United States Patent Application Publication US 2015/0240253 A1 - sequence listing, part 24

SEQ ID NO: 111919 - DNA, 920 bp, Zea Mays
ggattgagtatagtgcttgctgggattgttgggatttttggtgtatgaaaccctttcacgtagtgctcctggtctactcgtgtagaattacaaggtatcttttatggaaggaggaattaaataatttacggagtaatatttacgtgtagtttagtttgtgtataattaaaaggtatctttacgggtgaataattaaatattatacaaaggaaaattaacttgtcgttcttaaattattacagccgaagttgttcagagaggaataacaggagcaggtaggaggaggaagagaggtaagatttgggaaggaagaaagttctgcgtatcttcttacatgcctcacttggcagccattccttcatacataagcctctctacgcccactagttaacccatcccggcccatagacgacgacattgtccttcctaggccttgacgaacgatacagcccaattgctcctgttccttgtacggtacacagttgttcctttacggcactactgaaacttttctgtctaggagactgaactgggaagatgggagaagagaggaacgagaaagaaacacgacagggtatttatagcggcagcgtaggtggaaggacagagctgagcacgcggcatggaagctgcttcacaatttctttttgtttactctctgctctttcatgtattttgtattatatacggagtatatcatttatatggcttggttttttgttttggaattttatgggggattgagtatagtgcttccttggattgttgggatttttggtgtatcaaaccctgtcacgtagtgctcctagtctactcgtgtagaattacaaggtatcttttatggaaggaggaattaaataatttacggagtaaaatttacttgtagtttagttcgtgtataattaaaaggtatattttcg

SEQ ID NO: 111920 - DNA, 606 bp, Zea Mays
tggtagtcaaaaaagaaactgtgccttgtcggagcatagttggtgagagttgctgttctaggtagttgaactgaaactctgaaagagacatgcaactagtttcaggtcaggttttcttgcttggttggaccagcactggatatacgtactcttacttcactagtgctcatgtttgtctgaagacatgtcgtcggttgggttgggtatccatgccatgttttacctgtgctttgcaagtgatttcaggcttccgttcttcaggccgcggcatgcttcaacccaatctgataggtttaccactgaataattgttgttcatgccttggttttattaaactagtaacctaggggaaagagaaagaaggacaagggaaactggaactgcctgtcatacatgttcagggaattacggattatgcctggatgttgcacacttgcaagttcagtgggaaccatatgactgtaaatgttatattcacattagttaatgtatgatatgatcaactgtgtggtcataggtgaccagattgagtggcttggaagcctatttattgatatttagtcggacacataactatggctgacagtgacagcgatgttaaaccac

SEQ ID NO: 111921 - DNA, 528 bp, Zea Mays
ataattcgagagaatttgagggtagctcaaaccaggcaaaagagctacacggataacagaagaagaccactgtaatttgaggaaggagattatgtgtatctcaaggtgtcaccacttcgtggaatgaggagattcaaagttaagggcaaattatcccctcgctttattggaccattcctaatctttaggcgagttggggagatggcataccaactcgagttacctgctagtctatctgatgtgcacaatgtattccacgtgtctcaacttaagaagtgtctccgtgtccccgaggaatagttaccaatggaagagctcagtgttcagggtgatttgacttacacggagtacccaatcaggattttggataccttgactcgagttacaagaaataaggtgataaatatgtgcaaagtacaatggagtcaccatggagaagataaagcaacttgggaaagagaagaagagcttcgcatagattttccccatctttttcctcgttcctcctaaatctcgaggacgagatta

SEQ ID NO: 111922 - DNA, 358 bp, Zea Mays
ctgaatccttgcctatcacgctaagtccactggggccacatctgacgaagcttttacagaagaaggggagccctcggcagcgaagaaatctgctgggccaaaaggcggagaattattactgttattgaagccattgaaaaaacaccaccgctggcctcggtgtcaaaaacaccgactgccgaagacactacagctactgaagctgcccccgccgaagctgcaactgtcaaggctgaaacgaccgaagatacaaatctagagggcactttttccgatattgataagatgcttttgaccatggccgcggaagaaggtgctatagctgccgaagagaccctagccacagcgcctgggaaag

SEQ ID NO: 111923 - DNA, 657 bp, Zea Mays
atcgcgcccgctactcatgcgggcagcacaacgaagggccccttcgttcctatcatcctccgccacctcaaacggtgggaacgccacataacagtgggagcacatcacgaccgccgggagtcctgggaggtcttcgacttcgcctcccgccacataaaaccaataatcataccagttgccccacttgttgcgggcacagggaactagctccacaacttccgccgaagtcttcccagtcctcggcgtaaaggtgcatgatccaaactgtgcaatcttgcttctaatttttctcttctgccagtgcagacaataattcttggcgaagacctctacggagggctgaccgccatacgaagtcaccgcccagacatacttcgcaagagccaccacgacattatgagtcaattggttgatctgcacgtcatacctctgcaagacctccgccacaaaatgatgtgcaggtaggcgaaggccggtggtaaagaatgcctcgaacacaactatctccccctctggctcaggaatctcttctgctcctggaactcgtccaactccattcccaaaataccccaaccgctgcatgtcttgcacgcgaaccgaggagatcctcaaaacgctgaactccaccgtgtggcctgggtgcagctccaccaccgc

SEQ ID NO: 111924 - DNA, 681 bp, Zea Mays
gtttttgtaataccttgttatatggtttttaagttcttcctcatcagttatacagccgccattctcatcctccaaagaataaatccgctgccttcgatgcttgtcgttggccactaaatggaaatattttgtattatcatccccttcaataagatgattgaccttggctctctggaagagacgaacttcttcctctctcaaaatattggcaagcctatcattggcaaaagatttagaatccaactcgttaggcgataagcaagtaaactccgcctttttatcgagttcatcaatcagttttaaaagttgttgtttctccttttttactaaccccgctgagttctttgcccacccccttaaatattgtcgaagggacctaatcttgttttgccatatctgaatggcggtttcacctctcttttcttgttgccaaatgaaagaaaccatataaaaaaatccctctctaatgaaccatcctaactcaaatttaaactcagagaaattccctaggttcgtcggggctttaccattcagtaataaaggtgtatgatcagaccgagatctatcaagcgccttcactgagacgttagggaatttaagttcccactccgggctcattaaaaccctatcaagcttctcaaacgtgggtggattcaaatcatttgcccaagtaaattgacg

SEQ ID NO: 111925 - DNA, 902 bp, Zea Mays
atggatcgcagggaggaaggatgttgatcttctcggccatcgaaatgaaggaaggagatggaaagaaggcgaatagctcttttgcacagaaggcgaggatggcgtgtaaagaaggaaggctgaagaagcaaggcaacaatctgaagcatccgtctcgggcgaatttatagggaagggtggagtcaccgaagtgcgagtcgtaacggccaaacgacgatcgtttcaaatctacgccgcaaacggtcagctgatcggtaggacgacccatcgcattaaatgaccatgccccctccaagaaaaaatgtgccgagcgccgttccacattctgcctcaaaaggtatgacttcttccctctgcctctctctcctttatcccctcaacagttaaaccggaagaaggcgtcttctaccttgggcaactcacctcgggaaggaaaaaaggcaaggtaaaatattgttcagaggttcgaaggttaagccctcgggagggttcggcaaactgcctcaggacgcccgggctctgagcccgttactgatcaggggtctgaaggttggcccctcaaaaaggctccataaccgccccagaacacagagtcagggataactgtgggtgcgcccgtacatggccatagctcgagttgcgacctgaggtatcccaagacatatctgaggtccctgggagcgattcgtgatggtatcccatcatagggaggcatcgagccctcgagacctaacaaacgggttcgggaccaggcgaatcacccgcaggtactttttggggcgtgcctccggactgctagccgacccctaccgaaaggagctcggacccctgctcagattactcgataacaactcgatggaaacgtcatgttcgtcgcccatcaagggtagcatgactcgttc

SEQ ID NO: 111926 - DNA, 401 bp, Zea Mays
gccacgtgtcgtgtgcatctcgtttccttaacctggtgaccttttgacaacacccgatgcatgcagggatggacgaaggcacaagctaaagctttaagccaaattcccacccattctcacgtgtcaccaggaaatgtacgcactcttcatcaaccaacacacgagacgccaacagaccaaaaagtccagcacgggaaacgaacaaactgaaaggccttctttttacatgggcaaatacttcaaatcaaatggcaacagtaatgtgaatgccttctccatcaatcatggattctttttcttcgtttcttcttcatggcatggcaccccgagagcacgcccctttcgacagtttggttggctccgttctgcctctcctttgtttgtttgagtgggtgggtgct

SEQ ID NO: 111927 - DNA, 673 bp, Zea Mays
aaactcttcgacaaggtcacaccctttgctgacaatagttgtgtaaccaaaagccttatcattagggccattcgccccccacgctgaatcttggaaaggacgtgtaatcatacaaagtcatcttgctagcatgcggccaacaagataccccatcgccttcaacctttacataaaatcaatattcaagccagctgccacaatgatccttggcatagggaactaactcagtcaccgcctccctggtcttcctagttttcattgtgaatgtgcaactcccaaactgttgcacatacttgttaacgattttcttttgctagtgcaaatagtaatgcgtagtgaagacatctatggactttacacctccgtaagtggttactgcccacacaaatttacttagagccgccatagtgttcggagttagctggtgaatttgaactccatacctccccaacatttcgaccacgaaatcatggcacgacaagtgaaagccagcaacaaaaaagcataaaaaactatgacttcgtctcgcggtcatggtagagtctctgacctaagagtcctccccaaccccgcagtgaagtaaccaagtccccaccactagttgccccctgactttcactcacgtcatccactaacgactggatggcaacgctggaacccacagaaggcgaac

SEQ ID NO: 111928 - DNA, 441 bp, Zea Mays
agctccatggctcaaccacccgcgcgaattccgcgctcagctgcaaccactggctgggatttcgatcggaagctgaccatcgcgcacccgggtgactatataacccaagccttgttgctttgtggagcaaggaccgccatgtgcgcaacatcgaagaagcagagagggcgagaaacaatatggccgggatgtcacctctggtgcccgtcttcttggtgccgttaggacttcagaggtggccatggatgggtgggcatgtggtgtggctttgggaggccccaattcgacgaagaagcttcggaccatgggaatcgctcaccaaatttctctgctaccgcggtgccgcgaaataccgtcgccggcccacttctcgacccggctgccgataagtagctcgtgatcacgttcgccaagttactcccatacgtaaagcaccatcgg

SEQ ID NO: 111929 - DNA, 731 bp, Zea Mays
tggactttgggccaggcttggtcttttcggaatccctctgggatgccttggaagcttcggtttgccctgctcgcccctgtttgcggtcgcccttctggctggtggtttcctttggtagatgcatcttcaagttgaattcggtttcggttggtcatcttctccaggctgcccttggtgggctcgccgaggatttcgaagtgcttcagctggctgaccgcgtttttcgattttcggtttcctcgatggcggtgggtttccacatttataacttgggctccattgagcgtaaggagttcagggccttcttcaacctctggaatcgtggtggacccaattggaagcatgaattcaggctttttttggaggaggaagctgcctcctggtcgagggtccgagtcaggaattctctgtcatatgcggatgtggttaagctccctctcactggtgccaatgcggtcccgattcgtcgccctgccaggtcgcctgatggtgtttagcatgctgctcgggctggttcttcggttttcaatcgtttgggctgtccttccactaatcgtgcccaggctcgtaacatctggcgcccgcaggctttgcctcggcctctcccgagggtctccgtgttcaaccgtcttcgcccgcaggcttcgggaccgtggcattctgcttctaatggaagaactggtcttcctcggttcttgggccctaatcgttctggtgttgctattggtagc

SEQ ID NO: 111930 - DNA, 667 bp, Zea Mays
aggaggttagggtttcaaaccttgggtgggattttgggatgttacaaacctaccccacttaaaggaatctcgccctcgagatttagactggatttgagaaaagataagggtattccctcctcaaggagtcctcactctcccaggtagcttcctcttctccttctctgctccactgaactttacagagctttacttctgaggtgcgggtctttctgactgctgaatcaagaatcttcactggtttttcacggtactgaaggtctttctgaatctgtactgtctcttcttcgaggtgactttctggtgcttgcaggcatttgcggagctgggatacgtgaaacacattgtggatgtcggacatggattctggtaattccagacggtatgctgcgtgtcctaccctgccaatgatgggatagggacctacgaaacgtggggctagcttcccttttacttggaacttcctgacaccacgcattggagaaaccttgaggtagacgaagtctccttcctcaaatcggagttccctccgcctgttgtctgcataactcttctgtcgactctgagcttcgagtaaccttctgcggatcagtgcaactttctctttcgcctctttgacaaaggcaggtccttctagtgcttttccccccacgttggaccacatgag

SEQ ID NO: 111931 - DNA, 591 bp, Zea Mays
atatggtatgatcttctagggataggagttgtaccgggcttcaattcaatcacaaactccacatccctctctagaggtaatccgggcaaatcttcagggaatacatctaggaattcacacacaactcagatgacttgtatctcttgtgctatggcttcaaaaacttgtccagatactttaactggggcagatacagggatggacaacttgacttcttcttgtccatgacttagctgaatagtcctctgatccacattgattatagccttattctgggctaaccaattcatgcctagaattacatctacatcttgtccctttatatctatcatgttggtagggaattcatgtccggccgatctcgcgggtatgtggaagactacttccttagtaaagatttgacccctaggtgattgaataacaaacccctcctttgattcaatactatgtatgcaatgcttctcaacaaaaatcttgctcataaaagtatgtgatgcaccagaatcaaaaaggatgactacgggatggttggcaacgaaaaacgtacccatcatcaccggttctccttctggggtgattgccacatgggtg

SEQ ID NO: 111932 - DNA, 763 bp, Zea Mays
aatggagaagaagtagctgctactgctgctggctgccgccttgaatcaaaatcaaatcaaatcaattgaatccctaagtgaaaaaaaaaactaaaggagctcggctgagctgacaaacggaaacccagatgagatggagaggagagggaaggaaaggaacacgcaaataaaaggggaagggaggggacagggggattggtcgctctgttcgtgcgtggtcaatatatgctttgcttagtacaacaggataggagattaggaggagcaacagctttcttgttgcttggaaagctccgcgcagagaccaagaagaagggatggcatggcccggccgcgtttggcagccagggggagactgaatcaaatcaactcaaaatggaggaagaataataagacgaggcagacgggggaggggctccgtctctgtcccgcccgccaaacggacacggagtacaaaccaaggggtagtagccaaccaacccccccaaatggcagatgggaaatggcccacctctcgtgcgtttgcttggaaagaatttgttgaatccggagtgctccctctcctctccctcagtcatcgttgacttgcctggccgccccatgtcccttccaatcttctagaagataccggccaaacaaatgcgctgctgctacaactacgtttttttttggaaaaaattttgatgtgttctacaatattttttttcatagagcaactttttaatcaggaattggaattatcgatttctatgactcctaccga

SEQ ID NO: 111933 - DNA, 281 bp, Zea Mays
gggccagggaagtcaaagggcttcggaggtgacaggtccaaccaggagcctaaaaagcgacaaaggttggtgatccgacctttcaatcaaaaccgttctttacctcatccaccctcctaccaccttcaaacagcttgtattcatccgccctaccactgcccccacttcaacaactcaaccgagtgcccttggtactcgtttccccgccctcccgagttcttcaaccggctgcttcaattgtgggaagtctggacatttcatcaaagactgcccatatccga

SEQ ID NO: 111934 - DNA, 311 bp, Zea Mays
taaaattgttatttccttagttactggtgtcggtaccacagaactggggatccttactattgtatcaaaacgtagtacccacatgattatctctaactatgtgctaatggacttcaccaactggtctggccccatgggtgggtctcggacccctatgtacactgtccagacccttggaaggtccaggacctccacatatggggtccaggtcaccaacaagggctcctggtgctcccgggcagaatatgcccccatgccctactccggacgtaggaagggatccagtgatgccaagtggtcgctgagcgctt

SEQ ID NO: 111935 - DNA, 423 bp, Zea Mays
caccaacatgccaaaccaacttccaccaacaaataaccaagtcccttgcttgcctgctcccactagctccaagtatccttgttataactgtgggaaagtgggacactttatcaaagattgtccctatccgcgacaaaacaactccaactttccaaagtcgacagggaataactttcaaggtcaaaacaagaatgcacctgcaaacaatataaaagggaaggataataacaggactagaagggtattctatacacaagttgatgggtatgttcttcgttgcccgtcatcctgctaaagtactttttgatactggtgcatctcatacatttctcagtaaagattttgccatacattatgaaatttctattcaataagcaagatggggtgtggcaatacaatcgcctggggtcgattgtttaataa

SEQ ID NO: 111936 - DNA, 489 bp, Zea Mays
agccgccatcgcagtcgtagcatgtgtggccattgcaggcttcctcggatgttgtgtctactactcctggttttgcagtccaacgcccaaagcgcgaggtacaaaccagtaggtcgacgcctcaatttctgaattaattaataattattacaaccgcacgcatactaattaaatcagcacacgtgaaatagagatgatgtgtatcctctcgtctcggcgctccacctcagctctcctgtgatgcgattccccctccctacagctacaacttgctcaagcatgcgggaatgcagcagcagcgtagccggcaggcagcgctgctgcagggctagtagtggtacgataatgatgagagtctgctgctgctgggctggttgtacgatagtactactagtgatgagagggatgctagctaggtgctctgctatgtgttgctctgctctgccctgcgctgcgtcccctatcaaacgagagagggatggcccacgc

SEQ ID NO: 111937 - DNA, 525 bp, Zea Mays
attaacgaccagaatatcataaaccttcttgcaggctttaggaactgtgtccattctcagctgctacagctaacacaaaaaattgccactgcggtactggtaaaggattcaatgtaaaacaaaatctatgaatgaaatagagctacaatggaaaacaaaatatcttaagacagaaccacacaaacatggattaaattgtcacattcatgtttcgatgtaggatatgaggacatgaaactgaaaacatgaacaaaagaaaaggctgtcggagacaagtacacagtccggaaccttttacatgtctagtaataatataatatagtatgcgaaattacaaaaggggccggtgttgacatggtttagttgaatcagtttggatgcaacaacaaatgacctaccagagcagcatgtcatgatgtggaatcaccaaaaactgtgattcctaataatgtgaatgaactagttagaagtaaaaatgatccctccaaggtagcagtacagaaatcgtggcatatcctaataaac

SEQ ID NO: 111938 - DNA, 893 bp, Zea Mays
cccacgggcatctaaaacccgagacaagccctttttaaaatgcacttcatagtcatcctcaaggagttgtgagactaaaagcaacttgaaatgcttattcgaaaccaaagcaacatccttgagaacaaagctctcgttcacctgaatggtgccacgagaaacaaccttacctcttgacttatccccgaatgtgatgtattccttaccaatcacgaggtcgaggctagagaaccatttggagcttttggtcatgtggcgcgaacaaccggaatccatgagccacgtgttctctaggcctatgtcttgcattaatagtaagacatggggtgagcaaatggcacatcactagggtaagtaaactgtggagaataccggtgctgaggcatttggccttgaaaagtgttagggaaaacaccaaacatccccggtccttaagggaagcgatcaccacaagaaggaaactgtggtccgctggggaagtaagaaccaaagcctctgtcacggggtccttggccatatgacacacgactagcacccggcgggcatgaccaccacgtggtctcactccttgaggcctagcagcaagagtcaaagcacctctaggcctcgctggacatctctgaacaggctaagcatgaacaccatgagaggggcggttcatgtccgtcctactcgactcagaaacccgctactcatctctcttacttctaaagcaaaaagaagctagatgcccatccctctcacaatactcacaatggtacctcacctctctcttgggtggattttgtttgcaggagggggctttctttttggatggctgaggagctctaggaaggggatcactagagatgtcaggaagggtgtcaagtgtgttcccgagatggttaggtttt

SEQ ID NO: 111939 - DNA, 511 bp, Zea Mays
cttagttgtcctaatacttgtatccttttgtgaaacaacgattgcattgttaaagcaagtaaatcacccataatatacctgcaaaaaataagaccttcactcaatgttggtaacggactgataaattctatccaggatcataagagtaataatccacgacacctttaatagttgtctcgcatcaattaggcatttcagtccatgaaaacttgaatcgcataaattaaacatgagttgatgagctgatggggtgcagatgatactaaaatacatgggacgagtaccaaagagatggacgcggtggccataaaaagaaaatttttctctgattgaattcacaatcattaagttctttgttcattcttgttcctgctagtttgctcatctatatcgtctcccagctctcacctgcttattcaccatgcaccaccgtcgctcccttccccgctctcgcaccccatgctgcgtccccggacccaaacactgctattacccatcgccctagtctccg

SEQ ID NO: 111940 - DNA, 771 bp, Zea Mays
tggatggtgtgatacttcaagaaggcaaatcgtttgcttagtttggtgagaagttgagtgaacctacctagaattattcaacttatgataaggaagtatttggtaccgtaagaattattgattttatgatgaggatacccctctcaacaatacaacccttattgccccttcgcaccctacaacatcttttaccatggccatggggcatctcgtgcattgccccctgggcacctcgctcatcagcccttagggcacctctcgtgtcttccccctagggcacctaactcatcgacccttggggcacctcttgcattggccttgcacctctcactctgatccttgaggtcatcgaacatcagcccctaggtcacctagcacctcgactcctaggtcacctctttccttggccattggggaaccttatgcatgggccctcatggcacctattgtactggcccctatgaaacctcttgccccgactcctggggcacctcgggcatcaaggactcttgcttatgatcatcaacttaattattaggtatagttgttcctagcaaaccctttactctcttcttaagaagggatgctactaaagttttgtgatgtttaccttatgcatagaaatagcggggatagttcacttagtgttgggacaaaggatggaagtatgggaacataagttgggagcagcaggacatcaactccttgaggaagccataacacttaactcaagattatggtgaacgttaatgagtacttgttgaaaggaac

SEQ ID NO: 111941 - DNA, 538 bp, Zea Mays
tcccaatccctattctcaccaagaacagaaagccacacaccaacgaacagattctatgaagaaattccagttggtggtattatctataaagtccccatcgatatttgggtttgcaacaagagcagcttaattaatgtttcttcgatcacaatccagtactgcgtgttcaatatataactaggcattgcaaagcctgcaccttacgaccctggaaactctatgtatatacatatataatattcactgtacatgagttccagttagctattttacgctagaggttttttttggatatatgaaaaatcaacttcattttatggcgggaaacataatatctttagatccacttgatttcagaatcaaaacttattagttcatttcaatgcgcacatacatgtcttaataactatataaatgcaggtacatctctcaataattaatgctattatatctgaacaaacaaaaacaaatacctattgagagacatggacttctgcatcaaacatgcatgatcacacgaacacgataagaacatcca

SEQ ID NO: 111942 - DNA, 490 bp, Zea Mays
gcggaggagcctgtcctgttggagtccgacgctgcaagccagaatggataggacgtcgcgacgtcgcaggaggttggtggcactgacatcacgaccgtggcgataaggcatcaagaggagcaggtcagcgcagggcagccgaaggaaaacgcggaggaggaggaggacgtagccgtggaggagaagatcatacaggtggaggcggatatgctggagctgcaagaggagaggtcgtagagcagcgaggtcgtggagacagaaatagaggccaatgagcgcacggacgatggctcactgaccgtcattggagaagaagttgcaacacctgagggagaagacgagtggcggaagagaagatcgtcgaggagatccagcgagcagaggtgactgagaactcggaggcgaacgcaaactctgaggaaccagaccaacaaaactgacgtcgtctccgaagaacccaaggaatagtctatggtgatgagcacaggat

SEQ ID NO: 111943 - DNA, 569 bp, Zea Mays
gtctttctcttctcgcattacttattaccgtgcaagtgattagtatttcgcatattgtctttcttgtatacaattaccatagttgtttctcatagattgcttacttgttgtcactagagaatttatatctcttatcatattgattaaatttctctagtgtttttgattttagtcaaaatcgtctatttaccccccctctagccggtgtcctagatcctacaacgggtccgaccgtggcctcaggaggaacctccacctcgcctgagcatgacctcgccctagataacatcgacaaaaggacgcttgatgccaccaacccaaccgcatagacaactgacaacgagatgtctatagaaattgcatgactgatgtcaagtctgctttacgccatacacgacgaattaccatgtgcttttcaccataattatcactatttcaacaactgtgactcggacaacacatcctggccttgactctctactcgatcaatatgcaagatatagggggccagacatccttccctgatctaagacaaccgcaaggacagatgccattccggtggccatact

SEQ ID NO: 111944 - DNA, 399 bp, Zea Mays
gcggtaactgccgagtgatgactgggcacttttagaattggtgcctggccctggaaaaccccatttgtaccgtgccgtcgcacacctctgctttctgagccctagccttactttccgcttccagacctcctctgcttccctttgatctcgcttccgctcagttcgccggcgggattgagatggcggccaagcgaaaaagccagaattccaccgtcgcgattattccgcccatcgatcccaacagtcaattgcctttcgtaggtaatcacatgtctgttgtttccgagtcagaccttcttcatcttgtctctgtcggagttcttcccccaaaagaggtttgctcttggcggatctgtcgtggggttaccgtcccgacggaggatacccacgagtccgtta

SEQ ID NO: 111945 - DNA, 1150 bp, Zea Mays
actagcaccatgcactagatcatgatgtcaactccacccgattagagggtatcatggagcaacacatcaacactgcaatcctagtcatcgacaataatgaaattgcctttcgaggagctttcttcaatgtgcgtctccacattgactcagagacaatctagatttacgcattctaggtggacctcaacatcaatgtcaacatcatccgaaacacacaattgatggacaaccttgctaatatcctctagaacttcatatctctaaagatacaattccaacgaggccagtgcattgtcacctttaccaatgtctccaaatgctgagcaccacacaacgtgcttggacttcctcccgaccctttgccaccatgcctctgcaccatgcaccaccacagtggacgttaccacaaccatagtctcaacactagaccacatcagcccaacacacctggctctatctacctatgtgtcattatctttagacacatatgacacatagtttgagacgtgcatgagctgcacggtactgccactatggtaattggaagaatgacatggtccattcaataaggggtcctcttctttgataggtgcttctatcattcagtggcatcaccactattactgggcttgctggacactctcctcattgttagacatatggcaaacctatgactcatctctatgggcttccatactccattgaagatagtggtcatcaagtacacctttcccaatgcatactactatttatgattgtgatcttcttcgatgacactgcaccctttagcgatatgctccacttgaggatgtccgtcgtcaaggatcgtgtcgatgttatgtgaatgtgcgatgggttgcatcctcccaagcatagaaaaccatgtacatagctgttagagactctctatggtcgtgcagttgttctccaacaatgttggtgttatgtttctcattcacactgccacttcataggcacatgctcttacatcgtccaccaggacttgctgctactacatatttcgttacatcagcagctgctaatactactttagtttagtattgaccgcacttgcaacaacatcatacgtcggggcatcatgttgggttgtctcatcatctgaatcaaggtggtaccctttggaaaagat

SEQ ID NO: 111946 - DNA, 431 bp, Zea Mays
cgacattccagatgattattgcagggtagaagtgacgacagtcgtccaaggatccgaggacgacatgctagacatccctgggcccgaaggaatcgagacacttggacaagccatcaaaaatttcatcctttggcctcgaagggatgtcgaattggctaatccaccaacggcgtcaccatctcatccctaaccatctccgcctcctcaaactttagtacctattgtacatccatcatcacctcctcaatcttcacatgctgctcctcatcctctttctaacccaccatctccgccacaaacatcaacatttaggacaccaccaccttctccacaaccttcaagggattcacgacaatcaaagaaatctaaattccctataccaaaattggtgtccacactcgagaaaaagaagagtaaagctactacttctg

SEQ ID NO: 111947 - DNA, 1207 bp, Zea Mays
cggtcttcggcattcgaccactccgaagtcatcgcgagaggcagcacagactaccctcgcgtgtgacactccgcgcaaaagtcacctaagggtgcagccagaatagcacaacaagtgcattaatcaaagtcttttatttaaaagacactccgtgcaaaagttgcctaagggtgcagccagaatagaacaacaaatgcggtaatcgaagtcttttatttaaaagacactccgtgcaaaagtcacctaagggtgcagccggaatagcacaacaagtgcgttaatcgaagtcttttatttaaaagacactccgtgcaaaagtcacctaagggtgcagccagaataacacaacaagtgcgtcaatcgaagtcttttatttaaaagacactccgtgcaaaagtcacctaagggtgcagtcggaatagcacaagcacgataatccaagtcttttattcaaaagacactccacgcaaaagtcgcctaagggtgcagccggaatagcgttaatcgaggtctctctttaaaaagatactccgcacaaagtcgcccacgggcgcagccggaccaacacaggcgtacgaatacggccaacaggccacatcaccatacaaattacaattacatacacacggcgagggcatcacacattacatcggctcgaccttagggataatacccatctccctgtaattaaacatcattatcctcagctcctctccctcaaaaagcttccgcagatccccctcgcctatgcccgccccaaccggcgaagacaacaattctcgttttccaacccggtctactcggagacggccacgctccatccccatacgacggcgcctgccacttcgcgaaaattcacccacactatgttttcccaccacccttcgccgcctacacccagtactcgcaccaggaacatccccagcaccctccacacatggtgaagtctccgccgcagctacatccaacgcaacataataatccaagccttcattcgaggactcctccatccatggaaacgagctctcagattcaccatcagactcaaaacattcagacacagaaccaaacaaactatcatcggtaggcactacggttgaagtctccgccgcaaaatcagtattgccagtagcggttgcttgcgcaggcccaaacatcggaacctgcgcagcaaccgagattcagtatcacacagacaaaagtttac

SEQ ID NO: 111948 - DNA, 5241 bp, Zea Mays
cgataggtagttaggttgatgcggactccctgctttcgatggaggctcagtaggaggttgtggacaagaacgcaggaaataggagtgggaagggggaggaggattcctggtggcgttctggacgctggagagttcctccagtgcgccccaggtaacctcctaagactaggagatttatttcttcttttgataatccctagtacaagctacccttggtctcttatagactgagcccaggttaatatagaaacaaatcatatcactctcaacttgctagaaaacagactgactaaatatagaaacttatctgctgtctcttttattccttatatgctgactgactaaatatagaaacttatctgttgtctcttttattccttatctgatgtttcctttattcctggcgattccttctctggtatacctttcctacaaatgcatcggtatcatttcccccctcccccaaaaacaggtcgtccgcgacctggacaccaggaaaacggcgacgaaagtcctccagctgaacccaagttgcatcagctgctgattgtcccagccattgcacgagcagtcccacacgcctcagttcttgcgtgccttagtaaccttctcaggctgaggtaggactctgccatgtaatattgggggtagaggaactattgcagccgggggagccccagtatatttctttagtaaagagacatgaaacacattatggatgcgggcgtgagatggcagggcaagcctgtaagatactgtcccaatttcctccagaacctgatagggaccatagaagcgaggcccaagcttagagtaggcggctggtgtgattcctaaagttgtacgctgttgcagtcgaacccacacccaatccccggtagtgaactgcacttcccttcgagacttatcctggaattgtttcattgtgagctgagcctgtatgaggcgttccttgatctgagctaaaaattcatcccgatcttgtaactgagtgtcaatagcagctacaggggaaagtcccggttggtaagagataatagctggagggtctcgtccatacacaactcgaaatggtgaacaacgaagggctgtttgaaatgaagtgttataacagtactccgcctaggacaaccactgtaaccatgtgtggggtcgatccccagctaagcatcgcaagtacatcaagatgatccggttagtaacttcagattggccatcagactgtgggtggaacgctgaactcatctgcaacttgacccctgtcctggtgaacagctcagtccaaaatgtactagtgaaaactggatcacgatcactgacgatggagcaaggaataccatggtgacgagcaatatgatcaaagaaagccttagctaccgaagatgctgtatagggatggctgagaggcacgaaatgagcatactttgagaagcggtccaccacggtaagaataactgatttgcctccaacctttggaaacccctccacgaaatccatggctatatcgctccaaacccctgaaggaaccggaagtggttgtaacaaacctgccggatgaaggtgttcggacttattacgttgacagactgaacagcccttgacaaaatctcttatgcggctggcagcaaggggactatggaaggaagccctccagcggttgagggacttttcgatgccctcgtggccttcttcatgaactgaagctaacaacaggggccacatggatgaggcatctggcacaaaaaattttcccttgaacagtaagagaccatcaacctcggaccacccttccttcgcagttccagccaccaactgttgcctgagcgccaccgcgatcccatctcagcccgtagagtgtcaaacagagcaaatgtgggggtggaaatactgtgtaggttctgcaggacttcatctctgcgagacaacgcatcagcagctccattgagtttgcctggcttgtactcaactgtcatgtcatacccaaataatttgctgacccatgtatgttgagggatggtggataacgttggtctaggatgaatttcaagctgtagtgatcagtctgaactgtgaacggtcgccccagagatatggacgccaatacctgacagctttaaccaagccaatcaattcccgttcatatgctggcagcttttgatgatgaggggctactggcctactgaagaaagctatggcgccctcaccttgatgtaagacagccccaaacccaactccagaagcatcactatcaacaataaagtgacgagtgaagtctggcatctgcacaaatggtgttgtgatgagggtttgtttgagcaatgtaaaagcctcggctgcttccggtgtccaatggaaagactcccttttcaataaggcggtgagaggtgctgctattgttccatatccagcaataaacttctgataatatccggttagtcccaaaaatcctctgagagctcgcaaactattaggaagtggccaggtttccacagcagaaactttgtcgggatccatggcgacccctgttgcagatatgatatgtccgaaataggctactgtagcagccccgaacaagcatttggagcgtttcagggctagttgatggtcacggagggtctgtagaaccaacttgacatgctgcagatgggctgtccagctattactgtaaatgaggatatcatcaaaaaataccagcacgaactttctgataaatggtttcaatatgtcattcatcaagctctgaaatgtagatggggcgttagtgagcccaaagggcatgacaaggaactcaaaatggccacgatgggtgcggaacgctgttttttccacatctgctgggtacatgcgtacttgatggtagccacttcttaaatctaacttggtaaagaatacagcaccacggagttcatccaataattcatcgaccactgggattggaaatttgtcctttactgttttgtcattaagggcgcgataatccacacaaaacctccaggaaccatcaaactttttcacaagaagcactggggatgaaaaagcggaggtgcattctctaatgataccttgctgtaacatagcgtcacactgctgctctatttcatccttcaacaattgagggtaccgatatggtcgtactgccacaggtggagtaccgggcagtaatctgatcttgtggtcatggcggcgagatggagggaggccgtgaggttccctgaaaatatcctcaaaggaatggagcaaagcctccatgagatcacctcctgatgctaaagctgcacactatggtggcagagcaccaattccagtccactgaatgttactgcctcgatataagaatgacatggagagggcctcaaaattccacaaaattgttccgagagtgcgaagccaatggacacctaatacaatgtcaaatccatccagtggtagggtatagaaggatatcgagaaatcagcttctccaataaccagaggcagttgagtgcacacacccgcagtagttacccgatctccgttggccaccttcaccgtcagacctggacgaggttcaacttgaagctgcagctgactgaccacagaatcattgatgaaggaatgtgtcgaaccagtgtccacgagggccactaactgacggccatacaaacaaacagaaagtttcatggtagtgccaatatcaataccggtgagagcatggagagagatgccaacatcatccaatgtttcaccaccctcatcatcttctgttaattccagcaagaaaacccctttgtttgcacatctgtgatcggcagtatacttttcagtacaatggtagcactcaccactagcccgctttgctgctaattcttcactggaaagacgcttgaaccgagggcgttggttgccaacaactgatttaataggcgtactcacgccacgggctgcagggcgcgccgtggagtgtgtgcttacagccagctccatgcgacgctcatatgctcgagcaaggttgattgctgactgcaaattagttggcccttggagttcgacgtctgtcctcaatggctcacccaagccagcggtgaagaggttggtctgttgacgctgtgaaagattgtcacaacggcaagcaacaaggaaaattgacgtgtataatcatccactgttccagtgcgatagagatccttgaggtcagcgaggccattcatgcgcagtggggggccgaacctaagattgatcaattcggagaaacggccccaggtaatgtcgccgtagtcgcgctcgatggtgtagtaccattcagcggcaactccgtcgaggtgcagggacgccatccagacccgttcctcgcgcagtgtcctcatgccgcggaagtagatatcacattttgtcagccacgccagggggtccgattcaccgtcataggacggaaaattgggcctgggccaatgtgagctgtcctcccgacggaaggggccatccccgccgccgccgccgcgcagcccctccttgaagcggccgccgtcgttgggggattttggaacccctgaagatgcttcctccgtgggtggaatttccacgcgggcaaggcgacgatcatgagattcgaggcgtgtgttgatggtggtgatttgggctagcatttgggtttggtgatcaaggatttggcgtagggagtcagcgagtccacgcccatcaggattctgtccagtgccggacttttgggtttggtgatcaaggatttggcgtagggagtcaagcgagtccacgcccatcaggattctgtccagtgccggactcggaagtcatggcgctggctgtctctgataccaaatgatgcggactccctgctttcgatggaggctcagtaggaggttgtggacaagaacgcaggaaataggagtgggaagggggaggaggattcctggtggcgttctggacgctggagagttcctccagtgcgccccaggtaacctcctaagactaggagatttatttcttcttttgataatccctagtacaagctacccctggtctcttatagactgagcccaggttaatatagaaacaaatcatatcactctcaacttgctagaaaacaaactgactaaatatagaaacttatgtgctgtctcttttattccttatatgctgactgactaaatatagaaacttatctgctgtctcttttattccttgtctgctgtttcctttgttcctggcgattccttctctggtatacctttcctacaaatgcatcgg

SEQ ID NO: 111949 - DNA, 286 bp, Zea Mays
gtaaacacacgcgatcacacaaggtagtttatctcacgacgaggcaattcgctcgttatctcagaccgacgatcagggatcgcggccgccgccagttcgccgtattcgtacagcctactgttcaccgaatcggacaaaggtttatatatgaatctattacaaatgggttcaattatcccattgtgggccgtagtatttgacgttgggctttggaagacgtttgctgcgtctgggccgcctttccgctatggcgccagaccgggcatcctccttctgtgcttcctct

SEQ ID NO: 111950 - DNA, 492 bp, Zea Mays
acccggttgggtggttcggggtcgttctcaagctctagaggactgcagtgagcgcctgcgaccattgttggtcaagtttgcttgaggcgggtgaaaaacgggatttcaggccttgcatgatcatcctgttagcccgcttgacctgttcgttcccctgggggtgggccatggaggcccagtctatgtggatgtggtattcatcgcagaattctaggaacctgttctcggtaaactgtgtaccattgtccattatgattgatttcggcatcccaaatctcagcacctagtgtgcgtctgataccatggtaggccaattgaaatcttaccgaaatgtgttcccatgaggctcctcgaggtagcatggtgcacgtaggtcctactatggatgtctcctaggaactgcctgcctgccttccctgctcggtcgagatgcacaactaccttattctgatatgcccctttttgtagagatctttcccaatcgtgatgaag

SEQ ID NO: 111951 - DNA, 643 bp, Zea Mays
tcacagcctttggatcttggatccatgacctggattaaagatgaagcgatatgcgactaggatcgttgaatcctcatcctacagccacgatttaatgcaccgatacgatatctctatagtgaccttgaccgcccattggctgatcaacactctccatgccttcaccatgttgccgactatacaggcagcggcgctgcccaccccccacggtagaggcccgccggagacatgcgctccctagtacccgatgccctgaacttagattcgactagatctactcgacgtgggaaacaacacggacaagaggatgggtaactcacaacaattatgccttgtaggagtctggcggcgccatgcgacatggtggcgagttctcggctccgacgagaaatcgtcgtaaatatgtgccctcctccaccgaactgggggccgccacgtcttcaccatgtcctagcgatcaaactgagcattctgccaaggttcggggagacgcaaaatcgtgcggctgacggaggcgagccatcttctcatcactagtctctctctgctcgctcgattaatcgtggcatgacatcctggtcatgtttgcagcccgaagggagggtgaggtgttggccgaaaagggtgttgcagccacgacctt

SEQ ID NO: 111952 - DNA, 440 bp, Zea Mays
ggtggaggtggtaggtatggctaaggtggtggatggcgtaggagtgactggagcgggcgaagtgggaggtggagtggtagcagtggcgggagtggtaggtgcggaggagcgaggccgagaggcgagacgacgaacgcgataagcaatctgatctgaagaaatccgtagctgatctcctctctctgtctgctcagcggctgctgcttcttgcgggcttcctgctgctccaagtagacagtcttccccttgacctgcctaaagcggcaaggagggtcctcgtcatttcctcccctggcgctaacacattcttcgtgcatggcatcttgacctgaagactgcatatgagagagataaactaagcacaagaagataacagccgataggatgacaaaagactggatagctacctagaaatctcacacgagagggagagaatccag

SEQ ID NO: 111953 - DNA, 280 bp, Zea Mays
cttagagagggtttcaccacctcaaatggccgtttcacccaaaccctaatccaccgcacgccacgtgctcggtgaaatgcccaaactagctaaaaaatgctctaaacgatcccaaatttttctggcaccttcacgatacctccagtaacctattcatcaaatttcacgccaatccgatatcccaagcttcaattttacacaaatccccgtttctagcgatcgattccaagccgagtgcccaaatcccactttcttcgcctaaaatcaaaccaagcgcaca

SEQ ID NO: 111954 - DNA, 288 bp, Zea Mays
ctctgtaaaatttttgtcagttctgatcccagaggacttagcagctggaagggcggggattcagtcattaccttcagaattttagctacttcggtggtagagggcatcgaaggagcttcttctcctgtctcacctaccttcggctcagaagagggcactatgtcaagctttcgctttttataaattgttgcctttggctctagtgctatttttgttttattcaaaacaaattcatcttcttttactaaccgagtagcttgcctatttaggatgctgacaatccttttt

SEQ ID NO: 111955 - DNA, 305 bp, Zea Mays
accacctatcttttcaatcgttatccaaccaaaaccttatagttctctacctcttatgctctctataggcaccctcccctctactcccacattcatgtgtttggttgcaagtactatcccaacctatccgctacttctgcccagattctcgctcctcgttctgtcctctgtgtcttccttggctactcgtccaatcaaaaaggctaccaatgtcttgacctatccacaaactacatcctcatatcccaccatgtgacctttgacaagtctgttgagaactagttaccacggatcacagatccgct

SEQ ID NO: 111956 - DNA, 447 bp, Zea Mays
ccgagactgggggcggggtcttatgaatagccttcattacagtcatcacccgtcgtttcttctgacccccagcatttcccccatttgccgaagcagtcttcttcccttccgagctttgttcgatccccttctcctttgactgcaataggctagtcagatctaaccccaggggacttagcacaacaaatgggaagggtttagtcattaccttcaaaatttctgtaacactggcagaggaagacgaagaagtactgacagtcttttttggtacatcttgtacctttgtctcgacaggagtcgtcctcttagacttttgtttcctgggagccgaatcctttggctccgctgaaattttctattttttgccagccctctgatcttcttcaatggactgcatgccttgccttttcaaaatacttacaaccctctttttctttgctcttccgg

SEQ ID NO: 111957 - DNA, 331 bp, Zea Mays
ttttaatatagggacatgacctaatcaagtgcccattttcatagcattcactacacttcttacttttcttagtgtgaagtgtggcttgatcattaccttggatgttaccttgcatggaggcatggttgaggcttttggcagaggtattgattttcttcttttgttccttcctcttggcaatcctcaagtccttgacattttcttcaagggattttgtgcatgccacggttgttcccgtctcaagcttcttcaccatgtaatcacagttaccttgagaaggttgagtagggcacttcccttttagttgtgtcaagctcattcttagcctctc

SEQ ID NO: 111958 - DNA, 341 bp, Zea Mays
gctcacaatacatacatgtccgatccggccgtttagcgtccgaagaatccaggtatgattaaatgcagatttggaggaaaaaacacatgccaaagtatgtagctaggcgatcgattaaatgcattttcggagagtatatacgtacatatatttttttagataatgggaattgaaagttcccggcctttgtctcaaaaagactataaccgaattattacagactcagataggaacatcactatctgaaaactcagagaaaagaaaaacatagcgcagcgaaacgagattaaagacagtctaaatgcagatcctcatccatgatgtctaaaaatctgcatcac

SEQ ID NO: 111959 - DNA, 566 bp, Zea Mays
agcgattgccagaggacacaacctgcacactgtagatatttgtggagctataggaaggctacactttagagcaaggattagcacaatcaatcagcaaatgtaaagttgaataatggtgcaaacacgtagctaatgctgctggaaccaagtaaaatagaacagaacaaggcaacgagggggcgtgtaagggaggtgtgcaaaaggtggaaaaggtgtaccaaaaccccgactggaaaaagttgtgcccaagatagcttcccaaaatgtctgggcgcactaaatccctaaacgaggaaacaaggtttgctttccatagccatcgtgcaaacatttgtactgcagttgtgcttaacggccacctatggacaaccatcgtgaaccccaattcgtgagtgattgatattcagttttgcatacatcctaaacaaggaaacaaagtttgctttccatagccatcgtgcaaacatttgtactgcagttgtgctcaacggctacctgtggacaaccatcgtgaaccccatttcgtgagtgattgatattcaattttgcatacatcttattcttgc

SEQ ID NO: 111960 - DNA, 405 bp, Zea Mays
ctcatatgtatcacagaagtaataagaataaaaaaatactttaaaattgtcattggaactggccttattaattatacaccacaagtatagcttatactacaacataaaactaacctgcggttcttcctacgtactcagctgcattcctgcaaaatctgcgtacgagaaaaggagaggttgagataatgccttttgcttgtcttcttctgccacggcatttctcatagagcatctccttttgtgacatgtatgtatagtaaaccgagctgccttctttcgtggagtcatgggcaccaccaccaccaattggcacacattcttttccccagagaagcgcttgttgtcatggcccatgcatgcatgaacctgggtcaaaacggtcaaggtcaattgtcaactcgcggc

SEQ ID NO: 111961 - DNA, 573 bp, Zea Mays
ctttgagcaggttcatatcaaggctgggcgagaaaggaaggccattttacaaattgctcaagaaggtggacaagtttcagtggaccacagaggcacatgaggctctagaggcactgaagaagttcttgaccatgccaccagtactcaagccgccgcgccgagctatgcctggtcatccggcagaagatctgctcctatacatctcctacacaactcacatggtaagcaccacgttagtagtcgagcgggcggaggaaggacatgcatacctagtgtagcatccagtctacttcatcagcgaagtcctcggaccctcaaaaataaggtatcctcaaatccagaagctgttgtacgtggtacttctaactactcgcaagctctggcactacttcgacgaccacaaagtcatagtagtcacatgatttccgataggtgatattctccacaacaaagaagctattggaaggataggcaagtgggcatgcgagcttcgggctcacgacatagagttccggccccgcattccgataaaaactcatgcactggccgacttcatatcagaatggactgagc

SEQ ID NO: 111962 - DNA, 304 bp, Zea Mays
tgatataagctcataaaattgtccatctatttcaaacacgaattaaacagtcaatatccaccatggatggttattgcctaaccacaacccactaataactagctacataactataactataaccacaacccactaaaatactaaccaccttataattaagtactaaataactaagtataaattttgacagcacctcccctgcatggggaggatactaaaacctgcacattcaactcacattcatcatattcgatcaaattcgcatttatcacattcattttcatgatactcacattcaacagac

SEQ ID NO: 111963 - DNA, 287 bp, Zea Mays
ccggtcttgtgaaggataagtattgtagagcacctacaacactctgaaatcttgtggtgtcttcaggagacaatagctcaccatcatgaagagaaagtttgtccgtgggtagcatgggtgtgttgacgccattagaagtttccatgttggtgcgcagcagcaaatcattgatgtacttgtgctgtgtgagtaaaagaccctgagaagttatgtgaacctcaatgccaagaaaataactgagggcaccaaggtccttgactgcaaattcagagcatagctgctgtaga

SEQ ID NO: 111964 - DNA, 288 bp, Zea Mays
cagcaacatatgttgcatccggattgaaaggtgcctccctccaatctagatcatcgtctcctgctttcctcctaacctcctcggcataacgagtctacaaaacaatttatgttaattataaattagtcaaaagttaattaagaatagatagttattatttacacctaccagcttttctgtcgcgctgtcatcacataaaacttttggatgctctggatctggacctcggtgtccctccatgtaaacgtcaatgaatcggggttcaacaccatcacgagcctcctgcag

SEQ ID NO: 111965 - DNA, 450 bp, Zea Mays
tgtgagcctctatccgaaacgatcttcttcggtactcctcgtaaacacacaatccgagccatgtataactctaccaactgagatcccttttaagtagtcttgaccggaatgaagtgagccactttggtcagtctatccacaatcacccatatggaatcataccctttcggggtgcgaggcaacccgacaatgaaatctataccgatttcttcccacttccattcaggtatctttaacgggtgcaatagtccagttggtctttggtgtttagctttgactctttgacacacatcacacatagccacatgtgcaaccacatctcttttcagcccataccactagtacttctacttcaaatcctgatacatcttagttctaccaggatgaatagagtaattagaatcatgggcttccttcaatatagtctcatgaaggctgtcaatctctaga

SEQ ID NO: 111966 - DNA, 357 bp, Zea Mays
atctcgttcagatgaaatcgcagtccagccctgaagaagctcttaaaaaccactacttcatcattcttcggtgcaggggtagtctcttctccggcaaatcggacaaattttcttttagtttccccaaagtagccaagcttcatcatcatgggcatgtcgtcttcggacacagtagatctctcaaaatctagatggctgggttttgtggggatcaaaatactgtaatcttcctcaacttcatcaacattttctccttcaacaacagcctgttcagcttcgtcatcaggagtaccttcgtcaatagctccctctgtcacaactagtcctgatcgttccatgacttctaaaattggcgct

SEQ ID NO: 111967 - DNA, 422 bp, Zea Mays
gtttgatcccaatctgaatagaaacatcctaagagatcatcaaaaacctatagaagcaaaatgtttggttacctgcatcttagacatgccattacatcaccctagtgtatatctccatgcgatgacggttccctgctatctttagcaccaattggttagagcttgtgtggctatgccaaacccaacctaatctcgtctaacatcaaccttgccctgtcctcgcctttcattgttatgctacatgagaacatttgggttcacaccatttataagccaccatatcctctggatgcgctaatctctataacaatgcaatcaatatgttttgctacgacaaccacatcccccagacaaaaaacttgagtgctctatcgaacatgacctactcaacctgtcccaatgataacagtaacaccttttcc

SEQ ID NO: 111968 - DNA, 562 bp, Zea Mays
caagcctgttttcttgctgcacctagatacttgtacctcctttcttgtgccttggtccaactgttctattatattttcttggccagcaactaggacgagtacttggaacacttattcagcattgctatctgttactgacttgtgtgctacatatatatatttagtcagccttcccagagctccagctttctctcgagcagaacaggtactcctttgcaatcacacccacgcttgttggacagtcacaccggtcaccatttgccacctgcagtgctggtaagaaccttgtaagagcggggtaagacgcttcataacttgtgttccaccaccaccaccaccaccaccctgagagatagttgtagggttcacattgtttgttgcctttttgtctctattttgtactaacaatgacaggaccaaagaaccaaatggacaaggagaaggggcctaagcttaacgacgatgagtgtgtctctcagctagaattgaaggagatgatgcacgcgatgactgaagcttttaaaaaaataccaggactctacggtgacatcctatgagcagc

SEQ ID NO: 111969 - DNA, 576 bp, Zea Mays
atgtaaatcctctgcaagttctactcattggaattaccgtcttccacgggattagaggtgcagtgtcctggttaaaccaggactgctcttttgccgatgtgaatttgggaggggcgaggaggaggaggactggactggaggaggtagatctagatctctgagcctgcaaagttttcagtggtacatcgccagagactctctctttttttttaaccgctgccactacctctccatcagcacgaattacaagaaaggccggggtgatggcattattagtttattacctctagtgctaggtggttgcggtaacagcagcagcagtagatcccatctagcggcgcgagggcatgtgccgccctccgtccatcaatgggcggcgtggatctgatgcatccttttgtttaacctctgcagagcgggagcaggcggggcagagatctaacagtaagaaagtgctgtgattgttaattagtctgttaatgcgcgacggaacttataatctaacagttgtgttaccaccgcttcacccagtagcgagtactccagctgtgatctgccccctttttactttgtttt

SEQ ID NO: 111970 - DNA, 1018 bp, Zea Mays
aatcacatgcccatgaaagccacttcagacagccaaaaggcacacttcttcaacttgccatagaactgattcttcctaagggcacccagaatgagatggagatgttgctcatgctcagcctcggtctttgaataaatcagaatatcaaagtcgtccaagaactcatgcaacatcctattcattgcttccataaaagcagcaggggcattagttaagccaaaagacatgactatgaactcataatgcccatacctagtgcaaaaggcagtcttctcaatatcctcctcatgaatcctcaattgatgataaccagagttcaaatcaattttggagaacacctaggcacccctcaactgttcaaagagaacctcaatacggggtagcggatatttattcttgattgtcacttgattcaaagcgcgatccacacatagcctcttacttttatccttcttctcaacaaacaatactagggaagcccatggagacctgctaggcctaatgaaacccttagccagcagatcatccaattgtcgcttcaattcaacctgctcctatagggccatccgatacggggccttatgaataggctgcatacccggaatcagcttgatctcaaaagctgcatcgtgctccggaggaatgcctggaagctctgccggaaacacgtcggcaaagtcacacaccagacggatgtcctgcacccgcaaggcagcctcaccctccaccaccgtggagtaaagaattcccgacttccttgaccgacgatccagaagcaattgcgacatcaaggataacgtgaactttggagaacttcccaaaaatatcacctccctacccgacggcgcctgcaataacactatcttccaaaaataggatataactgcgatactgagataaccaatccatacccaagataacatcgaatgcccccaaggaaatcacaacaagattggccgaaaatacctcatcagcaagaatggcggaacacccctgacaaattgaacagctactaatg

SEQ ID NO: 111971 - DNA, 393 bp, Zea Mays
cctttgcaagagcttcgttccttaaagttacaacctccgatcggaggtttccaagtgctatttggcagctttcgtcctctttatatttttgagccttcagagccttactaaggattaaacgctgccaaacagaagaacgaacaaacaataacagtaagaatcaccaaaaaatagtttactgtaatgaaaagtaataaatacaaagccaaaatatacaaacattcaagctattataagcgaggctgtccgcaagctgatccttcgtcatagcgaacaaaccaagctcaagcttcggaaaccccattttgttcatcatctcgcagcaaacattaacctccttattgtcgggcagatagtagaggaagtcgtcttcgtcatttcctctgtatacca

SEQ ID NO: 111972 - DNA, 494 bp, Zea Mays
acatacataatggaagaacattctctcaatctcaagacaggtcccgctggttcgacgaccacaccatgtatctcagccgctggaacttttttttcctgactggagagtacgtgaaaactactagtagcctcagaggagtatcttaaatggagaacagaatggaaaatgcgcctacctgaatccagggtacctagttgcaatttgaaagcttggcagcagggaacatgcgacagcatgggcaaaaagcagagctttatttcacctgctcgctgtatgctgcctgctggagctggcatggattcatctcaagcgacaccggcgagattgatctgggcatgcacaagccacactcgctctagctagcggccggcgaagttcagagttcagaccactctcttctttttcttcttatcttcctaaactccattgccggcgatggacctgacgagcgtcgtcccttcgcttgcgctgttcctctccgtacaaatgttcaa

SEQ ID NO: 111973 - DNA, 586 bp, Zea Mays
cgcttttgcttggaattgtcttatgattgccgctgatatggacatgggttacatgcttctctactcttgaaagtctttcgctccgaatctcgggacaagattcttttaagggggagggctgtaacacccctggtgttactgctactaaagcttgagcataacatcgtaagccttggcagattatgtgtttatcacacctggagtacatccaccaggcaaaaaaaaaatttcaaaacaaattgaattgatgtgatatgtcatgggtacaaccctagggtagggtgcttaaccctaaactgagcttaggagttcaataaagtacaaatgagttaggttctcaaaacttacttgtaataataataaaatgtcaccatggatggacttaagtggcattcaaaccctagaaatatcaaaaaccctgaatagaccccttgaaaaccctcgactgaaaccctagggggtgatatgcaaatgttgcacccttctggacctaagtgcaagtatcaaagtaaaaggggcaccttaaacccactaacttttatattcaaggatttgtaagaggaatagtgggatttggacctttttg

SEQ ID NO: 111974 - DNA, 363 bp, Zea Mays
tataaattgaccccgccgtgagctccgtaggatcatcacgcacccagccaccaagtaatgccctcagtcgatcaccagcaagctccaattttagatttcccccaaaaccttcaagaacaccgagtgaattgatctcgccgtggtcagccacttccaggtctactcataccttttgctccctcgtttgagtgttcttatgttctcgtgatgctcatcgacccacccaattgatctgagctgccttagatcatcgggaacgagcttagtgctccgttgttgccgctatcaccgtgggtagagcattataggtctccaatccagaaattgattgaggggaaatatgcgggagtagttcaattcagt

SEQ ID NO: 111975 - DNA, 716 bp, Zea Mays
gcagcttcggatgctcctctgtctttgagctctttgcttctgtttcttctaccagagcgacagtagctttgacagtcacaacaggtattatctccgaagccaagggggtagctttggcatattcaacaatttccatcttctttgtagcaggcactgcagcagtcctctataaagactgcagcttcggcctacgagccaaaactttagctctttttgcatcgacgtggtggaagatgtcgaagttgcgattttcctctttgctctttatttccgagcgagaaagcagtaatcagaataaataaatccaatcacatcaaaaactctgttcagtatccttttgcctcgagcgccgaaggcagtgttcatgtctttgtcctctgccttcgtataagcccccagcagctcatcactggtcgcctcaacgacttcaagccattcatcattcggctcgtcaaactgacttctatagcgataggtgtattttaggtaaaccaagccaccttcgctggagccagcatcgatctccttcggcatttcccaatcattaacaagaggtcataccttaaaagcaatgtgctcctgaaccaagtgacaatgtaggtgcacaatgtgttgaaggccatcaaacatgcttgtgtttcatttccacccacgatcgaaggtctcctgatgccgaagcgtgaacgaatgggacgctggattatgcccttcacatc

SEQ ID NO: 111976 - DNA, 618 bp, Zea Mays
gtggaaaacaatcaagcagttacctccagataaagtgcccggtccagatggttttactggtcacttttacaaggtctgctggccggttataaagaatgatatcatggctgcagtttcttctgtgtgtaggaaatttgcaagttttggagtgcttaatgcaaccttacatcactcttctacctaacaaggaagctgagcaaccaagagactttcagcctatcagcttggtacgtagttttgctaagttgattgctaaaatgttggcacatcgacttgcacgccagatgcagcagatggtgtctcccaatcaaagtgcatttataaaggggcgcttcatataggacaacttcatgctagttcaacaaaagcagcccagactcctccaaatagtagacatctcaaaggcttttgattaagtttctcggtcctttttgcttgaggtcttgcagcacttaggctttggccaaatttggagggacatcatcagtgagttactctccacttctactcaagtgattttgaatgggacacccggggagcgaatttctcaccggcgaggattaagacaatgagacccgttatcgcccatgctttttattctagttgcggatgcgttcg

SEQ ID NO: 111977 - DNA, 395 bp, Zea Mays
gcaattagaaagtggaatgggttaatttggagttcatatgagttttctatgatttattaaagtcctagcacttatttttgtgttaaaaagtaatttctaaaattaaataactgaatttacagagctatggactgggcgcactatttacagagaatccagggtctaagtcgcaatattcctaagactcagtccacagcacggtggacggcgggttattttctagaaaacgcaggggctcttttacaaaatcaaacgacgaaggggtatgagtcaatcttggccgccagatctgctacggacgcaccagattagatcattaaatctatgaagcggtatgcagcgcagaccaccggatctgagatctacggctaacgtttgtttcgactgaagcggta

SEQ ID NO: 111978 - DNA, 831 bp, Zea Mays
tgcggggatgtttgacggcttcggcaattccgttgcgtatggtggactcagtgccttcaactgctctgctgttttctccacattcggctcctcagccacatttgtcctagcttcgacagacacagagcgacttggctcagagataggagcagaccccctcaattagcttcggcacgtcggccgtctcaatgcgcctgggtcgacacgtcaaaactttaaccttttttgactttgacgcactagaagtcaccgaggtagcaactttcctctttttcccttgctttcgcgaaggataacagtagttcgggtacacaaacccgataacatcaaacaccctatttaatctctttttgccccgagctccaaaggcagttgtcatggcttcatcttcggcctttgaatatgcaccaagcagctcatcactggtcgcctctatggcatctatctagtcatcattcggttcatcaaactggctcctgtatcgaaaggtgtacttcagatacaccaaaccattttggctggagccagcggcagtctcctttggcatttcccatccatgagcatgtggccacactttgtaagcaatatgttcctgcaccaagtctcttgtgccaatgtaagtacacattgtattaaaagctgtttggcacgcttgcacgttgtttccaactgcaatggttggcctcctgatgtcgaagcgagaccatataggccgctgaatgaccccttttatatcttccctctcactcagatcaaccttcacataaagccattcttgcatccaggagcctggcaactttttctaaaatgtcggcacatgatagctggcct

SEQ ID NO: 111979 - DNA, 303 bp, Zea Mays
gtttgtggaggcttccctgtgatttgggttagatgtaagtaatcagagttgcacatctttctttacctgcttcatctgataaatgatgataacatgtcttacatagcaccttggcctaatcaagttttgattaagaaacaaatattgatcttgatttgtgcatacgtgatcacctgtctaacagtcatatgagataattaatgtttccattgtggagtgcggtctgtgataagtggagtgaaaaaatgttgtctctggatccttttttaaggcaaggccgcaaggcgatgtgtgttgggattt

SEQ ID NO: 111980 - DNA, 655 bp, Zea Mays
caaagaatgttagattacatgattatattttcatgatggcaagaacaaggtttaggaagattaggagtttcaatagaactacttgtttcgtggtgctttgaggtgaggtgtttgatcttcttatacattcatctggtgtggatgtttcaccatttaattaaaatgaattgttgaagttggtaagggttgtgcttagtgcatattacccctttataaaagagtgttgttttaagacattgatgttgatgtatagctgcatctaaattcgatggtgtgaaattgtagtgttgatgacatctatgacttgctttgagcttctttgcatgttatttcatgcttgatgtcaggttgtgtagctttcttagacacttagtccaaggtagaagttcttatgttaattaagaccaaatggacccatgttttgaatggttgtgctatatggggtaccttgggtgttttgcttggagtggtcgaaatcgaggatggattctttttaaggggggtagagtgtaatatcccaaaaaaatgttgaccaaaagttggttttggtgcgtggatgagggaaagggttgtgggccgttggatgcaaagtcagaagtcatctgaggcgttgtttctttctcccacaaaaccctaggtggccacccctttttcc

SEQ ID NO: 111981 - DNA, 416 bp, Zea Mays
ccccttcttgattcttttgttcagatatctccgatggtctttcctatgcatccataatcatgtagtaaatcatgtagtagggcgttggttgaactgctcctcctaccaatgataacaatcccagaggcaccgactagatgcattcgtgccaattcatccaggtcgagtcccagctttatcatcgattcgcgctggccacaggctagcaaaatcgtacgacgtgctcatctcgcagccaccagctccacactttcccccgtatctggtggtacgaatgttcaagcaaaacaaaaatgctatgaattggcccagaattgttagaagtggtagctgcaatgatcttccctccctagaacaacaccccctcatccgatgtgcccctaatttatattctagaaccacacaaggcagttcgt

SEQ ID NO: 111982 - DNA, 772 bp, Zea Mays
agaaacataagattttaacaaacatagtttgaaacctagatatttgtccacaaactacataagacatgcataaaatataatgtgcagataataaacatgcacatgcaaagtctaaatgtccaatcaagctccccgtgactatgaaatccccatcttcatttcatcttcatctctccccgttggcatcaatttccacaaaagaggggcctcactagctactagatggaggacgcagatacatgttgtagtagtgagagctgaagctgtcaaagatggaggttaactgacgaaaatcattctggagatgttgttgcctctgatcaagcgtgtgaatgttgtcactggtagagggactctcaaactggttagacagggcacccatattatcctgaaaactctgttgcatgttgttcattctggtcatgattggatcatgaatggtgtactagatgtgagtgcgaagatcagcaaactcagagttcagcccatcaaactaatcgtcaatagcgctgaggcttgatgtcattgtagagtactagccatcaaaatgagtctgcatagcatcaaatctgccatccatgtgggtcatcaagtctgagtcccatgctgcatatgctggaagtaaggatcaatataccctgggctaggccatcagaactgctcatgttgaggaggcatctgctgagctggatcttcctcaggattaacttcttcttcatccccaaccgcttcctcatcatcaggtaagagagtgagaggcctggtgaggaat

SEQ ID NO: 111983 - DNA, 781 bp, Zea Mays
atcccaagctcgaacacaggacacaagggttcacagtagcaaggagttaccattggactagtcacatttgttcattagtaacagagagcagttatatgtaagcataaactgttctctgtccaggatgtaaccgagcgcccagttcagatttctgcatttttctacccagtaacagagcgcacagtagcaaggagttaccattggaccagtcacgtttgttcattagaagcataaactgttctctgtctaggatgtaagcataaactgttctctgttcacagtggcaaattatagcattttcagattgtaaacttcccagttcagatttctgcattttttgttatgcccagttcagagatctgcccagtccatagttaagcatcaactgttgacagtaatgcccagttcagattgtaaacttcccagttcagattttctgcatttttttgttatgcccagttcagagatctgcccagtccatagttaagcatcaactgttgacagtaatgcccagttcagattgtaaacttcccagttcagatttctgcattttcagattgtaaagtgcccagttcagattgctgggtgttctgagtaaactctgctgcccagttcagattgctgcccagttcagattgctgcccagttcagatttctgcattttcagattgtaaagtgcccagttcagattgctgggtgttctgagtaaactctgctgcccagttcagattgctgcccagttcagattgtaaactctgctcagtccaaagttcaaagatgc

SEQ ID NO: 111984 - DNA, 1165 bp, Zea Mays
ccggaatacgtctggaaagaataccgcgagaacggaactgagaagtgctttatggcagtctacctaggagaaagccgaaattacccaaaccaccctcctttccaagtcaccttcaccggacaccgcttcccagacacttgccaaaatgttgccccgaaaagctctccgacagctatgccaaaactacagctgagaggtctttgaaacccccttcgttacttcccacctagcaacaaaaatacccctgcctggaggaaaagacttcatgccctctcaggaagagatcccactgaggatgaccccaccatcgtctacatggccggatatctccacaccctcgataaccactatgatgacctttcctcccactgcacccacctaaactcccaggtggaaagcttagagcaacaggtcaaggaacttaaaaaggagaaggcgtccctccaagagaatctcgaaatagcagaaggcgaagaggccaacactcgtgaagcctaccgaaccctgaagatggattacgataagaagctaaagaagcttgcccccacgaagaaaatccgaaagaatatcaagagccaaggatgacagactgagcgaaagaaggaagcccctctagcactacctccctccaggatagagaatttgtctgacgtcgagaatatgtccctagctagccttgacgaccttctcaaggaatttggggacactttagaaagggagttcggaagtaccttagaaagcgctcgcgtgtagtgcgacttgtggtaactgtatgcttgtaatgaacttgtgtgatgaataaaataacttggttgaaaaaaattggcatatgcatagtagtaattctctccccctggcagatggcttcggataaaaccacgcctaccgccttcgggattggagcaggatttcctctaggagctgaaggagaagccggtggagaagggagtgagacccacctccccacacctctggagatgtcattagatttatcccaagttctagccaaccaaacccgactcattgaagtcctcactagaagtctggagaatcagcacccgaatggtggaagaccacaagataggatgggggattttctgaggctcaagcctcccacattcgctggatccaacaatcccctcgatggtgatgactggctgcgcac

SEQ ID NO: 111985 - DNA, 531 bp, Zea Mays
tctcactaacatctccactaaggcccctcccctttctatttcttcgcaaggtgaggtccccgaccatggatggtggagcagtggctccagcgagcctgtatcggccaagatacgcaatgaccggtgctcttgagcagttgacacctaattcgacccctaatacccatttcccctccatcaattgcgttaatccaggtcagaatctctctgtccacgataacggcggaaaccgagaacaatttgatgtgttcttggcgatccaaggcagtcgagttcaattaaacaggtctacgagtagcaggggacttaatggaggctagaacatcaagaaaggatgcttgaactaacctgtaggcgtctggccacgacgaggtgttcacgggtgcggaaaactgatttggggaaagaaagaaattggagctctctggtggctaatcggaggcagtagtggatgctttggcttcgtgatgacttaatggagctagggatgtgctcaatttatagtatcccagagcggtggctcccaatttg

SEQ ID NO: 111986 - DNA, 350 bp, Zea Mays
tggaaaccgaagccctgccttcatgaagctcttgtaaacaacaacttcatctacttcgcgcacaggggcggcgttgtcccctccaactctcacaatggacatatcacggaaatatctctctttcatagcatcaatctgactctgtttgatggatgactttccgaagatggtatgactcagccgccacggccgattttcggcatcttcgttcctagtttccaaatcaaagctttcgctatcgccagaatcttcagataacccagctagcatttcattagtcatcttctctgtgtttgcttttccatagcctcgtaaaacccagctagtgcagggtcaacaaccgtcttctc

SEQ ID NO: 111987 - DNA, 431 bp, Zea Mays
ccctcacctactcgtggggccagtcaatctcagtcataggggccttagcgacggagtctctatagtgacccgcataccctaaagaacgcaacaggtacaccatacccgggtgtatgtctacgcatgccaggggtgacacagtctcatgacgacaggcagaaccgcgccgcacacgaccactccgtgggacggcccgagggacccctgtgcactactatgaaggtgacagcaacggactagctatagggggttgtatgacaaacaagcgagacgatacgccataccaacagtacggttatgcacatctcactctctctgtcgctctcgtagaaaatagatctccactgtaaggtccaacccttgaactataaaagggacatgccctcttttctctaaggacacacgtccacctgttgtagcacgtctcaaag

SEQ ID NO: 111988 - DNA, 450 bp, Zea Mays
ccggattagtgttgggtcgccaggggccgaatgccagagtctccgacgagtgctctatcgcaagccggccggcaccaccgcctgcgtgcctagaaggagggaaacacgtctcgaccgttggatcctagggtagcgaccgggattagaagttgcagaccccttttcgtctgatggcttgtgcaccgtcgatctttgaatcgggcgggtgagaagcgatctccgttatttaaatctccatcgttgctctatgatattacggtcacaggtttggggggatcagatctaattgtggccgtctgcggttgatcctgcggcccaactaggcccatacatcttcagcctgcgaactttgcaaaagagaccttaccttttagggcaatcaaaccgccatccacactagtagaaaataattagaacggagtcccgatatttacgaatagaaccacgtac

SEQ ID NO: 111989 - DNA, 859 bp, Zea Mays
tttacatgtgataggaacaacatgcgagggtaaaggaacgatatcccatgtaccagtgcgttcaagagcagccaattcatcaatcatagctagctgccactcgagaatcccagaagcttcctgatatgtagtgggttcaacaattgccacaccagcctgtggaaaaccatagcgatctggaggttcaatggtaccacggtcacgaagacgatatccctgattaaaaacatcattagactcattattgtcagtacaagaatcaggtacatgatcagtatcaggaccaaccgtagaaatagagcgggaacgacgaatttaggtttggatgacaggtggtttggaagagtaagaagaagatgacgtggaggtggaaggtggtgttatgagaatgagaacatcaaatgtggatgtagaagatgatggtgcagatgcaagaatggaaggaagacacatgaaagaagtagattctgtgggataatatgaggagtgagtagactggttgtgaaagaagggccgattttcattgaaactcacctctctagaaattcgaacacgacgagtagaaggatcataataatgatagcctttgtgttcaatactgtatgcaaggaatacacattctacagattgagcagtcaatttggtccgctcacgtggtggtaacaagacataacatatacatccaaacacatgaagatgatcatatcgtggaggagtcccaaaaagaacttcacccggagatttgccaaaaagtttagatgatggttgtctattaatgagatacacaatagtggaaacaacttcactccaaaagtgtgaaggaacaaaagaagatatcaaaatagtacgagcactcaat

SEQ ID NO: 111990 - DNA, 526 bp, Zea Mays
ttcatgccgggagagagagcaagcagtggatttggaggcccttggcctttctcagcatgatttggctgcgcttgaggctccctgtttggaaagggaaatatgagaaaccattaagcttttaccttccgataaagctctagggccggatggatttactggctgtttttacaagtcctactggaccgttatcaaatctgatatcatggccgcaattcaagctatctggaataaaaactttgttaattttgacaagttgaattctgcttacattaccttgatcccaaaaaaagaggggctgaacatgtgaaggattttagaccaataagccttgtgcacagtttcggcaagctgattacaaaaatacttgccaacaggctggctagcaagcttaacgggttgatctctccaaaccagagtgccttcatcaaagggcggtttatccaagataacttcatgctggtgcagcagacttccagattccttcatcgccagaagaaggctagtttacttctcaaattggacatca

SEQ ID NO: 111991 - DNA, 316 bp, Zea Mays
agaattggaaattcgcgcgtgctggtggatgatcgagggtgggagcgggtgctatagcttcgggatgacttagcgcaatagcccgagccatcaatttataggaagcttcgtcggtggcgcttgaattgaggatggtgcggtggcggccggagatgaagaagaacgagggtacggtgaatacgtgtccagtgtcgtggcagtaactccggtggtcgacgggaagttagagggagtcacggtgatgcggtggcgagattgggacacgcggcgcaagaccggagaacggcggtcaccggcgaagctatccgcgccagcc

SEQ ID NO: 111992 - DNA, 813 bp, Zea Mays
tgaaccacatatgccacaaatacattaatggaataaaactaaacaataatactaatcacatacctaatgaaacaagcacaattacaaatacatactaatttcggcggctattaaataattgtcgccaaaaatatgcaataaaatacacaataaaaattaaccttttgatggagaagggcccgacggcggcggtggagtggtggcaggaggagcactcggtagcggtggacggtgtcacaacccaaccaaattatcggtcccacgtataccaatccttgcctttaaagcctcggatggatatgtatgtgaatcagataacttactcagggtgccgagtttcgataaactcgtttgtttctaaggatcattcacccgtaattgtgaaccgaggcccttttcatttaggccctgctagattggctaaccgaacaagagtcatgtgacctattcctatgtctcactgacatgtgcactgaggcccttttgtttttgttcttttacactttctcatcccagatcccgactccgctgagcacatgtcgaacacctggccacgcgtacccatctcaccgctggtgaccatttctagagaaactgagcacagtgatcgaatctatgagactaacccttcactttccctcggttaattggaatggggtaacgtacaacatctccagccatggtgacggcggagaacgagctccggtgagctcgaatctaggtctagagcatggtagcgttcaacccaaggctatggtgagtatcggtgatctatcaagcgcacggtgctcacatgagtttgcccgagaaggg

SEQ ID NO: 111993 - DNA, 500 bp, Zea Mays
cccctggagcctataaattgagtgtgtcgtcggctccgcaaggtagtcaagcaaccaatacaccaactcgtgcctcaaatcgtccaccagagctcgccaattcgagacttcccccaaatcggtccagagcaccgcgcttagtgagctcgccgtggccagtgtgctacaggtccgttcatgtcctctgctctcttttttcaatacccttatgtgcccttgatgcttctcgacccgaccgattaagctagaacccattagatcgccggaaacactttgaattctccccggattgcgcggtcaccgtgagcagagaggttgggagctcgaatcgtgcaattgatcgaggggaaacgattgttagatattgaattaggtatcaaccaagttagagcaccgaccattgcgtgtcttagccagtacaggctcgccggagctcggtctgtcgccgttctgcatcctggacctgacgttgtaaaggaatagaaatgcgagggtctcgg

SEQ ID NO: 111994 - DNA, 565 bp, Zea Mays
gctctgcaaagtggtctgttaggatgactgaatgagaaactgatggtacaatatcgaaatatctcaggttcagttcatctcgccgccggcgaccacacgctcggattcgcgccagacgctacgattcgtgctcaacggagtactgatagttgctcgaggtagtaaatatcaccgtgtggatgaacttgagccactgtttcactctgccgccgtgtccgcctgacttacagccgattcggatgaactcaccggagttagccacctatcgaccatgtgccatgtgccttggtgtcttaccacgttgcagtagctcgtattacacacatccagtgatcgccaatgagctcgccacggtgaaagccaccaatctcttgcgacagtgctctcctctctctccgaccgccaccacgccatctcaaattcacgggccaccgctcggggatcctataaattgagcatgtcatcggttccgcaaggtagtcaagcaaccaatacaccaactcgtgcctcaaatcgtccacccgagctcgccaattcgagatttcccccaaatcggtccagagca

SEQ ID NO: 111995 - DNA, 341 bp, Zea Mays
caaactgcttctgaagaagaaaatgttgttgagagtgaagaagattatagtattttgatcccaacaaaacccagtcacctcgaatttgaaaaatctaccgcgacggtggatgacatgccgatgatgatgaaattgggttattttggtgaagctgaaagcaaacttgtccgatttgctggagaagagactaccccagagctgaagaatgatgaagtagtggttttcaagagcttcttcagagcggggctgcggtttcccctgaatgagatgattggggtagtcctaaagaacttcgaaatatatcttcatcagctgactcctaacgccattgttaggctcag

SEQ ID NO: 111996 - DNA, 555 bp, Zea Mays
cacacctctggactaactcggctgcatcactctttgctgtcggccagtagaaaccagacctgaagaccttcccaaccagagtcctggatgctgcgtgtatcccacactgtccggcgtggatctcatctagtagttgcttcccagtagccgaaagaatgcacttcatgaggactcctgttgcgccccttctgtacagtgcctccccaatgagagtgtagtgagctgactgccttgcaatgtgttctgctgcagctttgtcatctggctcctcttcattctttatatatctgatgattggctccctccagtcattagaatctgactctcgcaggctcagaacattgcactcttctgcccgatctaagaaaatacttgggcgtggtacttcttggacgaaaaccccaagcgggacctgggtccgactggatcctagtttcgacaacgcgtctgctgtcgcgttgcgatctctctccacatgatgaaattccaacccttcaaatttgtcttctagttttcagactactgtgcagtatttgcccatagagtcattcgagc

SEQ ID NO: 111997 - DNA, 411 bp, Zea Mays
agaacatgacctattttaaatgttttctaatggtgcaaggacgacgagttgatttgtaaagattacagggtctcttttgcataatcgcacggtcgaaagggtatctatgaatcttggttgttggatctcaagccaatagctaggattagatcggatcctgaataactgacccccccgttccagccctacgatcaacggtatacggctcagatcttaaatagctaagacggattcctacgcgtaagatacttatccaacgacacagatctaacaaccccaaccgttatgcatgatttaatctcatgcatcgaatctccgatcgacggtccagattggaccatgccgaacgaggacgctgttctaatcacagccgttacacccagatcagacggtcgagacgcgcgcttcccc

SEQ ID NO: 111998 - DNA, 477 bp, Zea Mays
attttagcagagaagctggactggatcgatccatttttaccagcgcaacgagacgcgacctattttggagtgtgacgacatagagcgactcattttgacaaatttccagattctatgtgatctaggaacccagccaatagtgatgagtatgcgcatcatttgccacttatgttttgtaagttcggaaaataggtagtgatggatgtttctgaatcagcagtgaaagcgagatcaagagtagggttgtatgctctagtttaacttgtgtaaaaataccatcaattttatttatggaatactacaatgtttcaagccttcaattcaatgatcatggtgacaattcagtagatgcatttgttgccgatgtaataggcttatcctcacatagtgtgtaattatagtctgttactccaaacatgactaacacattattatttcacgttggatagttggtgccatttaaggggtcgatgttgc

SEQ ID NO: 111999 - DNA, 408 bp, Zea Mays
tctggatctaacgatgggtgctgcgtactgattcaaggtttaatccgatgcatcggatcttgatcgtgcgactgtggtcgctcaataccccttcggccatgaccttttgttaaagaacccctgctctttttcatatttaacccgccatccattccagctattcatcgagtcttagaatacttgcgtcgtggcccctgtacttaccagtaattgaggcctagtccagacagtgagaaaaacttataaaataatttagaaaagggatttttttatgtgaaaacaattcctagaacttgtatagttcctagaaaattcatagggagcccaaatttattcattccaattcctataattttgtaataatgttgtttatcatatagtgtctctgttttgacatggaagtcacat

SEQ ID NO: 112000 - DNA, 348 bp, Zea Mays
cttagcttacctataagggaccctacgttccaactacctatacggatcctagtcagctcaattagcttccttacccctcgcacccgttgagacagatgcgaagacccttgcacatttgtcactacacccatgcgccaatgtagcgcgccactaagaaaacgacgacccaatccttgctcacttgacaccgcatccatatcacaacacagcgcgccaccaagggggtggcagcccagcccttgcccatttaacatcatacccggtttccgatatagtgtgtcgctaagagggttacgccccattcattttctattgggtttcatctccatttgagtggctaagtgtttt

SEQ ID NO: 112001 - DNA, 388 bp, Zea Mays
ctttgtttacaaatagatagctaaaatgtaattgtttaaaagatattcagcaacaacaaatgcataatgtttttttaactatcagagagctaaggtgcattcttcaatgctagatgtctaataaaatgtacaatttgtggcgtgttggtacaagtatctatccatctacctgatgaaggcatatgaacttgcatatctgtactcatctctgaacttgcacaactgtagtggtcgcattgtacctcaaattcatttctgattttagtgttatatacatgtgagaccaaatatttttttctaatgggtcctatagtttgtaataatctatctgtgccacttatacacaagacaatgtacaacactattggtctagaattttatttctcaa

SEQ ID NO: 112002 - DNA, 894 bp, Zea Mays
caccgaggcccttcactttctaattcttcacaacccgcgatccccgaccgtggacggcggagcagcggctccggcgagccaagaccggccggaaaacacaatgactagggttccgatgtggctgacacccaattctatccctaataaccctttcctctcaatcaatttcaaggttcgagcccctaatctctctgctcacggtgacaacgcgatcaacggacaaatcgaggagttcccggcgatctagcacgatctagttcaattggccgggtcgagaagcataaatggcatacaagagtgctaaaacaagagctaggaaggtgtgatcggacctgtgaagggctgaccgcggcgagctcacacacgcggtgttcttgaccgatttgggggaactctcaaattgcggtgctctggaggacgatctgaggcacgggctggtgcattgggtgcattactacctagcgaagccgatggcacacttaatttataggactcgagggtggtagctcttgaatttagcatggcacggtggcggctggagagggggaccgcggtgactgtagctgttaccgtggcaaggccttaggcaatagaagggttgtgtattgtgatcaattgcaacgtggtaagatggctgacggcatggcataaccgcgaggaacagcggcacgacggtgatggtcgcacggccatgtcgccagcaagtggacaagtgacagagcggctactatgctccaagttcatccacgacgggatcttttcacccggagatcgttatctgcgtttaactgggtgtgaatcgcggcgccagcatgaatccgagcgcaagatcaccggtggcgaggggggttgaacctgagatatttctgcagacactgtaccatcaggatctta

SEQ ID NO: 112003 - DNA, 516 bp, Zea Mays
cggatgtcatctcaagggccaggatatcacatcccaagggccaagaaatcacacaggggtgagttttcaacgaggcggagacatgtaataaatctctgcaaaaatcccccaaaaatgaaagaggcaccatgaccacagagtcggtcttcggcattcgacgccaaaacagtcaccgcaacggcaagcctcggcagccgttacgtgcgacaagcatagtccacgcagaagtcgtctaagggcgcatctaggttattatcagtgcaaagtcgtctacaagacgcaaattttcatccgagcaaaaagccgcataagggtgcagccaaatcagcacaacaagtgtgtaataatacccaaagggtgcaaagtcatctacgaggcacatatttctacctatgtaaaagtcgcctaagggtgcagctggactcccacgaagcgaatcacaaaaagcgaagtcgtcacagaagactaccaacagatcaatataaacatattaacgacgccccaacgcacaaagac

SEQ ID NO: 112004 - DNA, 332 bp, Zea Mays
aaaatcatgaaccgagaacagatacgcaacacgaagattgaatttctgcttcttgaagcagtcataggcttccactccttgccatagcttctttaactcttcaatcagtggttgaagcatcacattaaggcgtacgctaggatgctcaggcccaggtataacaagacataggaacataaactcatatttcatgcaaagagcaggtggaaggttgtacggtatggcaatgacaggccaacatgaatacgacgcaacggtcatattgaaaggtgtgaaaccattagttgccaagccgatacgaacgtttcttgcatcgctggcaaaatctggat

SEQ ID NO: 112005 - DNA, 380 bp, Zea Mays
cgcggatatgctccggctaataatttactccggccaccgtaccgagcttgccacggccgcttcggatgagttcgtcggaggcagccacttcacggccttgcgccacgtacctgggcatattcaccgcatcgccgtgactcactttagccgtccgatcatcgccggtgaggtcgccacggtatattccacgaattccctgcgccagtgactttttgcttctccggccgccacacgtcgtcgtccaattcactgaccactgctcttgcctactataaattgaggatgccgtgagctccatagggtagtcaagcaccaagccacccaaaccgtgccctcaatcgatcaccagagctcgctaatttctcattctccttaatcac

SEQ ID NO: 112006 - DNA, 943 bp, Zea Mays
tgctcttcccatatactgtagcgggttttcggactagcacaacaaaagttgcctaagggtgcagccggactagcacaacaaatgcgtcaatcgaagtcttttactaaaaagacactccgtgcaaaagttgcccaagggtgcagccggactaccacaacaagtacatgatacgaagtctctcgcttaaaggagaccaacagtccacattgcaatacaagttgcagttacatacactcagcgaagggtcactagacccaccgcacaaataaacacaactatgccctccaacaaacgcgtcaatcgaagtcttttactaaaaagacactctgtgcaaaagtcgcccaagggtgcagccggactaccacaacaagtacacgatacgaagtctttcgcttaaaggagaccaacagtccacattgcaatacaagttgcagttacatacactcagcgaagggtcactagacccaccgcacaaataaacacaactatgccctccgttaccgccgcgcaacgcgagggcaccatacattacattggctcgactttcggaatgatgcccgcctccctataattgaacaacattattctcaattcctcaccctcaaaaagcttccgcagatccccctcgccaatgcttgtcccaatcggtgaagacagtagctctcgtttcccaaaccgatctactcgaagacggtcccactccatccccatccgacggcgcctaccacttcgcataaactcgccaatgctatgcttcgacaccacccttcgtcgccgacactaggtcctcgcaccaggaagattagacaccttgccaacctccacctgccgcaaggactccgccgtggccgcatctaacgcaacaaaataatccaaatcttcaccagacgactctttgctccaggacaacggactcccaaactcatcatcaaacaaaaaagac

SEQ ID NO: 112007 - DNA, 524 bp, Zea Mays
aatatctggtgatgtcgtttgggttgacaaatgcacccgcatacttcatgtatctgatgaattcagtcttcatgcctgaactagacaaatttgtggtggttttcatcgatgatatcttggtgtactcaaagaacgaagaagggcatgtcgatcattgcatgtagtgctctaacgtctaagagaacaccgcctttatgccaaattgtcaaaacgtgatttctggctaaaggagattaaattcttgggtcacactatctctcaagatggcatagctattgatccggataaggtgcaagaggtgatgaattggaagccacccacgattgtttgtcagattcggagttttctgggattggctgggtattatcgtcggtttattccagatttctctcgaattgcgaagcccatgacagaactattgaagaaaggagcaaaattcgagtggagtaagaaatgtgaagatgccttccacaccttgaggcaacatctgaccacaacacctgtgttagcgcagcctgacaaca

SEQ ID NO: 112008 - DNA, 707 bp, Zea Mays
ccgaagaggagcctagcccaacaccctcgggggctgggttaccctcagcaccaccctcgggggctggttcctccttagcaacaacctccaaaactgaagcaccctcggccgtgcccagagaagccgggtgactctgatcagcggcattgagggccagcatatcctcgcgagctagaccgccctccaaggttgacaaagcacgagagattgtctgggttgcctcttgcccgacaggatcgcatggcaaaggaacatcgtccgggacctctgaacagatgatggaactgtcaacctcaaggggctccgataaaaggttctcagggatgatctcttctaatggatggtcaaaatcagatatcgacaacccctggaggttgacaagtcctgataaggcctgcatccggatgtcactgctcctgctacgacgggtgttcttgcgaatcaagggaacttcttcttcttcctcctcttcatcatcatcaagcacacaaactgctaaccctagcatcgtcacaacctctaatatcgtccttgagggtggtgctcaccgggccatcaccgagtagtgatgttgaagggccagcatcttgttctaagcatgataaccgtcggagttgtttctttctctttttcttctcatcagacgtagctggagggttcgtccggcgtgatcgcttgcgacgaacaccttcaggtttctgaatttc

SEQ ID NO: 112009 - DNA, 612 bp, Zea Mays
cctggatgcagaaaagcaaaactagggcacagaatgcaggggtgtgcgacagtgcagtacatatggggttttcccgggccagacaccaattataaaaagcgcacagtcatcacccagccgttatttctaaagcgctggcgtgacatgtcatcgcccagctgttatttctaaaacgccgacatgccatgtcatcactcggacattatttccaaaacggccgatgtggcccgatttatcccagctgttatttctaaaaacgctggcgttaccagacttcactcggccactatttacaaagcagccgacgtggcccgttatcactcggttgttacttctaaaacgccgacgtcgccagcaatcgctcggctgttattcctaaagcaaagacgtggctccaaaggattcggctgttacctctaaaacgccgacatcaccagtaaccgcttggtcgttatctctaaaacaccgacacgacccgttatagctcggctatcacttctaaaggcgccgacaccgctaataataactcggccgctaccaccaaagcgctgacatcgcgaagaaggcagtctgaagcaagattcgacgattctaagccactactcaagcatt

SEQ ID NO: 112010 - DNA, 437 bp, Zea Mays
acaacctgggtaaaggaacctggatgccaacgagagtgacttctgagcccactacaaagaaaaaagtaaccctcagccgcctcgaccgagcccatgcttgaatcacttaaggggatgggtaaaacaaacctgaagcaccaatctcggtggcctggacagaggcggcgacagaaaggttctagacatcatgatcgcttcgccgtctccacggaagtaagcactaccctcctcttcttagaaatcaccttcattacacacgacatggaagcgacaaggcgaagagcactactagggggaagaggagtctagtcaagggatcatgacaaaagaagggtagacaatgggaccagtgaggcccaccgcccattgaatacaaagtgatgaaccttcgcttttcgggtagctccccgctcccgtgacttcctggtgaagcactg

SEQ ID NO: 112011 - DNA, 787 bp, Zea Mays
gtccgcgacgtgctgtcagggctgcaagaggcagtcaaccagtcacgcgagaaattcgaggcagagagcatggctgattggtacatgcataatgcattgaactagcttcatcttttcaacaccaacagaggcaacaaccgtgtcattgtttcaagtcttttgtttgtgagccattagaaaagatggtgactttctttcgtgccaataagatgtgatcagcggagcgtatatatatggttgtgcaaaatattgttttacattgtagactacactatttataaatgagtttgaaatagaaagtgagatatgatataagatatgaggctcacggagacacgtaaaaagttcaggagactttccctcctatactcccacgctcatgttgccatcgccactaaccacgacgacgccctttactattgaccaccagggttgtcacctcctcatgcggagtgccatcatgccactgccttgatcaagcaacaaccaatctcgcgattcgtagggtcgtgtatgtctctttcccccttgtcattaactggccccttgctagttgctccacctactctattagtattaggaggtgtctaggaccgttccacttcaagaaattcaattccacttcacgatctttattgtacgtagagtagctttgtcgtgaagttagaacaggaaaaaacattttacttagcatttgacttgacttcatctccataaatgatatatttttaggggagactcttatatccttgttttaaagcacccacatgtaggtgaccccactcta

SEQ ID NO: 112012 - DNA, 437 bp, Zea Mays
gcctgactgccttgagaggagctgaactattgttgtgaaataggggacgatgcagtgggatctttgacctgagggcaggcatcattgggccatggcctgccaagggcttgctgccatggctacaccctccctgggcatgggtgatgtgccatccctgcccatcacgaccttggttgtgccccttgcaaatgcgatccttgtccacgaaaggggtggtcatgccctccatggttgttatgggacaaccctacacaaagaggtccgggtggccgacaaaacatgtggaggaggctctgggatgcactaccagaaatcagctctttgcctactaatgcacttagcaaagagactgtcaaaggggcccactagtgctcccgttgccgagagctagctcaggtgacactcggaaaaggctctgtcatcgtcacttggcctcg

SEQ ID NO: 112013 - DNA, 476 bp, Zea Mays
ctgaagaacgattcggattgaaaggtcggattaccaaccttgttcttttttaggtccttgagttgattttttcacccgcatatccctttgacttctcgtgtcctgcatttttagcttcaactgccagtgatgtactgacagccctgctgtaggtgaggtccaaacatgttgccatcttccgctgaagtctgtcatttagccccctcataaaacaattcttctttttcagatctgtatccacgttctcaatggtgtactggagaggtgattgaatttattgagatactgcatcaaagtttctcccccttgcttctgtcggaggaactcttctagtttcatctggagcactccctccggaacataatgttcccggaatgccaacttgaattcttcccaggtaacctgacgtccaataggctggatcgctgaaaaatttgcccaccaggtactggcaggccctcttagctgctgagcgg

SEQ ID NO: 112014 - DNA, 674 bp, Zea Mays
cgagtattgtaattaggggtacctggattacgccctaatacgcgctcaaccccaagaccaccatcaggcacattccccgagatcaagaaagagtaaaccatgattcgcccgaggccctctcagcggttactcataactccgcctcgccagagcttgccctcggacaaggtacgaactcggggaaatgctcgtccagaccgaggtctcctctccacggaaccaccatttctgcctcgcccaagcccatcttgggcaaagaagacaacccgaaccatgccttagccaaagtccgaaggggacatgagcattcaatgcgcgtacctaccccatgcaacgtcgcaggcgaataggaacgacaggactgggtcccgttggctttcaccaacaatgatgacgcaacgactactgttcccccatttcatctaccaactcctgattggacgcgcatacgacaatgcgtgggctggtcctcgggaggaaactacacctcacccgaggtcggccttagcctcggaacaaactctgcctcgcccgagcccggtctcggctgcctgctccctaggaatcccgcagatgaccactcctcccactgtgtcctacacggctgcaagccccagagtaggctcaaccatagactcaagaagatctctgcctcgctcgagaacggcctcgac

SEQ ID NO: 112015 - DNA, 665 bp, Zea Mays
attttaggcctgacttagtcaaggaaatagaagcgaaggttcaatagataaggcacctcttgaaagaagctcaagcctggcagaaaagttatgcagacaaacgacgctgatccttgtttttcaagtcaaagattatgtgtacctgaaagtatcaccaatgaagggtgtaaatcgttttggggtaaaaggaaagctggcaccccgatatattggcacgtttctcattcttgaacaatgtgggccagtggcataccgactccaactaatagaaacattatctgcagtgcataatgtgttttatgtatcttaattaaagaagtgccttcgagttcctgatcgaatcattgatgtggtggatgttgccttggaaccagacttaacttatttagaacatcccattcgagttttggatcagaaggacagggtcacccaaaaaaggacacttcaattttataaggtacaatggaaccagcatactgaagatgaagctacctgggagactcaagatttcttggaaaagatttttcctaggttttagcttcatgtaacctgtaagatatgtacatttgtttgtaaagttggaataaaccctataccaccccctactctataagacaaataaggaaataaagatgtgatgtgtttccttttccattacttaccct

SEQ ID NO: 112016 - DNA, 405 bp, Zea Mays
gtgctgaaggtgacatggaaccttatttgccttaagggagttgtggacttgcctagaatgatcttgtagaatggcacataactcatcctcaatgatttcttagtcaagcccatcttttctaaatgtattggtgaagaggatgttcaagctgctcttatcgtcgatgatgactcattgtagtcacgcatcacccttagttgggttcacgatgagaggatatcgcccagatgtggcacatggtcagaatgattagatctatcaaaattaataggtacctctcaccatcgtagggactctggtgtagttggttacacaacgtagatatcctttgcctcaagcttttgctttcttttttacttgtatgagttagggtcaccgctgatgcatataatgtcctacattggt

SEQ ID NO: 112017 - DNA, 382 bp, Zea Mays
ttctaagagttaggggacagtgatccgagatagcagtagcattactgtgaagagaacagtctggaaaaaaatcctcccagtccgcagtgcagaaaacatgatctaatttcacaagagtaggcacctccctctgatttgaccaagtgaatcttctgccaatcaaaggaatctcttttagctccatagaattgacaaaccccctgaagcgacccatcattagcctattgatgttggaattattcttatcttcctcccggaggatcatattaaaatccccacataaaaaccatggccccacacattcatcacgaaccgatctcaattcatggataaactcctgcttaaaaatatcctggtgaggtccatacacacctgtgaacca

SEQ ID NO: 112018 - DNA, 286 bp, Zea Mays
tttgcgaagctcctcaatatttttctctagcctggccttccaccattcgctgatttcttggctggcctttgcgacctcaccattttctttgggttcggcaagttgtctccgaaggtcttcaacctcgactttatgagcttcggcctgggcattgtatctcgcctcatcctccttcaccttgctcaccaatgaaattaaaatcttatctttctccagaccttcgtttctcagctcaattacctctgagcgaaggttgccgagagctattgtgcagctttcgtcttcg

SEQ ID NO: 112019 - DNA, 797 bp, Zea Mays
ttcatgatggctgagtatgagtacaattcttcactcgcgtaaataaacaactaaaaaccggttacgctaccaagttcacgaatcagtagacttggttttattttcattttgtagaattaaacgtccctctgacagcaagcgcgagttcagcttcacaggaagcatggtaccggagtatagtatcagggccacacataccgcgaacaagctagtatcagaacgaagcaccaagaaacgagaatttcctagccagacgaactgacgaagtatgcttgctacaactaacgaaggcaaaagcaggaaacataacgcaagaaagaaagaattttttttgaagcatgagcatcgcccgtcacctgaggcgacctggtggttgattctgaactgctccccctccttctcgtcgtcgtccccgtcctgagggcatcggcacaagcacgccaagaagcccatctctcatcacccgaatcaacgcctacagcaggagaaggagaacacgaagcaaaaaaaaatccccaatcctgttaggctgctgctgctgctgctcggacgggggctttgggtcgccgggggtatcaacagaggactcgcgcagctgccgaggaatgtatcaatttttttcctggtgcgcccagaaggagatggggggaaaagcggagaagactgatgaggatagcagcgtgcggcctaaaagatttgaaaacatgttaaaaaaaaccgacggaaagcggaggacggaaaacggcgccgagggaaggcggaaaagtcagcatcgatgggacgtcggagactcacta

SEQ ID NO: 112020 - DNA, 1774 bp, Zea Mays
cgtcgatgtgattaactcgtgctctgccctggtactgggtcctgctctgctgactgttggagggggtgccttggaggtaggtgccgaggggatcttggggccattcaccgagttggagtaggtaggtccgggtgccttcaactgggggcagttattcttgaagtgaccggggtctccgcagtgccaacaggcatttgctggcggttggttgcttgcaaccgagggggactgaaaggaactctgactctgctggctgtaacgtgacggagtgggtccaactggtctattgaagcttggtcccttgggtggatgtccaaaggatcgagctctctggtgacggtcttgctgctgagctcggagaacctggaatttccacttgaggtgccctttttcttcctcttttgccctttccacatggatggctttgttggagaggtgcgaaaagctgaggaaatcttggctagcaaggatggtcttgagttctggtcttagccctttcagaaaacgggccatcttcctggtcttggtgctgacatcatcaggcgcgtaacgagccaactctatgaacttgtgcacgtactcactgacagatcttccaccttgagttagttcccggaattcatcttccttgagttgaacgatcccctggggtacattgtgctcgcggaaagcagtttcaaaatctacccaggtagcgtccctgacggcctcgctgaaggtatcccaccatgctagggccatcccagaaagttgatgagcagccaattgaacacgttgattttcggggcatccgatggcttccagtttcctcttgatcgtgcgtagccagtcgtctgcatcgaggggattgctagatccagcgaacatgggaggcttgagtctcagaaattctcccatcctgtcctgtggtctcccaccacctgggcgctggttttccagacttctagtgaggacttcaatgagtcgggtctgattggctagaacttgggccaaatctagtggtagttctggaggtgcggggaggtgggtctcactcccttctccgccagcttctccttctgctcctaggggaaatcctgctccaatcctggaggcggtaggcgtggttttatccgaagccatctgccaggggaaaagagttactaccatgcacatgccacattttttttcaacaagttactttattcattacaccagttcattacagcacacaactaccataagttcattacacgcgagtgctatctagggtactcccgaactccttctctaaagtgtccccaaattccttgagaaggtcatcaaggctagctagggacatttcctcggtgtcggacgagttccctatcctggtaggaggtagggatggaggggcttcttccttctgctcagtctgacatccttggcttttggtcttcttgcgggggcgagcttcttcagcttcttgtcataatccatcttcagagtgcggtaggcctcacgggtgttggtttcctcgccttctgctatctcgaggctctcttgaagggacgccttttcccttgtaagttccctgacttgatgctccagcctttccacccgggagtttaggtgagtacagtgggaggcaaggtcatcatattggttatcgagagtgtggaggtatccagccatgtagatgatggtggggtcatcctcggtagggtctcttcctgacagggcctgaagtcttttcctccaggcgggggtatttttgttgctgggtggaaagtagcgaaggggggtttcaaagatt

SEQ ID NO: 112021 - DNA, 540 bp, Zea Mays
caacccactactatactactctaatcctccacgtccttggtcgctccagatccactactagcttctggagggcgatcatccacgatgtccatagaaggaggggctccaaagatgtccatctctccatggggtcctctttcacctgcttctgctaccccagcccccatctctgcaactttgggtggtacatttggatgtagctcatcatataacacatgcacctcctcgtgcaagatgttattatacacttgcaggttttcaaaggctaggctcagctcatccacctgggctcgggcagtcgcctcacaatcccaggctatggatcacgaactcatagcctagtcaatagcctgatcacgctctacaatatcccgctgcacacgttctacttctcctgacaactcagcgatgcggcgactagcacgcacacgctccctacctccatggcgcaactcctcaaacacacactcgactctagcctccaagtctcctatgggatcattgctcccactgctgctcccctcatgacgaggagccaac

SEQ ID NO: 112022 - DNA, 555 bp, Zea Mays
taccccggtagtaccaagatgtatcgagatctaaaacaaaagtattggtggtatggtctaaaaagggatgttgcttcacatgtggcagtgtgtgatgtttgctagagggtaaaagctaaacattagagaccagctggattacttcacccactgaagatacccgagtggaaataggaagaaattggtatggacttcattgttggtctaccccgcacttctacagggtatgactctatttgggtgattgtggacagattaacaaaagtggctcacttcatccctgtgagaactaattacatgggggcaagctagcaaggttgtacatggcgcggatagtttgtctacacggagtgcctaagaagattgtgtcagaccagggatcacagtttacttctcggttttggcagaagttgcacgaatgcttggacacagttgaatttcagcttggcctaccatcctcaaactgatgggcgcaccgagagaaccaaccaagtactggaagatatgttaagagcttgtgctcttaaacatggtggcgattgggataaaagtttg

SEQ ID NO: 112023 - DNA, 324 bp, Zea Mays
tggtcatcattatcaggacattgtgcaataaaattaccaagcttaccgcacttgaagcatgcacgctttcctcttgatctgttcttgttgaggtactccttgtgtcccttcaatgcggtcttgaaacgcttgattacaagcgccatctcatcctcattaaggtcggtcgcctcaatttgcgccaccttaccgggtagcgctccttgttgaccgttgctttgagagtaacgagttgtggcttgtagtgttgaggaagaggtatgttggcgacatcgtcaatgtaccttgcctccttagccatcatacgtccgctcacaaattttc

SEQ ID NO: 112024 - DNA, 328 bp, Zea Mays
cctttggacactaaccaagatgaaattattttaagagaggcctgaagccaaaaaaagacaggctgctagcccaaccccacaagatgaggagctagatcaagagatcaacaaccttgaagccatacaccaacaagtggagaagaggagagaaaaaatgctttggtttctgggttgcaaaagaagattgacgaagcagctgaagagatgcgacacattgcgcatgaatttgagcacccagagtatcgacaaaactaaagagatcttcggcaggaaggccctaaccacgaagacatgtggtatgaagcttttaaccatgacaatattgctt

SEQ ID NO: 112025 - DNA, 368 bp, Zea Mays
ctgaaatccaggtattttttttaacatttcgaaatccaggggtgtcgtgtctttcttgcttgtccaaaccaaacagcgtggatgcatgatactgggctggggtaaactgacaaaatcggtatgggctgggctccatgctagctgagctagtatcaggaggcccccatgcataataattaataggacggaatcttgacccccggcccaaacatatttgaactccatcgtttctgcaggcgacgttggcgccaccggcagcggggaagatgatgaaggcgctggtgctgtgctactccgtcatcgtcttcaccttcttcctctcgtcgatcacgggctactgggccttcggcagcaacgtgcagtccaac

SEQ ID NO: 112026 - DNA, 293 bp, Zea Mays
gcattatcaagcacaatagcaaagattttatcagtaattccataatcagtagcaaccatttcaacacgctcagcaatgttaagacctgtatgagctacctcaattggtctaagaccgagcaacctcttttctaaacaccaatcagagttcacaaaatgagcaacaacactgatgtaatcctcttttgcctttccagaccaaatgtctgatgtaagtgcaacagatgaaacagatttgagtacattaataagttgtttagcacgattattaaaaagcctaatcaagtctctaac

SEQ ID NO: 112027 - DNA, 447 bp, Zea Mays
tcccgatccatggctatgtctccctcccctctcctcatgcatggccatgggctagaggccaagtcgctactcactctgtcctctttgcccgtgtgtgtgcaacaagtcggcgacctagctaggccatagtagcggctacgattcatgtcttgtgtgacactgttgaacaatagggcccacatggtagtgtcatttataggttgggccctcttatcagtgacccttatagtggttccttttctccttgcatgtaactactaactagcggcagcgctgccctctctctctctcatctattgtcgtctcgagctcccaaaccctagccaatgacaaggtctcaccatcatcgatctctgccattgccattttttcggtgtcctaataacccccatgttgttcacgaggaagtacggaacctagcttagttgatatctaagtgtgtaatct

SEQ ID NO: 112028 - DNA, 804 bp, Zea Mays
atatccgagaagggagattctccctggaaatgaaagggcctctataaatcccctccagggcagatttccctaattcctctcctcgctgccaaaccagtccttgatggagctgggaggtcgggcctcaagccctcaaacggtagctccaaacgcccttcttgtgataatgatgaggatatgccacctggcttgaccaacaactaggaaggacgactgatgtgtagaggagccgatgcgtcatcgcgggggagccgattgaagagtatgccagacgaggcgatcgatagaaacaataggtactccatgggccatcagacgaatgcggggaggagcccatgcgtcatcatgatggagccgatgaaggggcccgccagccgaggcgatcgacactccatgagccgattgcaaagtagatatggcaataccatcgaaatcatgaacggacggataactagaaaactccaccaacaacaacgcttattacggagtctaccatggtaaagcaaaggaccatgatgccctaacagatctattagatacaatactagggcagcatgaagattgcttggagagattgaccctaagagtggcaatgtgtcgagagatggttgtgttgatcgttggatgattgattacatgatgcgcccggttacatatttatattgtagaggatttgacccctacaacaataacatctaaatattagctgatgcccgtcgttgcagatcgcagatatctgaccgtctcattatttggaaattcctatcgactccgaacatatttggacgtgactcttgtggagtg

SEQ ID NO: 112029 - DNA, 324 bp, Zea Mays
aaaatttgtgcacttttggacccaagtgcaaataccaaagtaatagaacaccacaacttatgtgtttctcacatttgaggattttcaagtcaaattgtgggagttgggcttatttgcaaaaagcaccactcaaaccatataggcctaagtctgaaattcagtgagcttgaagcatctttggagccttatatctctcaattcataagggatttgcctagggtcaacacatcaagattataaagctactataggagcataactttgcttaagtgatcaaaccttggtgtcatacaaaatttggaaataaatagacctaaagtctgg

SEQ ID NO: 112030 - DNA, 308 bp, Zea Mays
tacaaatcctaccccccttaacagaaatctcgccctcgagatttgtaagaaaagggatacagaaggattggtttgtgattcgtcttttagtctataataggtttaagatccggagtttcatatatttctttttatagacaatagtgggtgattaggaaggcctgggtatatatgggtatagccaccttattatgtaggatatgagatgggttggttagggcaagaataacctggggtaagaaagtttatagtgagaagaactccgtgttggatggtaatgcatctgaagatcgagtttgacttctctc

SEQ ID NO: 112031 - DNA, 705 bp, Zea Mays
gctactgtcctcaccatatgtgcaagctcaacagagaatcaccttgggctcctccttaacaacccaagggcctaacagcttttggctctccccttctggtgactttgcctttggcttccggtccatcgagggcaacacctcctcctacttgctcgctgtctggttcaacaagatcagcgacaagacagtggcatggtatgccaagaccgctgatccagatccagcgctggtacaagtttcatccggttcatgcctcgagctcacgtccagtggagcgctctcgctccaggaccctactggcaaagaggtatggaatccagaagttgtgagtgcaacctatgcttccatgctcgatactggaaacttcgtactggctgctgcagatggctcttccaagtgggggaccttcgataacccagcagacactattctgctcactcaggtgctcacccctgaaaccaagctccacagccggaccattgccacagactactccaatggacggttccaccttaacctgcaaaataatggtgttttcttctatgctactgctgtgcaatccgatcctcaacatgaatataattggtccatgcctgggaacgccacaaatttggtattcaatgcgactggcatgatatacatcaccttggataatggaacacaagtaaaaatcacatctgggaagacaagctccatagcggacta

SEQ ID NO: 112032 - DNA, 457 bp, Zea Mays
caacgatggtgctgaaatccttcacgaaacgacgataaaatcctgcaagtccaagaaaactccgtacttatgtcaccgtcgatggcgttggccaactctgaatagcatgcaccttggcctcatcaacctcaataccctgtgtagtgacaacatagccaagaaacgatacgcgttcagtgcaaaaggtgcatttgtcaaggttagaaaataagcgcgcggcgcgcaaagcatcaaaaacagcacgtagatggtcaagatgttcagataaacaagtgttgtagatcaagatatcatcaaaataaaccaccacaaattttcaaataaatgggcgcaaaacctcgttcatcaaacgcataaaagtactaggggcattagttgatccaaaaggcatcactaaccactcatacaagccgaacttggttttaaaagcagttttccattcatcgcctaatttcat

SEQ ID NO: 112033 - DNA, 440 bp, Zea Mays
gtctacgactgcaacctgcgagcgccgcagctgcctcggtcttggacacccttgcgctgtggcaataatggctcgttcacctggctttctggggagtacaggcccgaagacagctccatggcgatgccggggaactgcaacgttgcgatgataccggtggtggcgtacgagggggcgaccgcggcagattatcagtggttcgtggagggaggtttttttcttagttactacctcacggacactgaggacgacgactactacgaccagtgccaagcttgctcgtaccgcgctggccacggccaatgccggacaattgtcagtgacaatgggttccagtgctactgctctgacggcgtctactcgacgacggcctgcggtgagttcggttccaaatattcatcccttgtgcatcataaagaatatagcaaaatatatgcttc

SEQ ID NO: 112034 - DNA, 297 bp, Zea Mays
cttttctggaacacttttttccatcaaccttaatggcacggtttctgaaggtcttgcttcaacatgagcagaagaagtgcttccagtgaccacctctcttgcatcttcaattttcccgccagaagcttaggcagaagcaagagtttttatggattccaaaacagcgtccaaaacgctagccatcctcctcttccttggagttgttgttgcagtagctgatagtttcggcaatgctgtcaccagtagcttcatttgctctgctgccttctccagctctagctctttgaccaggtctgc

SEQ ID NO: 112035 - DNA, 488 bp, Zea Mays
cttgggacttgcacagagttgatagaacataacatggtgaagagaccttacacaaggactttggccgagataaccatgtttgggccgactaatgaacgtttgaacacaggcagaagcaacgcccacatgttcgcacggtgaccctggtagctcagtgaagcttcacaacccattccatggacttgtactccgctaccacggcgtgccaccgctcgtcggagtatgcacctccaggggagaatgtggccagcccactttagaccatcgtcggccaattcctcctacccatagcaccaccgtgacctagtgaagctccccagctactcaattgaagctctaccatcgccaatgagccaaatcgctcaccgttgttgagctctgtcgcatgtgcacatgatctgagcgacttcgactacctctggtcatgacccgaccatcgacgtgacccttgcgacatccccgaccacgttgaccactctccaagaacc

SEQ ID NO: 112036 - DNA, 321 bp, Zea Mays
catctacacactaaggtgtacacaaccaaaaaggaaaaaagcgaaacaagctcatctcaaagagagctatcactcacaacagccttcaagtcatccactaaccagataaagctagaagcaatattaaggctcatcataaacaatgtcttcaggaagtacacgacatataagaatgccattattgccatgacttaaccaacaaacgccagatcaaaggtttttacccaagagaaaagaccctcaatacaaccaactaagactaggactacaaatttttcctcgaagtcaatgagcccgacacccataagtcccaccaaaatc

SEQ ID NO: 112037 - DNA, 710 bp, Zea Mays
aaaaggttgagaaatgcaaggagcttaacacaactgcgagagatagacgacgatcctccatctgtccaactgcgtcgtcctggaggtgaatggtcaaggtgccaaactttgaaagctagcgtcgtcctggagttacacgtaattttcaacctgtatattagggaatactgcatcttgcttttttgaaaactggtagagtgctgaacattttattgtttttctaaaggtagtcaagcaccgaacgttaggattgggttctgaagaatatcacgtcgtgcagccatgcaggcatggacacctgtaagggacgaagcaagtgtacgtaactgtgtaagtgacagactgactatagagcaagatgtcaaaagctcaaagaaaatggttttgctactcaaaaaccatgtgtcctttcatggattaaggttaaagacgattaataattgtcattgtttactatggtaggttaggttttgcctactttctgaccactgaaaaggcagtactttcagactgcacatatgctcatatcctactatcctaatgaaaaggcagtactaagtaggagctgccgcatagaagcatatatatgtaatcacgtccactaaggtagcttctgtcagtgtcaacgtaggatatttgcataaacgaatcgcaacaagccaacaaggtgcacgagctccagtgaaggagagtcgaagtggcaatgatcg

SEQ ID NO: 112038 - DNA, 1232 bp, Zea Mays
tcccaggcttgggataaaaatcttgaaactatttttattaattagtctgtgattttaggagtctagaaaaattagtctcatgattttatcattttttctactatttcctataaattttctaagctgacagtaagaagaaaaagagaaatgatgaatagtattgggccgaatctagcccaagtcagcccgcgatagaagaaacgcacgcgcactcgtgcccgtgttacagatttgcgtgaaggcccctaggtattcgaataaccagtaaagaacctcaggtactattcacttgtctcactgacatttgcacaaagacccctggacttttgtttcttcatggctctaggtcctcatcagagccgcgtcgaatacacggccggactagcagttccccgcagatggcgacccctccttgaggcaacgagcactcggacaccaagcgtgagcctacctaagcatatgccctcacttaattggactgctccgaccctaattgacgcttgttcatggctacgacgatgctagagctccggtgagcgtgttccggacaaccaaacttggtagcatttaaattggagctagggcgagtttcacttactcaccagagattgggtacacgcgtgaatgtgaacggagcgggtgtgggaaagtgggtcgacgtgagtgcgctctcagacgtgttctgcggcggcaaggtaatgttctcgatgctttatcgtggtagtattcaatcggttggaccgacgagctatgttaaccttcaaggatgctaaaacatgacacagaggggaatgaacggacctaggaatggttgatcacggccgggtgccacacggcggcgtaaatgaccaatttggaggaaaaccggaatttgtgagctttggtggataattggaagtgaggaagggtgcgttgggcgtgtaacaagagggcggagcagggagggccttcaatttatagtaactacgtgaggtaagacccctagtggtaaacgggcatccacagtgacatattgcgatgtggtaatgtccctaagcacgtggcatccttgtggcgagcggtggacgccgatgatgacatctcggccaggcatgaagcaagtgggtatggtggccagctcacaatcttatccgcattcacgatcttttcacatgcccggtaatatccgcgtcgatctgtgcacaaatcttcacgacgagctcgaatcaccgcgctcgatcactagcggcgag

SEQ ID NO: 112039 - DNA, 315 bp, Zea Mays
aagcaaacaaataggtctaaaagctttaatatcaacagcattaggaaccttgggaataagagtcaccacaccataattgagtctttcaatatttagagtcccagcataaaagtcttgaaaaagtttaaacaaatcggttttgattgtgtcccagaactcctgaaaaaattcaacagggatgctatccggaccaggagctctattatgcttcatagagaacacaacttctctaatttcttccatgtcaaaaggtctggtcaagcagcttctgtcaaaatcatctaacatttgcatattcagatcattcaaagaaat

SEQ ID NO: 112040 - DNA, 1096 bp, Zea Mays
gggataaacatgagaaagctatagagccagcagagaaaaaggaatactttgaaaagtaaacacaaatcactacaacacgtacagtttataatgccagaagacaagcaagtgaccaggctgctcgaatatgtaattcgtcacgctatcagtaaaaagcttacggtagaacatattgtcgaagcacaaaactttgctaaaggttaaggtatcctttggtggcaaccatctttggtggtggagaagatgaatatctatactgttgcccggataacctggaaaccgaaacatgtcgttacatggcaaaaaatgggtttccaaagctttagagtggactagccgctatgcccagtcgggatcacgctaactacttggcctagacaagcacgaaggtaacaatgctatttctgcttcggtgaaaggtcccttgtgggttttggtgtttggatgtcaacataattaaaggactaactgaggagttaagtgttgagcatgtactcaatgtaaagcttacaaagaacacaaggagtcaagtgtgatattccatataagctgaggtgaatatggattatggatatcacaagaagatagttgaaggatggacactaactaagtgggactcagtgtgcatggcttggaggcagtagattgaaccatggacgaaggcaagaaggacttcaaggtactagagcaaggaagaaggcaaagaggactaagatatctaaagccaaggtcaagaagaggttcttgcaagacgtcaagattgatcaacttgtgatgaggcatggtgcattatagaccacaatataagaacgtgacttgaagccattgaggtaattcatatggttttatggtttaagtcgtaaggctcaagatcctagctcgagtggagtaattgccacaagaatgagtagaaatatcaaagttaggacctagaagggcccaaagagctaagtgtaatttgattcagagtttgggtcactcctatgtttggaactatatccgttttgatcatatgccccccatgttgtcgcatatgcatacgttgttaaatctttcatttggtatcacaagaatattttttatcacttacatgtac

SEQ ID NO: 112041 - DNA, 745 bp, Zea Mays
agaatgttttccttgcccacaatgataggagtggacaagagaggtgtgtgggaagaagaaagtataccgacgttcggagtggtgtggtaggaggcactagaatcagcaacccagttggtgactgcgggaggagtcagggtcatcatgttgaaagagctaacaagggattgctgattccacccaccagaccatggggtccaggacgtaacagagtggggtggtagggtagaagttatggtttaggtgctgatggcatagagatagggtggccgaggggataccccggaacaagcatcgtcacgtgagccgactacggtggaggaagacactgggaaagtcctcctagggatgagttgggccacaaccggcccacgagttgtaactagagggctaaggaacgttcccctggccacccccatcatcgcgaccacccttccggcgacgacgaccacccccccagacctcgcacccttgggtccaggtaggtagggaggacacgttgagccgacgacgagagggatggaggagcgcgacgacgaggcccctagggtaagagtggaagaggatgagcgcgaggtctggccccccgggggtagagctgtagagagcggtagcgacgtctaagtgaggaggcgtgagctccttaaggatgaggtcgttgctgaccttgtggaaggacaggaatgggaccgagtaaatgatccaaatgtgaagaagattgtagcgctcgttgaggccacagaga

SEQ ID NO: 112042 - DNA, 423 bp, Zea Mays
atctgatgaaggaagatctggtatattttcagcacttcaaccacaaacttgctcagcgggaaccgaagacctgcctttaagaagcttaggtatataacaacttcgttttccttcgaatcaggggcaatactatttcctccaactctgataatagacatgtcacgaaaatacctccccctcatggcgtcaatatgactctatttgatagttgactttccaaagatagtatggcttgggtgccacgaccgttcctcagagtctttatccccactttccacgtcataactatcactgtcaccagaatcttcggataaaccctccatgatctccatagtaattttctctgtatttgtttttgccatggactcaataaatccagcaatgaaaggatctgcaacctttttctcttcatacagcttcgac

SEQ ID NO: 112043 - DNA, 533 bp, Zea Mays
ccatatccgcggttgctaccaatatccgcccgcgaccgtacccacgggtagaaatttatatccatgcccgtgcccatcggatttcggacgggtttcggatatccatcggataatgacagacacaatcatttatacaatatttcaataacataattagtcaaatttcttcccaattcaccatcatatacaattaaaacttaataaaagaattattatgggcctgtgagcctcggttaggagcactagagcttggaagggccagccgttagtggtgctacggtctctgagacttggaaggggccacgaggcacaacgtaggaagccagcaatgctataaggggcagtcaacagtgggaaattaggaccgttaggcgtggggtttatggtgttaggatttgttctttgctatgtaatatgtgctaggccaaaaaatacactatgggtcgatttcggatatccaacggataacccgcgggtagaaggtaatatcctaatccgtgcccgcccgacttcggatcggattcggatctgac

SEQ ID NO: 112044 - DNA, 528 bp, Zea Mays
agaggtataaagttcgtcttgtggctcgtggtttccaacagactcaaggacttgattatgatgagacctatgcacctgttgcgcatatgactactgttcgaaccttgattgcaattgcagcctcatcttcttggactatctcccagatggatattaagaatgcttttctcaatggtgatctacatgaagaagtttatatgcatcctcctccgggggttgatactccatcagggcacgtttgtcatctccgttgcgcattgtatgggctgaaacaagctcctcgtgcttggtttgagagattcatctctgtcatcacagctgttggtttttcttcttaagaacatgatcctgcattgtttgttcatgtttctctaaaaggtcacactttacttctattatatgtggatgatatgctgattacaggtgataacttagaacatatttctcatgtcaagcagcatcttagtaaggaatttcagatgtctgatttgggtccacttagctatttcttgggcattgaagttcagc

SEQ ID NO: 112045 - DNA, 479 bp, Zea Mays
tcaggcagcttcatcttcggtgtgccggttccattgtaccttattgaatttaagagtcttttttcgggtgatcctgtccttctaatccaaaactcgaatgggatattctaaataagtcaaatctggttccaaagcaacatccactacatcgatggttcgatcaggaatccgaaggcacttcttcagttgagatacatggaacacattatgtactgcagacaatgtttttggcagttgaagtcggtatgccactggtccgtatcgttcaagaataagaaatggactaatataccggggtgccagtttcccttttaccctgaaatggttcacacccttcattggtgatactttcaggtatacatgatcattaacttgaaagaccaaaggttggcgtcgcttatccgcataatgcttttgtcgagcttgtgcctctttcaagttgtgtatgattcgttggactttttcttccatctctttaa

SEQ ID NO: 112046 - DNA, 702 bp, Zea Mays
ctagatttacatggtaacaagattgaagggcggcttccgaggggcctttctaagtgctttcacttggagattttggacatcagtagcaacagaatgctgatacttttccttcttggttgaggaggctttgtaatctttctatactactcctaagatcaaaccaattctatggcaccattggtgatggggataccaaatcggctagtgagttttttcctagcctgcaaattattgatctttcctcaaacaacctctctggtgttttgagggcacaatggttgatgcagttgaattcaatgatggcagagtacaatagttctggagaaactattgattttgatagcaataattattcatatgaaccattctatcgatattctattgagttcacgtacaaggggtattttatgacatttgaaaggatgttgactactgtaacactaattgacttctccaataatagactggagggcaccattcctgaagctcttggaagccttctatcactacggatactaaatttgtcgcacaataacttcatcggaaatattccagctcaacttggtagcctcacagatttggagtcactagacctctcctgcaaccaactcttaggagagattcctcaagagctgactgatctcacttttcttgcgaccctgaacctatcagacaatgacttggtagggaggataccacagt

SEQ ID NO: 112047 - DNA, 643 bp, Zea Mays
agagagaagaagagcttcgcatagacttccctcatcttttccctagaccttcttaaatctcgaggacgatattctttctaagggggtaggatttgtaatacccaatttgtaaacaatctgaagagagttgatctcactatgtgtttttgccccatactcattgtaacctggaaataaaaccattgcatcatattggatctttgtttgtgcatttaataacatagtaaaatggataaaaatataataataggttgagaattgggatttaacccaaaagtgcaaattgggagaattggaaataaaatagaaagagaaatactatacaaaaccaaataaaatttagaaataaataaataatcaccataccatgttcaagctgaacatttaatgtgaagatgaattggctacagattttgaattggaattgaaatttgaattggaaataaacttgaagaaaagaggagcagaaaataaaaagaaaaaggaaagaaagtggcaaaatctgcgcctgggcccatttccctatctcagcccattttcccctccaagccgtaggccacttcctcacccgcgccactgtcacgcgggcccgcccacgcagccgctacatcacgcaccattccgtctcctggcacactgtctc

SEQ ID NO: 112048 - DNA, 285 bp, Zea Mays
ggtagtgatccagcattggtgggtagcgcaagctgcaacccagcccccgagggtgttcaggtgagctctccttcccacacctccatggacgtccatgttgggtcatctccacctcgatccgatggggtgacggcgatgcatgcttccacggctttgaacaaacaagtcgccttggaggtcagtgagctagatgcgagaagtctattatctgctggcggggctgggctcgcctctgacaacgttcttcaaattgttcatgttgatctttctccgtcaagccatgac

SEQ ID NO: 112049 - DNA, 943 bp, Zea Mays
gaccctaaaatcatttggaactgggagaaaagggtgtcctaaacgttgctatcagaccatggttttctgaacttagttcagttaactgaaacacaacttcagtgtttttcgcccgactttggagttctctgatgtttgattcgtggagttataggttgtagtctccatagaaaagttgaagagcttagatcagtgaataagtttcctaaagtgagatcgacttggtgttgtatgaaatcgaagtaaaacacacccaaagagtctctatcaattcggggtgcatgtttcagtttggataactaaacttggtttagttggcgtgaggtgcactgaacctcaccgtcgccaacgtgctttgcgcgtcgtgatttggtttgagtcattagattcgtgctatgggcatgcaatcaatagcgccactgcatcgttctacaggttgaacaaagatttggctttaaagttatccgctcgccatgccacttcattgttggccctattctggataagctcatcgccacaacgatcgttgtagcttcgggtgtggccacacagctggtcagcttgggcacgtcctctgctgcggtgtcaaagttctaggtgtttgtgtgccacgcaatcctgtaatgtcgccattgttttcacttggagtttcctgtcaccgcgccatcctctctcctctctatccaaattgaccaaagtgcgagtagcttccattaaactgagcaaaacgtccatctcacctctcccttatgcgccttttctaccggtcgtttcactagtttacccagcacagtcgaaactcaccggatttccctgagcttgctcactgccatcgctgtgaaaatgcctcaccgtggccgggccatcccgagcatgtttcatcccgtggcgtccatgttttagttccctctagtagtattgaaggtcctcgacttgattgttt

SEQ ID NO: 112050 - DNA, 361 bp, Zea Mays
gacgagcgcaccaccgcgtcggggccctgtgccgctgcgccgaccgtctggggaggaagacgccctctgggccgtccgttgtgtaatgagcgacttagattagatctagccgtgggtccgacatgaaccattgatcacagatcatggggctcagatagcacgggctctttaaccacgatgacctgatctgagccgtccggatcagatcgtgcggccctaatttctccataccccttcggccaacctttttgctaaagagtccctgtagtttatagaaatcaacccgccatccatgtgtcactattcactgtgtcttggcggtcttgcgagttagccccctgcacatttcggtaattgaggc

SEQ ID NO: 112051 - DNA, 436 bp, Zea Mays
gtgaagttagtgtccctatcaggagaagaagtgttagtggaattggtcttgtcaggaccgaggaaagggagttgtcaccaagtcaccgctcgtattgaggagattaaaccatcagaggctatcagtgtagtatcagatttcccagatgtgtttcccgaggagttaccaggtatgccacctgaaaggaaggttgaatttgccatagagcttattccaggcaccgcccctatttccaagagagcctatcgagtgtccggaccagagttggtggaactcaagaaacagattgatgagttgttagagaaaggctacatcagaccaagtacctcgccttgggcagccccagtgctgtttgtggagaagaaggatggcacgaagaggatgtgcatcgattatcgagctttgaatgaggttactatcaagaacaagtaccccc

SEQ ID NO: 112052 - DNA, 671 bp, Zea Mays
gttgttaatatgcagtttgatcttaatattccacctcccatgggggaatgatgaagaaaaccttgataataatgatgatgctaggtgggatgcttggccaattcattaggttcggcctcctgaacaagtggtgaatgctaacaatgctgaggagcaatttagctttcagctctctggccttgaggatttgccttcttcagatgagtcggtgggattcttcaatgatatcataatccccaagggattcacttcccccatgtggaagctcctgaaccagctgaagcagtgctggccattccagctttccccctagatgacatgcaaatggaaggaaaccatgaccaggggatgtaaacatgcaaattgaagaaaatatcaatgtgggccttatgcagcacctggagcactccacctctgacccagcaaatgaggatttcctggctagaaagcgtttcaactcctggtctggtattctttcgggcagcttagaccttgtcactgttccaaaggtgtgggctgcatttttcatgggcttgttattgaggtcggattccttcgaatgggcaaaaaaattcttaacgtcaggtgctgtctctgctcttgtggagcccagcatggaaactgtctcgcttcttattcccccaaagtgcctgccaccacctagccaagag

SEQ ID NO: 112053 - DNA, 462 bp, Zea Mays
aaaaaagtgtcccatgcatgatattgtgctcctatttatagtgtcgtggggtacatcttcatcaaaattacaattacgatcttaagtctatacatatgaactataaagatgattaggggtattatcgtatttttctttgataaccttgtggaacaagtcttaggggtctcgctcttctcttgttagcttcttcgttgtaggcgcatggcgtagatctgatgcttatagcttcgcctttgcggtcgtgatcatggctaaccatctccgaacgaaggtttccttcggcatttacacagttatacctaaaacaaacttaagaattattggttgattagtatttcgaggaccttcgcctacggagcccccccaacagagtgtataaagtaattatgggtgtttgtaaacaataactatcatattcaggagagatccttaagaacatctccaatagttacgacgacg

SEQ ID NO: 112054 - DNA, 465 bp, Zea Mays
aataggggtggtgcctggtataagctctatggcaaattcaaccttcctttcaggtggcatacctggtaactcctcgagaaacacctctgagaattataatactacatggatagcctctgatggtttaatcttctcaatatgggtggtgacttggtgacagcttccttcccttggtctagacaagaccaactccactaacacttcttctcctgacaaggacactaacttcactgttctcttgtcacagctaagactgacttgatacttggttagccagttcatccctaggatgacatctatagttgcatcctggttacccataactattagatcagtgggtaactctatcccctttatttgaactcttgcactagggaaaaatctatttgtttgggttcttccaccaattgaactaaccctcataagtggatacatgggtgctactggtatattatgtgattctac

SEQ ID NO: 112055 - DNA, 535 bp, Zea Mays
ttgcaactttcaaattataggatctttgcccttggtcaccacatcaatattatagcccaattataggagaacaagtttgcttaagagtgcaagccatgttcttgtgaaaaattgaaagataatcatgcccaaagatggactgtcaggctaatactgtctgaatttcagactaacagtggcctagacccaagtttgagagccagtttgaccttgatccagtgctcaaataagtgtaatccctatagtcgatttgtatctggtaagtagcactacaactttgatgcagagacttgggtgagtcgccaagtaaaatttggagaaaatcgaccctcaactccggctgtcaggtgctctgaatggggatcgccatggtacagtaactgtgcggatcaggacgccagcgcagcaaagaaatcttcaccgtcggcgaccctcgccgtgattcacgccaccgctgtaggattcgcgtcgccgatgacccgataaggccgccaggtaaaagccatcccctggggataactccggtgactcaccg

SEQ ID NO: 112056 - DNA, 456 bp, Zea Mays
tgttgctccagaatcaaataatatagctgcaggaactgaattaatataaaacgtaccggtagtaatatcagcacccgtagcagtagcatcagcactgacttggttgactctagcaatactgaaccccctgccagaagccagagtctgttgcttgccctgaatattgcttcgagcgggtgtgttggggttcctcttcgtacaagcattggcgtagtgcccaacctcaccacacttgaagcaagtggtgactgtactatgtccaacaggtctcgtcggggtgccagtgggggtagcctgacgagtatgcggagtctacggagtcgcctgtggtgtctaatgagcaggtcgttgataggactgttgccctcctctaggacgagctggtgtaccctggggtggaacatagcgaggacggatgctactgctcccctatccctgggtgatagccttcctctt

SEQ ID NO: 112057 - DNA, 608 bp, Zea Mays
cgcctccaatgaggccttgagcccgctcatccgcggtgatgtagatgtacgcctccccgaacagttgttcagaggtgacaggtgctttttgatgtatggctcagacaaagaccgtgtcgttggatccccgatagaagtcttaaatcgcagccgcctcagcgagcttggggatagggttcctcattatttgaaaccttttgatgaacgaacgaagagtttcatcattctgccgcctaatggatttgaggtccctcggctgtgccggtttatcagagagggactggaagtttgcaataaaccggtgactgaaatctccccaatcgttgatgtagtgtcgaggcagatgtcagagccattacagtgcgtcgtgccctagaacgatgggcaagtacgctgccatgacgtcctccattgccccagcagcccgggcagcgattttgtagacggccaaccaaccccctaggtcatgcttagacttatatttgtcgacgttggagaccttgaaattaggaggccattggatgggctggaggcgagaggtaagcgcggagaccctgcacgtatcctcttgtcgatgatcatgtcgtcgatatcggactgttggttga

SEQ ID NO: 112058 - DNA, 389 bp, Zea Mays
cccaaatagcatgtgttaaacatatacttccaccccttccaaataataatcaatatgtgtaacttgatcaaaccacactctcaacatatgtaattaatagaacatgaatgtcatcaagcaacggtacccaacaagaaatatgaggatgaacacaattgacataaatataatcaagtataggacacattaatcaaccgacgagataaccatccctattttacttgccttcaccggggaatttggacaaagccctaagtgtgatacggaagtccaccacctgtttttgacacataacttattgcacaaatccacataacaaactctcataaacgacgccgcacctacgcacaattccgaacccattgcaagcgacttatcacccccatcac

SEQ ID NO: 112059 - DNA, 539 bp, Zea Mays
taaaaccgggtgtgatagcggttgctcttcctagtgcgaggaccaagtacaggtagcaaagggtggtgtcgaagtatagcgtgggtgaggtttcgcgaagtggtaggcaccgtcgtatggggatggagcgggaccgtcttcgagtagaccggattggtaaacgggaactattgtcctcgccgattgggacgagcataggtgagggggatctgtgaaatctttttgagggtgaggaattgagaataatgttgttcaattatagggagttcggtatcatcccgaaggttgagccgatgtagtatatggtgccctcgttgtgtgtatgtaactgcaacttgtattgtaatgtggcctgttggccgttttcgcacgcctgtgctgatccggctgcactcgtacgcgacttttgcgtcgagtgtcgattgacgtacatgttgcgcttatccggtggcacccttaggtgacttttgcacggagtgtcttttcggaaaaagacttcgattaacgcacttgtgctattccggctgcacctttaggcg

SEQ ID NO: 112060 - DNA, 345 bp, Zea Mays
gagccaatacaccttatgcattcattgaatttcacctcgcacatagtgtacggttgggttcattacttcgaatagatgttttcgagtgaacaagtaggtttgtaatgcaattatgtgtaatgtgtttataaagacattttatctcaagaagtgttatgttctgcgcataaataagaagtatatatattttctgtagtaaggattgattgtgagacagtgtgtcacaagaaatggattagtgcgcatataggagatgaatgtgtgtgatgaaatggtgacatgccttcgtagtcatcatgtcgtctgtttggtgacttagccgaaagtcgtaaagaaatgtcgctt

SEQ ID NO: 112061 - DNA, 495 bp, Zea Mays
tcatatgtatctaactcagatggtcaataccaggaggggtggtggaattgatttacctcctagacgacacactcggaggatatttagacaacccagccacaaccagcagagatgaatcctcctaatccttcaccaggcagagttgacccactggttgcagctcagatgaggatgatgcaacaaatggcagacactatggtagatatgcgtgctcagatgcagcaaaaacgccaggagatgcgccaggaacgagaagagatacggcaggagttgtgccaggagcgagaagagatacgccaggagagaagggcgcaacaacaaccgcaacaacaacagcaacagcagcaacatcaacaagtaccattgcctccaccaccaccaccagttccacctcctgataagcaccgggaacttatgagccataagccaccgaccttcgctagttcgccagacccactagatgcagatgattggttgaagtcaattgagaagatg

SEQ ID NO: 112062 - DNA, 565 bp, Zea Mays
acctccatcacaccgtcatccactggctccgataacaagccctctggaaccatatcctcaagagtctgatcaaaattggccagggacagttcttgcagaccaatgagagcagacaaagcaggagagggaactccactactttcaccactggcgatgaactgccgactgtttttccgagtcaaaggaacttcatcttcctcctcctcgtcatccacattggcaacacaagcagcacacccattgggatcagcaatagatggagcacccacattgggatcagcagcggattgggtacacccattggggtcagatcagtaaattcagtcacatgcacttcttcagcagcaggaaccgaggtaccagcgtcccgatccaaactggatacttgccggaggcgtcttcttttcttcttctgctcatcagcagaaggatcaggctgattggctcggcaagggcgcctcgggcgagtactggcaggtttctgagtatccaaagttgtatcagcctctaggaggggcgccactaccagtgccccagcaggagcagcatcagaagaatcctcagc

SEQ ID NO: 112063 - DNA, 327 bp, Zea Mays
gtactcgaagaacgaagaagaacatgccaggcatttgcatgtagtgcttcaacgtctgcgagagcaacacctttacaccatgttgtcaaaatgtgatttttggctaaaggagacccaaattcttgggtcacactatctctcaggcaggaatagctgttgatcctgataaggtgcaagaagtgatgaactggaagccaccaacgactgtccgtcagattcggagttttctaggattagcaggttattatcgaagattcattccggatttctctcaaattgtgaagcccataactgagctgctgaagaaagaagccaagtttgtttggg

SEQ ID NO: 112064 - DNA, 560 bp, Zea Mays
agttctacaactagtgatccttttctaagtcattgtcagcatatatcaaatggatcacaaattgcatagatgtatcatgaatcctccttttaacttagtgcacatcaagagagatatcgattgataatatacgcgacactaagaaacataagtgttaattgaagttattcaatgatcaaacaaataacagatgtgatcaaaagaacaacatatgcattagaataggagaatccagtaaatatgctactttagcaatgaaagcaacaatccttgataagagcgacattattttaacaagttggattgatatgtagtagcatacatcatgagaaacttattctcatacaagagactatatgagattactaggataaagcgatagtctcaacataatcaagatatagaaataggctccccctagagatatgcatcaaagaattttaatgagatgaatagatgcattcattttagagacgtgtagggagaagcattatacaacttgatcaaggcttataagatttgcaataaacaccttatgcctgatattctcacaatgaaaa

SEQ ID NO: 112065 - DNA, 835 bp, Zea Mays
ccaaagcccaggctgaagcccagaagtgcgaaattgaagaccttcagaaacagctggctgaagcgaagttaaagtgtacaattgccgaagctgaccgagacgccagtaactattggaaaaattatcgggagaagacagttgtagaaattcggccttcaaaagagaaatgctacgaaaaatccatagaatgtgtgcaaaaaataaaatctagcttcgccaatgttggcgcattctctagcgaggataatttcgtaaggggcgatcctgaaggcccaattgactggatcagcaatgaagctgaaacctttgaagaagttttgagtgggcgtggggatgtctgtgccttctcaggtgccaggggaatcgcggctattttggagaaatcaggctgcgatcacgtgaaagctttgactcaaactgaagctgccttatctattgaagatacaaaagacccctcggccgaagcaagcttagttggcgggaaattcttcgctgatatctgggaaaatggcggccgagagatggcgcacaagataataaaaaagagtgaaaaagattctcatgatgcaaaagaagcgacgaaggcagctgagaaagctgcggaacttgaaaggcggataggtattgcttaattgcttttgactttgtgttttatttctgcgacttcgaacttatttatgttttgtatcgcagctgagctatctcctcccccggagcctttcgagccaacagccgacccagaagcaaagagagaggaagaaatcactaaaatggccgaagctattttggataaagctatttctcaactgttaaacgaagctgcggaagtagtttt

SEQ ID NO: 112066 - DNA, 452 bp, Zea Mays
catacattggagtagaatgtgcttttgtcaagcaactcatgatgtgtcccagtgtgtgctactcttccattttcgacgacaactatagtgtcagcatttacaattgtggacatcctgtgggctatcaagataacagtccttccacgcattgctctctcaagtgcatcttgaactagcttctctgattctgaatcaagggcacttgttgcttcgtccagaagtaggattggtggatccttcaacattgcccttgcaatagctattctttgtttctggccacccgataactgcacacccctttctcctacctgaaacaatttaattgtaggaagtcccagtggggatcatttttaaatctttgaatgtctaataatgtggaaaaatccatgattctcctatgggaataaattgcgactatctgtaattttaaagttctattattaatgcattac

SEQ ID NO: 112067 - DNA, 300 bp, Zea Mays
gtgatatgcgcaggagggcaagtgcgtcgggtaccacccccttccctcccatcctcctttatctccctctccaagcgatgattgcggggaatggtagagaaggaggaagacgtgggatgggggcgcgatcatcgcgcggtgatgagggcggctcgcgtggtgatgagggcgatgacatttttggaaaggaagggcggcaagtgcgctggagacggacggtggcaggggagggggcattgatggagatgtggaggcagaaccgtgcaccatatcctgtgaacgtctacactactgtcttat

SEQ ID NO: 112068 - DNA, 773 bp, Zea Mays
ttgaagatgggctgtcagggtgtgttcttatctgatttttgttcagaccaatgtaactctgacagtagaatgtggttcactttggagccctactgttactgatccatagtgttttgggccaaagtgtttatactaaattggtagaccatagaaaggaaagaaaggttgttgtggagtgtgaggcctggtactatgcaaaatagtgagtaaaatgttcttaaactagctctgtcaggttgtagtgagtggtgtcagtttcaactaactgaatttgggttcagtgtaatgtgctccacttttgggcaccataactttgaatatatgcatttttggcctgggaattctatagcaacgtgaaagagctatgcttggtgaaccactttgatgtagtgaggtaggtctgtccttatgtagaaatgggagaaaaggggaggtgaatttggttctgtagtcgaactgaagaagttcagagcagtccaaaatatctgaaaatatctcagtccactagtttatctagggagttctagggtgtggcatacaaaaaggagtttgtgtgaagagggaagtagcatggcaccagtcgataatacccacgatgagattgaggtggtgtaaagcttatctactagccgactcagctactagcttatctactagcatgactcagctgctgtcacacatgcagtgaaggtgtgcttaactcttctcctgtgctttcaccttgcaaggtgaccatgttggaaatctggccactggacgaaagcaatacagac

SEQ ID NO: 112069 - DNA, 917 bp, Zea Mays
caaatcatgagtactaatatgctctgccagaaccctgaattccacttcggctaactggcagggggaaccgagttgcatatcgcataatggtcgtggcatgccaaagctcagtctcatgagactcatcaccatagtcacaagcttctccctcttcttctcgttagctttcacataaaaccattacttgtccaactagtcagccacttggtgctatatccgatcacaggagctttggtactttcaggtacgcaaaattgtaacattcgaagttcttatgtagtccatcagctctagcgttagtctagtagtggagctcatgcacccggcgaaatccttcagcgttgacactcttcccttggcttcggagagcccatatatatacactaattctaactatggcatttgggttgagttcataaaggtagatttcaaacttctttaaaacttcaccaatcatctcgtacagagggaatcgaagacctaccctgaagaagcttttaaaaactacgacttcatcatttctttgttctggaatcacttcttcccctgcaaatcgaactagttcgtcatcatactctccaaaatatcctaatttcttcattataaccagatcttcagctttaaccgtggactttccaaactcaatgtggctaggtttgctcggacttaaaatgccatcatcatcttcgttatcactgtcagcttcggcagtagtcggttccacttcagcaacaacaacatcttatgttgaaactgactcttttttcttctcgtacaactaacctagaacgtttcatcatttctaagataggggccgtctcagtggctctagcttcttctccttcgtgtgctactctggcagtagacctcactatagcatttcagtttttatgagatgaagctacactccactaatt

SEQ ID NO: 112070 - DNA, 433 bp, Zea Mays
tcattccagtagcattaaatgataattttagcaccaaacaacatgttatggataacaattgaaaaataagaatttatgataatatataaatccggatgacccatgtgttagatatccattgggtaacgggtatggataccggatatacataccagcgaaaaaatatccgcggataccttattatatccataaccgtacccgcggataccaaattctaccatacacatatatgcagtggataattatctaatacacatatccaatgaataattatctacggttatttactaatactcatacacattgtcatccctgtggtggaccgacttggttactgatccgatagcgtggcgggcctgtgaatcctgtagcatcttggtgggacgaactggccatggcaagcgggccacggcagaaggaccaagagcagcta

SEQ ID NO: 112071 - DNA, 348 bp, Zea Mays
cggaagaagatggtcgacttgcgacatcaggcgcggcaagaacatcagcgacaatgtcttcaggcaccatgacgctaggcctctgcattaggatccgcccagtgcgaacaatcttatccatggccttgtcgcacatcgccttcataatgacgcggtcatcgtccaaggccttgatgttgaggcgggcggcctccagctcctaagtaacaagcttcttggaagcgcgtagctccttaatgacagaatctttggtagacagcaacttaccaagtcgggacatttcagcctgggacgccctcagttcatcacggtgatggtccatgtccgacatggtgaagtggtgactcc

SEQ ID NO: 112072 - DNA, 295 bp, Zea Mays
aaacaacatgtcggtgaaagaattgagtattggcatctctttttaggaattgaattcgggaccgtaaatgtgcgatagttctttgcaaagacgcaagcaccagacaatgctgtttcagctgcccccataaccaaagctcctccctggacaaggatctgatatcttgcgccatctccagcctatgcaacacctcacgagcaagacccaactgggcattgacattccccacctctttatgaccccaggactgcaaacacttagctaatcttttaaacttcagtgatatcttctccaa

SEQ ID NO: 112073 - DNA, 414 bp, Zea Mays
ggttttactaattgatagtgttcttgttcagaatttttaattatgaagagaagcggagacatacgatctctttttgagaaagcaacaaagaaggcggctagtgctcctttgaaccatgcgacacctccggttgaaactactgtgggacaacaaaatcaagaagaagatagagtagaagttgaagaaattgcagatccttcgtcgtcaccgtcgccttcgttagtgtcactgccaatgcctgcatcaaatcccccggtgtatgacatcaatctgattccatatgatccaggtgaaaggctgcccattgaaaattatcatgttaatgatcaggatgcaatccgtagagcatatattactaaaggtccttgcaaaccttatatacatgattttccataccgaaatattggagatgca

SEQ ID NO: 112074 - DNA, 291 bp, Zea Mays
cttagcatcactatgtacttgctcggtagtaggtagaggcaaaagatcaataggagcacgagggttaaagccatacactacctaaaaaggacttaccttggtcgtggagtgttccgcccgattatatgcaaactccacatgcggcaaacacccttcccacattttcaagtttttcttcaatattgctcgtagcattgcagacaatgttctattcacaacttccgtttgtccatcagtttggggatgacaagtagtagaaaacaacaattttgtccccaatttgttccatag

SEQ ID NO: 112075 - DNA, 420 bp, Zea Mays
cagtgaaagcacagtctctcgtggtcctatagcctcaatccccacccccaatttcatccagagtcgtcgcaacaccatttttccccaaaattggtctccgccaccgtaaagcaccactccaccgtggccagtccgttctggtaaggcaccatccgattcgcgcgttgttctcacgtccatgtatgctggtgatgcttgccaaaccaccgaattgaactaggagcccgccaattgattggaacacgagcacatgtccgcgccattcactgtcctcgcggacagagcttggcagatcaccaactataaaattgattggggggaaatggtccttagaacttgaatttggtttcggccaaagtaggacaacaatcgctgagcaaaatagccggttcacgtgctcgtcggagtcctgcgcatcgc

SEQ ID NO: 112076 - DNA, 654 bp, Zea Mays
gagtataactcaatgaacaaccttattacttgtggccaaaaaaagttcatgctaagtaatgaacagatcttgcctgaattttgtgacatttagcacaaaatcagcctcttgaaatatagaattgatttaattgtttatagtgtgcacacaacctgaatctttctaattcataattaaggatcaaacaagttacctctgtttctgttctttaatatccgtgcgcataacatgaacatcattgtgggcggtagcgttttgggaggcagatacgtggagcaaaaccaggagttggagcatgtggagggaggatctagagaccaggtcgttggtgaagcggtagaggaggaatgcacgacggaggcgcgatatcagaccggagggaaaggggagcgtgacgaggaggttgtagatgattgttccccgctccaacgacgattctgtcctaggctcatctgactccacagccaccaccgtcatcgcagcttccccgttggccgcctttgcccatttattccctccattggaactggcggcaagacctgatgcaccgatagagcggcggatctggggagcatgcggcagtgtggtggcgaagaggggacctaagggagccaggaaacgacagatcgggtctgatggggtggaggggtggag

SEQ ID NO: 112077 - DNA, 479 bp, Zea Mays
gatgagagttgccagatagcccttggtaaccttcggtcggaggttatcaaactgaggaatgaagctgcagagaaggacaaaattctactttccttggtggacagagtcaaggctagagaagccaatcttaccgcgcagtccgaagctcatatagccgaagttgaaaatttaaagaaaaagcttgccgagaagaatgaagatttcgaagtggctaaggcaaaataggaaataagcgagtggactagcgcaaggttgcaaaagaatgtagattagctttgggaatcaaatgaaagatattatgaaaaatccttggattgtgctaagaatctataggatagttttgcaaaggtgggtgcttactcatccgagcaaaaatttattagaggcgatctcgaaggaatcatcgaatggatcggtgaaaaagccgaagcttttgaagagatccttagtgatcgtggtgatttctacgcctttgccgg

SEQ ID NO: 112078 - DNA, 573 bp, Zea Mays
tgaaaacaaaaaatcaacgacatatggctagtttaatctaggtgtgagtaattcttggcattcttaatctggcattcagtctttcgcacgatgctcccaaatggaaaaagctccaacaaacaccatacacagggaagtctaaatagtcggctagaactgctatttagctattaaaaaatccatcaatccagggtttacaaaggtgagggtaatcgtcatagtcgaacccaccagatgccgcaaaaaatagtgccagcgatgtccaggtaagcaagaatagtacctaagactaccaggaaaaacatgcgaaaccaccaagaatgaagcgctaacccatgattcccacagcggagatgggattgtcgcttcaccccgcagtggtgtcatcatcctgttgcttgcggcgtggcccaaacaaaatccggtatgggatggtgaccgtagcctgcagcagatatcaagagcattggcgtcgaagaagctgaagaagcaaattgcgcgaaagaaatcaaaggtaaagcgaagaggatttctcacctattcctcgcttgctacagcaagcgcgtgtcgcag

SEQ ID NO: 112079 - DNA, 777 bp, Zea Mays
gctacaaggagcaagggccagaatcctcttcatcgccgatggaggagatcagctcaagtacgcgttgcaacttttatttccagcttccaacaatgcagcagagtatgaagccttgatacatgggctcaacattgctgtatcactcgacatcaagagactaatggtatacagagactccctagttgtcatcagctaggtcaacaaggattgggactactccaccaattcaataagcaattactgtgtcgcggttaggaagattgaagataaattcgaaggcttggagttccaccacatagaaagagattgcaatgcagcagcagatactctaccaaagctaggatcgagccgtgcacaagctccaccaggcatctttgtctaggagatacaatagtcgagtatcacatcatgaccaatggaggaatgcaaggtagtggagtagacagaaccagacccaaatgactggaggatgccatttatcagatatatcaagaacgaggaggaaccgaatgataaggccgctgccgagcgcactgtgagatagtcggcccactatatagtcataggagaagtcttgtacaagagaggggttgttggagtcttcatgaaatgcatcgattcaagcgtcaggaggcgtttgcaggaagaaattcatgcagggcaatgtggagtacatgcaacatctatgactcttgtgggaaggccttcaggtcaggtttctattggccaacaacaaagaaagatgcactccacctagtccaaagatgtgatgcatgc

SEQ ID NO: 112080 - DNA, 488 bp, Zea Mays
gcatagtagtaatcctttccccctggcagatggcttcggataaaaccatgcctaccgcctcaggtattggagcaaggtctcccctagatgctaaaggagaagtcagtggagaagggagtgaaacccacctccccggacctccgaagctgccattagacttagcccaagttctggccaaccaaacccgactcattgaggtcctcaccagaagccttgagaaccagcgcccgaatggtggaaggcctcaggacaggatgggagattttctaaggctcaagcccccccacattcgctagatccagcaacccgctcgacgctgatgactgactgcgcacagtaaaaaggaagttagaggccatcggatgccctgaaaaccagcgtgtttatcttgttgctcatcaactttccgggatggccctatcctggtgggataccttcagcgctaccgtcagagatgctacctggacagaatttgaggccgccttccg

SEQ ID NO: 112081 - DNA, 393 bp, Zea Mays
aagcatcaacttacatgacatattcatagtcgatcatttgaggcaattcgttgggccccggaaaatcctttaatcggttgatgttacgcagaacaaggaagatgagtcaacttacgccttcacccatgcaggatcctactcaacaacatcgactcatcctacttaacagagcacagttcgtgcgacatacagacgtcaacttcaaagtggttatctagaaacattggacaacttcgaaatgcaaggtctttgcctggctaaatcattcagaatcagatctagacattgttggatagattgtaaacacgcggatggccgcacaaccctggttgtaaacacgtcgtagaccgcccaccacctcgttgttcaatgtcgcttcttgaggaggacatg

SEQ ID NO: 112082 - DNA, 632 bp, Zea Mays
aacatgtcctactgttgtgaccatcagcaattctacacttctggcatttcctgttcattttctttgtaccttttgctcccaatttaataaccttttgttcactcccctttattgttcttcctttgggttttgagttatttggtcttgccaagcttatctcatcgactgcaaaatccagtttctgcaattcaaaagtatatattttttcagcacataatattatgcagtcccacattcagtctaataccattattacctttctggcatgatcattttgttcatggtcaccactctcattcatatccgcgtgatcctgcaaattaacttgtacccgccaacacattttaaagctcaatcataagccaataacacaaaccaataaatcatttgtatgtacaaccgcaaatcaatatagttgttaaagttattacctcttcaaatgaacgtatcagtataggtatttgaacattgtccaaacccccttcaagtatattagatacgtcttgaatttcccgaaaaatttgttcaaagctcagtatacatcagttacaaataaacatacacaacaatataatcaaaaccttgttattcctttcacccaattcaccatctctttcgacgtctctattgtc

SEQ ID NO: 112083 - DNA, 568 bp, Zea Mays
cagatgcgttgtcaaagctgggatccagtcaggccaaggccccaactgggatcttcgtccaaaaaatatcacaaccgagcatcctctcggatcaggtagaagagtgcaatgccttgagccagccggagtcggccccgaatgactggagagagcctatcatcaggtacataaaaatgaagaagagccggatgacaaggctgcaacggaacgtattgcgaggcagtcggcccactacaccatcataggggacttactgtataggagaggtgtagcaggagtcctcataaaatgcattcactcagctactgggaagcaattgctagatgaaatccatgccggacagtgtggggtacatgcaacatcaagaactctggtcggaaaggctttcagatccggtttctattgaccaactgcaaagagcgatgctgccgagttagtccagaagtgtgaggcatgccaattcctatcaaagcaacaacacttacccgcgcagcagctgcagaccattccagtaacatggccatttgcatgctgggggctggacatgattggacctttcaagaaagct

SEQ ID NO: 112084 - DNA, 1491 bp, Zea Mays
ttctttatgaatcttcttgctaactttggagataagatcagaaccttgcggggtgctatcaactatatcactttctgaaacccactggttatgtacatgagcaagatttttatacttaacgaaatattgcttgctgttcaccactcctaaaatggagaggcgatagaattaataaatgaatgataacaatcaaagaaaaactggcatacgctttataagatataattaccttccttgacatcccataaagattcaattccctcgctgactgaatatacaccaaactgaatcctctttttcatacacattatgcaaagccatattcctagggacacgtccaaggaaggatccatacacgaaagatggtaatgtcgtttacatccttttccaccacaagacctattaccaaattaaaaaatggggttagtttttttttcttttcgaagacaggggagagcttcatattatttttttctgtgtatcattatattaaggggtttagttttattaagatccctgcaaatcaagtatgaaccatggaacacaattttcacatttacagcatggtattagagatgaactgttccacaaaacatgtttgaaagatgcatcaaccacaaagactataaggtgttaaattctagaagcacaaccgaaatgggagataaaaaaacacatgtttatctttcacctgatatcgaatctttcagtcacctaaaaactgttcaataaccttgaaacagagttcactgttcacccatgaatcatatcactcgtttgagaatgtatttattctaaaattgttgtagcaagaagtaggcaattttaggaaagctttactgcattcttttgtaccacttgtttctggatttgttaggttcgcctacatttactttttcctacattctatcatcataaatctgaatattataattatcaaactcaaactttagcctacaatatctctaaacctagctacgtagtctcccagaattcaggacagtaataacctacaacttcactccatacagttacaaataagtaccactgcaagatccatcaaggcatcaaaccattttaagtttgactaaaggcgtctttatcattttgaatctatcacatgaaaatgaacaaatgtgattcaaaaaaaaaaacacatccataacacaaattgcatcatgtccaaaaatatacaacaaaagttttgttgtcaaagtcatactttgaagacaaataacacttattcatatatagttttaaatctggtaatcaaactattgaattgcatgcaccaaccatttcaacctaaaagcttaaactagtaaagagaagtgggcaattcacttgtattctaacactccccctcacatcaagcctctcatacctcaaatgtggaatatgaactaataacgattatttttatttaattgcgctaatcaggatataaatttgagacctctggctttgataccacattgagttgcatacacc

SEQ ID NO: 112085 - DNA, 1640 bp, Zea Mays
caatggacagttatcaaatgaacatagcttacctgcttatttgaaaatcgtatatctttcaaaaagtgtccgttatgggctttattatcattcttgtcatccacactcatgttttcactaccatcatcaacatcacctccaaaaacatcagctgagaaggataaagatctagtgacatgttgacgcttgaggacagcaagctcctcctgatagaaggacattcttttagtttaggatcatgaaacaaacggtagatctagaattctccatgcatcacctttaggagacgtatctgatgttgtaaagctagcacatctcctgaagcgtcttcattaacaaccgccttaaaatttgaatgggaaagaaatgcttgtggttagtaactgaagatgttttagaagataaacatactgaaatggcatataccaacattgttctgaatgagccttgcacgctgagcaaacttcagggtgctgagtgtttcgttagcagaactgtatgaacacacaaaaaggatatcacaatatttaacaagttcacatacatttgtaatcataccagacataaaaatcattaccatactgaagggctgacatttgcaatgatcatagtttttgagttccctccaagtgaatcctgcatatcgtaaatgaaataaaataatttcagagatcaagggaattcagatatattgaaacttaacatgatgtgtcaagattattacttggagaaggaatgtcaatcttgagtccctatatggaatgtgtctttgtttgccatgcgctagatcaactaaactcattatcacaaggctgcaatgcacaattcatgataacacttgtggctgagtgaccgaacaaaaatcttgtcatgccatagaaaattattcatctaaaagtttgagtggcaagtacaaacccaagtgttgataacgatttgttaatattaacagcttccttcagccgctcaccttctgctccagatgtcctctgcctgtttcaagtggattatcaagaatcatgattgaactcagcacaatatactgggacacaattgacagaaaagtctcctacctttcagacccagcaagatcaaccagatttaatcttgcaaaccgtaagttggatgctgaatccttctcccacctactctcaatgatacaggtgaaaacactgtgggagcggctactctcacggttcatatttgtagcagccactcttctatttgcagaaccctggagcaggttttggccaagtgcaaaattttaaataatatggacagtttaccagatattcacaagaaaaagatcgaaaggcaaacatacctgcatcaggagttttattatgtcactggcacagccaacttcgaattcagtcaaattttcgacgtacactccattccttatatcttctcggagctgcacataaaaaaatagtacatatcgtggtgccacattgaaaaggtcatgtcaactcgaagctacaacatgaaaccttactgggagatttgtggcagaaggatcaagaagatctgtaatttgttcattatatatctccaggaaagaacacttgcaactgtatttgagcttctcatctctcctgctctcttcttcctatcattttcagtttcacataacaaag

SEQ ID NO: 112086 - DNA, 387 bp, Zea Mays
gctcagtcaaccttgatgtgatgtcctcctagtctccatgtaatcctgcctcaacgagcacgataaggtcactcaaccttgatgtgttgtcctcctccatcagctccaccatcgccatttttccctgaacgtatcttgcacgagcctcatctgtgagatagttcgcggcacatccaatctctgcaaatataatgggacaaataagtttgcaaagacaagataaataaaatgtacaagcaaaaccaacatgtcgttttctcactcacttccactcagacaaccagcaagattcctcaacatctgtttctcggctctagccgcctcccattcccttgcatcatgtgctctcttctcatttgtcgccttcaatctcctccgctcagcaca

SEQ ID NO: 112087 - DNA, 863 bp, Zea Mays
tttggaagcttagcaaaagtaccacataacttttataatcaccaagaagtgattctatgtgtaactaaatcaaacaatatagtttttgaaatctgttctgacagtggacagaatacaacaatcatcttataaaattcataactctcaaactatcatgtttattgtcatgaaaatttaacacaagtaagataaagaaattatctacaacttgcttacagttgacaaggactgattctaaactaaacttaatcaaacaatcgatctctgaaatctgtacaggaattagacagatttagttactgaacttatgaaaaagcataacttctaaacgatcaggtttatggctatcagattttaacaaaagtaagttaataaagttatctacaactttcttgtgaccaccaataactgatttcaacattaacgtaagcaaccatagcaatatctgaaatctgttcagatattggacagattcagttactgaacttgtgaaaagtatagcttctaaaccatcatttcttagctcatgcatttttaggatgagctagatattcaagtgaactacaacttttatatagcacatatctatagaaaacacactttacttaactagattaatcgcacaactaaaaatgtacatgcaggaaattcagcttgcggtcataatagcacttaactcaagcaccaaacaaaatcatggagggatagtgccacaaattctcaagtttaaatcattgtgacttagttatcaagtttcaatttatatcaagacagttaagcatttcaagaaacatgcacgcttttgtttacttctaatttttcactaattgttcttataattataaaatgtgtgtcattttagc

SEQ ID NO: 112088 - DNA, 797 bp, Zea Mays
cgagtcaagaccttagctctcttcagtttaagcatggtggaagaagatgaagttgacattattctttttgacccttgtttctgagtaggaaagcagtaatcaggataaaaaatccgatcacatcaaagaccctgttcagtctcctcttgccgcgagcggcaaaggcagtggtcatggcttcgtcctctgccatcgtataagctcccaacaactcatcgttggtagcctcaacagcctcaagccagtcatcattcggctcgtcaaattgaattctatagcgataggtgtatcttaagtaaaccagaccaccttcgctagagccagcagcagtctccttcggcatctcccagtcattaacaagtgaccacaccttatacgcaatatgctcttgaactaaatccctggtgccaatgtaagtacacgccgtgttgaaggccattaagcatgcttgcacttcgttcccactcacgatcaatggcctcctaatgccaaagcgtgaccgtacagggtgctggattatacccctcatatcttccatcccacttaggtcattcttgacataaaaccattgcttcgtccaagagccctaccatttctttcagaaagttggcacaagatacctcgcatcagaacgatgcacaaagttgtaacatccaaagttgttgtgatactgctccttcccagttgccttcgtctggtaggataattcatgaatgttgcagaagcacctggcatctagctccagcccttggcttctcatagcccaaataaaaactccagctttaattaaggcttcg

SEQ ID NO: 112089 - DNA, 570 bp, Zea Mays
atttacggcgagagcttcagagtcgctttggcaaagaagggggatttctttctttatgaagcgtgaaaagaaaggaatgtgttttttcgcgtacggctcaagaaacggtacatacgaagatttcacgcctcacaaagaaatatattacatcattaaatatacaaatagttgataagtgtttcttacaaaagcaaaattgtatacagagaatctaaagtctcaatagataagctctagtcatcccctttcaaaactttgtcagcagcttcgttcagtagtctgttgacagcttcgtcaacaacttcgttagctattcttattatgtcaagcgcccccttcagagatggatcggcttcaggattttatggctctggaaggggagagagcttagctgcaccaaaatacaagtgtctgttagtaccaaagctaaaataatttacgaagctaagtcatgatagatatacctataagtctggcacgttcagcaacttcttcagttcttctgcctcttccaaggcgtcatgaggttctttctctttctttctaatagcttcgtcagctatctctcac

SEQ ID NO: 112090 - DNA, 673 bp, Zea Mays
tttcagagttacacttgtgagaagaacttaaatgctagcagttcatctcaaaactagttgcagtcattgtattgttttattttgtagtagcttgatgccagattgccagtatagcttgtcactataaattacgtttggtatggtttcttgtggtctttttttatttaagtaaaaagtttggttggctccgctgtgtgcatggcgcaacgatagcatcctagttgtaaatagaaagaatacagcctctttaggactagtcattgcgatcgtgttgattgatccacttgttgcattattggccctctttatccataaaaccttaagatctggttttagctatatagacttgcaacttacatgtcgaccataatattgtggttctctaaagtctaaactctgaggaaaagtgacgcctatttaaaaccctgtcccatgcataaataatagagtttttgtttgtctttgatgcatgaggtgctatcgttcttcaccttttcaatgcatttctctgttttgcaccttagtaatgaaattggcattcttatggtgcttgaaattgttgagcgaatagttttttcatctaatgttctcagtgacatggattcctgtcacttagttgtgcaacctaatcatccatgaaatactgaacctatcatcagttccagctagcaag

SEQ ID NO: 112091 - DNA, 766 bp, Zea Mays
accacggggaggtggaggattcggtgggtgtggtcaccactgccagtgcctactcggtgttctggccttcttagtgaaatagaggggtggataaggtttgagggcttaccctagatgtatgtgaatggtgtggcacggtggagaaactatggaatcagctagggcatagtggatttcagtttgtgctttcatatgccataacaaggcatagctgctgcagcctggctgtagcttctttgggaccatatgcagaggataaaagagggccaacatgttccacttatctcctgcatggtcaccacgtagaggtgaaacacagtaaacccatgaacacatattcactgcatgttggacaacacaccaaatagtcaagcagctgaatcacttctagataggtcttcaagtcttcagctttttcttcaatatggtggagctataccaggtgaacccccctcagggtaactctatttctaccaaccttttgccaagaaacaactagaaactctagtggagagagatcttttcttcagatattttcaatgacctaatcttcttcagtcgactgcaccccagttttcacctccccttttctcccaattctgtagaagagcggaccatgctcaccactccaaacttgttcaccaagtattggtctatcactttgttataacattctagagctaataacacctagatcacaagctacattgccccaaagtcgagcacaaaatcactggactccaaattcagtgaactgaatttgatc

SEQ ID NO: 112092 - DNA, 391 bp, Zea Mays
tggttttggatagtttctctacgtagatggatgttgcatttggaaagggagcaaagtctgaattctatcattttttggccaatcctttgtattgttatgtagtattgggactatgaaattgtctcaaagggaacaatcgtatgaaatggttctgagtccaggacatatatccatgcatggactgctgaatggttgttgggcacaaccacatcttcttgccttacgtatgatgtaaagtatttcccctgatgattggaggttagtgtgctgatgctttcttccagttctttgcgtttttgggggaatttcaaggactcagtcaatagcactgaactctcatgatcatggccaattcgttgtgcatgttttacttggtgacattcattgggat

SEQ ID NO: 112093 - DNA, 377 bp, Zea Mays
gccatccaacgtcagtgaagtacgaagctttctgggaatggcagggtattaccgccgctttatcaaaggattctccagcatagcaaaacctatgatcgaacttctcaaaaaggacaataaatttgtgtggactccaaaatttgaggaaagtttccagatcatcaagaaaaagcttacaaccgcgcccgttttgacactaccggacatacaccaggatttcgtcattttctgtgacgcttcaagacaaggcttagggtgtgtattgatgcaaaatgagaaagttattgcctatgcatcccgcttactcaagccacacgagcagaactaccctacccacgacttggagttggcagccatagtgcacgccctgaaaatat

SEQ ID NO: 112094 - DNA, 294 bp, Zea Mays
ggggatgaggcttatattactcgcacctgagtgactgcagtagggattacaagcacagcgggagagaggaagtccccaagtccctagaactgactgaggcaagtgtcaatatcctaagacttagtgggaaacgactgagtgttcgccttcgtgtcccttttttcttttgggggaactacactgcccgatttatacatgtaggagatatatgatgtgaagcctagggtcgctgtattccaaggagagttgccttggtgtcctataagctgacgtgatagtgcactgcattgttga

SEQ ID NO: 112095 - DNA, 351 bp, Zea Mays
gtcaaaaaggtcaaggttctgtttgggtatgttcggtagagctagctgaagagctcttcggtacactaaaaatgtggttctcttcgatactctaggatgaaccttgaaagaagcgattttcaaactaaaaatgtttctctacaattcttatatatacaacgactgtgtatagtatatctagtgaacagtaagccaagagatgctactttcttaacttttagccctctagttcatctcaaaggatcactcgtaaaatcagtataaaatttaaattgtttctgcaaagcaactaaatttagcttggaagctcctttagaagatccaccaaacaggttctaaccaaaacatgtt

SEQ ID NO: 112096 - DNA, 708 bp, Zea Mays
gctaattccaagtcatgtgtagggtaattcttttcatgatttcgaaactgtcttgaagcataggcaatcacttttccttcttgcattaacacacatccaagtcctagatgtgatgcatcgcaatacacatcaaatcctttatgaatatcaggcataattaacactggtgcagaggttagcctttcctttaattcctcgaaacatttctcacatgcttcatcccacttgaactctttacctctctccaacagtgaagtaaggggtttcactattttggagaagccttcaataaatcttctatagtatcctgctaatccaagaaaactcctaatcttggacacatctatgggttgtttccaatttagtatttcacttattttaccggggtctaccttgattcctccattggtgataatatgacctaggaaagcaacttcctttagccaaaaatcacacttcaaaaaatttcgcatacaactgattgtcgcgaagcttctgtagaactaatctcagatgatcttcatgtgcttcttcattctgagagtatactagtaagtcatcaatgaataccaccacaaactggtcaagatattccatgaatactttattcatcaaggtcataaagtacgctggtgcattagtcagtccaaaagacatgactaaaaactcatatagtccatatcttgtagtgaaagctattttaggtat

SEQ ID NO: 112097 - DNA, 608 bp, Zea Mays
cacaatcccaacacaaatgtcgacagggacaatcatactcaaagtagccagcatagctcacagtcttcgggaacgcaacaaacttcctacaggccatatgccccgagaggtagaggggggacaaacttcggaggaaggtatggtaatcaacccaagaagctgttctgcctattctgtggcgaagacaagaacataccacaaggatgtgccaggtcacaatccagaagcagaaagagatagctgaggccgaagcaaggcagaatcagcaaagcaggtcctgcataccggttcgtgctattgcccatacattcctgagtatgtgggcaaccaacggcccacaacatcagttgcttcagcaagccactctcaagctgcatggaccccgctaccaccaccaccaccacctatggcactagccttgacccacaatcagcagccagaagggcaccgccaaacatagcaacaacgtgatgtgcgtgaagaatccgaagctcgcacagtcaacaacattgtgcccgagtcgaggcacaattactaaagtcatacaggggctctatcacaaaattttcatacttagtgtactctttacctttctgtccttatgttgc

SEQ ID NO: 112098 - DNA, 650 bp, Zea Mays
gccacaatatccctaatttctagactttgctgaacaaggcaattggccttaaaaacaaaaggaaagaactgtccgaccacaaaaggatgtaccaagggcagactagcagaaacaccaggcaaaacaactcccaaggttctcagttccgctccggaaaccagagtgggaacaacaactatcaagcacagcgctctggacaacaaagtcagaggaacaatcaatactagaacaagcagagaagcaacaccagaccagtcaaaggtctagtgggcaacaacagaatcgtcaaagaagcatcgtgaacacactagccaagaacaacaatgcaactaccctagttcaacccaatggttgtttcaagtgtggcgaacttggccactatgccaacaactaccccaggcgcaatccacagacacaccagaagaacaacaaccagaggactgaccagaacacacctactcatggatctgcacagaacaagactccgtagaaccagagtataggaagagtcaaccatgtgacagcggaatcagttcctgaggatgccgacgtggtgtatggtatgtttcttattaactccatacctgcatcagttttatttgattctggagcatctcattccttcgtaacaaagtcattcgtggaaaaac

SEQ ID NO: 112099 - DNA, 532 bp, Zea Mays
gcttgagcttcatcattccacttgaaaccatgctgtttttgcagcagctgagtgaggggtcatgccagaactccatacccacacaaaaacttcctgtagtaccctataagccccagaaatcctcttaactcagtgatattctgtggtctaggccatgccagcatagcagctgtctttgtagggtctatcgctaccccttctctggatgtaacatgtccaagatatttcagctctttcttcgcaaaaacacacttcttatgcttcaagaaaaacttatgttctctgagcttggacaataccatcctgagatgtttgtagtgctcctccagactcgagctgtagattaatatatcatccaagaataccataacaaacttccgtagaaatggttctagcactgtgttcatggcacactggaatgtcgctggtgcatttgtcaaaccaaaaggcataactcggaattggtaatggccatgatgagttttgaacgcagttttaccctcatcctcctctgccatcctaatctgatgat

SEQ ID NO: 112100 - DNA, 486 bp, Zea Mays
tgtgaatccaagcatgtgtctatgtgccctagtgccttttggatacccctgcagctaccttgctccctttgggagggtttctccacctcaaatgaccatttctccaaaaccctagaactccgcacgccacgtgctcggcataatgcccaaaccaaccaaaaatgctccaatcgatcccaaattttttaggcaccttcactatatgtctagtaacatattcgcaaaatctcacgccaatccgatgtcccaggcttcaattttactcaaatccccgtttctagcgatcgattccgagctgagtgcctaaattccactttcttcgcctaaaatcaaaccaagcgcacacttcactcatatttacccatataaacctattcgtgaagtatcggctcaattccaaatcatttcatgcctcaattccaatttcaaacctcctatggcactattcttcgttcaaactctgttttcacgccgtttgacctctcg

SEQ ID NO: 112101 - DNA, 708 bp, Zea Mays
aaatttgggactctaaacagcttcaaataaaaagttttcaactacaaagttgtagactacattgagaactataactttcgtatggatcatgtcgcatccgagattgtttgataattttaaattttaaaacctgtgaacttacaacaatattttgggaccgtaaacagtttctaatcaaaataatccactatttttttaaacaaatggcaggagctctgcctttcagttatgaagaattagaagttttatgtacaagggtagtcaaactcaaaccacatgatgcctacgtaacatgtcattagaaaggttaatccacccacatgacgcaaaaaagcacaaaactactgtcagtcattgttgccgagcatggttgcaaagcagtcaacaacttcgacttccctatggtagacaccaaactaaacccaccctattgatgtcgggcagacaagccagaagcacatggccgttacatgtccttattgccaagctcaagcacgacacaaagagcagttatgacttgtagatcgcatcgagggctacaattttgataaagaagtttgtcttcatccgatttcaaatgaaaaggttatgaatttttttgtttgcaataaatttatttacggacatgatcgcttagaatgatagtctttattgatagagattttgggagacagataattttctgagacaatcgtcttaggatgccgc

SEQ ID NO: 112102 - DNA, 440 bp, Zea Mays
atccggtgcagggagccgaagaggaggcaatgagcatgatgtcatcgacatagaggagcaggtacatggtgtcactgctacgctggaagatgaacatggatgtgttcgacttggcctcaacaaaaccatgggagagcatatatgtggcgaagcggctataccaagcgcaaggtgctttctttaggccatagagggacttgttgagcttgcacaccatatcgggatgagcaggatcaacaaagctagtaggctgactgcagtagatggtctcagtggaagtcccacaaagaaaagcattctttacatccaactgatgacccgaccaagaacgtgggagtgccaaagtgaggaggacattatggacgggtctgaatgtctcattgtagtcaacaccaggacgatgagtgaaccctcggagaacccaacaggtcttgtaccgg

SEQ ID NO: 112103 - DNA, 709 bp, Zea Mays
caccctgtgtgatgagttgtgcaagctgaacctggaagttgtttctttaggtgctttcaattatatctcggtggagcccacattacaagggcaaatagtccgggcacagattgaagacaagtgtgttcaggttatcaaggaaatgatcaagcagaaagcagaaaaatacaaatgcttccggcaggacagcaaaggaatcctatggtttggagatcgattggttgttcccaaggacccggagctcagaaagaagatattggatgaagctcacctttcaaaattctccatgcacccgagaagcaataagatgtatcatggtctcagatccttatactggtggaccagaatgaagagagaaattgccaagtatatatccgaatgtgacacctgccagagaatcaaggccaatcatttgaaggtagcaggccctttgcaaccccttcccataccatcttggaaatgggaggatatttgcatggattttatcgtgggattgcccaatacctcccgacaccatgattccatttgggtcattgtggacagattgaccaagacagctcatttcttgccggtacacaccacccacaggacggagaagtatgcagaaatctacattgacaacatagttcgcttgcatggaataccaaggactatagtatcggacagaggagcaacattcgtggcacgattttgggagcaattacaagaa

SEQ ID NO: 112104 - DNA, 828 bp, Zea Mays
gtttttctgactgccgaatcaagaatcttcactggtttctcacgatattgaaggtctttctgaatctgcactgtctcttcttcgaggtgactttctggtgcttgcaggcatttgcggagctgggacacgtggaacacattgtggatgtcggacatggattctggtagttccaggcggtatgccacaggtcctattcgggaaatgacagggtaaggaccgacgaaacggggtgctagctttcctttcatctgaaaccttttgacaccacgcatcggggaaaccttgagataaacaaaatctccttcctcaaatctgagctcccttcgcctattgtccgcataactcttctgtcgactctgagcttcaagtaaccttctgcggatcaaagcgactttttcttcggcttccttaacaaagtcgggtccttctagtgttctttcccctacattggaccacattaggggagtctggcattttcttccatacagtgcttcgaatggtgacattttgatgctggcctgatggctatttttgtatgagaattcggcgtacggtaaactagactcccaatctctgtcgaaggctaatacgcaggctctgagcaaatcttcaaggaccttgttgactctttccgtttgaccatctgactgggggtgataagcagtgctgaaatctagcttggtgcctaatgcttgctgaaggcccttccaaaattttgaagtgaactgcgttcctctatctgatactatcttccgtggaatgccatgcagcctgactatctccttaaggtataatcgggcgagggctgctcctccaaaagtggtcttt

SEQ ID NO: 112105 - DNA, 700 bp, Zea Mays
atcagttcaaacatagcacaattacatacacatggaattcataatacactgtttcgctaagaagtactaactcaataaagagatgttttcgattcaaacaaatcactgcgcaggagaatttttgcaggaagcctcggttgcaggaatagcagaagaagatggtcgactcacgatagcaggtgcggcaagaacatctgcaacaatatcttcatgcaccacaacaccaggcctcctcatcaggatccgcctggcgcgaacgaccttgtccatggctttgtcgtacatcgccttcataacaacacgatcatcctctaaggcttgatgctgagacgggtggcctctagctcttatgtgacaagcctcttcgaaacacacagctccttgatgacagaatctttggaagacagcagcttactaagtcgggacacttcagactggcatgcccttagttcatcctgatgatggtccaggtccgacatggtgaagcggtgactcgtctccagaatagtcaagaaattgctagcatcacgatatagtctatccaggttgtcgcgagaagcaatgagcatttacctctcctcctacaagcaagaacaacactaagcaccaaagcaaagaaagcaaaacagaagcagccaagaaagttgacctcataagccattttctcggagtcaagttgagcattcagagaagaatttaa

SEQ ID NO: 112106 - DNA, 409 bp, Zea Mays
gtcggttggtcttaagttgctcggttgggtggcttgaggactagatggcttgtcaggaacttcttgagggctttgaacacttcttgagtttttggagtccactagaacatatccaacttcttgagcaacttcgcctggggccctgagcaggctgcagccttcgaatcattgaagcagtacttgtctgaacttgcaactctgactagtccaaaccccgcattacccctcctactatacatcgcagcatcacccaacgcggtcagcgcagctctggtgcaagaaaggtgcaaaaatggtaggccccaacagtgtcaagtctacttcgtgtccgaggtcctcactaattccaagtgcaatatgacataaccggataagatagcctacgcagcaatcatggcttcacgcaaac

SEQ ID NO: 112107 - DNA, 415 bp, Zea Mays
gtcgggcgagtcgtcgcaggcagcagtcgggagcggggagcctgtctgtctcgtttgatcgatcgttccagccgcgttgaggctgaggatggcacgtccctcttgtggaacgtacctaaagatgggagaaaatcaaacttggccatggagatttgtgtgctccggaaaatccacacctgtaagcaccacctatatcattagtaaacgtgcctcgtacaaaatttaacatattttaaaatcaggattcctacaaacattcaacacgaattgttctaaaacttacatgagcgagagtgaaccgttgatcagggttatttatgtagaacatgtttggttgccatcattaaggagtgtttcggaacacatttttaaaaatatcacagtatacaaaatgtcatgacgtaatattattttt

SEQ ID NO: 112108 - DNA, 562 bp, Zea Mays
cccttttggatatttcaatttttgcgcatagaactgagcttcttgcttttctttttcagacaattttttacccgaagcatgacgtaaaacgtagttgagggcttcggaagatgctccgggaatagggatggcagttttttcagataaaatttcttctacagattctttttccatttcttttctaatttccaaggattccttcttggcgggctctgaaggcccagtttccgtcttctcaatttgtgtttttgaagcttcggcagctttcttcggagtagagcttgaagattttattgtttccagcacatctaaaacattgaccattctcctcctcttgggagttgttgtcagatccttttgtgccttcggcattgacacctcaactcttgccgaaggacttaaaactttcgatgtccttgtctcttcagccctccgtccttcaattttttccatctccggcattgcagccggctcttcaatattctgcagatgtgtaggttctctggcttcagtggccagggaggtctcaccaccaaaatcaggcactatggccggctcaatg

SEQ ID NO: 112109 - DNA, 506 bp, Zea Mays
tggccagtgagatcccttgcaatatatgcacatgagacctttctttgcgaggtaccgtgactcacagacactcaactagtgtttgtcgatccaaactccaaagagcgctagagaaagggaggtactagtacacgaacaacgcgtggatccatttacttttgccgcaatcagaaggtgttatgaaatgaagctggtgatgattctatttactttacgaaatcaaagtgtgagcgtgcatgtgtgtaggcaggtagggcaaaacagaggcattattctgaagaccactcgaacggatggagaggaggctaaagagagcagtggcaagcatcatggtctgtaaaataatagatgcccttagaagaatcgccggcagactattacgcgtttatgtgttggatgagttggtgtacatatataagagcgagagtcctcgataaatataacacggatttaaactaaattctaatctatcttagaaaccaaaatattcctctctccgttacttt

SEQ ID NO: 112110 - DNA, 305 bp, Zea Mays
aatctggaataaatcgtcgataataccctgccaatcctagaaaacttcgaatctgccgcactgtggtaggaggtttccaatccattacttcttgtaccttttcaggatctactgatatcccgtcctgagaaattgtgtgacccaaaaatttaatttccctcagccagaaatcacatttagacaacttagcatacaactgatggtcacgcagtctctgaagtacggtatgcaaatgtttagtgtgcttggcctcattcttggaatagaccagaatatcatcattgaaaaccaccacaaatttgtcc

SEQ ID NO: 112111 - DNA, 295 bp, Zea Mays
ttcgcaccggggcaatgaagcaaacccgaagaagatcaaagcgattgaggcgatgaggcctccggcccgtatcaaggacgtccagaagcttacggggtcattagccgcccttagccgcttcatttcaaggctggctaagaggacgctgcccttcttcaagctgttgtggaagtccggccgattctcttggaccgaagaggcggaacaagcctttaagagttgaagcagcacctggtgtccctaccaacactggtagctccagaacctggggagccattgtatttatacatcacga

SEQ ID NO: 112112 - DNA, 353 bp, Zea Mays
cgacttttgcccctttgtccccagccatgagaacatcgtttgaaaaaactgggttgaattcactgtccatgctacctctgtgacgccactcaacttcatttggataggttttgcaacctaatttgcacaagcagggcagatagcatgactggtatcataagagtcttagcaagtgaaactcaggacaaggaaaagcccgtcgcaggaggatatcatggcatgcccatgcccatcccatgtcttcgaatggttaggtaggagtgctaggacatcctagagtctttgtgcaagaaattcagctagttgccttgtcggagatgatattcctgatttgtccggtgttgttgatttag

SEQ ID NO: 112113 - DNA, 352 bp, Zea Mays
caccactcacattcagctctggctacttggtgctttgatttctcactcagagtttgatgtggttgatttccttgcgcgggtgctccaacgaggactaggggagagtgccgactcttcgatacctcgagaaaattagaggagtcttctaaactttgctttacattccgcacttaattcaagtactttaccttgtgcatttgtttagcaagtagttgaagtattgtcttagcattgttgtatttctagtagtattctcttattgctagttgttggggtgaagttgggctcttgcttagggtttaattattgttgatttttagaaaagcccaattcacccccctcttgggcatcg

SEQ ID NO: 112114 - DNA, 322 bp, Zea Mays
tacttggttaagagtagctagcttatgtgttgtaagtctacacgaagtgtagcggctctacttactgtaaaatgatgccgcagaattcagaatcaactgaattcatgcaattaatagtaacacagtcacatgcatgcatgtggtattgttggcaaacccccctggtgctccacgtctatcaacaaaggcaaagtccagtcaaaacaatgtgtagttttgagaaagaaataaatcctgcaatactaggatcagttaatcaagtttacatagagtttgtaaaagattttcatggttattgagcttattgcagcttacatattct

SEQ ID NO: 112115 - DNA, 431 bp, Zea Mays
gatgttttgaagaagtttgggatttaccttcatcagctaactcctaacgccatcgttaggcttagcatctacatctgggctctccgaagccagggggcagaaccgcttgtcgaaggcttcttccgggcacatgagcttcattatcagacaaaagctagagacgatgggctgcatgagaacttcggctgctacaattttgcttatcgcaaagatgcgaagtctccagttatcagctatcataccaaatggccagctgcctggaagactgaatagttttatgtcaaagttgatgagaaataggaggagctggttcaaagcccattagaattaatcttcggagagactagaccccagtgcaacatgaaaccggagagtccatgccaaattgcactgggcgaattttgagttattgcggagcacattggtactag

SEQ ID NO: 112116 - DNA, 878 bp, Zea Mays
agcccataaaacaatggttgtgccattgcgatgaagaaaaacgcaacgccatctgagaggaaatggagaaacttctgatagtaggattcataatgaaagtttatctcccccagtggctagccaacctagtattggtgagaaagaacgggaaatggagactatgtatcgactatacgagcttgaacaaagcatgtccaaaaaatccatcccctttccacgaaaagaacaggtggttgaatccacctcagggtgcgaagtgctaacttttcttgacgcatactctggctaccaacaaattgagatgaaggagtccgatcagcccaccatctccttcatcactccatttagatcatactacttcatgaccatgcccttcggcttaaaaacgtctaggccacctaccagaggtgcatgattaggtgttttggcgacctcgttggagaggtcatggaggcatacatcgataatattgtggtgaaaaccaagcaagtcggaggcctcgtggctgaccttggaatggcatttggcaggctaaaagctaacaacatcaagcttaaaccctagaagtgcatattcagcatcctaggggccatgctgttgggttttctcgtctctgagcgaggcattgaattcaatcttaagaaaatcaccgccatcatgagaatggggtcgattaccaatctcaaaggattattgcgggtcacagatgtctagcctcccttagacattttatctcaaggcttgaagaacgagggcttctgatatacatgttattgcaaaagtaaaaccatttcaaatagacttcggaggcccaggaagcccttgacatactaaaatgcctcctatctagtgcccccatcttggtccccccgatgata

SEQ ID NO: 112117 - DNA, 329 bp, Zea Mays
gagccaagttggcagagttgtacatggcacagattgtatgcctacatggtgtgccaaagaagattgtgtcagaccagggatcacagttttacctcgcggtattggaagaagttgcacgagtcattggatacgagattgaattttagttcggcttaccatccccaaactgatgggcagacagagaaaactaacaaagtgttagaagatatgttaagatcttgtgcccttaagcatggtggtagttgggataagagtctaccatatgctgagttctcttataataatagctatcaggccagtttgaagatgtcatcgttcgaggctttgta

SEQ ID NO: 112118 - DNA, 495 bp, Zea Mays
tctacatcctcgttgacgaccacgtaggactccccaacgatgtcgaggtatgtgtcgaaggtgaggtcatctggcagtgcgacgccaccgaggaggattttcaattgcgcgccacggtggcccgtcccatgccaccgtggcgatttcaacaacattgcggcgacatgcctcgatgccactgtcgtagaggcagagatgaaggccggacataaggtggtcgggtctgcgggctttgtcaggtccatagagatctacggaatgcgggaacggggtggggcggcacgagggtgatataaagacaaaagggcacgaactaggaggggagttggaggagcaaagagtaagaggaacaggaggaaaacatgcatgcgttgagctttgaccgaggcattgacccctcataaaagaaagaacaaggaacgacaacgtgggaggaggagcattttagccaaaagcgcacatgagactacttgttagacgacctaattacccaac

SEQ ID NO: 112119 - DNA, 386 bp, Zea Mays
attacaggaaatttgttaagaactttggggtcattgctcgtccactaactgatttattgaaaaaggcagtagtgtttgtgtggacacaagtgcatgacacaactttccaatcactgaaacacgcacttacttcagctcctgtcctagcacttccaaattttgataaaccctttgccattgaaacagatgcttcgagtaaaggcattggggcagtgctactgcaagataatcaccctttagcctatgtgagcaaagccttgggcgtcaaaaatcaaggactctcaacatatgaaaaggagtatcttgcaattctgctagcagtagaaaaatggcgccaatatcttcagacctcagaatttgtcatttattccgaccatcgaagttta

SEQ ID NO: 112120 - DNA, 866 bp, Zea Mays
gccttggtggttttaaaaggattctactatactattttgctactatgaatgaaaacatatgacatcattttaccttaataatgtttattacttgccagttaatctaataaatccatatccagcattatgtttgaaaaaggtaaatcggagagggagaagagaaccaggaaagggaagatgttcattagcaaagtactgtccactttatagtaatgcttagtgcacagcgcatttgatatttgggataagtgttgacacacctgcagaaataacgatgacgggttaattgatgatccacttgtttcttcaggcacttggagaatcagttctgttgggtgtagtttatagtcgcacatgatggttactataccttgatagcagggaatcatcaatcaggaagcgaaggcaacaactaattaagatggtgagcaatctcaggcttctggtccttaaactatgtgttttgtaatgacttctttggaacttctagaagtcagctggatgaataaatataaagtgagcatcactaagccgtgagcatcaccaagctgtgagcatcaccaagacttcgtaatgggatttatttattttttctatagaagcatcaccaagctttccttaatattatgactatctttatatgtgtagtgatgtcaattgcagggtccattaagtgtagaacagtgctaaatacatgtattaattttccaaatattttaatcttattacctttattgttgtgtagttttttcattccaaacagtaaaagcgaccctggatttgattaaatgtggggctgctaaagaagcagaccttgatttggtgttggtggaggttaatcttaacaatatggcaccagacacttc

SEQ ID NO: 112121 - DNA, 766 bp, Zea Mays
ggatggtcagtggaacatgataaaaaaggtacgccatgaacatctgaacaaccattaacattgtagcaatagtagttatcattctaaaaaccttattcaattcaatgtgcgataaacatagtgttatgtctatggataagtaaattctttccatggtaaatatcatgatttataggagaagcttgaccgggttgcttgagttttgttccctctatactagggtagctacataggcttcttgctacatgttcactgaagtggaatgatggaatttttgtgatggtaaatttatgttactaattttattatttgtctacacattctattttgttatgtgcagcaagtagtagatggtgcaagggtgggcaactgggcctgcgttaacttttgtcaaaagttgcgtgcagatagtgttggtaaattttgctctgatctgattaagtggtctcgcactactggagtggtaatatacatttacgtttgcttttgatttccttatcatcaaagaattttcttgcatgactcccagtttaccattccactctggtttcaggacatggataacttgagacttccaatatacaccgctcgtcctgaacaagctgaaactgatcttcgtaggctctatcaggatgctcggaacaagctaagatggcaaaagtttgatcttttgcttgctatactaccagagaaaaatggcggcttatatggtaatatttattacagcaaactttgtttattccctgattatcacatatatgtcatg

SEQ ID NO: 112122 - DNA, 542 bp, Zea Mays
ctttaagaatgtttcagaagcaaaccagcatcattatgacatcaccagaggattgatgatgaaataattaataactttctacagtgcccgttttctggtttgtttcacaaaaacttttgtcgtggggatctcccccacagtgcatttgtcggaataagggatcacctgcctcaaatccagtatccacactaacttgtgcatagtcttaatgtgttgaactggaccgccgacacatggcgcgctagccaggtcacccgcacacacaccccaggcccccgaacgcacattttaagtttgttgggccaacacccaccaaaaacaccagcccattagggggttgcaccctccgatagactcctgtttagggttaggttaggaatttcctgcatttacctaattacccccctatgggcttggcccaccaaactcttttatataatatatactacaaactctatattagggttaaggtttcacatattccaacttggtatagagctaggtatttttctctcccctcccttccaaccgtcagcccctct

SEQ ID NO: 112123 - DNA, 483 bp, Zea Mays
gccttccgtggccaactcggccagtgaagggaggaacccattgttcttattattattatctactttattttatttttgttttgcgaatagaacaccgatggaccacgtcaatcatttagttctttttttgagtcggcaatcccatctgctagcccccgggatacagttaatggtgggtgtgcacgggtccactaaatttacatacgtatttcatgatatcaatttggttcggtctgttccagtcatgatagtttcatagtaataatatcatttgtatgttaacaacattaacctgtcacaacgcatgctttacaagttatgtaattacttgttaaccaatagtaatctaatgaagactagcttatgatatggagctacgctttgtgagcatacatgagtgtagttaggccacctcgaatgttttatactggtcagatataaatgtgtcgtcaagctagaaattctttcaagtagcacgtgcgg

SEQ ID NO: 112124 - DNA, 369 bp, Zea Mays
agggagtagataatctcacgagactgcctttcgatgcccaatccgaatgcgatggcatgcgctagcccggcatatagtcaaatcaaccacaccaacaccaccaacgtcccgaggccatcttggcatgtcctacatgtggactatgtaaagttgtggccgcgtaatggttatgaatcgtgatgaccaactgaatgcttctttagatagcgtttggttccgtgactagtaacgtacgtagcaaggaaaacagatcaaggggggaagtgcgcggggagtcttgagtctcagcaggtgccttgatttgtttggttgcgtatagcaagggaagcagcagtggcagaatgcaacaggactggcggaggagcggta

SEQ ID NO: 112125 - DNA, 522 bp, Zea Mays
gacaatgtcatctgctagagccttcatgtgtctaaagaattcgaccatagtccatgtacccttcaacatggtggccaacatcatttacgtgtcgaccaccttatccccaagcttccaactaacactggtgtcatcggatcgaggaggtgcagtacctacgcattatggagtgtagaggggacctgctctccatagtgtatggttgttctttggtagtttcttgatggtcgagtatgtgatcaaggacacaactagtgactcaaagaaacttgaagcggtcatggaacagactactagtgaacctggctttgatttccatacaagaactgataaaacatgatgcccttcagagaatcacagtcccatatcaatatagctaagaataccccatagaatgacttgtacatcaagagaacaatttggaatacctggtaagaggaagaataaaaatgaaacaaaacaatcaagtcaaatatggtgggtctgtctagatgcttgagtctgggtcatgtacgataggac

SEQ ID NO: 112126 - DNA, 523 bp, Zea Mays
aaaaaaacacatccatctgtagctacgcgtaaaaactgatctactggacgctttgactaatgctagtgtagtgtaggtgtagtagccgtgtaggaaaagaaatgcagtccatcttgcatctggtgtgtacgtagaatactagtacgcgacaggctgtgcgtgtagattacgcacgcgagcatgcaccgcgatccggacgcccaggaggccaggacccgggtgtgtgtctgactctgactcccggggcccgcattgtgatgagctgagctgtaagccgctgggcctgggattcgtgtatgccaatcagccgatgtggcgagccaatgaacggcaaacgagtcaacgactcggatttgccagcctgaggagcagattttgctatgcaaaaaaatttgcgtttgtcttgtgctgcaatatttcgtatttcctcttccggtcggctgtatgtagaaggcgtacgtagagctgtatacctgtatagtatggcttggtttggggtggccggcttggggaagcaacgtgc

SEQ ID NO: 112127 - DNA, 623 bp, Zea Mays
tcaagtggctctttttccatctctgaaactgaaaatgaccaagtctcacaatcaaaattgagatcgcaacaaaggcagggatcagagggaaaacaaggatgtggcttatagggcaaaaagagggtagcagcagattatgatctccctatttaagattaatgagtaactttgctttaaaaggatggagaagttgcttttgatatgtggattagaagtggtgaagcacttagggtggttgagtatctataagcagattatgatctccctattgatagattttctagttttcagacttaaaacagtagtctgaacatgagtttcagtattttgagctgtttttggagcccatttgtacctaatccatgaggttttaggacgtagagtatatagaggaattcaagaccacctaatggtgaacaactttatgaaaggatgatggacatgatcgcacataaaaagtgaagtaacagctgctcaaaggttggactatcaggtggctagtgattaatatatggagtatgagacccacatttggagctctctggtaattaatatatggagtatgagccctacttcatgtagaaaagttaaataccattgtcatcattgtcacgggattccag

SEQ ID NO: 112128 - DNA, 859 bp, Zea Mays
cgctcccagtggacgaggtccagggttcgtttggtgattggccaaaaagagtgccaatagattgttatgagttaacatttagatacaggtaattctcccatagatcgaacatcggaggcatgcttacagggctttacgtgaggtatgggattcacaagagtggattgcaaagtcaaacagaattaagacaggtgacgccatcaccaggacaaggataaggacgtagtcaaccatacctatgggggtgatggacatattcgcttagcgaaatgaatggtgagtatgttgtcgtggtttcagaaacaagaggacaatagaatttgtgttcagtgagtgaagctagtgcggactcactccaaatgatgaatcaagggattcaaacgaggggtttgagacagggagttaaggttcagacttgcatcctagtccagtgtagtgcccatcgtagtattgcttgtggaggtgttactgttggtgcctgtgtgagaagaacgaaggggtcatgtccttttatagatcaagggtaagacctttcagtggggacttgtattctactggcaagagcatggctcattgcccttgggtggcatagtccttttgacgtcatttgtagagtcatgcatagccgtactcttgggatggtgtaccgcttcatccgtccggtatatgggtctctatagtgagtccgatgttaacgtagtgacacttggcggtcccgcaggggtagacttgcggtgtgcttcggggtcagctttgtcttccatcatgagccttgcgtcaccttcttgtgtgtgtaggcatatacccggtatggtgtatcgtcccatccttttcggtgtgtgggttactgtagataatc

SEQ ID NO: 112129 - DNA, 458 bp, Zea Mays
gcccgaggcggaaaagtaccgcgtcggtgtggtgcacgagttcctgaacctgacgctggagaagcgagcgatgatccaccacatcgtcgagttcaaggaggagttcgggctcacgcggcacatgtacgagtcgttacagaagcagaaccgcgctttctacctcgccggcacagagatgaactgggccttattcctcagggacgcgtatgacgaaaatggcgtgctcaaggagaaggatcccctcgtgctgttcaatgagaagcttcagcactatgcgtgtatgagcaagatagattccagagagaccatgattgatactgcaggcttgactgaataaggtcagctttcagttggttctgccgccagaattcaattgtgcttatttgcagccaggtatatacagtttcctcttgaattatatttcgttctttgatgcctatcttttttcaattgttatt

SEQ ID NO: 112130 - DNA, 440 bp, Zea Mays
gttctaatgcaagaaggcaaagtgatagtttatgcatcaaggaaattaatgaagcatgagaagaactactcaacccaatatttggacttggctgccatggtgcatgccttaaaggtttggaggcactacatgattggaaaaaagtgcaacatctttatcgatcataagagcctaatatacatattcacgcagaaggatctcaacctgaggcaacgaagatggcttgagttaatcaagaactatgatttggacattcagtatccccctagtaaagcaaacatcatagctgacgccctaagctgaaagagtgaagttaacatagttattgcccatttgatgttgtaggagttatgttgggagatggaacgacttagagtatggtcgcccatacagaagtaatagtcattaagtagaaccaatcttggagcaagaaatctata

SEQ ID NO: 112131 - DNA, 568 bp, Zea Mays
ccatttaagcctaatctcacatcatgcaaacaggaatctgtttaagcatgttaggcctgcccacatattcatccaagcacattctatacattatatcatcccatataggaactctctttttttagttatactatacaaatatctatcgaataactcagacaaattgcatctcaacctagacttcacatgacgcaactatttcatacttacgcaatcacgccaatacaagaaaacgtggcttcacaacaatacgtactggcctattcaaacgttccttgctatctctgtgttccagcccacgctccacatatacataaacaagataaccatcccaaccactatgtttattccctcccaccatacaacttaattaacatggattgcgaaagagctcaccacaactaaaccaaactcccatgaaaaaaatcactaagtagaaaattgacaatcaatagcacaaatgttcatttttttctacctctcactataaaagcaatggtaacaatgaaatattgtaaaatcatctaaacttcatgatctacaactttcgtattcaaaggataaacaa

SEQ ID NO: 112132 - DNA, 548 bp, Zea Mays
agaggtaacagccgaatcctctagagccacgtcactattttaggaataacggccgagtgactgctgtcaatgtcggtgttttagaagtaacagccaagcgactactggcgacattggcgttttagaagtaatagtcgagtgataacgggccacgtcagccactttggaaacaatggccgaatgaaatcttgtaacgtcagcattttttagaaataacagctgagtcaaattgggccgcatcggccgttttggaaataacggtcgagtgatgacatggcacgccagcgtttcagaaataacagctgggtgatgacttggcactttttagaaatggcttctggctcgggaaaaccccatatgtactgcactgtcgcacgcttctgcattgtgtgccctagttttgcttttctacatccaggccttctctgctcccttgcagtattgcttccgctccgcccgccggcaagattgaaatggcgcccaagcggaaatcccagagttcgtctgccgcaatcattcctcccatcgatcccaacagtcagttgcct

SEQ ID NO: 112133 - DNA, 440 bp, Zea Mays
gtaatgtacgtgttgcgttggccatagatgggttcaatccctatggaatgagtgctgcctcgtacacatgttggcccgtgtttgttatcccaatcaaccccccctggtgtgtgctttcaaaggcagaatatattcgtgtcgttgataattcccggacacccggggaataaaatgggcgtgtacatggagcctttgatcgatgaattggtatgtgtctgggaggaaggggtatggacgtatgaccgagctacgaagacaaactttagaatgcatgtttggtaccagtactccatgcatgacttaccgacgtatgggctattctgcgcctggtgtgttcacggtaagttcccatgcccagtttgcaaggaagctctcaggttcatttggttgaaaaagggtggcaaatatttgtccttcaataaacattgacaacttctccc

SEQ ID NO: 112134 - DNA, 527 bp, Zea Mays
atttgaggcagcgtcggtggctggaattgattaaagattatgatttgtccattcattatcacccagggaaggctaatgtggtggctgatgcccttagcaggtccggggttccaaaggtggccttgtcgttgatcgctgatctggaccgtgtggggatcgctttgtgttatgtcggcaccgctagcagggagactcatatgcttattcaatcctctctcatggagagagtgcgtgcggctcagcaacaggattgtctattgcaggaagctcgaaagagggtgggtgatggtaaaccgcgggagttcaccattgatgagaatgatttggttcgtttcaggggtgtgcctcagaaatcagaggtgaagatggatatcttgagagaagctcataaaacgccttacactgtccatcctggcgaaaccaaaatgtaccgagatttgaagcaaaacttctggtggaagcgaatgaaggttgatgtttctaagtatgtggccgcctgtgaagtatgtcagcgcgtgaagaccgag

SEQ ID NO: 112135 - DNA, 716 bp, Zea Mays
gagcatttgaatatgttgcatacaccttttacaatgttattggcactttggtttgcactctaactttgttttcagtcaaagtgccacattggtccttgtttgaggcgaaataggaaagcaatggagaaaaggagaaagaggtgagtgccaatgaattagtcaattggattacactctaattatgtctgtctaagttataggaaggtgttcaagaaatacgaagttgaatggaagaagaatggccaaaattggctcagtgtgttgttgtctctaacgcatcggactggttcgatggggcaccagaccgcgggcgtagagaaggcagcaaaggacgacttggtggcctagtgcaccggaccgcttataggacccggtccggtggtgcactggaccgcctacaatgaacaggtaggctttggattttttggctataatacaccgaaccctgagggtccgaaccacttggtgcaatggtcccctcgacaggtgaccattggccaatggctagctgggtccggtgccgaccataacaagaaggtttcatttagaatcctagagacatcgctataacggagggtccaatgctcccatgaacataaccttcctagattgttttgcaacgactatgaggggcttggggctataaaagggccccttatcaactccaagaagaacacctaagcaacatacaagtgtagaacaagtgcatactcatt

SEQ ID NO: 112136 - DNA, 442 bp, Zea Mays
ctatcttcgtgccatccatttgagtaagtcgatatgatcctggccgagtgacttctgctaccatgaatggcccttcccatagtggcgacaatttgtgtcgtccttcccccgttggaattcggcgaaggaccaaatctcccactgcgaaggatcgaggtcgtatggccttatcatgataacgcctcatggtctgctggtacctagctgactgaattactgtattcaatcgtttttcttccaatatatcaatatccaccagtctagtagcttctgcctcagctatgttttcgaagatcagccttggtgacccaaacctgagatcggcaggtagcactgcctccgaaccatagaccatgaagaagggagtgtttccatgcaaagctcggctaggctgagttcttaggctccaaaccacatacgacaactctccgatccactttcc

SEQ ID NO: 112137 - DNA, 440 bp, Zea Mays
gagcgctgaataaccccttttatatcttccctctaactcaggtcaaccttcacataaaaccattcttgcatccaacaacctagccacttttttccgaaatgttggcacaggataactggccttagcgcggggtacgaagctgtagcagccaaaattgttatggtattgctctttcccagtcgccttcgtctgatatgataactcgtggatactgcagaaacacctagcatctggctctaacccttggcttctcatggcccatataaaaacccctactttgataatagcttcgggggtaagttgatgaagataaatttcaaaagcttttagaatatcgaccaacatcttatccagggggaaccgaattccagctttcatgaagcttctgaaaattaccacttcgtcagcttcgggaagaggaacattattctcccctccgg

SEQ ID NO: 112138 - DNA, 977 bp, Zea Mays
ctggagcgtacattatattatcaaaccaaatcaacccgacataaccatctaatgttccgctatgcacaataagcgcatggtctggggcttaatcatccggaataaccatccgatcttctggtaagcatagtaagcgtatggttcacgactttgtcattcggaataaccattagattttccggtatgcactgaaagcaaatgatccggggttttggtaggtgtaacgttgttaggtgaatgcgtatgttggctgctgttgcacgtgcgaactgctgtgtggaagctgctgggtcctcctctattatgtgtggcttgtggcgggcttggactgctctcatggcttcgtcacttggaactgctcgtccgtccggtcctgcgtgcatctctctctcctagctggaggcgtggtggcctggtggtttctctgtgtttttctttttacgacggcttctcttgttggctagggttggcatcaggggcccggtcagctatgctccctcagcttttataggcagcgaaccaccgcaggcagagcagagataaagattccaactgcatccatctacaaacaaggatctcgacggaagagataaaagcatgcagcacaattgccgctgccctactgcagccttgactctcgtcaattggatgaccaaaagatgccaccgtctaagctcttttctttgtgcagctgcctgtttgtcaccaacacaaaatttgtaggtgcatgtttgtcaccaattatcctctaccacaaagaactacaatagtggtggaggatccgatccggcacagatccactataatgcatagttggtgatgcatgcctaatggtggttgtttagtgttagtttgggcatgttggaactaagcaattgtcgatgccatacactagaagtgaagaatgttgttagcgttaggagtagaggtgtcaatggggaccgatgcccgttaagccatggagaatttctctatta

SEQ ID NO: 112139 - DNA, 508 bp, Zea Mays
caggggcggcccaaggcgaggtgcttggccggatgtaacctttctctgacagctcatcgaactgcttcttgagttcaactaactccggtctagatactctgtaagctctcttaaagatgggggcggttccaggaagaagctctatggcaaactcaacttttcgctcaggtggcatgcctggtaagtcctttgggaacacatctgggaactcggacacaaccttgataatctcaagtggatctgcttcattgctatcaatagccatctgataacaacctcctttccgtggctcaggcgggactaactcggtcatcacttcctctcctcgtggggacatcaacttgattttcctcttatcacaactgatatctgcctgatacttatctagccaattcatccctaggatgacatctattccctgagtacccattactatgattagcgagaaacgctatcccccttatttccacacttacattcaagcaaatgttattggctccaattctac

SEQ ID NO: 112140 - DNA, 521 bp, Zea Mays
gtgggctacttatatggaaacagagcagggtgtgagtgtgatagcgggggaaggctgtgatatttctatatggttgtgtgtcattgtgtggatccagtcgcttccagagcttttttattttttatggttcggctgaggggtggcatcctgtggagttcatggcggtactgtgatgattatgatatggagtggacgtcatcacttgttgtcttgatgcactgctcctttccttgtgttactgccatggtacaggtggggtttgaaccattttggtagaggtaaggatgccacatcagacatgtggtacgacattgacgtgacaggggtgaattactcatgggtgtggtagattaggtgttaccttgttaaaccgcccatcaagttatttgttcttggatcctgacagcacttcatctgtcaaaccttagaaacttccgtggaacttggtcacgttaacattagctcacactcgcactctccgccgtaaccggccgccgccgccagcgcatcgaatctccccg

SEQ ID NO: 112141 - DNA, 383 bp, Zea Mays
catgctttgtaatcaatgccttgtctactattctctcttaccatatgtttctaactcagatggtcaatacttggaagggtggtggaattgatctacctcccaatcaacacactcggaggatatttagacaaccccagcaacaaccagcagagatggatcctccaccaccgcctccaccagtcggagttgacccaactgttgcagctcaaatgaggatgatgcaacagatggtagataccatggcggatatgcactcgcagatgcagcaagaacaccaggagatgcgctaggagagagaggagatacgccgggagctacgccaagaacgagaagagatatgccaggagagaagggcgtagcagcagcagcaacagcaacaagca

SEQ ID NO: 112142 - DNA, 292 bp, Zea Mays
cttttctgtgatttttgtgtagaaccaagccatcctcccttaagaaaacttgcacaccaatatatgttcttcaacttttctataaaaggtatgtcttaatactccaaggatcaagcactagagagctccaaagttgagccaaacacacaatgtctgtgtgctgaaataagactaagtctgaattcagatttagcacattgaatatttgaactactgttactgtcagttccaactggttttagtggcattacccttaatcaaactttcacaccaaagtatgggcttccacttt

SEQ ID NO: 112143 - DNA, 510 bp, Zea Mays
tgtagatctagaaattcaaagaatttgcctagggtcaatatagcaaagttgtggagccatcataggagaacaagttttattaagtaactgagcactggtgctgaatagaaattggtgaaaatgagcccaaagttgggttgtcagtcagcctaaagtctgaagattgattaacagtgtgcaggatcaactttgggaccatgtggagctcgggttaatggatgtttggcaaaaacccctgtgacaaagttcaagctagattgataagctacaactttgatgcagagtactgggttagtcgccacacaaaatttagagaaagttcgccccaaacgagctctgtcagaccaaccgatgaagcctctgatggtacattggcaaaaaatctacagattctatgaatctcgccaccggtgacccttcatcgtgattggtgctgaccgccacgattcgtgcttcaggtctgtggattgagctcgccggtgaaaagatcacgccgcggatgggtccggg

SEQ ID NO: 112144 - DNA, 436 bp, Zea Mays
actccctatatatagatgaacaatgtcctgcataaagtacctttttagtggacaacacaatttccctgtaactctctctctctctctccatcacatctctgttgtaattctctttacaaatgtggaaggtacacttgcaaagttaaattaagtcaaaagaaaaatattgggaatatatctcaattgagttactatatacgaactcttttgtattccttgtaccttcatgcattcacttaataattaccttcgttgccaaaggagttatctcgggtggttaactccttcgtgacgaaggtcatctattcttttaatactatgttgccttgtttcttgattgtatttagcgatcggaaacaagtgaccaacagaagctaccgctgactcggttctagtcgcacgactatgtgccagtgcgccatggtcccgatcctac

SEQ ID NO: 112145 - DNA, 288 bp, Zea Mays
aagatggatcctaacgctgagattgaagaatgtgtcaccatgatacaattcaatgagctcaaacaaagcatagaagacaagcaagatcggttggcacaagatcttcagacacttatggctgaaatcagaggtcgtcgtcgactcccagatggtgcaagaaaccataatgaagacggggaataaggtgaaggaaattattctagaagagcaagtgaacatgggaggagaaatcaaggtgctgcacgtggtagaggaagaggccggaatcgaagaaatgatgacaatgaa

SEQ ID NO: 112146 - DNA, 405 bp, Zea Mays
gttgccaggtttgccgctagaacatgatgtggaattctctattgaactgaaatctagtacaactcctgtttctcggagatcatatagaatgcccccaaatgaactggcagagttgaagactcaattgcaagatttgttagaaaagggttttatttgacccagttccttaccatagggttgtcctgcaatttttgtgaaaaataaagatcaaaccctaaggatgtgtgttgactacagacctctaaatgaagtaactatcaagaacaagtatccactgccgcgaatagatcttttgtttgaccagcttgttggggcaaagatattttcaaagattgatctccgttcaggttatcatcaaattagggttcgaccgaaggatattccgaagatggctttcacgacaag

SEQ ID NO: 112147 - DNA, 574 bp, Zea Mays
ggtaatggggaaaggcggccatttcacttaacttcaacatatgggctactggtactgccaactgaagaaaatcttgtccaacaccagttcagatggtttggactttcaaacaaagaccctactggtgcatagagggatcctttgatattgggggaggaagaaaaagaggacttgaaaggatggaatatacctaaagatttgtccttggataggaacacatatgttcggctatttcaccaacatgaactattaatcggctaagagggcttttttagagtgttgtgtgggaagggaactgctgcacagttgtgggtgattgagagtgcacatcctacaaatgcaatgcagtttatgctgttttcacctgcattcttattactttgccagaatattgttgtagcttttcctatttattgccacactactatagctttatgacttccagccattcataaaatggtttgctatgctaaacctatgaaagatgaacttttatcgttgctaaattgaaatgttcacccttaactatttgtccatgaaatgttcaaaaattctgctcggtcagagagattgc

SEQ ID NO: 112148 - DNA, 531 bp, Zea Mays
acgcagtagctgtcaagcatgttgccgtcgactcttcgcagaaggagacgaataggcactcttcacagaaggaggcgaagaataggcgatggatggatggatgatgatgaagcgacgcgataccgatctattactatatatacatatttttggcccctaatttaatgggccctaggctctagcccctgtggcctatggccagagccgaccctgctctatgtgatgaggtcctcacctctattggttgggctcctagccgactatgacttatttgtcacctccatgacaaccaagactaaatcatcctccctcaacaacgtgcttgtacacctagttgtgtttgaggcttaccaacttcaatatgtggccagactgtagctacaacatagtgcctctgccaactactttggtcacgatggcccctctcatggccatggtcatggtggtcactcccgtggcagtgctccctcccgtggtgatcatcgtgacaatgaccctcatcctcagtgtcagatctatggcaagcttaac

SEQ ID NO: 112149 - DNA, 454 bp, Zea Mays
aaaaataaaggtaaaagagctatactttgttaagtaggtttcgggattcgtctctagccaactcgcgtccacccttagcgcaaatttgagtgatgaacatgttccctatgcttcggccttcggctagaacgtcaaccagatccgatgacgaaaggctaaagttcggtctattgacaacctttgcgtgattacactcggcctttatgaaagcagtgactataccacgagaagccaccagcgtacataagtctccatggccggtgataacttcatcgaggacatcgacttctttctctacgcattcgagggtcccggggatatcttcgacagagaagttagcttcttcagatgcagctccaactgaattgaatatgattttcaatcgagtggtgcattgtcttgcaaagttaaagcatctctccttaagagctctcaacgcttcactgagcttcga

SEQ ID NO: 112150 - DNA, 656 bp, Zea Mays
gtcactatttctcagccttcaatgaatcaaaggaattccaagatacatgaaaggcaatgtcccaattccacaaccaaataaatgtgaatattgcaattcatattccttagctaccccatagcaaaatagctcacttttgtggaaatttattttaagcccagacatttgttcaaaaacagtcaaaagtaatttaatattccgagcatgctcaagattatggtctaagaaaaccactgtatcatcggcatactgaaggatagataaaccctctggaatcaagtgcggaacaattccatggaactgattttcctctttcgctcttgcgaaaagaatagctaacatatccgcaacaatgttgaataatattggcgacaaagggtctcctcgacgaaggcccttgtgagtataaaagaaaggacctactccatcattcactttaacaccaacatgacctccagagaatattttttggatccaagcgcaccaagatgatgagaaccccttcatacgcattgcttgctggagaaaattccatttcactttatcataagctttctcgaagtctagtttaatgataacaccatctaactttttcctctgtaattcatgaatggattcgtgaaggataataaccccttcaagaatattgcgaccag

SEQ ID NO: 112151 - DNA, 736 bp, Zea Mays
gttctatactaggaaggaaccataatgaaaaagaatagtatgacaatcttagactaaaagaggaataatttccatgttgtacagaaggagatggggacacaaacaaatgaaggcaacattgtagattcagagaaaggggagttagacaaacaaagggtgacatctcagaagtcaatagaggggacgtctttgcagaatcaggaaaacaacacaaaagaagagccaggaggagttgacacagcgggctacaacaatagtcgctgatgataggagatggacacagaaaaaatgggattcaaattaataaaggaggaggacagtcaaggcttagtagagaacttaaaagactaagtatgacataaggactctcatcgggaatatcagaggaatggggaagaaacccagagttagacaactgaaagacttaattagtaaagagaaggtggacattgttggtatacaggagactatcaagcagggatttatatggatcaagaattgaagggttttatagagggttatgcttttatatcgaactgcattctgggggaattttggtaggggtcaaggatgatagatttgaggtgtaagggtggattaaaggaagattttttggaggtggatatcagagatagattaaacaaaattagatggagactggtttttggtctatggtcctacagaccacgagtgctcagaagattacttcaaggaactagaggactgctgccaagtt

SEQ ID NO: 112152 - DNA, 366 bp, Zea Mays
ctggtaggccatctccccaactcgcttaaggattttgaagggtccaataaagcgaggggatagcttgcctttaactttgaatcttctcataccacgaatttgtgacacctttaggtatacgtgatcatcgtcttcgaattccagtggtcttctttggttatcagcatagctcttctgccgagtctgtgctatcctcaagttctccctgatcatccgaacttgttcttctgcctcttgaataatttcaggcccaaagaattgtctctcaccagcctgatccaaatacagaggggttctgcactttttgccatataaagcttcaaatggagacatcttcagactagcccgataactattattgtaaga

SEQ ID NO: 112153 - DNA, 471 bp, Zea Mays
aaatttattcagctatctcgatatgctcctagggatgctgaggatgatgagaagaaacaggagctctttttggatggtttgattggacccatacaatatcaactggtaacacacacatttccgtcctttcaacgactacttgacaaggctattgctgtggaaaacaagaggtgtgagtttggagagaaaagaaggcatgctaaccaaggataggctggaagtagttcccgtcctctctatactaccactctaagtacaccagctcgtggcagttccgggcagaaaactcaacaggcaccaactgctcctccgcaagcaagcaccccagcaggacctgttgctcctaaaacatccaccaacagggcatgcttcaagcatggacaatcgggacactatgccaactactgtcccaacagggttgcctacactacactagctccaatgaagcaaggtcaggcttcggcaggaaag

SEQ ID NO: 112154 - DNA, 493 bp, Zea Mays
aggctttcctgatgatagtgcttcatggatatatgtggatgagcttcggcggctttaccctttattccgtctcaagtgggggattgtgtatcgtcgtcgtggtcacggacctactgcatgaaacaaagctagcgacaatagtttgcagaaccaaaagattgatattatcttatatcatcatttctcttttatcagttattttgttttaatttatatctagtcaacttttgttagccccctctataacagaggctggaattgtttcctttgtcatcatttggaatataatgctttttgttttctcatgtgtcaccacgtttttcttgaagctaccatcaataggatctaaaagtttgatggtgaaattttctcaacactattagtaatgaagtataagtgagattatagggagggactaaaggagggggttatttttttagtttgaatgttgaaagtttttgcgtgaaaaacttgcaagtgtaattctttgggt

SEQ ID NO: 112155 - DNA, 1029 bp, Zea Mays
gcagttattaagtgtgccagtgctactgctaccagttaaatttgtttctccaattactggtaccagtgaataagtgctactgctatcatagaattatccacaaataataaagtgtagcaagtgcacgatacaaaagagattcttttaaaacagctgcaataaaaaatgattcgcaccatctaactaactgaagcatagcttacctgatgaaacaatggtgtgattctgtccacgtgcaggctttcctgatgaaacaaaacacttctcagttttcaaagtcaactcaactgaaaatgatactaaaattcacatctggaaaattcacagaaaaagtagaaccctttttcagcacagatcagacagataaaaactctgaaaccagcgaacttttgcaggggtacaccgcacaagctacaatattttatattggtaccatagctttctagagtagcgttcatctgttgatagcattcagaacaactgagtttttgaagacaacattcagaactttctctaacagaacacatgggtgccaaaacatccataggggccaaaacatcgtatctagcatcgaccagcatcaaactaaaccataggggcgaaaaacatataaggaattcaacataacgagcatcaaactgaattggagttcagagctgaaactaaaccatcctgacccgagttcaaaaggttacaagcaaaacattattccaacgcactgcacttaaccacatctagcatcgacccttctatctcagcagctccaagtaaggtttaggacagggggaaggacatatcaaatctagcattcttgttctaaaagtagacaatgtaggaacatagaatgtttcagtatgaagttcccgagaaaaaattgtgagtttttagtaaagcatgtagaaaatatatgtaggaaatctcaaagaaatgtccttcccaaaagtagacaaagtaggaacagacaatgttccagtacaaagtaggcacatgagcgtaagacaatcacaacagttctgatctgaagataac

SEQ ID NO: 112156 - DNA, 380 bp, Zea Mays
ttcttatccgtggccttgctcttcccatttctcccttctttcgcggtctccttgacttttacaatctgaatctgactcacctgaatcccaactctattctgcaaatttctatttttgttcatttgtgcgaagcctaacttggaattcttcctcacttcggtttgtggaagtacttgtatcattgtcggcctgggatggctgggggcagcaccagctcgtggctggtgcgagtctggagatgcgccatgggaggataacagaataccttgacatcccacttaaggatagcattaaaggatggcgcttagagtggttcattgtggaaaaccatggcaagtccctccccctcggtcagggagacagccggatgttcgtgctcc

SEQ ID NO: 112157 - DNA, 481 bp, Zea Mays
atcgaatcctaccgagcaaaagtattatttgatactggtgccacgcattcttttgtttctacatcttgggtagaagcacataacatccccatagaaccaatgatcccacctttaagagttagtttagttggggaaaagttcagtctgataggatttgtacgaatctaaggattgaaataagggggatagacttcctcgctaacctagtagtaatgggaactcaagggttagatgtcatcctagggatgaattggctgcacagaaatcatgccactgtcagttgtgacaagagaacagttaagttggtgtccccatccggaaaggaagtagtaactaagctgtacttgcctgaactagaagaaggagcctgtcaccatttatcagtagatgacaaggagtccaatctaattgaggcaattagtattgtgtcggaattcctcgacgtgttccctaaagagttactaggtatgccacatgaaag

SEQ ID NO: 112158 - DNA, 4305 bp, Zea Mays
agaattaccttgttggagggcattgatagctgcaagcagatcgtccttaatgatatgccagcatgacttatagaatctccgaggggaaaaccatccggacccggagctctatctgaaggtaggcagaaaactgcaaaccggacctcttcctctgagatggggaggtccaatacacctagatcgcccatgtccctgtggcaagatcccaagtttagtgtgaattctctatgtttagccacccccaacaggttggtatagaaatcattcaaagcttcatgcttctgctcatgagaggtgaccacctgatcaccgactgtcaaactagagatgaagtttattttcttgcggtagcaagcctgcaagtgaaaaaaagaagtgtttgcacccccctccttcagatatctaacacgggatctgagatgagccactgtcctatctaaagaagcgagggccaaacaatgttgcttaagcctcctcatgagccataattcctcaggagacagcagcctgctatcctgagccatctcgagtctgtgaaggatttcccttgctaaagccaattgggacttcacattgcctgcattcttgtgcccccaggactgcaacctaaccaatcttcgaagcttcaaggatacacgctttagagggcaggaggtctgaactggctgcatccaagaatcagccaccacatctaagaaatcagcaatctttagtccagaaactttcaaagtgaaatctgcgctttcccttaaaatcttctttgagactgagagttaaagggcagagatctgaaagcctcgtggcactgctgcggagaatacagtccgggtagagttgttcccagcaagctgtgcaaaacaagtgatcaagcttaacaagagttggggatgacctttcgttggaccaagtgtactttctacccatgagaggtatatctttcagccccatatcatttataaatctcctgaacctgccatcaaagatctgtttatgttggtattgtttttgttctcagagcagaagatctgattaaaatccccagcaacaacccaagggcctgcacacaattccctaacatctctcaattcttgaagaaaaaactgcttaagattgtcctgatgcgggccgtaaactccagtaaaccaccattgcaatccagattcctcctgaagctgaatggagactgagaaatcacgcacaataccgctggcggaggaaaaggctccatcccgccaggccaccaggatgccccccttgtcccatgagcaggacagaagacaaaattaccataaccaacacccaaaatagataggacatcaaaagcagagatggaactcagcttagtttcttgcaaacagactagcagaggcttggaactaaggacctcagacttcacacaatctcttctagatctatcattcagacctctaacattccaaattagaaaaattgactgatacatgactaacaatatagaagaaaacgaccaaacagcgtcaggctgagacctggatctctaccggcacttcccagccgaacaaagcagccatagcctccacatgtgatctggagaggccgttctcgaataatttgacatatctagcagcattttccaaggagatttcctcatggtcaccacaataccccaaatgcctgcacaccttggcaactgaaacgtttccgaggtcaagaggaagcttagccacccttctactcctcctgggcatgaaatcctttggcagtgtcttcttttttctcaaattgcacctaggtggcgagagcagcccgttaatcggtttgatgataatttgtttgaaggcctccaggggcaaagactcaaccggctcctccagaatagatggatctgacccaaccttcgatcttcgagaatagacattgagacaacagcgatcaggacgccatctctgatcaaacaagtcctaaataggaggaacaagaacagggctgctgctggccgaagcaatagcaaacaagggtacaacatccatcggtccatggggctcaaccggagcaacctcctcaacagggacaacaacgtcctggaagagcattgcttctggagacacggtgaccgtctgtagcataccatcaaggacaaggcctgagctgatgagggcaacacctgtgctgtccatgacaataacaaggctgctgctggttgaattaatagtatacaagggtgcatctccctccagttcaaggggctcaacaggaccaacctcctcaataggaacaacaacgtcctgggggaacactgcttctgggccacggtgaccgcctcaatcacaccaccaggaacaatgcatgaattgctgggagcaatgtttgtggtgccagaaaccgatccatacatctccacaggaacaagctcctcgacagggacataattgccctggggaagctctgctcccagaaccgccatagcaggagaggtcacccaaacatcgccaggaagatcttctgcagaaacatcagcatctttggggcatcggacccaaacgatgcaggacagaccgcctaccccggtgagtattgtccacatcaggggttccacgaccgtcaaagtctgggggtggtgaacgagaacggtatcgtcgccgctgcctggcggaatcatcgtcaaccacagggtcccgaggaggggggagcaatgcactctgatgggcaaccactttaatatggatctggtataccagggccagtctccccttgccagagggaaggccgtgtggctcaacaatccaaaggttccatgaagaaggaatggttgaagggtcgtagcaccacccagaacaccgaaaaacatcaaggcttcttgattccagagtatcagcatgcacctcctgaacccaagcaaaagggttaagaatctggttgaccgtagaaagctcccatgcatgcagcggaatgccactaagctcaaaatcaaccggagtgataaggttggatcctaaagaaccaagtagcttggaccatctcttacacagcaaagaaaaggagcctgatctgataatgtgcctcctatccgttagaaaaatagcctggtgctcatagggtagcataagcaagaactcagatggggaggactgccttagaattaacgaaacagccccaacttcaagcttcagagcgatctcctccaaaatgtcagcagtggtcacaggaagatcgctaataaccgaaatagagaccgcattccccaggtcatctaccgccttggaaaaatgattgttccatccaataatacatgatccatgcttaacaccagaatactgatccaaaagggtctcgtcacctcccggttgatcaatgtgatcggggccaggatcagaaccaccccggatcgaggaccgacgcttgcgatgacgcctacgacgatgacggggagggagggtccctagcaagcctggatcgtccatatgagacggctccaccggagacgaagaaataaccaacgtaggagtcctcccactagaggcctccagcgcgtggccagagccattgcccccattctgtggggagaccctgcgccaaaccatcctccggacttcaactccacctggaggagacgtcggtgggcgaagacggtcccagacagagccaccagatgcccgggtgtgggccttgggcgctaccggaagccggacagggtctactgagaccaccggagagagtctgccccagacaggtcccttggacagccgccgatgaactggaaccttactggcagacctcccaacaggaacatggcagttgtacgaactatggcccagacccatgcagcggagacatcttgtcctcaaacgacaagacgcagcaaagtgatcttcagcgaagcagttgaagcaccggcccaacaagttccgaggaacagaggtgacggagagcgggagctgcaaacgacgcctcctagccttccgggattccactcgaatcaagccgtcctgaggaggctccggcgctctaaccagaccacgagaccgtaggcgtccagccaaaggagggggcaacgcagtggtctcaagtggtgggagcgcaaccgaagcagcaagcctcgacgaagaactgggtgaagccgacgaacagaggattatatcgcgaaacgtaggccgatcagcctcccccgcaggagttggagcgacaccgcgagacccagaaaagtcgcctaaccacctctgtaacttggacctcccttgggtggcgcacggagcagacccgccagagacaggggaaatgaggggagacgccttggatggggaggccgcattgacgacggcgtgggga

SEQ ID NO: 112159 - DNA, 372 bp, Zea Mays
agcttttggtcctcttgtcgtcagctagaagaacggggctgggcgcgggtgtcgcagttgcaagctgcaaaggagtggttcgttcgtaccctagtactgtcgatggtagacaacgttgtacagttgaagtcactgcattggattttcagtagttgcaggtagagctagctagctagctagcgaatgtcttgttactgatggtgacgtgggaatgcgacgcctccgttgcctatagattatttggcagctctcaatgagcgagcaaattagggtggatgtggatttgcccaagtcactaaaacacatgtccacattattaagtcattatttgatattcatctcaatttatgtgtattctcaatccatgtggat

SEQ ID NO: 112160 - DNA, 295 bp, Zea Mays
tatccatataattctttataagtctctatttaataaaataactaagataaaaggagaggaagaaaacttagtaggttggcctgggtcatagaaaaattgtcgtggctgaaaaaattgcattcagatgatgttgtggaccatggaagtatggaactactgcgccaacataaatagtgaaacactcatgtgttgtgacgccacaccaatcgtatagtgcaacaattgtatgacgtgtgtgggcccatggcaaaccagtgtgacagaccctccctacaaaaaatgaatttaaaattaa

SEQ ID NO: 112161 - DNA, 458 bp, Zea Mays
ggcatggctgattgggtgcctattccctgccttgtgggcaggagattaattggctgattgggcacctaattttctgccttgtggggaggttgggcacccacctcctcctctctatttaaccagggttgcgccccctcctagagttgagttttctttgatagttttagccatcgtgcaaacttcctgtactgcagttgtgctcaacggccacctgtggatagcctagtgaaccccaactcgtgagtgattgatattcagttttacctacatcttgttcttgcttgtttctttgattgctcgcaggaatagaacttcgtgttcaggttgattttgccaccagcaaggtcaataaccatttggagatggttttgcgattgctaaggcgccacgacctaggtcgttcgtagtcggatcgcgagagtcacctcctccaccaaataaaattattcacctcacta

SEQ ID NO: 112162 - DNA, 329 bp, Zea Mays
ccggcaccagagaactcgatcctttgggtttccacccaagggaccaagcttcattagaccagctggacccactccgtcatgtttcagtcagcagagtcagagctcctttcaggccccctcggttgcaagcaaccaaccgccagcaaatgcctgttggcactgcggagaccccagtcaattcaagaacaactgcccccagttgaaggcatcaggacctgcttactccaactcggtgaatggccccaagaatatctcagcacccgcccccaaggtgccctcctccatcagccagcagaacaagacccagtatcaaggaagggcacgagtaa

SEQ ID NO: 112163 - DNA, 565 bp, Zea Mays
ttgttatacctaggcctgagcatccttgttggaactcgctatctcgtggtcagcctagctcaaacagtgggagaacaggaatagtttgatgccatttaacacatagtattagggcaacaatgttttttctgtcccccgcaatggtgttgtacgatggtatttataggtaattgagggacaactctaccctgtcaaagacgattgtgccctcgattacctacgttatccccagaatattcccccttgggggttacggcgggtcattacagtgtgattaattacaagtatagacagacacactaacaactctaccctcatagcagcttacaagtgggaccctgcatcatgggccgtttatgtgtgggccccttattacaataacgagcgggtaacaacacatggtcttcacgttccacatgcttagccttcagaactctcggcggtcttcgttctaacccaccgagaaagaaggggcgcccaggccttcgcccgctctgtgcgctccctccatagtggagctctcactcttcggtcttctcgctctttagatttcacttgaatccct

SEQ ID NO: 112164 - DNA, 428 bp, Zea Mays
ccacgatatagacatcgtctcctggtaaggtggaatcttgtcgaatttcgactatcccaagattagaatgtgtccgtctcgtcacttgagggtcaaaccaatgacatttgaatatcactagagtaagaggtttggaaccataaaaattgagctcatatatttcttcgattcatccaaaataatcgacattgtcaaggctgggcgtaaagactccagaacacgttgttttccgattgggtcgacttttgtcgtagtttgttgtgcgaaaacggtatccattgacgtcatacccagaatatttcttgaccctataagcaaagccgttggctacttgtctcaactcggcactcatagacggatctctttggccctgcaagtattcgcaagttaaaagacgctaaattgagttcaaagacatatgtctttta

SEQ ID NO: 112165 - DNA, 406 bp, Zea Mays
gttctgctttgtactatggggttgtcagccaaacctttttcggacaaggggtaacaggcgtattgccatgaccaacaatggtgcagagaagaaaaacaagatatagaggaaaatgtgaaaacaagaactaattttgattctttttcaggctcatttttattgaccagaagtatccagcctttttgaacacaaattgcatgagctcttactttcaattagagtataaagtaggtattgcgggcaattgagctttctaaagagataaaatagcatgggaaaaacccttaattcatagtaaatcttttttatttactttcatctcatattgtctgccttttctactccttgtgaaaatggagtttgaacttaaaattttgcagaaggctgaatgaatttcataccacct

SEQ ID NO: 112166 - DNA, 473 bp, Zea Mays
acgcaaatggccatgtcacggcccacgggtatggtctgcagttgctgtgctagtaaatgttgctgctttgataagaattggcaagctttgcacctctatactaactcagctgcatcactctttgctgtcggccagtagaaaccagacctgaagaccttcccaaccagagtcctggatgctgcgtgtatcccgcactgtccggcgtggatctcatctaacagttgcttcccagtagctgaaagaatgcacttcatgaggactcctgttgcgccccttctatacagtgcatccccaatgagggtgtagtgggctgactgccttgcgatgcgctctgctgcagctttgtcatccggttcctcttcattctttatatatctgatgatgggctccctccagtcattagagtctgactctggctggctcaaaacattgtactcttctgcttgatctgaggaaatgcttgggcgtggtac

SEQ ID NO: 112167 - DNA, 448 bp, Zea Mays
aagattaggaactattggagatgctcttaattccaatccatgggtaccatccccaacagctcccaagatttttaaaaaatctaaatgcataggcccaccactaccgtatctagaggtagtctgtaagcaactgaaaacaatcgtcatattatctcagttctcaatagatgagaccaagtattaaacgcacatataaacagttgcatctggcagagtgctccacctacgaattttgttgcaagattactggagacgcatgaaggtcaaaccttgcttccaattatcaagtcatcatggtcgtcggacattaacaaatcagagcatacaatgtctgaataaggaagaacaaggtgcatggggacgggtgaagatgcgagagccaggcgtccgacgcggatagagacgatgatagagagagagagtagcacaaaccctttcacgcgaattc

SEQ ID NO: 112168 - DNA, 579 bp, Zea Mays
ataccatattcctatcgccaggatccatgcatcgtgtggcatcaggtgcagcgggtgatggggcataggatcgctcggggtatcgcgcgtcgtgtactggcgaacgccatggaggcgccgtcgctcggctcggatagaggtaggagaaggaaaggatagtcgtagatctccaaatggacatactggattagatccaaacataacggttcgccagagttaaccctagtcgtctatcatgacacgtacggatgcgattagatgtgcttgctgtcggttcggtcagggtatggggtccgtccgatctagattcgggggtgcggatagttctcgcttattttaaatctggttcgccgatctcgcgatcaacggctctggtagtataccggttggaatcaaatgatcggccggatctggagcgtccgtttctaatcggatggctgtgggttgccgatattcatcttgcgaatcttgcaaaaacaaccctgaactttatatgaatgaacccgccatccgtgcggggagaatatgagtcttgggagaaattgcgagttagcccctgacatcttaagaaatattgtg

SEQ ID NO: 112169 - DNA, 835 bp, Zea Mays
cttcttcctcgtctgctgcgtgcgcatcaccggctgcaccgtcgtctgaggagaccttgagtgatatagcggtgattgagttgtagcccggccatactatggagtttggtaccttgagaatttcctcggtccacgtgctagagatgcagcggcttggttactttggtaacggtgtcgggcgggccctgggtgcagaggaggtccccgagcctgaaggcgacttgatagtttttgaggccttttttgctgccggtcttcacctcctgacacattgattcgtggtggaggtgttgcaaaggtttgaggtacaagtccaccagttgacgccgaacgcagtggtggcgcttgcgaagtatgtctgggtggttacctcctacggcaggcagcgtttgtggaggtcttcgccaaaaactattgcctgcattggcagaagaggaagataaggaataagattgcctaatttggatcgtgcaccttcacgccaaggactgggaagacttcagctgaggttgtggagatagtcccctacgctaggaacaaatggggtagctggtgggatttttggttctacgtggcttctggtgatgtcgaattcttgctgagtttgcctcaggccatcctgtgctcacattgttatgtggagtttcctcgatttgaggtggcggaggaagacaaagatgaaggggcccttcggcaaactgctcgcctgagtaccaagcgtgacttggtggtggaatttattgcttgtggggtgtgacccttggcgcatggctgggtattgggcgaagtgaccccacgccggatgcctacccttggcggccagctggtgcgaagt

SEQ ID NO: 112170 - DNA, 358 bp, Zea Mays
aatggatgagcttgtactatttcatagtagaaaccatattatggcaatgaaaactgtaattaatcatatccccatattattttgttttctaagctttttaacttctatacaaaattattctatttaaatgggaacaagcaacctgctcttttgccaagtagccgctcttgtcattatcatgttacatgagtatagaatcaaagttagatttctaaatggcaactgtgttgagtgaactgagtgcttcattgaattatattgtttgatgctttgtgtgaatggctaaaccttcagcccaaatgcctaatgtatgattcttcttttgctatagattatgatattcacaatctatgaagtg

SEQ ID NO: 112171 - DNA, 607 bp, Zea Mays
ggacggtgtagttggaagtatgttgccaccatccatttctgcgtttatagcattcacttggaaggaaacattgccataaataattgtgctttcggtgaagctaacattccactcgaaagacttttccagtagatttgtaatctcttttggaatgaaatcgggtggattagtcgagatgagggtgtccacattttttttaatgaggcgctgcgccattcgtccaaagaagataaattcggcggtgtcagtgtcgtcttcagcggtgagggatatcttgtacctgcacagagtggttcgattgctaaacatcacaaaccatgaaatctgtcctagacactaaatgtctcctttagttgccatagtttgttttaacgactattcttttagctatattaccagaacaagcacactatgcacaaattggcataggtctatcttacagatgtacggtatgctaatgcgttgcgcactaaacttcaccaaacttaagatactctaactgcataagccatatactggacaacctccatcataggaactcttctagctgtagttggaaccgaagcagccatatctactatctacctgattggtaaccaaaaccttg

SEQ ID NO: 112172 - DNA, 792 bp, Zea Mays
ctcgtggcccttgaggttgacctctgcctccatgttgctgaaattgattccacgccaattcacgcaggaaatgtgtgttgtcagcggtagcattgactaaggtagtgatagcctcagccaatgtaggaggtacaggtggtgggtttggagtttcctccatgccgcggaaagttcctgccttgtcatgagcacgagttcttgatggcatctgaggaataaaaacatcctgaattattacatgccgaaagtacaccacctttattacattatgctgaactggtaataattatacatactcattagtacaactcaacttccttatttactttacataaggacactacttaaactacactactctaattatcttcgtccttggccgctccactgccagcttcgggtgaacgttcatctgcgaggttcatggaaggaggggctccaaaaagatccaactccctatcgggtcctccactagctgctccagatggttcggctcccattactgcaacctctggtggcacgttcggatgcaaccggtcgtataacacgtgcacctcttcatgcagggtgttacaatacgcttgtagattctccagggatgcgcttaattccgccacccgggctagaccatttgcctcacagtcccaggcgaaagagcgtgaatttacggcccagtcgatagccatacctcgttccacaatttcctgctgcaagcgattaacctccgctgacagttcagcaatgcggtggctatctcgtgcatgctccctatttccatggcgtagttctgac

SEQ ID NO: 112173 - DNA, 681 bp, Zea Mays
gatgaagaggaagattacagtattttgatcccaagtaaacccggtcatctagattttgagaaatctacagtgtctgaagctgacgtacccatgatgatgaagctgggttactttggagaagttgaaaggaaacttgtccgatttgccggagaggaaaccaccccagcgccgaaggatgatgaagtagttattttcaagagtttttttagagcgggactgcggttccctctgaacgagatgatagaagaggtcttgaaaatttttgaaatttatcttcataagctgacccctaacgccattgttaggcttagcgtcttcatctgggccctccgaagccaagggatgaggccagatgccgaagcattctgccgagtgcatgagttgcactaccagacgaaggccagggcagacggtctgcatgaaaattttggctgctacaatttcgcgtattgcaaggatacgaaggctccagttcttagctaccgaactaaatggccaacctgctggaaaggtgaatggttttatatcaaggcctatgagaagaagagggggaaactgaagacgatggtcatgtgcccgctggctttaagcttcggaatgaccagacctctgtgcaacatgcagctagcgtcagcatgccagctggcctcagtagaattcaggttggtggctgaacaaatc

SEQ ID NO: 112174 - DNA, 290 bp, Zea Mays
cccaaatatcttttgctatttccatcccaatcactttgttgtactcatctacactaagtgcactcaacatgatactagtggcttgagcatttagatggatccttcagtactcaagagttggattactaggatcttgtggttcttccttcccacttctcacaattcccaaagctcaagatgtagctcaatgagataagtcttcatcacatgtttccactttgcaaaattagttccatcaaattgaggtaacttccctgtagacacattcacaagagatctatggtcaagat

SEQ ID NO: 112175 - DNA, 691 bp, Zea Mays
atatcatatccttgagattgttagcaccaattcccactagcctccttctgaagattaaggatttagaattcgtactcagcaccttttctacacttatctctttgtcaagagataaatcatgcagtcttttaaatcttaccgagagaggaatattcccacaccaacaatcattccaaaaactggttgatttaccatctccaatgattcttttgtagtttttgtaaaacacatcttttacttccagaatgctcttccagaaatgcgagtccccttgtttcttttccatcaaactcaaaggtcttcctctgatatatttaaaccttactattttttgccataggccctccctattctccaatctccaccaccatttagccagtagacaatggttcatgtatctaaggtctaaaattcccagtcctccttgatccttaggtctacaaacagtatcccagttcaccagatggggtttattgttctttttttcccctgccatagcatcctccttctatacatgtccagttttttgagcacactaacaggagcccagaaaagggaaagcatgtataaggggatgctagacaaattattgttaatcagcaccagcctccccccaaggctgagataccttccttgccagactcccagttttttccatcttttcttccattttggcccaatgggagattct

SEQ ID NO: 112176 - DNA, 438 bp, Zea Mays
aaatcatgtcatatgtgctctgctagaagaaccataacaataacatccaaaaaatgctaccatagtagcaacttaccataaccagaattgtatgaactatagtttgcctcggaaattattatcaattaaaatcacttgatcaactcatgagagtaatccaataaattccctcagatttgtatgaataaacacctcatttgaccattcataggaaaacatagggcatatggagaaatcagattaaaagatagagtatgtttggttgcctggcccaaaataaaccattgaaacaggaagaaaaccaagagcaaggaaaacaaagcagtaagtcaacctcccattagtggtcatcagtcaaacatatttcattacaggcaaaattcacaaaatgagcaacgaaaacaaagcaacaagtcatactcccttgattgatcatca

SEQ ID NO: 112177 - DNA, 420 bp, Zea Mays
ggggggtgttggcgtattagccgtagatcccagagtatacgatgtccacgtaacgtttcggcctaagcgattctggccgttcgatcgcattatctgcgcgttggatgtgattatggtttcacaggatcctggccatcaactccagatcgtgtggctagcgctgcgtacaggttcgtttgagccatgatttaatccgaaccactagaaccagatctgacggcccagatttgggcataccccttcgtcgcagcctctttgcacaagagcccctgtcttttctttgtctaaacccgtcgtccacgccagtgtaaaagtaatttcatttaggtcctagaatttgcagattcgaccctggacttctggaaaatagtggccacggccagaggtttataaaatgggtaaatttggtaaataaaatta

SEQ ID NO: 112178 - DNA, 297 bp, Zea Mays
cgtacactagggaccctcgaggatacttcagttccttagcataatgttggtcctcagcaatttgccactgtgttagttgctttcccaaagcgtgacggataataaaatcaagatcttcagtatacaccgcttcaggtatcggcagtgataacttctctggtagactctcctttacttgctctattgacctaatttccgaaggtctaggagcagcgcctacgtcgatagctttttccaactctccagtttcatctttggccatcttagcatgagcaggagtagccatcttcgaaggcc

SEQ ID NO: 112179 - DNA, 588 bp, Zea Mays
tcgggattgagtccttgcttcctaaagcagccaatacctcctaaccgacaaacaagggacgccacaacaatggttggcctagccgcaatgagatggtagatgagcgcgtggtataacatcaaaggtctgtcgtcgcataatttgtgacaaaagtggaccaccatggttccatgagcaagctagaatgtcacggccgccacgatgctcctggataggctccacaaagctgacactccgggtgaatggaggacctagtatgagatctgggagctagatgtcgactagcaaaccacgtccacactgttcggaaatgatgctttatcgggtcagctcctcaagtacaacgagaaaggcgccacacgggtcccaccccatcggatccgaggtcgggcaggagtgcggagagcgttctcgacccaaggccatgaggaaaaggactggggtactaaacatcgattgtcggtacaaccagcgccacagagaacgcttcgatcccgatgagggacaaagtttaagctcgcccctgctgggccctcaggctttcggccgccacatccttcgagcaccagtgccgccacagtacagggc

SEQ ID NO: 112180 - DNA, 1089 bp, Zea Mays
cgtgcgacactccgcgcaaaagttgcctaagggtgcaaccggaatagcacaacaagtgcgttaatcgaagtcttttatttaaaaggcattccgcgcaaaagtcacctaagggtgcagccggaacagcacaacaagtgcgttaatcgaagtcttttatttaaaagacactccacgcaaaagtcgcctaagggtgcagccggaatagcacaacaagtgcgttaattgaagtcttttatttaaaaggcattccgcacaaaattcgcctaagggtgcagccggaacatcacaacaagtgtgttaatcgaagtctcttatttaaaagacactccacgcaaaagtcgcctaagggtgcaaccggaatagcacaacaagtgcgttaatcgaaatcttctgtttaaaagacactccacgcaaaagtcgcccacgggtgcagccggatcaacacaggcgcgcgaatacggccaacaggccacatcatacaaattacagttacatacactcggtgagggcatcatatattacatcggctcaaccttcgggatgatacccatctccctgtaattgaacaacattatcctcaattcctcaccctcaaaaagatttcgcagatccccttcacctatgctcgccccaatcggcgaggataacaattcttgtttaccaatccggtccactcgaagacgaccacactccatccccatacgacggcgcctaccacttcgcgaaaattcacccacactatgtttcgccaccacccttcgccgcctatacccagtactcgcactaggaagatccccggcaccctacacacgcggcgaagtgtccgccgcagccacatccaacgcagcaaaataatacaagccttcatccgaggactcctccgtccaagaaaacgaactcccagattcaccatcagactcaaaacactcagacacagagccaaacaaattatcatcagcaggcactacggttgtggccgccacaaaattagtattgccagcagcggttgcttgcgtaggcccaaacgtcggaacctgcacagcaaccgaggttcagtatcacagatacaaaagtttacacttaaatccc

SEQ ID NO: 112181 - DNA, 553 bp, Zea Mays
gccgacctttgaactccaagttttatggggtttggttgggccgtctcacagtcatgggtcagcgagggtccactagttccttccctgcaggtgggagacattatcgtgtattgaaaagatgggtcgatgcatcttacctagtttttgcttggtagtatttgggcctcggcactgcttcctgcgtcgttcgggcatcgccgggccctttggtcaggctcatgggttgtgtggccctcgaggtgtgcacatcgtctgacccagctctattcatcgaaaccagcaatatattagctctaatctcctactgcttacaggcgtggggcgtttgatcgtacgatcgtggcctggtggatcgatcgtccttgattggaagtgaaggtgttgcccggcttcatcccccagttttccttcttaaggttttgctcgccccctcgttgcccgccttgcaccgctgtcgcctgcccttaggctgtcttgggattctggagcccctccttgggcgaccaaagcttcctagatgttcttgtttctcgtgggcttctgcgcgagggag

SEQ ID NO: 112182 - DNA, 429 bp, Zea Mays
aaacatggctctagctagggagaagaatttataatataaaactagtagtgatctgaatgaaaggatttgagaacagtgcatacaggtggcaattgggagttgtaaccaatgaactggagctgatctgttgtgcggtaatattagtaagagttgtttatttcttttacacttgtttcttttaaccagcaaataagattagcctcaactttcattgactaatatctttgcatactaggttagcatcatatgcatataccaaactcgtcaattatggtaagaacaagagtagaatatcggttcttaatcatcaactaacatatctattctcaaaccgatatcaacaaacaaaccagcaaaacaggtctacaaacagactaataagtaagctagcaaatagagaaatgcatagaactcagggaaacatcattg

SEQ ID NO: 112183 - DNA, 338 bp, Zea Mays
cgtattttctgatattgataagatgattttggatatggccacggaagaaactgttgcaactgccgaggaaaccctggccacagtgcctggaaaaggggagaaggtgtttaacaaagagaagaagattaccgaagatatttcggaggacttcaattttcaaaacatgatcggttaggagttatccaaggctgaaaaagaggagctaagagattatgctatatcttgcggctaccagccaggagcgttgctcttcggtggcgttgacgaagagagcttaggatgcctccgggaccggactggagcgaaggttgtcagcactctatcgaagagtgttggct

SEQ ID NO: 112184 - DNA, 1177 bp, Zea Mays
cattgtttgaagaattacaaaggtgcttgggccttggatcttaaataaaaaattttcggagattattgatgttccatgagtgttctatgtcttcgccggatgaagttgttagcctataagcacttggggatgccttcgtcgtgactatgtacgacccttcccacttcggctctagctggccccgggactctgtcctggtggtcctcatgagtactaggtccccttcgttgaattctcttgggacgacagtgttgtcacgccatgccttggtctggacctgatacttgtttagggcctgtagggcgaggacacggtctctgtcgatgagatctttggaggtcggttcgtcgatgtcggggacggctgattcgtttgttcggggggacccatgctttaactcttgcagtgtcattgatttggatccatacatcaggcaaaagggtgtgaacccggttgcttgacactctgtcgtattcagtgcccatatgacttcgggtaattggtctacccatttgccctttttgtcgtcaaggattaatggcgctgaaaatcttgccattggcacgttcgacgacgctgttggattgtgggtggtaaacagaggcgaagactggctttgtgccgatggaactgcagaattcctggaagtcttggctgtcgaactgtttgccgttgtcgactgttagctcagatgggactccgaaccggcagacaatgttttgctagaagaatttttgggcggtcttcgctgttatcgtggagactgctctggccttgatccacttggtaaaatattcgatggcgatgaaggtgaactttaggttcccttgagttataggtagtggcccaacgatgtccagccccaacgctgaagtggccaggtgtgggcgatgagcttggtgaattgcgagggggcgcctgagcaaggggagaatttttgtcatgcttcgcatgacctggtgactcggtttgccgtgcatattattgcgggccagtaaaatccctgacgaatcaccttggctgcgagggccctgggccctgagtgtgaaccataggttccatcgttgacttcacgaaggatctgaaggccttcagtttcggttatgcatttcagcataggctggctgatgccctttttgtaaagctgaccctcgactattgtggaatccttgctcct

SEQ ID NO: 112185 - DNA, 534 bp, Zea Mays
atgtatcatgacaaaataatatttttactgtgggcacgacacttctacgaaggtaacacaacaacaggaacaaaataaatcggaccgctacacaaaagttaatatgtatttgataaaccctgtattaatgtgacgtggcacaatacgattgggcagagctaaatccttgacggcatggaggcaatatttttattggatggctgcaagtatggaatcgtggaggctatagtgcatgtgcttggggctaaccacatgcagtatctttttttctctcctaaacgcattctcaggttctcgatttttttgctacatgcagcggtgcagccaggaacgcagaggggcatgggcggttccttcctagacgcatgcacgtgggctctagtgctccacatgcaatttcttctcacgcacaccatgggtgtcggcatgcaagcagggtccacgcggttccttcctacttccacgtacgaaacggttcctgcttcctccgtttcttctctaatggaaaaactagcatcaagcacaaggtcgcgg

SEQ ID NO: 112186 - DNA, 288 bp, Zea Mays
tcgaccactatctcttcaattttatcagccttcggctcagctaatttgaccaaggatgccttcggctttgcagccggctcttcaatcctttgtgtaagcgtaggttctttggcttcagtagccgaagaggtctcaccaccaaattcgggcactacggccggttcaatatatcgtggccggtgagtaagaaccttcacctttttcctcttcggcacgggctcacttggagcagctgaagcagcatccttcccggaagttgcactctttctcttttgcccccgtggcggg

SEQ ID NO: 112187 - DNA, 313 bp, Zea Mays
tgaggataagggtgttcaggttatcaaagatatgatcaagcaaaaggcagagaaataccagtgtttccgacaggacagtaagggaattctatggtttggagatcgattggtggttcctaaggaccctgagctcagaaagaagatactggacgaagctcacctttccaaattctccatgcaccctggtagcaacaagatgtaccatgatctcagatctttatattggtggactagaatgaaaagagaaattgccaagtacatatccgagtgtgatacttgccagaggataaaggctagtcacttgaaggcagca

SEQ ID NO: 112188 - DNA, 393 bp, Zea Mays
aaaaggagaagattttaaatgccggtataagataaacctcgagtaagatatagaggtgtctaaggtgaaggtgataataacaaaagtgatgacaaatgttagagttaaggcaagactcgcggaatggctaagtggagaaaacaaacaaggtaagataggtgatgtttcaatagaatagttgaagtaagaattcattaccgagggaagttataaggaagcaacgagattaccacgggtgtgcaaaataaaatgatcgctcatggattattaggaaacaagggtggtcaaggatatgttaacagaaatgtcttgaacagttattggggtatgaaaataagcatacataagaatataaaagtatgcaagattccaaggatacgagcatactaagac

SEQ ID NO: 112189 - DNA, 361 bp, Zea Mays
aattttttgacgaaaagttaaagtgtatcaaccaaacgttattacaaggtttaaaatcctactccagtgcgtccgctaaaatccctgaacaacaagtaacaggttatcaagcactgtgtcggttcaaaattcctagaactcctcccaacattttctgggataccatcttcacttggatcaaccagatttgaattccttcgccaggaaatgcgctacggttcccaagctactttctccaaagcaccagtgtataaatctagctcctcccaagtcccaacttttggcttgaagagaggtttccagtttctcagcatttgagtcgccctgcacagcacctacttcacacacatccagtttttcc

SEQ ID NO: 112190 - DNA, 410 bp, Zea Mays
acaactaaactatctatacttgctttgtatcgtccatcaccagatactattatctgatctcgttctattagacggcttgctcatgcacccgctaccgtcaggtgacctggatgagcaacactagctgcgtcatcaccggctccatttgcatgcacgtccaggtgcattgcccttcaccggtgtaatcatttagcatcccatgattagctccttccatgtatagctgcatgtaatctaggattgcttgccgtgattgttgctatcactggctatttgtatctgccgatgtaagggaacagagtattgtgtgaatcattctctctgtaatacaccttcacacttttatggtatcttgagcggctcgcttcctgcgaccctcgcttccgcatcccagccgccggcgtttctcg

SEQ ID NO: 112191 - DNA, 766 bp, Zea Mays
agattcatcatcgcttccatcatagtttgacgcaacatatcgagtactccgtcttcgaccatctcaatgttggagcccgaagaagacatgacaagagttatttggtggagcgaaaggatagatggagtaaaataagaaatagtaggagtataaatggaaagttaaaggtgtgaatgaacttatacacctgtctctatttatagactgaatttcattattttttagaaagaatagaatttgtttttcgttttttgggacttgaaatggttttaaacggtgtagactaatcaaacgtgtcacgtgactaaaagagatcggtactgatgtcgatatcaaccagaccgtctaaaaaatatacggaccgatcgatcgatcggtactggttttaatccgacgggccatatcgatcgtcgactcaccaacgtcactagttagtaatgaccactgtttcaaaccaaccttaaaatcatatcggtgtttactccactgactcggaggcagcacctgctagaggagacaagactgaattgcaccgcagcagcgacgactgtgcatgctgcaggaaggagaaagcgaagcggataaacgactgcgctgtgcgcgtcacccacctgttggacgccaacggtttcggatccccggtgactctgactcgaatcgagagctcttcttttgcaggttgctgccactccctcgacccccaacctgaagaaaaagaagcagagcgattagtacccgtgggccgtggcccgctcaccgttaaggt

SEQ ID NO: 112192 - DNA, 316 bp, Zea Mays
tgtgttgtaaataattttggtgccatttagttgtttgtgttgtgattgctatcttagccttcttctctttgtgagcttgattgatttctgagcttcagtatttgccgtaaccatcatccgaatggctgaggacaagaagattgcagaccccacaattgctgggttttacaaagcaatggaaaagaccaacacggaaaagatcaccaatgagatgctagctgggttgtctagggattctagcgatagtgacaattttgatgtggagagtggaaatgaagatgccaaaaatcggccgtggaggccgagccatgttgtt

SEQ ID NO: 112193 - DNA, 685 bp, Zea Mays
attcggtcgaacccgaatttgatgataacccgaacgaagatcaatctttgaaaatacatttgcaccaacaagctggtcaaacaaaagatctattcacggcagtggatacttgttcttgatagttacttcatttaaaggtctatagtcaacacacatccttagggtttgatccttctttttcacaaaaattgcaggacattcccatggtgaggagctgggtcgaataaaacccttttctagcaaagtttgcaattgagtcttcaactcggccagttcatttgggggcatcctgtatgatctccgagaaactggagttgtgccaagcttaagttcaatagataattccacgtcacgttctggcggcaaacctgacaactcttctggaaacacatccggaaattctcgcaccaccggaacattgaccaactcttcgactaccacactataagcctttcccgaaatttcttctagagaagacaactggatctttaactgactttctcctaacactgtgtttatctgaatagtttgttttttcgtgtcaataattgcttcatgttgagctagccaattcatacctaggatcacatctatgtcctggcccttcaacactatcatattggtggggtaggtatgcccacacaattctactggcacatgaaatactatttcctttgtgcctaac

SEQ ID NO: 112194 - DNA, 632 bp, Zea Mays
atgggctatgtgaaaagtaatcttacgaagcatataaaccctaaattcttctatgcacatgagctgcataagatgaatgagattaaaatattgcactctaagtcatgtgaaaatctcgcagatatgttcacaaagtcactccctgcgtcatcttttgaaagatgcgtccgaggacttggaatgatgagacttagagaattgcagatctcagggggagaaacttcacacacacccaaataatcttaaacgtaaattttaagtacccaaataatctagaagattaaattgttatattgggtgaattgtactctttttcctttatgtgagttttcatgaaagtttctcactaaggttttgatgaggcaattcatgcgacacagcaagtgtgagctatgtactctttctccaattttttcccactgggttttttatggagttttgggacatatgcatctcgcggcattgggccaagggggagtgttaagaaacctttcttgggccaggaaggcccatgtggcccatatgtctgaaaccctagttttgtctataaatagagaggagatccccatattatgtaacccttggagagcagcaccatatagtaacaaagaatcagttcctctctacactct

SEQ ID NO: 112195 - DNA, 351 bp, Zea Mays
ggctgagaggcataaacacaactcgcattctccaaagttgtattgcctgaattaatgaagtttgttaaatttatattgatagcaatagcaattgcatatacaatataatgcacatatctttgaacagaaattgccctcttcatttttcccctaacatctaaagaaaaacacaataatggaagtgatgagtgcttaccagtatatatacacctcggccctaatatgataaaaagaaatatcagtcaggatagtgaaatgtagaataagcaggggaagtgaagatctatagatcttgagactctgttacatggttcagccgtcccacaacgcacggggctcgtcctaggcttc

SEQ ID NO: 112196 - DNA, 352 bp, Zea Mays
aagaacgggtgctccccagggagacgaactgggacggatgtaccctttttgctgtagttctgaaagctgaagtttcagttctgccaattcagtgggggccatgcggtatggtctttttgcgatgggcgcagtgccgggaatgaggtctatatagaactctacttctctttctggtggcatcccgggcaactcttctggaaatacatcttcaaattccttgattacagacatgctttctactgccagactaaacaccattggatcttttgcaggcggttgggcttggcaggaaactgcctttccttggtgatctatgagaaggacagttctacttgcgcagctgataacaccc

SEQ ID NO: 112197 - DNA, 533 bp, Zea Mays
gtcctcgagctgaaattgagggtatgaagctgtgaactgctgcaggggctcccatgttgcatcttctggctttgcttcactccactgcattagcacgtgccattgtcctctcttcaatcgggctctgataatcttctctggagatggcagcagtcgaccgttttccatcggtggcatggctggtggcagtaaggggggactgccccgaaatggcttgagtcccacatggaagacgacgtgaatgcgtgtcccttttggcagctccaatctgtacgccacagtggccaccctttcaatcacacggaatggtcctgcatacgtggtcccagcttccctttagggtggtcgactagtgactgggcatttcgatgtaggagacggagccaaacccaatcatcaatgctgaactcgagctcacggtgtcgcccatcattaaacctgcgtgcttgttcttgagcttgtagtagcctgtctctgacctccccaaggaacaggccacgttcctggagcatctggtccacaatttgagtttc

SEQ ID NO: 112198 - DNA, 366 bp, Zea Mays
caaggaacacaaggttccaagagtaacaaatttgcacgagattcaagtttgcaatgagctcaagagatgaagagaaagggagaatagagatgaaatcaccaacgagttaaacaaacttcacctcacaccaagggtcctccaaatgattgaagggaatgcgatttggggtgtgagaggtgaagtgaatgctcttgtttgagtgtaggtcagccaataattcgtggatgtgcaagagtgaatgaagagagagggtaacgggtatataaaggatctccaaaagatggtaggcattggacttttgtgactgagaaccggttgagccaatcctaaaaccggctgaaccagtttctgccagtctgtttttcg

SEQ ID NO: 112199 - DNA, 284 bp, Zea Mays
gataaattcgatgaaccaaacgatgactggctaaaatgcatcgaagctaccagtgatgaactgcttgggccgtattccaaagcagaagataatgcattatccacatccttcgggggccgaggaaaaaagagattgaacatggtttatgatgccattggttttgtttaccccgactactgctacccgctgcgggaacggggaaagaagaggaaaactgctgcttcagccaggactgctgcttcggccactccagatgagcctgcgccgaataacaaaaagttgaa

SEQ ID NO: 112200 - DNA, 376 bp, Zea Mays
agtggcaacagtttgtgtcgtccctcccccgttagaattcggcggaggacgaggtctcccactgcgaaggatcgatgccgtatggccttgtcatgatagcgcctcagagcttgctgatatcgggccaactgaatcaccgtattcaatcgttcttcttctagtacatcgatatcctccagcctagtagcctcagcttctgctatgttttcaaagattaaccttggtgccccaaacttgagatcagcaggtagcactgcttccgaaccatagaccataaagaaaggtgtgtttccatgcagagctcgactaggttgagttctcaggctccaaacaacatacggtagctctctgatccactttcctgcgaacttttcat

SEQ ID NO: 112201 - DNA, 705 bp, Zea Mays
ccaccacatggacgactccagggccgccatgtgtcaaaagaaagtaacatatgccacgatatcaccagtggatccggaccccagcatacatagcctagacccccaggtacgacccaggacctccacgatatcccgttgggacccggaccccacgacaagatcctaggacgatgcataccctgacctaggtcagggacgtacaggggtccggcgcttacgcttgtcaggactttgaccaaagcgtttccgctccccgcttagatagagactcgatgctgccacgtggcctagtacccgtgacgtaagccagcgggcagagcatgacataaggcctctgggccacacaatctttacatttattgcggaaaagacgtgtcgcctatctgcccttctgacaggtgatgtgccgccttggcatttaatgtgccccgtccactccgctggcaggcgacgaccaggccaccctacaagcggtgtgcctgtccaatcagacagcgggcgtacgcctataccaccgcacgcgccatggtcatcatgacttgtacgttgtcagggaaacttctgctgcaagctaatactatggagatcgtagatatcagggcacgaggagattgcactggattaatggctccaagtactacacccgttatgttcctgggcccaaatgttggggctcaacgttcttgtacgtgccccccttgagct

SEQ ID NO: 112202 - DNA, 396 bp, Zea Mays
tgtagggcgagggatgatgacattccactgcagcacattacttgagtctttacccccgcatgagacgtaagacgtaggcaggtcaaaggtagtgttccttgaaaccatgtacacacataggcaacaaagacccttttctagttcatgaattggccagatgttgatggaatagaggagggcgtcgcagcatgaggcagtagggttttgtggtgccgtctcctgacaggagtgcagtgccacgctcgtgaagtcaagcctgcaaatcagcgaggagcaagcaggtgatgacgacagcagcagcagcatgatggtgacgagcagtgaaacggaggaggaggccatcagctgctctattatgtactagtgggtagggtagtggcgattgtgacccggccg

SEQ ID NO: 112203 - DNA, 375 bp, Zea Mays
atatacaaagcacctgtgataaataaaattatatgattatgagattagtgtaatacacatctgacaactctatatacatgaacgtttcagattatgtatacaattgtttgcatgtcgccattaatttctctttaggaaacagaacacaaaggagcagtgtaattggtgcatttgtttgggaagatctcaagacatggaatgtctccctgtcgcttccggccaccaccagcaaacctcacatcaccagctaaaaaagtgccccgcccactccttgcctgacgcgcaagcaagtgcagaccgattactttactttaacaaacaaatggcgccgttgttgcagttaccagccagagatttataataaggaatgctata

SEQ ID NO: 112204 - DNA, 479 bp, Zea Mays
cgaagacgcggtctccatcgatgagatccttcgaagtgggttcgtccacgtcggggacagctgacgagactgtccgtggggacccatgttttatttcttgcggggtcatggcctccgatccatatagaaggcggaagggggtgaacccagtcgccctgcactcagtcgtgtttagcgcccagaccgcttcaggtaacaaatcggcccacttgccctttttctcgtcgaggagcatcttcttaacagctgtgaaaatttttccgtttgcgcgctccacaactccgttggactgcgggtggtatactaaggcgaaggcaagcttggtgccaatggagaagcagaagtctttgaagtcttggctgtcaaactgcttgtcgttatcaactgtgagttcggacggtactccgaagcggcagacgatgttttgccagaagaatttctgcgcagtctttgatgttattgtggatacagccctcgcc

SEQ ID NO: 112205 - DNA, 558 bp, Zea Mays
tgatatgcaacctctcacactcgctttaggattaaaaaggggcaaataaagcgaggggacaacttccctttaattttgaatcttctcataccccggattggtaacaccatcagatatacgtgatcacccttcttaaactcgagtactctcctccgggtatcagcataacttttctgccttgactatgcagttctcaaattctcccttatttgatggacttgttcttctgcctcttgtataatttctggtccaaagaactgtctttcactagtttgatcccaatacagtggagtcatgcactttctgccatacaaagcctcaaacggggacatcttcaaactggcctggtagctattattgtaagagaactccacatacggtaaactcttatcccaactaccattgtgtttaagagcacaagctcttaacatatcttctagtacttggttggtcctctcggtctgcccatcagtttgaggatggtaggccaaactaaaattcaatcttgtatccaagcactcgtgcaacttcttccaataccgagaagtaaactgtgat

SEQ ID NO: 112206 - DNA, 958 bp, Zea Mays
actttaccatttgttagagttaacataaccaagggagaactaacaagtagacttactaaatttttatccgtgtcattttgtacgctagaatcaccacacacaattaacaacacatccaccacaataatcggacccggtacatatacatgcgtcgatgcgcccttcacacactaatttgcattttagcttagacatcatatgagcgctgctacttttcatccgcgaccataaccatgtatattggggctacaacaagcaatttatggtgattacgtgcttaaccaaaccatctgacaggtcggctaactggagcaacgacatagcccgctaaataacctacacatcggctagcccattattatcgcaatccgagacacaacatacactaccacatttttataaacacacataatcacaagtattttcgcacatcgaccaatctatacgaatcgtaaaccactaacccccaaatcgcaatcgctatgtatttactttctaaatcacgaacacttacatgtttatcatacgagccgagtatttcaataattatcctaaaaacaactaatctccattacacacttgtatctacttggcttacttgaagcgtctactcgaaatcgtgagcacaatcatacactatatgcgaagccttatttattaaacacacaatacgcatcgtcacgactcggcttataaatatagagaatgcggcgactactttggcatgtcaccacctctctacataagccaaaataatttctacctacaacgaccaaacattcatgtcgagcacactttattttaccatgtctcgcatacaaccatatggtggcgtgcactcgagacacttcaatcaatgcggcgcgaccactaatatatgaactccgatactcatgttttaataattcatcctctacgcaactagcattttctaactactcgtcacaacaataaatat

SEQ ID NO: 112207 - DNA, 1311 bp, Zea Mays
gaagaaaacattgccaccacctccggccgctccgctctttcctttcaaccggagcgacgagagtcgagagacacgaggtgccgcaagagaaaggggaaatcgcagttatcatcggggaatccgaccccaagcatcgaactgctttcgtgccgtcggctcgttcccggtacgcggtggctgatttgcagcgagtttttgtgtttttttgggtgggggggggggggggggggggggtgcgtttggtgcgtcgaactgcttggattgtgtcggctatttcttcttttgaggagtttattaattccatttttggatgcttgaattggagaaccgagcggagttagagtcgcgtaacggtttccccgcgtttcttggccgctgcaaggtgatatgtcttggtactgtagttctgtgctcgaatttaagcattttcgcgaaaacccttttcagaaagttcaccccgtggatcatgggtctcttcttcaattgttttctaagaacaagtatcagttgttgggtttcttgtcggtagtattggtatcacttgtcagtagcctgatatctgaaaaaagaataggtttcataattgctctggtgaagcgaactgaattgttagtgctggtttcatagcgtaattagtgaatcgatcagggtcccgatatgaatctagtaggatttgttcagcgtcaataactgtccagatgacgtaattttgctgtcctctcatctgttcggtgtcaaatctttgctggacgataactggccagatgacattttttttttgccaaatgtaggcatgtagctgctacttgtcagctttcaaaggtttctgcatctgcatgacgcctaatctacattgttaaaggttttctgatggatggtgataaggtgaaggaatcagctccggattgtgcgtccggtgcagcagagccaaccaagaagcaggataagaggaaacgtgcctatgctgaatttgatgtggtggacaagaaatctgtatctgctgaatggcagcaagaaatggatgcactgtataaatactacaaggaggtttctggtcatcagctgaacccagaggagctttcatgcaccacaaatgactctattatagcatgcttgctggaggagagcagtctttcttgtgccaagttaacagatggaatctacaagaggatgaagctgcaatatggtgtcactgagtcttcagtgcgcacctcagtactcaacattggtaggagatcttcatatgggatttctgctatggatgtcaatggtctggaggatgagtcggattcaagcctttggtgttgggag

SEQ ID NO: 112208 - DNA, 678 bp, Zea Mays
gtttgatatcatcaggaatgttgagtaaatttatttttttaattctatcaaatggagatttaattttaggcaacctaggaagcacatcaaacaattattggctggtgtgatcagtgtccaaagctcaaacggcagcacaaggtgtacttgttctaggcacttccatgtgaagttgaacatgattttctcaaccagagtgggtttgcttaattaaaaggtcactaaaaattagccatgatgcccctcacaataagattcactgtgagtctgtaccacatcttgacatccaaaaatatcaagaaccagttggtttgtgagactattcctactcatccagctcttggtgaaagcacattcactatttgttttgcaaattctatttcagtgctttgaaacataaatctacaaaaataggaacaaccatgcaaaatggcaaccagtgtcgagcaaaggttcagctagccacgaccaaaaaaccaaacgattggagctgatgtcctgtatatgttcaacattgttgtgcatgtacttactatttcagaaaaaggtagctcatgagtctgacttcctaataagaatccaagtttcattttaggataatgcatcactgcatctgcctactctagaacatagttgttaggaatagcataactctatcgtatgaacacttgaaaaaat

SEQ ID NO: 112209 - DNA, 582 bp, Zea Mays
ggggtcactgtcaacatgattgtacgtccctacgaaaggtctcaggcgtatccccactacctctgggtcgcaactatgacccatataccgggaatgacgggacaatgcactgtaccgaatgtacgcctacacatgcaggctggtgacacggggctcatgatgacagcgtctgcgctacgcacgaccgcacaataagactgaatagtgggacctgccacacactattgcgaagacatcaacaatagacttgctacatggacttgtctgacggaatagcaagccggtacacccgtaccgggagtagggctacgcatgaccctacggacgacctcaggaacaccacgacaacccggggctacggatctctccctctctagtagaaaacagtctcctctataaggttcttcccttgagctataaaagggaaggccctcctcctccttccagacagacgtaaaagttgtagcagttctcaggcaatactacgattagtactacactggactagggcgcaagcctgaaccaatataactcactgtctcacaccccctcttctggaatccccaccgaacacaaattctg

SEQ ID NO: 112210 - DNA, 305 bp, Zea Mays
cggctagtccaatcatagccggtgccgcctgtcaccgtctccacaactataccgtccagcgtgacttatccaaaagttccccatctctatcgtcctgcgtctttccgattagcctcgtcaaggaaaatcacggtctgtcaatctcggccccgtgatacactccagtccacctcctgtttttaacttttaactttaacatgtaattatccgtggacgccgggcaacgctaaattaatcgctgtatcgccgtcggcgtcaaacgacacattcctcaagctatccgagtggagcactcccgagtgatg

SEQ ID NO: 112211 - DNA, 648 bp, Zea Mays
gatgatggggaagccataagggaaggacccaaggcttggtcatgttttcagggcagttggaggaatcaaaagtaatagggataccatcccacttatgtgggatggtagagtgaggtcatggggtgctgacgtatacttcacggtgaaacaactttaaggcttgtcatgagttcaactccttggtggcccttatagatcatggtcataatgtgtgttggatcatataaatctaggttatcctactccaccttggtggcatgttgttgggcccccaagtgttgccttagggggcacatgtcctgccactattggttaggctatcacttatggggaacttctatctagggtgcctctgtctgctcactgttggaagcactcaaccatgtccttcattgccctataattagttatatcatggagatttgtcccatgtatagggcaatgctttttggtgccctatgatactggctagggttgtgtgttagccttagggcctagctcaccacacttgatggcgacacatacatgggggcctcaaagacttcttgatcttcttttgtggcttggtgtgtgaggacctaggcatcaattgccccaacaaagtatcctttggggcatgccatgctcttccttatgtggctcgagcgc

SEQ ID NO: 112212 - DNA, 1492 bp, Zea Mays
tcgatccggatttctacgtctgacgtgaattgcgaaacatgcgttgtgcggtactctgtatggcaagtgaggagtcttggcagcgatcgtcacttgttctcttgtgtggttcgcggagcctcgaccgtatctttcgacgtgacatgcctccaactacccgcaggctccgtccgtggacgcatccgcgaatggaggaggggaacagtccacgatttcggtgaatctttctgagctaggcgcgccgaacggttctccttgatactaccgccgatatgtctacttcaaaggacaaaaaacaccaccagaagcacacatctctgcaggctgcagccggctattagtgacaacacgaacctctctaggtacagcgcgctgccgtccagctactccaataccaaactaagccgggctagtgacaacacgaacctctctacgtcgcttccgtctagccactccaataccttcttgcataaaacaaccgccaaagacaaacgggagaatctccgagtttaaaaaaagaagaagaagaagtagtagtagtagtgtatagtacaggacggacaattcaaagcggtttgcttcacggaacctcagcatctaatcacttccctgatagcccccagccccccactccttaaatttttagtttttcgttcctcagcgttttaggtgagagctttcgtacggcgtcatccccgggccagctggccagattgttgtttgtccgtgtcgatcgacaggtaaccaacgcaaccttccattccattttgatcctaccagtagcggggccggccgcgtgtgtcccattggtttctcagtgcgtgcgtgcgatgcaaggcgaggcagcagtagttaagcactggcatttcgtatgctaaagatgctaccggagacggatgaatttaaaagaactgggtgctgactctcaagaagggggatcaagtgagactgcaatagtacgcaactagaaagcaaaaaaaaaaaaaaaaaaaggcaaagtgtcagatgcaagtagccttgaggccgcaaggtggtcgcggacagactgaagaggttaatttgataactggaccaacttttttaaaaaagaaaaaaaaaactcttcttctgtaatgagatcctaaaattccggcaaggcgcgggacaaagaaaggtgccagtggctaatcacggatcgcgcacagctgccgggcggccaaaggagaatctaattggaagcttcggcacgtctggttggttcgtgcaaacgatcgcccccccccccccccatgtgatgagacaggtacgcgcaactgtcctagagttgtagtaccggaacacactactactacagaaaaaatggattcggacccctccccctaacaaattattgagatttagagctgagggaaggtgctggtccaagtaaagtgacgtctaaaaagtcgcgtctaccatctgttaccgtagcgctggagtacagtagcagtgatcgatccgctatatatatata

SEQ ID NO: 112213 - DNA, 443 bp, Zea Mays
cgtatttcatcattgcatccagcatatatggctctccaatatccacttctgtttccatatggagagcgtgggttccaagttggtgtagcatatagtgatacaagggttagaggaacaaattcaagggctcatataaccatgcaagaatactattgctatcaatttcattacaaggttggccaaccaaatccatttctgtctatcaaaccaagctaaagttgatgctcgtgcctgtattgatgaaaatagacttatgtatattctgaataatcaagacaaattacgaatagaaaacctccaaggcatatcagatgctgttagtaaaggctgcataaacggtgacgaaatgggaaaaacaatcattcttccggcgtcacacattggtggacgacgatatatgatacaaaattaccatgatagcatagccatctccagagtccatg

SEQ ID NO: 112214 - DNA, 431 bp, Zea Mays
caacccctggttaaatagggaggaggaggtgggcgtccaccttcccacaaggtaggaaattaggcacccaatttgccacacaatctcctgcccacaaggcaaggaataggcgcccaatcagccatgccatctccttgatccccattccttatttaggtggtgcagcaccttcttgattatttctttccaaactaaaaagatagataggtggcgcaggacctagactttattctgggcaaattcatcatgagcatagatggcgcatgcactttaggaaacttctggttcttcattcttcagaatcatcacgatgtttaattcacgtgcacgagctcaagtgagtggtcctggtggtgcctgtgctagtttagttggagtagccattcctttgttggggttgatgtcctcatcatacactacaagaaatcctt

SEQ ID NO: 112215 - DNA, 621 bp, Zea Mays
tcagtaggtagtactacctccgaaccatagaccatgaagaagggagtgtttccatgcaaagctcggctaggttgagttcttaagctccaaaccacatacggcaactctctaatccacttccctgtgaacttttcattcttgtcgaagaccttcttcctgagtgcttccaatatcattccattagccctttctacctgaccgttggctcttgggtgtgctactgacgcatatttgatctggatgcttctttgttcgcagaagtcaaagaattcagagctagtgaaattggatcccaagtcagttataatgctatttggtattccaaacctgaatattatatcttgtatgaattccattgccttagctgaggtcagagaagcaataggtttgcactctatccatttagtgaatttgtcaatggcaaccagcacgtgagtgtatcctccttgagctttcttgaagggtccaatcatgtccagtccccagcacgcaaatggccatgttacaggtatggtttgcagttgctgtgtaggtaaatgctactgctttgataagtattggcaagcttcacacctctggactaactcggctgcatcactctttgctgttggccagtagaaa

SEQ ID NO: 112216 - DNA, 438 bp, Zea Mays
ttgacaaatcaccttggcagcgagggccctgggtcctgagtgggagccgcaagttccgctgtggacttcgcgaaggatttgaatgccttcggtttcggtcacgcactttagcatgggctgaatgatccccttcttgtacagctagcccccgactagtgcgaagtcccggcttcggtgcttgaggcgtttggcctcattgatatcacttgggtggtaatggccttgcagatacaaagttattggggcccgccaatcttcagccatgatgaggttgacaatgcggtggccttcagcgtcattagttatttgtaagccttctgggttgcggacagctggtgtgccgatgtcgtggtagaatacgtcggagggcaaggcctcgcctttggccgctgccttggccaacgcgtcggcctcttcgttcttggcgtggtccacatg

SEQ ID NO: 112217 - DNA, 674 bp, Zea Mays
attagttttgtgttcaattggggtgctagtgtggactcactctgaatggtgaaacactgggacttgagtgtagcggttgagatagatagtttatactaatttaggcttacaccatagtccagtgtagtgatgatcgtagtgttgctttgtagcgtgttacaattggtgtgcttgtgtgttcaaggaggaggagctatcatcttatagttcaagggaagaaccttacagaggtgtcccgcttttcaccaaagagagagctctactgccccgagcgctgaagtggtatccctaaggtccgtagggttgagtgtggttgtactcccggcatggcgcactgcatcattcgtccgatgtatgagttcctgtagcgagtctgatgttgtcgtagtggcgatggaactttgtcttttgtcacaaaccctgtgtcaccctcctgcgtgcgtaggcatacacccggttgagagcacctagagggggtgaataggtgatcctgtgaaaatcaactctaaacaacacaaacttagtttataaaatgttagtgaagtcaaaaccaaggtgctataaatatagagggagataactcttcacttgattgtacctttagaatgtgtattgaacttaggaacaatagtgcaagtgattaaatgagaactctaaggaagaaagcaatcaca

SEQ ID NO: 112218 - DNA, 400 bp, Zea Mays
gttgaaacggacttaaaatgagaaagttatggattatacaaatttgttttggatttatttgtctactgaaaactattttcgaattaacttctagtttgctggcgacctgaggaccctgggcacaaatctctggactgacaggggttaaactgttaaaaacagggcccatatgtaatgttctttgaactatagcggatggcgggttgattccacaaaacactagggactctttagcaaaataccttgcccgaaggggtatggctactcgtgagccgcccgatcagattctgaaggtccagatcagatcgcgcgaaggggtaaatccgggcctgatctacaccgtcgatttcgtcatccacgaacacggtttcttgaagggaaagggtatggctgttttaat

SEQ ID NO: 112219 - DNA, 626 bp, Zea Mays
caccagagaatttgttgttatctttgaacagatagcaaacaaaacaatacaacatctttatccatactatactcaagccaattaaactcggaaaaccactttggtaggaagcgacttatgcctccacattcatgttggggaaaatcatccttctttatatttggttgacatggccccaatgcaatataagcccttctaaccgcatcttggttattaataaaatagcttgagaatggagtcctgaatccaggatcatgctcaatgccataaatatcattatcatcactatcattatcctcactcgatgttgtcccattcaagtgcactgattcaaaatcatcattgtcttcaacatcttctattattggaggttcaggctcaactctctcgttctgcgggcgttgcattattagtttcagtctgtccttggaatatcaccaattgcatctctctttcattagaagatggagcagcactatctttcttttttgcagcagctcttgctaaaaaagctctcaaatcagtggtagcattgatcttcctcttcattttcaaatctgcaaataaatcacaatacactcaattcaatgcctagtctaaaacaaattaagacacactcaaatcac

SEQ ID NO: 112220 - DNA, 538 bp, Zea Mays
aaaccgactgctctgctagtagggcgtagtggtcaccccgggtttagataagcgtgagcatgtcgcaccaccttaagtcattgccgacttaagtcgattgttccgttagtagggcatagtggtcaccctgagttagataagcatgagcatgtcgcaccgccttaagtcattgccgacttaagtcgattgctccgttagtagggcatagtggtcaccctgagttagataagcgtgagcatgtcgcaccgccttaagtcattgccgacttaagtcgattgctccgttagtagggcatagtggtcaccccgagttagataagcgtgagcatgtcgcaccgccttaagtcattgccgacttaagccgattgctccgttattagggcatagtggtcaccctgaattagataagcgtgagcatgtcgcactgccttaagtcattgctgacttaagccgattgctccgttagtagggcatagtggtcaccccgagttagataagcgtgagcatgtcgcaccgccttaagtcattgccgacttaag

SEQ ID NO: 112221 - DNA, 635 bp, Zea Mays
cgagtaccttggaatgagtacttggaggaccggacctcatccaaactcaggggatgctccaaactaggattggctagaataagcactactattggagaattgattgcagtagcacctgaagcgggatctgatttttaattacactcatgtaacctagattatgtttccaccttatcacctggtttgggaccttcccttgtaacatgtaacgatcgggtcatgaagggatagatctagggggaagggacacgttctcagggattgtccggagccatgtgactgcttagtcaggtcctgcaccctaagcccacacactgtgccatccttggacaactattcccaaacctagggcttggcccctaaaggcctaaacattatcctgaccaagtaacaggtcccgagaccctgctcgacaaggtctagaaacaaaatccagaagattgaaaacattggaaatgacaacacatagatacgtcgttgatcaccataacaagaccgtgtggaggggcaccttttttgcaggtcaccaggcagggggcagactggagctgtcacaaggaagagcggagccagctactgctcccctcacaaggcgaggcccggtgctgtcttgtatcctgcgacgcataatgtgg

SEQ ID NO: 112222 - DNA, 811 bp, Zea Mays
cttgtgatctcggcctttccttcaccaagtctggctcactcctcttaagtgcgttctccgatgccgattgggctgggaaccctgatgatcgccgaagcacaggtggctacactatattctatggtggtaacctcatttcatggagctctaggaagcaccccactatttctcgttccagtacggaggccgaatacaaagaaatagctaatgccacagccgaactaatctggatccaagtattacttcgtgaacttcaaatctctcagccacgctcgccggtcttatggtgtgacaacattggggccacatacctcacagctaatctgatctttcatcggtgggccaagcatgtggaagttgactatcactttgtccgagaacgtgtggcgtccaagcaacttgatgtacacattatctcatccaaggaccagttggccgacctcatgaccaagcctctaccagcgcctaccttgaacaagatcattcacaatctgcacttaattccataccgtccagattgaggggggtgttaaagatagcaggtctatctcctatacatggcatgatcatctatgtatggtatgatattatatacgccattcattgtgttggggctgcgatccccatgatcacgcaggaccatttattccttcctgtaatcactcatgtaatcatcctatatatacacgtgaatacagcccctagagggcaatgtgccttgcgccattccttacattaactactaaaacagagcataggagcattccgttgtatttttttgggagagtcccaagttactccagaattttct

SEQ ID NO: 112223 - DNA, 429 bp, Zea Mays
ctaagggtctgcaaataacacaagacgaagacgggcatcagatagtcaacctgataatggccgaagactggcgggcaccaatcaccctatatcttcagggccactaccacccctctgaccatatcgaagctaaaagattaaaacacagaagcatagactttgctatagtcaacggacatctctacaaattggggataagtcaacccatgttgaaatgcataactgaagccaaaggaaaagaacttctccgtgaagtccacaggggtatacgtggatcacattcgggaccaagggcccttgctgctaaagtcatacgtcaaggcttctattggtcagcaattgtgtgcacgaccaaccgggtaacccattcgtgcgaagcatgccggaaattatcacctcgaacaagcgccccttcgcaactcacaaagc

SEQ ID NO: 112224 - DNA, 444 bp, Zea Mays
cagctgtgccctaacaccattgcagctttcgtcagtttctcttgcgcgtgcaacagccactccatcgctgccctgtggggccaggtggtcagctccttctttccccttttctcgtaaccaagcgtggatttctgaatcgcaaactcgatctcttccccccctttcttgggtcgttacaagatcctctcgggtatttaggtcgacctccccgtgactccttcgcatcctgtcatgccaatgtcgttcctcatgccacgcgaccaagagaggacaccattggtgagggagattcccactattgcggaccgacacgtacacagtcgctcggacacaatcaagcgcccttggtgatgtgtcttgggtcgggggttctgtgcgttgtctctagtggggcacgggagcttggagccatttagaattgctcgtcggacttggttccttgcc

SEQ ID NO: 112225 - DNA, 1624 bp, Zea Mays
agagaggttagagattcgaccagcatgaaggtgacaaacgctaaaaaacagtcataatgtaattgtgtaacaaaataaacgaaagcctgaaaaggatactccttttgtccagagccacggaaagctgggtccaggtccttcatagaaactgacatcctcgattcgtaaagatgtgctgcctaattcttctttcaaaggagacctaaaaggatgttgtgaatcagaagcgcatggatagtacgcaaataaacaaacagataattccccatcctgagaaaactaaaatagccagttttgctgttgtgtggtactatcattacataaaaaaatctctctaagcatccagattagcttcaaatgatgttactgatatgaaagtaacaaaataggcacaccattcatcatatccgtaactgtaaccaacaaacaaaaaaagagcacagactgtacaagttctcgcagaatatcttctgctataagatctgctataacttgactctgcagaaaaatgtattagaccaacacatacggcgcctaactcagccagggtcctatactaataagtgtgcttacaatgcctatttcctcagtgccatcaaatttacacgatggaaacgtgtctggaaatcatggggctccgctctgctgcaagttctttatttggatggcaatcaagaataggttatggacttcaggtcatttagctaaaagagggctgccacatcccactgcttgtcccctttccgatgtctaataaaacaggtttggcaatgtgttcatcctccgaaatttgagtttggatgcccctaatcttcaacctgctgccactcgtttctacaagtggtggcatggcgtgaccagaagtgttccaaaggacagaaagaaagggcagaatacccttcatcatccttgtggcttgggggataggtaaacatagcaatgcttgtgtgtttgagggtgccaggtcttgtatttcagtagtgttagatgcagtggaaaatgagagtagtttattttttgtgcgttagctctccatgaactactcatgaggtcgttaaagctctatcgtaagtggtgtgtctgtaactagacagccacgggagttggtcactggcctctccttattctctttctcttattaatgaaataacaaacagctctcctgtgtcgtttgagaaaagaaaaacacatttatcaatcaaggaacgtgtgtcaatgtgcaataacatgcgaccgcaatggccctgtttcagtaacgaggttaagcaacagaatagacatactatggaataatatgttcctgacaagttataacagagaacacagaatccaaataagatacaggatatgtgttcccatatcaggaaatgcacagcaacgtaaatccatgagtggcacaaggctcgtgtgcaatgccggtctcgagtgagtagtgaccaaagggctaatctgctagatcgcgtgcagcgctggtccaagtgaccgcaggactaatctgctatagtccaacacatccatccattcccatggctcctatcccgtcagctcgaaatccagatgaactctgaaaagctaaagtagtgctgtaagcattgcagataagtaaatattgctcccaatcgac

SEQ ID NO: 112226 - DNA, 443 bp, Zea Mays
gccacatgccttgttatgtcttacctctaaggacaagatctaggtgatgagatggatgaaaaaaattaaatttctcgatggttatgctgcgggcttgaaaagggctgtgaatttgaaaacgagaaaactaactgggttaaagagccataacttctatattttcatggagaggattttctctgtcatgtttcatggttacatgcccaacgtcatgtggcaagcaataactgagctaagatatttctacaggcagatctgtgctaaagaaataggtaaaaatatcatggagaagttggagaaagaaataccatgttgctatgcaagctagaaaaaatattcccacctagattcttcaatccgatgcaacatctatttatgcacattccatatgaggcaaatgttggtggacctatacaatataggtggatatatcacattgaaag

SEQ ID NO: 112227 - DNA, 313 bp, Zea Mays
atttaaatttcaatgtgtcagtgtgttggtgcatccttgcagacactagccgttctacccctgacgaggaattgaggaccacgttagctttcgttgtgtcttcacgccgactgtggagacctaatctttgtcctttgttccgggaacacgtgagagattcgtgcccgtccgtatatttgttttgatccaatttgttgtttagctcagttcagcaggtcggtcaataatttatgcttcccttctttgaaaggttgaattaaagcattctgttccatcgttggttccatcttttcatttgaaagagaaataaaaa

SEQ ID NO: 112228 - DNA, 602 bp, Zea Mays
gtaatttctaaaattgattttgaaaaggcttatgataaggtgaagtggtcctttgtccttcaaactctacatatgaaaggtttttctagtacgtggtgttcatggattagttccatcatgatagggggccacattggcattaaagggaatgatcatactagtgctaattttcaaactaaaaagggtttaaggcaaggcgatccgttgtgacctatttttttaacattgtggttgatatgattggaatcctaattaaaagagaaaaggtggcagggcaagttggaggcttggtgtataatttagtggaagatggaatgtctattctgtaatacgcagacaacacttttgtttctggagcatgatttggagaaagccaaaaatttgaaagtactcctccttgattttgagcatacttcgggccttaaaattaactatcacaaaagtgagttattttactttcgtcaagctgccaaagaggaggaacactgtcatcttttgttaggctacaaaaagggtaatatccgttcaaatatttagggattccaatgcattatcgaaagttaaggaatagtgattggaaaataatagagacgaaattcgag

SEQ ID NO: 112229 - DNA, 291 bp, Zea Mays
ccactttccacgtcaaaactctcactatcgttggaattttcagatattccagccaacatctcattggtgattttctccatgttggttttttccatagcttcgtaaaatccgtccagcgcggggtcaatgatcttcttctcctcacccatttagacaatggttgctaaaatgctgaagctcaaaactaaattaaactcgatgaagcaaggaaggttgaaatggaaaacacaatgcaaagcagctaaaatagcacaaaacatactcacaacgcaagcttctatatatatactc

SEQ ID NO: 112230 - DNA, 300 bp, Zea Mays
tcttgaaattcggtgagcaattgccggcactccggccaattcccccgtcagaggaggtcaccaggatgcgtggttggcgcgaccgattcttcccatactatatttaggtggacaacgacgctgcacactgattccatgcacggtggcgcccacccccgcgctggtcgtcgacgtgatgctctgcagagtcgttttggtgccccggttcgaggaggaaggtggtcgccagggcttgcttttatagcccggaggcgttgacgagttggtcatgtcggcccccaaggatctcgcggataccgt

SEQ ID NO: 112231 - DNA, 315 bp, Zea Mays
acctccctcaaatgatatatatgcgacatagacattgtattagtcttttataaaactaatctctccacaaccagccgatctcaacacgcaaatcattcgtacattctaatcaaatgatatatatgcgacatagacattgtattagtcttttataaaactaatctctccacaaccagccgatctcaacacgcaaatcattcgtacattctaattgcaagctatctgtatacttccaattactcaattgatcctcgaagaaaagagggcatatctagtgcacatgaaagattgttacacataatacacatattaaat

SEQ ID NO: 112232 - DNA, 630 bp, Zea Mays
gaactcatatagtccatacttggtgatgaatgttgtcttcggtatatctgagggtcggattctgagctgatggtagcctaacctcagatctatctttgagaacacactggctcctctcaactgatcgaataaatcctcaattctgggcagggggtacttattcttgatagtaacctcattcaaagctcgataatcgatgcacatcctcttcgtgccatccttcttctccacaaataacactggggctgcccaaggcgaggtactcggtctgatgtagcctttttctgacaactcatcaatctgcttcttgagttccaccaactctggtctggacactcgataggctctcttggaaataggggcggtgcctggaataatctctatggaaaattcaaccttcctttcaggtggcatacctggtaaatcctcgggaaacacatctgggaaatctgatactacactgatagcctctgatggtttaatctcctcaatatgagcggtgacttggtgacaactccctttcctcggtcctgacaagaccaactccactaacacttattctcctgatagggatactaacttcactgttctcttgtcacaactaagactggcttgatacttggttagcca

SEQ ID NO: 112233 - DNA, 288 bp, Zea Mays
ttctagatacatgtggaggacccatgcagtttcaaatgttattggaaatgatcctgaactttattttattggtgattgttctagggatcattcagtagttgattagctgacggtttactggtgattgttgggggagtacttgagcgtgtgatctagatgggcgtcctgaatgattgctggtaactcaccacggtgaggtatgatttattattaattcatatttgcaacaaggcaacatatcctattagctggagactgagctagctaattgttaagagagtttgagtc

SEQ ID NO: 112234 - DNA, 390 bp, Zea Mays
aataaattaagggtcctaacttattgtgaagaaacatttaaatcaccatccattaccaccctaggtgtcactggagcttagatagttgcctaggctacataaacctacttctggggttttttctttgagcatccagtaagctggtctagggaaacaatgcacatcacattttgggtggtgatgagttttttgctctattgttaggtatcctgccaagatatactgaaggtactagatgctagtaaagtctgcagttctgtccagaactttactgatgtgtacttacggcttcctggcataccatcaaatgcccagctgaccgaaggtgagtgtatccgggtcagaatttgtgaaggaagatttgcattgttgatacgagaggtatgcacg

SEQ ID NO: 112235 - DNA, 356 bp, Zea Mays
gtcgttgttgactttgttttcaagaatattcagcctttgaaggatagagtctaccctgcttacctgtacactagtgttaatgcccctctcgttaccaacaagcgaatatctgaggaggacgtgctgagtcaggttgactcggtgctgaggggcaaagcttcgaatgctggtgctcccccttcatattctgcctggaatcttccccctatggtaagcgttgtttcatatgagttcctgtatttgtcatgtgtactgtccttaatgtgtcgttttgtcaccgcagaggtcttttttagagttcatatctaacccgcctgtccaaggcgagcgtgacctttttcagaagatattgaagc

SEQ ID NO: 112236 - DNA, 483 bp, Zea Mays
gctattaaggatacgaaggtttgtttcaagtgcctcctccttgacaaaggtgcagccaacatcaagggatttaaaatagagaagagggttgcaaagcgagctatgagtgtggcaaagggaccgacgtatgatgatctttatcagcgactaggcacaaaggaggaagagaatgacatttataggatggctaggatacatgagaggaagacaagggacatcaaacaaatcaaatgcgttaaggatgagacagatggacttctagtgaaggataaggagatcaaggacaaatggtgagagtacttcgacaagttgtttaatggggagaatgatggtcctaccctcgagttggatgactcatttgatgatacgaacaaacgctttgtaaggataaatcaggaggcgaagatcatggaggctttgaaaagcatgaagtggggtaaagcgatggccctgatggcatccctattgaggtgtggagatgcc

SEQ ID NO: 112237 - DNA, 523 bp, Zea Mays
aaccctggcaatagagaatcccttgccagatcttggagtctgctgcttgttctacacaggagtagtagcaatcctctgcggacaaacattagcataatgacccgtcttaccacacttgtagcatgtggtaccagcactctgtcctgagaatttcgccggggtgctagtgggggcagcctaacgagtcggtggagtcccctggggtgtgtgctgagctaagcgctggcctcctccagtgcaaactggtgtaccttggggtggaacgtagcgaggacgaatgctgctgcttccctgaccctgggatatcgccttcctcttcaaatctcccagctgaacacacttgtgttcaatagctagggccttgtcgagcagcctatggaacaatggaaatgtatgagccaccagagcatactatagaggtccattgagtccttcaatgaagtgctcttgcttcctctcatctttagctacttcatcaggtgcatatcttgagagttgaatgaatctatcgcggtactcgttg

SEQ ID NO: 112238 - DNA, 382 bp, Zea Mays
tgcctccgaaccatagaccatgaagaagatggtgtttccatgcagagctcgactgggttgagttcttaggctccaaaccacataaggtaactctctgatccacttccctgcgaacttttcattcttgtcgaagactttcttcttgagtgcttccagtatcatttcattagccctttccacctgaccattggctcttgggtgtgctaccgatgcatatttgatctggatgcttcgttgttcgcagaaatcaaagaattcaaagctagtgaaattggatcctaggtcggttatgatgctattcggtatcccaaacctgaatattatatcttttatgaattacactgccttggctgaagttagagaagcaatgggtttgtattct

SEQ ID NO: 112239 - DNA, 686 bp, Zea Mays
aaaaatctcaatcttcttgaagttcactggtgaaaaccagttgaactttagttcaatctagttgagcttcagcacaactagggtcagctgagttcttctctggccaaaactggttcagctggcccctaggggtggttcaacatgcccctggacaaagtcaactgacaacttttctgactcacttgctctgctcctgtcagcttgccctgctgccagtctaacaattaggcatctctgacaggaggcggttgaattggccctgacccccggtacaaccggtttctactagtggtgcccagggtttttatcccgcgccccctcttctctctccccccacttcaactcctccagcctagtcgcctctagacctgagccctctctcttttctatctttttcccctcaaaatccctcaaatccacccactcaaatctcttgaaacttggagggattactcctagggagatcctcctccatttccaccactttggttgcaattcatcgtccagattcttagatcaaggtaactctccatttttactcttttgccccgatctatgtttgtatgcatatggaacactttcttgaagaagtttagccttgttgtatgcatttgttaaggtagattatgtgttgtgttcatatccagttgaactattcatatgaacggttgaactgaccctgccac

SEQ ID NO: 112240 - DNA, 313 bp, Zea Mays
actgttatagactatggctaacttaatagatgaacacctagagactttgaagaggaagtagttggcttggttagttctatttataaggctataacacattttgaagcctacccctagatattttgaagcctacccatatggatgaaatgttccaagttggagcccttcatgagaaagcttcatcttgatgcaagttttctaatgatgctatgttccgccaaaagatcctttccatgattttgaggtttaaacccgacaaacatgccacatgaggttttgaggtcaaaactagcaaacctagttggagttgttt

SEQ ID NO: 112241 - DNA, 281 bp, Zea Mays
cctgatctattctaggaagtccaaagggatccttcggacagtgtttgttgagatccgtatagtcgacgcacatgcgccaatccactttattctttttgagtacaagaacaggatttgctaaccactcaagatgcagtacttctctaatgaatcctaccgcgactaggtgagctagctcagcacggatggcttgtctcttgtcgagcgtgaaacgatgcaacttttgtcgaatcggcctcgcctggggatagaccttcagtttgtgctcggctagctctctc

SEQ ID NO: 112242 - DNA, 694 bp, Zea Mays
ggaaagtggatcagagagttgttgtatgtggtttggagcctaagaactcaacctagtcgagctttgcacggaaacactcctttctttatggtctatggttcagaggcagtgctacctgctgatctcaagtttggggcgccaagattgattttcgaaaacatagctgaagctgaagctaccagactggaggatgttgatatactagaagaagaacgattgaatacagtaatttagttagccacgtaccaacagactctgaggcgctatcatgataaggccaatcgacatcgatccttcgcagtgggagatcttgtcctccgccgaattctaacgggggagggacgacacaaattgtcaccactatgggaaggaccattcatagtaacagaagtcacccggcctggatcatatcgtcttactcaaatggatggcacgaaaatagggaactcatggattatagagcatctcaggaagttttacccctatctagatttcaaaagctattgggacaacattgtattctgtaattgggagatacaccatcaataaaatgacttcattctcaaaggcactcaaattgttttctgcatgtttacttaacccagggtgaccactatgccctattaacggagcaatcggcttaagttagcaatgacttaaggcggtgtgacatgctcacgcttacttaactcag

SEQ ID NO: 112243 - DNA, 387 bp, Zea Mays
gggaggtgtatataaaggtgctcccaaaagctggtggccgttggggaaatctgactgaaattcggttgaaccggtttcaaattcggttgaaccggattccaccagtcggttttcggttcactagcggactcagccggagactggaccggactcaaattcggttgaaccggtttcaaattcggttcaaccagtttcaaattcggttgaaccggattcaaaattcggttcaaccggtttcaaattcggttgaaccggattcaaaattcggttgaaccggttttccaaaaaactgcacatgactttttctgactggactgactggcagactggcagtgacagaggggaacagtgcagaaaccggttgaaccggttttaggtccggttgaa

SEQ ID NO: 112244 - DNA, 492 bp, Zea Mays
cttggtgaaatggtctggctgggatccatctctggccacctgggagacgaacaggtgatgaggcagtcatttccctgtgcgccagcttggggacaagctgattttttaggggggaatatgtcaacaactgcactaatgggttgcacaaggaggggttggaagctgatgcagagcagatcgcagggaacaagattgatgaagctgaagctggagcacatgacaacaagctgaggaggggtgatcggacaaggcagctgaatcccaagtactatggcgccaactggctgtaatagggcccacttagttttgattctcagtataaagagatacacctgctctattgtaaagtgacttttggctattggcaaacttcaacagaaagaaatagaaaaccacaaacctgctgccgagagaaatacagagagtgcttaacaggcggctacacggacacacggttaaaggagcagaggagacgctggaaattgaagaaac

SEQ ID NO: 112245 - DNA, 383 bp, Zea Mays
aaccgccataattctatatcatgccgtgtgctcctataatttgtcagtgtttttcttttacagcaagcttttcttctgaaattatagcttggctgttgtctatggttcattggtttgtaacttgcttggtagtatcagggagaatatgtgtatcaagatgttattttgagggcttgtttggtagcaagggattttatgccccctcaatccattccaatccgcatgcaacaacacaagccctgagtgattctctgacaaggaacatatgttattataaagttgtacaggtagttgtattcaacatgatgttagtgcgagcaggattatattcaggatttatttggaaatgtagttctgaggtccgaatcaatcccttggtgttg

SEQ ID NO: 112246 - DNA, 298 bp, Zea Mays
ctcataaaacaattcctctttttcaggtcagtgttgacctagtcaatggcgtactgggacaaatgattgaacttgttgagataccgtgtaacagtatctccaccttgttttagttacatgaattcttcttgcttcatatggagcactccttctggaatgtagtgctcccgaaataccaatttaaattcgtcccaggtgacttgatgtccggcaggctgaatggccacataatttccccaccaggtgctagcagggcctcttaactgctgcaccgcaaataatggcttctgggtctccg

SEQ ID NO: 112247 - DNA, 645 bp, Zea Mays
agaaaactgattacctggccgagcgaaagcgccgacgaggacccatacgccgcggcgctgttccggacgatcatcggcggcatgtgcctcgccgggatcatcatttctccctctcagaacctctcgaaccctaattcctgccgcctcagtagcttctttccatttgttcactggcacatgcgtagtatctatctcccgcctcacggacaaagaacaggcggcgccaatcctattcctatatggagatgtataccttgcctgccaagtaacaacacgaccaacaacagatctagcgatcgacaaggtagcccagacaaccttcgctgcgagctgacgactggcagtgagatctagcagaagagctacatatgttcgtgtgcctatgcaaaaatagaactccgatcgatctctggctgcatgcagctctcaaggcgtgcgtgcagcaaaaactttgcaagctcagaagggtagctagcaggaggtggcgagataagccgggaggagactagcttgagaagctataggcggccatggaaggggaggcgaggaggaggaggaagaggaggagaggaaaggggaacgggcggaggtggaagagaatgtggagaagggaggaaggagttattgcgaacgagttgaggtggt

SEQ ID NO: 112248 - DNA, 482 bp, Zea Mays
gtttttggtatgagcaagtgacatgatggggcctagccagtggcttggtctaactaagaccaaacctaaccctgtcatatggtgtagaactacatgctaagttgtatggatgttttaaaatacaacttgcacaattgggtaaatgccagacaccaagatcaggattaggactattatgaagctgagagacatgatcaagaatgcaaagacttgaactatgatcgagcccagtaggatctagcttctgaaggcctcatgacatccatttttaggtcattaacaggtcgcttggacaagggtggacccatcccaaaatttgagtggggtcctaagtggaggcctactaactaataggcctttgtagctatagtagatgagacaaaaattccactaaaacaataaaattgagtggggatatgcccccactcagcccaatgtgggtccacccctacgattgggtagagccaactgaccgaagaatt

SEQ ID NO: 112249 - DNA, 426 bp, Zea Mays
gctctggtggcatacccggtaagtccttgggaaacacatctggaaactcagacacaatcttgatcctctcaattgggtctacttcactgctatcgatagccatctgataacaacttcctttcttcggctcaggcgggactaactcggtcaccacttcctctcctagtggggacaccaacttgattgtcctcttatcacaactgataactgcctgatacttatctagccaattcatccctaggatgacatctattccctgagtacccattactataaggttagcgggaaacgctatcccccttatttccacccttacattcaaacaaatgctatcggctcgaattctaccaccggctgagtcaatttgaataggggttgacatggtggtaattggaagattatgtgcttctacccatgatgcagtaa

SEQ ID NO: 112250 - DNA, 464 bp, Zea Mays
cccgattcaccctcgtgggtgtccagtgtacccaggcgtaccctcggaaccaatcgttgtgtccgcgctcgcatcggggtaacagaaggagatcgccacaacgtggagtaggcattgaccgaaacacgggataaaatcaccatgtcacttgtgaatctttctatcatgattgttttcttccatagagttctcacatattcacttgcactattgttccaaagtttaatacatatctcaaaggaacaatcaagtgaagagttctctctctattcacagtaacttggttttcatttcactaacatttataaaccaagtttgtgttgtttagagttaatttttataggatcacctattcaccccctctaggtgctctcacttacaccatcggccccatgcaaccctctcggtcggtccatcttcatggtatcacgcgctcagcggaagcactgacatgtgggaccatg

SEQ ID NO: 112251 - DNA, 382 bp, Zea Mays
aaagaactatcttcccctagtctaatccaatatagaggagtcatgcatttcctgccatacagagtctctaacggtaacatcttcagactggcctagcaactattattatatgagaactcagtataatgtagactcttgtcccaactactaccatgctgaagggtacaagctctcaacatgtcttccaatacttgattagtcctttcagtctctccatcagtctcaggatggtaggccaaactaaacttcaaattcgtatccaaattctcatgaaaacttttccaaagtccggaggtgaactgtgatcctctatccaaatcgatcttctccggtacaccgtgtagagacacaatccgagccatatatagctctaccaattgag

SEQ ID NO: 112252 - DNA, 939 bp, Zea Mays
atggagccattagcagatctaaccaaaattgggtgacccaacctctgcaccgaaagaccagcccgcgacacaaaatcctccgaaacaaacgaatagctagcgccagagtcaaaaagagcatgggctgcaaacgaatcaactgaaatcgtacctgtcaccacgtctccttgctccctggcatccacagcgggtagcacataagctctagaaatacccgcagaagaggaagctcccggagtgaaattaacagaagaaccccactgagccaccgggtgaggcagacacggagctccaaactgagatgacataggagtagatggtgcaggagtaggcgcggcctgatactgaggaaaaccctacatcggcacgaactgagaagtcctaggcacataaagctgctgcggaggaagaggaactgaaaactgctgctcagcacttgacatcatgttgatagtgccctgagaagaggaggaagtcaccagctcccatctgagcttcccattaggattcctcctacacaccacatccttgtggtcctgactgcagatagaacacctgccaccccactggcactctgcacggcgatgcgcatcaccacagcggaaacacaccagccccagcccgggcttaggaacagcccaaaacctctgagtacttcctcccgaagtacccgagtcagaagatttgccacggtatggatggtggcgctggtgctgagacttgcccctcttgtgggctggacctcctgtgttgcccctcctcgcgtcctggccacgaggctgatcaacacccgaagacttctgcgactccatggtatactggtgttgcatctccacacccagtgcctgctccaccgtggtatggaagtccaccaacggaaaggctcccagagcatgcctgatagaaggcttcagaccctgacggaactggctcgccttc

SEQ ID NO: 112253 - DNA, 568 bp, Zea Mays
ccaggggatagagtcggttgctaggtgtttttgcaatattcatgagttatctactagacgaaggcaaccggaaaagagcaataccataacaacttcggttgttacagcttcgtgccccgctgtgaggcaaattatcctgtgcctacatttcggaagaagtggccaggctcttggatgaagcaatggtttttcgtgaagaatgatctgcatcacaaagaggatgtgagggacatcattcaacgtcccatatggtcacgtttcggcattaggagtccataaatcgcaattgggaatgaagtgcaagcgtgccatatggctttcaacaccttatgtacctacatcgataccagatatttatttcaagaacatatcgctttcaaagtatgacctcttgcgaatgaatgagaaatgccgaaggaagctgcgactggctccagtcagggtggcttggtttatcttaagtacaccttccggtacagaagtcaatttaacgagccaaatgatgattggctagacgctatagaggcaacgagtgatgagctacttggagcctactcgaggacagaag

SEQ ID NO: 112254 - DNA, 533 bp, Zea Mays
ctgtggtgtaacaactcattgttaaacgagaagtggggagagaaacagacatatatgcttcgtgcacgacgcacgaaactaaagctttaaattagtactagcaaagtgtcggtgtttcgaacctctgccctgacaagtaaatttctatgtgcgcgttctaggctccgggcgctgtactcggtgggcgcaatgtttatactggttccggtggaacgtccttacatccagttttggcggctcgcgctaccggcacccttgttgctcgatgctcgtagtaggtgttacaagtgggttatcagcagacgagagagtgaggaagggctcccaagtcttatgcgtgaatgaatgtacgtacaaactacggagctcgagtcctacactaaacattggtttcggtctctaggtctttaggtattgctgggcatgtgtggttgtgcgttcataagagattgactgccacaatttcattaaaccctgacccaaaacctggtcgcccgattccggatccacggccgagatctaaaacccaaaag

SEQ ID NO: 112255 - DNA, 863 bp, Zea Mays
tgggaaaaacagttgtagaacttcgctcttcaaaagaaagatgttatgaaaaatctatagaatgtgtggaaaagataaaaactagcttcgccaatgttggcgcatattcaaatgaagacaacttcgtacggggcgatcccgaggggccaattgaatggatcagcagcgaggccgaagcctttgaggagattttaaatgaccgtggggacgtctgtgccttctcagatgcgaggggaattgcggctattttggagaagtcaggttgtgatcatgtgaaagctttggcccaagccgaagctactttatctattgatgacacgaaagacccctcggccgaagcgagcttagttggcggaaaattctttactgacatctgggaaaatggcggccgagggatggcccacgagataataaaaaagagcgaaaaggatactgacgatgcaagggaagcaacgaaggcagctgaaaaagctgcggaactcgaaaggcggataggtattgcttaatagcttttaactttatttttcatttttgtgacttcgtacttatttacattttctaccgcagtcgaactatctcctcccccggagcccttcgagtcattgatcgagccagaggcaaaggaaccagcagaaattattaaaatggccgaaagcattttggacgaagtcgttactcaactgctgaccgaagctgcagacaaagttttgaaggaagaataatggatattgtaaaaacattgctagaatattaatgtaacatttgctggactatgcttgtaatatttggtgctcatgtaatgtataaatggttttgtaattcatttctttgcgatgcatgaaacttttattgtacataccgtt

SEQ ID NO: 112256 - DNA, 345 bp, Zea Mays
ggcttgccggcgctgcttgaacttgctttggcaccagcctgtatgtagggcaaacacaagaagatgctggcacggtgcggttgtccgttgcctgcagtgccgggagccacttcaattcgccggcaacggcaacagaatcggcgattgtgcagtctcaaatccgtggttttgttttccagggcaaccgaataaaagcataaatacctccagccagtgctagcagtagcaacaaaaaacaccctaaaaatcctacgcgtagatagtttgtccaaagaaaaaaaaacaagagaagaaaatagctagtacgtcaagaatggcgacagcatgttccaaaacggattcgtc

SEQ ID NO: 112257 - DNA, 412 bp, Zea Mays
acagacgcccatgaagccgtcgttttcgtgcctttttctcatccgagggctttccctggccgtttctccatttttccgcagcctccttgatttctacgatttgaatcttgcacatttaaatcccaactctattcttcaaattgccattttcgtgcatctttgcgaggcttttcttggaattcttccccattttgggctctggaggtgtctttaccactatcagcccgatatggctggaggacatcatcaacttgttggtggtgccagtttggagcttcgccgggggaggaaagtagagtaccttgacatccccctcaaggacatcattaaaggatggcgcctcgagtggttcaccatggagaaccacaacaagtccctccctctcgatcagggaggcagcccgacgttcgca

SEQ ID NO: 112258 - DNA, 641 bp, Zea Mays
atttgcatcggaaacaactaattaattcagcttttgtctttgatacttgtaatgattcctccttttccaccctttttgcacttacattatgaagctgtgaaggatacatttcatcttattatttgttaagatacaacatggataaaaggtggatgaatgaacctaggtatatttctaacaatgtactataaaccattattttgtagtaatcacctttgacaaacatatcgttttgtacctaatatttataggcacacgaaggtctacatagatggggtagctagatttattgagtttgcgtttagaaattctataggtggaaacaaaattctatgtccatgtagaaaatgtgttaattctctatggaaagatgaaaatgaagttcgtgcgcacttgatatgtgatggctttcagagggatacaaaaggtggacttatcatggagaaagagactctgtgcctattaatagtcatgactacagtgatatagaggttgtaaacaattcagatgaagatgacatagccaatttggttcatgacttagctggtggtctagatgataaaggggattttgaagtatctgatggttcagatgaaactgatgtagatttagaagccatcaattagttagcgatagataat

SEQ ID NO: 112259 - DNA, 276 bp, Zea Mays
gtatgttgtaataaggagggaatggcaattacacaagccttgttgtcctgtgtcatttcagattttccttgtaagtatcttggcatccccctatccttgaaaaagcttgcaaaagataaggtccagcctattattgatcagattgcaaatcaacttccgggttggaaagtagccttgatgactagggttgggagatggatttaggttcagcatgttctcacgatcattattgtttatcttgcaatggctattaatctcccccttagtctcttaaag

SEQ ID NO: 112260 - DNA, 329 bp, Zea Mays
tccttctgttaggagttgtggtagaactcttttctgccttcagcgttgttgcttctgttaaaggacttaaaatccccggcatctttgttacttcttcagtttttgactcttcagccttatctttgtcaaccttcgtttcaactagctcaaccgaaggtgccttcggcattatagccggctcttcagccttctgcgtggggggaacaggttcccttggttcagcagctgaagatgcctccccgccaaattcaggcaccacgaccagttcaatataacgcgaccggtgggtaagaacctttaactttttgcccttcggcataggctcgtct

SEQ ID NO: 112261 - DNA, 860 bp, Zea Mays
gcctatgattttttctagtgcacgtatcatcttatcgatagactcactataagttcaattcgatcatcaaaagaattcttaagatatcgaatctcatgggaaagcatgatttcacttgtagtgggggatgtagcgaagccatcagagaagtgagctccacttctctctccttgataaccctttgttgtcatgtatatgagttgattggcataccatacaacgactagatctgtggggatccgatttttgccgacgtgttgggtgcaactatttcgttgcctagatcatacaaaggaaagtaggcctatgatttttttctagtgcacgtatcatcttatcgatagactcactataagttcaattcgatcatcgaaagaattcttaagagattggatctcgtgggaaggcatgatttcacttgtattggggttgcagcgaagccatcagagaatcgagctccacttctctctccttgataaccctttggtgaggactaaccgtgaagtgcaaggggtaccacttcttcaccttctcgcgattccaagcttgtcatccttgtacctcatcgtctaactttttcatgtagtcttcaaattccttctactcagttgctgacaaattatctatagtctgcgttgtgttgtcgtctaagagaacatcgttgcgatcatgggaaccgaccatttgtgccccgattttaatagatctgaactcactcatccctagtggtgtcaccaaaaagtgtgttgacacctttttggatccaaacatcaatgatcactagatcccgctagctcgtggggatcgataccttagggacctctcagcaagatgtcggacggtccgcgataggtcaccaa

SEQ ID NO: 112262 - DNA, 774 bp, Zea Mays
gcgaagcccgtctcttcagacattacgtagtacttcaaaagaattttttatacttaccttaaaatattctttccttctcatcttaccactttccggtagtaacttaccttttaaaagtcgggtaacagagtgctatatatgaggaagtaggggatcaacgaaagattgatcccataattattaggttatgcatgcatcatgtttaaactatactaataaatcttcccctcttatggagatatgatgcgcacgaaaactacccagcgcaaatcaactgggcctcagggtgtgcctcgacatcagctggcctctaggcatgaaggaagcagcagtggaagcaacgaccctatcggggagttggaggctagagtggatcgcctcagatcggaactacgccacgggtgtagggagcatgcgcgcgatagttgccgcattgctgaactatccgctgaagttaatcgcctgcagtatgaaatttcgaaacgtgatacgaccattgactaggtcgtcaactcgcgctctttcgcttgggactgtgaagctaaagctctagcttgagtagtagaacttagtgcatccctcgaaaacctgcaagcatactgcaacaccttgcatgaagaagtgcatgtattgtatgatcggctgcacccaaacgtgccacctgatgtggcatcaatgggagctggaccatctagaacaacaaatggaggatctgatggagggattgacctttttggagccccttcttacatgaatatggaagatgaacggtct

SEQ ID NO: 112263 - DNA, 322 bp, Zea Mays
gccttttctccaatttccgagggtttctccttggcaggctctgaaggcccagcttcggcgctagcctggctcattgtagctttgtctttggtcagttttgtttcagtttcaattgggactttcgaagccttggcaattttccctggagtagagcttgaagcctttaccgtctccagcacatctagtacactggccatcctttttctcttgggggtcgccgcaagacctttttgtgccttcggcattgtcacttctgccgaagggcttaaaacttctaatgtttttgttccctcgattattggctcctcagctttatcagtct

SEQ ID NO: 112264 - DNA, 556 bp, Zea Mays
gcgaggtcgaagctttcagggaaattcttagtgacaggtggacttctgtgcctttgctggtgcccgtgggtacatgtctattttggagaaggctggttgtgatcatgccaaggctgtagcttagccagactttgccttctcagccgacgatgttagaaatccttcagccgaagctactagcctgggtgggaagttttattccaaagtacggttgaagggtggccgagaaatggctgatgaagccattagaaagaatgagagagtctcatgatgccttagaagaggctaaaagagccgaagaagctgctgagcgggctaggcttagaggtatatctttatagcttagcttcgtaagttttgtagcttcagtactaatagatatttgtgttttgatgcagctgagctttctccccctcctgagccatatgatcctgaaactgacccatttgtgaaggaggcactagatatatataagattgctaatgatgctattgacgaagttgtcgacaagctgctaaacgaagctgtcgataaagtcataagggaagactaaagt

SEQ ID NO: 112265 - DNA, 512 bp, Zea Mays
ggtgctcacatattaaggcagttggaaaacccaaatttttcatatcggtgatgatgtgaaaaaaccattcgccgatgctttgaatgtggtgaaacacttcttcactctaatctaggctaagggcgaaagggaattagtaggagctgaagccgaggccaacatgccgaaggtttgctactggatcttatttcgattattgtcaattttggtttgtatgtaaacgtgttagatctactataggacaaggtggctgccaacgaagccgaaggtggaaaagaagcttgagaattgtcaggagacatagaaccttcgtcgttgggcatagaaaacttatgttatagttgtaatatattgtactggaattgtaatatgagtttgtaatttagttgaggggaacaatgctcgattgttgatgaaggttggaataaaaatacaacctggatgtattaattctcatgactctatttggtgttttcatgttgtggttttgttatgggtgaaactcaaaaatg

SEQ ID NO: 112266 - DNA, 741 bp, Zea Mays
catccccaaactgatgggcagaccgagaggaccaaccaagtactagaagatatgttaagaacttgtgctcttaaacatggtggaagttgggataagagtttgccctatgcggagttctcttacaataatagctaccaggccagtttgaagatgtcaccgtttggggctttgtatggcagaaagtgcaagactccactgtattgggatcaaactggtaaaaggcagttctttggacctgaaattatacaagaggcagaggaacaagtccatcaaataagagagaatttgagaactgcacagtcaaggcagaaaagctatgctgatacccggagaagactgctagagtttaaggagggtgatcatgtctatttgaaggtgtcaccactccggggtatgcaaagatttaaagtcaaaggaaagttgtcccctcgcttcattggacccttcttaatcctaaagcgagtgggggagattgcatatcaattggagctacctgatcatcttgcggatgtacatgatgtcttccatgtatcacagttgaagaagtgtctcagggtacctgaagagcaactaccactggaggatcttagtgttcaagatgatctgacttatcctgagtatcctataaagattcttgatacactgactcatgtcacaaggagtaaagtgatcaaaatgtgtaaagtgcaatggagtcaccatggagaagatgaagcaacttgggagagagaagagcttcgc

SEQ ID NO: 112267 - DNA, 476 bp, Zea Mays
agatgaacatcttcatcgactttaggaatctacatgcctaagagttaacttcgataagtcttttatgatccctataaatgttgtataggataaattaggttgcatcttctacacacagcttttggttactccaaggcctccttgaccttcacttatttgggtctgcctttgagtattacaaaaccaacatttgcatacttctattctattgtttcatgatgtgagcgaagattggtcagtgtttcctcttttttaaatcaggtaggacaattggaactcactaatgtagttttcacaaccattcccgttttgctatgataaatttcccttgccaaagtgaatcatcaagtaggttgacaagtttagggaacactgcctatggtggcttgatgctaatatagtcaaaagcctacaaatgcaaccggagtaattgtctatgtacctaacagtactagagaatggagcttcggtccaac

SEQ ID NO: 112268 - DNA, 449 bp, Zea Mays
gtccctcttttttgtagtcaaacatgctggagcgctagctggggatatcatacatgcacgtccatgagtccatccaaccaatcggctgctatatctcgtaatagatcaatacaacagtttggttttagtgtcactaccgttgctttttttttcttcccccaccattgggatcttcaattccgtgttcagttcagtatactgctcgattctgtccctctttttttagtcaaacatgtacaaatatcctcggtatcctccgcttgctctcgcccttttcatggcacgggaatcaaatctgaatcaaacacgggtcgatcccaccgccaaacagtggagtagaggcgatctggtgcggcctcgccgcttcccgcaaccgcaacccccatgtgcggttttctcgtctgcttcccctgcagtcagccagctctacccaccacactgaattggcc

SEQ ID NO: 112269 - DNA, 435 bp, Zea Mays
atcttcgtcgtgacgctgaagaagacagcggcaccaagggctacccttgctcctctagacaccaatcaagatgggctccttctaagggaagcccaaagccataagaggaaagccattagcccaacaccacaggaagaagagttggaccaagaaatcagggatctagaagctattcatcaacaagtagagagaagaagggagaagatgcttcggctggctgagctctagaaaaagattgatgaagcagccaaagagatgtgtcacatcactcaagacaacgaacaagggcataagccacaatagagagagcttcgtcaagaaagccctagccatgatgacatatggtatgatgactttcatcatgataccattgcttttgatgatgccccctagctacagaattgcaggctacccgatgaccaccttcatacaaac

SEQ ID NO: 112270 - DNA, 303 bp, Zea Mays
ttctcgaacaaaatagtgaccaatttaaaacatcaatcaactaccaaaaccttccagtagaataggcacaatgtagtcacaaagcaatatgaataaaacatgagtgggtaatctgtatcacatgagcaaggcgagaattacaaacataaagatctacaaggccgacataagaggtaaaatcagacaaaaacatcgttgtggctcagaaacagttattggagacacgttactagagtatacaatatcttacattcttacatagttcttacttcatgggattccaattctaagcagaggtagctc

SEQ ID NO: 112271 - DNA, 1046 bp, Zea Mays
gaactgtaaagaaacgctgatctatcaacattctaagcgtctaacaatgtgatgaaacttttctccttgatgataatgaataaataagaaaccgtttttgagggacaaagcaaagcacgcagctagtggtgacgatctgttctaaatagaaatatgcaaaagcatccacctagtttaatattccaataacagattgacaaataaatagcacatataagaaatttatattgcaattatcattaccattccatacaacgaaagaatgtggatgacatcaccataagacacaccgagtaagatttcgttcaacgtagacatatgagcaaggtagtggctcatgctcccaggagttgaagttgaggaatctgagggtaaagaagctgataatagcttgaccaccatactgaccacatgttcctgacataatgtgcatcaacatatagcaacaattgttacaaaaaaaacatacgccatgcccattgtagaaaagtgtgtttgtaaggttttctaccacttttaggtaactagttgtgtccccaaaatgttggtatatgacaacacgtcaactccctacgtccctgcatttctgacgatttttgggactattgcgacgtgcatttgactaacaaacgatagtgaactttcagctatgctaatagcttaatgtttgaattttcctagtttcattacaaaacatcacaaagtaaataaatagtggaggtgccctttggtgagtatgaaaaagaaaaccaaatgcacaaccccacattgccagattgattcacctaaaaaataatgaactacgttacagaagaaacaaaaaaatccagtcagctatatgttgacagtatggaatgccttcagtcttcacacgataaggtgtacgactgtaaatcaaggtacctgaatgttccagccacgaacaagtgatgcgccacaaagaatctttgcagcagctgttttttcttcttctgaaccatttgttgctacactgtataacttgtccaattccgcaacactgaagaaacaaatagattacaaaccag

SEQ ID NO: 112272 - DNA, 313 bp, Zea Mays
ctaaaacatgaacccgggaggtacggactgacctgagactggctggccacggtgcgatacctcacggcggcgacggtgacctaagttggggggaaattccgaattctcgggctacggtggatggtttgaggtgaggagtggtgcactgggcgcgtaacaagaaggcggagcagggagggcactcaatttatagtgatcactcgtgtgcttcgtgaattttggatgagaacgttcacggcggcgctctgatttccttcactacggccaggtgtcgtggcatactgaaagagaaatgtgcccttgggccatttct

SEQ ID NO: 112273 - DNA, 477 bp, Zea Mays
cccccagtgcttacaggttggcaacatcatccagcgaagacttagaacattcctggaacatcgataatctccggaaattttttgtttaagtctcagggcctacgcgcctttgtaattctgcaaacaatgttgttcaggcctgcactcttttcctcccgaggggtgaggtttttaacgaggcggagccatgtaatataccagtcaaagccccgcaaaaaatttcaagaatcaccatgtcgaaaaagaccgctccgacggcctttggcattcgaccgattcgaagtcaccgcgacaggtagcgtagactaccctcgcgtgcgacaaactccgtgcaaaagttgcctaagggtgcagccggacaagcacaacaagtgcacgatacgaagtctttactaaaagacaactccgcgcaaaagtcgcctaacagtgcagccggacaagcacaacaagtgcacgatacgaagtcttttccaaaag

SEQ ID NO: 112274 - DNA, 349 bp, Zea Mays
agaaaattgagaaaagacatttctaagtttgaaaatgggtgtaccatgaatccatatggttccaagtgaaaaaggtatgctcctaacacttagtcaattgttttaggtactaatcatatttgtctaagggctagggactatgtgaagtcaaaaggagcaaaagagaattggaatgaaaaggagcatctaggctgttatgcgtagcatcggaaagtccgatgtgcactagacagtccagtgacagtccggctgaacgggctgttcttaggaaaaacatacttcgtcgcctataattcattggacagtccacgtggagcgccggacagtccggtctgctagccggccaaca

SEQ ID NO: 112275 - DNA, 892 bp, Zea Mays
caatttaaagtcaagctttcgaagtgtacctttgctcaaacaaagttatattaccttggacatgttattagtcaagagggagtggcgacagatccggaaaaagttgctgcagttcagtcttggccgaccccaaccaatgtcaaagagctccgcagttttttgggtttagctggttactacagaaaatttgtaaaaaattttggcatcatatcccgccctcttacgaatttgttgaaaaagggagaactttacatctggcattccgatcatgaccaagcttttcagctgctcaaacaagctctggtgaccgccccagtccttgcccttcccaactttactcaaccatttgagattgaaaccgacgcttgtgagcgaggagtgggtgcagttttacaccaagctggacatcctattgcttttatcagcaaagccttgggacctcgtcataggggtctttccacttatgaaaaagaatgcctagctatccttatggcagtggatcagtggcgatcatatctaattggtgatgagttcattattcggactaaccatcgcagcttaattcatttggatgatcaacgcctgacaacaccatggcaacagaaagccttgaccaagatgctgggccttaggtacaaaatttgttacaagcaaggacagaccaatcaggtagctgatgctctctcgagattaccatctgatcaccttctagcagtgactgtggttcagccggattggcttcatagtttatctgcaagctattcccaacactcggacactgcatccttgctgcaaactctctcagtacagtctccttcgggtccttacaccatcaaagatgggctcattctctacaaaaaacgagtattggtaccagctcaatcagaattcc

SEQ ID NO: 112276 - DNA, 375 bp, Zea Mays
agcgcgtgaattcataatgaaactctggtcggctcagattaaagctagctgtttggacttatacagctgcaatccgtagagataaaaatattgtagaaacagtagaagccggtaaagataggactgttgaattttgtacaagttacttcatctttcagctgaaatttatatagataaaaacacggtagaaatagtaaaagtcagcaggagatgcttttctttagaagcgtctgaaaataaacttctctagaagaacaggggggcagaaagcactgttgaattttgtataagttacttcacctttcagctgtagtactgaataactgcagaatgtggaaacgttcataaagatttggttgggtcaatctacagctg

SEQ ID NO: 112277 - DNA, 1215 bp, Zea Mays
attgttcctgatgatattgttgcggatgttcttactgcatcagggactttgacctaggctctagcctctagtgatcctgtgatcgatgcccctcttgaaaatgctcctacatgacacatttaatggaaagtagaatgatggctggttaagcaaggaggtgcttcctcctttgataagtgtacttgagattttactttgaatctgagatatggaactactttgtttgtgttttgtgatgagttgtggggaaaaaagaaacttaatgtttgtccctatattttgctatgtttcctttgctgggattttgcgtgcatcctttttatgtataagtgtatgtgtgtgtatgaggcgtcgattgaaccacttcttaatttgagccattatccttgttggtagggtatagtacgcatgctttatacgtgagtgtgagcatgtaacaccgactttagccaatcccgacttaagccaattgctctgttagcagggtatagtatgcaccctttgctttgtaagtgtgagcatgtgacactgacttaaccaatcccgacttaagatgattgcttcgttagcaggctatagtacgcaccctttgttttgtaagcgtgagcatgtgacacagacttaagccgattgctcccttagtagggtatagtatgcgccatttgttttgtaagcgtgagcatctgacactgacttaggccgatctgacttaagctgattgctctgttagtaacatgtgagagtacttttgtatgtggagataaagtagaagctttattgagaatgaagtcatcgaatttcaagtggtagcctactatctagagtttatggtgctactatggataaaacttctttctgtgctcaatgttccatgagttccctagcgtagtaccattcatctgagttagtcgatatgaaccgggccaagttacttctgcaattatgaaaggtccttcctagggtggtgatagcttgtgttgtccttctcccaattgtatgcggcggagcactaggtctcctactgcgaatgttcggtgacacacaaccttgtcatggtaattccttaaggtttgatgatatctagccgactgaataacaatatttaaatgctcctcttctagcacatcaatttcttcatgccgggctgcctctgtgatgcttttgaaggttaatctaggtgctccgaaggttaggactactgctagtaatgcttct

SEQ ID NO: 112278 - DNA, 320 bp, Zea Mays
tgggagcttcatttgaagtttgatcatgaaacaagtaaattactttgaagatgttaatcattatttgcaccatgaagcaattatagtagtgattcatgtatgtatatcaaaacaacaaatgagaggaccattttgaatatttacatgggatgtggctcaataacaggcacaagatccttgcaaactggatgttgctctcaagtatcaacacctgatagcatgccagagagcgtgatggtagccagtagtagcgtaagcttcaacgcagattcttgttagtaatacttgaaacatgatggtgcaatttagtcagactcaat

SEQ ID NO: 112279 - DNA, 378 bp, Zea Mays
atctggaaccacaatgcattgaacttaaagcacagtatagaaaagaaggcacaatatgcctttggattttcttcattccaattgacagcagagagtagaaaggatggagccctatgatacacaaatggggctcatggcctctagggccttctctggggtgtgtacatgccttatggttgtctcctttatctttgtatccaatgttctagatggtagactgcctggaataaggcatactacgttaaactgtatgaaacctgatttttttgcatgtttagtctaatgaatagtcatgtacctggtgttagaacttcgtcatacaaataaaagaggggggctcttcagtcaggtcaacagctggcaacacttgccgcagca

SEQ ID NO: 112280 - DNA, 311 bp, Zea Mays
ttgatggtgagcaatctcatgcaaaaccctagcattatcaacagtggcatttactagggcaacaatggactctgccattgtaggtggaagtggtggcggtggagggttgatatcagcttctgcaccaccacgcgatgtgccagccccatccgacccacgagtactcataggcatctggagtaaaacaaactcataaataaacatccataaccatgaaatatattacataaggcaggtacatggagttttattcattacaataccaaaattgacatagcttaatatcttatgcctacactagagatcacgac

SEQ ID NO: 112281 - DNA, 556 bp, Zea Mays
cacaattcagcagcaatgttgcaacctgattctttctccaacgccgcaacttgatgccaagcactatcacaattgtgactagatggaaactattatccagcaacctgtttatgagctgcaagcaacctaatatttgtgctgctctagaattgcaaacaacctgagaagcctttaattggtctcatgcctctgcaccaaccagactttgattttagtacaccagtgactgggtggtgatcgaatagccgacatgcacgttcagcaaaacaggcgcagaaaaatagcccttgcatgatagatggttagtgttcaaaaaggtctaggtcatttaaatctgaaattgtttgttgacgaagctggcaacccactatacaggcgcggaaaatagtattgttgcctggaatgcctctgcaccaaccagtttgttggatgaaggcaggcgacatcgttgagccaaacacagcaaatacgatgcacaagatttgttcctcggcaatgaatggagaaattaaaccaggggcattacggggagtttagaagatgatgaaaaatgaaa

SEQ ID NO: 112282 - DNA, 555 bp, Zea Mays
gtgattcttggagctgctcccaaaagcgtgccacaaaaagtgctcctctgtcagatacaatggtcttcggaatgccatgcaaacgcactatttgatcaacatagattgctgcatatttctctgtcttgtgggtggtatgcactggcaagaaatgagcagtcttggtcaacctatccacaatgacccaaatagaatcatggtgccatgaggtattgggcaatcccatgataaaatccatgcaaatatcctcccatttccaagatgggatgggaaggggttgcaaagtgcctgctaccttcaaatgactagccttgactctctggcaggtgtcacattcggatatgtacttggcaatttccctcttcattctggtccaccagtataaggatctgaggtcatgatacatcttattgctgcccgggtccatggagaattttgaaaggtgagcttcatccaatatcttctttctgagctcagggttcttgggaacaaccaatcggtctccaaaccataggattcctttgctgtcctgacggaagcatttgtatttttctg

SEQ ID NO: 112283 - DNA, 670 bp, Zea Mays
atctattagtctacccatacacctcgcataactagtatcttgacttacttcaccttacacaagcacatgatacccgctttagacataggaattatcacaacacaaacattgactccatccaattactactaggcatgcatatttaacatagtagtcaagacatttctacaagtgcccaacatatttctaactccattatgcaccatccgaacatgatacaccatttcacaaacacttcccaagcgacatattaacaatcaaaagagaagaagaatggcaatatcttttataaacaccaccattgaacaacacatctcacaagcgaaaagaccttttgaccatatctaatataatcccaatagtcacatatgaattagacgaagaataccctatgttaaaacgagagagttggtaactaatataattatcccctacactcattaaatcaaacaacatgagtggtactagtaactcaccaatacgaacatgagccaaaaaatgctaaatagcgaggatctctgattcaatctttctatcgaacacctaataaacatcacctagaccttggttgctctcatccaatatctaggattttctctccgtcacatcacatgcacaaatacacacaagtattagtaggatacacgtgtcggatggggaacgagcaaac

SEQ ID NO: 112284 - DNA, 397 bp, Zea Mays
gcacgtcttgctcatggattttaatggtcataactagcaccattacatgttaatgttagtaacatgatagggcagctatttgctggagaaacatgacatgatagggcatatatttgctggagaaacattagtccattttaatttgttctattgttatgtggggcgcagtgtataagcgtcggccacagcagaaggagggttagtggatgagaaagaataggaaaggatagattaagttagttgagaaagtctagggatgaggattagccgcctaagagatagattgagtagttgagatattctagggatgaggattagccgcatcctccctcaggatactatttaatgtaatgaaatgagaggaacaaagtaagaaagaagttgagtcctgtcgagt

SEQ ID NO: 112285 - DNA, 366 bp, Zea Mays
accgaccatactgctacaggggctcggattcatctcctcttatcacaacaatcacgcgacaacccttgtactcctgggcttcccccttgcgactataaaaggaggagtctagggtctctaggacagaaggaagacaacacttgaccgctcactccactcctgatattagcactgaccttaatcatacttagagactcaggacctgctccctttcttgactaacttgtatcccctactatgtgtacctaggtgcaagataatatatgtctcatccccttgctggaagtagggacttctcttgttcaaaataggacaatgtcttcttgcatcacctatgaggacagcagcacgcagcacaaattcacc

SEQ ID NO: 112286 - DNA, 408 bp, Zea Mays
aaatcgatgcgtgcatcgtgtcgtggctctacaccactgtgtccaagagcatcatggacactgtgtaccagccgcggagctctgctcaccgcgtctagacagcgatctctagcctcttcctcgacaacagttttcaccgagttgtcttcgcccaacaagaatttcatagcatctatcagggggatatgtccattgctgagtacactaggcgtctcaaggagcttgcggatactctgtacgacgttggcgcggcggtcactgatcatgcgctcgtcatcaacaccctgcgtggcctcaatgaagaatatcacggcactgtcagtattttcaacaatagtaacaaccccccttccttccttgttgttcgctccttccttatccaggaagaacgacgcatcaaaaatcgcc

SEQ ID NO: 112287 - DNA, 318 bp, Zea Mays
gtgatatacctgctatgtgtcatgatgttatttattcttcacatgccatgattgcttcgtctagttcttcacatgctcattgtagacctaggcgccatgctcatgttgtttctcatgcgcctaaggctaggaacgcatctcatggtccctctatgctatttcatacatttggtgcttcttatgtgttgtattgcaagaatgatatagttgttgtttcaaatgtgggacataaatgcaagaagggtaagacctacatttgggtgccgaaatcctatgtaactaacctaacaggacccaacactatttaggtacctaaac

SEQ ID NO: 112288 - DNA, 359 bp, Zea Mays
ctgagtttggtgaggaggcctctttagctgctgaatcaagagaacctgttcctcccatgcagaggactaaagagccagctataatgccgaaggtaccttcggttgagctaattgaaacgaaggttgacaaagataaagctgaaaggtcaaagactgaagaagtatcaaagatgtcagggattttaagtccttcaacaaaagcaatagcactgaaggcagaaaagagttctgccgcaactcctaagagaaggaggatggtaaatgtattagatattttggaaacaaccgattccataagccccgctcccacagggaaggttgccgaagctgacaaaacgcaatccaaagctgatactaag

SEQ ID NO: 112289 - DNA, 503 bp, Zea Mays
aacaaaacgatcttataatttaaaagggagggaatactatctatgactccttagggcagtgtttcttaccttatgtctgcaactagtagcttattagatgatggtacgtatatgttcaatcaattcatggtcagtcaaggtaaagagaagagaagatgattaccatgaactgttggtacgccaactttgcgctgttgctacttacactgcgtgcctcctcccccgcccccgcaacacatgcccaaacagtcagtggatgacccatacgacatggccttaactctcctttgatctcacgagcaatgatgtcttgaaggggatatgatcactccatgcatgcctctgagtctctgacggcctttctaccatttcggtgtccccaatatgggagtcaccctccttgcgatcaggctttcgtcttttgggggcttcattggtcctgtaatagccaaaacctggcgtcacctgaaattttggctgccatttggtttaccactaaaatt

SEQ ID NO: 112290 - DNA, 371 bp, Zea Mays
ggagggagtacatcgattggagcaatggccgaattgaaaaatgtagctagcaatgctcaattccgcctctgtgtgttgggaaagatcactgccgttgagcagtccagaggttattatgagacgtggcaaaatcctgtgacgacgaccagcattctgaaccctaacgcatgcatgcagagtgattggacgacgcgcgcggcggcagtgcaggaagcgggtaatggctgctaggagatgcgggccatgattcacgcatgatgagaccaaaagttggaggagaagagtctagtggaggccgtggcgaggtcgagctcgacacgtatggaccatcggcacctttagtaccgtctgtccatccacgaggattctat

SEQ ID NO: 112291 - DNA, 833 bp, Zea Mays
ggaagaggaagtgctgctgcagggagagggtgctgctgctacgtctagtggaggtggtgctgctacagaggttgaaggtactactgatagagagaagggaaggaagcctggtttgtttttagtgtttgtgggcattaatgatgatgagtccagaggagactgaagcaaaaaggttggaagaagaggctaaaaaaagagcaatgattcgtggtgacaaggaagaagaggatccactaatcacaaaaagtgagatgagaaatgagatgaggagtatgattcaggaactcatggggttaggtatgattggccccaagactttgcctatatcatctgaattaaaattggaactcattccaaatgatgtgaagctagaagggagcaagaattacttgagttggtctaggagagtgcgagtgctcttaggaggtaaaggagtggagcactatttggaagaaggttgtgttgaacctgttgataggctcagccctgaatggagggtttggtataccaccaactcgattattgtggcgtggttgttagcatccatgtcttcgtctgtgagtaagatggttgaagccatgcgcactgctgcacaaatttggaagaccttgagcaatatgtattcaagaaagggaaatgtgatgatgatgatggagatccaaagtaaggcagatgcagtgaaacagacagggagaccagtggaacaatatgctagtgaacttcagtatttgtggggagaactagatcactacgctcctctgcaaatggtttgtcctcaggatgcacaagttgtccacaagtgggtagaggacaggagagtgactcactttcta

SEQ ID NO: 112292 - DNA, 510 bp, Zea Mays
gtttttatggccgacgggagttaaatgtaatgcaattagagttagtttagtattgttaattggtagtgtgatttagcttaatatgactttatgcatgatacttgttatttataacttattattaattgatgaatttgacgttatatatttatagtagtcttagctaatgtcgagtccatacttctagaaactcgtgccctagagagccatgccatattttgaccatatcatgaggccctcctaccctttgagatccatcagactccaagctaaatcttgcctacaaggtcctaaacatgtgaggcctttcacagacatacttgtcgctaagataggacatatctgtcattgcagcaagacatgtttgacattatggcacaaccaagacatataggtccatgactatgacaagataggagtagataaacctttgttggatatgccccacagtctagcatgcatgtgtctagtactataaaagggaggagtaaagcaacatagaacacaaat

SEQ ID NO: 112293 - DNA, 419 bp, Zea Mays
ttatatgatcgtgatgtccagatttttggaagaaccaacaagttgtctttcttgtacaaaggagagcgaatctctttgcttccttagacactggaggaaattatgaaggatgatctaagaaacagcgagagagcaagaagcacttgagagtgatccacaaaaatagtaaggaagagtttccaaagccaaataaaactccacagcctccaataaccaagacaccgggaaaagagggattaatcatgatgactaggaaggggcatctaaaagaattgagtgaacctaatgccatgttctttgtgctcctgtacaaggacaaccttttttctactaacgacttaccctctactttgccaagtattgtttttgatgcattacaggaatatgaggatgtgttttctgatgcctaccgcaccaac

SEQ ID NO: 112294 - DNA, 594 bp, Zea Mays
tgtgagtgttttttatcgaagacattgcaatgacaggctgttgtcttcgccgaccaagtaacgtctagggtgctagtgaatgttgcgacctcacagctacgttgcgagaggaaacgagaaacgactggaggacaagatagaccgccttcggatgttgcatactgaggctgtgagggataagtctacaaccctgaacaagagtcgaaacctcttggagaaggttggctttcttgagaaagagaatgagagtctcggtcacaggctgagcgaagagaaggatgtcgccgatcaggtgaagctagagttccaggctgcccacccagagggtcaagccgcctagaagcaaactgctgaactagagcaggaagtgaagaatatgcgcgcctaccgcgagaaggtggatgtcgccacacgggttgatgcttatcatgatctgggcgaacagacggcccccttcgacaagtcagaaggggaggtggggaccctctttcttgggtggttgcaagagtagttggagtccctcccgtctatcatgatggggctcatgtccttagcttcccatgttacctaccatcaggcagtgaatgccttgtc

SEQ ID NO: 112295 - DNA, 455 bp, Zea Mays
tgtccattaacttttctcttgctttgccattgcgagttcaaaattttcattagcttcggcaagctttttccaaaggtcttcgacttcggctttatgagcttcggattgtgcattaagctttgcttcgttgctcttcaacctatctactaaggaaagcaatattttatctttttcaagtgcctcgttccttagcgtgataacttctgaccgaaggttcccaagggctatttggcagctttcgtcttccgcattcttttgcgcccttaaagccttgcttaggattaagccctacaaaaaataaaggatcatcacaataataagaaaagacacaaaaagtaatctgcttataagctaaaacatcctcaccttcagactgttataggcaaggctgtctgcaaggtcatccttcgacattgcagacaggccaagttctagcttcgggaatcctatatttt

SEQ ID NO: 112296 - DNA, 345 bp, Zea Mays
agtagcttgttttgcttcggcagttgaagaggtcccttcatcaaattcaggcactacagctggttcaatatatcgcagccgatgggtcagaaccttcatcttcttgcctttcggcacagcagtagtggacgaagcggcagtttttctcttctttccttgccttcgcaatgggtagtgataattagggtatacgaagccaattgcatcaaacaccctgttcaatcttttcttgccccgaccaccgaaggctaggacaaggcatcatcttcggccttcgaatatgtcccaagcagctcatcgctggtagcttcaatgcatttcaaccagtcatcatttggttcgtca

SEQ ID NO: 112297 - DNA, 483 bp, Zea Mays
ggcaaagagccattcccgtgctcatcggacaagagcgtgcggtccaatcaaagtccggttgagcaacagggaacggagcgtgaagaccggttgagcaacaggaagcgtggccgcgcggtacagcgtggagaaggatagacggggactcctccgactcgacgtttgtacctgcacaagaattttccagcgttccgcgcccgtcggcatacagcgacggtgatgggatttaggaaggaaaatcgtacgatgagtgcaggacctaatccggcgatgcgaataacgtgaattgcgtggttattccacattgttgaagacgaagttcgtagtcctagcacacagaagaaaatcggggctactgttaattgataacgaagacgagggaaaaaacaaacgaattggggcgtttatccatgataatggagaatcgttggttggtgagggctgccgactgttcgtgtggaagtcaaagaaaattttgtaaag

SEQ ID NO: 112298 - DNA, 485 bp, Zea Mays
aaggttacaagtataccgccggtgacggtgtcataaaggtaacaaaaggctctcttgtggttattaaaggtgatttgaaagctgaaaacttatatgtgcttcgaggtagttctggctctgctaatgctgttgttgcttctgattctgagactactaaaatttggcatatgcgccttggctatatgagtgcacctggtttggcagaattgagcaagagaggccttcttgatggttgccatgctgatacccttgatttctgtgagcactgtgtttttggtaagcataaaagggtaaagttcagttctgctgttcataataccgaaaatattcttgattatgttcatgctgatttgtgggggccgtcacgtataccttctcatggttgtgctcgttacatgttgactatcattgatgataattcacgcagagtttggccttattttcttaagaaaaaatcagatgcctttgagtctttcaaggtttgg

SEQ ID NO: 112299 - DNA, 307 bp, Zea Mays
ccgcgccagtggttttgcgcagagacccctggcgatttgaaaaacccacaaagaatccactgcactattcacgtgtctcactgacattcacacttaaaccctcacacttctttctcttcacaactccaagtccccgacggtgaacggcggcatgcgcgctccagcgaacctgcaccgaccggaatacgcaatgaccagtgtcctaactcagtctacacctaattccacccgtggggatcctaatctatccctcaattgcacgagtccggcccgaagttcttctgctcacgacgacagcaagatccga

SEQ ID NO: 112300 - DNA, 361 bp, Zea Mays
aagtgaaaaggaatgagaaagggaaggtaacactcgaatttgatggatgttagagaggaaattttacactcccaagttcagggtgttacaagtgtccagtattcgcaggcgtgtgtcatcgtaattggtgaaattagatgggaccacggtcccatcgtcctttgttgactgcagtgtcacatggagcagatatctgaatcgtcgcatttaatgtgcacgtcttcatgattcctaagaatctttttgccgagatcgagctcaaggttgtccttcgtccgagatgagctcggacgagacggaaattgctttccataaaggtggtcctcgggtgagtcgaggattttccacgggcgcagccttc

SEQ ID NO: 112301 - DNA, 699 bp, Zea Mays
atgaaacaggtcagtgctgccatgcatctggtaagcttttgaaccttcttttgtgatcatggtggttccatctgtgggatggcttcgatcttctcagggttggctttaatccctcggtaactgacgatgaaaccaagtagctttccagtgggcaccctaaacacgcatttgtcgggttaagcttccaacggtagagccttagactgttaaagacttgctagaggtcagcaataaagtttttaggatcctacgtcttgattacaacgtcgtcgacgtaggctttcacacacttgtactagtggtcggctaagcatgtttggatggcccgctggtaagtcacccgacattctttaagccgaacgacatggtggtgtaacagaatgcccaaagagtgtgatgaacgtcgtcttctcctggtcctcctccgctagactgatctggtggtaccccgagtaatagtctaggaaggagagcatggaacaacctatggtggagtcgactacttgatctattctggggagcctgaagggatccttcgggtagtgtttgttgagatcggtatagtcgacacgcatgcaccaatcaactttattctttttgagtataagaatagggttcgcaagccactcgagatgtgtcacttctctaatgaaacctgctgctactaggcgagttaactcggctcgtatggcttctctc

SEQ ID NO: 112302 - DNA, 882 bp, Zea Mays
ggtacatataccatgcatccaaattttcttaggtgagagatttttgggatgactccttgcactagttgcattggtgagtgaattttgtatgctgatggatggaaattgataagtgttgctgcgtgcaggatggcatggccccaacatctgttgggtaggttacaactctgcaagagtggtcgagcaattagctttattcttttaatcaaagcttcggctagtccattttgcgtatgaacatgaggcacagagtgctcaactgcaattcccgatgcggtacaataatcatcaaatgccttagaggtaaattctccagcattatccattctaatggactttattcgatggtcagggaaagtatttttaatccggatgatctgcgagatcaactttgcgaatgcatggtttcgagttgatagtaagcatacatgcgaccacttcgaggatgcatcgattaagaccataaaatatcaaaaaggtcccaaaagtggttgaattggaccacaaatgtccccctggattcgttccaagaaggcaggaatttcattctttactttcaagggggatggtctcactatcaattttcccatggcacatccctggcacacaaaatcttcttgattagggaagtgtttcacatttatgcagtgtccttgtgagttattgatgatatttctcatcattctaagaccagtgtgccctagtcgacaatgccatagagagaataattcagaatgtctaaacaccgtctttagggaagtgtacattgcaggtgcactaatcttagtataatataaccctgattctagcgatgggaatttttctatgacttctttgtcatattccccatactttatgatgcataggtattccttaccattt

SEQ ID NO: 112303 - DNA, 416 bp, Zea Mays
cgttagcagggcatagtggtcaccccgaattaagtaagcgtgccaattgacagtgaacaatctgagtgcctttgaaacctttttattgatgatatttttctcaatttacagaatacatcatcgttccgagagcctccgtgatgtagctatgggtagaacttcctgagatgttctatgttccatgagttcccaatttctgttccatccatctgagtgaggcgatatgatcccggccgagtgacttctgctactatgaatggtccttcccatagaggtgacaatttatgccgtccctcccccgttagaattcggcggaggacgagatctcccactgtgaaggatcaacgccgtatggccttatcatgatagcgcctcagagtttgctggtatcgcgctgattgaatcaccgtattcag

SEQ ID NO: 112304 - DNA, 593 bp, Zea Mays
agcataggtatatatggttatagacactttattatgcaggataaaggatatcttttaaagcctatataggtttgggcaagaaagagtggggtgaagaaagactccatccaagattgtggatcttgactcatcttggtgacctcacttgatccttgaagacttgagttggtgctcatcctcccttgatgaagttgatcatattcttcggtcttgtcttattgattaggagttagtgtatattatcgggctagagaatatggttaagataggtatggttgagatagactacatgatgtaggtcaaaagtttgtgtgatgtggggataggcagatcatgcaatccatcaagactctattggttgggttggtctctcattctttatttagtgtagggtgaactaagttaaaacatgtggagagggtctaatctatttcacaagtattaactggtccattaagtaactcactttagatcagatcatattaggttagatgggatctagattagattggtatgactagatgagactagttaaagttagatagatctttctgggtaggatatattttatcaggatatgttagaaatctctg

SEQ ID NO: 112305 - DNA, 746 bp, Zea Mays
gcatgatctagtgagtgtttggctatgattgctataacaagattgtagctggtttattaggctataattttgatacagagagttgattcagtcattacataaaatctggagtaaatcgatgccaaacctgctctgataagacgactgaatgagcttcgcgatggtacagtgaccagattggatcgccagctcagagacctcgccaccggcgaccacgtgcgtggattcatgctatcgccgtgattcacgctgaattaaacatggataacgatcacggggtgaaagatctcgccgtggatgggctggaatgtactgtgtgcgtgatggttcataagtgcacaccgacgacgtggccgagcggcaatcaccggcgtgttcgccattcactgggtggacgccacgccttaggaggtttatcgtgtcagtatgagtcgaggtgactatccaatgaccgtcgtagttcagtcgctctgcggttgccacggtagatcgccgccgtgactcattcccctatcggctgccagcgcaattcgcccaaattaaacaacacctctcatggactatataaattgagcacgccatgagctccgtagggtagtcaagcaccaagccaccaagtcgtgccctcaattgatcaccagagctcgctaatttctcatttcccccaaacctgctttccgccaccgtgaaagaggcctctccatggccagctcgattcaggtccaatcttgccctctgctttcttg

SEQ ID NO: 112306 - DNA, 329 bp, Zea Mays
atgtcctgtgtcatgggcactggataatagtatcagccaaagagtagaggagcacatatacttttcctttgaaaaggagcaacccatccaattttgtcctacaaactgcactaaccactaggtgctgttgtactctagtcaaaagaaaaactgcagcaagctgctgtcctccaaaagctgaaaaatgaaaaggagatgcctgcagcacgctgtccttgcagtcaaaagactgctgctgtgcagcacgctgtccttgtagtcaaaagactgctgttgctgttgtcctacagcagagatgctgtgcggactgtcctccacaccacaaaatt

SEQ ID NO: 112307 - DNA, 383 bp, Zea Mays
atgaaagcgatgtgcgacaaagccatggacaaggttgttcgcgctgggtgaatcctgatgaggaggcctggtgttgtagtgcctgaggacattattaccgacgttcttgctgcacctgctatcgtgagcagaccttctccttctgctactcctgctggcgaggtttcctgcaaaaatgctcctgcaccgtgattcgttcggatgaaaaacacttctcattgagttagtattttttagcgagacagtgtatcatggatttcatgtgcatgtaactgtgctacacttgaactgattgttctgttagcagggcactgaggccacccttgaatatgtgagcggttgcttttctttaaggtgttcctgatttgagttgattgtttcgc

SEQ ID NO: 112308 - DNA, 458 bp, Zea Mays
ttttcacttcatcagtaaactaagaaaatactaccatgaccagggtgcaaatggttggataactacggacatgaacacatatagctacattgtttctcaaattagaatacagataggatttcagtaaatcagatcatggtatggttgcagttttgtagtacgggtaattttgttttgttttctctgatgctaaggtagttttaagatttactttgacctttcctttggttgatgtaatcttgaagctgtagtcgttagaggtaatcataggttttgttcataagaggacttgacttttcgtggatgtggaagcatttgtttgtttttgttcgaatgcaagagagatattttagggcctggcgatcaccttgttttggtgctctgcacaatcagcattccttttaccgtgtgaataaggatctcactttaggtgtgttaaactgggtttttgaattttg

SEQ ID NO: 112309 - DNA, 401 bp, Zea Mays
cctcgcgtgcgacactccatgcaaaagtcgcctacgggtgcagccggaatagcacaataagtgcgcaaaatcgaagtcttctccaaaagactacccgtgcaaaagttgcctacgggtgcagccggactagcacaataagtgcgcaaaatcaaagtcttctccaaaagactccccgtgcaaaagtcgcctacgggtgcagccggactagcataataagtacgcaaaatcgaagtattttccaaaaggttccccgcgcacaagtcgcctacgggcacgaccggatcaacgaaggcacgcagcttcacataaattacggttacatacatacagcgagggcatcgcactttacattggctcaaccttcgggatgatacccatctccctgtagttgaacagcatta

SEQ ID NO: 112310 - DNA, 321 bp, Zea Mays
gctgaacaggaaaccaaaccagctaagggataaagagtacacatgctagagataaagcacaagtaaaataattgctgctggagttattggagtccatgcatgcgtgtgcatccttcaggtgttccacatggcaatgttgctgtcatgcagcacacaggctgctacagtacaggcaggttcagcacaggacacaatcaaactcaagtgtgtgatattatatgtactcagaactgacaatgttcctgttctttatgttcacagctcagcatcgacagccatgtcactttgaaacatgcatttttatataccactcattttttt

SEQ ID NO: 112311 - DNA, 527 bp, Zea Mays
cgtcgccgagcttctcgctggggaggttcttcccctggcctatttggctcgtcgtcagagatgggagatgagtccaatctccccccgatgaagatgatgtcggggtagaaaggagttactatggtggcgagttcctttccatccttctttgagggcgaaggtgtcgggaggatagctcgacgggccatcgtcccttctcctggaacgcttgtttctttctttcttataatctgtgtccacacctttgtgggtgaagtggacaacggagttcttcgagcaagtgaattaccggctctcgacttgcaagaggtaatctttgtctggggcgcatgaggttgcgctgtccgctgtcttgttccggctttcctagggatttccaaggaaagcttcttcttcaatggatccgctatgcggtgcagaattcccttttcatctgctatagaagagatggtcccgaaggagaatacggatccagggcgaagagcaatcttgcactgggaagtaacggccactgagctagcttggaa

SEQ ID NO: 112312 - DNA, 785 bp, Zea Mays
agccaacttgaaatgattctcaggggcaaagtgtccaatgttggtgctccattggcgtactcggcctggaacttgcctcctcccaaagccttcacccttttcgtgtcaaatccacctgtgactgatggcaatttgggccttagagtgcgaccctctgctgaagaagtcagtgctttggttgcttcgcttggggggattcctgatgacgaacggcaaatccattttgaggtgcccctgaaccctagtgatgcagatataaatgccatgcttgatctgctagctgaggattcttccgatgctgctcctgctggtacattggcagtggtgcccctcccagaggttgatacaactttgggtgttcagaaacctgtcagtactcgcccgaggcgccctagccgaaccaatcagcctgagccttctgctgatgagcaaaagaagaaaagaagacgcctccggcgagtatccagttttaatgaggacgctggtacctcagttcctgttgctgaagaagtgcctgcgactggacttactgatgctgaccccaatgggtgtacccaaactgctactgatcccaatgtaggtgctccacctgttgctgatcccaatgggggtgctgtttgtgttgtcggtgtggatgacgagggggaagagaatgaggttcctttgactcgaaagaacagttggcagttcatcgccagtggtgagagtagtggagttccttctcctgctttgtctgccctcattggtctacaagaactgtctctggccaactttgatcaaaccct

SEQ ID NO: 112313 - DNA, 589 bp, Zea Mays
gcaatgcactaggcatataaatagaaacccacagcggcagcatttgctacgccatttctgttgcttgcgttagtttctcaaatttttaactcttgctatcagctctcgcttgatttttgagcttcgtgatatacacaagtgcttgttgcatttctgaagagaagaagatgtctgaggagaagaaagttgtggacccttttcttgctgggttttacgaatctatggcaaaaacaaatacagagaagatcacaaaggaaataatggcagatttgtctgaagattctaacgatagcgatgactatgatgtggaaagtggggatgaagattctaaagaccggccctggcggccaagccataccatcttcggaaagttgaccgttaaacaaagtcagattgacgccatgaagggaagatactttcatgatatgtctattgtgagggttggaggggacaacaccgcccctgctcctgaagaaaatgaggttgttgtctacagaagctttatgaaggcgggtcttcggttcccattgagcaaatttttggttgaagtgttgaagatatttcagatctttcttcatcaaattactcc

SEQ ID NO: 112314 - DNA, 426 bp, Zea Mays
ttcaggggctaccataggtaaccaggggcataactatatttacgagggtgagactaccccctagttacctataaataccctcgcattgtaccctaatgggacaggttgaaaaacattgttgctctaatccatcgtgttgttaagcatcaaagtattcccgttttcccactacttggacctactcaaccacgtgtcagtgagttccaacatttggcgcccaccattcgtgcttcaaaatctcattgccaggatggctcccaagaaagcaacttcgaaggctaccacctccattgacgacgcaacgaaggcggctcttctcgctgagaatatgggcaaggcagcccttattggcgatgtccctcatgaggccctcgaggatggggcagttaacagcaagcgacacctacaagagaacctgcctacccc

SEQ ID NO: 112315 - DNA, 325 bp, Zea Mays
aaattccagttgaacctaaaatttccaaagaagaacctgatgaatcctgattgaaccggcatagaacccggttgaaatggtatgcacaggaaaacaaattttgaaggggaaggggaagaaagcaaatggtgacttcgcaacttttcaaaacaagaattttgaagtggataaacttagttggtgcataccatccttacctcgcgaaagaactaagcatacgaagatccctattactaagacaggtcaatcaaaacacttgggaatctcctccagagaccaccttcagatctttacttttcaccgtttggtctcttgttagctcatt

SEQ ID NO: 112316 - DNA, 883 bp, Zea Mays
atgctcagattgagatggaaaagagaatattttaaagaccggtataagataaacatcaaggtaagatatagaggtgataaggataaaggtgataatggtgaaaaacataatccatggatagagttaaggcatgactcgcaaagtgacgaagtggagaaaacaaataaggataagataattgaggttccaacataagagttgaagtaaaaattcattaccgaaggaagttacgaggaattaacgagatcacccaggatgtgcgaaataagatgaatgctcatggatcattgagaaacaagggcggtcaagggcatgtaagatgaaatgttttgaacaatcattggggtatgaaaataatcatacataagaatataagagtatgcacgattccaaggatacgtgcatactaaggtaagggaatagaaagagccaaaggataacgacttagcaacagaatgggaagggatctcagaagacaagaagttcatggacatataaactgaagtgttcaagtaagcaatacaaattatgatgtaagcatttgaaacaagagtattgaggaatctaggggtatgggaaagtcaataccaagggaacagagatggtcaaatgttagcaatttaataatggaagagacaagaatcacaaaagacaagaaggttatggtcagggggcatctacaaagatgtcgcaagcacaagagtgagatcagatctaatagattgagagaagtatagaccatactagaataaaatactttttggcaagggggcatataggagcacaacatagaattaggcgaggtgactaatattttgaagcagaatcaaggatgtggtgaagtagtaatcaataagtccttaaaacagccaatgctactcta

SEQ ID NO: 112317 - DNA, 381 bp, Zea Mays
catccttccccattttttcgcggtgacgcttctccggcgattcatcccgtatatttgcatgaggcaaagtctccccaatcatctcacacccgcacatcccacctgtttgccgcattcttttcgaccttgagagccatggcgggagaagcaagctcgaagtcgccacgatgaatgtgtcgcggttcatggacaagcagatccagagccgtgtcacctccgtctctgcagatgggaggtgctgcagaccatgcccccgccggtgtagtgaaattgtggttccagggtggaggagcaccccgacgtccgttgcttttgtcctactggagtagaagcataccctcttggtggagtagaagcaacatcacttctatagtgatttat

SEQ ID NO: 112318 - DNA, 471 bp, Zea Mays
cgctggtgcctcaaatgagtaatcaccagatgtaagtttaccacaagtctttacgtctagtgtggtcaaagtaattagtcaatgatactaactcactcaaggaacatcatatggtcaaatctatgatttagttcatatacaaatacgagcaatatgtgtttcgcaaacagcaatacttccaaatgcttatttttggtagcattttatcacctttagaatttataactttgtgaagttagatctccacccacccaaccagacagtgtcaccctgggattcatataagtggatttcacgctatataaacttataaacagcacaagcacatatcattgaaagagaggtcatatgcataggccgtaggcatacacaagtttgtgatagtgatttatccaacacatgtccaacaaacctgctaggctgatcatgaggaggtttaaatagttgtgtacttccaatgctatattgtag

SEQ ID NO: 112319 - DNA, 882 bp, Zea Mays
aggaggccaacactcgtgaagcctaccgaaccctgaagatggattacgataagaagctaaagaagctcgcccccacgaagaaaatccaaaataagaccaagggccaaggatgccaggctgagcggaggaagaaagcccctccagcaccacctctcgccaggatagagaatttgtccgacgtcaaggatatgtccctagctagccttgatgaccttctcaaggaatttggggacactttagaaaaagagtttggaagtacctcagagaacgcttgcgtgtagtacgacttgtagtagatgtatgcttgtaatgaattggtgtaatgaataaaataacttggttgaaaaaaattggcatatgcataatagtgactctctccccctggcagatggcttcggataaaacacgcctaccgcctccaggattggagcagggtttcccctaagagctgaaagagaagccggtagagaagagagtgagacccacctccccgcacctccagaactacccttagatttagcccaagttctagccaaccaaacccgactcattgaggtcctcactagaagtctggaaaatcaatgcccgaatggtggaagaccataagacatgatgggagatttcctgaggctcaagcctcccacattcgctggatctagcaatcccctcgatgctgatgattggctgtgcacgattaaaaggaagctggaagccatcggatgctcggagaatcagcgtgttcaactggctgctcatcaacttttcggaatggccttagcctggtgggataccttcagcgctgccatcagagatgctacctgggcagagtttgaaactgctttccgagagcaccatgtgccccaagggatcgttcagctcaag

SEQ ID NO: 112320 - DNA, 290 bp, Zea Mays
gaaagagagttgtggtaactgtatgcttgtaatgaacttgtgtgatgaataaaataacatggttgaagaaaaattggcatatgcatagtagtaattctctccccctagcagatggcttcggataaaaccacacctaccgcctccgggatgggagcaaggtttcccctaggaactgaaggagaagctggtggagaagggagtgagacccacctccccgcacctccggagctaccattagatttagcccaagttctggccaaccaaatctgactcattgaagtcctcaccag

SEQ ID NO: 112321 - DNA, 445 bp, Zea Mays
tagaggaaccgtaattccacatctagtggaaaataccatgagtaaaactcgtgggatgcacatgtgcatatttgatgaactacaagtcctttggtacctcatcttattcttttcgggtctgtatgggtctttatccctttattggggttatcaaactttggtgtggaacatagactttgtttcctcttggaaggttccagttgggaactataatctcaactatgagatattctctctacattggagagtggtcattcatcaggaatgtattatccggtatgagatttatatgttgtatatttataaatcaaagatataaatcctcataggatctcatgatggatcttcagaatcctattaactgcatattttaattcatgtcatttgccagatatattacatagcggcacaatgtttattcaacacatatgtggggtgggtctct

SEQ ID NO: 112322 - DNA, 506 bp, Zea Mays
cttgtgtaggccccaagcaattcgtcacttgttgcctcaatactgcttaaccattcatcgtttggctcatcaaactcgcctctatatctgaaagtatattttaaatagaccaagccgccctgactagacccggcagcagcctccttcggcatctcccattcattcacaagcggccatactctgtaggtgatgtgttcttgaaccaggtctctagtgccaataaaagtacacatgatgttgaagcttctctggcatgcctctatatcgttcccaagagcggtggcgggcctctagatgtcgaagcaagaccagatggggctttgaataattccttttatatcttccctttcaattaaattattcttaacatagaaccactcctccatccaggccctgggccaccttttttggaatgtcggaaccgggtaacttacatcgggacagggcatgaagccataacaaccaaagttgtagtgatactgctccttgccagtagccttcatctc

SEQ ID NO: 112323 - DNA, 365 bp, Zea Mays
ctccacaggtgaacttaggtgagtgtttggttaccatgtatttccagatcaatgacatactaaaattgttctttgcacatataaatacaaaaaaataggtataggaaaagaaatgacatgcaacccaataaatctttttgtatttatttataagaaatgacagaaaaaatctccctcattaaaataagtgaaagaatctaacaaccactaattatcttccaaaaaatcaattattatttttgcaccaaattgtaacaatactgaaaccatattcctttcatctcattttatctgtttaacacaatgattttaataagttcaatatcacactgtaaagagtgaaccaatgatttgtcttagactac

SEQ ID NO: 112324 - DNA, 741 bp, Zea Mays
ttgacgaatcgggggaggaggtggggatccgctttctagggtggttgcaagatgagctagagtcgctcccgtctatcgtgacaggtctcatgtcctgctcgtctcttgttacttgcgagggggctgtgaatgctttgttccaagagggatggaggcatttcgaagtcttcgaccgcgtgaacgaggacttcgatcgtggagtattctagattgaagatgacgtgttgaagcgcttcgctggggcgctttatgataggatgtggggtccccacggccacgacatcatccgagaaagggcggaccgagcgctggcgtaggtatgttgttggtttgacgagggttgttgtgtgtgttcgttgtttgaaaatgttgttgtgttgtcttcacaggtgatgaacgaagaagatgtggaagacctcgctggccttgagagctcggtgacccagagggatgcttcgacggaggcgggagctgaagagcaaacgacgcttccaggaggtgttgctgagggtcccgcgacggcagaaacttcgacgctagttgagagaatgtaatagggggtagactaatagtttttgtatgatactgaagatcggttattgcgcgggttctggcgtccaggcctgcacaagaaaacctgatgatgttatgaatgatgttgttttgatggatgcaaatgcgatgtctcttagtggtaatgtgtcaggtgaatcagattttgggtcgtggtcttcggaggct

SEQ ID NO: 112325 - DNA, 301 bp, Zea Mays
attttgtgtaggggagatgctaacagggacagcaagggctttatttatggacgagatatccactggtttggatagctcaagcacatttcagattgtaaagtttatgaggcaattggtccatgtcatgaatgaaactgtcatgatctctctgctccagccaccgccagagacctataatctttttgatgacataatcttgctatcagaaggatacatagtgtaccatgggccacgcgagaatatcctggagttctttgagtctgccggttttcggtgccctgacaggaaaggtgtcgctgac

SEQ ID NO: 112326 - DNA, 687 bp, Zea Mays
ccacctgggaccagacggtccgcagtacaaaaagttcgcaaaacacagaaactccatgtttctgcccatcacctcaagttagacctatggacagtccgccatgctggcccggacggtccacggtacctcaattcagcccacattcaagaaatcgcttttgaataggtttttctttcacgaaccaaagcgttgttagccctcatgcaaatgcaccaactatatgagcaatgaggcactaaaaacatatcaagcaagataattgacccctcttgatagtacgactatctaacctactaacccggtcaattatcaacctctaagcaccttttgaccagtaaaacaaaaacctattgttatacctttgccttgagcattcaattccatctccttaaatgatgaacaatgggcatccataagtgtagccaaccatgataccttttaccatttgtccatagcatgaagttcctccaccatcatcatcaagccacttgatcaatagcccagatcaacacatggcttgataattctgtaatgatatgatccactccatgttatcacatagcctttcttggttcatcaatctcaacatagcttgctcttcaccgttgctttacgtccatcggtgctaagtccttgctcttgcttcaccgccacgtggtccctcacacatgagcctttggcttgccc

SEQ ID NO: 112327 - DNA, 304 bp, Zea Mays
tctgaaagtaatataaggaagagtgctgtcgtcgactaattatattaccacctaaagctaactactacttgctagaatttccagcatgaaatggaccatgcacgctggtgtcctgctaattaataatacccctatacctgtagtaggagtggatcttgctaatgctgcgacagaactcctcatgtgtcatgcaggcgtcacaacgccagcagcatgccctcttgaccattatattgcttttgccctttgctagctgctatcacttgtaggcttagcttgtggcacatactaacatatacacgcc

SEQ ID NO: 112328 - DNA, 380 bp, Zea Mays
gccgccgcaaaatttgggttcaccaccggccggagtgagcagggagagaggaaagcgtgaaggggcgccctgatcgtcgatctggtattcaacggctaggattagaagacttcataccccttcgctcggttgatagcagccgtatgattttgatccgagggccaacgacgaatccggctgtgtttaaatctggggcgtccgtctggatcatgcggccgaggtttcttgatcgtttctatctaatctacaccctcggttattgatcggacgatcgccatttcaacataccccttaggccaccaacattgcaaataaacccctatggtttctacgaaataaccgcggtccagtcctggattcactgagtctttgtatctttc

SEQ ID NO: 112329 - DNA, 479 bp, Zea Mays
cagaaaccagttgctgcatgttggccaggaagacatccgataggtagcagagtcaccaattgagatgaggctaaactgaaaaaatttcagcttctatgcagtaaaatgcctcccacgttacccccatttctttgtgtacaagttgttcttatctacaaccggtctagaatcacctggagggagttgtggtcagggatttttttttacagatatttttctgttttctgaaccccagccacattagctcgactgaacccataattttatccctcatctggctccacaatttcaatggtaccaagtcaatacagttagacaaacatgtcctccgaccatagcactatcaacttgactcacttgcccaaaaccaagggtgcaaggatcaagagttatcaggtccaaaaaatggtgagcacaacactaaaaactggtttcagttaacagaaacgacacctgacagtggacattttggggcttat

SEQ ID NO: 112330 - DNA, 614 bp, Zea Mays
ttggggaagttttggataattatgagatctatcttcatcagctgacccctaacactatcgttaggctcagtgtcttcatctgggcccttcgaagccaaagaatggacccgaatgttgaagctttctgccgagtgcatgagctgcattaccagacgaaggccagagaagatgggctgcatgaaaactttggctgttataacttcgcatatcgcaaggatatgaaggctccggttctcagctaccgttcgaagtggccgaccggctggaagaatgaatggttttatttcaaggccgatgagaagaaaagagagaagctgatgcaaatagtgttgagtccactaagcttatgcttcggactgactaggcccctatgctgcatgatgctggggtcaccatgccgacaagctgtagcagagttcagggtggtggctgaacagatcagcactagagatctactgcaagaatacctcgccaacaaggtatctccaacatcgagtgaatggagtatgccgaagctgaagggaacaaggaagaagaatgaacttattcgattgccctatcgcttcaagtttgaaaaacaattcaaagagccctgccaagagtggctagaaatg

SEQ ID NO: 112331 - DNA, 823 bp, Zea Mays
aaagattcagcaaatgttactctatcaaagcatgtataatcaactgaactgctgctttgcttcatctcaattttattgacctcattttatatgttgcaaacaccttttgtgttgcttttcttaccattctgcatcttttgtttctttttcacattggctttcttgctactgagctcctgcaacttctgagaacaccgatttggatccatcaccatcagggtaggaggctgctgactaccaggttcttttctaatactatcatgtgtcttttggacacttctgcctgtactcctggatcacaattttcattgccctatgacacttctgcctgtactcctagagccaccatgctaggaactgtattgccaccaatgttattattagtagacataggcatcggctcagttgggtaaatctgaacacttggtggtcgaacttcagcagcaacaaacactgcatagatagatagatccagctgccctcatgaatactgttcgtgctaggggatgatgattgacgaccagtattcacggttccctctggattccattttcaccggtgagctttggccggatccgatccataaacgcccagtagctgcagtgcaacagtgttggtttgattgggtggtgcctggtgctggtggtactcgggcaggcctgttcttgcagttcatctgtgtactctctccctgcctctctctctctttttccttcctgttcttgggcttccaagaaggaactgcacgtgggatgctatagctgatgcaaaccgatcttactactactgcagtgccactcactgttcactgtcaagaagactc

SEQ ID NO: 112332 - DNA, 553 bp, Zea Mays
tcagggatcaggtcctcggacctctaggggccacgagttagagggagtggaaagagccccgtccacgtaaatccacccctagatgaccccgtgctccgagctggggggtgggctaggcagagctaggctagggagctagatggaccgctaagggattgctcgagtggatcccgtgcgaccatcaaaatactatcgccatcaatgctacgcataccacatcaactgtgcatgactccaagtcaaaatacaacagatggatggtcctcctcccactcataactacaagtttgaggcctaagtccactcatgacctacgaatctaggcttgagtcctcccaatgccctatgagggccacaaaacaatgatggaaggccatgggttgcatcgcagagaccagagattggtatggaaggtgtagatagagaaggcaatgatgacgcccaaacacccttcgacgacacgcttccccgatgaacttaaaggcaagcgatcgaagagctatctagggacagataaagacacccgacagagattttactaggggagaattac

SEQ ID NO: 112333 - DNA, 644 bp, Zea Mays
gagacggggtgcaatccaatgcaaatgcgatacagacgcacgctagttgctaatgctagctaccctcctcggtgctccccttgctcctgtggcgtgcgggaaaaaggcaacttaacaccagcatcgtccgaggcagcagcaacggacgactccacaagatcaaggtatgaattttcaacaggcacagggccttgctgcatccatacctcctgaagttctgatccaccccaacgtatgtacctagagctgcaggttttcgtgtcttctttatcaacaactcacagcagccaacaacttccatttacatcaaagcaacagtgcccagcgccacttcagtgcggcagcaatggcattggcgtcctgagtggtggctgcaatgggcatactgagcccaaactacctcaccgatagccaacagctgctgacatttttaatggaaccaacctctccacacctccagcatgggacaccaaatacttcactcggagatttatcaactgcgatgaagcaaacatctacaggtcttccaggctgcaagaattcgaaacaacacagcgcatgtactagctaatcaagcttatcactacacatctatgtacactcagcatacgagggcttcttgctccaatcaggctcatgtaaac

SEQ ID NO: 112334 - DNA, 509 bp, Zea Mays
atagggagttatactggttcacgctagggccctagtccaatatagtgttgatcgatgtattgcttaggagcgtgttacaacaagtgtgcttgtgtggagaaagaatgttgtccagcacttttatagctaaagggtggactttacagttgggacatatattctactcggaggtacttggcttgttgcccctaggttgctctagccctccttgtgtcgtttataggggggctgtcgtactcctgatatggcgttctgtcccgtccgttgtccatatggatccctgtagcttgtttggtgtcaacgtttcggtaccttgtgggtcccgcaaagtgggcctatggtgtgatttagggtcgtgttcagtacaacttcatctttcgtcataccgcctgcgtcaccttccagcacgtgtagccatacacccgatacgagcattgccctatccttttggtgtatgggtcactgtagagactttggtgctaaggtcccctcaactagagttgaccggc

SEQ ID NO: 112335 - DNA, 458 bp, Zea Mays
attgtaccaccaacaactgaaaagattggtggtccacgagcagccgcgaggtcacccttttcaacgacatctacaactgattgcccgtgtggctcaggcgagcatatcaaataatgctatgctgctcaaagtggtaaaggagagcttttgcaataggcctgtgaactaactctaagctggagcacatgtaatgtgatcttcgccatcgcccaagtgctatgcatgagacagtgatgacaactccagtgatgcaagcaaacgatcccatctcaatgtggaggacgactatagcttcacatcactggacaatgtcggactaacacaccataatgcccatgatagggcaagagcgcaacataaaaggtaagaggtcgacaacgagtagtatcgagtcccctgccacgcaaaagagaatggtgaacaagctctacaagaccaacgagaagataagtcaatca

SEQ ID NO: 112336 - DNA, 1006 bp, Zea Mays
cggacaagcccctagcgacggcgcgctcacccgtcggccatcccctcattgggacttgccatgaacgacgacgactatctaaaccaagcgttggattagcatccctaatcccaggcgaacttagtccatgccctaattgagtgagtctgactcaaaatcccctctgcccatgacaacggcgaacatctagggcagaccgaggtgttcccggcgatctagtgcggtagcgttcaagcagttgggtcgataagcaacactaatatgcaaggaagcttaaacatggcacagaaggggaggagcggacctgaggatggctgaccccggtggagtgtttcacggcggcgacttcgaccgatttgggggaaataccgaatttgggcgctacagtgggtaatcgggggcgaggagcggtgctcggggttcttaacatgctaacggagcaggacgggtcatcaatttatagtgattaatagcggtggctccaaatttggggaaagaaggtggcggccggctagagggggtgagtcaccgacgaacactatcgtggctttcaccgaggcaatgtcccaggcaatgagcagggtaccaacgtcgatctactgagacgtggtaacactcctaagtacgtggcatgactatgaagggcggcgaactccggtgaggacacctcggttaatcgtacgacaagtgggtacggtgaacagtctggtgacagggtccgagctcatcccaaagccaagatcttttaccctaagtcattatccgcgcgccattgggcacaaatcacagcgccagcatggatcgcggtgcgggttcaccatcaggatagtttcagacactgtaccatcaggatattcttcagagcgcctgacatggcacattgaagggtgtttttcttgaatttttatgtgacaaactgctaatgcaactacatcaaagttgttttccaatgtaccagctttaattttgttataaagaccttgatcaaacattcaatggatccccc

SEQ ID NO: 112337 - DNA, 745 bp, Zea Mays
ataattcctagtgtatttctgtgcaaacgaacagaacctcagctgaaacgatttctagccggattaattacttgtgtaatttataaaagctttatacctatgtggaatcctggacaaactaacaacgctttaggatctttatgggatgtcccaacttctccattttgtgccaccagacgtactccttcgcctccgacgtctcccactacaagaacctccactatcaccctaaattaacttcacgagtcatctcgggatgagttgcataaaggaaagaaagagtgtttggatgtggaggagggagtgtgtgtgataataggtgtgagagaacttgccccgcccacagcccgcctccaccattggtaaatccctactcaagacctccctctccctctaaacccatactaaaccctagtgtttacacctacaagacggagggggggagactaaagagatagattgaagtccacatcaaagtagggtccccaatagggcagatttgtagacaagcgcaaggctttcacttgaagaaggtttcacccatgtaaacatgtgtggcattcgataatctatactactctagtaagaacctaatgtggacatctgttgctaccatgacttcacccttcatgctgacactattggctcgacccacgcgccttacctcggctcgtgccctgtgggccccacgcccagcactgcgtccacgcagctaccacaccgtgtaaaatacagtgcaaagcga

SEQ ID NO: 112338 - DNA, 359 bp, Zea Mays
cttccttacacatccaagtgattcaagtgccccatttgagtagagaaaaagagtgtgcacatgtgtttgagctaaaagagagtgtatttggtgttgttgtgtcttggtgcaaagcatccattgagattgtaaaggctagcaagaggctctgatgttttggagtaccttgcgaagacttaggtctcttgatcgattgagaaaagaagaaacaactcgagtttgatcttcaaaatcactcgaaagggtttaaagagactcaaccttagggacacctcaacgaatacgtaggtttcatttgaaaactgaactctggtaaataaatcgttgtgttctttgtgtttgcatatttgtgatttgtt

SEQ ID NO: 112339 - DNA, 491 bp, Zea Mays
gaagatgaatggacggtgagaaattactcgtcgaagttgtcactagagtcggtgaggaactcgaactttgacgagctggtcatagcggattattgctacgagcttaacttgcggcggcgaggttcggccacagagtggctatgctaacgaacgccatcgtcgcactagaaaaacttgaggaaattactacttgtagcattagatgttgtacctcgaggcgacacacgctagtaactcctcgacatggctggcatgctgttgacaacgaacgacggagttgctccgatctggcgaccctggcaacaaactttctcatacggcgctggttaatttctcaacgaattaaatagcgcaggtgatggttcgaccgctcatatatacttgtggatgggatcgattccgggcgttcgattggcaggaggcctgacagttacgcggtggtctgttacgatctgctatagtgccggtttgttacgcgcctacgtgatgtc

SEQ ID NO: 112340 - DNA, 600 bp, Zea Mays
gtgccataagatgcaggaacaatgatacaaagactctccaatctcacccaatttacaaatcagaggatgcgagtgagtgtactgtgtcttagctctcaaactgtgtgcacacatgtttgggaattcaagagagtggacatggctggactgtcggtggttagcattggcaacacactatgggatgtcccatgtagtggttttatggttggcaagatcgacgattagcttgatggttcatgcaaagcacgatgggacacaaagatttatacatgttcaggccatagagatgcacaataccctatgtcctgtgtgttattgtgatggaattgatctttacttcgagattacagagtgcatggaagctatgatctagctagcatgtcaggggatccaatcgttttgtaggggtccctaacccaccttgtatatgcgacgaggttaggattacatgaggtcgaacagattactattgctacacttatatccatggaacagactccgactaacatgtacacatgtggtctggttggtttatcttctccgcatgcacaggaatctattacgaaaaaaccacacctacgtctttgagctccgtgtcgt

SEQ ID NO: 112341 - DNA, 1528 bp, Zea Mays
gcgacgctagggttgaaggcactttgataccatgttagaaggttttagaatattcattcacaagtaggggttacaatatatatatactccctaaccctaataggactaacaagcctcatgggctgggctaggcccataacacgcagctataatctaaatatttggctaggcccataacacacattcataatctaaatatagtctcaaagagacgactagcaagaactagaggccgaggagaacaaagattaaggaaccatgctttgtaccatgtcagtagaagaggataaagggaacatgtatggcaccagactctgtgctaggacaacttagctatacacatcttacacttgatgggtgtcaaaataaggttactaccttatggttgtaggaatcagctatatatacttgattgtcattggcataaacaacacccaagggatgttgaagtagcacatctgagccagtcccgtcataatctccaaactgaagagacaaaagtatctgacttaaaaatgctcagacagattagcatcaaataagttaacagaacatcaattgtatcaagagagaaataccctaaacaaattttctggaaatactggatctcctccagccagcaatcttgagcctcctgtcttcagattaacaactcgaatggaactactttcactatcagcaacaagtaactcatgcatttctgttataaaaattcctatactcagtgccatcagatcagaaacagaacggcaaaaaaagagtcagcaatgaataccaaaagctaatgaaatcccagaaggctgtgcaaacgatgtgctggtggcgctgcaacataaatttaatttttcagaaaataaattcaaaacttcaaagtattaaccaaatcaagtgcaaggatgtgcaggagacaaatgaacacattaaaggaagaaaagtcttaggctgatcatataagaagcaagcctgtacgccaagatctggaatggttattctacttcaactttcacagaaattagcataaaaaggaaaaaaataaacatggcttcaagctgtaaaatagggcctgttacactgtttggaacagctccagctccaagatccatacaggatttgctacttgtcggataaaataaagcggtttaaacatatgtatttatcacaaggaaatatcgccaaaaatatcattagccactcatcagatagaaaccgtcattaaccatcttcataaacatattactgcgctgtaagaccaattaaaacagcacatttagaactttcctgacagataatgccagaatctgttaccttgagccattcagattcctctcatagccatcaccgctaataactttggttattccatcatgtaaattgtgcttccagatctggtgttgcccagccattgcaatatacacggcctcctctgcgggatcgtagcatacatcccatggtgaatttaggacctgcatgaacactttccagtcaattgttgttccatctaccataaacaatgatatgataaagccaa

SEQ ID NO: 112342 - DNA, 499 bp, Zea Mays
cgaaggtcttgaaaaagataagattttaaagtcattgttgaacaaaatacaagaagacgaggctacttccaaagcccaggctgaatcccagagatgcgaaattgaggatcttcggaaacagctggctgaagcgaaattaaaatgtgctattgccgaagctgaccgagacgccagtgactactggaaaaattactgggaaaaacagttgtagagcttcgttcttcaaaagaaagatgctatgaaaaatctgtagcatgcgtacaaaagataaaaaccagcttcgccaatattggcgcatactcaaatgaagacaacttcgtactgggcaatcctgaaggtccaatcaaatggatcaacggcgaagccgaagcctttgatgaagttttgaatggtcgtggagatgtctgcgccttctcaggtgctaggggaattgtggctatcttggagaagacaggatgtgaacacgtgaagattctggcccaagtcgaagctgctttct

SEQ ID NO: 112343 - DNA, 518 bp, Zea Mays
gctcctttgacaatcattagaagcattctaagataatatctttcacccgccgatggatgtacaaaatgcatgcggcctatgctaccgtgtctatgtctttgttcccatgatctcttttttcatcccatctccattcagacggaaaatcggtgtaagttagagatcgcgcactctcatgtacttggttagcaacaaaccactcagttagcattgttcgacgtaggtattcctgtgataagatatgtgacatgttggtgttggcatgatatgtgatgtaattttcattaggcaaatgcaccggcagtctagcaacaggagggaagtgtctgtgaatttcaaagccgaaaatcctccaacatgaatcgtatggacaaataaatctagcatctagatattccttgacctcattccttgtgttcgtttcttcatcaataggagtgtcttggccatctaaaactcgttgtagatataatttgctgcaatcaggacctttcgtaacatacttgaaaagatatttt

SEQ ID NO: 112344 - DNA, 438 bp, Zea Mays
gtagcctgcaactctgctgctagaggggaagcatcatcaaaagcaaagttaccatgatgaaagtcatcgtacaattaatcatcattgattgggctttcctgacgaagctccctgtgttgaggccttcggtcttggtcatcctgagtaaggtgacgcatttctttgatggcttcatcgattttcctcttaaggtcggctagccaaagcatcttttctctcttcctttgcacttgctggtgaatagcctctaagtccctgatctcctggtccaactcctcctcctgaagtgttgggcttgtagcctttctcttctggctcctagcttctcgtagggagagtgcctcctgatttgtgtctagtggctgcagatgtcttcttcggtggcatgacgaaggtggatgcttgccgaaggtggttgtttgagttcacctgaggtgg

SEQ ID NO: 112345 - DNA, 291 bp, Zea Mays
gcagctaggagagtctctgaaggctgaatgggagagactaaggcgaggtgtagaagtcagtacttcagaagataaaaaagttgacatagtcaaacgttggggtttgcaaaataataagtacaacgctgaacactggatccctccagggggtcagcgcacagctgaggatatgggaaaactctaccaattctgggatgaattcattgaaacatatgaaaatgaggttatgatgaattcagggtacagagaacccttaaataaagataaagtgtttaatatactactagatca

SEQ ID NO: 112346 - DNA, 767 bp, Zea Mays
atttgcatgtcggtgtctatgctccccgcaacgcctgttggatgtgtatctaatgcggtcagtagagccatgaagctgccgtcgtacccaactggcgaggtcgcatccatggtcgtgcagaacctacatcacaatcaatcacctaggtcaatgaacgcggccgccgtaccttacacgaacctgagaaattggagactgtggtgcactgtacccttctctggaggaacggcttggctccactgttgctgatcgccgtaggccacaagcaggaaacgacgatgcaggcggggacgagcggtgcaagcggtggccagggaacgaagtggaagcggcggccagaatacatgggcgcggcagccagaatacgatggggcggcgtccaaaaataaggatcagagttgtttctggcgtgcaaggagcttggggggtttcgtcaaagattcagagggctttaggtaaggtggagggtgttttctgataaaatgccgagttgagagatgcaaccgtttgatcgaagattagaggctgagatgttatatgtgcaccatgtgcaccaaggcttcatgtgcacaggatactccgcctctatgaaatcttcatagattgagatgaaaaaattgtggataccacctttacaaggattattccaaggtgatctcagagtatgaacctagaaagatcaaaattagaagatgatataataaaaaaacactagaactgatttgggattgcacaaaaagattcaaacaacataaatcttgtgctcg

SEQ ID NO: 112347 - DNA, 819 bp, Zea Mays
cgcagaatatgttgttcaggttgtatattttcgatccattgatcctactcccccctgaatgttttcctcatgttgggccgacacttcacctcccacaggaactggcgggaagttgaggtcgaggccagtaggtggcagaggttgacccaaacaaaaaaaacagaggaagctgttgaccatcctctggagcttccaggactgggtcctcatcttgagcttgcccaccaagcatgttttgttggatgatttcacactaaactgtctaggaatccccaatgaaaccgtctgcttcagaaaaaacaatgaactgtgggacttcttcaagagaagtgacacggacacgaagcaacgtcctggtgacattatggcggtcctcctcccacagaatcaacctgccaaaagaaccaatagctacttgcaggtactctgaagagcggtagtccagagggaagcccaataacatcagccaacattcacgattggaaaaaagagtccggtgattccaagcatcattatgacgaagagcagtgaaagtagcatctaggtactgttggggaccaagcaaaacaagattgtctctctccaaaacactgtgaaactgcaccagcacctaacccaagtgagaacgccgaatatctctcacccctatccttcgacgctccactaaatattccctaatcacatctctgaccgcgggaaataggacctcatgctcaggtaaaggatgaatattaataatcgcccaatcctcatgcattggcggaagtctccgagaaactgacctggacatgatttcacggtgttgaatctgatagtcgc

SEQ ID NO: 112348 - DNA, 524 bp, Zea Mays
gtgtacctcaacaagcagcaggtaatcgtggccatgcgtacaaccgtggaaaggtgaaccacttggaggccgaagcgatccaggatgcaccagatgtggcagtaggtatgttctcagtcgaatctcatccagcgaaagtgctatttgatactagtgcaactcattcatttgtcactgcaacatgggtagaaatgcataacatctccatatagtcattgatgctgcccatgagggttaactcggtcggtggtaaagtgcaagcagataagatatgctcaaatgtaagggtggaaataagggggatagggttccccagtgacctaatagtaatagacacccctagggtagatgtcatcctagggatgaattggttaatgaagtatgaagtgagtgttagctgtgacaagaggaccgtaacattgaagtccccgcccggagagaaggtagtggctgagctaagaatgcctaaaacagcgaaaggtgactgtcaccagatttcggttgatagcaaggaggccaacccg

SEQ ID NO: 112349 - DNA, 430 bp, Zea Mays
gaaaatcctcatagcactgaacaaatgatcatcttcactgacagcttctcagataaagaggaaagtggaaataaatggattacccaactaaataactaactttattaataactacaccaagttgcaggggacacccacaccttggtgacaatcattacaaagatccaacttcagtacatgtccatcataacaagcatccaacataagataagcaaactaactctaactaaaactgactagactaaggcactgaactaagcattattacagactccgactctgtcgatctagggatccaaatctatccgggtcctacagtctggggtaccatagttgaagcgaccacggggcggtgaacggtaaaggtgctgaatcctgacaggggcaggagaaccaccatccagatagtggcatgctgcgcactcagcac

SEQ ID NO: 112350 - DNA, 454 bp, Zea Mays
aaactttgaggtgaactgtgttcctctgtctgatactattcttcgcggaatgccatgaagtctgactatttctttgaggtatatccgggcgagggtggctcctacgaaggtagtctttactggtataaagtgaggtactttggtaagacggtcaattatgacctagatagaatcgttgcccttttgggttcggggcagcccgatcacgaaatccatgcctatttcttcccacttccatttgggcactggaagtggttgcagtaaccctgcaggcctttgatgttctgccttagttcgttgacaagtatcacatcgggctacatgttgagctatctcctttttcatccctctccaccagtatctagtcttgaggtctaggtacatcttggtagaccctggatggatagaataggctgagttgtgggcttcatctagcaggatttctcatgcctcc

SEQ ID NO: 112351 - DNA, 392 bp, Zea Mays
cccctcattgcttgggaatcctcttctgccccaaacttttcctgaactgcttgagtaaactggacccaatttcccaatccttaactcctcttgtattctcgcacccaccgtgctgcatttccttccatgtgcagagaagctgaggacggccacaagagctcaggcacctgataaatatggtaatactccaagcacttatcgaaccaaatcttaggttcaacaccctaaaatttgggaaatgccatctttggcaaatctgaaggccgataatctctattccctccttgtggatcaatcacccggttcctcatgtttccaccctgttgctcacgacgctctctacttccttccggctgatcatccacacgaaactctttctcaccatgctcccg

SEQ ID NO: 112352 - DNA, 507 bp, Zea Mays
actgaggtctcgttcaaacttcgagaaaccaatgctctttgataaattgttaacaatttttgccccagcgcgatcagggatacaccctagaatttcttcgtcaacgccacctaaaagcacggacctaggctgatagccaccagcaatagcgaattatttcaattcagaaatatcttcttcaaagagctgctggccacccaggtatcgtaggtccaaatctttgccttccaaagaagctccttctatttctttcagtttcaaggtcatagcgttagcaacagtaacttcatccatttccctctcgggaactacatcaactataatcatatcaatttctgacaacgtggttccgagagggcctccgttgttttcagcttcaatttctatttcaccagcttcgacatcactggtaggtgcaattttttctgtcgcgaccggaggggggtcttgcgtacgaccctcatcacgtccatcataagttgtttcttcttaccactcccattcccc

SEQ ID NO: 112353 - DNA, 461 bp, Zea Mays
taaaatgttactaacagtgacataggatgaactttgggagctctttcgaggataatctagtgagtgtttgagcatggttaccatagcaagattgtagctggattatagggctagaacttttttacagagagattaacaagttgccacacaaaaaatggagattaatgccctgcaaatggccctgtcagatagactgaatggtgttctgattgtacagtgactgaataagatcgcaggttcaccccccttgccgccggtgaccttgcgcccagattcacgccggcatcgcgattcacgcccggtcgaacacggataacgctccttggtaaaaaatcaggcaccgcggatgagcttgagaccctgttccgcctggtcgtcgtgttcgcttgactcacgaccggttcagataagctcaccagagatggctgcctgcccatcggatgccacgtgccttgaagctt

SEQ ID NO: 112354 - DNA, 915 bp, Zea Mays
acagaccacctgaccatggcgtcagttttggatggatcagtagcaaccccttccttagaaataatatggcccaaatattgcaactctgcctgagcaaacacacatttcttccttttgagataaaactggtggtgccttaacacattgaaaacttgcttcaaatgttgaacatgatcttgcagtgtagggctgtaaatgagaatgtcatcaataaaaaccagcacaaacttctaagaaagtgttctagaatagagttcatggcacactgaaaggtggtaggagcatttgttaacccaaatggcattactctgaattgataatgcccatgatgggttttaaaagctgtcttgtgctcatcttcctctcccatcctaatttgatggtacccagctgtcatatccaaactggaaaaatattgtgcctgctaattcatctaaaatctcatccaccaaaggcattggaaacctattcttcattgtcatatcattgagtttcctgtaatctatgcaaaaccttcatgttccatctttcttctgtaccagtaatactggagaagcaaaagagctcacacttggaacaatcaagcctgctttgagcaactctgccacttgtctctctatctcatctttgtgtagtggagaatatctatatggtctggcattcactggaactgaccctggcagcaaaggtatatagtggtcaaacacccttttaggaggtagggttgtatgctgagagaataaatcctgaaattctgtgagtagtgctgctaactgctccttcaccttttctttcctttgcacaacctgttccagcagcacaaaagcccaaacatcattcccttttaaccatttctgtacctgaacagcatgcacttgaggaatttttgtgaccttagcacaatttccttgtatc

SEQ ID NO: 112355 - DNA, 344 bp, Zea Mays
tatttcacttttgtgaaagttaattttcaaacctgacatactttcaaacaaacataaaatgaatttaagattcctggcgccttctaagcaatcttgaataagaaaaatggtatcatcagcatactgtaaacaacagcaaccattttgaatgatgtgagggataagcccttcaatcagaccttcctcctgagcttttttaatcatacaagcaagaccatcagcaaccaagttgaacaacaggggagaaaaaggatccccttgcctcacccctttgtgagtagtgaaataagggcccaaagtatcattagtcttgatggcaactttaccacctctcacgatcttca

SEQ ID NO: 112356 - DNA, 605 bp, Zea Mays
ggaataattgtataaaaccaaaaaaataatatacgcattttgccatagtcaataaccacttctgttttaagatcagcataaatctttctcatagagtagaactggagcaaacctcttgattattcattgctatgatgcataatatctactgattagtaaagaagagtcacaactatacatattgtattgcttcttgcagtcaaatgattgcacatgtaatcacccatctttctatactacctgaatgcatactccattttgtgtaaaagacatggatactgaatgaaaattgtttggacttgatgtcggattatacatccttatgtaggttgtatagtaagtttcattttgttatgtagtttcaaatttattggcttatgaattagctaagttctgattgaaatatgaatcggtggtggtatcatatatgaactaagagttggtaactgtatggagtttatttggaccaagcagatcatccttaaagttcttggcttactagtgccatttatattttgtactagaaatacattcacattatttaacttttgggcttgttgtcaaactgttaatattttgtatattgggttgaaggaacattctcc

SEQ ID NO: 112357 - DNA, 480 bp, Zea Mays
tcacctttgttgttagaggtgccactcttattttctaaccatcacctttcttgtttttgtttggctatgatgccaccaaccacaaacttgttaggcaagatacagtcaaagtgtgcaagttcccccaccagaagctggattcatgagcctgttccatgatagaacgatcatcgaccatcttgtattcatggtactggtcattagcataatgctcacgtctagcatttgattctgcatattttcggtccagggcctctcataaatcacgagccacaacatggtacatgtatatgtcatatagttgatttttttgacaatagcgttaagatacaaccaatgaaggtcgaggtatccaactcgaagttacggtcatgctcctaagtaagaggaagaaccggagaaatcacccaccagatcctcaatgacatgagccataacttaaccctaggctaccatctcttaaagttttcaatggcaaat

SEQ ID NO: 112358 - DNA, 451 bp, Zea Mays
agaaagacagttctttggacccgaacttattcaagaggcagaagaataagtctgtataatcagggagaatttgagaactgcacaatcaaggcagaaaagttatgctgatacccggagaagactgctagagtttaaggagggtgattatgtctatttgaaggtgtcaccactccggggtatgaggagatttaaagtgaaaggaaagttgtcccctcgctttattggacccttcttaatcttaaagcgagtgggagaggttgcataccagttggagctaccggatcatcttgcggatgttcatgatgtttttcatgtatctcagctgaagaaatgtctcagggtacctgaggagcaattaccaatggaggaccttagtgttcaagatgatctaacttatgctgagtaccccatcaggattcttgatacattgactcgagttacaagaaataag

SEQ ID NO: 112359 - DNA, 289 bp, Zea Mays
gcctgaaagaggagacatcgaatcatattggtggtggtgcggatgatgcgttaggctcggttgttctggggagaggtgtaagggcatgagagacgctactgcatgccgtgggaggaagaaggaacaagaggtggagttgtcgaactcacgaccattgtcacactggaggacatgaaccggacgacggaactgggtggagacccaggcgaagatgtgggtgagggtggcgaacgtttcagacttcaaccgaagtgggaaagtccaaagaaaatgagaaaaatcatccaga

SEQ ID NO: 112360 - DNA, 366 bp, Zea Mays
aggggcctgatggggtattttgtgttggttacctacgaaggcacctcaaacgttcttgcgcgtaggggttgctgacactttgagccgcttggatatatcgataaggatttcgatcacagtgtgtataatgttggggtaatcgcacggtggagttgactgctgatgtgttgtttgactgcatgtggggaccgcatggtgtatccatggtgaagcagaggtccggtcgaggcatcgaacaagtgattaatatcgattttcgcttttcattgatttacttttagggacacacttgtgtaggctaaagttgtgtttgtttgacaggcacatttatgaggcggaggctggtgggtctgatgactcggacat

SEQ ID NO: 112361 - DNA, 534 bp, Zea Mays
cactatgcacaattcttccatcgacaacgatccccttattgctaggataagaaatatagcagtcctagaatcacgcatggatgtcccccacccacgagtgtgtatgaaggagagcacataactcatgagaccgagatattccattgctgctactcttacttgataggtcatggacgatacagtctccatgaccttcactattcacttctgacatccaaccctagtttcacaagtttgatcatgccacagagccatgttttgtagacaactctaaataggatgtgtggtctgcattgaaatcttgatgccattgtccaataatgataaggtcatggtaagctattccaccatttatactaatttatataccatccttttctctccttgcctacttcccatcatagttttaccatgattgagggaggcatgccacatgctgcttgcatatttaggacatattattctctctctcatatcccgcatgcatcaagccaacttgtcatcatcttccaatccttctaaggcaatagtgac

SEQ ID NO: 112362 - DNA, 436 bp, Zea Mays
gcagcaggggcagcaccactggaactcccagcctcatgatcatgagtgcgtggaggcataggaggcggaggcggaggtggaaccccaaagtcatcatcatcatcatggactgctgcgccctgagtctcaaactagtgaaaagttgtattctcggcctgagtatcaatcattggagcatatgtcggcacaggatcctttggagctggacggtatgacccaaagatgaggcgagaggcctcaagagtaccctggaactgtgggggtcgaatcagctgagcaaagatgtgacacaaatagtgagcataaggcagttgtcgatgagcatgtagaccatccagtacggtgtcctcgatctcacaaatgagaaaatccacaacatcaaactctgagtgagaaactagggcaccaaggagccaaagctgaatatgagtggaag

SEQ ID NO: 112363 - DNA, 363 bp, Zea Mays
tcgaggtagcaaattcacgtaaaaagtatcatggttggcctgaggataacctggttttatttccccctatttttcataaaagtctctatattatatttgagtatagagtttaaaataaaaaaatgtgtggtctggtggctaggtggatgtgaacgtgagtttaaagcaaataaccatggttcaaatccgatttacatatattttatcttatttttaccgtttagttccttgaaactgtccaaacacatgtgctgattagcgcatttatttgtaacatataattcctaccaggtatcaaacacatgcgcaacaggctttgcattcacgcttgtgcacatgcaggttttgcatgtagtggtgaca

SEQ ID NO: 112364 - DNA, 389 bp, Zea Mays
aaagacaccaccaggagcttcagctccgaaggcgccagctgctaaaagttcgacagctactgaagctgcccctttggaggccacacatgtcgaagctactagagccgaagatattaatttagaaagcatggttgctgatatagataaaattctgctagatatggccacagaagaagctgttggggccaccgaagaagctttggccccagaacccgagaaaaagaaagaaattgccgaagaaacatcggaagatgaaattttcaattttcaaaacttgattgggcaagaactgatgaaagccgaaaaagaagaactaaaagagtatgtcatatcttgcggctatcggccaggggcggttctcttcgggggtgttgatgatgagaagctag

SEQ ID NO: 112365 - DNA, 293 bp, Zea Mays
aatcataaatgagttatacaaaatttcagaagtacctttgtaattgtttcttatccagtcctgtgaacacattaaagcctctaaaatttcaggagtaagcctgctgcgatgttcactaagaatccaccaactagtgttaaaagctgactctgatgcaacagtgctgatcggaatagccaatatgtcacgtgctatctttctaagtgtaggataacgggttccagccaccttccaccagtctaggatctggaagttctcagttgaaatttgaaccaaatcatcctccaagtatc

SEQ ID NO: 112366 - DNA, 986 bp, Zea Mays
gcttgctgggcttcttgagcgtcaacgtggttgactcgggctctgccctggtactgagtcctgctctgctggctgttggaaggaggtgctttggaggtaggtgccgagggaatcttggggccattcaccgagttggagtaagtcggtccgggtgcctttaactgagggcagttattcttaaagtgactggggtccccgcagtgccaacaggcatttgctggcggttggttgcttgcaacggagggtgcctgaagggagctctgactctgctgactgtagcgcgacagagtgggtccagatggtttattgaagcttggaccccttggtggaagtccaaagggtcgagctctctggtgacgttcttgctgttgagctcggaggacttggaatttcctcttgaggtgccctttttcttcctcttttgccctttccacttggatagccttgttggagaggtgagagaagctgaggaagtcttggctggcgaggatggtcttaagctcgggtcttagtcctttcagaaaatgggccatctttctggactcggtgttgacatcctcaggcgcgtaacgagccaactcagtgaacttgtgcacatactcactgactgttctcccaccttgagttaactcccggaattcatcctccttgagttgaactatcccctggggtacatggtgctcacggaaggctgtttcgaattctgcccaggtggcatctctgatgacctcactgaaagtgtcccaccatgctaaagccattcctgaaagctgatgagctgccagttggacacgctgattttcggggcatccgatggcttccagcttcctcttgatcgtgcgaagccagtcatctgcatcgaggggattgctggaccccgcgaacgtgggaggcttgagtctcaaaagttctcccatcctgtcatgtggccttccaccacctgggcgctggttttccagacttctagtgaggacttcaatgagtcg

SEQ ID NO: 112367 - DNA, 409 bp, Zea Mays
ctcgaacgcttcagcagaaaggggaatgtggaacagttcattcggggaagccagccgcgcttgactaatgttgatctccttgacagaggcaaaagacgaaagctccgggaatttttcagatattcgctgcccattccatcgatcatgccaaaggagagtagatttaccatttccaatctccacttgggcaatttccttaaaagaatcttggattttgagaatatctttccaccaaaatgagccaactggtttagctgggggcagagagttgttgtagtgattgtcccagataatgttaacccatgggatgttgactctattaaagaatttatagaaacatttcataaggagcgctttattctgccactcaaggttgatgactccaagtccccctgagtttttggcctgc

SEQ ID NO: 112368 - DNA, 596 bp, Zea Mays
ggagaagcgctccgcggcgttgcccacacggtggtggtcggctcttcaccgggccggaacgccactgctgatcagtgtcggcgccaggaactctggtaagaaccactcctagctgtttctacttcatttggttgtgccggtcgtgttcctgggctatggttttaagtctggcaacgtgcgacttggtcgccggtgttagtggttgccctgggtggggacaacatcatcgccggcgggacgcgctgttgacggactcagcgccgctggtgcgtgtaggtagaagaagatcccctgaccgtcgattcagtgtcgaaccgatcggattggaagtaacgtaacgatgtggtcaagtatagcgtgtgccgtcgattctgaaatccatggttcagattagatgacacttaccctttcgccattttaaatctgaaccgtagagttccgatcggagagttgagagcttatgtggactcggggggctattgaccgttggattagtatccagtgactccaggcgcataccgattcaggtatgggggttctaatctggggcatcggttggaaatcgggcgatcgagatccgcccggaccctctcggc

SEQ ID NO: 112369 - DNA, 417 bp, Zea Mays
tgtacagtaactgagtattcacaatatcaatagataagaaaggataataaagagtagagacaaaaaaggattataggcagtcattgaaatagaaaagggaggatgatgaataagggggaaatgtgttataggtagatcaatctctaatccttagaaagtggtattgacagaagttacctactgaagtgcatattacaagcatgaattggcaagatgtaatgttaagagaagatacatgatcctattctccttcaaatggatattatacttgtataataaatacgatccagatacaagtgttcgccatggattaaaaaacaagaaatatgtgtgcttatgtagtgacaatatatcatatatcaaagaggtaaggacactcaaagggagtatcgcaaaccatagttttagttattctaa

SEQ ID NO: 112370 - DNA, 328 bp, Zea Mays
cgaaaagctttaatatcagtcgcatcagggaccttaggaataagagtgacaataccaaaattaagtctttcaatgttgagagagccatcatgaaaagctttaaagagattgaacagatcacttttgatcacatcccaaaactcctgaaaaaattcagaagggaagccatcggggcccggtgcactattgtgtttcaaagcaaacaccacatctttgatctcttccaaagaaaaatggttggtgagaagatttctatcaccctcccccagctgtttcatgtccaagttattcaaagaaatattcgaatcacgggaaggaccaaagagat

SEQ ID NO: 112371 - DNA, 762 bp, Zea Mays
ggaggaatggttttatgtgaagaacgatttgacaacgaggtaagatattaaggaagttatcatgtgccccatatggtcccgcttcggcctctgaaagccgaaggtcaaaattgatgacgccgccgaagcgtgtcagaaggccttcggtactgtcagcttcttcattggtacaagagatttaattcaagagcatatagcattcagagtatggccgcttgtagaaagctgggaaatgccgaaggagaccatcaccaagtctagcgaaggtgaactggtccggctgaagtatacattcaggtatggggataagttcgatgaaccaaatgatgactggctgaaatgcatcgaagctacaagtgatgaactgcttggagcatattccaaggcagaagataatgcactatccgcagccttcggaagtcggggaaagaagagattggacagagtttttgatgccattggcttcgtttaccctgactaccgctacccgctgcggggacaagggaaaaagagaaaaactgctacttcggccaccccagacaaacctgtgccgaagggaaaaaagttgaaggtcctaacccaccggccgcattacatcgaaccggccgcgatacctgaatttggcgaagggacttcctcggctgtcaaaacaaaagaaactattcttcccgtgcagaggactgaagagccggctataatgccgaaggtgcctacagtcaaggtagttgaaacgaaggttgataaggctgaaaagccagaaac

SEQ ID NO: 112372 - DNA, 1667 bp, Zea Mays
tgacagcagaaaggtcttcgaccaattgaaagcatcaggctgaagcagattcgaaaggaaaaaaggtgcccacttcttagggatgtccaccgagtggtcagccgacccagcaggagcaaagtatttggcctagagcctagagaactgggcagatctttttctctcctcaaacatctggaaaacggggtcaggctgccattcctgagagagcatgaagttcatctctaaattctgaaggtgattattgttaggctcaccaacatgggctgatggggcaagtcctccatatcatggacatggtccacctgaggcaccggtccatcaacctcctgaggaccaatgaatggggtagcattgatatcaaatccattcccaagcagcacatatccattctccacaaaatgaccattcggaaggggtgcaagctgaccagcatcaatggagctatcagacgacaagccagagtgctggttactgagttgtagttcttcctgctgaatgggttgctcctctggcaagatgggctgcgggacctgctgattgggctggacattcacaatccactggtcccaatctccttggccaaagccatcctgctgagccggcagctctccacccgcaggctccagagggaaatttaggtcaagccctgtcggaggcatgggctgacccagcccgaagaagaccagggggagctgatggccatcctcgttcgggggccggggggatggggtcctcatcttgagcttgcccaccaagcatgagttgctgaataatttcacattgaacagtccaggagtcaccagcaaagccctcagcctccgaaaaaacaataaattgggggacctcatcaagtgaagtgacacgaacacgaagcaaagttctagagatattactctgatcctcctcccagagaattagtcttccaaacgacccaatggcggcctgcaagtactctgaagaacgataatccaatggaaaccccagaagcataagccagcactcatggttgaaaagaagagctcggtgattccaagcgtcattatgacggaccgcggtgaaagtagcatccaaatattgctgggggccaagcagaaccaaattatcccgctccagaacactacgaaactgcactatcacctgccccaagtgcgagcgctgaatggctcgaacaccgaccctacgatgctcaacaagatactccctgaccacatctctgaccgcagggaacaagacctcgtgctcaggcaaaggatgaatattgataatcgcccagtcctcatgcattggcgataaacgctgcgagactgacctgaccatgatcccacgatgctggaccaccgaggcgctgaagcctggtgggaggaacggctccgggtctacgcgccggtacgcccattgatagattctcagagggtcaccggagagccaaagagcaaaaggagcggtttggggttttggtgaagtgacacccagcgagagctccaaggacgtttcgggcgcctgttcgtatatttttaataagaccgccctggcaaattcaccgaagcaggtaaaggtgggaggggtcccacccgtcagggacccgggggaagggcggaaccaggacccgaagtccaagaggtgagacgacccctccaaaaggcaattactttcgaaggaaggga

SEQ ID NO: 112373 - DNA, 418 bp, Zea Mays
ataatcttgcctgctgctagtctttttctatcattataatgtacacgaccacgtgcacaaccacagcgcaagttcgtcaatactgagataaaaggctctgaaaattttctataccaatttatccaatatattgtgcagctgccaatacgagtctcattagggagacaactgaaatcctgatttattgggcgtaaaagatgtgcccagtaagagtaagcgaccccaaaatcatcttctgtatacacgctcttcagtacaagatatgggacgatctgatcaagcctaaactgtcaagttacacgatctggatggtacggctccgcaatgcatatgttatcacgcctaaaaggaagcaagccacgccgaatgcataaacaaaatattttgctgatccaggacgaaggtggtgtgcgtagat

SEQ ID NO: 112374 - DNA, 772 bp, Zea Mays
gaattactgtgttcaatcgttcttcctcgagcacatcaatgtcttctagcctggttgcttctacttcggttatgttttcgaaagttaacctcggcgccccgaagattagatcggcaggcagcactgcctctaacccataaaccatgaaaaacagggtatttccatgtagagctcgactgggttgagttctcaggctccagaccacgtatggcagttctttgatccattttccggtgagcttctcactcttatcgaataccttctttctgagtgcttccagtatcattcctttggctctttccacttggccattggctcttgggtgtgccactgatgcgtacttaatctggatactcctttgctcgtagaaatcaaagaattcagagctggtgaagttggatcccaggtcactgatgatgctattcggtatcccaaacctgaatattatgtcttgagtaaactccactgctttggctgaggtcaaagaggcgattggcttgtattctatccattttgtgaatttatcaatggcaaccagtatatgagtatagcctccctaagctttcttgaagggtccaatcatgtccagcccccagcatgcgaacgaccatgttacaggaatggtctgcagctgctgtgtgggtaagtgttgttgctttgataggaattgggcatgcctcacacttctggactaactcggcagtgtcgctctttgcagttggccagtagaaactggatctgaaagccttcccaaccagagtccttgatgtcg

SEQ ID NO: 112375 - DNA, 784 bp, Zea Mays
tggatggggtgacatagcggtcatactattgccatagtggcgttttaagcagtgttgtgggcgacacttttattcttaattgtttttgaaataattcaagtaaataaatcggcacacaatgggaagaagcataagatccaagcaaaaagcatgaagatgcaaacacacaaacaagggtatcagtcatgatcgtactatcgtggtaatcaagattcaaggcgagatggttactaacgatcgacctcatcatacatggactcatcatggtatatgactcgactcatgacgggggtggcaatggggctaatgatacagactctatcacgaacactgtcaatgtcagggctgcagggtacagactctcatggactcataactccatcaacttatgaaaccctaagcacggttactcctaaactctcatcatgaatgtgtcatggaaactgccacctgtgtaagcatctattctgcttgtctgaagaggatctggtagtcagatgtgtcatcgttggagaactatgtgacactggtaccagttgggaaggatactatcctgcccagctcggaccgtccctctgggtagaacctgtcggtgacctccatggcccaagccatctctagggtcaacttctccttcttcctcatgacacagcgactctctatcagccgcagtgtagtgcggggaatccagaatccctccttcttgatcttgagtcggtttcctgccggtaggcaacggctaagagctctcaactcttagactcgacgttggtcagagtccttc

SEQ ID NO: 112376 - DNA, 535 bp, Zea Mays
actgtttgcagttgtcgattgtgagctcagacgggactccgaattggcaaacaatgttttgccagaagaacttttgggcggtcttcgacgttattgtggatactgccctagtctcgatccacttggtgaagtactcgacggcgatgaaggtgaatttgaggttcccttgagccgtaggtagtggtccgacaatatccagcccctagtgttgaagtggccatgtgtgggcgatcagcttggtgaactgcgaagggttgctcgagcggggagaaaacttctggcatgcttcgcaggacctcgtgttttgattcgcggtacagattatcacgagccagtaaaatccttgaaggattaccttggcaacgagggccctgggccctgagtgggacccgcaagttccgctgtggacttcgcgaaggatttgaatgccttcgtttcagtcacgcattttagcatgggctgactgatcccctttttgtatagctagcccttgactagtacgaagtcccggctttggtgcttgaggcgtttggcc

SEQ ID NO: 112377 - DNA, 605 bp, Zea Mays
gttttgtgcaaaaaattattgttggatctatggtggacttggaagctactgcttatatgatgaaggtgttggtataaaaggttggggcatgatccaatgagttgaagactgacttgtcgaagcaatgaactctgaaggttgtgggcttagctattgacgatggatggggagtagtatgaggaagtgtgaggactttgttttggttgattctattgtgagttaacaatttccttctgcttttttattgttacctgacatgtccttgtggtatgccccatatcttctccacagaatagacataacaacttacttggttgggaatcgaatcttcctccgaagcttcatcctcctctacctcctcttggggctggcggatggaagttgttctaagagggttgttgttgggtccctgagcctttgtgattagttatatttcctttgagtctggctagttttgtcttcattttgaggtgggttgtgaatgctcctggcatgccttgggttaaaccttcccccgaggctccttgtcatttcagcatatctctgggcttttgctctttcacacctagatttaagggcaaacttgggtgcgtcttaaatgtgtg

SEQ ID NO: 112378 - DNA, 775 bp, Zea Mays
gccgaaggtagcattcatcagctggtcttccttcttcgtatagttcccaagaatttcattgcacattgtttcaatcacttctagccattcagtgcatggctctttaagtgtctactgaaatttgaagcggtaagggtgtcgaacaagttcatatttttcccttcttccttctttggcattcccatccgctagaggttgggaaagttttgattgctaggttttcctgcactaagtccctagtgttaatatgcccagccaccaccctgaattctactgcggccagttggcatggggagccgagttgcatgttgcatagtggtatcgtcataccgaagcttaattttagaggactcattaccatagtcatgagtttctccctcttcttctcatcagccttcatgtaaaaccattcattagtccactcggttggccatttagtaaggtagccaatcaccagggccttggtatccttccggtatgcaaaattatagcacccaaagttcttgtgtagaccatcggctctggccttcgtctgatagtggagttcgtgcacgcggcacaacccttcggcatttgcactttttccttggcttcggagagcccatatgtaaacaatgagcctaataataacatctggagttagctgatggagatatatttcaaatattttcaaactccccctatcatatcgtacagggggaaccgaagccctgccctgaagaagcttttaaacacaacgatctcatcttccttcggctctggaactacttcttct

SEQ ID NO: 112379 - DNA, 480 bp, Zea Mays
ctccattatgtgcagtatcttgacaggcagcaagaaaatgggccacatgttcatgtggtgacccagttccattgaacttgctaaattgtggctaccgatagttgcttggaaaaggaaccatgtcaacttccgacggatatggtttcacataccctggacgcatggagtagtgtgtttgcatgtattgcgcccttacgccctcagaaatcatcctttgtatgcttttgagggagatttcaggtggagggtgaggaggaggacctccttggctagttgaggcattggcatcacttgttctatttctggtgttagccacttgctcacggagggcagccaactcttcttccttttgttgaagtgcagccatcatttgattcatttgctcttcaacggactgaccttgatttgtggtaagtacttgttcagcatcacgttcggattcactaggctcaccctcactatgcggagaccgtaagtcat

SEQ ID NO: 112380 - DNA, 511 bp, Zea Mays
agggtgacatggttgacactcctgtaatgatccctcttttgccgcttcgtctcgaagtcgacgctggaccctccggtgatcatgtggatgactccgctatacggctgatcggcgaagtcttccagcttcggcgcttgggggtgattttggtggtgtgggttcgggtgatgcggaggcggaggcgggggtggaatgacttgtacttcctgatgatgcggatatgcatggttgggtgggtgctggacgtggccgttgttgtatggttgtgggtggtggtgatgatatgtgtgcgcgacaactctctggttgtgctcgagacatcctgtccctggtggcctttgtttccgagcgatcccttgttgggtgtgcgcaatcctcgccatgaaacaggcagtaaaatatgcgcggttgttgcatccgtccctggccccggcctcacatgccattcccgtggccttggggggatattcctgacggcgagcggcctcaccagtggggtgctggttggctc

SEQ ID NO: 112381 - DNA, 1195 bp, Zea Mays
cgaggttgacgaagaggtagacggtgctgacgttgtcgcaatagacaagcatgctcctggtgagggctatgaaactcctgaaggagatggcgcaactagctcgtctcagacaccacactagcgacagcccggtactcagcctcagcactgaagcaggagaccacaacctaacgcttggaggaccaagatatgagcttggcctaagaaacaccgtacaaccggagacagagtgccgacaagactgcattagacagtgggtcgttgacagaggcaccatcaccaaagaccttggcatgtgtgtccaccaatgtcgcacatggcttgcaatctagcatgccagtgcgctctaggacatctagggtgtactaacattgctaaagattcgagcgacgctcaacgacatccccaggaaatgatgaagaggacccagatccttcattgtgacttcttgctatgatgatacggtgcaacatgaccgaagaagaggtagtgagcacaatgtcatcaacatacaggaggaggtacatagtggcactgctatgccaagagatgcacaaagatgtccgacttagccacaacaaagcttagggagagcggatatgtagcaaacttgctataccaagcgtgcggggggtgcttcataccatagagaacttgttgagcttgtagaccatgtcaggatgagcagagtcaacaaagccgacagatttactacaatagacagtctatgtaagagtcctatggaggaaggcactcttgacatctagctgatgaataggccaaaaacgagagatccaatgagacaccagcacaaacagtagcatgcttcaccactagattgaacgtctcatcgtcgtcaaccccgggacgttgagtaaagccctagagaacctagcaggccttgtacctatccagagaactattggactttcgcgcatgtgtctagacccacttcccagtcaccactcaggcactcaccacgttgcgacctggagaatggggcaccaaatcctaggtatgattggcaaggagggcctagtactctttgtaatacccgacattgtaaaccaaataaaaaggaatggttttcctatataaaatttttctatgttgatatcacatgtaaacacccttatttaagtaattaaataaccaaaaacacataaataatatgtgcatcatgctggactttttc

SEQ ID NO: 112382 - DNA, 383 bp, Zea Mays
tggccactgatagacagctgggaaatgccaaaggaaaccattactaaccctagcgaaggtggtttggttcgattgaaatatgccttcaggtttagagaccaatttatcgaaccaaacgacgactggctgaagtgtgttgaaaatactagcgacgaactacttggagcatactccaagtctgaagataacacactatcagcggccttcgggagcctgaaaaagaaaaggctaaatagagtttttgatgctattggatttgtgtaccctgattaccattacccaccgcgggggcaaaaaagaaagggtacaacttctggtaagactgctgcttcggctactccaagtgagcctgcgccgaagaggaaaatgctgaaggtccttac

SEQ ID NO: 112383 - DNA, 462 bp, Zea Mays
gcagctaaattattagaaaagatggtcaggaaaaaactgaatcaaacagacctaatgatgagtacagtacgtagaactccaagttctcttcgtccaaccgtgccgcaggtggaaaaaagcagtatagccagagaagacaaaagcaggaggaaactaaaggcaaactactcgcactaatcgtagaggtgtacctcacgatagcaactctgtacctcacgagtcacgataggaactcggacgcatacaaaaccgcaaccaccctcatgactggttagcttaaggacggttggctcaactcaaggataatgaagttgatgttattcatcgtggcacacatcaggaaggtactactagcagagcaacgcatccaaagatgggagtaatgcgtcccataaaaaacgtccatgtagcaataggtatcttgctcctccgaaatataagggggaaggatcactgtgtaga

SEQ ID NO: 112384 - DNA, 443 bp, Zea Mays
ggttttcattgatgatattctggtttattccaagaatgaagctcagcacactaaacatttgcataccgtacttcaaagactgtgtgaccatcagttgtatgccaaattgtctaaatgtgaattctggctaaaggaaattaaattcttgggtcacacaatttctcaggatgggatatcagttgatcctgagaaggtgcaagaggtaatggattggaaacctcctaccacagtgagacagattcagagttttctgggattggcagggtattatcgacgattcattctggatttctccagaattgccaaaccaatgactgaactattgaagaagggagtcaagtataattggagccaaaagtgtgaggatgcctttcatacactgaggcagcacttcacaacagcccagtgctagctcaacctgataacaccaagccctttgaagt

SEQ ID NO: 112385 - DNA, 577 bp, Zea Mays
aggtaatagtcattctactatttattttgctcggctttctttatttagttctctatcaagagggagacaaaaaatcacgtttatgacatgggcactcgacttggttcgttttgacgacaaacgacgctggcagtagggtgtcatgccaaggccatcggagtagttccaatatgacatggggctcgttttgggcaactttaggtacactctaccctatgaatccacaggctcacggaggtgtctcttcatgtggagttagtgtttgacaatagtgcactttgcactctcatcggtcaacatgcaaattggtaggagcccaagaaaataaggatgacaattaaaagcacaacttatggaaccgccagaagacaaactacgccttgtagtcgaggcagcgttgccggtctctccctgtcagtctcctaggcgtcctgatggattaaaagctattcgaactggaagccaaatcatatcaaaggcaccgtctctagagcagactgcagacatcactagtgtgtatgtgcattgggtcacctgtatgcatatggggaccaacaattgcaaatacttatctaag

SEQ ID NO: 112386 - DNA, 364 bp, Zea Mays
ggtttttgcccttggtcaccacatcaaagttatagagcaaacaaaggagaacaactttgcttaaggttgtgagcatagttattaagaaaaagtcagagataattaagcctccagtttggctgtcaggctggtccattctgaaattcggattttcagtgaaacagagccaactttgtgtgtgaattcaagcttgaattgttgagaatttgatcaagattgctgtgacaaagttgtagctagtttgtcaggctataattttggtacaaagagctagcttagtcaccacacaaaattgggagtaaatcatgctccaaatctctctgtcagttcatctaataggagatcaccatggtacagtaaatgt

SEQ ID NO: 112387 - DNA, 467 bp, Zea Mays
tggacatatgcatccttacaagtctggtagtttaggatggagatggagtgtccatatgtttgagtttgtgtgtgtgtgagagagaaagagagttgtgtgcttgagcattgatggggtctggtcaaaagttagcattgtagagcattgttggactccaatgagctctatttcactcgagtgtgtgcgtttgagctatctgtttgctcggtctttgcattgttcattattccaaaagatactgatagtattgttctatctataacatgaactcttctttgttagaaaccgtatagtgggttgtctgcttgttgtaattatattgcatcaagtgttgatgtgaagacaatatctgcaaacttgctccattgattaatactttggagaccatccatccttctacatttgtattgattaccattgtatccatgtgtgggtagtcttttaattgaagatcctcttcagagaat

SEQ ID NO: 112388 - DNA, 1024 bp, Zea Mays
ggattgctagcagaagatgaacgtgaaactactcaaaggcaagatgcttttaccagtagaccatctggtgtccgccgaagcgatgaatttgatgatgaaacagctgcattgccctgtactgattgcgtaccacaagaacgggtatttgtttgcaaccgatctaatccgataatgaacattggtagtttgtacaaggatgtgaaagaattcagactggctatgaggcagtatgcgattaataatgagtttgagttaggaattgagtcaagctcaccttggagatatcgaggttattgcaaaggaggtgattgtccatggagaatcaatgcaaggctacaaaatgtcgggtctcccactatcgttgtgagtatttttttagcacacattgtttgtactttcgattgttgatgaaattagggaagctcacaatggtactattttttttgcgcaggttacagttatcgtggatcagcacacatgcacttctagtggccgtcgaaatacaacaacacccaccagctcatgggttgcatccctagcactgccaatcctaactaagaaaccacatatgggagcaaaagaattgcaaactaccttgcaagagcagcacaattgcacaatttcttatgatacagtgtggaaaggtaaagagaaggcccttagagagttgtatggaacatgggaggacagcttcaaattactatttagatggagagaagctgttttggaggttatgccagactcagtgattgaatttggtctagtagttgaagatggaaaaatatatttcagcagattcttttgtgcttttggcccttgtcttgaaggttttcgtgaaggctgcaggccctacttaagtgtggattccacagctctaaatggtcgttggatttggttcatgcaacaacttcgtaaggctataggagaccctcctgttttagccatttgctcagatgcatgcaaaggattgacatcagcagtaaatgaagtgtttccaaatgctgaaaaaagagaatgcttccgc

SEQ ID NO: 112389 - DNA, 431 bp, Zea Mays
ttttgcaggggtgtgccttgggcaatttggctcctttttgtcaattggaccttatgaatttggctccagcaactaggtgaacatctctaatctttggaagtggctgatttttgacttagattaaatgtggattactctatagtgctctccacttgggggctgaatttgggggttttgtaggacctttttggaacaattcccttactatttcttgtagatatataaatgtacttcaactttggtataaggtttaagtcatgaaatggtcatttgcatagtttcccactaatccaatgcttggggtgtaatggctcaagagggggtgctagggtttgagcatctttttccaaggtgaagatacatgaaaagctagggtatcccttctatcatgattattacttaattaagccatggtttctaatgtttttgtg

SEQ ID NO: 112390 - DNA, 631 bp, Zea Mays
agttagagagggattatagggcaacaatttctctgcaggacgaagatcatgttgtaacacaaaaattgaagaaaaccgcctctgaagatgctctgtcataacaattgaagaagaccctgatggtacagtaacaaaaagatcttccgatttagtgtatctcgccgccggtgacgttccaccacgattgacgctggtcgtcgcgatttgtgcgccctagcttgcggataacgactagcagtgaaagatctccacgcagggaaggattggagccttatcaccggactattccctgaaccacttgccgcgcgattgactgaggtgtcctcgccggagctcgccgtcttttgtagccacgccacgtacttagaagagttaccatgtcacagtagataaccgtaagtagccagtccatcgcatgagacgttgccccggtgaacgacacggtagttcgcgccgatgactcacccctatcttcgatcgccgatcttcccctttcaaaattcggagccaccacctccagacactataaattgatggtgctactagcttcgcaaggttgtcaagaagccaggacatccacccctgccctcgattagccaccatagtcggagaattttgttattcccccaaa

SEQ ID NO: 112391 - DNA, 452 bp, Zea Mays
cctcaacagtgctctctaccgtccagatccgccgaggtaaccggggtgtggccggcggcgcgcactgggtcacacggaatggtttgaccaccatagccgtccacataatttttgggccccgctacccgtcctccgagcagagcggagatcgatgattttggcatgggtgggtctcactgtgcttatgtttatccagattgataagcaagtgtagacgtgttgtcgtgttgtgtagtgcagcttcatgagtcaccttgtcgctttcgtggaggacatgaattcgcagctctataggatcaagccggggtccagcggacacggccaggataacgtgaacttcgatagctttcgagatatgatgcatgatgatctgcttagtgccgtcctggtttgtggataacggtggcatattgccgtgctaaacgagagcttaaaggcacatgagattccca

SEQ ID NO: 112392 - DNA, 293 bp, Zea Mays
cgggagccttgcctcagtaaaagccacgttagcgcttctcggtgatttcccctctctccggtcgatagcgcgccttctccaaattagacgccaccgccattgctctctataaattgatgcccccgtgagctccgctaggttattacgcacccagtgcactagctctcgtcccagatcattcaccatagcgtcccaatttcccatttccccaaaatcggatctccgcgccgccgtgagcactacaccgtgaaccgctgtctctaggtccgttctcgtttcccctacccttgcac

SEQ ID NO: 112393 - DNA, 1785 bp, Zea Mays
caaggcggaaactccaagcaaatgggggacccaccacaaaatccgaagactactcagcctcaccgtgtggcagcaagccaaaggttctgtaccacgacatcaggagccaggggctaaatagagcatcgtggttgcaccaacgactaatgatgcctcgatgaggctattactcaggcctaaggaaggatcgtaacagaccccataccgctggagacaagaaagaggcgagtgagcatggagcatgcctgatctggggagcagcgaggaagtacgaatggggctggacgacaaccactggtacaaccgcgcgccttgggaacgatttaaccccgatgaggactgaagcccgagcccccagtcgtggggccccaggcttttggccgtcacatcctataggtgcccataccatgattctacaaccccccgtgatcgcaaagtatgctggggaatagaacctagtctctggttgggggactatcagcttgcatgtcaagcatgaggagcggaatgctataattttataatccaaaaccttcccttgtatctagtggattcagcgtgagcctggctcgaaaacctcgggcttggctgcatccaggactggaggaggtttttgtccgaaatttgcaaggtaagcacatacgtctagaaaacccatgggactttaaagattgttagtagaaactggacgaggccctaagggactacatcaggcgcttttctcgataatgcaaccagctgacaaacctcgctgatgctaacattatcgacattttcatctcggggaccattaacaaaaccctagtgcgtaagctgggatggaagagcccacgaatggcaaaggagctttttgacattgcgaccagacatgcatcgtgagaagacacaatgggagccatctctaatcgccgcaagcggaagactgtacgtgacaaatagtcgaacgagggtgtcgacgaccagctcaacacaaaaagggagaagaagccgacgtcagcgagccgacgtgttgatggctttggcgagccaacgaaaagaaggcctccaatcgaggaaaccaccgaccattttgaaaacctccttgaagccccatgttcgaactagcggtgccaagttcgacacgctataaggattgtgggttgcttggagaattcctatgcaaggcggcaccgttcgaaaggggatcggaacattgaaaaaacgaaaggccaaggggaagaggaccgcttgcctcaccgagaccggctgctcgctgatcttcgagaggtgtggttactgcgcctcgcgggagcgtacaaaactcgatcgatgcaaggtgatcaacactcagccaacgatctcggcctctttcggccggtccgaatacaccattgcattcaattaatctatcggatccgagcgcattccttggctaggccaatgcccacctatcgtcgactccttcgatagtacggaacgactaaccaaggtgctcatggctagagatagtaggcttactgtcctctactctgcctctagcaaacaccatgagtcttggacgggaccacctctgaccaaccggaggacctgtccccccttctgcatactagttagctggcgtacattgcctctagttacgaaacattgagttgaacaacaagaagaggacactagctgatgtcgagaacattgagcaatgagaacgactcgatttgtgatgatgttttggcgccctagactggttctatacctcaaccctcgaacagttgctcagggctatctaacaagtgaaattaaggaagaagg

SEQ ID NO: 112394 - DNA, 311 bp, Zea Mays
cctatccgtcctaacactgggatttcgtagataattaattatgggtgtcctccaatcgcttgcatcagcttcattaccagccgaatcaatcaggagaactttcctggcaaccctggacggttcgaagccctcactcggacggtccgcgacctggggaattggccctgtatcggttatcagattttcggtgttgtgaaatttccctcgctttatccaataacctaatgcatcttgtgccaaattgttagctctgtgattctcaactctagagatgtgccgaatgctgaattcgtcaaaagaatgaattatgc

SEQ ID NO: 112395 - DNA, 297 bp, Zea Mays
gaagtctgatcctgtactctacaaatgtggtattgaagctaagtatggattagttccttccgagcttggtgtgggctatttttgtagacatatggtagattacgatgaagttggtatttcgttttgattgcatgagctataatgttgcatcagtacttattgttttttgtaggagacaaggaaatgcagttgggagagatacaccaacaaagaagaggtgatgcatacaataaagtccaagagactcatgggacagaagatacgctgtggatctcagctcgtcgattcctccattaa

SEQ ID NO: 112396 - DNA, 664 bp, Zea Mays
tgaaaataggctgcttaaagggataggaaggtgggcgaggtgaagaacgattttgattaaaaggtcagatcaccaacctggttctcttctcaggcccttgattcgacctttcacctccaaatcccttggattttccgtgtcctgcatttttagcttccactgctagtgcagtactgacagctctactgtaggtaaggtccaagcaggttgccattttccgttgaagcctgtcattaagtcccctcataaagcaattctttttctttagatctgtattcacttggtcaatggcatactgggatagatggttgaatttgttgagatattgcactacagtatctcccccttgctttaacctgatgaactcttcttgtttcatatggagcactccttctagaacatagtgctcacggaatgctagcttgaattcctcccaagtgatctgatgcccagtcggttgaactactaccaaatttgcccaccaagtactggcaggtcctcttagttgttgggcagcaaataatggcttctgcgtctctatgcagcgaatcaacccaaacttttgttccatgactcttacccactcatcgtcttctagaggttcttctgctttaataaaaagcgggggtcgagtctcagagaattcctagtatgtagtttcacg

SEQ ID NO: 112397 - DNA, 413 bp, Zea Mays
tttttcccgaagcatgtcgaataacataattaaggtctttggaaggtacttcgggagtatgagtggcaactttttcaggcaaagtttgttctatagcctcttccttcgctgccttttctccaatttctgagggtttctccttggcaggctctgaaggcccagcttcggtgctagcctggctctttgcagctttggcttcggtcagttttgttttggcttcaatttgcacttttgaagccttggcaattttccctggggtagagcttgaagcctttaccatctctagcacatctagtacacttgccatcctttttctcttgggggtcaccgcaagacctttttgtgccttcggcattgtcacttctactgtagggcttaaaacttctaatgtttttgttctttcgattcttggc

SEQ ID NO: 112398 - DNA, 546 bp, Zea Mays
gtgacatctccaccaaatcgatagttaccttcacctaacggaagatcgggcacccccgttcctatcaagtggtattcaaagacttaggtattaccgtcaggattaccctagtttagtttatgtttttcttcctatagctccagaaaattgccatacaaaaaaattccgctgtcctagaacactgtttagccttgcaatttcgtttcagattgctttgttgagtttgtgtccgtgttcgagtcttgttgctggtttaggtcatgtcgtcattgtagttcaaccgctccgtcgctgttatttgtttccgccgctatcccatccacctttcccagattacaagtcgagacaccacattactcgatttgccctcgctagccgccttgtgtgaactctcgccacgctagccctagattaggttgcaagccgccttgcatcgcagcccctccttgtttcatcatctggcgcttacctattgcttataccagggaggtttgtgcccttgtgctccatagccgccgctatggttcctgccaatttgtgtctttg

SEQ ID NO: 112399 - DNA, 859 bp, Zea Mays
caggtttcctataatcccctctattcaaggcatacctagacggtgtttatgtccactcaagaaaaacaacacacatcaatatgccacatcatttctcaaaataaaacaatgaccatggaaaatttagccaaattgagtgagagaacagtccaaacataggttaaggttgtaaggcacattgggctagtcgatgaagacgtctttattttattttgagaaaaatgtggcaaattgatgtgtggtgttttccttgagtggacataaacacaatctaggtacgccttgaatagaagggattataggaaacctagtattacaaaaagttattagctagcccaataacgtcttcatccactagttgtactctaataccctctgatgcgaatacaatgcccttgacatcagggaaacgtcatttttagtttaaaaggtgatctatagttttgaattctttatattcctacttattagcatctttttggtggaaaaaagctgtcttacaaccctaacctatgtttggaaagttctctcgtgcaatttggcaaaatttctcatggtctttattttattttgagaaatgatgtggcataatgatgtgcgatgttgaacttgagtggacataaacaccatctagatatgccttgaataaagggattataggaaacctggtatcacaaaaggtcattaactagcccaataacgccttcatctgctagttgtactctaataccctctcgtgtgaatacaatgccctaaatatcacagaaacgtcatttgaggtttaaaaggtgatctattgttttgaattctttattttccaactttttagcaactgtatggtggaaaaaattgccttaca

SEQ ID NO: 112400 - DNA, 297 bp, Zea Mays
aaaaaaatgaaattaataagggaatgtgcaagagggtacgagtaggtaaaagcaagaatcaggttggagaaaagtggttttacgctgcaacaggatcttctgtggcttttaagggggactgggggagctaccgagcacagtgcagaggtcagaccgtcagagggagttgctggtgcagtggtgcgggggagatcatcagatcagaggggtgtctccatggccgacaatgaggggaccctggacgccgtcctcaaggaggccgtcgacttggtaactgctggccttcctcttgttggg

SEQ ID NO: 112401 - DNA, 708 bp, Zea Mays
aaacttactagaggtccaccaatcattctagtcaaagctttcatggatcatctaaaggcggtgcattggcctgagaagtttatccagtaaaattagagcttatatcggaaatactaacgatgttgaatgcttagagatctgtcgcctatccatcacatcagtcaaaggaggccctcctgtcgtggaaaattatttcatcgaatttctcatgcttgtaccgagagaatggttgctaggatagcccccaactcaatagattcttgggatgagttcatttataactttatccatctcttcagggcctaggacaattggtcatcagccgcaacaaattgaccaaggggaaggagagtacctgcgcaattacatcagaaggtggcaggatgagatggcaaaaacaccagatatcctagaaaaaacccataataaagattgtcatgagtaaattgtcaaatcgcagcctatccttggaactagcgcgaaatcccttgacctcgataggaaccatgttccaaacagatgaaaaacatgcagtcagcaaagagatctactaaaagttcgctttgcctagtgaaaggatcgcgatgcccaagaggagggtgaattgagcttctctaaatttcttgcaaaagattaaagcctaaacaggagcacaacttcacccaactacttagctagatcacaaaagctaggaaatgctaaacaaac

SEQ ID NO: 112402 - DNA, 368 bp, Zea Mays
aggtaaggttccgacagaatagttgaagtaaaaaaaattcattaccaaaggaaattacaaggaattaacgagatcaccaaggatgtgcgaaataaaacaaatgctcatggatcatcgagaaacaagggtggtcaagggcatgtaaaatgaaatatcttaaacagaccttgggatataaaggtaagcataaaaaaatgagagtatgagagatttcaaggagatgagcataccaataccaagagacaagaaattgccgaaagatagcgacttaacaacagaagaggaaagggtctcaaaagacaggaaggtcatggacatataaactgaaatgtttaagtaggcagtagaaatttagaggcaagtatttg

SEQ ID NO: 112403 - DNA, 393 bp, Zea Mays
cccagaggaaccaaatttgctccagacaaagctggctttcgaacaacatcagcaaacgaggcctgcagattacgacgacgggaaaccaatttccaagaacttgattcttcatcagagtaaagctaccattctttggtccaattagggccaccagaattccaaagatgaaggtacgctttgaacgatgaacagatataatagtgacgtctatagactgcgaaaccaacatccttgcaggaaagcgagaagcgaaaaacctggtccgacaaaggaataactctgaatagctccgctgatccatcgatgaaggattgaagaagaaagcccactgactctgcgcacaggcgcaaggaacacctgccgaaagagatgactaaaaagaactcatgacga

SEQ ID NO: 112404 - DNA, 272 bp, Zea Mays
gtgagaagttaccacaacattcattgccatcgcactgttgtgttgttaaattttttaaggcgaagctttttgaattgtgctttcaaaacacgttcttcgtcatttgaagttagcttcatcttaaggaaccgcaacacttgaaatggcccgagtaaaatccactgctagggtgtctcgtgagggagatgatgttgaagtgacagaaacagcgccaatatcagaagtgattaggcgatcgggtctagttgtatcggaaggggctattgccgaag

SEQ ID NO: 112405 - DNA, 443 bp, Zea Mays
agtacgtgatcctgagcctgaatgcttactgcattcattataatttcctggcattctttttggtacttgaaatctccccctaatgcctggaaaagctcatgattcaagcaagcgtacgggccgtaaatagattctcatgaagagattctaaaacttaatgatcgacggagaatgaattctcacatagatccccagctttctgtgtgcccatacatgtacgctgtggtggtgagattgggaaaacatacccaatgtacgcatgggaaatctttcatggattcccacgtactaaaaaccataggggaatttgtacatatagtacatgcagttcatcacaagtcaggagcatgcaaaacttcctgacgccaaccataactagttggaagtgacaattcattattgatggtcattaatgatctgaaattttcgaatctatcacagat

SEQ ID NO: 112406 - DNA, 819 bp, Zea Mays
ggaaaagaactatgttcatctccgggataacttgaaaaagtaagtcctttttaacagtaatatcatagagctccagagtttttacaaaataatttgcacgtctttttcccagcttagaggataagatctcaaatttagaagatgagaatcatttattgagacagaaggccttgaatttatctcctaggcacagccgaactggggtatatcttattcattatagaatgatatccttttcttttagtgtcctatataagtaatcatgtagtctgttcagttaagaattgttatgttctgatgaatgctcttatatttgttcatagagttatcactgcggttcttcaccatgcagcccaaaatcattcgttgtaagacctgcgacctcattgtcattttcattgtagatccatctcagttgtggataaatgaaattccgtctcccttcaggaatcttcacctgtgaaacttgcacctccccctcataaccagacagaatcaagaaggtcgaggatgaattctgatagatatgaggttaaatatatctttctctaaatattataaagaacatcattttatgtgcatattatttctagatattagtcattgccaggatgaatttttttgtatgaagttaagcatactcaagatttttttttggcgctttcaggattaccatgatgtgctccaccgctgcatcaaagatgatatgggattcaagaagggaaaaccagttgcagcctgtatcatttacaaatgccttctctattggggagtatttgaggctgaaagaacaactatttttgacttcataattcacac

SEQ ID NO: 112407 - DNA, 314 bp, Zea Mays
gaaaggtccaatcatatccagtccccagcatgcgaacggccaagttactggtatggtctgcagttgatgtgctggtagatgttgttgctttgacaagtactggcaagcttcgcacctctgaactaactcggctgcatcactttttgctgttggccaatagaatcccgacctgaagaccttcctgactagtgtcctggatgctgcgtgcattccacattgcccagcgtggacctcatctagaagttgcttcccagtagatgggagaatgcatgtcatcagaacacccgaagcaccccttctgtatagtgtttccc

SEQ ID NO: 112408 - DNA, 313 bp, Zea Mays
aaggacctaacagacagcgtgtttacgatattatcgtcctagaagatctacagaataacaatcatatgggctcggccatcctggcatatacattattcgaaatttgatattacacaaatggacaaatggtagataaaccaagataaagacaacgacatgacctagaaagcgggcttgcgcatccgcgcggttgccagcgtgactcatttctaacatcctacaagagaactctcaacgcttcaacattggaacttggaagcgttcgacccaacctcatagatcgtcttgtaagcctttcttgctaatttgcttg

SEQ ID NO: 112409 - DNA, 351 bp, Zea Mays
cgatactttccacctagcaacaaaaatacccctacctggaggaaaagacttcagaccctgtcaggaagagatcctactgaggatgaccccaccatcgtatacatggccggatatctccacaccctcgataaccactatgacaacctttcctcccactgcacccacctaaactcctgggtggaaagcttagagcaacaggtcaaggaacttaagaaggagaaggtgtctctccaagaaagtctcaaaatagcagaaggtgaagaggccaacactcgtgaagcctaccgaaccctgaagatggattacgacaagaagttaaagaagctcgcccccactaagaagatccgaaag

SEQ ID NO: 112410 - DNA, 1383 bp, Zea Mays
atccccgtcttgtaatttgaagatccttgttttcctatgttttccatttgccactaaatggaaaaacttggtgtttgcatcaccctccaacaaacctttcgttttcgctctttgataccattttaattcttcttctctgagtagggccgccagcctgttacgcataaaattccgccaatctaattcttcggtagtaagaaggcaactttctgctttcttatcaagaatattaaggtcttggataatgtgtttttcctttttatttgtaccactgacatttttttcctaaccccttaaaaattgcctaaccttcctgatcttgttttgccatttttccatggccgataccccaccattatccctacaccacagacttgacaccttctccctaaaaccctcccttaagaaccaacccagctctaatttgaaactgggaggggagtaggttgaagtgtcaatgtcggtgcttaggattagaggtgtgtaatcggacacatccctagagtgggccattacgttagatcggggataccgtaattcccactcagtggaaaccaataccctatctaatttttcgtaagtgggaaccgctctcgcattagcccaagtatattgtctacctgagagagccaactcccttaggcaaagtccgtcaataacggcattaaagagaaaaggccacctcggattgtaattatcattgttcttctcggacgcattgcgcagtaggttgaaatcccctccaaccatgacaggttcagtgattttactaaccatgttcacaagttccgctaaaaactgttccttaaggtggtcttgggcgggaccataaacgcagaccaaagaccacttaaacccaccatgcttatttcttaacaaaaaacggacatagaaatctccttcatctatggcacctatgtcaaaaaccgagaggtcgatccccataagaatacctcccgaccgacctctaggttctttacaatgccatagaaagtccttgcccgcacacagatttttgagaaaagaggtcgagaactctttttaacagtttcggaaagcgcaataaaactaagattaaactccttagttaaatccgcaacaaaacgatgcttcttagggtctccaaaaccatcacaattccaaaacacccctttcattttaacttttgtttttgcacgataacttcttctttctttttttcgatctaactttcttcctatgtgtatcactacctggatccaatggattttgacaatccgccttgttgtcaactccgttatccattaagtcatccatgatacccccacaaagattattaagagtaagtatgtctaattcctcatctgactcctcatccactatgttataaacagtcccttctac

SEQ ID NO: 112411 - DNA, 573 bp, Zea Mays
cgtcaggccgtcacacttctgcctttgcctttgcctttgcctttgcctttgtggactcgcagctagagaaagaatcttcgtcgtcgtcgtagtagtagttagtacgtgtagtgtaggcttcaccgtatgttcactgcaccagatttaacatgcaaccgcaggccgtgccgtgacgtgctcatatggatgtacatttgaaatagcgagtagcatatagaggctgctggtctggttgccctttccaattttcttgggacgtcagccgtcttacggacgcgccatgaagctgagagcccccaccccacccagtcccagccatctagcctgctttcttgccaaaacacacccaagggcagacgaagaaaccaaacatacagtcgcaaggctcacagcacccagattgaagaccactctgttttcggcaggcccgcagcacctagatcaaattcctgctcttcaggtcttcgtcatatatcagcagaacaccagcaaaagcagcaaagaaggaaccctttttttcctcgaaatttcaggctcagttattgcgaccttccatcacaaattggcaccttt

SEQ ID NO: 112412 - DNA, 962 bp, Zea Mays
tttggctcttttcgggcgcgccactttaattggatcgctgggcgttcggtaacggacgcccatgccgttgtttgatgcgaactttgctgtgctaggatcagtttgggatgcgttttgaagtgctcggggtttgacttgatgcttgcttagttcattaaggccaatttcgtgattatcttcacgttcggttgggtcaagttcacgcccacgccgaatttggtcctttgggttgtctgtctccacctataggttgatgttccggtgtatgattataaattgtctccatacttgttcagttcaagtttcattgtattcgtcacatttccttaaacatcaggaccatcaggtgttttaggctctagccgtatttgaagtgattcctctcttttcatggatcaaaccgtgctgcacttctctccggtactatctgaacttctctgactagccggtacttgttattgtcccgacttgtgctttgggtgaaagtggaagattagtttgttcgtgctctggctgcatctttggaaatggcctcagaattcaaaggtctttgcgtgcgtaggtccctttcatgttgacttttgtagtaaggccatcaagtttgttgaggtgagtacatatgagatattttgttgacaagctacgagacatgagctgcgaatttcgtgtcctgttctgtgagtttcgtcgattgcaactgccatattgtataaaatgatgtctgcaatgggctactgacttggcctatctaaggtgtttactgaacagttgtaatatttgacctgctgatttccactgcctcacgatctagtaagtagttagctgtagctgatagggtatgtgactatagcaatatatcagttggactagtatgtaaaaatatgtcgtattgtccaaacagccacatgtggatgtcgactggagtttatttgtcattgtttttttttcttgctatatatttg

SEQ ID NO: 112413 - DNA, 485 bp, Zea Mays
aaatttgtcaatagatagatgggctcgtggccaatacagaagatggttttctaggatatggtgagcagcatatgtggacacataagtcgggcttgactcggctcccctattatgacgaactgctccttccacaaaacattgatgtgatgcacactgaaaagaatgttgccgaggcactttaggcaacaattatggacattgctgataagtcaaaggataacataaaggcaagagtggatctggaagcgttatgtgatagaccaaaccaagagatgaagccgccaagtggtggaaagacatggagaaggcctaaggccgatttcgtcctaagcagggcccagaggaaggaagtacttcagtggatcaagatgttgatgttccctgatgggtatgcagctaacctgagtagggggtgaacttatctactctgcaagtcttagggatgaagagtcatcacttccacatatggattgaacggattcttc

SEQ ID NO: 112414 - DNA, 533 bp, Zea Mays
tgtttctgacgaaggtgcacctgccgctgaagctgagcaggttggtgctgaggaaggtgaatctaaagatgattatattgtcgtgccatctaaacccagccacctggagtttgggaggtccactgttaccgaagatgatatggccaagttgatgaagttaggctatttcagtgaagccaaaaaggaactaatttgctttggcggagaggaaattactccgaagccagaaaaggatgaggtggtagtctttaaaagcttctttaaagcaggattaagatttcctttgaatgagatgattgcagatgttttggggaagtttgggatttatcttcatcaactaactcctaacgccatcgttaggcttagcgtctacatctgggccctccgaagctaggaggtagaaccgtttcctgaaggcttctaccgggcacatgagcttcattatcagacaaaacctagagaagatgggctgcacgaaaacttcggttgctacaattttgcttaccgcaaagatgcaaagtctccagttatca

SEQ ID NO: 112415 - DNA, 926 bp, Zea Mays
agacggttgacccgtttaggaaaccgcccaggccctaaactggacggtggggtgccgttcaccgtttagaccggtctaaacggccgtttaataccgtttaggataacactgattattacatgcctggaagtggggtctttgtttcaggtggctggagcagccacccctctgccctacacctaggaccagccctgggtctgagtggccaaccctctggcccacccccacccccaggaccagacctcgaaattatttgtgcttttcccatattcatgcctggctaaaattgtaagctaaaaggggcttgagacctcactcaactttggaatttctagtcacaccagagtcgatcgacatgactttaagggcggcccactgtgtttagttaccaaaactgtgaattgcttggcacctgttttagtgtggactaaaatggtagatcttatttttaggcctacataattgagttccgaaatatgtattccttgttggcgatgtttatgccacttaatatttttgtatcatgtgcttgtttgaaacagctaatcttctgtagtcaacacatgtcactgacttgctcctcttgcgtagaggctaactggcaaatggtcctttttaggcactggcgatgtctcaaatcagcaagaattcaaagttacacaaagtgtacctgacttttttttcatagagaaaatagtaatatttgaatattaatataataactgggtactatatttatttagcaagtatatgcttgctccattctttttagtttaagtaatacccttatctattattagtgtatttgagtatatattctttttaaaatgttccatttgtaggtagaaggtatctatctagcctgcctagatggtcacttttagcgattttcctgtctatacattagacgagttagtatatgaaac

SEQ ID NO: 112416 - DNA, 912 bp, Zea Mays
cttgacttcaccaacgtggcgctgctctcctgccaggagacggcaccacaaaaccctactgcctcaagcagcgacgccctcctctattccatcgacatcttgccaattcatgatctggaaaaaggtctttgctcctatgtgtgtatattgtttcaaggaacactacctttgacctgcctatgtcttatgcctcatgagggggtaaagactcgccggcaagcagtgctgctgctgggctggtagaggtacgataatgatgagagtctactgctgctgggctggttgtacgatagtactactagtgatgagagggacgctggctagctgctctgctctgcgttgttatgctctacgtccccgatcaaacgagagagggatggcccacgcagacgcagcagcgcccggctgtttgcatgggctataaaatggaccaccacctcaatcgataggaacgaccgggtcacaatcgccactaccctacccactagtacatactagagcagtcgatggcctcatcctctgtttctctacttgtcaccatcatgcagctactgctgccgccgtcacctacttgctcctcgctgagttgcgggcttgacttcaccagcgtggcgctgctctcctgccaggagacagcaccacaaaaccctactgtctcatgcagcgatgtcctcctctattccatcggcatctggtcaattcatgaactggaaaaaggtcgttgctcctatgtgtgtacatggtttcaaggaacactacctttgacctccctacgtgttacatctcatgcgggggtaaagactcaagtaatgtgttgcagtggaatgccatcattcctcgccctacagactgcaatggtaagtctcgaacaatccttaattaatcactacgtacttcattccatcgtattat

SEQ ID NO: 112417 - DNA, 277 bp, Zea Mays
tgataatcgtaagattaaagacctcattagtgaataggggtacgtgtgcatctaccttcctcattaggctagtttagatcaagtgagagtctatgtttggtactcttgtgatagacatcacctagataattttgtggtgattgagagattcgtaatctctcaatggtgattgtgataggcccaactcatggtgtaaacacttgtgggtgattgatggtactggagtagcaaacaatcaacctgtagagagaacttgatacttgatccttacatggac

SEQ ID NO: 112418 - DNA, 365 bp, Zea Mays
gagattttagagtcttcagtacttcggcacaagcttcggcttagcaaccttcagcaataccatcctatagacaagacaaagtataaggtaattggaaatttaataaggagaaatcaaggtaaagagacaaaggtaaagtttcatactgagttaagcagttttcgtgcttcatccccgaccaattcacgcccgccctttgcccaaatttgggtaataaatatatttcctaagcttagggcctcagttggaatgtcaaccaagtctgatgatgaaagattgaaatttggcttgttgatggccctcgcgtgattgcacccggacttcataaaagctgcagctgtgccgcgtgaagccaccagagcaca

SEQ ID NO: 112419 - DNA, 292 bp, Zea Mays
ctcgggggctacatctagcagatgcgcttgcacacacccgggaatttggtcctcaacaagagccgagaaccatggaaacaatcgcaaggagggtccgtcccaaaactgcgaatataccgaataaacccccaaacaatactcatggattattcgaggggggctctagggctacatctagcagatgcgcttgcactcatctaatacttaggtcccaatgaaagcctccacccaactccaataagttacatgaaggctcagggctgctatcgggttcccaggaattgggtgccca

SEQ ID NO: 112420 - DNA, 587 bp, Zea Mays
cattcattcatttcctctacatggaatgggtgtgttaggaactctctagcatttttaacttgtttgtaatgcttactcatagttttggtattgttttctctacttaagatgcatgtgataatagaatcacctggtgtggtgttaagggggaaacacttgcttaacacctagggtgttacagcctacccccccccttaaaaataatcttgttctcaaaattggaatagactaagtggggtagaggtaacacttttaggtaggaactctgcgaagttcttatttagatagtcctcggtttcccaggttgattcttactccgtgtgattactccattgcaccttgaacattttcactagctcactaccttcctcatggtagccctttctttatgatccaggattttaataggatgatcctcataggttagattttgatctgcagtgatatcctcattggttagatctggctccttctgcagagcttccaatgtaagtggtccgtgtgccaggccaccaaagacgttctacaaagccctctatgaacaaggtctggtgcgccactagacaactgaactttgactctttttg

SEQ ID NO: 112421 - DNA, 620 bp, Zea Mays
cgggaatctcatgactttgcctatctcccggtagacagatatttctttgttgcccggaagacagtataagaaatcatcttcattgcttccattaaacactaatggtcccttcggatatttcaatttttgggcgtagtgttgtgcttctagcatctctccttgggatagttcttttcccgaagcatgacgaataatgtactcaatacttttgttcgaagcctcgcgagcagaagtttcgatctttccagatgcaatttgctctgtcgccttttcttcaagtgctgcaggctctttctcagtcggcactgaaggcccagtctcggcttcagcttgaatttgtgcagcttcggcttgcttagtttcggtttcggcctgcgatttggtttcagttggaacaactttctttgcgagtgcaggactcaaggccttcgtcgtttccaacacaacatctagcacgtttgccacccttctcctcttgggagttgcggcagaagccttttgcaccttcggcagttttatctctattgaagggttcaaaatttctggcattttcattaattcttcaatttttggctcttcaatcttcctctcaactggctcgactgtaagtaccttcggca

SEQ ID NO: 112422 - DNA, 505 bp, Zea Mays
ctacggtgtttgcttgctgattttggtgtttctgtgtctatattgactccactttggtgctattagtattgtttgtgatctagtaaagcatgtgtgttgatgcttattatacacgagcacaagtttagaatgatattattgattttcgttatgtatttccagatctttagttgactgatatcttcaccaaggcacagatcaaagatcaacatagattccatctccctaaactcagtgtgattgatccaccttgagttcaaggggttgttagataaaactctattttatattgttactctatttccctatcgtatatagataggattctatgttgtatatgtgtatacactggacttagggcctcgtattaaatacaagtgtgaatcataacaacgttaacgtactaagaacattattcttacccccaacatgccacctatgtagtcaccaagacgcacaactctcacatcaacattcttgtctatcctagttgaattccaccggc

SEQ ID NO: 112423 - DNA, 292 bp, Zea Mays
gttggtggtggaccaggttgacgaagaggtagacagtgctgaggttgtcacagtagacaagtgtactcctagtgagggggttgtggagctcttgaaggagatgtcggagctagatggtttcgtcgttcgccatgacgcggtactcagcctcaatgctggagcaggagagcacgggctaacgcttggaggactaggagataaggttggccaaggaacacgatgtagtcgaaggtgtaccatgggtgtctgggcagcctacccagttagcgttgatgtagacgatcaactcgtg

SEQ ID NO: 112424 - DNA, 323 bp, Zea Mays
ggaaactcctctctggtctgggtatggactatcacaaaaacgatgtctgtctagataatcacatgcttttctagaaggatcatgagaatgatagtaagtgtctaaagtgtggcaagtccagatatgtagaggttaaaaatgatgatggtgaaaaggtcacatcaatgatagcccaaaagcaacttcgttacatgcctcttgcacctcgtgttaaatgtttgtttcttttgaggaacacggctaggcacaagagatgccacaaagaacatgaaagagaggatactcatgtgatgacacactcatatgacagtgatgtgtggaag

SEQ ID NO: 112425 - DNA, 378 bp, Zea Mays
aaggtaaagattatggtggaaggaaaaaaagagaaagagagcccggatggtttttaaaggaagtgggttagctcaagttttaattcctctttgtgtttataatgcatgcatgctgaaagtaacgtctcctctcaaacaatagggtgctcttagggcatccttaaaaagtctaagtactggcccacggggcctaattaattagccacatattcctccctctatgcctaaggcctttcgtcctaggtctagcggtctagtcctgacgatccgtagcagtttctaggcatgttttaaatttttgaaaatggtattcatggtttattgtccttctctgtggtggaatttgctccgataccagctgtggcagaaccacccgaa

SEQ ID NO: 112426 - DNA, 333 bp, Zea Mays
atcgagcacaaggcaaggattgaactaggattatgaacaagtaacctatcacagtagagtggattcatattgtgatttagatgttccttgggctccatctccaggccctgtcgttgtgtcatgcatggggctagatgtcactcattgttaccttcaccttataagttgaggcgttggcaatggtaacgtttcgtgtctgcaccccttgataaaatatggcatacctcaatcccaaaacccaatcattatgtgaatgaaaattaattgccactattttttagtggggggatttatttgataatcctcaaaaactttgagtgaggtcttagttct

SEQ ID NO: 112427 - DNA, 536 bp, Zea Mays
ggatgattgtggatagattgaccaaagttgctcatttcattccggtcaatactacttataagggatctcaattggcagagtatatatggatcggattgtgtctctacacagtgtaccgaagaagatcatttaagatagaggatcacagtttacctccagattttggaaaagagttcatgagaatatggatacgaagttgaattttagttcggcctacctacctcaaactgatggacagactgaaaggactagtcaagtattggaagacatgttgagggcttgtacccttcagcgtggtagtagttgggacaagagtctaccttatgctgagttctcataaaataataattactaggtcagtctgaagatgtcaccgttcgaggctctatatggcaggaaatgcaggactcctctgtattggatcagactagaggaagacagttctttgggcctgagattatacaagaagcagaagaacaagtccatcaaataagggagaatttgagaactgcacagtcaaggcagaaaagctatgc

SEQ ID NO: 112428 - DNA, 500 bp, Zea Mays
atttcttcttgggatagttcttttcctgaagcatgacgaatgatgtagttagtgcttttgtttgaagcttcgggagcaggagcttcgatcttttcagatgcaatctgctctgtcgttttttcctcaggcgcgacacgctccgtctcaatgggcactgaaggcccaacttcggctttagtttgaacttgcgcagcttcggcttctgcttgcccagttttggcttcggcttgcgtttttgtagcttcagcaactttatttgtagcagcagggctcaagaccttcatagtttccagcacagcatctagcacgttggccatcctcctcctcttgagagttgcggcagaaatcttttgcaccttcggcatttttgcctctatcagagggctcagaatttttggcatccttattatttcttcaacctttggctcttcagccttatcaaccttatcttcgactggcttgactatatgcgtctttggcattatagtcggctcttcggc

SEQ ID NO: 112429 - DNA, 310 bp, Zea Mays
tacgaggcaaccccgaaggcattgttgaatggataagtggagaagccgaaaccttcgaagaaattttgagtgatcgcggggatgtttgcgcgttttccggtgcgcgggggatttcagccatcttggagaaggctggatgtgttcacattaaagccataacccaggccgaagctgccttctctgtagatgatatgaaggatccttcagtagaggcaacattaatgggtggaaaattttacaatgatgtctgggttaatggaggtcgagagatggcccatgatattataaaaaagtgaaaaagacacccacg

SEQ ID NO: 112430 - DNA, 394 bp, Zea Mays
ggttaggaggttagggtttcaaaccttggttgggatttttgggatgctacaaacctaccccacttaaaggaatctcgccctcgagattcagactggatttgagaaaagataagggtattccctcctcaaggagtcctcactctcccaggtagcttcctcttctccttctctgctccactgaactttacagagcttcacctctgaggtgcgggtctttctgactgctgaatcaagaatcttcactggcttctcacgatactgaagatctttctgaatctgcactgcctcttcatcgatgtgactttctggtgcttgcaggtatttgtggagctgggatacatgaaacacattgtggatgtcagacatggactctggtaattcaagacggtatgct

SEQ ID NO: 112431 - DNA, 604 bp, Zea Mays
gttagcgcaggagtaatgaagatccaggagcctggcgatcgactgctggcgaaggtacgacgcgaaacaaatcggttgtatctgcttcaagtgaaactcgccccggcaacttgcctagaagtgcacaggcgaaatgatgaagaggctaggctctggcatgagcgttttggccatgtcaacatggcggcgctttggaagctagctcgggaggagatggtgcgtggattactatcgatcgggcaggtggacagggtgtgcgaggcttgccaagccggcaagcagagaaggacctcattcccgatagaagcagagtaccacgctcatcagcgcctcgagctagtgcacgcggacctgtgtggtccaatcacaccggcgatgccacgaggtaacatgtattttctgctcatggtggatgatttcacccgatacatgtggatagccgcaatcccttcaaaggattgtgctgcggctgccatcaaggagatacaagcacaagcagaaggtagatctggggcgaaattgagagcccttcgtacataccgaggaggagaattcaccacaactgaattcgcgaagtactgcgcagctgaaggtatacatcggc

SEQ ID NO: 112432 - DNA, 318 bp, Zea Mays
actcgacgccgcgttagtccttcgccatatccaggaataaagtgctcgtctcatcgaccgatggtggtgcccggcgtagtcatgggagagaagagcctcggaccgtggaggattagcactgttgccgtctcggtcgctctagagaaaagcagcgggcgtgtgcctccatattcatagccgccgtgcatggattacgagtgacgcgatggtctcacaactgggcaatttcttaccggaatttgagcgtgggcgcattgccgctgcactgcatggcgagcgatttagcaacttcaaactctggtaagctccttgacttcc

SEQ ID NO: 112433 - DNA, 570 bp, Zea Mays
cttgcttgagggtggcagaggtcgacgcatttacggagaacgtggttcatgtcttgatcaaaggccatgaacgtgccctagagaaattgcccgtcgtgaagggatacacacacacacggtagagaggcacatggaccgtgacagagcgaagggcgggtgttgagggagcggttgcagtgaaggaggatgagcgcacgcttggaccaggctcatgcagaacagccgggatgatgcatgtggagacgaagagtgtgctagtaaaggaagaagatggtgttgctgccggcgggcgcggtgtaggcagggatgtgggtggtgttagggtggaacactgctacaagggaattgatgagggtgccagggaggatgagagtgagggtagggtgagccattgagggtgggtgagcagcgggtgctcagtcttgttgggaaagagagaggtgcagggagagggaacaggggcggcagcccaaagtggagagaggcagaggaggcagcggacattgtgaaacaacagtaggaactcacatgcgcggtgtggatggcaggcgctggtgcggctggcggttg

SEQ ID NO: 112434 - DNA, 969 bp, Zea Mays
caaggtcctcactgatgtgtatttcatccctgaactgaaaagtaacattgttagtttgggacagctggaagaaaaggggttccaatatgttggggagaatgggagattgtgtgtgtatgatcaggagaaaacactgctaatctctgcacctagagttgggaacagattgtacctagctaagtttgggttagactcaccagtttgcctgcaagctcaagtggatgatgtttcctggaggtggcatgctagatttgggcatttgcatttcaaagccctgagtgatctaaaatccaaaaacatggtcactggtttgccaacagtaacaagggtagagaaagtgtgtgatgggtgtgctcttgggaagctacacagatctccatttccaaaaatgtccagctatagggcagaaaagggcttagaacttgtgcatgcagatttgtgtgggcatatctctccaaagtctcttgggggagcatcctattttttgctggtagttgatgatcacagcagatatatgtgggtggaattgctgaagagcaaggatcaggctctggaatattttaagaaaataaaaaatagggctgaggttgaatgtgatggcaagttgaaggcattgagaacagatcgggggggagagttcaattccaatctattctcaattttctgcagtgaaggtgggataaagcattacactactactccctatactccccaacagaatggggtggtagaaaggagaaatcagagtgtagttgagatggccatatgcttattgaagacaatggcactaccttctgatttttggggcgaagctatatgtactgcagtgtatgtgttgaacaggtgccctacaaagagcctgaacaacatgaccccatatgaagcttggcatggaagaaaacccaacgtgaagcacatgaggatctttgggtgtgttgcatatgtgaagttggttggacctggtctgac

SEQ ID NO: 112435 - DNA, 503 bp, Zea Mays
cgaacctcttttttcttcaattgtacattactcaatgtgtcatttggtggagcaagatcactctgagaaacactttgatcgtcatttgtgcatgtggtaattctgtcttcaatctgttgaccaaggatgtcaattgtgctatccatcaatagggtgcactctggaaagtaggctgctcgatgcgctaaattcagaagcttccgagaaaagtatctatagcgaagcattgcatcaaactttggattttcaattacctttttcccattcatgtcttgtactgtgccactccgtgcttgtcgtgtccatctttttaatatatattgggcagccaatgacttgatattcatcaaatcaagaactttcaaagcatgagcacatattatcccagttctattaaataaattgcagctgcatacaactgattggtccaatggattaccaataactttgcactcttcctcaaggacaagttcttcaccgaggctcccggttgcaacaaggta

SEQ ID NO: 112436 - DNA, 406 bp, Zea Mays
ttaaggtgcaaactctttgtttggttggcaatcaaaaaccgggtctggacagctgacagattggcctaaagaggactgccccatccagctgcgtgccctctttgtgatcaggcagaggagaccatccaacatactctcatcccttgtgtttttgcccggcaagtctggacgttgatcctccacaaattgggcctcctcatcattgctcctcagccaggatgctcgagattttcgagttggtggtgccaaagtattaaaagtgttgagaagaacttcaggaagggacttaactccctaatcattttggttgcttgggagttatggaagcaccgtaattcttgcgtctttgacggtgctacaccctgtgtccaaagtgttgtgcttgctgtgactgaagagggtagtg

SEQ ID NO: 112437 - DNA, 513 bp, Zea Mays
cgtcgatgcggtcctttttgacatgttgtgtcttagtttttgcgggggatatttgcgggtatattacatggctccgcctcattaaaaacctcaccccccgggaggaaaagagtgcaggctagaatgatactgtttggtgaattacaagggcgtgttagccctgaggattcaaacaaaaaatttgcggagattatcgatattccaagagtgctctaggtcctcgccagatggcgttgttagcctgtacgcgctgggggacgccttcgtcttgacgatgaaaggaccctcccactttggctccagtttgccccatgactctgtccgagttgtccgaacgagtacgaggtctccttcattgaattctcttgggatgactgcgtggtcgcgccaggccttcgtttgagcttggtatttgttgagagcctgcagggcgaagacacggtctccgtctgtaacacccctggtattactataactaaaacttgagcatggcatcatgagcattggcattgc

SEQ ID NO: 112438 - DNA, 361 bp, Zea Mays
aaactacctccgaggggtttagagtttctataaaaacattcataccctctcattataaagagtagagaaagagttctccaccggtgtcgtctgttcattgtgtaggttctgtaggaagagaacatgcttctatatcttttcgcctccctactgcttcgagaaggatcgtagtccggatcgacgatacgtgacgatgactagattattcaacaatgtcctcattttcatgcccattgtttcgtttcgatcagactctgtatcaccaaatccgatcccatgatttgtgtcaacttgtgactacatatccattccgtggaattccaagcactgaacacttgaggctacccttctgtccccagtt

SEQ ID NO: 112439 - DNA, 432 bp, Zea Mays
aacatcctcagcgtcgacgccttaactaacacctatcaagccttaactaacatccttatgtgctttgactcatgttgggggcttcttcatctgaaggtcctcaaaaatactaacttaacaattatttcttagctttgcttcgaagtgttacatgtataatatcgaaggtaagcacaagctttggactagtgacacgagtacgtagtggatgaacaagctaaggcctagagaagtctgcaagtctgaatgaagaagctaaggcccagagaagtcttcatgtcttgtttatcaagacaactaaagtgatggcattgccctcaatgatttacctagttcaatgtataggcttgcgggtacaattgtaattttgctaaagttataccccgcgactataaatataggaacaatgtcatgcattacacacgctttttg

SEQ ID NO: 112440 - DNA, 460 bp, Zea Mays
gacgatgcattttctccttgcacttcttgacttgctgatggatgagttcgaggttgctgatcttctcatcaagctcctcttcctggggtgctaagctagtggccttcttcttcagattcctttcttctctgatgagtgctttgttcccttggttaggatcaaggggtgtcaggatagagctatttgtcgttgttttcttcggcggcatggtgtatggtgatgtggtcgtggaatcaccggagtgagcactaatgttggatacttgatttcaatcccttgaaggcattgaaaatcaaggcaacacaagttaagtacgttaaccttcacccttgacctaacacttctttgaagtgttaatgtgaaggacgaaggttttcagaaagagatgtaaatgaaatgacatagaatgaaatgatattgcacaatggagtatgaaactcatcttctttgccttatcatt

SEQ ID NO: 112441 - DNA, 327 bp, Zea Mays
atttggtgcgatagctgatcaccgaagtcttcatatctttgcggtaagcaaagttgtaacagccgaaattctcgtgtagcccatcttctctagccttcgcctgtaaatgaagcttgtgcacctggcagaaagcttcggcaagaggctccactccttggcttcgaagagcccagataaaaacgctgagcctaacgatggcgttaggagttagctgatgaagataaattttgaaatcttccaaaacatccccaatcatttcatgcaaaggaaaccttaatcctgctttgaagaaacttctgaaaactaccacctcatcattttctggct

SEQ ID NO: 112442 - DNA, 511 bp, Zea Mays
cccctccgcccttcgtcgacacgacttcatcgcgctttgcggaccctgttcacgtctaccagcgatgtggccgggctgctgccctagctccctctcgcacggagccgcaggtgtatcacctcgttgccctttgttgggaccccgggcatgtccaccgtcacgcatcgggccgctggtgtcctctggcctgccgatcgactagtcctcttggcgtccaactcttctacgctctccctcgagccatcatatgcttgtggtgcgctcgtcgaacccaactggcgccacaccatggaggattacgaggccctgctggcgaaccgtacctgggacctggtgccacgccccttgatgccaatgtggtcaccgggaaatggatcttcaagcacaagatgaaggcgaacggccctctggatcgatacaaggctcgttgggtcctatggggtttcacccaacgtcccgaggtggactatgacgagactttcagccccgtggtgaagcctggcaccatccg

SEQ ID NO: 112443 - DNA, 280 bp, Zea Mays
ctcaatttagcgtcttttaacttgtgaatacttgcagggccaaagagaacctgtctataagtgccgagttgagacaagtagccaacatctttgcttatagggtcaataaatattctgggtctgacatcaatggataccattttcgcacaacaaactatgaccaaagtcggtccaatcggaaaacaacgtgttctggagtctttacgcccggccttgacgatgtcgattattttggacgaatcaaagaaatatatgaactcaatttttatggttccaaacc

SEQ ID NO: 112444 - DNA, 410 bp, Zea Mays
cgaagttccaaaaaaatcgaatgctcagccctaataccaaggtcctagtcaccttgtgccacccaatgaccaaaaacaccacacaccatggcttcccctagtgtctggaaacaccatacaccatggcttccacggaaccgatgaaccccatggcgtctagccaacataccaaggtcctgatcaccttgtgccacccaatgaccaaaaacaccacactccatggctccccctagtgtctggaaacaccatacaccatgatttccaaggaaccgaagaaccccatggcgttaggatctgaggagccaatcatgactaacaatgagcagcacaacaatggaggtggaggacgccatgctggaggtggaagatcgagataagacgtcgccaccatcaccaaacaacgatcaacc

SEQ ID NO: 112445 - DNA, 400 bp, Zea Mays
gagggaaattgccaagtacatatccgagtgtgacacctgccagagaatcaaggccagtcacttgaaggcagcaggccctttgcaacccctccccataccatcttggaaatgggaggacattggcatggacttcatagtgggattacccaatacctccaggcaccatgattccatttgggttattgtggacaggttgaccaagaccgctcatttcttgccagtgcacaccacccacaagacagagaagtacgcagaaatttatgttgatcaaatagtaagattgcatggtattccaaagaccattgtatctgacagaggagcgctatttgtggcacgcttttgggagaagctgcaagaatcacttgggacccaagtaatacgaagctcagcataccatccc

SEQ ID NO: 112446 - DNA, 662 bp, Zea Mays
gtgggcataacaatgaatgggaatgatctttcgcgctcgttgagatgatatcatccatccttttccttgatctttctatagacattttccttctgccaaatttatcaagcctaatgtgatgctgatgctctatccttactcaatgtggagaatccagctccctcatagctggattatccgaaagatgaagtgggccctccatttgtcatccttatatctggtgacatagttttggtagcatggactcactaccaacacatttagtacctgaggtatttttgccttttcttttgtgcaaattgatatctgaatcattcgcgagtgttatgccaacaaaatgaagccatgaattgatgttcgattagtttatttagcagcattgtaaggctatctccaaccgcgtactcattcatatcttctatttcaaactacactatatgagctgtgacagtctatagtgcaaaacaatgtttttgtacggccatatgcacgatcttgtaataccctgaatttgggggtataaattttcttctccaatatccaccaaattcgggcgttactctctttttctcttcatgtttcgttccttcttcctattttcaaaacaatatagagactgatgtccgtgtcacgtgtaaatcaaaaccctaagttgatattgt

SEQ ID NO: 112447 - DNA, 425 bp, Zea Mays
aaatattagggtggtgtaccaaatgacgacaatgttcacgctcagcaggagtgtcagaccgagacgacataggatgtcggatcatcggttagagtttgacagtaaggagagaggttctagagaggagatcagagtgttagtctagtcgaaagaaggctatcgtaccaaaaactacggagacacacttaatggtcaacaacagctagttctgaaatagtggccattaagagtcatcgtactatgacataatggtctgacgaccatatattgcatggtatgacaatatccatagatgactattgaagttgcgacggctatgcctaaccttcttgggggctatgaatatgacctcaaccgacatttaagagtgtggagcccaagcaatacttatgcgagttgatgcttgtctataacatctttagcca

SEQ ID NO: 112448 - DNA, 345 bp, Zea Mays
gctgaacccaatgggtgtgacctagatgacgctgaatccaatgggtgtgtcgtccgcattgttgatgaagatgaggaagaggaggatgaaatccctctagttcggaagaacagccgacgctacatagtcagcggggaaagtagtggtgttccttctccagccttgtctgctctcattggtctgcaggaattgtctttggcaaactttgatcagactcttgaagacatggtcccagaagatctgttgttggagccggcagatggtggaatgatggatattcatgccgatgtgcctgatgctgggctagagttatctcgagtggcgtcccgtgtctcatcgacctta

SEQ ID NO: 112449 - DNA, 899 bp, Zea Mays
cgaaacaaacaccggtgggccatggccttgtcaattttcaacaaatacggcaccactgattgggttgtgtgtgtgggttgaggtggagtggagtgtgcacttatcaatagaagacaagagccgagaggaagggccacaatagcaagacgaaaattaagaggggcacacgacacacacaggcagccctacaagtggagctttggagggagggaggcctggcctcgtagtttcggtgccagtggtgaaaagtggcagctctgcccacattcctacaccaccgcccaccgcggggccaccgtctccatggcaccacttctccatctccaatccaactgcccttgcgatgctctgcctgctgcacattttcctcccactactacactttattaatcacacagaccgaatcccacgccttctctttccttccccttcgttctctccctgctgctctgctcctgccgcctggctgccgtgccgccgctgatccctctccctctcttccccctcaaagccccaattgccgggtgctcctcttccacccccattgccgactgcttcccgccagagagtggggaagggaggggggtgagaagggagatggcttcttggatagggagtgggtaagaatcacacgatgcagttacctccacctttctctcttctccttttgcgggcatattcttcacctccgcctgcctagatccttctttctttggcccggcttagcttccagtctcaccaacagttctgacctcggagcatctatcaatcggcccactccactctctggtaaggcaaccagccacgccacggcaccctttttgttcgagaatctgcttgcccgcgtcgccgtcgtggctttgttcctcctcgcgactgattcgtcggcctgagtcgtc

SEQ ID NO: 112450 - DNA, 431 bp, Zea Mays
acttggcggctagagtgaaatctgctggagaacgccgtaacccatctaagaacggaggtcgaaacaaggcgacgacgtgagcagtggcaggggctactccaccgtgagggcgaagaggaggatctgaagtgccatagcacaagatgtggagcctcgtcaatgactcaggaaatccaaagagctgtttgatttgagtagcatgcaatgtcacctcctctcgctcaaatctaaacctcatccactgatgatctgggtcaatccatactgtggcataaaagactctgacccactcctcaacatatctaccaccgaaggtcagaagagagtgtaaaccttgcagatatgtgatctgaccctctgactctgcactacctactgaaagtaaggcagggagatccaaacactggtgcgctctcacggcaatatgagca

SEQ ID NO: 112451 - DNA, 472 bp, Zea Mays
ttcaaagtccgaagatgaagctatgacaaccgccttcggagctcggggcaaaaagagattgaatagggtgtttgatgctatcgggtttgtgtacctagactactgctatcccactcgaaagcaagggaagaaaaggaaagctgctacctcggcaacttctagtgtgtcgaggtcgaaaaaggttaaagttttggcacaccaacccaggcgtattgagacggccgacgtgccaaggctgagtgaaagggttgctccagtcacagaaccaggtcactctatgccagtcgaagctaagacaaatccaactgaagagccgaaactagagaagacggcagaaccgttaaaggtactgagtccaccatgcgcaactgaactgccgaagccatcaaacatacccgcggcgactccatggaaaaggagaatggctagtgtgttagatgctgttatggagtctgtgaagacaacaactcta

SEQ ID NO: 112452 - DNA, 295 bp, Zea Mays
agcgttcaattaaccaagaccgagagcttcactagcaataaggaatgctaaaacctggatcagggggccacgaaataacatgagaagggccagccacggcgagatgtctcacgacggcgacggtcaccagatttggggaatttgttgactgggggatacggtgcacgagagaggctggcggagggtggaatgggcgcataacagagaggcagagcgaggggagtgctcaatttatagagaccagctacgggtgctacaaattttggatggagatgagctcacgacggtgaagagg

SEQ ID NO: 112453 - DNA, 506 bp, Zea Mays
gttttattaaaggattgagccccaagaactgtacagaaattggagtaaaagggactagaagttggactgtcaatcgagtattagtttgacatcaaactgacagtggcattggatcacctttggaatcaaattgtgctcaatccagtgaattcttgaccaagatctctgtaacaaaattggagctagtatataggggaacaactttgctatagtcaacttggtagtttgttgaatgaaaatcgaagaaaaattactctcaatttgctctgttaggcactctgaattcagtatgacatgaacagtaaactgaacaagatcgagttcagtgcatccgccaccgacgttccttcgccgtgattcgagctcgcgccacgattggtgtcgttcagacatggatcaatgaagtggtaaaagatctcgagttcggattcggtgaacgagttaccattctagccacagacaccacgtgtcctcaccgtgcttcattcaccaccgccgtagcaagc

SEQ ID NO: 112454 - DNA, 461 bp, Zea Mays
caacatttgcttctctacttatcgaactagcattgtgctaactactgtgagcacattgatcccaattggcagtatgaaatggagaatatgtgtatattttacaaatctgaacaagacaatgtgttgatcatatgtggggaatggagaacgtgctagattttataaatctcaaaaaatgcctacgtcaaagatagtttcccacttctttagatatatatcctcatagatgcagctacatgatgtgaaatgatgagtctataaggattgcttcttatgctactatctaatctggataaaaaagatgaaagaaagacttgcttcacaacctaggaaatgtgtttttggagttaggtaaagaaagatcctagagcgtttcatctctatccagagtttgtttggaagcaaagataccagataaaattggagttaaaatccacttgctattcaaaataacgtgcatc

SEQ ID NO: 112455 - DNA, 313 bp, Zea Mays
gggtttatgggggcagaccccaccgggttggcgtacccgtatgcactacctagttacaaaagggaaaaacttcgacccctcagacctgctctatagataaaacttttagagatatttcgacactgggggaggcattccttcggtcgtagctagacagttgcccttgggtcggggtactcccattaccatgaagggtccttcccagctgggggagtgttacatagccctaatttggtctggtactctcgtaagattaggtcccgaccctgggttcctatctgcatttgacgaaggaggccccgcctttggctgt

SEQ ID NO: 112456 - DNA, 345 bp, Zea Mays
ggtcccgcttcggcctccgaaagctaaaggtcgaaattgatgacgccgccaaagcgtgtcagaaggccttcggtactgtttgctccttcattggtacaagggatttaattcaagaacatatagcattcaaagtatggccgcttgtggaaaactgggaaatgccgaaagaaaccatcactaactctaacgaaggtgatttggtccggctaaaatatacattctggtttggggataagttcgatgaaccaaacgacgactggctgaaatgtatcgaagctacaagtgatgaactgcttggagcatattccaaggcagaagataatgcactatccgcagccttcggag

SEQ ID NO: 112457 - DNA, 414 bp, Zea Mays
cagaaaacaagagatgagacgatcgagaggtcaaacgacgtgaaaacggcgtttgaacgataaaaagtgccataggaggtttggaattcgaattgaggcacgaaatgacatggaattgagccgatacttcacgaataggtttatataggtgagtatgagtgaagtgtgtgcttggtttgattttaggcgaagaaaaagagatttgggcactcggctcggaaacgatcgctcaaaacggggaattgagtgaaagtgaagcctggaatatcagattggcgtgaaatttggcaaatatgttaatggaggtgttgtgaaggtgcctgaaaaatttgggttcaatcggggcatttttggctggtttgggcatttaaccgaacacgtgtcgtgcggtgaattaggttttcggggaaatag

SEQ ID NO: 112458 - DNA, 597 bp, Zea Mays
tatagaaaatcaataaaaggctagccagctagaaaggtagacttctttcaaaggcaggtagggaaaccttggttaaatctgtgttgaccgcacaaccgatttatctactaactgttttcctagctcaaaaaatagctacttaaaaggattgataagatcagaagaaatttcctttggaaaggagaaaatctggactcatgcaaagggggtcattgtctgatgaattgggctacaacttgtttaccaaagaataagggggtcttggcatccttgatctagagcgctttgcaagagcgttaagacttcgttggttgtggcttcggtggacaaataaagataaagcatggattcacttgcaactcccttgtgataaagcagatgtcgatctattcaatgcatccacaactgtaacaattagaaacggcaaaacggctgatttttggagatcgagctggattcggggtcagacgccaaggaacattgcaccaaccttatacatgaaagccaagaggaagaatagctcggtgtgccaagcccttaaaaacaatcgctggatgcacttctgctctccttacacacaagatgaataaataaaag

SEQ ID NO: 112459 - DNA, 622 bp, Zea Mays
gtttgattataggcagcttggccttcttcccaagagggagcgccttagcccttgcaataacgtttctgcctatttttgttttgtagatgttcgtgtttgcaatataatatttgttttggtttcttcgccggtctgcgatcgacaatttagacatgaaacactaccctcgtcctccttggcgattggatactaatgcgaagatcagctagatgattagcctaacttgtagttgacttcatgcggtttatcacctttacattttgtgtgttttacatgctaatttggttgcgcgtttgtggctaacgcggttgcaccctttgggtgattcaaacaaatatcaccctacaatttttacgtggatttttatgttcttagacgtcttcgcatccttagttgtcttcacacatatttgtgctaatgcggatgcacccttaggtggcttttgcttggatttttatgtctctttgacgtcttctaacccttaggtgtcttcgcacatatttatgataatccggctgcacccttagtcgacttttgcgcagatttgtctgtctcttagacatcttcaaacccttaggtgtctttgcacatattggtgctaatccgagtgcacccttaggag

SEQ ID NO: 112460 - DNA, 543 bp, Zea Mays
gttggagttcctccgtcctcccttgtccctccctccatttgtgactgacgactccctaaccttaacccctccagtctccggatccggtggttctagctcctcggttatgtaaggttcgtttatctcacctaatcccatctagatctggtgtctagctggtggttggtgctctgtgcttgtttgtggtgtctggatgtcgttgccggtgtgctgtcgcctgtctgcttgctcttcgccattcgctgcctcggctcctcgctggtggacacttgacatgaggagtggtgggtgtgaccgtgtgactcactaatggtgatggctcaccgtcgtcgaccttctcggtgctagctggtcgccattgtgggtcgtctgtttggacatctatactcataactcatcgtcctcctcacttgccctcatgttcccgtctcccattcccagtcccagactcctctcatcatgttctagtgttttctaacactcagctaaaaatcatcagcatctcttagcctctttgactctttgtcgtcgtctctagtgctc

SEQ ID NO: 112461 - DNA, 303 bp, Zea Mays
gtgagttctggctaaaagagattaaattcttgggtcacaccatttctcaggatgggatatcagttgatcctgagaaggtgcaagaggtaatggactggaagtccccgactacagtaaagcagattcggagttttctaggattggcagggtattatcgacgatttattccggatttctccagaattgccaaaccaatgactgaactgttgaagaagggagtcaaatttgagtggagccaaaagtgtgaagatgccttccataccttgaggcagcatttgacaacagccccagtgctagctcaac

SEQ ID NO: 112462 - DNA, 491 bp, Zea Mays
tatcaaacatatgtgccgaattgtgatgtagtagtgattgcgtaagttgaaccgaagtgtcccaagtacatgtcgtgatatggttgtattgagataataaattataagtgttgcgtgatatgagactcgatcgatgtagttaatattgaattggcctgtagagaggtggtgacatgccgaagtagtcatcgcttcctctacggttaagtcggagtcatgcgtgatgatgttatttatggggtgaatgcgtattgaaatattttatgttgtgccatatgattaggaagatgaaggatagatatgttgtttcggaaatgttagccaatagattcgaacaagcgtgatagaggttgagtcacttatgttataaaattgatgctcgacatgttaggtctcctaaaatgtggtgttttaggtgacttgtgtgttatccattttaagttgagaaatgtttaagagaagctaattaatttgctcccacccatgttttg

SEQ ID NO: 112463 - DNA, 493 bp, Zea Mays
caagtgcttcccttcaaaacgacaggaccatatcattggatatggtggtggagtgaaagcaagacatcttcgaagtccatctgttagtaaggctgaattgttagagaagctgaaacagtcggaggatgagaaacgagcaatgcttgaggagaatagagagcttcgagaagaaaatcgggctacaaacagtcgtgtaagccaaatggaaaaggagtgggcagagttgaagaaaaaattaagtagtaattagcatagaaatcttgatttcagtagagtttgagtgatatgaatacttacaacttttataccattggataaatacgtgatactggatttaatatacaagctgcaaatggttcattggtgcatctcaatgtgaaattgaatggtcattgttgtttaatacagggaagcagaaagatgtcgtttattaatgtttcatgggtgtcaggtagaagaatgtagttgttgatgtttcaaatatggctggtag

SEQ ID NO: 112464 - DNA, 665 bp, Zea Mays
tgctcgaccacgagtgcggacgttaacacgtgatagctgtgaatgtaaatatcactaaattttaatcatcctcgtctatcatgattttgatgtcgtgcatgtctccatctgtctaaatgtttctaatttattctgcaaaaattcagactttagtaattttcggaacctcaaatccaatatcgtttgagttgagccatcgacgtcttgcccaaactctaatccttgaaattgaatccggattcttaaactttgtttcaaattctttcacgcttgcgttgcacgtctctctgtggcgcgtggcaggtgctaaccggtgtctagactgcgcacaacctctcgcccacgtgaacgttacgtgacattgcttccaaaaggatcacaatttcgatgccacatcgatctcgcgtatttatttcgcggaatgtcgagtctggtgtctgtttaaaattttacggattaaaagaatatgaattcggaagctcgacccactcttacaatttttatcccgaacaaattaattggaactcgacgatagaagtgatgcaaaattaaatcaggcgagataactataaccgaagagtattcgtaattaatctgttccattttctacaactatggaaatttgtctgatcccgaaaatatctaccattgttagcttagtctaa

SEQ ID NO: 112465 - DNA, 362 bp, Zea Mays
gctacattgtagcatttttctttagcttcacgaagctcttcatcatttttctacacccttgatcattcaatatcagaaatttcacgttttgtgagctccacattaaaattttcagttgcctcgctcaatttcttctctaattcttgaatctcagatctatgtagttctacttgagaagataacttagcttcggtggattttagcctctcaaccagagaaagcgagatcttatctttttcaagggcttcgttcctcaaagttataacctccgatcagaggtttccaagtgctatctgacagatttcgtcttctgcatctttttgaggtttcagagccttactaaggattagaccctgccaaac

SEQ ID NO: 112466 - DNA, 651 bp, Zea Mays
agttgcttcacgcccatgactttccctgcagcatgatggacccaataccgttggccgcccaagaattggtcaaaaggaccttcaccaagcgatgtatcatcttcgatcgctttcttggcctcctcaaaatcaataggccccttccctttatcccctgccagggcaggtttggtggaacccttatctttggctatcatgattgacgaaggcgtcaccactgtagtaatctgtccaaaccctaggatatttgcaccagtctcatttgtagctggcgacacagtgtccttcagcgccaacgttgtaccaacggtatctttctcaccttcatcttcgtcaacatcgaagaatgaactcattactggagctattccctcctcttcctcttcttccttgctctttggaagcgactccaaaggtgtaaccctccgtgctatcaaggtgatggcttctgcaattttgccttttcagctcccataggagggagttcttcaatctcagctgctaccttagcttcgggtgcaacctaaaagtattcaaaacagtaaattaataaaatagattcacagctagtataacaaagatcaaaaaagcctatttaccataatttcctctgaagcttgaggagttgattcaaccggcaccttcagaact

SEQ ID NO: 112467 - DNA, 496 bp, Zea Mays
ccccgcttcgtggacagcctcgtcttcaagccatttgtgagtaccaaccccctccctagatccgccgtcgtcctagctttatttggcacctagcgtctcggttaatggcgcaccatataccatcggggggtctcccagccatggagcgccgccgtgtctggggtctgctccggtggttgggggcagaggagtctgtgcggggagtggagggccggtggtcgttggcttgggattcaacggccaggatcagagagagagttgtgagatatactgaaccgttgatcttgtgattaaaggccacgaatagaagagagaataggatgcttggtgccgtcgatctctggattgagggtccagattagaagcattatacccctttggtttataaaatctgagccatcagcttttaatccagcggcccagatatcgcgataccctttcgccctggcgttttgcttaagagaccctaggttcctttgaaatagaacccgccgtc

SEQ ID NO: 112468 - DNA, 382 bp, Zea Mays
ttcatacagcaggccccctataatggtatagtgggccgactatcttgcaatgcgctccgccgtagctttattatcgggttcttcctcgttttttatgtatcttatgattggctctctccagtcattgggatctgcctctgcctgactcaggacgtggcattcctccatctaatctgtggaaacactcggttgctgtatttcttagatgaaaaccccaggtggaacttaagcccgactggatcccatctttgacagtgcgtcatctgttgcattgagatccctttccacatggtggaattctaatccttcgaacttgtcctccagcttccgcacgactgcacaatatttgctcattgagtcggtcgagcaatcccaatctttg

SEQ ID NO: 112469 - DNA, 700 bp, Zea Mays
aagtggtctgtggagatcgatttctgctgctcgcggtcggatgccgaaggatggggcaacctacctaacgtctgttttatttttttcttcctatgatggtttcccagcaagacgtcgccgcggatggcggtgggccggatcaagctgctgcggaatcgcaaggaggtgcaggtacgccagatgcgtcgcgaggtcgcgcagctcctcgaggccaaccaggacatgaccgcgcgcatcagggtacgtgccttcgccgccacctggttacctccctaatggttcatctcgttcgccatttcaccctgcccattggtcggaattgactcgatgcacctcccaggattccattcgtggtagcacaattgacctcgtggttgtagaattcgataacgcgtcgcgtggacttggcttctgaagctagagcattctggcctcaagctgagtatgacttagttgcccgttgcagcctaggtgtttgtttatatgcgtgcaaatggaaaaattgtctgcaattcggggtggatgtgcatgctctgacccctaggtaggccgtggtttatgattgttggacatgtagccatcttgctaaccgtggactgcaatgacttttgataattgggacttgtttgataatattttagtgctggttattccgtgtcatgtgccttccctgtgcatgccagcacatacactgtagcct

SEQ ID NO: 112470 - DNA, 287 bp, Zea Mays
cgtggacttgctcaaagacgtcttcgccttgggccttcgctcttttgtaacaacatttccttttcatatgtggaggggtacttcgcccctactaatagttgagccctcgtgtctgccttcgtttccccttggcttgtttccttgcattagaaatcttgatgattggtgagaaggtgatcgagggctggttctgtcttcactcctacacccacttaggctatcttcaataattccccttatacaactccccttatatgtattttttactatatttcttagctcctcct

SEQ ID NO: 112471 - DNA, 922 bp, Zea Mays
agaaatctaatggtacagtgtctgcagaaagatcttcagatacatccccctcaccgccggtgaccctcgcgccgtgatccgtgctgccgccatgattcgtgccctctggcgtggagataatcatggcagagtaaagatcttggcaccggataggtttggacccggtcgctggtaagctcgccgtacccacttggactgtggctggccgagatgatcctcatcggcgttagccgcttaacgatcgtgcgccacacatcttggaagcttagcacgtcgtagtgaacctgtgtagcaagcccgtccatcgccagaggacttgtcacggtgagagccacgttttcacctacaccagtgaccttccctctctccggccgctagcgcttctcttcaaatttcggagccaccaccctcggacactataaattgagcgtgtcgctagctccgttgggtcatcacgaagccagagcacccgcccttgcctccgatgagccaccatagctctctaattcctctcttcccccaaatcgtgtttccgcgccaccgtgaacgccgcgtcgtggctagctctctgcaggtccgttcacgcccacctcgctcttgtttcgacacccctgtgtgctataaatgcttatcggcccagacaattgaactagcccgtgttgtatcaccgggaacacctcagattgtcctcggtatgtgccatcaccatggacagagagtttttgggctagaacttcacaattgcttgagtgattagtgttgccgagggtggaattaggtgttaagcaatggaggggcatagtcgttgcgttttccagccggtctaagctcgccggagccactgctccgccgtctgtcgtcggggacctcaacttgcgaaggaatagaaagggcggcctaactgcgaatgtcagtgacacag

SEQ ID NO: 112472 - DNA, 508 bp, Zea Mays
gaacgtcgaccgcagaggtgaatggggcgggggaagcccgtgctcgagatggaggagtcagcacacacacctttaaggtggtcgtcaggagagttgggggacgccgtcggcgagtggcaccggtagggcctcaaaagggatagcattgactagttgggaggtgtcattgatgtggagggtgggatatctacagtggaagggggttagggcatgtctgatcggcaaggggcacccagtgcttcggtgaccggaggcatggtagcggtggtagcgaaccgggtcgcgacagtcatgaacatggtgatcggaagcgagggaacggtagcacttggaagccacagaaataggacggggacacaagggttttgagggttctgaggagatttttggtggggttaggagcgtgcttcggtaaggggagctaaggcgtgcgccgccattggacgacagtagaagatgaggcgtaggggaggccggcgccgagttaaggcggtgtaacgggggccgg

SEQ ID NO: 112473 - DNA, 525 bp, Zea Mays
gtccagtccagtccagtcctgcctgctaccagcaaacacaacatgcatgtacaccatgcttggttgcttgctattggctatcgctaggctatagctttgctgcaaacaaaggaccatgcgtgctgctggtgtgtagtgtagtgtagtacgagacgatgagtgtgttgttggcttcattctttcatgctctccctctccaatgataatgatggtccgatctctgattggtccaaaaccgacatctctcctggtagtctgtctcatgcatctctctatgatcgatcaagcatatatggagccagcctgcagagtcagagccactactgctgctgctgcaccacatgaataatagtatcatgcaccattgcatcaatcatatatgaactgctaaagtagagatgtatgcatgtatgtattgctctttgactggtaggtggtgctagtacccagtcaggagcatgtagtataggagaggatgaatgaatgtcttttgcattgcagttgagttgcttccatcagccggtc

SEQ ID NO: 112474 - DNA, 340 bp, Zea Mays
ttggcgacgaagtagacccccaacacacccactttggaaaagctagttttcaatttcttcacacaatccaaggatttttcaaaacatctttacttggattcgcgaagctcctcaacatttttctctatcttggtcttccaccactcactaatttcttggctagcttttgcgagagcacaattttcattggcttcgacaagttttttacgaagatcttcaattttggctttataagcatcggattgagtattaaattttgcttcatcttcttttgctttatccgccaatgaaagtagaattttgtctttcttcgtggccttgtttctcagcctaatgacct

SEQ ID NO: 112475 - DNA, 444 bp, Zea Mays
cgactgtgaggcaagtgggtacggcggccagggcggaacagtgtcccaagctcattcccagcgctagatttttcaccttacatggttatccgcacttcactaatcacgaatcacaacgtcggtgacgatcactgcgcgggatcaccggcggcgatacattgaacctggcgatctttgtcaggtcactgtaccatgggagcttgattcaggcgcctgacagagcaggtttcagggtcttgatctcaaatttttatgtgataacttgtcaaccttcttgtaacaaagttatcgatctatactctagctttaatcttgctatagcaatcatagtctaacaatcacgggatcatgatcaaatccgatctcaaagttcacctaacttcactgctagccaatatttagttcaaagactgactgtcgacccaactttaagtcctttaattt

SEQ ID NO: 112476 - DNA, 455 bp, Zea Mays
aaagacattatccacaaaatcggaggatcccaagcgacatttgaaaacattccaaagcaggttagctttgagatcatgctctgaaaagattgagccactgtcacccgagagcaacgcaattgtattgcggccatgttttaccgttgcatgagcatgaaagaatctggagcagatatctccatcagtaacccatttgatggaagcccgttgcttccaataaattttttgaagttgaagcaactcagcagccttgtgttgcaataactcacggaaattccattcttcaatcaaaaggtcacgatgctcttcaataatatcaatgaattcaataatcaacttaatttgtctcacagttttgtcaatttttggcagtgaccgctgccactcttttagaatctttctggtgaacttgaattttgctgttaaattcttcgctttgtacaaaaggcttggca

SEQ ID NO: 112477 - DNA, 481 bp, Zea Mays
aaggagtactgatccatcacaggcgatggatcatggtctacggtgtaaataacaggacctagctttaacactctttagacgtgtttggactgcaggttgaatatttcaaaggacaggggttcttctgtaagatggcgtgaccgaagaggtatgatctaatatggctgtccgattagaagcccgcggtccagattatattgaatcctaatatccgaatcggtatgtgctgcgagccgcaagatcagaaatcaatgaccctcattcatccgcgtcactgatctaacacggccctcggttccaagatcaacgatcagatctaaatgagctgaaccggtatccaccttctaatcaaactcatacatgcccgatccaacgaattagaggctgtcttcatcccccattcccccatcactcaccggtgctagcccgacgacacaaagttgaggcacgacggtgccattgccgcagacctgaatcccat

SEQ ID NO: 112478 - DNA, 679 bp, Zea Mays
catcggcctgcttcgcgtgttgcgcgcttgctgtcccaagtagttacgtgcgcgtcatttccgttaccctgttcgatcgatgcgctgtggagtgagctacgactgcggcgtgcagagttctgttcagcgcggcagcgcgtttggtgcgtccctctgacaatttctctgaatctatgctgaattatccgagatcgaagtggtctgtggtattggcagtttggcactgctgttctgaatgtctgacgtgacgtgtttttggcttctgtgtcgaaggaaatactgtattgaagatggttacctcttgatgtagccttatttgtgtgcactggtttggtggcctggttactgattttacatattgcttactgccatatggagtggtttgtttggttaaaggttaaaacgtaaaacagtgatgtttgatatgtagttgaaagttgctgtgcaacagtgcaagtcgcagagcatttctaccttttaagatattgtgggggctaggcgatgctaacatgctggtgtttgtagttctctaggcagttaatgctaggcagggaaagggggtgaagagggtttactgggaaaggtgcaaaattgagtggagagttgatagagattttttccaatcttttgctagggtgtacaaacatcataggcttctaacattcatattcttgcaaac

SEQ ID NO: 112479 - DNA, 1529 bp, Zea Mays
tcctatgattcatggtctctgactgcaggatcgaagccaaccaagaaaaaattgaggcgctccagcagatgggagccattcaaaatctcaagggagtacaacgactagtcgtgtgtgtcgttgcgctcagtcgattcgtctccaggtttggtgaaaaggtatgcctctctacaagcacctcaggaagggcaaccaattttcttggaccctagaggcccaatagtccctcgaccggataaaggcattctgactttgccacgagtcttggtcacatccaacttaggtgaggccctcctcctctatgccgctgcaaccacccaagtggtcaacgcgacactcgtcgtagagaggaaaaacgaaggccacatattcaaagtacagaagcacatttacttcactagcgaggtgttgactgagtccaaggctcgatacccacaaatccagaagttgctctacaccatccacatcgccaagagaaaattgatacactactttgatttacacctcgtgtcaggtggtctctatgacaccgattggtgagatcattcgcaatcatgacacgtctgggcacatcgcaaagtggtccttcgagctcaataagctcgacataaattacatccctaagaccacgatcaagtcttagaccttggctgacttcatcgtggaatggacagaagcccaagcatcacctcatcgaggactcggaatattagaccatatattttgacagatcctacctcaagacgggcagcagcgcaggagtcatcctcacgttgcctcaagggcatctccactttgatgtcaccaacaatgtggcagagtacgagtccctcgttagtgggctttagatcacagccgaaataggagtgcgatgaatcctagtgagaggcgactccaagatggtcgtcgatcaagtcatgaatgtgatggagccccactacccaagcatgtgcacgtactacgacaaggtacgtaaagtggacgaaatgttcaaaggcttcgagctacaccatagttatatgtgatttaacgtggaagccggtaagctctcgaccatggcgtcagggtggaagcccgccctacatggagtcttcgcctccgatctctatgaaccctccgtcaagttcaagcaactagaggaagagccaagcaaaccaactagcgaccaagtcgaccctacgacccaggctcgggggctcgtcgcaacaaccgactagcaagattggctcttgcccttcatcaatagtctatctgatggggccctcctagaagacacaacgaaagctagacgattgtcctagaaggcgaagtccttcatgatcgccgatgggacactctacaaaaagagcaccttagggatcaagtagaaatgcatcccgatcgaagaagaagaacaactactcagtgacatacatggcgagacatgtgggcaccatgtggacccagatccctcattaggaaggtcttcagacaaggtttctattggccgaccgtcatggtcgatcctgagcaagtcattcggacctatg

SEQ ID NO: 112480 - DNA, 482 bp, Zea Mays
gggctacccaagtgcaatttgtgctcactgctactattatctatcatatgatggcactagatttgcctaggtgggctattaaggccattgataaaatctgttgcggttttctttggagaggacgtaaagaggctaatggtgggcattgtatggtggcctagggcaaggtaacgcgtcccaaagaattgagggccttggtatctctgatattcaatgttcaaattgggccttgcggtttagatggatatggcttcaaaaaaccgacacatccaagccttgggctaatttgcctatccagtcaaaccgattttttgagtgcttactctaagttgcattggcttccgaggtgggggatgggcgatccactcttttttggcaagatagatggctcttgggtcagagaatggaagacttggcccctcctgtattcagtttggttcctaacagattgatgaaaagaatgatagtggttgatgctctct

SEQ ID NO: 112481 - DNA, 314 bp, Zea Mays
ttctacgctcaccttaatcattcatttgttctcctattgaccacacaagagcaaccaagacaacgtaagtttaaatcggacctaggcatcaatgtctatgaaactcctatatcgcaatcactagagaaaggaacatataaaacaagacacacatatcatctctagcttaaccatggtaagtctacattacttaagagcaaaccaaacatttttagcgacatgggtgaactaaacaatcaaaagcgcactagcagaatttttggacagcaatacagcagtcacttgtttcagtcataactcacaacatatttaac

SEQ ID NO: 112482 - DNA, 704 bp, Zea Mays
atatggtagttccctgatccattttcctgcgagtttctcactcttgtcaaacacctttttcatgagtgcatcgagtatcctcccgttggctctttctacttgtccattagctcttgggtgtgccactgatgcatacttgatctagatgctcctctgctcgcagaagtcaaagaactctgagctagtgaagttagatcccaggtctgtaataatgctgttatttattccaaaactgaatattatttcttgaatgaactccactacctttgctgaggtcaaagaggcaataggtttgtattctatcaactttgcaaatttaacaatggcaactagtatgtgtgtatatcccccttgagctttcttgaagagcccaatcatgtccagcccccagcatgcaaacgaccatgttacaggaatagtctgcaactgttgcgtgggtagatgctgctgctttgataagaattggcatgcctcgcactaatgaactaactctgttgcatcgttcttcgctgttggccagcagaacctggacctgaaagctttccctactagagtctgtgacgctgcgtgcacgccacactgcccagtatggatcttgtccaacagctgcttcccagtagccgagtgaatacacttcatgaggactcctcttgcacctcttctatatagtagaccccctataatggtatagtgggctgactgtc

SEQ ID NO: 112483 - DNA, 454 bp, Zea Mays
tccatgatcttactgtcttttgagaccctttcctattctattgttaagtcgctatcttttggcaatttgtactctcttattattggtatgctcgtaccattggaatattgcataactttatttttatatatgcttacctttatatcccaatatctgtttaaggcatttcagttaacatgtccttgaccacccttgtttcctaatgatccatgagcggtcattttattttgcacatccttggtgatctcgttaattccttgtaacttcttttggtaatggatttttatttttactcttctgtcggaacctcaattatattatacatgattgttttctccatttcgggactttttaagtcttgccttaactctgtccatggactatgcttttcatcattatcacctttatccttatcacctctatatcttaccttgatgtttatcttatatcggcc

SEQ ID NO: 112484 - DNA, 530 bp, Zea Mays
gacaataagagttgaagtgtagtactggtactaaagatatttctgcatgcatgttagtaccagttgatagattaactatgtactaaagacttgatattagaatcggttagagacctgtactaatatgctcggaataaacttgacatttaaaacccgtactaatgatggagtcggtatcggttttaaaaacataggaacaaaagttgataaacgaaatccctattctccaactgacgtccaggcagccaacggccccgagagagcactacaggatttactgtaaagttttttgtattaaaattgcttttacgtcgtgtacgtacatgggtgatggaacggataagaaaaaggtgcgatttgcagttttacgcacgcacgcaacagcgggcacggggagacgtggacgctccgtggctgctcatttttaggcgccttggtatgccgtatgcgttgggtccctatacatgtcgtttcatgctgaattttctgaggccgtattggaccccctccgtcggaacgtcaacccggac

SEQ ID NO: 112485 - DNA, 379 bp, Zea Mays
gtttccgacttaagccgattgctccgttagtagggtatagtgatcacccttagtcatgtaagcatgagcatgtcgcaccgacttaagtcgattgctccgttagtagggtataatgatcacccttagtcgtggaagcgtgagcatgtcgcaccgacttaaggcgtttccgacttaagccgattgctccgttagtagggtatagtaatcaccctaagtcatgtaagcatgagcatgtcgcaccgacttaaggcgcttccgacttaagccgattgctctgttagtagggtatagttatcacccctagtcctgtaagcgtgagcatgtcgcactaacttaaggcattttcgacttaagccgattgctccattagtagggtata

SEQ ID NO: 112486 - DNA, 846 bp, Zea Mays
cttccttagtttctcaaaagtgagtagtggtctgcccggcacatatttttaggcacgtttttataatctgccttagttggcttctttatctttgcggccattgcctcagccttttttgcggactcctcgagatcagccaaatcaacattgtctgacatgaggctccgtccaatccctttcaaaaaacgaacagtgccagcagtggatttactcttctttttcttatcatacggggacactacttttggtatagaaactttagatttctttgatggtcgtggagatggctgtggagaaggtggatctctgaagggcgatgtatgtggcggagatggtgggccaccatgaggatgaggagaaggagggtcataaagaggatgaggagcagcatgtgaagtttgaggaggtgatgatggatgtacaataggaacaacaatttgagaaggcggagacagttgggcctgcgacgacggctgttgtgcgatatcaaccaattcgacatcccttcgaggccaaaggataaaattcttgatagcttgtccaagtgtctcgataccttcgggcctagggatgtctagcatgtcgtcctcgtatccttggatgactgtcgtcacttctaccctgcaatattcttctggaatgtcgtttccatggaacttgcgtcctgggatcgcaaggcctgtggctactttccttgtacgctgattgttaataccatatcttataactagtgtgcatgccacaggccttgtgatgtcatcaactggatagcggaccttatttcccgttgacgcgacagagcttgggatggtcgtaccctcggtggcagccgacgtttgagctgtt

SEQ ID NO: 112487 - DNA, 1220 bp, Zea Mays
ggggacataaatccttcatggtgaattcatgttgaaggacagcgatgatttggtgcaggatgtccaaagaggaggcagtgaccacgatgtcatcgacatataggaggaggtacacaatgttattgccgcaccgatagatgaacaaagatctgtccgacttgaccttaattaaatcagggggcaaatatgtggcacaacagatgtaccaagtgtgagggcttgctttagaccacaaggagacttgttgagcttgcataccatatcgggatgagtagggtgaacaaagccagcatactgactgcagtagacggtctttgtgagtctcatggagaaaagcattcttgacatctagttgatgaactgtccaagaacgggagaggaccaaagtgtgaactgcatggacggtagcaggctttatgatgggaccgaacgtctcatcatagtcaaagccataacaccaatgggccttgtactgtttagagagtcattcgccttccgcttatgtgtccaaacccactttgttctcatcacattatcgcctgcaggacagggcactagatcccaagtgtgattagcaaggagtgcctgatattgttcctccacagagaggtgccagtgaggattagcaagggagcaatggacgaaagatggcataggggagacagatgaggaggaggtcacgaagaggacaaggcgaaggaccctagtgggttggagagtgaccattaggtggatgtggtgaggatcgtgatgaagaaggggttatacactgttacccacctaggcacgtcactgataaacatggaaaggttggatgtagcaacgaggagtcgacataggtgagggcactagagagggccccaagggtgggggtgaggtcaaaggagtggacgctaggaccgaaggtgaggccacatgagccaatagggctctaactggggttgatgaggtgacacacgagttggcgaggggcgaagggacagcctagagggagttggggcacaggagccacgatggcactaggccatgggctaaagtggtgtgggggaacctgaatggtgaaaaaaacaatggctgatcagagggcgccacgaagtcaggatcatgaagaaaatccaactcggtaagggaggtagtagtgggatgagaggtagacaagaagggaaaatcagtctcgacaaagttgacgtgacaggagatcaagagacgatgggttgtga

SEQ ID NO: 112488 - DNA, 438 bp, Zea Mays
cctaggtgctatagggctggggtatttatatgggtagccgagggttggtaacttaagcaccataatgaccccggtcaccaactatattcttgccatgcactgtacaacagggtaattaaagggcagattacaagtctaccaagtacaccagacttgatactctcccgagtcatttacaagtgggcccgtagaaggtaggcaagatctgcacaggaattacttgttgtgaagtctactgccatcgttgttgtaagccagcctctaaccatgttaagtctttgtgctttccccggtggtcagcccccttcgcaggctggttcgcatgaccgacttcgccatttacaggagggttgagattttatgccttcggtattgttcttcgactttcgtcttctgtagcttcgaccgtttgttcttgtggtcaaaggggggtgttct

SEQ ID NO: 112489 - DNA, 499 bp, Zea Mays
tgtgtgcatttatgcattttttagacctagtttaccaaagactgtaattatttgatgtatttcgtaaagatatttgttacaataccatatcctagctagaaaaatctaaaaacttgtatggaccattcattttggtgtacaatgttgacaaaatagtttcaattcattcggacaaagtggtgacacacatcctaagaaaggcatacatctctcatataaggctaattactaagtgagagatgttattgcaagtgagagatgtatagtaccactatgtcaaaaatatttcaaaatattataacatgatcataaaccaaactaatgtgtccatgaatagataattgcaaaaaaaacatagagacaaataaaaaacaaagaattaatataaaatggtaggcaaaacacaaaaaatgtctccttgcaggcgcttaaacctaggagctcggtctcttagttagcaggtcaaaccattgagctatgcatgtgttttcgatatata

SEQ ID NO: 112490 - DNA, 539 bp, Zea Mays
caccacgcaaatcggcagcgcgttagtccgtcattgtcgggatttggagatgggtgcaagaatagtctaaacttagaaaacagaaagatttctatgactattattagggtgtcatctaaacaaagtggtgatgtgatattggtactaagtaatagagagatgaaagttctttgttatatatacaagatacgagaaattgtctactttacgaaataagacaggaagagacggtcttagctgaactagttgaatttcttgtggtggaacatgtccaagtcctcgtgatatatgtgctcgtattttttgggagtgacatgcctatgtgtctacgtttatataattatattgcaatttgtaaaaataaaaagatataaatagatgaacatataaatagcctagataataatttttgcaagtcttcattgggccttatcgatggttctcactctaaaaggacgaagatatcagagagaagtggatgttgaattaggctaatctaaaattctcatgaaattaaaatttaccatttaacctatttc

SEQ ID NO: 112491 - DNA, 669 bp, Zea Mays
gtctgagactatagtccttggtacaccatgcaaacgaactatctggtcgatgtagatttccgcatacttctccgtcctatgggtggtgtgcactggtaagaaatgagctgacttggtcaatctatccacaatgacccaaatggaatcatggtgccgggaggtattgggcaatcccacgataaagtccatgcaaatgtcctcccatttccaagatggtatgggaaggggttgcaaaggtcctgctgccttcaaatgactggctttaatcctttggcaggtgtcacactcggatatgtacttggcaatttccctcttcattctggtccaccagtataaggatctgagatcatggtacattttgttactaccggggtgcatggagaatttagaaaggtgagcttcatccaatatcttttttctgagctccgggtccttgggaacaaccaatcgatctccaaaccatagaactcccttgctatcctgacggaagcacttgtatttctctgccttctgcttgatcatgtctttgataacctaaacacccttatctccaatctgtgtctggactatttgctcttgcagggtgggctccactgagatataagttaaatcacctaaagaaacaacttccaggttcagcttgcacaattcatcacacagggtggtaac

SEQ ID NO: 112492 - DNA, 370 bp, Zea Mays
tgtaatcatcttctgactcaacttcctcagcatcagcttgctcagcttcagcggcaggtgcatcctccgatactaccagccctgaacgcttcatcacttcagagattggagcagtttcggcaccttcggcttcctctccatcgcgagtaaccctagctgttgaacgtactctggccatctgatgattgaatttcttgtttttcgaatgaagttgaaaatttttaactttgccgaagctcttttttgttacgaagcttgagtaaaacaaatagcttcggatggggatgcagtcagcaagcttcggctttggtcaatattttggcagcaaaacaacgcaataacaatgaatgttgtggtaccttcacaccta

SEQ ID NO: 112493 - DNA, 720 bp, Zea Mays
ccacatcagatataagcctgtccatctctgacagtgtggtcccgaggttctcagcttcaggtgttgcttcattagcttcaacttcggtagtatcttcggcattggtaggcacaacaattttttccaccgaagccgagggcggggtcttttggatggcttgcattacgtccatcatccgccatttcttctgaccccctaacatttccctgggtagccaaagcagtttcctttcctcccgagctttgttcaaatcccttctcctttgactgcaataggctagtcagatctgaccccagggggacttagcattgcaaacgggaagggttcagtcattaccttcaatatttcttcaacatcgatagatgaagacggagaagggcccgcagtctttcctggtacatcttgtaccttcatctctgcagcagctatcctggcaggcttccgttttttgggagccgaatccttcgactccgctagaactttctgcttcttaacaaccctttgatcttctttgactgaccggatggcctgtcgtttcagaatgctcacaaccctctttctcttcgctccctcgaccccttcgtcaagcctgtcgtaatccggatattcaaagttaagagcattcatcacccaattcaaccttcatttttcacgggtgccgaaggcagctgtcatcaacagatcctctttcttcgtgtagttcccaataatttcattgca

SEQ ID NO: 112494 - DNA, 274 bp, Zea Mays
gaggacgtccctgccactgaagcagaacaagctgatgttgaggagaccgagtctgaagatgattatagcagcgcggtgccgagcaaacccagccatctggatttcggaaaatccaccatatccgaaggtgacctacctaagttgttgaaattgggctattttaatgaagaaaagaaagagctggttcgctttggtggggaggaaactactccgaagccaggaaaagatgaagtagtagtttttaaaagtttcttcaaagctggtttgagattcc

SEQ ID NO: 112495 - DNA, 353 bp, Zea Mays
ggcttgcaaataacgcaagacgccgatggccaccggatcatcaaccttataatggtcgaagactggcgggccccaataacactatacctccagggccattatcatccatctgatctcaacgaggccaaaaggcttcaacacaggagcagagacttcgcaatagtcgagggccagctttacaaaaagggagtcagccagcttatgctgaaatgcataactgaaaaccgaaggcctagagatcctccgcgaagtccacggcggaacttgcgggatcacactcaggaccaagggccctcgtagccaaggtaattcgttagggattctatcggcccgcaataatatgtatagccaac

SEQ ID NO: 112496 - DNA, 430 bp, Zea Mays
cggcgaagtcctcttgcttcggtaggggtggtggtggtaatggttgatttggatgctgtggtggtggtggaggaggtagagctaggatttcttggttttgctcgtatatattgtggttttgttgatgaggatggaagtggtcattgtggggtttggtgctggttgtactgatggggatggtaggtgtgggtgacaactctttgattggcagtcggttggtttctggccattcgatcttttgttgctttagtttcagggcaatccctaattgggtgtgctaagtcttcgccatggaaaagacaatagaatcttcgctgctgcgggccatggcctctacccctgcctctagttgcgtgaaagtgcattcattccttttgtgagttttggtgatttggataacaacacatttaaaggtctaacaagtttgcta

SEQ ID NO: 112497 - DNA, 353 bp, Zea Mays
atgggacaatccttgcattgatgtcccttctttcggcatgtgtagcagaggcgctttttgagttttgaagacttcttccttccttgtttcttgcttgctacatggttagtgaaaactttcttttccaacaacatgcctttttgttttacatagggacaagatttgattaagtgtcccttctttgagcaattaaaacaaagtttatcatccttaataatcaagtcattaatataggaacatgacttaattgagtgtcccttttcaaagcattcactacacttcttactactctcagtatgaagtgtgacttgattattaccttggatgttaccttttgtggaggcatgattgag

SEQ ID NO: 112498 - DNA, 339 bp, Zea Mays
gcggcatagaggccagatgacagttgaacttgcacatgatggcactcggatgcagaagcattagcggcatgtaggcaagacgaaacatcatagcgggtacagaacggtgcgaaagcgcgagggtgaagatttggcagaagtcaaggcgtgcacgtgactgcttgcccaagcgcgagggttgatgcagagctgggcattggcgacacgattttagtgtgtgtggaaaaccgttcaagatagaatctgcatggatggagagaggattgaagaagtacaatggagaagacaatatgaggacgtagtgtgttacaatcaatgaagaacataaggtctctttgg

SEQ ID NO: 112499 - DNA, 694 bp, Zea Mays
tacgtttgttccttggtagcgatgggatagagaagacaatgttgatgttcaacaccatctcgttcttgacaatgacgtgaaacatccacgtgacgaggaggaagacgagtcgtggcaacgcggttgaacacgacgaggaagcgatcgagcagtcacatggattgcttcccaaaaacctaattcaccctctcccgatgttggattgctgaggatgacaggacctgagacctgatgacctgtttgtcggtgtgtggcgatgatcgagatgaagtagcgtacgtggcgatatagtaggcaggaagccacaagactagatgtgatgactactactgtgtgatttgatgacaacactcgtaggtatttatcggaggaaaccacattcgatttcaaaaaaaatccgcaccaaataataaggattcacatcatataagataaggattcacaccagataaggcttcggcctgcccggtctagcgaggcgagcgaccttctacctctctcccaacatatacgagaccatgtaaaactctccacctcaattagaaatataagaatgtttccacactcctctaaatattgacatgcatctcttcatgaatggacatttgagatttttctagaaattattctaaaattaaaataattccaacaattatcacgcatgctatgcagcaagcgtgtttgcatatggtcg

SEQ ID NO: 112500 - DNA, 860 bp, Zea Mays
caccacacacccattgtgggtggggagcctgttatatatagccagtagtcaagcatggaaagtacatagatgggaaactattccctgtacaaggaaacaatcctaggctatagatggaaaccaatcctaggctataattgcagctagccaatctaggagattacaattaatcgctaatcaggctctgattgatcctgatatatacatatcataatacccgcccgcagtctgagcgggagtatcacgtacgcatagactggtctgaaaatcagtgaagagctggatgggcagacccttggtcatgatgtcggcgaactggtgcgtagatgggacatgaacacgaaactgccctagagctaccttctcgtgaacgaagtggatgtcgattttgatgtgcttcgtgcggcggtgatggactgggttagccgccatgtaaacgacgctcacattgtcacagtagacaacggtcgcacgtgggatggagttgtggagcacatgtcgtagctgacgtcccagcgcgccttgtgccgagtgagggagccgtcagagtggagcttgtgtttgaacagccacttgccagtgacaatgttcgcaccaggtgaccgaggtacgaggcaccaagtgttgttgtcgatcaatgccttgtacttgtccgccattgcagcacaccaattcggattggcaagagcactgcgatagtttgcagggattggcgaggcgacggaggcggagaagcagaagcgctagacaatgtagagggagccggtttgtgagcgagtcattggtcggttcgctgcagtattgaggagccgagctgctggagtcgcagggggcgaagctggtgcagccgctggtggtgg

SEQ ID NO: 112501 - DNA, 498 bp, Zea Mays
cagatctgcaaggaaaacataccgagtgcacgaagcaggtctctctcagcagaattggggcatcgtttggtgctggcatgttggctccattgcaacaacaaccccccaaccctcatgttcgtccgattcttggatttggagacggctaataacaacagctcacgcatgcaacgtgtcaccgagacaatgggctggaatacaatatgatcggatgacttttcttgcatgtggagcaagcattgttacaaatcatctgggaaaatatggttattggctacttgattgattggcagtctacaactcagtctgctaggtttcatcctcaagtgttctcaagttgagaattcttctcgctctcgtgtcctgtctttgcttgccctacactgcactcccatctccgtcgtcaccacgaccatgtaactaacagctcatggtgcacgtcacaacatttcaacttccttgctcaacgaaaactaactatatattttctttgcggag

SEQ ID NO: 112502 - DNA, 493 bp, Zea Mays
cgtttggcgggcatcaccggtgggctccctcacggatcgacatcgccgtggggcgcgcgtcgtcacagcagcaggtgagtgaccttcctatctttagatggcgtcagtaagtgtgaggggcgcttgtactcgggggataccggacaccagggcgccactggtgtgcctctccggcatagcaccctcttgtcgcgcacgacggcggatctaggcgcggtgtcaatgctagccgcgccgtgaggtataagaaggccagcaaccgttgatcaaacgctgtagggctaggattagatctaggggaaagttggcccccaaccgttgatcgtgcaggggatggtctagatcgagtcttggtgtaccccttcgagccattaaatcagaaccgtgaatcccggatccgatggcctaggttactcgcggggttgatggatgtcgaatctaatcgtggtcgtcgggctttgatctgatggctgagacgaaagcatacccttcg

SEQ ID NO: 112503 - DNA, 496 bp, Zea Mays
cggtactgaaatctagcttggtgcccatggctttctgaaggcttgtccagaatttggatgtgaactgggttcctctgtctgacactatcttccttgggatgccgtggagtctcactatctccttgaggtaaatccgggcaagggtggctcctccaaaggtagttttcactggaatgaaatgggctaccttggtgaggcggtctattattacccagatggagtcattccctttctgtgtccggggcagtccggttacgaagtccatgcctatttcttcccacttccattcaggtatcgggaggggttgtaataggccagcaggtttttggtgctcggccttcgtccgttgacagatgtcacatcgggccacatactgagctatttctttcttcatccccttccaccagtatctggtcttgaggtccaggtacatcttggtagatccggggtggatggagtaggctgagtcgtgagcttccttgagcaggacttctcg

SEQ ID NO: 112504 - DNA, 411 bp, Zea Mays
gtagattttgcaaggtgatgaactacctaaagcattgaatggtcatttcctgaagtgttatcatccaagtgtgtggcaggatgattagagaaacattaggtttctaatgacttgtatcatgcgcttttggttcgttcagctttcccaaaaggtagggggcatgtgttgatcatcatatctgccacctaggaaaggcttgacggtccagctatgtggtcggatggtccgtgagttgattagattatgcaagattaaccattttctatacgtgtttatccatctaaactcgtggactctgttgggggacgcctaggaacaggttcatacctcctccccttatataatatatgaaggggtacgactgattgtaggcaccaacaatcaaatcaaatcaatatatcttccatttct

SEQ ID NO: 112505 - DNA, 310 bp, Zea Mays
cgatatccaaaagactcagagttcagcgaacgccagcctggctgcaggggatgaggctccagggtcatccttaccctacagcggggcactcggttcttctcgaacaactgcaccgcatactgaggaggcgtcatgtaaccagctccctgaagtacctcccacaaaatacgggggaaaccctctcgtgcaagtccgtcagtgtgggactgtgcattcccttcgtccgtggatccgtgagaagtcatctatgtacggttaagcgtaagtaaaaggaaaagaattataaaataaaaagggatcgtgattccgc

SEQ ID NO: 112506 - DNA, 642 bp, Zea Mays
cggggcaagaaaagattaaacagggtatttgatgctattggcttcgtataccttgattacctctacccgctgcgagggaaagagaaaaagaggaaatttgccgctttggtcaccccagctgagccaaagagcaaaaaggtgaaggttctgacccaccggccgcgttatattgaaccggccgtagtacctgaatttggcgagggtacttcttcagctaccgaagcaaagcaagttgcttcgattgtgcagagtgctgaaaagccgattgcagcgtcgaaggtgcctacagtcgggccagccgaaactgaggatgataaggccgaagggccacaggtggaaaaatgatgaagatgccagaaattccgagtcctctgtaagaggcggaaatgccgaaggttacaagagctcccgccacaactcccaagaggagaagaatggaaagcgtgctagacgctgttgtggagacaacaagagcactgactcgtgctcctgtgaaggagattgctgaagctgctacagcacatatggaaaccgaagctgggcccttagtgcccattgaaacgaagctcgccgcaaccgagcagagggccggagaagaatctccatatactggcgtagctctggagaaaagtgtgaccaaag

SEQ ID NO: 112507 - DNA, 764 bp, Zea Mays
gttttcagaacagtcacacagtcattattgagtttaacttacacagagttataaaataagataaaattgaaatattacattggagattcagtcagattcatagtcattcttaatcactttcgtcttggtaattaacatggcaagttgtcgccctcctaattcttgcaatcaccgcgtgtgctgctgactcctccatggccatagtgcacccagattgctgtgtctcatccccctcactctgcgcctcatcttgattcccatctagtccttttttattgttaggcgacctctttttcttggagtccaacctacagttttggcacttctctttttattcttgttctcggccgctctgcttctgtttgggttctgagggcatgttgtgctatagtgccccctaacatggcaggtttggcactctcttatgccctgacccccactgtatgtgttgtatggattagcaggttccacactatttttagcacatttagccccactgcagacttcctacccttcgtgcgcgacattggcggttcagtcaatgttagatcagcgaggcagtttgcagaacctggattgaggcccgattctggtggtggtgtaggaccagtgggcatcacaacaggttccatattgttgtcagaactttgttgtgttggtgcaatgggaccaatattccgccgtccatctgcatcttgctgcaactcagtatttgttgcttcatccggaccaatctccgctgttcgtagaagctcaatcccagg

SEQ ID NO: 112508 - DNA, 394 bp, Zea Mays
atttagatgaggagatttagatgacacaaccttagggttttactactcctggtcaagagcatttagtatgtcatttgcagaaatctctttatggtttgaaacaagctcctaagcagtggtataagaggtttgactcgttcatgcttgcacatggttattctcgaagcaattatgatcattgtatttatttgaagcaattcccaaatggatcttttgtgtatctactgctttatgttgatgatatgttgattgcttctcatgataagtcattgattattgaattgaaggctcaacttagtcatgaatttgataggaaagatttcagaccagcaaagaagattcttatgatggaattttagcgtgatcgtcatgctgatattccttttctatctca

SEQ ID NO: 112509 - DNA, 665 bp, Zea Mays
gttgcatgaattcctagatgactttgtggtcgtgttcctggatgatattctgatttattcaaagaccgaggccgagcatgagcagcatctccgtctcgttctgggtgccctaaggaagaatcagttctatggcaagttgaagaagtgtgccttttggctgtccgaagtggctttcttggggcacgtgattaatcaacagggcattgcggttgatcccaagaatgttgcggctgtggtggagtggaagagaccctctagtgtctctgaaatccgaagtttcttggggctcaccggatattatcggcgcttcgtaccaaattttttcagcattgctaagcctctgactagactcttggagaagggtgttctcttcatctagttcggcgattgcgaggtcagttatcagacattgaagaaaaagttggtggacgcccctatcctagctttgcctaacagcggtaagcgtttcacagtttatacggatgcttcgcgtattggtcttggttgtgtgttgatgcaggaaggcagagtgattgcttatggctcaaggcagttgaggaagcatgaggggaattacccaattcatgatcttgaattggccacggtggtttttgctctaaagtcgtggaggcattatctttatggcgaggcttgtgacatttaca

SEQ ID NO: 112510 - DNA, 346 bp, Zea Mays
aacattttcagctcacgagccaaacgagacgtaaaatagtcatctccagcggcccggggtatagggtccttcctatgccatcgacccctggtaacctttagcatatgtgaagatgtttcccggagctcgggcgaagtcataacctccccgggacccgcggacgtccctgtcatctcctcaacaaaaagcctagaggccttcggccccatattttcatcctctgtaccttgcaaatctattttcctttttcgggtagctacaatcataggctttcccttcgaggtgccctcttcagaccgggtcttcacctgctttcctcggtcgtcaccagcatcaacagagtccc

SEQ ID NO: 112511 - DNA, 345 bp, Zea Mays
ttaactcatataggtttgctcgtgatttcacccttaccatatgattaacatagtgaaagcaaaacaaaaaattaaacgtgctcatataaacttaggtataatggaactatatgctaattgaaacctcaataatttacatttggttaccaaccatgggtacaagaataagagtctatagctttcactaacctattcgggattggcatgaaccaacttggtacattccatgatatgcacccaactttgacaagtatccaaattcttgaagtccattggatttctcacttctgctttgggatccaaaccatctttgtgcccttcatgtttgaaataatctactttggc

SEQ ID NO: 112512 - DNA, 382 bp, Zea Mays
aaggaactccactactttccccactggcgacatattgccgactgttcttccgagtcagagggacctcatcttcttcctccccgtcgtcttcatcagcgacacagacaacacccccattggggtcagcggcagatggagcacccccattgggtttagcggtagatggatcacacccattggggtcagcgtcagtaaattcaggcacaggtacttcctcagcagcaggaaccgaaggaccaacgccccgatccaaactagatactcgccgaagacgtctctttttctttttctgctcatcagcaggagaatcaggttgattgactcggcaagggcgtttcaggcgaacactgacaggtctctgaatatccaaggttgtaccagc

SEQ ID NO: 112513 - DNA, 743 bp, Zea Mays
cttgctcgatattgttgtcggcgtgcttctgcgcggtctactgatgcattaataatcattttaattggtatgggaatcattaagaaaggaatggtaagtaacatatattgtgtcgtaccagctatgtttgcttggacgggatatgttggagcaaagtgtgaaggttcaagtaagcaactattgttggttgcactgacatctagtaataataccaagtcaaattattattaaatcaattgcatgtaagttatgcttgaaccttgtatacaagtgtaatctggtaagatttaccattgttcggttcgccatgaggtggtgtatcgcctaacggttggtctcttttacgtctcctttgttctggtgtcatattcgcataccgttctctagcacgggctcgtctactttcaatttggtcagaagtcatgctcgcacgtctggctcgatctcgcagtcgacgcacttccgcgcgatcatctggtacttcattagagtatgtttgcaagagaatgggtgatatggtagtcgatgatgcacatgtgttaatgttcgtaccatcatcatcaactataaaaaatataagtttaaaattagtaatttagtaatgaataataatatttatgcttggcactatgttttaacatatttatcattaaactaaccgttggatgtatgtccttgtagtaaatttgatatggtagtcgatgatgtacatgtcttattcataccatcagtagcaactataa

SEQ ID NO: 112514 - DNA, 392 bp, Zea Mays
ttaagaataatagagcccttgttctcatccaatctgctttggtgcttcctatctccccccaataacttcctatcaggttgacacaatttggaattcaatctacacgatcatctttaaccaccgggcaaccatttctagacacccagggtcacctagcgaccttgatcaatgcaggagaagagaagaggggtgaagccatgacgacaaattacctatcgaggaagagggccaccttgagggcatagcagaggctggactcctggtgcaaaactaagctttaagacacattaacaataccataatgaaaggttcttatgaatatagtaagctaaaatgtaaaatcacacatccctgaacataaaatgcaagatcctacagggacagacaaaaat

SEQ ID NO: 112515 - DNA, 527 bp, Zea Mays
tccatgagatgttgactccgcttttgattgatttgtcataactctccgcaatttatgcaggtagcgtgccactgattctgacggtttcttgacatcgtcagtggcgattcgctgatgaattttctttgaaatagttggcccttcaacattggtgtcaacctttgcttcctttttgatgtttgcgtcgacattctgaggaacaattttgtctacgtccccctcgtcgagttcctttgcaagaggtgatatgattgtttcaacgatttttgtggaggtcggtgccatattttcctgcaccatggggtatggaatgatcgaactatctttctgttgcattggtgttgaattcggcgttaatgacttatgacgcgatacacgacttaagatcggctcatcacccaacttgatgtcgtgtcgatgccaaaggaccaactcgttcattgcctcctgcaaagttatgatcccctcaactggaaagtctatctcccaatcttcacaaccactgtctgtgatctctagaacttgga

SEQ ID NO: 112516 - DNA, 419 bp, Zea Mays
gttattctgataaacgcttccccgaagcatgtcgcacaatgaattctagctctttagcaagagcttcaggagcaggagatttggattttccagaagcgctctctttctctaggattatcgaagtgctttccgaaggtctagcttcggcaggaacttctaagggtccagcttcaggaatagcctccatcatgccggcctcagatttcttcgaaactttaccctccgtgctaggcgcttcggtagaagcgagagttgatgaattcacatactccataatagcatctaatacgctggtcattctttttttccttggagttgctgcagggatgcttgatggcttcgacagttccattgtgcatggtggactcagtgtttttaactgctctgccgccttctccagtttcggctcttcagccggt

SEQ ID NO: 112517 - DNA, 755 bp, Zea Mays
gctatttattctctatacttatctaaacaacttcctaacaacttatccctatttgctagcagcggccagctctgatctgttgctggccgtgagcttatcttctaaacaaatctcctattttctagctactagcaactaccagctattcctgcgccctgatctgctgttggccgcgtggccgacgctggtagtggtgaccccacatgacatcaactatatcatgtaataaaagcacacatgattttcgccatgcctttcagctaggaaagcatacccatttacctttctctagttcctccagtcgagcttccaaaccatttgagttggctcattgtgatttgtggacatctcctgttgttagcatgtatggtcacaaatactacttggttatttgatgatttttctcattaattatggacctttgctccgcgtttgaaatccgacacattcactactttgtcccagtttttctcatgtgtttccactcaattcggttactccatccaggccatccggtgcgaccatggcacgagtttggtaatacttacactcggacctttatccgctctcatggcactttactctggatgtcgtgcccctacacctcttcacagaatggtaaagccgagtatattattccttttactattaatgtcattccctctctgcttttccatgcttctgctccaacatgctaatgggttgaaggtctctacaccgtgacatacctgttgagtcgtctacccacaaagaac

SEQ ID NO: 112518 - DNA, 503 bp, Zea Mays
gggaccaactttttagaagattggaagaaggaatcagctcaactaaatacatgtctgggaaacaacgtcagtctcgaagtcagaccagtactggaagacctcatatacaaagctcaacgtctagactcaaagacagcaagacttgtggagaaagcccgtaaggaacaactcccgaacctcaggacagatgaccaaggagtcctttggttcaaaaatcgtctgtgtgtaccaaaaggggaggcacgagaggtcctgctagaagaagctcacaactcaacctactccatccacccaggggctaccaagatgtacctagatctcaaaaccagatactggtggagggggatgaagaaagagatagctcagtatgtggcccggtgtgacatctgccaacgaacgaaggccgagcaccaaaaacctgcaggcctattgcaacccctcccaatacctgaatggaagtgggaagaaataggcatggacttcgtaaccggactgccccggac

SEQ ID NO: 112519 - DNA, 459 bp, Zea Mays
ccgggatatgactaaataacacactgcagctcatttacaccatgtattgcatggatatgtgccggagggctcgtaaggcgtatccgatacagatacacatctgatacgtatctgcagagtatccaatttttttctgttatcacaaattttgattgtgtgcgccgataagtatgccagttggatacagcctaagcctagcccaacaagaagcaatggtatctccctctgcccatgacaccatagcccccgatgctggaactctcgcaccctcatgccgcctcccggaaactcgtgcggtaatgcacgcctcgtcctgcgcacggactgccagtgacgagtcttcacccccgcgatgtcgatccagcgaccctccaactcctgagttcattcccttccctgttctcacttctcgatctactctattattgcttgatttctttgctccccactgatgcatcg

SEQ ID NO: 112520 - DNA, 285 bp, Zea Mays
acttctctgtcttgtgggtggtatgcactagtaagaaatgagcggtcttggtcaatctgtccacaataacccaaatggaatcatggtgcctggaggtattgggcaatcccacgataaagtccatgcaaatgtcctcccatttccaagatggtatgggaaggggttgcaaagggcctgctgccttcaaatgattggctttgattctctggcaggtatcgcactcggatatgtacttggcaatttccctcttcatcctggtccaccagtataaggatctgagatcat

SEQ ID NO: 112521 - DNA, 508 bp, Zea Mays
ttgaattcggtcctgtagtgttagttattgctttgggtacccacacactccttttcataacctttctcttagtgtaggcacccacatattttacaaccagttttcctgaatctcaagtcaacatataatcacaaagataagaatgagaaataggagctctaaacttttctccatttgtggagaccgcatccttcatcttgtcctttgtgtaactcaagtttacctttacttgagttgacttgtcatttgaggagtgaatcctccccaaggcatcatatagggtggttccctctatgaacttgggggatctccaccccttatgctttatgctagggtttaccttatatgagttgtacccaagccactttctcccattgttgggcttcaaggacttgtacttgggttaaactttctttaacccatcattgctagagcatttcttcagtatttctttaaccttaacctgtgggcttttcttccttccatggttagtcaaacaacaagaagc

SEQ ID NO: 112522 - DNA, 573 bp, Zea Mays
agacggtcaagctaacctttgcggtggttgcagcgtgtgcgaggagcaatattgcacgaagacgaaggggcgcaggagcatgggagagggggcgaatgcgaaaaggtacctactatctgcgatggaaggcctaattaacgttggctcacccacacgccaccgaagcgtcgggcagaacaccaagaggcgcagacactaagtgctaacgacccagaccatgacatggggggccaggcacaccaatcatatgtagtgggtggcaggtaaagatgtgaaaagcgagatctgaaccgtcaaacgcgtgaaacgggggcaaaacgcacctctttgggaaccaccactatggtaaaagcccttttttacccctaccacagtggtgtcgaacgttatgcgcatagccgggcataccacctgcgtgggggccataggccagtaagccacagagacgtgtgtgacagcaggtgaattgatagatgggacgacataggacaaggttcccgaaaaacacaccactgtgcgccagtcgcaaccaggttgcttaggacgacgtcgcagttgtggccccacctacgg

SEQ ID NO: 112523 - DNA, 389 bp, Zea Mays
atagtggattcatgactctgtctgctcatgagtccctgacaccgctatccagctacgctgcctcggtcagcgatgctgccagacgaaccctgtggtctctcagccacacctaccggcagcagctgaatgacacgaagttcaggcatctccctctgtgtctgagtggaggaagctagaccagcatcgttccaggtggagctggtgaggatcgcctcaacaccctagctggtgtagaggccggactcaacaccgaccttgacaatgccaccctggatctctctagggtgcacttggagctggaggatgcccatgccaggattgcagccctggaagcccaacttcaaggacgggatccgcctgaagcttaggtccccgccttggcgttgtct

SEQ ID NO: 112524 - DNA, 446 bp, Zea Mays
gtggattagcacgtatatattccattacaagtctagggatagaattttatgatcgtctggaacttggagatacaacgaggttcctcctcctaccggggattttctcgtaatgcaagttggacctcaccacgaaaatctactatttggaaacattcagcccatacttactagattggtttccgaactgtagaccaagttggagttgggtaaccactctctccgaccgtagctggcaagcctggccttgcggagcaaggtgaggagagctgggctggccgcgtagcgtagaccagccaaatccgctctacttattctccttccgtttaccagccaaatcagcacgtggcagatcggggggacacggactgcctaccggtgggctatgcatgagagaggcgagctgccgcagtgattagacagagagagacacgcgggcccaactcgtc

SEQ ID NO: 112525 - DNA, 592 bp, Zea Mays
gcgtacaaagatttggagtaaagaagaagcttgcaccaagatatgtaggtccttactagattattgagagaaaaagaggaagtggcttacaaaattcagttgctagaggacatgagcactatttttccagtattccacgtctctcaactaaagaagtgcctcagagtacctgaagaaagagtggaagccaaggttctgaagattgggtcagacctagtgtatcaagaacaacctatcaagattttggacactaaggactggatcacaaggaatagcacggtcacgatgtataaagtattgtggagtcaccacgatgagcgtgatacaacatgggagacagatgcctatttatgagaactttaccctgatttttaccaatatggttagtaatcctaaaatctcggggagagattcctttaaggggaggattgtaacacccatggtgttaagcatgctcatacatttcatatgcatcatgaaagcatcatcataagcatcattaatcattcaccacttacatcaagatcttgaattgctactcattgttgtggagtgaattcatgcttggattaacaggaagcctatgttttat

SEQ ID NO: 112526 - DNA, 602 bp, Zea Mays
gtggttttactacctcttggtaagtatcacgaaccagcctccgattgtaccgtcctttacattgtgttttcattagatactagtaagaacttggtaagacacggtagtgtgtgttcctattcacccagagggcgcgtagttgcttattagggataacctttactgtttgttcctgttttggtgtttccaatggcaggatccgatgatgagattgagatagtcgttcccacacaattttctgattgtgtcagtcgcgaagacttcgatgttatttgcaagcgtatggaggaaaataaggaggaaacggtccacaagtctatccatgacgcgattattgcaatggatcttggcaaagtgctagatagggtggagagacggataaccaagcttgtcgatcgggtttccacgttggagacacgtccactacatcagcagcctcctccaccaccacaaccctagcagcatcaaccacggcatcagcaacctccaccacaggctcaagatgatgccattttcgatgcacgtggcaattttgatgaggcagctaccagagacgcccgcctacaacgtcgtctttgtcggaacagggtaggtatgggtga

SEQ ID NO: 112527 - DNA, 384 bp, Zea Mays
tagcacttcacctacaagtaagtatcccaaggtatcaatatttatttgatcccaagggaaagcagtagctagaaattataatgagtaagtccaaagagtgatgaaataagtagtttaaaggagtaatcagttatggacatgtttttatgacttcttcgattatggacacatttttctcaccatttaatcgactcaaacttatcacaaacaagaaggacatagttaagattgttattgtactacacatagaggttttcttacaaccacacacatttcagggtccaattacttcaatgcatacaataccaacacaacaagaacacactaccaacagaatcaacatcttcactgctctgagcaggacatctactgttcttgccaaac

SEQ ID NO: 112528 - DNA, 577 bp, Zea Mays
tacaagataagtccattcattatgcgcaacagacacaattgtggcttgatgatcgcgacagacgaacattgtctacatggtttgtgaaaagtacgcaactcggcgattgcggtccgactcaacaagagcggtcaggttaagcgagagtgcgacatagcaatcaaatgacacagtccaattcgtgcgacatagatattgcgtcgtgttgctagagcgtagccaatgacataactcaaccgattaataacatagctcgatcggtacgtctgagtacccactatataattggagtgagagtgctcaacgcatcacaagtatttagagcaatataaaaatatacaatacaaccaacacatgtagtttaatattttttctgttcattatttattactagaataaaaaacggaaaaataaatcaatgaataaattagttcttgttaaaagacacacggaaatgctggcttcccagcgtttcacgggaccttctcctctcgtgcagcgacgtgtgccgcggtccgtgcaatagcgccgtgctgcccatgctcgcgtccgcaacaacagtcaacagaagactcac

SEQ ID NO: 112529 - DNA, 642 bp, Zea Mays
gcaaggcgaatgttgtggcagatgccttaagtcgaaaggcccagtgtaactgtgtaactatggactctaagatcgccactctgtgtgacgagttgcaagctgaacatggaagtcatttccccaggtatcttgaattatatctcagtagagcccactctacatgagcagatagtcctagcactgattggtgacaagggtgttcaagtcattaaggagatgctcgaacaaaaggtggataagtacaaatgctttcgttaagacagcaagggagttctatggtttgaagaccgattggttgttcctaagaatccagaactcaggcagaaaatattggatgaacctcatctttccaaattttctatccaccccggcagtaacaagatgtatcatgatctcaaatccttgtattggtggactcgaatgaagagggaaattgctaagtatgtagctgaatgtgacacttgccaaagaatcaaggctagtcatttgaaggtagcaggtaccttacagcctcttcccataccatcttggaaatgggaggacctcagcatggattttattgtgggtttgcccaacacatctcggcaccacgattctatttgggtcattgtggataggctaaccaaaatagctcatttcttg

SEQ ID NO: 112530 - DNA, 692 bp, Zea Mays
ttggtacagagggatgaggaagttgtcaagagaaatatagagagaaattgccctaaagttgctctgtcagggtaactgaaacgagctcgccatggtacagtaccagaactggatcagatcgccagcgtgacagaccctcaccgccggcgacctctctacgcaaaaatttgtgccgtcgccgtcctgattcgtgtgcgatatggagtggataacgtcggggagggataacccatacgtggcgccatctcccaagcccagtcggagtcttcaccagtggccaccgtgaccagtaaattttgccgcggtgtcgcccatgcctcaatctccctcactgtatctctttccgacgtggtaggcatgcgcttgcgatgctatccgtggccggaggtcgtctgttgggtcgccgtgactataaatcgcacggtggtccacggcgaggtgtttacctcttcaccagtgaaccgatcgcaaagccaaattcgcgctgcctctgccccctcctcccaaattgattgtgcaggataaaactagagtcccttgccgccgtatagtcccaagctccatcctcaatttcacccgagcacaccacgacgccgttttcccccaaattggtccgccgcaccgcgaagaacagcccgcccgtggctagcccactctggtgagttcctatccaattcaagtgttgtttccat

SEQ ID NO: 112531 - DNA, 397 bp, Zea Mays
taaatccaaaccctaggggtctatgtgcaaaattagtccactcttggactaaagtgcaaaaaccatgacaataaggtatcctaagccctttggttcacaaatatgtgaatttgcaagctaaactctgagttttggacttacttgcaaaagagccacatttgaactcttttgactaagtctgaatttcagtgtactatgcacatctttgtgaccttgtaacttctaaacaaaagggattctgccctaggtaaccacatcaatattgtagatctatggaaggagaataactttgctatagaactcatgccttggtaccatgaagaattctgagataaatgagcctgaagttggactgtccgactgcttgaaatctgaaattcatattaacagtgggatg

SEQ ID NO: 112532 - DNA, 565 bp, Zea Mays
caatctcccattttgccctttcctcatccacggctctaagactcatagtaacactagggctgcagccatcaaagacacatttgtttctatgttttcacaagatccaagctcccagaatgataagggaatcaagtccttttttggtgagtccattaacaatattccccaccaattcccaccagcccagatatgagccaacatccagttgaggagccaaagaatgcagaccaaatttcctaagcaacaaataccagaattccctggataatgaacaggtaacaaggagatgatcaatagtttcatcctcttgatcacatacggggcacttctcaggatgagtcagccctcttttagcaagcctatctgctgtccagactcttttttgagctaccagccaaatgaagaagcgacattttgggcaaggcccaagttttccaaattctcttgtgatgagggaaaaccacagaccccaaaaagaacccttcataagcagtctttgctgaataggtgccagtaggagtaatactgaaaacatgtctatcctcaacctcaggcatgggttctt

SEQ ID NO: 112533 - DNA, 426 bp, Zea Mays
acgtccgatgcttcctattcttttgtgtgatagggttggcttcaaccatttggcttcagcacaacgcttacctcaagatggcccgacactttggtctaactcttcttgagaaaacctaccttgagaatgtgacttaaactttcaacacatgaaagttctattcatagcttgaagtcattgctcatagctcgattagtatctcaactcaatgcaagtactctctccttcactttacccatggttgctcggtcgccaacccgtcagtggctcgtcaccttctcttagtccctcgagaatcccttttctttctcactccaggtcatattatatcttgaaacaacatttagaattcatttgaagtcccacatcaacattgtctatgtccaagtcatattccacatattgtccatcaacctttcaccacct

SEQ ID NO: 112534 - DNA, 410 bp, Zea Mays
tggtgcagatgtgtccgtggtgccagtgggcagagttttcgaattccttggcactggagtatgagccggacgatcgacgaccgtgcgtgtggcttgaggttgatttcccatggaggagttcgaggtgtggctcaggcttgcagcgggttgcggcttttggcgtggcacagcgttggcgacggcgcagttcatgacggcttctttcgcttcctttcccagtttgtggtggtctagtgttttgttgagtgtgttgtttgcatggtggtggtgttcgcttcggcgtgttactctgtcgtcgttgtgctgagttggtatggtgtcggcgtgttgatgtcccaatccaaccgcctgttgtctgtcccccgtcttgcggagtcggagctgctcgtcgcttgtgtcgagctcggcaa

SEQ ID NO: 112535 - DNA, 850 bp, Zea Mays
aaggcagtataggaagtcatcttcgtctgtcccattgaacactagtgcccccttcgggtatttcaattctctagcatagtgactagcttcataaatctcttctttagatagttttttccccgaagcatgacgcacaatgtaatcttgtatattggaaggtgcttcaggggcagcagtatcaatttcttcaaccgaaattggctctgacatttttattttttcggcttccaatgctgcctttgtaacctttgtttcttcggtttccaaaggttgttccttggagggctctgaaggcccagctttagcttcaagttgttgcttcgaagtttcagcaacaaaggattcagtagacacttcagaagttccaatggttttctttggtgttatgctcgaagatttaattgtctccaaaacatctaacacattaaccatccttttccttttcggggtcactgttggacccctctggcttttttctgactcaatctttgctaaaggatttaaaatttccaatgtttccgcttcttcagtcttcgctttttctattttttctgttgctggctcttcggccaactgtttgatttctggcagcagcgttgattttttagcttcgatggccgaagaggtctcaccggcgaactcaggcactgtggccagttcaatataacgtggccggtgtgtgagaacttttacccttttcctcttccgcgccggctcactaggagcggctgaagtagtttccttcgcagaggaagtattctttctttttttgaccacgcactggatagtggtagtcggggtacacgaacccaatggcgtcaaacactcggttcagtctcttcttttttcg

SEQ ID NO: 112536 - DNA, 383 bp, Zea Mays
gattttttggcaatcctactgactccagttctggttcttcggccgttttatccttggcttcagcaggactcttcggtgcttcggccgattcggttttctcttgccctgttacttttgacgcctcagccgattctctcttggcactggtaggaccggggcattttggctcagcggcggaagaggtcccctcagcaagcttcggcaccctggccgtttcaatgtacctaggccggtgcgtcaaaaccttgatctttttccccttcggtgtagcagagatggccgaagtagcaacttttcttttctttccctgctttcgcgagggatagcaatagtcgggatatacaaaaccaattacatctaaaactctatttaaccttttcttg

SEQ ID NO: 112537 - DNA, 636 bp, Zea Mays
caaaaatgccactcctgctgtgagagatgttgtgattgaggtgcatgtgagagccccccttagaacaagtgtggattcaaaaaactaaccctctcaggaacacacttgacaccattcctggcgtctctagtgacccccttcttagagctcctcaaccacccaaaaataaagccccctcccacaagcaaaaaacactcaagcgagaggtgaggttccattgtgagttttgtgagagggatgggcatctagattccttttgctttaggatgaagagagatgagcggcaggtttttaagtcgagtaggaagaacatgagccgccattctcatggtgttcatgctcggcctattcagagacatcctacgaggcttagaggtgctttgcctcttgctgctaagtttcaggaggagagaccacgtggtggtcatgcccgatggggtgttggtcgtgtcccatatggctagggaccccgtggcagtggctttggttcttacttccccagtggaccacaatttccttcttgtggtgatcgctaccctcccatgggaccagggatgactgatatttttcctaacactttacaggggcaaatgtcgtagtactggttttcttatcagtatcataaccctagtgttg

SEQ ID NO: 112538 - DNA, 731 bp, Zea Mays
caagattttgctatctttggtcgaaaggctgaaatccaatgaagctaggctattcgctcaagcagaagcgcacaaagctgaagtgcaagagttagaaaagaaagttgccgaagcaactgaaaattttaatgtagagctgacaaaacatgaaatatgtgaaatcgaacgatcaagggcacaaagaaacgttgacgagcttcgatagctaaaaaatgctatgatgtggctattaaatgcactaaaaatttgaagaacaacttttctaaagttggtgcattttcttcagagcagaaattcatccgtggtgacccccatggagttatccagtggattaacagcgaggccgaagcctttgaagagattcttagtgatagaggggatttttgtgcctttgctggtgcccacggtgtcgtgtctattttggaaaaggtcggctatgatcatgccaaggctgtagttcagccagattttgccttctcagccgacgatgttagaaacccttcggccgaagctactacactaggtgggaagttttattccgaagtatggctgaagggtggccgagaaatagctgatgaagccattagaaaaaatgataaagagactcatgacgccttagaagaggctaaaagagttgaagaagctgttgagcgggccagacttatatgtatatcctttatagcttagcttcgcaattttttgtagcttcggtactaacagatttgtatttt

SEQ ID NO: 112539 - DNA, 472 bp, Zea Mays
ggatgaccaactttatgtagagcaacctcgcaaggtggagcagacgaccgagtcccattccaatctgactggcataagagaaaggttgacctaacgatactggcccacgacagcaagacaagacgggtcatcaccaaaccacgtccgggccctaggtacaacgtcaaaaagtccctgacaggcatcaaacgatacatcatcatcacaagcaaacccccactaatgtatggggatagtcaacccagtagtggggaccttagcgtcagagtctctatagtaaccctcattctagaaggtacgcaacggataccccataccggtgtatgcctacgcacgtcgataggtgacgtagatgcttgacgatgggtgaggttgtgctacacacggccacaccatggacattagggctaacccatgggacctgcctcgcactacttcaaagatgtcagcagagaactcgctacaggaacac

SEQ ID NO: 112540 - DNA, 568 bp, Zea Mays
aagagcctgaatagggtatttgatgtcatcgactttgtatatccagactactgttatcctccaaggaagcaaggaaagaagaggaaagctgctacctcggcgacttctagcacatcaaagacaaaaaaggttaaagttttgacacgtcggcccaggcgcattgaaatggtcgacgtgccgaagctaattgagagggacgcttctattgcagagccaagttgctctatgtcaatcgaagctagaacaggaccgactaaagagccgaaattggagaaggcagcaaagcagttgaaagcactgagtccaccatgcacaacggaactgccgaagccatcaaggatccctgcaacaactcaaaggagaagaagaatggccagcatgctagacgctgttatggaatatgtgaagacatcaactcctgcttctactgaagcgcctagcacagaaggtgaaatttcaaagaaatctgacgaggccggcatggcacaaactgtttttgaaattgagcccccggaagttaccaccgaagctagaccttcggaaagcgcaccgatgaacctagaaaaag

SEQ ID NO: 112541 - DNA, 404 bp, Zea Mays
aagccaaagcatttgagaacaagtccccaacatgagagatgtatgcctttcttaggatgtgtgtcaccactttctccgaatgaattgaaactattttgtcaacattgtacaccaaaatgaatggtccatgcaagtttttagattcttctagctaggttatggtattgtaaaaaatatctttacgaaatgcatcaaataattacagtaattggtaaactaggtctgaaaaatgcataaatgcacacaacatcataggttggttcaataaacatcccattaaaatttaaaatgatttggagaaagtggtagtatagatccatcacaagcatgaacatctctcactcagtaactaggctctatgtgagagatgtatgcatgttcggaggatgtatgtcaccactttg

SEQ ID NO: 112542 - DNA, 280 bp, Zea Mays
ggaaaaccaagaagcgccaaacaactcatccaacagctcatcgatgattggcaccgggtacttggatttaaccgttagagcgttatggtgtctgtaatcaacacaaaaacgccatgagttgtctttcttttttaccagaagcacaggcgaagaaaaggcactggtgctatgctgaatgagcccggtctgcaacatttcagccacttgagattcaatttcatccttcattgctagagagaaccgatagggtcggatgcttactggtctggcaccttcaata

SEQ ID NO: 112543 - DNA, 1349 bp, Zea Mays
catctgctgtatttcaagaagtggatggagagagtgaagagagaaggaaggcaagattggaacgacaccaaagaacaatggagcgtgcggtatgctaacctataatcaatctgcaactacctgtcgtttagtaattataaaagtaactatctgttcatatgatatttttcaggcaaaagctcttgctgagaagaatgagcgtgacttgcaagctcagcaggagcaagaagagcgacatgtaagctctgtatcttatcatactgattctggactttaagtagataaatgaattagatagtttgattttttgaggtaatgtggtttctttttttcagagaattggtgaatcacttgattttgagataaagaggtgggctgctggcaaagaaggcaacctacgggccttgctaacaacgttgcaatatgttagtactccgtttccagtgtagatatatgattctgtttccctttctacttataaatatgtttttcgattgcagtcgctgcatgcttgatgggatcttacctaacttgaatggggtgctagtgctcattatggagaaatgcaccttttagtgtttggctgggtttcatggagtttctcatctgcttacctttgcgccaagtgacagttgatttgttagttgaggttgttttctagtggaaagcatgtataagtgttgtgtgatgtttctatgggctctaaatcctttcatttttgttaatataatgatacgtgttagagatggccaaccaagtgtatttccatgctcaaagggacaaatatacaacatacgtatgcaaagaagttcttgaagtagaggaaaaatacataagcatcctatacatctaatattgccctcaaacgggatctacaacattgagtttggagagtaagaatcgatgatgggctcgtgtctgtgcgttgatgaagaaatcagctaactgaacctctgaaggcacatggtggagcgtcacaacttgatcatgcatctacgatctcatgtaggaagcaacaacgccaatgtgcttggtgagctcaagcttgactggggatcgaacaatacagaacacaacaatgttgtcagaagaaaggagttagcgtagtagcaggcacactgaaattctcaagaagccattggaaccatgtcacctccacagctatacttgctatggcaagaaacttagtctcaacactcgaggggaaacaactatttacttcttggttttctaggcaatcaaggagccaagaaaaacataataagtcgagagagagcgatgatcatagattcagagtgattgcccttgtcgcatcagagtatgcctgaagatgaagggagctcaagtgg

SEQ ID NO: 112544 - DNA, 801 bp, Zea Mays
cgggggcgctgaccctaggggtgctgctccgagtggcggggctgaggcgcccctccccgttagtggtctttctctgatgcagtggatgggcatgaagctggacacctttgatggcagtggtactccggtcgaggcggtggattggctaacttatgtggaggataagattgatgtctttgagattgtgtatggtgatcatgttcgctttggcacacagctgctgaagggagaggctcaaatttggtggagaggcgtgcaggcagctcactcctctttaccaggagtcctgtcctgggatgttttcatcaggcagtttgagaggtggttctacccggtcaccttcctggagaatatgaagattgatttgcagtcctacaagcaagagaagaagtccgtcaccgagtatgaagtgggcttcaacaagatggtccgctttgttcctcatgtggcttacaatgagatggagaaggcgagccagttccgtcagggcctgaaaccttctatcaggcatgctctaggtgccttttcgttggtgtattttcgtactacagtggagcaggcattgggtgtggagatgcaacaccaatacaccatggagacacagaagtcttcgggtgtggatcagcctcgtggccatgacgcaaggaggggcaacactgagggaccagcccacaagaggggcaagtctcagcaccagcgccatcacccctaccgtggcaaatcctctgaatctggtacttcgggaggaagtactcagaggtatcgggttgttcctaagcccggtctggggctggtgtgttt

SEQ ID NO: 112545 - DNA, 366 bp, Zea Mays
ctagctatccctttggtcacctgaaccccgggatcagacctcctacgccaactcaggtgctcacaagtcagaattctcttaagtggggtagtgttcctggcagacttaaccatcttgccatcccaagggattgatgtgatcctaggaatggactggctaactaagcacaagggtatcatcagctacgcaagtaagaccgtccttctcaccgatcgccaaggaaaagcagtttcctgtcaagcccagccgcccgcaaacgatccaatgatgtttaatctggcagcagaaaacatgtccgtaatcgaagagtttgaggatgtatttccggaagagttgcctggaatgccaccagaaagaggagtggag

SEQ ID NO: 112546 - DNA, 486 bp, Zea Mays
gtttgggggcacgaatggcagtataatttcttggtgattgggggcacaatgcccgggtgtacgatgttcatatgtatgtaccatagaattcaggatcctcatatttcaatatttatttaatggattgttgtttactacaccttaacctagctgtgggcagagatgatgttgaagcttggtattatattgacatgacattgtctctgtcagttaaactaaagattcaaactgaacttaagctttgaagtgatctgttcacagtggtcactctaagctctgactcttttagatctatagcactgagccactgagctgtcatggaccagatttctacagttactagttgtactagtgtaatagcttgtccaatcagtttcttctgaaacaacgctacattttggtgagggatgtggactgtacaatggtatcatcattaagaatgctggttgcagtgggtgcttgtcatcaaaccatgggcaactgctg

SEQ ID NO: 112547 - DNA, 361 bp, Zea Mays
gacatatatgatcatttgtgtgtggtcaagactatgtattgtgtatttgtgtggttgagacttgtatgaggatgtgaatgaacaattgtatgtttaagacttatatattgtatggttaaaacttatgagcgaacatatatgtttaattgtgcgtggataagactatgtattttgtatttatgtgactggtacatgtttgtggatgtaaatgaacaatagttgtggttaggactcatttattatgagtttccgagttaagttaccattttctggataatttcgagatagtttgtctagatttatctgttttcgatacactagaatttatcggccataatctattttcaactttcctgttttg

SEQ ID NO: 112548 - DNA, 409 bp, Zea Mays
cgtagagtgagtgaggtggagggtggtcgtcttcgtgtggacagggctggcaagcgggaattgttgtccttgccggttggggcgagtgtgggtgagggggagttgcgaagtctttgagggtgaggagctgaggataatgctatttaactacagggagatgggtatcatcccgaaggttgaaccaatgtaaggtgtgatgccctcgttgtatgtgtgtaactataatttgtatgatgatttgtatgatgaggctgtgtgcctttgctgatccggtcgtgcccgtgggggacttgtgcgcttgatctagtgggcttattatgtcggtccggctgcacctgtagtcggtttttgcacggatagtcttttgagggagacttcgattttgcgcacttgttgtgctagtccggct

SEQ ID NO: 112549 - DNA, 316 bp, Zea Mays
gtaaatgttattacattttccaccgattgtactaatgtcggcgacgatgaacctgttgttgcccagtttgattttggtcctaaagaagtcacctttactaaaccaaaggaatcaataaatcatttaaagccgctcttcgtgcgcggtcacattgattggatactgattgctaaaatgttggtagatggaggggcggctgtaaatctaatgtcttattcattgtacagaaaattaggtaaacaagatgatgaacttgtcaaaaccaacatgaccctcagtggtgttggaattgatagttcgatcaaagccaggggag

SEQ ID NO: 112550 - DNA, 295 bp, Zea Mays
ttgaattcttgtcaaacaataatccaaaatgagaaatacctttcaagtagcgaagaatccactttactgcattccaatgttctttaccaggattgtgcataaatctgctaaccacactaacaacatgagccaaatcgggtcttgtacagatcatagcgtacatgagattcccatcaacattagaatgtggtatgtgagacatgtgttctttctcatcttcagtaacaggacatcgcctcgatgataatttaaaatgtgaagcaaatggtgtagcagcagatttgcaattactgag

SEQ ID NO: 112551 - DNA, 446 bp, Zea Mays
gcagccagagcaggatcaatagcaggaggggcagcaggggcagcactggaactccctgcctcgtgatcatgtgagcgaggaggcataggaggcggtggcgggatcccaaagtcatcatcatcatcatcagtagctgtaccctgggtctcgaactatctgaacgcctcatcctcggcctgaatatctgacactcaatctggcactgggatcgggtcctcaggggctggacgatatgaaccaaactggaggcgtgaggcctcgagggtgccctggaactgaggcggcctgattagctgcgcgaagatgtgacataggtaatgcgcatacggcagctgacggcgagcacggagaccatccaaaacaatgtcctcgatctcacagataagaaagtcaaccacgttaaactcagagtgtgagatcaaggcaccaagtagccataactgaat

SEQ ID NO: 112552 - DNA, 502 bp, Zea Mays
ttctctccttcgcaagaccgagtccccgacgatggatgacggtgtgggcgctccggcgaactcgtaccggccgcaatacccaacaatccacgctctaatacggtctatgcctaattctaaccttggcgctccactgggaatcaccaatttggtccgaacgccattctagagctcggtccacatacacccggggagcttgagactttcccgatgtgttcccgacgacacagtgcagtaacatacaaattgggagcacggtaagctttagcaacgtaccagggctcaaggacgacatctaggaaggcgggaggagggacaggacggtgggtcgacggaggtggtgctcacggcgatggagagaacggatttgggggaaattccaaattagggcgctacggtggacgatcgggcgtgaggagtggttcattgggtttgtaacaagtagacggaacaggctgaggcatcaatttatagaggacggtcgcgaggaaggttaatttgg

SEQ ID NO: 112553 - DNA, 646 bp, Zea Mays
aaacaaatataaatattcgagaaaagaggtagtaccatattcgccaaattttaatggctcaggacctcagaacaatgtagaaacatagcagtagaatctcaattggtgtatgcaactgacaaatggacaagctgccaaagtgagccagccatttgacatagcatctagcgccacaactgcagttacatctgagataaggcagtaaaacaacaagattttggagtgtaatcaatcatgcacatatccatcgaattgaacaccggcctcgtcccctgcctacctcagcaatacaacacctctcattcccctccacacaatatagtggagggaaaaacatttttttcatacgagttgaaacacgagctagccggtggactggtccccaagcacaaaaccagatgaaacaccgtgagaaagaccaaattgaggaagcccgtaaacattcccgcgaggaagcccctcgcccccaactctagaatcacagcaacgcacgcattcctctcgcgcaaagccaaaggtgacttgccagcactcgagcagccaaggttcccgccacagcccaaaataccaccccaaaaaaatgcagcagacgcaagcgcgcaagcagctcgccgcgacacaggtcaaccggggaagtgacgcaaca

SEQ ID NO: 112554 - DNA, 366 bp, Zea Mays
gagaaagacaagcttataattgccaaagcctacaacaaggtaaaagctaagtcattcaaggtctgagatctggcctgaaagataatttgccattgaggagcaggggccaaaagtttggcatatggtccccaagctaggaagtgccttacatagttacactggtaatttctggtaatgcatacatgctggaaaaattgcaaggtaagagcattaaatggttgttttctaaagcaacatcatccatgtatatggcaagatgcttctcacatcgaggtgtattattagaaagcatacactaggtgcttttgacttgctaagctccaccaaaagctaggggcatgtgttgagcactagattcggcatctg

SEQ ID NO: 112555 - DNA, 891 bp, Zea Mays
gacccaccccagcacagctggtgaaacactgggcgccagcacacgggaaccaggacggccactactatatctgcactgggaggggaggcactaatcagccatggctcatggcttccatcacgagtcgtcatggctgtgtggtgtgctagcccaggctggatttgcagtgcctgccccctaattcgctgcacgctatctggtctactcatccccaccacctcgcaaaagtcgaggatagcaatgaaatctggctggcgatttctttacttagcatctcggtgaagtgccggtataaccatctcccatacaatgatacaactatacaagatgcatgcgtggagtggggctgctgctgcccatttcccccctttaatttgcttgctgaggaagatcaagttgcattgaccgggagcacgccattggtggtggtatgctgcatcgctccagcgacagcgaggtgtaaaggggtggagattacatcgctggagaatcgatcgggaatccagacgcctttcttttctagtgaaaaccgatgcatggctttacaaaatgttgggcggcatatactacccaatactgctactctccctgtagtcttttttagactttgacccgtcgactgtcaaccgctggaggaatagatgcttgattccgcggcatgcatggaaagctttgtgctgatgcagcttttccttctctagctcgtcccccatatccgatcgattcgtttcagagtagtagagtttcttacattcgttcgttgtttcaatattgactcccaagtcccaatatgtatttaccggatctcctagctagctagactcttatttttcaattggagcctttcctctttttcattatgtgataatcatatatcattaggttgctttt

SEQ ID NO: 112556 - DNA, 315 bp, Zea Mays
acgacattaccagatattccaccaccactaccaccacaatgcagcacttttgtatccacactagcttaggtacgctaattttagaaaattctcttataacattgttgaacctagcatttcatctatttattattgcaaaaacatgaactgtatctaatgttaatcaaatgtccattaaacagggatcgggcatacaacagttcaacaccacccacacacatatatacctacaccctgagaccaggtacattttggaactcttgaaatatccttatgattttgtacatttgtataactaacttgttgatatttgca

SEQ ID NO: 112557 - DNA, 569 bp, Zea Mays
cctggattcacgctggccgtcacgattcgtgctcaacgcaaagtggataaccgcgggggagtaaaagatctagcggggagatggattgggtcgcgggcagtagcttatcggaggggcttggtggctgtgcgacatggccgaacggtcgtggttgtcataggtcgccgacgagctcgactgcgccacaccgtggtcctttaccacatagtcgtaaccgtggcatgctcaaaattactctccctacgtttgtatgccgtcgagcgccacggcgtgctcgccagtgcaatgtcttgtcaccgccgccctccaaatcccttccaaattcggagtaaccgtggccaacctctataaattgagcacctccctttctttgccccctcataacgaacccagtgcaactctaacctcggccggtcatccaccatagcccaagcgattccgttttcccccaaatcggttctgcgcgccaccgtggacacccctccgtcgacccatcgtcctgtccctccacttgccttcctagctaccgttcttaagccctggtaagttgctaaagtttagcatgcttc

SEQ ID NO: 112558 - DNA, 488 bp, Zea Mays
tggacttaaagtcaggatgtcagtcacctctgaatctgaattttgactgacaatgaactaggacaaactttgggagcgatttcgggtaggatccagtgaaatgttgattatggtgattataccaaaattaaagctggtgcataggacaacacctttgttacagatggattagtgagttgtcacataaaaattggagaacgaagcctttcaatttgctctgtcaggcgcactgaagagtgttcgtgatggtacagtaactaacccgatgccaggttcagtgcaccttgccgccgacgatcccattgcctagattcgcgccggcgccgcgattcatgctcagtgagtagtagatatcaccgcgggagtgaaaatatcagtggggtcgggattgagccaacctcaccgtaccaactcgaacggcaaagtttactggagtctgccacactatgtgctgtcgtaccacgtcacagtaagtcatgatgaacgac

SEQ ID NO: 112559 - DNA, 778 bp, Zea Mays
caataatcgcacgaagaaattaggaacaggcattgcgatcccaggacgcgagtttcatggaatcgacatactagatgattattgcagggtagaagtgacgacggtcgtccaaggatctgaggacgacatgctagacatccctgggcccgaaggaatcgagacacttggacaagccatctaaattttcatcctttcgcctcgaagggatgtcgatttggttgatccaccaacgtcgtcgtcgtctcatccccaaccatctctgcctcctcaaactttagtacctttatatccatcatcacctccacaatcttcccatgctgctcctcatcctctttctaatccaccttctccgccacaagcatcaacatttaggacaccacctccttctccacagccatcaagggattcacgacaatcaaagaaatctaaattccctctaccaaaattggtgtccacattcgagaaaaagaagagtaaagctactactgttggcacagctcgattttttaaagggattgcacgggacctcacgtcatgtactgttgatttggccaagcacgagaagtctgcagaaaaggctaaggaaatggccgcaaagataaaggtcccaactaaggcagattataaaaatgtgcctaaacaatatgtgctgggcagacctctactaactcttgagaaactgaggaaggtccctgctagtattaaaaggttgcatgactggtacatgcgtgcatcatcagttggcattgacgccattagtgtgtgatgaggaaatcac

SEQ ID NO: 112560 - DNA, 594 bp, Zea Mays
tcgacgacggcgaaatctatccggccgcacgacgagcaagtgggtacggtgaacctcatccgcgcccgagcccgagctgatccagtgccaagatctttactccgtcgtggttatcccctctccagcgaacacgaatcgcggcaacaacgtgaatcacggcgtaaagaccatcggtggcgagggggatacatccgggatctgattcagctactgtaccatgggaacccctattcagttaacctgacagtcgatgtttagggcaggttttctccaaatttgtcatggcaacataaccaatgctttgcagcaaagttgtagccctacaaaccatcttcacctttgctatagcatccctagccaaattccccttggatcatgattgaattcgagccctaagttcatgcaattcctctgtcagtctgaattcagactccaagcagtctgacagcccatctttaggtctagttatatccaaattttacacaacatcagtgcttggtcacttaataagaattgttctcctttcatagctctataggtttgatgtgttgatctagggcaaactcctcctaatttggaagttacaaagcttca

SEQ ID NO: 112561 - DNA, 642 bp, Zea Mays
gcctttgagtctctaaagcaatacctatccgacctggcaacattaacaagtccagacctagagataaccctactactatacatcgcagccttgcccagcgcagtcaacgcatcattagtccaagagaaggcaaaagacgacaaggctcaccaatgcctagtgtattttgtctctaaagtcctcataagctcaaagtgcaacatgacagagctagaaaaaatagcatacgcggtcatcatggcctcgcataagctaaggcactactttgaggcacacaaagtacgagtcacttctgataggggtctgagggagttgctcagaaatccggaggcgtccgctagaatagcaaaatgggcagcggaactctcagggtacaacatcaccttcaatcccaggacatcaatcaaatcacaggtcctagctgatttcatcgtagactggacagggccttcggaaccacagtagtgtcacacaaaaatagtctggaccatccaccgtgatggagcatggtgtcacgcaggcaccggcgctgcagcaatcattacatcacctgccggaatcaaatacagatacgccgcatgtctcagctttgcactcgagtcagataagtgcacaaacaacatcaccgagtacgaagtagtc

SEQ ID NO: 112562 - DNA, 720 bp, Zea Mays
ggaggattttgtgtcgcgggctggtctttcagtgcagaggttgggtcacccaattctggttagatctgctaatggctccattagtagctgttcagtttgtcagggatgttccggcattcttgctgatgaggtcttcttggccaatctggtggtgatttccttaggggcattcgatgttatcttgggtatggattggttatcccagtgtcacgcggttatatcctatttttggaagacaatgttattgcaggtgccgtcgggtaaggaggtggtattcttgggaagttccccgaagttcacgttatccttgttggcgcaattgcttcctgatcgccggtcaaggaagtcggggatctttttctccatggtggtggagggtgaggctgccttgcgggtgcaggacatccgggtggtgcgtgactttgctgacatgttttccggcagagcttccgggcattcctccagagcgtgatgcagcttttgagattaagctgattccgggtacgcaacctattcataaggtcccatatcgaatggccctaaaggagcagattgaattgaagcggcaattggatgatctgttggctaagggtttcattaggcctagcaggtctccatgggcttccccagtattgtttgttgagaagaaggataaaagcaaggggctgtgtgtggattatcgcgcttttaatcaaatgacaatcaagaataaatatccgc

SEQ ID NO: 112563 - DNA, 2304 bp, Zea Mays
agattattcttttgtatattgcggcatggataaccaagattcttactgggttggactaattgctagagaatcgatcggttctacatgcatgcaagattaatagccctatgaatgctttatactggttcagaaatcagaactggtgttaattttgctaggaatatcggattgattggattctatttttctttaagctttttctatctagacaggggaatcaagcacatccattggctctgtaagtattttcttttcttccaatggcctgggctctggtttcctgattattttctcggtagtgcaagtcagtacctgatatatactttaatacatttaaagaacaaggttcatattgcacgaataaagggttaggggtgagattggatgattaggtagcagtgcaattagtctgtttgactttgtgacaaaataaagaagaaatacattctcttgatcatgaaatggcagtaaggatagaattttttcattggttgagtttgtgcctgaaggctgacagtggatctatttggcatatttgtgctgccatggtgctttcatcagtctaatattatttttccctttacttcagggttgttatattcaaaatggagctaacttttcttgaagcatatgcagttatgcacatgtaaaatgagagcagtggatgattaggagataactagggaacctatacttcttgtgtttcctttttccttgcagaagaggtggttctgatctgtgcaatacttacccgaagatgaactacacagactgatttgcacacaatggttcccttttttcttttggggaataaactgtctccatacaacccaaagatgaactactattttttgttttatttttgacttttgaggccactcattcaaatgaattacgcatactgatttgcacaaagaatgatgtgtgcaaggcatctacatgttatctattttaagaccacttatcccattttgactatttttacgtttatgttctttttttcaattttttgtctgcatataggttgagtgtcagtcatcttgttcttccttatgtttgtccatgtccttattctacttcagttcaatgcttttctatagtgttgtttgctgttttatataaaataagaaggcccttacagtaaactaaaccaacctaggaggaactatatacattgcaaaaagaggactttagctaatgggggtgcacgcccatatctcccaccaactgagctaggctcaaatcctgtttttgtaacatataagattgatttagtagagtgctgatgaggtctggcatctactacattgtaatggtatctgaatggaaccaaagcattttaaagcatgaatccatatagttactttagatgatatagttgacttaataacttataatctgtagctatggtacattctcaactgtcttctttccaagacatttagaatggtaaagtggtatacagattttacagggtatctgttaatgaaaatctgcagttgtgagtgcatcacaactgtgtatatatagcatatgttgctctttgccaaatatcagggaaagtggaaacatctcaaaatttagtgataattaagactcgaaccttcccaaggagttaactcctttcacattcaaacaagataccatagagaagaaaaaacagatgtacttgtctggacaaaagtccatgcaaaaatgaagaaacatctatgttctcctaatctattgacttgtgcagacaaaatcatctcatacaagaggtgatgattgaagactactgaattgcttctgcattctaaaaaggataaggtacccagccttcatcgatttcatgtgcacaggctgcatccatgtctgcatcagcagactccgtcgcacctgaaggtaaggtaacttgtgctttcaaacaattaataagtttgttgtgtaaccaacctaggccaccttatagattgcctacccagacagctaccagagatattgggagacttagctgacagaactggtgatggtgatagctctgcttccatcactgctgattctaggtacagcctctgcctctttgtaccacaaatccaaagctgatttagaagcgtctcagcctttcttacttttactggattttgtgcatgttttcttcttttgtttcattcatgtttttctagcggtctgcaacatgaattgtgtgggagctttggatggttacagttcttttttgggaggaaggacaaaggtagcaggtttagtaggccttcttatctgataatagaaatatagttaataaataaatttgtgataaatgtg

SEQ ID NO: 112564 - DNA, 407 bp, Zea Mays
ggcgcagcagtcttttcgtctctttgcgctctgtgttgacgtggtgatgcgcccaacttgtctgcggatgcgcaattgcgccaggagtacaggtgtattgctcactagaaaacactaccaataaccccccccaatttgtcaggacagtagtaacaaacaactaattatggatgaaaaataatatcgatcgtcttccagcattaccaacatctcgtagtgtagccttgctgtaactgaaccctttcatcttactgttgcaacggttgtgcttagtttttgcatctcgtagagggttcgtgcttagtttttgcatcactctgtcattgttgctagcaccctcaagttttcatcaaggcaagtggctgtacatggttcccctgcatctagtctgcagagcacgttaggtg

SEQ ID NO: 112565 - DNA, 398 bp, Zea Mays
cccgttgcaacgcacgggcactcaactagtcaatctagaattgcaaaacaaagctctcctaatgaaaaaccttcacaaattttataacagagatgacactccttggatcaacataatctgggccaatcactaccgcaacaacacagtacctttagtgagactagtaggctcgttctggtggagggacattttaaaaattcgaagcacttacaaagagctcgctcgggtggagattgggaatggaaagacagctttattatggcatgacaactgggacgacatatgtaaatccgaaagctacccagaactttggtcgtttgctttcaacagagacatcaatatacaccaggcgagaacggtgggcttacatgagatgtttcacactcctttgtcagtgg

SEQ ID NO: 112566 - DNA, 393 bp, Zea Mays
gcaccataatgttgctgcgatgaatgtgggaactgtgcgtattgcgcagctctcggttctgcgtatgcatatccggacggtccggcataagaagtcggatggtccgcgacctggccaaacggtccgaaggtatatccggattgtccaaccgtatatggtgctacgtgggtagtctcatacccagtccgtctgtcataaagaactggacggtccgtgatcgggccgaatggtccagggctgtacccggacggatcgaccatatatggcgcgacttgggcagtctgcgcgtggactcgtgtagagtcggatggtccagcgtaatacattggccggttcatgccatatccggacggtccggcgtaagacggtggacggtccgcaacatatccggac

SEQ ID NO: 112567 - DNA, 622 bp, Zea Mays
acacttattcagcattgctatctgttactgacttgtgtgccacatatatatatttagtcagccttcctagaactccagctttctctcgagcagaacaggtactcctttgcaatcacacccacgctcgttggacagtcacaccggtcactgtttgccacctgcagtgctggtaagaacgttgtaagagcggggtaagacgcttcataatttgtattccaccaccagcaccaccaccctgagagatagttgtagggttcacattgtttgttgcctttttgtctctgttttgtgctaacaatgacaggaccaatgaatcaaatagacaaggacaaggggcctaagcttaacgacgatgagtgtgtctcttagctggaattgaaggagatgatgcgcgcgatgactgaagcttttaaaaaataccaggactctgcggcgacatcctatgagcagcttgatcgacgagttgataaacttgttacacgcatggacgtactggaggctcgtcccccaccaacaactccagccccatctcactctcttgtggacgacgacaacgatgacaacaatgtttatgcaccgctgccacaacgcttcgcacgtaatcgacaaggtatgggaggta

SEQ ID NO: 112568 - DNA, 702 bp, Zea Mays
atcgacttaagccgattgctccgttagtagggtatattggtcaccctaagctgagttagcatgttgatttcaagtccaatcaaatcgaagtcaaccgatagtcaagagtctgaatgcctttgaaaacaaaaactttattgatgatggagtccccgattacagagtacaatgttgcttcgagagctttttgaggccttgctaagggtaaaactttctaagatgctctatgttccatgagttccgcacttctgtgccatccatttgagtaagccggttttatcccggccaagtgacctctgatacaatgaatggcccttcccatagtggtgacaacttgtgccgtccttcccccgttagaattcggcgaaggaccaagtctccactgcaaaggatcggtgtcgtacgacgttatcatggtagcgcctcaaggtctgctggtatctagccgactgaattaatgtgttcaatcgctcttcctccagcacgccaatatcctctagcctggtagcttctgcttcaactatgttttcaaagaccaatctcggcgccccaaacatgaggtcggcgggtagcactgcttctgaaccataaaccatgaagaacggagtatttccatgtagagctcgactaggttgagttctcaagctccaaaccacatatggcagctctctgatccactttcctgcaagcttttcatttttg

SEQ ID NO: 112569 - DNA, 681 bp, Zea Mays
ggaagaggtggcaaacatcgccatccaatctacttcaagctcgcaactcttcaccaacatccacgacgactcctacactcctacttgcctcatggcaaaaggagacaaggtacatttgtttaatgatgattttattaatgatgatgaagaacaacttgctatgaaaaataagatgattaaagaatttggtttaaatggatacaatgtaatcactaaactaatggagaagctagataaaagaaaagcaactcttgatgctcaagaagacttgctcatccttgaaaaggagagaaaacctagagcttcaagaatttctatccaataaagatgagatgcttgaagttttgactaaggaaatatctttagccaaaataactatagaggataaagagaaataaatggctaatgtaaaaacctctatagttagtcttgcaaatgaaaaggatgcacttgaatcaagcttgtcatgcttaacagttcaaaatcaagaacttcaagtgcaacttgaaaactgcaagaacttcaacacttcatctttagtggaaaagtctaaggctagctcctcaaataataatatttgcaaacattgtacaaaatatcatgcttcttgttgtttgactaaccatgcaaggaagaaaagctcacaggttaaggtcaaagaaatattgaagaaatgctcta

SEQ ID NO: 112570 - DNA, 508 bp, Zea Mays
catgacaaccttacaaagagaacgatgaaacctctcattaagaatggcctcattctaggtaggatgctaggctgattccttagggtgccttcatttttgggataatttgatatgcatcggtccactatcctgtatctatagggatgaaaatggtcgtaaacggtcggtaaatgctaaaactgtttctgttttcatattttttttattggaaacgaaatcgcaaacgataactctgtaaatggaaacgaaaccgacattttggaaataccggaaaggaaagatcgatgcggaaaatacatcattaacgaacggaattaaaaatgcaatcgataaacataccagtatgaaaatctctcaacataatgagttcacgatataataagatcaaacttatcacaagttgaaaaacaagttcacaaagatcacaagtccatagagatcttaaattcacaattcacacgcataacaagttcacgtactcacatttcacaagttggcaagtttataa

SEQ ID NO: 112571 - DNA, 445 bp, Zea Mays
ctcgtgtcgtatagcacgatcgtcgggccgagtctcttcgggcctgattggttaccctgatgagaccgaactcggctcctgaggtacaacatttgtatacgttcgcgtgtttggttctccagcctagctctagcgatacaagttatgcttatttggatgactgcatttatagctcgacctggcttagatgatgcaaaactgataagcgagcctgactcgtaagatacgggatttatttgcgtttctctagagcctggctcacataaacctactgcagatcagccaagtcacgaagatacaagccaggatgcctccgtccgaaaaccaaacaggccgttcactgcgccgccgcagatcgcctgcgctaccatctagcaccgtcgggagggagcagatgggagtgtcgttgttggatcctgagccgatggccatgttagaagctaac

SEQ ID NO: 112572 - DNA, 400 bp, Zea Mays
gaaatagatggaagaaaaggttcaacgaatcatacataacttgaaagaggcacaagctcgacaaaagagttatgcagacaaacgacgctaacccttgtactttcaagtcaaagattatgtgtacctaaaagtatcaccaatgaagggtgtaacccattttggtgtaaaaggaaagcttgcaccccgatacattggtctgcttcctattcttgaaagatatggaccattggcgtaccgactccaactacccgaaacattgtctgcagtgcacaatgtgttcgatgtatcccaattgaagaagtgtcttcaagttcctgatcgaaccattgatgtggtggatgttaccttggaaccagacttaacatattcagaacatcccatttgagtcctggatcaaaat

SEQ ID NO: 112573 - DNA, 847 bp, Zea Mays
ttcgtaacaacagtaaccacccgaaattccttgccagccacctggccagaggatcccttgacggtgtatgaatgcggatcctcctaagaccttgtctccataaaacgagtagccaagccatgtgaatacttagttgtcgagagcaccacgtcggagcaatgagggagaaagagagagtgcacacgtcgtggtagtctccttttgtctacaccatcgttctagttttggctagtggtcgtggagattcgccaagggtttgtgtagcatgagtgctacgatgctgggcgagagggcttgttggaaccatagaattcctcatcgggatcgaggggcaccgtgaagctattgtatggcgtggatagcaccaccgacgcctcaaccaccggtaagtcagtccctatagagttattctctttctccgcattcgtgtacacagggtataggtcggagtgggtcactagagaataggggagcatacaccgacaaggggtgtcaccgtggtggatggacgctgctgcctgatacatcgagttggggaagaggggtctcttgtcgttgatcggccagtggactgttctgattcattgaagaatactgtttcaagtacatgcgatctagactattgatcgttgagcggacggttaggattttaagggcggcatacccgtttgttgattacaccagagtcgtggacctttgatcagatggcttgggttgagtgggggtgataccagttgtgtaacatttgcttaagagaccctgggaaacctaaaaatggcctacgacccaccacgcttgttccaacaacctaattgtttctagatttagaaccttaacaaaaagaaat

SEQ ID NO: 112574 - DNA, 482 bp, Zea Mays
cggctgtagagagggaagaagggggctacatgaaaggagggaaggggaccccctagggtttagggggaggaaaagaaacgatgcctcaggtgacttctgacttagcatccaacggcccacaacccttttccacatccatgcaccaacgatccacttttggttaacatttttttatctaggatgttacaatctccccaactagctttaggattttgaaggatccaataaagcgaggggacaactttcctttgactttaaacctccccataccacgaatgggtgatacttttaggtacacgtgatcaccttcttcaaactcaagtggtctccttcgggtatccacatagcttttctgccttgactgtgctatcctcaagttctccttgatcattcgaacttgttcttctactttttgaataatttctagtccgaagaactgtcgctcactagcctagtcccaatacaaaggggttctatacact

SEQ ID NO: 112575 - DNA, 660 bp, Zea Mays
gagaactctgcatatggtaagctcttatcccaactaccaccatgtttaagggcacacgctcttaacatatcctccagcacttggttagtcctctcggtctgcccatcagtttgaggatggtaggccgaactaaaattcaactgtgtgtccatgcactcgtgcaacttcttccaaaaccgagaagtaaactatgatcctcggtctgacacgatcttcttaggcaccccaagtaaacatactatccgagtcatatacaattctgctagcttggatcccgtgtaattagtcctcacaggtatgaagtgagccacttttgtcagtctgtccacaatcacccaaatggagtcataccctccaggagtgcggggtagtccaacaatgaaatccatgccaatttattcccatttccacttgggtatcttaagcaggtgcaatagtccagctggtctttgatgtttggccttgactctttgacacacatcacacttagccacatgtgcagcaacatctctttttagcccatactaccagtacttctgcttcaaatcccgatacatcttagtgctaccagggtggatagagtaatcagaatcatgggcttctttcaatatagtctcatgaaggctatcaatctccgtgacacatatctgatccttgaac

SEQ ID NO: 112576 - DNA, 304 bp, Zea Mays
tgagcttcgggaatcaaaagaaagatattacgaaaaatccttggattgtgccaagaagctgaaagatagttttgcaaaggtgggtgcctactcatccgagcaaaaatttattagaggcgatcccgaagggattatcgaatggatcgatgaagaagctgaagcttttgaagagatcctcagcgtccgtggtgatttttgcgcttttgctggtgccagaggggttgtagccatttttgaaaaatctggctgcgaacacgttaaagctgcaacccaaacagaggctatttttactgtggataacacg

SEQ ID NO: 112577 - DNA, 695 bp, Zea Mays
cgaaaatgggagcgggttgggggagtagtggaacctggagtggtggaggtggtgggtacaatggaagtagtggatggctctggagcgacaggagctagtgaagtgggaggtggagtagagagtggcggaagttgtggagggagcagtggagcgaggacgagatgcgggcgacgaactcgataggctatctgatctgaggaaatctggagctggcctcctcgctcagcctgctctgctgctgctactgccgctgcaagtgctgcacgagcggctctgtccatacatcgcttctttctgtcctccagctgttcaaggtaaactgtcttccctttgacctgcctgaaggggcgaggagggtcatcgttgtctcctcccctaatgatgagacattctttgtccgcaccatcctgaccggactgctgcacgatagagtgaaaagataagcaggagtagagagcagccgataggatctcaaatgaagcgatagctacctggaaacctcacgagagagagaaaatccaggcaggacaggagacgggcacgagggcaggcgagatcactgaaatgacagaagaggtgagcacatattagtcacatagtcataagtatataaaatgagaataaatacatacacatagagttaagacacaaaaactgagtgatttggagaaaaaggggtcaaacgacgcgagaac

SEQ ID NO: 112578 - DNA, 621 bp, Zea Mays
tctggaggtagatgacgaaaagatcaaagttgtacgcgactggatgcctccacagaatgtgagccaagtgagaagcttccttgggctcgttgggttctaccggcagtttgtaaaagactttagtactatcgctgctctcatcaacgaattgaccaagaaataagtacctttcaaatggggagaagcacaacagaagacatttgaagaattgaagacaaagttaacgacagccctagttcttgcactcccagacttcaataagacatttgaaatagaatgtgatgccagtggaattgggatcggaggcgtgctcatgcaagaacaaagaccaattgcctacatcagtgaaaagctaagtggtccaactctaaattattcagtttacgacaaagaattatattttcttgttcggagttcggaaacttggcaacactatcttttttctaaggaatttgtgatacattcgaaccatgaatcattaaaacatcttaaaggacaactaaaactaaatagaaggcatgcaaaatggtgtgaatttattgaatcatttccttatattgtcaaatacaagaaaggaaaagataatgttgtagcagatgctttgtctcgacgacatgcttt

SEQ ID NO: 112579 - DNA, 311 bp, Zea Mays
ccattagacttagcccaagttctggccaaccaaacccgactcattgaggtcctcaccagaagccttgagaaccagcgcccgaatggtggaaggcctcaggataggatgggagattttctaaggctcaagcctcccacattcgctggatccagcaatccgctcgacgctgatgactggctgtgcacaataaaaaggaagttagaagccatcggatgccctgagaaccagcgtgttcatctggctgctcatcaactttctgggatggccctatcctggtgggataccttcagcgttgccgtcagagatgctac

SEQ ID NO: 112580 - DNA, 335 bp, Zea Mays
cggcaatgaagaaaaatgttctgttagtacgtggttgatgacagtggacctactggacatgagggggaggggtgtcgcgggatcgaggatgaaccctagcaacacgacatcacaacggggtgggtaaggatggacgcgaggtgcaccgtaccttacgaagatgcagacgcgatggttgggacgacgcggaaccttgacgacggagcaagggcggcggcgtcactgcggcaaccatacggacagaggaaaagggtgaaggaaacgcggcaatgcaaggagaagatggtggggacgacaatgggaggagggattcgtacctgcgtacaccagcggcg

SEQ ID NO: 112581 - DNA, 470 bp, Zea Mays
actggtggcagcagttgtgtctcaatattatgagacaccatccctagtgaataggttgtattctgtactacacaagatagcaaaaggggaggttctggtggctattactaccttggtttactctccaatggttgtgccaggtcaagtgtggcagccatgtctaaattcgttgcatctaacgcaagcgatggatgaggagcttcatctaatgtcacatatatggcttcattatcggctgagttttgcaatacatgtgggtttgcagtctgcaccagaggtagagagggatgttgtagttgtgttaactttaaattttcaaaccccgaaagttaggtacaaacaataaaaaagcaaatttcttgttccataacacacaagataatcatgaatgcaacatatgcaactgcttaatcactaagataccccaagtattggtgggtgccaaagtgacataaattatttaataaaat

SEQ ID NO: 112582 - DNA, 353 bp, Zea Mays
agaagaaggatgcgcctgaaaaagctagatcgcctattcccgaagcaccgtccgaagatcctgactttattatccgacatgcttcgagaaaaaagctatcagacgaagaaattatggaagccaagcactatgcccgggaactgaaatacccgaagcgggccttggtgtacaatggcacagacgaagatgatttcctatactgtattccagacaataagaaaatatctgtctactgggagatggcaaaaaatatgggttttccaaagcttgaagctggcctctccgccatgtcaaaatatgatcttgcagacagccttgcatacaatagtctgaaggtacggaagtgatgaact

SEQ ID NO: 112583 - DNA, 309 bp, Zea Mays
ttcacacttcgggtagaagtgactcctaggcccagctcccttataatgtgccccttgaactataaagggagggcactagcgatgcagagggaggtcgactcacatccagacccacgacaagctctcaagcaatacaactcacaatagatgtagggtattatgctctgggggcctgaaccactctaaacccttgtgttctttagttaatctactcggtcaggcaaacctctaagtccactcctcatcggaggatcaagggcaggtgcactccaccactcgaccagaggaaatatgcctccgacatgggcg

SEQ ID NO: 112584 - DNA, 420 bp, Zea Mays
aggatctgtacgagtttcgattggcatgacatgacctaattctatggcggaaggggcagtttctgcaccttcaataagctttggcacatcggccatctcaatgtgtctcggtctacgtgtgaagaccttcactttcttcgccttcgacgcactagaggatgccgaagcagcaattttcctttttctcccttgtttccgaacaggaaaacagtaatcagggtagacaaacccgataacatcaaaaaccctgtttagcctctttttccctcgagagccaaaggttaccatcatagcttcgtcttccgccttcgagtaggctccaagtagctcaccactagttgcctctatagcatctagctagtcatcatttggttcatcaaattagcttctgtatcggaaggtatacttgagatagaccaa

SEQ ID NO: 112585 - DNA, 394 bp, Zea Mays
ccccaatggaaaatacatgaatcatgaagcaaacttaagtgtcagcttgattgttgttatgggtacattactcacttcagctctgggacccaggttcctagctcattaaccttgctacttgaactatcagtttctttccatgttcctcacatctggtctctccctgtgtttgtgtgtcagggggtggggtgctatgtttctcagtttgttgccatgttcctcaccatcatcatcatacgaaacttgctttccaggccacagaacctctcaatctttggcaggatgagcctgttagacaagatgccaaacataaaaggatttggttggaatgtgttcacattgaggattctcatgggcaatatctatggacgtagctgaaagagtgtgaatgtgt

SEQ ID NO: 112586 - DNA, 433 bp, Zea Mays
ttgttggctagtagaaatcagacctgaagaccttcccaactagagtcctggatgctacgtgtatcctgcattgcccggcgtggatctcatctagtagttgcttcccagtggccgaaagaatgcacttcatgaggactcctgttgcgccccttctgtacagtgcttccccaatgagagtgtagtgagctgactgccttgcgatgcgttctgctgcagttttgtcatccggcacctcttcattctttatatatctgatgattggctcccattagtcatcagaatctgactctggctggctcagaacattgcactcttctgcccgatctaaggaaatacttgggcatggtacttcttggacgaaaaccccaggtgggacctgggtccgactggatcctagtttgacaatgcgtctgctgcctcgtggcgatctctc

SEQ ID NO: 112587 - DNA, 348 bp, Zea Mays
cagaaactcctccaagctgtcctccagaataactctgttctccacacgaatgcgagggagatccacaaggatttcctcgactaccactgggtagacgagaacttgctgtggcggagggatgtagttggtgttggtccaggtggtttggattgtacgaaccatgtacaagagaaaatgtcaactcagttgaattttaaagatgtaaggttaataaaataattttgtaagaacaaaattagcatgttttgaacagtctaggctttctatttctaactagtctaacaacctagagttagcatagctttgataccacttctgtcacacccggttctgggggcaaaaccgaat

SEQ ID NO: 112588 - DNA, 462 bp, Zea Mays
tttttatacttaaaaattcatttcttaaatagatttcctgattaattccctgtctggaccgcgcacataaatatctaaaaggccaggggctttctcgaaagatttacccagatacagagaacagtgcccgaggacggtgggttatttattaacaacttcaggggctcaattgcatgatgggttggctgaatgggtatgacaaactgtgtgccgggagatcgtgaatcaagggctcagattagaagttcactcatctgaactggtatgtcgtactgaccgcacgatcaaagatcgacggtccctcccatgatttaatctatgcccctggatcctaatctggcggtcctatttaactgagccgaaatggtgtaattgctccgatctcacgcgcccgttcaggatccaacggtgcaaattgatccccaacctcgcgaccgtgcccggtggcgccgccggtcacac

SEQ ID NO: 112589 - DNA, 438 bp, Zea Mays
ctggaatgtaggtagtgggtggtttctaattggttagtaattcagaattatttgaatttcatgggtggatagatttacattttatgttgtgttttggtataccaagtgaaatattgtggccctgtttggatctctccatataatcattatctactaaacttttgttgttaggatccaaacatacccaactaataggctaaataattgtgttactgtggccactagatatttgtcacttcaaggttttgaagcagctcacgttatagcttgtggagcagaagggtgcaaacgatgaggtactccatgctatcttgttttcttctccgttccatctcatgtttcattagtgattagaactacaatcatcaaatgatggatttgactagacttgttctacttgtatttttctgtgtgcattgcagaacatggaggtttgcg

SEQ ID NO: 112590 - DNA, 530 bp, Zea Mays
cagcaatcaataaatttcagctcatatataattcaagaatcgccacgttcgagagacttgaattactctaacgctttgctatctgttcgagctaagacaatcaatttagaaccaacaattcgacttgcaaattttattcaagtcatttagtgcactaaaattactacaaccaattaaccatgcattcttcacgataatcactcaacaatttgcgttttaaattagacatcacatgagcgctactacctttttacctgcgaccgtaaccatacacatttcgaccacaacaagcaattcaccgtgactacgagcttagcccaaaatcatctacaagtctgctaacccattattatagcactctgagacacaatatgtatatagcaatcacttaacgaaatcgactcctacttaacatgagttggctaatcacagtattagacttagcgaaccattttagacatcgcaactcaaaaatatgggttggagcagattaattagtttttcttaacctttttctcaactcaaattag

SEQ ID NO: 112591 - DNA, 629 bp, Zea Mays
caaagggttgcttaaaagagaagcaaaaggagtttgcttagaagagaagcaaagagttgcttggagaagaaggaaataggttccttctaggctaaggaaactactcaaagggaggaaaaatctcccgcaggatttgccggtgcagagaacgagggaccaagggaaaataataggaccaagaaattgatttggtgtcattcggaaaaattattcgcgcactattagaaaacaaatttttaactcaaggttttgatcgacttttggatttttagttgtaaagggcaagttgcgatgttttttttaaatcattgccgatgttggtttaaaaatttgatcggattcagtgatatcaagttgattcggataaaaataaattataggtcgacacattagagattccacttgagaatgcgggttttaatttatatttggacatagaccaaaaatcaagaaattggattcgggtacagatcaaacaattgccaggagttcgaataaatgagtttggacgagatttgcgagaagagattgactttcgaatttgcattcgtgtcaacaaataaaagttttaacaggctccaaatttgcatttctcgagatcaaataactccgaatttggtgaaacgttt

SEQ ID NO: 112592 - DNA, 356 bp, Zea Mays
ctcaaatgaaaaaggaagacatcaagagcaacaacacctacttggatatgaaatcttcaaaacattcaatagtgtggttgtaagcattcaaaaactttttattatgagaatactaggcaaaaattgtttattgcaaatcttttaagcctttatcgagataaatagtgcttctccctatttgcctttaaaattgtgtgcatccaccctgataaatagtgcttctccctatttctttctttcttaatgcatatctttagggggagcctatttctatatctttgttatattaagactagcacgttatcttagtaatctcatatagtctcatgtatgagaacaagtttctcataaggcat

SEQ ID NO: 112593 - DNA, 328 bp, Zea Mays
ctcggcagcaacttcagccattgggttggcccaggcacaactcaatagaaactgtgtcttgtaaccgaccaaatctaaaagccggcaacggcccaaccgcccaccccactcaaacctagtgacctagtccatctcgtcgctgtctaaaacctaaaccctaatgcccctcgagtgaacgcactcacgcctgtcctttttctcacggcgtctcgtgaacctcccgcgcctccatccttggtccttccacctcaccggagctccaccatccgctgatcgtcgtccaccgcctccgtcgacccgtggtcctctactctaatcctcttgtcct

SEQ ID NO: 112594 - DNA, 449 bp, Zea Mays
ctagaataacaaccacgagcagaatatataactcaaccaatagagtcatgatgaattgtataacctatctactcccacctaacatcaaacaaagtttgatctacaccatgtagtccatctcacccataactatcttaaccatatttccccaacttcgatgatatacactgaccccgactcaataagaccaagactggagaagaaaagatcaacctcgtcaaggaaggagagaagtcaaactcgatcttcagatgcattaccacccaacaaggagtcctttctcaccataagctatcttaccctagctattcttgccctaacctatctatctcttatatcctacataataggtggctagaaacccatgctttcctaaatacctatttattagtataaaaaacttttcaatattgaactaaaagacaattacaagcaaaactttctatacc

SEQ ID NO: 112595 - DNA, 280 bp, Zea Mays
gaccatgtttccctttccttgatttgcgttcccagaagtctattgaaagttggatttgttcagcttcggataagggcagtctttgatgaaatgcccagactttccacaattaaagcaaccacttgaggaactgggaagggcagggaaatgagaaccaggggaactcgactgattgttctgggtgggggcaggagtgggatggatgaacatgggttgcctaaagggatatgtgggtggacaaggagaagaacggtttgggctgaagggaggaattatcaac

SEQ ID NO: 112596 - DNA, 288 bp, Zea Mays
ttgagaatgaaatctttttattaatgatgtattatcccattacagaatacaatgctgccccgatagcttttgaaatctcgctaagggtaaaacttcctgagatgctctatattccatgaattccctattttcgtgccatccatttgagtaagccgatatgatcccggccgagtgacctccgctactacaaatggcccttcccatagtagtgacaatttgtgccgtccttcccccgttagaattcggcgaaggaccaagtctcccactacaaaggatcgatgtcgtaca

SEQ ID NO: 112597 - DNA, 659 bp, Zea Mays
cctatgcagccctttgaacaaaggaatgcttcgcaacaattcctttgaaattcctatggattgagccataaggaactttggagaaaacaaaatatgagctccaacctcattgatttgtttcctatgtttttctacattgcttacaaaggaagcttcctgaactaccctttattctgaaaccttgtaggatttaaagtgttaaggcatttcggtccttttttcctattcctgtgttttgtaaatcctttgttccaaatgcagcctaaactaaacaatggatatttccatgcttcaaggaagtcccaataataataaatttgtgttgaacaaattaatctcgactagctcaaaaaaaactatcaattagcagtgtccgaatagagccatcacatagaactagttttgcttatgcaatttcaaaagtagacatctttggtgaaataatcatctcacatcatccagaaaaataagaaggcccgtcataacacgactttggaaaagatgcatgtcaaaaatagaaatggcacatgtattaaaattgcagaagagcaaacatagatatgtgagaaatttggatttttgtgactccaaacaatgttcttcgtattgttgccattcataacattgacttcacagaaataggactcaacatgtcacac

SEQ ID NO: 112598 - DNA, 470 bp, Zea Mays
ctttggagctttataactttcaaaatagtgagaattcaccttagaacacgacatcaactttgtaacactatgaaaggggaacaactttgcttaagagtgtaagcatggttgttatgaagaaatggaagaaaaacacactcaaagtcgagctgtcaggttattggagtctgaaaattcagactaacagtggtactgagtcaactttggagctctgtagattgagaggttcaaagaatttgccccaagacaatatagcaaagttgtagagccattgtagaggaacaactttgttataggtgtttgggcatggtgccatatggaattgggagaaaatttggtttcaaatcgctcggttaggccaactgatggagggttgccatggtacactgcatcgggggggaagataaggatcagcccctcgccggcgataaggatgccaccgtggctcgggataggtcgtcggcggccgc

SEQ ID NO: 112599 - DNA, 472 bp, Zea Mays
gcagcagtagcccccaccggccaccggagcacagaaaggtgggtggtttcaaccgtcctcctacctatctatccaagagacgggggggaccagggccacgcgcaagcagccaagccaagccatcatacgctcataacaggttgcccccagattatcctgattccctcggcgaattatgtgcaggcagtcggcagatggtgcaatccaatcccctcttccatgtcatgtcgtgtacagtacagccagtgcacaggcggacaggcctcacctcaatcataaaaatcgcctctatctaaccaggttggtgtcagcagccccccatccgaacccatggactactagtctaatcaagcttgatactctgctacatcgtcgttccaaaaacaaaaaaaaagagaaattataaatcgtattctcagcttatgcatatttaaagtcatatataataatatatagtgtttttttttcagaa

SEQ ID NO: 112600 - DNA, 315 bp, Zea Mays
ataacttgtacctttgagactaacatgtttgcttgagtggttttggtgtagtctcaaaggtgaatggaaagggaaatggttgacttgaacaacgaaaaaggtttccactgcataacggtatcgtgttcaagttgtccttggttttcaatgtcttcttgcttttaattcgcaatttttggtgaggcaatgaggtttaaaggccactagtttctctgttttggtgcttaatgtcaaagggagagaaattaaggccaaagcaactggatcaactaccacttgtgaatttcaaaaattattgtgctagtacttgtcttt

SEQ ID NO: 112601 - DNA, 635 bp, Zea Mays
tgcgtgtgtgctgcaggcgaattactgccctggaacgggggaattcctcgtcggaatccatacctccgacgcggaaccacttgcgctgtggtctgccttgttcacctcacgatcgtcggtaagagctatcccaccatctctgcctcatctcctcttggcgtaggactggttcattacgaaactgcggtaaccagtgtgctggccatgggtcgctggagagaaggggggctccgtcgttgtagcttgtcatcgccgcgggtcgggtttagccgccacgtgtagtcggattatgggtggtgtttggtaatcgttggtccgtccaggaacggatgagattagattaagtttactgattggtgagggaagtcctagagcgttggatcaagatttgtggaccacgatcagattttggaagattaaatccggaccgctgatctttgtatatgcggttcacgttgcgtacccattcggcgtgcagagatctaatctccactggtattgcattatccaacggcggagatcaaaccatacctcttcatctcggcatatttactaaagaaaccctgaaattttaggaaaccaacccgccatcgccatccactgttcgctgagtctagggaatcttacgctgtggc

SEQ ID NO: 112602 - DNA, 762 bp, Zea Mays
gatccggtgaggtttggggcgcctggcgaggctttggtgcgctctggcggggtctgccgccgcgggtgtgtgttgcgccgccgttagtcactagcgtgaggtaggtggcgccagcacgttccttgacctagagatggacggctacagtattgtttggtgcatctgttcggcggcatcgtgttcgggtctaggctgggtgcacgctggtgaaccatcggagaaagagagagttccagggagagcgcggcgtctaacctgggcggaatggctggggagaagtcttaggttgaagatgatcccggtccgttggttctcagatgtgtggatgagagatagtcaagctgtagtgtcttcaggattaaatctgggccgtatattaggaatccgatggtgtctggtgagagagggtttaaaatagttcgatctaatcgtgatcgttcacagtggatcgggcggccgagaatgcgccatacccccttcgtgggtcacttttgttaaagaaccctcgggcttttagtgaatcaacccgccgtccagtgcacagttccctgagtcttagatttaattgcgccgtagcccctgcgctttgcagtaattgatgcgaaatccagagacccaggaaattcaataattaaatgtagaaattgatttttatgtataaataattgctagaaacttgatttaatcatagaaaatccattctagctccaaattagtatattccagttcctaaaattttgtaataatgttgtttattacata

SEQ ID NO: 112603 - DNA, 430 bp, Zea Mays
cccaagcaaacccatcaacctcaagtcatccaagtcttgaagaaaatcatcaaccccaaaggatgccaaccgtggtagaagatgaacacgaaagtgttaatggtgaagtgcctcttgatcaagtggatgatgatgaggagcaaattcaaagacaaccatcagtgccccatcctcgagtccatcataccattcaaagagatcatctagtggacaacatcctgggtagcatcaggagaggggtaacaactcgaccccgtttagcaaatttttgtgaattttactcgtttgtttcctctcttgagccacttaaggttgaagaagcgttgggtgatctggattggataattgctatgcaagaggaattgaacaacttcacctggaatgaagtctggtccttggttcaaagacccaagcaaaatgtgattgggac

SEQ ID NO: 112604 - DNA, 545 bp, Zea Mays
taacttgatgtaacccatgggaacttcttttgtgggataaaaatggatggttttaagtttcaaggttatgattcaagtttcaccctgttcagttccaagtcatgaaatgcgagacaatttggaaattaagatttttactccttactcattattcattaagtcacatttaacaagaatggatctgttcgagaagaggtcttctacgattgtgccaaatgtggggcggcctcgtctcacctaactctagcgagaactgcgccaacaaactctaaggcacgaggatctcaactagcttccgccccacatagaattgcacctgcgtcaggtgggcctagggtcattgcgacacatgtggctcggcagactgaggctgcacctctatcgcgatggacccctttgtccacatcacccactcaggcatggactcggatcactcgacgaaaagaaatgggtaaccccgacactggcgtggccgtgggaacaagaccaacgactatgccgaccattgcgctctcatgggagatgactagatcatgagacgccgc

SEQ ID NO: 112605 - DNA, 676 bp, Zea Mays
ctcctacccaaggttggcctcgggcgaaacagaatagtgtctcccgctcaaggttggcctcgggtgagatggaacttcatctttcgtctgaggttatcctctggcaagacagaacaacgtcttccactcgaggttggtcttaggcaaaacagaactacatcttctgtctgagcttggcctcgagcgagaaggaactgcatcttctgtccgaggttggcctcaggcaagacagaacattgtctcccgtccgaggttggcctcgggcgagacgaaactgtgtttctgtgcttgtaacaacctggtggatatctatctctcacaatccccttagggtcaagccaatttttagggtaattggcttgagacaccaaaaattgaattgtgatatttgattgtcttatgcttttgagtgcatctttgtttcgcctttgcatccattgggtgtagccccaaacttcaagttgacttgagtaacaatcagcttgaaggtccaaaatctattttctgttggtaccccccatgcagcccccgagcatcaagctaattaacataatcaggttgaggatcaagcaacttattccttcgagtgtcttggtgaggtaggcggcagcactcgagctcacgaagtggttggcaaggtgtacgataatgcagcccccgagctgacgaggcagtg

SEQ ID NO: 112606 - DNA, 321 bp, Zea Mays
ttgtgggtggtattcaaggaattgatctgctggtattattggattcgggcagttctcattcatttcttagttcccgggtggcctagcaccttacatgattaacccctatgaccaaggaattgtctgttcaggtggccaatgggtgtcaaatgcagtgtactcaacagttggtaggggctgtttggtcgttggggcagtgcgagttccagtccactttacgtgtgttaccactcttgacttatgatcttattgttggtatggattggctggagcagtttagtcctatggaggtgcattggactgagaagtgggtggtcatcc

SEQ ID NO: 112607 - DNA, 330 bp, Zea Mays
caaacatgaataaacaaaaattatgaaacatatgctattaacaatccaagaaatgaagatgatgttggagatcacaagcaacttcatgagcatctccaggagttccttatccaaacttttatagtcaaaatataggtttatgcaacaaaaaatcaccctccagcagcatccctatccaacatcctatatttaatcgtatcctaagtcaccctcactttccctcaaatatggtgtcgagaaattgttggaggaaacatttaggaagggatttttttgtcaggatgcacctatacggtgacataggggaattaagtttacactaacaaaatt

SEQ ID NO: 112608 - DNA, 365 bp, Zea Mays
atacaaacatgccaggcagcttcaatacggtgtgtacttacataggcacaagagacttggtcaaggagcagattgcttatagagtgtggccacatgcaaatgggtgggaaatgccaaaggaggctgctgctggctctagcccaggtggtttagtctacctgaagtataccttcagttataggagccaatttaatgaaccaaattatgactggctaaatgccatagaagcgactagtgacgagctgcttggagcatattcaaaggccaaagatgaagccatgacaactgccttcggggctcgtggcaaaaagagattaaataaagtgttcgatgttatcggatctgtgtacctggactactgttat

SEQ ID NO: 112609 - DNA, 325 bp, Zea Mays
gcaccttatgagttgagcagatcttcggcaaatggaatgacagggaagatgcgttgagagtgggggtgggttgagaaaaactggtccatccttttaataggagtcacaacgatacccatggggaagatgttgggtggaaggttgggccgaattaggaatgcgcgcatggatgggggtgcggataggggcatggtgcatgcgcaagttacctactatggaagggggccgcctactatggaagctccacctgtggcacactaacgatgtgtaaggattgaaggtcgcctccatctatggaaggagacgctgaggttggaaggaggcg

SEQ ID NO: 112610 - DNA, 422 bp, Zea Mays
tcctgccactgtcttatggcgaagacctccgagagcactttgtgtcaagaaatggaaaagctaaacctggggatcattcaacaagggactctgagtcagttaaagcttgagtcaatcattttgcaaagaataattgatgctcaaaaagataatctgggtatgaagcacattcgagagaagataagggcgggagtagccaagtgttttaaggaagacgatcaaggtgtgatatggtttaaaaaccgcatagtagtgccaaagaacgaagagctccgccagcaaattctggatgaagcacatcttagtcgttattctattcatcccggaagcactaagatgtaccaagatttaaagcaacattactggtggaccaagatgaagatcgaaattgcacgctatgtggctaagtgtgacacttgcag

SEQ ID NO: 112611 - DNA, 529 bp, Zea Mays
cttttatacagaataggataggaaaccagaggtgcttgtaccaaatcagaaatactactgatattatcgaaattacaattcacttgagtaatacataaattatccatgaagttatatcccaaaacctgatctagctcttcaaatgcatatatggttcaacatgagcattgcacacctaatctgagtcctcacatgtaaaagatttgtcatgggactcgcaggccgggagcacactgccaaacaacttctacattgatttgtgaagaagaaaaaagaaaccaagactgagatatgaagatcttaatcctttttctctgacattacactcatcagtgatgagtcaccaccatattgaatgaaattgccaccatgaagcgctttctagaaaatgattttgattttatttatgttggcacttgtagtggatcagaaccatatattctttgctgtagctgtatttaatgctctttcatagagggttaacaactattcaatcgcctagtcggtagggatcccctgtatcacttcc

SEQ ID NO: 112612 - DNA, 650 bp, Zea Mays
aatctctacactctgtattccattaacagtaaacaaatatatacacaataaacggacgacttcacacctgtacatccgttcggtcgattaagcatgtttacattatggctaattaggattaaaggggatgataaactgctaatcttctggagacttcttgttatctctggatgagatcaccaccgtcttttgtccttcaacactcccccttgatcgtatcgatcctattacatcatctaggaatacaaaactattctatatctatcctattttgtgtattattatcttacaaaaaccctgtgggaaaaatagataataagacacatttcgtctgttgatattacctcattaaaaactttatatggtaaaacctctttgagggaaaaatccatacgaagataagagtataatataatgtcaactaggttatattctcgagagtgatactccccgtgattcttgcaaatctctaagtcgtctcgtacctatccctttaacatacttcaaaaatgtggaatatggtaatgactttgtaaataagtcaccaagattatcacacgacttagtctgcaaaatgtttattttcccgttcttttgtaattcatgaggataaaacaattttggagcaatatgttttgtgatattacttt

SEQ ID NO: 112613 - DNA, 1258 bp, Zea Mays
caggtctcgaacctgcgaccttcgcgttattagcacgacgctctaaccaactgagctaataggccaactcccaagtccaactacttaatatccaccttcgcactcatcagggtcgtttacagcttctatgttttctccaccaccggtagcaccattgggagtgagagcatccttacaaaatgtaacgtaagcatcatcatgtgggtcttgatcttctttatgttattcatttcctaaatctgactcatcttcatgtaaccttgggttcgaactcatctttacagttgtattcttcctcatctgctactatcttgccataaatgttaggatttcgaacatgtcttctattctaataagatctttctgatgtttttattattagcgatcggtctccttttgatcatcgatcttggactaagactgcaaaaagaaagaaaaaagaagtttaaaaactcaaaataattggcccatgcaggtctcgaacctgcgaccttcgcgttattagcacgacactctaaccaactgagctaataggccaactcccaagtccaactactcaatatccaccttcgcactcatcagggtcgtatacagcttctatgttttctccaccaccagtagcaccattgggagtgagagcatcctcacaaaatgtcacgtaagcatcatcatgtgggtcttgatcttctttatgttattcatttcctaaatctgattcatcttcatgtaaccttgggttcgaactcatctttatagttgtattcttcctcatctgctaccatcttgccataaatgttaggatttcgaacatgtcttctattctaataagatctttctcatgtttttattattagcgatcggtctccttttgatcattgttcttggactaagactgcgaaaagaaagaaaaaagaagtttaaaaactaaaaataattggcccatgcaggtctcgaacctgcgaccttcgcgttattagcacgacgctctaaccaactgagctaataggccaactcccaagtccaattactcaatatccaccttcgcactcatcagggtcgtttacaacttctatgttttctccaccaccggtagcaccattgggagtgagagcatcctcacaaaatataacgtaaacatcaccatgtgggtcttgatcttctttatgttattcatttcctaaatctgattcatcttcatgtaaccttgggttcgaactcatctttacagttgtattcttcctcatctgctactatcttg

SEQ ID NO: 112614 - DNA, 572 bp, Zea Mays
catcggagatctggcccacgttaagcaaaccgcgcgccgccgccgatggtacatagtgatgtcgtcttcttcctcatctgctgcgaatgcgccaccggccaattcatcgtccgaagatacctcgagcgatttggcagcggtggagttacagccgggtcacatggtggagttcggcgtgtcgaggatttcctcggttcacgtgcaggatatgcattagttagggtattttggggacgatgttgggcacgtcccaggggcggaagaggttcccgagcctgaaggcgagttagtcgtttttgaggcgttcttcatcgccggccttcgcctacccgcacattgtttcgtggcggaggtcctgtagaggtttgaggtccaggttcaccaattgacaccgaacgctgtggtggccctggcgaagtatgtctgtgcggtgacttcgtacggtggacagccttccgtggatgtcttcgccaagaattactgtctgcactggcaaaagagaaagattggaggtaaaattgcacagtttggatcgtgcaccttcacgccaaggaccggaaagacttcggcgg

SEQ ID NO: 112615 - DNA, 369 bp, Zea Mays
tgaacatgtaatgaagttggatctttgtaatgattgtcatcaaggtgtgggcatcccctgcaacttggtgtagttattaataaagtcagttatttagttgggtaatcccttcatttccacttccctctttatctgagaagttgtcagtgaagatgatcaattgttcagtgctatgaagatttccatatatcttttcttatgctgaaagaccgcagtgtcagatttgatgtgtgtgtgctttctacatatgtctgagaacaggcgccgaggtgcaaggcatgctcaacaggagcagcaggctccccaggagcagcagcagttgccaccacaacccccaatgaccgttgagcagatgttcctgatgcagac

SEQ ID NO: 112616 - DNA, 509 bp, Zea Mays
ggtcagcgtcagcaagaccagttgcaggcacttcttcagcagcaggaactgaggtaccagcgtcctcatcaaaactggatactcgtcggaggcgtcttcttttcttcttttgctcatcagcagaaggctcaggccgactggttcggctagggcgcctcgggcgagtactgacaggtttctggacatccaaagttgtatcaacctctggaaggggcaccactgccaacgtaccagtaggagcagcgtcggaggaatcctcagctagcagatcaagcatggcatttatatccgcatcactacggttcagaggcacctcaaaatggacctgccgtttgtcatcaggaatctcaccaagcgaagcaaccaaagtactgacttcttcagcagagggtcgcactctaaggcccaaattgccatcagtcacaggcggatttgacacaaaaagggtgaaagctttgggaggaggcaggttccaggccgagtatgccactggagcaccaacatttgac

SEQ ID NO: 112617 - DNA, 540 bp, Zea Mays
cacgtgcctccagatctttagagcatgaactacagttgctagttccaagtcatgggtgggataattctgctcatgagggctgagtgctcttgacgtgtatgcggtgatacggttgtcttgcatcagaacacatccaattcctatacctgaagcatcgcaatatacgtcgaaagacttgttgttgtcgggttgtgctaacacgggtgcggtgtcaagtgctgccttaagatatgaaaggcatcctcgcatttctggttcctttcaaattttacttccttcttcaagagctcagtcattgatttagaaattctagaaaaatcagaaatgaattgtcgataatatccagctaatcccagaaaacttcgaatctgtcggaccatagtaggaggcttccactccactacttcttgcaccttgtcgggatcaacagctatcccttcctgagaaattgtgtgacccaagaacttaatttgcttcagccaaaattcaaatttagaaagcttggcatataagcgatgatcttgtaggcgttgaagtaca

SEQ ID NO: 112618 - DNA, 334 bp, Zea Mays
ctttaggcaaggggtttattggcccactttggtgtccaacgcacaccaggtggtgcgtgcctacgaaggttgtcaatactacacacgacaaacccaccttctagcacaagcgctgtagacgatcctaatcacctgcccgttcacggtctagggacttgatttggttgaacctcacagaaaagcgtccaggggccacacgcacgtcttagtcacgatcctcaaatccacctggtggattgaagcttggcccatcacaaattttcattagaacgacacacaattcactggaagcatattcctagaattcgctttggggtaccaaactcaatcatca

SEQ ID NO: 112619 - DNA, 548 bp, Zea Mays
gattacttctttcatatacaagggaaccaactttgaagctgaatttgtggtcttcatgagaataaagtgcgcagacttagttaagtgatccactaccacccatatagcatccctgccctgaggagaatgaggtaagccaaccacaaaatccatggtgatatgctcccacttcaactccggaatttccaatggcttcaataaacctgcaggcctattatgttcgcccttcacgcgctgacatacctcacaggcggccacatacttagaaacatcaaccttcatcctcttccaccagaagttttgcttcaaatctctgtacattttggtttcgccagggtgaacggtgtaaggcgttttatgtgcttctctcaagatatccatcttcacgtctgatttctgaggcacacataggcggcccctgaaatgaaccaaatcattctcatcaatggtgaactcacggggtttaccatcgccgaccctctttcgagcttcctgcaacaaacgatcctgctgctgagccacgcgcactctctccagaagggaggatt

SEQ ID NO: 112620 - DNA, 277 bp, Zea Mays
ttaaagaatagttttacaaaggtgggagcctattcttccgagcaaaaattcatctgtggcgaccccgatggtgtcgtccagtggatcagcggagaggtcgaagcctttgacaaaatcttaagtgatcggggagacttctatgcattcgctggtgcacgaggggtcgtggtgaccttagagaaaaccgattgtgatcatgttaaggctgcagctcagccgaaatttgttttctcagtggaagacactaaggacccttcgggtgaggcctctacgttgg

SEQ ID NO: 112621 - DNA, 344 bp, Zea Mays
tttatgaggaaggatcttcctgtccttacttcgaattgagcgaaaaaggttctcaaactcgctctatcagacagaggtgtgctgagttaaattcagttcgctgagttgtgcagttcggtggtgttgacccaaccttggagctccctaacctgaaatctgttgaatcttagttggtagttggtacccattaaagcaaagttggagagtgattataggagatcaactcctagtaaggagatgtatcaagccagcagcatgggaaaaggagtgaaaatctgacttgaagtttcaggtgactgaaaacctggatcagttttggagcagaaagatcacgccggagctat

SEQ ID NO: 112622 - DNA, 729 bp, Zea Mays
catggctatgctgtcttgtcagagagggactggaagttggcgatgaaatgccgactgaagtcgctccaatcatcgatgcattgtcggggtagatgtcggagccactgcagcgcgtcttgccctaggacaatgggtaagtacgtcgtcatcacgtcctccattgctccagcggcccgagcggcagtcgtgtagacggccaaccaaccacccgagtcctgcttgggctcgtacttgtcgacgttggagaccttgtagttgagggaccactggatggcccggagacacgaagtaagcgtgaaaactccgcacgtgtcttcctgttggcgttcgtgttgtcggtcccgaggaggggagttggtagtatgtcgtctcgatcgtccctagaacgacccactagtcgaggctacggccgactcaacacgggtggtgcgacttcgtgccgggacaccatgatcccggtcatactcctcccgacgcctttatctcattttcgtgtcgtcggtcgcgcgaagcgttgatggagctccgcacgtctcgcgggctattgatggcgtgacgtaggtcgtttgctggatgagcgatgggtagaaggtgactagatgtttgagtaagcagccgccggtagccttctacgtctgggttcgcgggaggccgtcagctatctgggccagtacccctctgacttcactcgacgtgttcattgcacaagcaaagtcggggtataggttc

SEQ ID NO: 112623 - DNA, 427 bp, Zea Mays
cccgtcacggggtcaaaaaagaaaaagtgcaacttccgggaaagatgatgcttcagctgctccaagcgagcctgcgccgaagagaaaaaaggtgaaggtccttactcaccaaccgcattcattgaaccggccacagtgcccgaatttggtggtgagacctcttcagctactgaagctgacaaacctgcctcacacagaagattgaagaatcggctataatgacgaagattaacaaaattgaagaacctagagtcaaagaaacaaaaatattagaagttctgagcccttcgacagaagtaacagtgccgaaggcacaaaaagaccttatagcaacccccaagaggaaaaggatggtcaatgtactagatgtactggagacgataaagagttcaagctctactccagggaaaactgccaaagcttcaaa

SEQ ID NO: 112624 - DNA, 472 bp, Zea Mays
ttgaagcgcatacttgagttgatcacctccaggagcaatgaagagaatccctgctcctgctccttgcaatcttagcaagccatcaaaatacattctctagacttcagcaacttctaggctttccgggacctggtgctcagtccattctgatacaaaatcaaccagtgcttgagtctttattgcaattcgaggtcggaactctatatcatgagcttcgggttcgcatgcccactttgttgttctcctaatagctttcttgttgtggagtatatctcctattggaattcttgtgactactatgactttgtggtcgtcaaactagtgctggagcttgcgagcagttagaagtactgcgtataatagcttctgaacttgaggataccttatcttcgaggggtcgaggacttcgctgataaagtaaactagatgctacactgggtatgcgtgcccttcttctgcccgctcgactacc

SEQ ID NO: 112625 - DNA, 329 bp, Zea Mays
ctgggttactggaatcaaccctgtaaggtaaatagcgggaatgcttcattggcttctcaaactaagtctaggtgacagcttcaaccattttcataataaagggtgcatggagacaccacttcaatggtgaccaagatgttcgaaaaatttcctcctagattatatcaaaaacattgatccagtcagtgctggtgggagtcagaagcaaaagaagaacacgactctccccaaggacattcatctagttcccgcacttaggaaggatcgtcatcctggatagagagttgaggtaccgatagtacctgtgcatgttggacgtaatcaagaac

SEQ ID NO: 112626 - DNA, 471 bp, Zea Mays
aacattctatattgattctttaggcatcagttcaatatatttggatcgacgtatttatatctccaatataatattagttttacagtgatattttgtcacacatattttgtatattataatgatgtttatcgttttgtatctatgtttgatactaaatttttattctcgtgacatcgcataggcacatacctatactactctattaagagtctagcatcaacgtcaacaccctaccccgtgctcgcgcacccaccctctacgatcgcacgtcactgtgaaccccacgccccacaccccctccctagcgtaggtccgcgaccgccgcatcccccgtcctcctcgacaaatgccaccactgccttcttcttcctcaccagtgccaccctcatcatcgccttcgccaggctctcctacaccaacattgaaccccagtgtgccaaggccaccgataggcgacacgtgctcgaggcc

SEQ ID NO: 112627 - DNA, 408 bp, Zea Mays
ttctgaactgggtctgacagtggcatcgatctaactttggagccagatttaggatgatccagtgaggttaagcccaagatccttctgacaaatttgaatatgatatataggagagaaactttgatgcagtcgggttggtcgttcgctgcctaaaaaccgaagaaaaagggtcctaaagtcgctctgtcaggcgccctgaattgggtgtggcatggaatagtaattgaatcagatcccaggttcactgaacctgccgccagcgtcctcacactgtaatccaatctcgacttggagattcgtgtgaaggagcaaataaccgcggtgaaaagatcatcggggagggtttggattggttcacgggaagaatcattcgccgtacccacttgcacggcatcgtggccgagcagc

SEQ ID NO: 112628 - DNA, 456 bp, Zea Mays
gtgagtttaggattgcctagtgctgcagttagtatgtcattctccctccgaggcttaaattcgcccttctttctcttttctgcatattcttgaatttttgtcgaaacttcgcctaccaattctggatgcaaaagtttgccgtcctcagtcaaacctgcccgacctaagatccaatgaatagctcgctcatcgatatcttttaatattgggtccaaagtgtcgttagctatagcttcctcgattatcctgttccactgcacaactttatggtgatatccggttgaccccaggcgatgggggtgtttgttcatcttcaccctctaagaattagtttcgcccggttctttggccttcagttcattcttctgacgaacaaattcctcccactgagcttgagtgattttccccattttcttgggcggaggaaccttattcttcttaacaaaatccctattc

SEQ ID NO: 112629 - DNA, 503 bp, Zea Mays
tttggctgaaaggataagggaggaaattatggtgatgtttcacaggcggaggaggattgcacaaaggttgcaaggaaggattttaccttcggtcctgcatatcctacacgacagaactagaggtttgagtcatttatcagttcgtaaagctgacaactacattgctgaggtaagggataacaatgatgtgcattcgaagcacattgtcaatgctcatttgcgggaatgctcttgcaaagagtggcagcacacgggcaaaccatgtaaccatgctttgtgcttgataacagctcaagaatttagggatgtcagaatggaggattttgtcgatgagtactactctgtatctcatttcaccacagcatactcaagggtggttccacctatcggtgacaaatccttttggccagaagtccctttcgcaaaagaagttggtgctccaattggaaaacgagctgtgggtcgacagaggaaaaataggatgaaaggatgccttgagggag

SEQ ID NO: 112630 - DNA, 374 bp, Zea Mays
cttgcctcggaaaagctgccacttgatacagatgaaatcctatggatttcattttttttccctttctctttgcggcaaatggcgtgcaagtatcagtaacttgcattgctcgacacttgtaccacatatctaatcagaagcatcacctgttgagacatggaccaccgataaagtagtagcacctgaagtgttgtggatatctcagagtgaagcagggaagatatccgtctgcatgatactaaggatgcggccacgtgcgttgtctactagggtttggatactaacccgtacccagctacctgttaccaacctgctaagccaaaccgttactgcattgtaatttcagttccttgttcttggccttgggccctcca

SEQ ID NO: 112631 - DNA, 458 bp, Zea Mays
tggcgctattgtcggtagcctgataagaagaaaataagtttagatcagaacaaacatgtacattggctccagtgtctaaccaccaatcggtggattgacatgctaaaagaatttgagggacaaacctagaattcccagcatcagcaatagccacatttacatttttctgaccatcacctttcttgcctttcttattacgacattttctagctatgtgaccggattcactgcacacaaagcaagtcaggtctgcaaggtttttcttcttcttcttaaaatcagtgttttgcttggcctttggtttccggttcgacttgtttttgtttttcccaccagatttgccttcaaccacattggcattagaggtaccactatccaatggaccagaacggggcacatccttagatctcgccttctcctcaacatcaagagcagcaattagactttcaacagtcatt

SEQ ID NO: 112632 - DNA, 379 bp, Zea Mays
gatttttacacatatacctttgtattggttgggttgtaggatgggtctttagtaaaaggagagatatgggaatcatttggatgatacatctgtgaactaggttcctgatcacatgggatggaagtagaagccaccagggaaataccatgtacaaatgtgttgagtaatgctttgaaaaacacatgattcattaagtgaaagaatagttagagatgccataagcaatgatcgtatagcctaactgactgcaaggaatgatgctgctttgttagtatctattaagatacacgcctcctaattgtttgggaagaaaaggtacatgcagattcccttctaattgtttgggaagagaaggtacatgcatctgcgtgtatggcaa

SEQ ID NO: 112633 - DNA, 340 bp, Zea Mays
ttcggtttgccttcaaaaactgggtgtgacaaatatcagagtgattacaaatttgattcaaaagtagcacatctttgaataatataaacacaattataagtttgaaacacatgctagctcaaaagataatcctcgaaagaaaaatagacgagattcttatatgagaaggtgtagtccacaggcacttagcaccatccacagtgaaaaaaacactgatgcctaagagggggtgaaatatgacttctaaaaatctcgtgctaaactagaccacaattaattctcataaacaaaacctacacaaatagctaagcgatactatgaaaagtaggttttgtctaag

SEQ ID NO: 112634 - DNA, 983 bp, Zea Mays
agtggggcaggtatggaaatcagtcacattggtcattctactgttacaacccctagtcgtgatcttcatcttaataatgttctatatgtccctgaggccaacaaaaatcttgtttcagttcatcgtctcacatctgataattctatttttatagaatttcaccctgattttttcttaattaaggatcaggcaacgaagaaaactctgcttcgggggcgatgtgatcgtgggctctattctctccctgctaggcgcacaacaaagcatgcctatggagctgaaaaaatttcttttgatagatgacattctcgtttaggccatccggcttctctgattgtcgacaaagttatcagtcaaattaatcttcctgtcttagcaaattcaaataaacatttggtgtgtgatgcttgtcaaaaggccaagagccatcagttaccttttcctcattccaacactgtttcccaacatcctttacaaattatttattctgatgtgtggggtcctgcacccaaatcagttggtggacacaagtactatgtcagtttcattgatgattatagtaagttcacctggatttacctccttaaattcaaatctgaggtatttaccaaatttcgagaatttcaatctcttgtttagcgcttatttaatcgcaagattatagctatgcagaccgactgggggggagaatatcaaaaattgcatccctttttcgcccaagtcggcatcacacaccatatctcttgcccgcatacacatcaacagaatggggcagtcgaacgcaagcatcgccatatcgttgaggttggtctagctctccttgctcacgccaacatgccgctaaaattttggcctgatgcttttctttccgccacacatttaataaacagaacgcccagtcggttactatcatatgacacacccctctttcgtctgttcaaccagcaaccagattattcctctcttcgtgttttcggatgtgc

SEQ ID NO: 112635 - DNA, 374 bp, Zea Mays
tgctgaatgcgcggcacgccactatttggatggtggttctcctgcccctgttgggattcagcacccttacagttcactgccccgtggtcgcttcgactatggtaccccagactgcaggacccagatagatttggatccctagattgatagagtcggagtctgtaataattcttagtttagtgtctcactctagtcagtctagttagagttagtttgcttatgttatgttagatgcttgttatgatggacatgtactgaagttggatctttgtaatgattgtcactaaggggtgggtatctcctgcaacttggtgtagttattaataaagtcagttatttagttgggtaatccatttatttccactttcctcttt

SEQ ID NO: 112636 - DNA, 1157 bp, Zea Mays
tgatggtcgaggaccgccgctgttcaagatatgtggtcaagtacatcatcgtgttggttctcttttaccccttgatgactctgctccacaatttcttcaactttatgtgtacgacactgctaacgaagttagtaatagattgaaatgtcttgatgctgatcatagacccgttgaatcgctcgatccatcaattgtacatgatttgattagcatgttagaccaacataatccatttgctaagaaatttagaatggcaagagatcggttggctgaccacaataatgaagatttcatcatcagaatcgttggcgcaaaaaagggtgatccagttcaatacaacttaccaactactgatgaacttgcaatgttggttgttggtgacttctctttagatacgtacaaacgtgatatcatcattgaaacacataatagagagcttaaaagaatctcctcattacatccagcttacatgcctctccaatatcctcttttatttccttatggtgaacgtggattccagctcggtattcattacactaatagaaatcctattggggcaaccacaggacgccatatgacaatgcaagaatactattgctatcaattccattataggaagaatcagccaaatccgtacctatgctatggtctgttatcaagccaagccaaagttgatgcacgtgctgctattgaggagagtagacttcactacattgctcaaaatcaaagaaacttacgaatggaaagtatccaaggaatagcagatgctgttagccgtggatgcataaatggcgatgaaatgggaaaaagagttgttcttccagcatcgcacattggaggacgacgctatatgattcaaaattaccatgacggtctagcaatttgtggaaagtatggtcctcctgacttttttgttacatttacatgtaacccttcatggcctgaaattactgaaagtatctttcagcatggtcaaacagctcctgacagatcagacgtagttacacgggtcttccatctaaagcttcatgaattacttcaggatattagatcaggaactatctttggtccgttactggcaggtacacttctgcctataaaaatttccaacgcaacaaaatttctatcttatattagttaccctgacacatttctcc

SEQ ID NO: 112637 - DNA, 554 bp, Zea Mays
ctacaactttggtacagagggatgatgaagttgtcaagagaaatatagagagaaattgccctgaagttgctctgtcagacttgtatcaagtaactgaagctgaacctgaagacagaaatggtcacagtgatatgggaccaattttagcgcgccataactttaaatttgttcagttttgacccaagaatcctatagtaagtttgtagactgatgtttagtgaacaaattttattaagggaagttgctctgttcttaacaaaaatccagaggtaaagagggtagaaggtggttggttcaggtgactgatgaaggcgtgccatggtacagtgttctgggtggatcagaatgccagctaagctcgccgtcgttgatcgccgcccggattcgtgcacggtgagggatggataacaccgggaaaagggtaactcgtacgtggcacgactccacgaacccagccgcatgtggccggagttacctcaccggcggtcgccgtgactcagcgttgtccgccgcgctgtcgcacatgctttgattcgcctcactgtgcctctccc

SEQ ID NO: 112638 - DNA, 334 bp, Zea Mays
agagaacccaaacagatagattttgccctagtgcaagaattcaaatagggggatagagttccccgctgatctaatagtaatgggtacctaggatgtaaccatagatgtcatcctagggatgaattggctaaccaaatatcaagcaagtcttagttgtgataagaggactgtgaagttagtatccttgttaggagaggaagtgttcgtggaattggtcttgtctagaccaaggaaaggaagctgtcaccagatcaccgcccatattgaggaaatcgagccataagaagctatcaacatagtatcagaattcccagatgtggtttccgaggagtta

SEQ ID NO: 112639 - DNA, 559 bp, Zea Mays
aaagagattctctcttctttagacatgaaagacaacttgttggttcatccaaaaatttggacatccatatcatataaccatggtcttcctagcagcaattgacttgcttgcatagggaccacatcacattccacatgatcattgtacctcccaacagaaaaaggaacattcatcatgtggctaacacgcaacgctccacaatgattaagccacttcatcttatatggactatgatgacgccttggtttcaattccaatttgtctaccaattcttgactagcaatattgttgcaagtaccattatcaactatgatacgacatagcttatctttgatcatacctcgagtatagaaaaaatgtggtgctatccattttcatcctttttagcagtcacacttaacactcgaagagaaataaaacaattatgatctccttcttctggttgaatctcattctcttcttctccaatttcttcatcaaatttggtccatcatcttctggatcattttctgattcccattcacctttttcattcaacaacattgtcctcctactcgta

SEQ ID NO: 112640 - DNA, 457 bp, Zea Mays
atgaaaacgaagatgatgagtacgaggaactgcactcacactatttattagtaagaattcttatgcatcctgcatatttatatctacttgctaaccactaacatccaaaattcacttgtaggtttccacagatattttcttaaagagcacaagatatccaaacaggaaggttgccttaggcagagtacttagccaagaccccaaaaccaaagttggagatgttgctttaggcaaagaattttggatggtgcgtgttagtctggtatctatgcgcgatgaacaactaataaggccatataacaacttcaaggttcttagacaagtaggcaataatccaattgcatggccttcaagttgtgtaagttcatcacttcacttaacaagacattattctcctcattattgcatttggttaaagtattctaattccttttgtagattgaaaaggttaactgat

SEQ ID NO: 112641 - DNA, 526 bp, Zea Mays
gattctaaaaccctaatttcccctcttgagccattaaaccccaaacattggattaaagggaaaaattatgcaaatggccaattcatgaaatgaaacctttaccaaatatgaagtacattaataaatctacaaaatgtagtaaaggaagtattacaaaaaggcccaacaaaaaccccaaatcaagcccctaagtggagagcacactagagccatccatttttctctaagtcccaaaatcagccctaacctaaagaccagaagtgttcacccctttgctggcgccaaaaccacatggtccaaataacaaaaagtggccaaactacccaaggcacacccctgaaaaatttgaaaccaaaccagggttgtttgacatggtttagcatccattttgtcgcggggtgaatagtgcagacatacaagacttggcaccaccatatcttctaaactaggccagatcttcccttggaactcacatgaactagatagctctaggtgcagggaagaaatcttacacaagacatatggc

SEQ ID NO: 112642 - DNA, 407 bp, Zea Mays
accggaagtcgtcttcttccctagcgcccaaacccgatgacgacctgataatcacggcggcgtagctcccgccgcgagcgatttccatgatccactgctctaaacttcccctcgaagggttcccaatgcagaggagggtggcacgaagaacagggaagtgattctaccttgaatcgaggcggtgttgccttgcccccacgcaaccagcggcacccaaggactcccgcaaccacggtgagcaattgtgctctctaatgctaactccaaactaggctaattgaggagcggaacgtatatgcttgcgtgagcttcccatgttctcaggacggggcttgatcggtggcagagcggattagacgcagcggcttatggcaattcccaacggggttcgtggctatcacgaagca

SEQ ID NO: 112643 - DNA, 543 bp, Zea Mays
caacgatctatgtgatcagactcaagagtttcaagggtgttagaatggtctaacaacatgtgtcagaccatacaatgacattatttatgctaggggttccttctacacggtcattggactgtataaaaagttgcgttgctgggccaaagtagatggccctgatggcatctatgtagtgatctaaaaggttatggtgggcatcagactagttcgatggtgggtgtcgaaccatacactcaaggtaatgtttaaacgactagttctaatttcgtagtataatagttaacattgtgtataacatgcacgatggtctggcggtgatcgttgaatggtttgaaggtgatcgtcgaatggtctgcggttgtgaattttgatagactttattataacaactagttgactagtaaaggctataaatacccccaccagctaatcaacatacttttccttaccccatttaatagccaaagcaacctacatagagtgtgataataagccattgcatagtgagggacttcagagtcaaatttcatgagattaaca

SEQ ID NO: 112644 - DNA, 545 bp, Zea Mays
gttgtatagaacgtatagagagggagagtcgtatagaacgtagagagagagatggagagtcgtatagaacgtatagagagggagagagggggagtcgtataggacgtagagagagagatggagagtcgtatagaacgtatagagagggagagagggagagtcgtacggatattatcgagttgtgtacccctttcatcagattggaacaaaagattagaacatatatacaatatcatactaagttcttacataatacgccgtccatcatactaagttcttatatataatatcatactaagattagaacatatatagtaatttatacttttctactcctcgtcgtctatcagtgtcgtccaatcgatctcctcatcttcatcgtcggagatgttggtgatgacgagcacggagacaacctcgcgtgcagtcgtcggagccgaggagcccacctcatggtggtgagtagacgggcctgcggcggcgacacgttgacggcagcgattcgagagaactctgcatgcgcgcatgaaaaaccggcgtacgac

SEQ ID NO: 112645 - DNA, 478 bp, Zea Mays
ctggaaacctacgttcgacctatatatgacacaaggtgagtgtctgaacctcctcgggcttgttactacatcactcgcgcgcatatcagagtgttggatgcaggagatagaggtttctaatgtcgttatccacctacgctgctttggtaagcaatgctgctcggagagctctgtgccccccatccatacatatcgacgacaactacacgacatgacgtacaggcaccttcccccacattctcgtggagaaagccagacaattgttgttctaggtaaagctggagaagatcgcctcaacacccttgtaggtgtggtggcaggtcttaacactgatctagacagtgctaccctggatctttcaagggtacacgaagaacttgaagatgcacatgcaaggattgcagccatcaaagctcaactcgaagggaggaatccactcgaagcacaagtccacgacatagttgtgcccctgccccgt

SEQ ID NO: 112646 - DNA, 578 bp, Zea Mays
cagcccacgctacatcgctggattttaagagttgtccatgctccagcctttctaaattgtttttaagctgcccttaattggggagagtttgacatgtcagtgcttcatcactgcagtgggcaaggccaccactactgccggtgtgtgtcagtgtgtgtatataaatacaggcgactgaggtcacttggccactgagcaggacaaataaaccaccagcacctggttcttcaattgatttcgatcagcacagcacaacacaggaggaggtcgatgaagatgagggctcctgtcgtggcctttgctgctcttctcatgctgctgctggtggctacaagagcacatggtatgcttgctaaggccatagccacctcctccaccagtgctccttgtgagatgtatatgtgtatccgtcctggactgatctgaccatgtatattcctccctgtttcattctccgatcgagcaggaatcaggctggacaggctgttacatgatgcgatcaacagcagcaaggtcagtacagtatatatacgagctacgactgtgatccaatccaacaagcacttcttcgatcccta

SEQ ID NO: 112647 - DNA, 423 bp, Zea Mays
tacaaggtgtctggtgtcttcaagtgacttgccttgatcctttggtaggtgttgcattcagacacatacttagcaatttccctcttcatcctagtccaccaatatagggatcgaaggtcgtgatacgtcttgttgcttctggggtgcatggagaatttggagagatgagcctcatccaaaatcttcttccttaggttttgatcctggggaacaacaagctggtcctcgaaccataatataccatgctgtcctcacgaaaacacttatatttttccactttctaggtgagcatctcgttgatgatttggactcccttgtccccaagctgtgccaagatgatctgatctcacaaggttggctcgatcgagatataatctagagttcctggagaaattacttccatgttcaacttgttcaactcat

SEQ ID NO: 112648 - DNA, 600 bp, Zea Mays
caaccccataagtaaggcaccagcacatttccaaaaattcccgagactacgacgacaaggcatcgatccgccatacaacaaaaatcatgacgaagacgataggtgctatcaactaatcgttaaaaaatattagacttacttctctctttgccactactccactctttagtcacatgaccatcatgtgcatcctttattcgattatataatagcgacctaagcgtcgtgtcacaatacatacatctttcctcgttgcgagtataaccatatcacggcatatacccgcacacctcaatcaaatatcttacgccaccatcactataatacaccacggcacacacgcacaagaaacctcaacttaacacaagtgataccgatggaacttttactaaactcatcatgtgcatcaccctgtctcgcatacaaccattattatggtgtgcactcgagacacttcaagcaatgtggtgcgacaactaatataaatgcactccgacactcatgtcttaacgatacatcctccacacaaacgagcatttttttactactcgtcatatcaacaaatataactcctctataaccacgaatcccatcacattg

SEQ ID NO: 112649 - DNA, 1239 bp, Zea Mays
acggtatgcactacgggggaactggagcccctggtttccaggcgcccgcaccggcgtaccaagcggcgccctggaaccccactcacggaggagcatggcatcaggacgcccttgcacactctttcaacaccatgaccctcaacccgccgaacgctacttccgagtggtacgactccggtgcaggatcgcacatgacctcggacgctggtaaactttccaccatttcctcgcccacttcattcactccttcatctatcattgtgggaaatggtgccctgcttcctgtcacagccactggatcacatattttttctttcccgtatcgcaatttagttctcaataatgtcctcgtgtctcctaacattattaagaatctaatttctatccgtcgttttaccaccgacaataattgctccattgagtttgatccctttggcctttctgtgaaggatttgcaaaccaggaacgtgatcgccaggtgcaatagctccggtgacctctactcgttctatgcaccctccaccagcacccctgccttcctcgctgcacccacctccctgtggcatcgacgtctcggtcatcttgggcatcaagctttgtccaaacttattacctccagtgttatttcctgtaataaagatgatgtcaaccacatctgtcatgcgtgtcaacttggtcgtcatgttcgtttgccattcagttcatctagctctcgagcttctcacaattttgacttaatccactgtgatttatggaccttcccaattgttagtgtgtcgggctataaatattatctggtaattcttgatgactgctcccactacatttggacgtttccactccgtctaaaatccgagactttttccgcccttgccaactttttcacctatattcgcacccaattcgacaccgtcatcaagagcatccagtgcgacaatggtcgtgaatttgataattcccaggcccgcacattttttctctcccacggcattgtcttacgcatgtcgtgcccctacacttctcagcaaaatgggaaagcagaatgttctcttcgcaccataaatgacattttgcgttctcttttgtttcaggccagtctacctctggcttattgggttgaagcccttcacactgcgacatatcttgtgaatcggctccccactaaaacccttgctttctccacaccatatagtgccctcttttcctcccaaccctcctatgatcatcttaaagtttttg

SEQ ID NO: 112650 - DNA, 482 bp, Zea Mays
cagaaatggtcctactcaaacccgagacagtaacactattatagtgcaaatcacaatcagggctgacaaggaatctgtcaagtttctcgaatgtgggatcacttctgttattggaccaagtgaaacgtctattgaccaattctaactcaataagactatgtaagtctatgatagagttaaaaagagaactccatttcgtgacacctccaggtttatttttctcattttccttcctgagaatattaaagtcgccacccaccaacacaggatatttacatttactacagaacagagaaagctcactaaggaagcggttctcgtgctcatcttgagcagcaccatacacattgataaaattccaaataaaaccactatctttatgaaccacaagcactctgatcatgaaatcacctatttcttgctctctaacatcaaaaatctcagcattgaaaccagataaaaggcccccagatctacctttg

SEQ ID NO: 112651 - DNA, 326 bp, Zea Mays
ctcatgtccggttcgtggcgaaccatcgcaggaaagggtacccttacactgcataaacccccgagcaatctacatagattgctcgaggactcaggggctacatctaatagatgcgcttgcacgcactcagaaagggaatctctcaagaaaagcctctacacaactccaaggagttacacaaaggctcggggtgtcaggtacctgagaacagggtacctaaagaaggcctaaagccttcataagacgactcactaaccagccgacccatctgccaagcggctcggcgtgaaggtccaaaaggcttcccggtgatggctccccaagcc

SEQ ID NO: 112652 - DNA, 417 bp, Zea Mays
ggagagaagaaaagttgcatcctgaatcacggtctcttgatatgcagttcccttttatagggtatataatgaaaatatttgcatcgtgagtgtccgtcgttgataaaggttggtagtttgaggtattctaacggacagctcaaaagagggatatacctcagctagagcaagagctataactaattccgtacaaggtacaccactgtggtacaagtataactgtagaattatcaaagcacgagatgttattatgttaagaacgttctgcaagtctgcaactatgctatggctgtaaacagcagccagctagagtggtggaaccagcctggacaaaccgagggagccgaacaaggcccgcgatacatagttcgggccaggtaccgaaagacgtgggtgggctttacctagcacaggcct

SEQ ID NO: 112653 - DNA, 606 bp, Zea Mays
tattgtttgctagatacataagtgttccaattgcactaagatatgggtactcaggacccaaaatctcttctccttcatctcgtggtcgaaaaggatccttatccctttctgggcataagtagactgatgaatgagaatgcccgtgggaaggtgctcaagttgcaaacctaagcaaaatttggttttacccaaatccttcatctcaaattccgtctttaaaagattgtgtgcctcatcaatatcacgtttatggccgatgatgttcaagtcatccacatatactgatatgatgcagaaacgtgtagaagatttctttatgaagacacatggacaatcatcactgttagaataacccttattcataaggaattccttcagttggttgtaccacattctccctgacgtttaagccatatagagatttgatgagtttaacacaaaacatgttatgatttttgccattattcggtacaggtattccatcaggaattttcatgtatatgtccgaatctagtgacccataaagatatgcggtcacaacgtccatcaactgcagaagtagacgtttttgtactgccaatgaaattaaataccggaaggttattc

SEQ ID NO: 112654 - DNA, 507 bp, Zea Mays
acttggtacaaaccagatcatcatccagaggcttaacaaagagaaccacatcatctgcgtacatggagagcctagacctaacatttgcagcctccaaactatgcagcagccctctagattcagcgtgcctgaataagctgccaagtacgtccatcacaatgataaaaaagcataggagacaaaggatccccttgacgcaaacctcgccgatgccaaatatgatcatctgggatcccattgagaagaacttgtgtagaggaagaggtcaacaggttggagattaagttgcaccatttcagaccaaagccaagatgggacagcacctccaagagaaaagcccaagagattgaatcggaagcttttgtaatgtcaagctttaaaacaagctagagacctttcgctgatgaagggacttgatcgaatgttgaacaagcatatagttaacatggatagacattcccctcacaaaagcactctgatttgcagccactaacctttgcaggagag

SEQ ID NO: 112655 - DNA, 704 bp, Zea Mays
cacgtatggtgctaatgctttggccacaccgatatcccgatggtaaacgtcctggaaaaaatcattaggtgcatagaatagtctacaaatggttatgtagtttgtagaatatggcaggatgactgctctagctcacattgttgtatatatattctgctttggcttcgagtttttttattgtaatactctcgtcgtgtggcttcgctcctttgataccatgtaccgagacttgaccgtattggcattctcttaagaagacaatcatctgtttggtaaaattgatgactgctctagctcacattgttgtatatatattctgctttggcttcgagtttttttattgtaatactctcgtcgtgtggcttcgctcctttgataccatgtaccgagacttgaccgtattggcattctcttaagaagacaatcatctgtttggtaaaatttttgttttaacggtttctaattgtgcgtcatgtttaatatttgcacagtgctactaatgtacgtaccccttcccttcatcctactccttcagtcgtgcgcccgtcctagaggttgtcatcaactcatcatcgcccgcccgatagtgacgaacgaatgaggggacaaactttgtatgtcgccgctctggatgatgaagcgtagccaccgccgtcatcggcgttccttgatgctgagctgccactatattgcattgcttctat

SEQ ID NO: 112656 - DNA, 343 bp, Zea Mays
cggtgtcggacacccttaaattggtcagaacctggagaacggtggtattttaggcctgacttggtcaaggaaacagaagcggaagttcaacggataagacatcacttaaaagaagctcaagctcggcagaaaaagattatgtgtacctgaaagtatcaccaatgaagggtgtgaaccgtttcggggtaaaagggaagctagcaccccgatacattggcttgtttcccattcttgaacaatgtggaccagtggcataccgacttcaactgccagaaacattatctgcagtacataatgtgttccatgtatctcaattgaagaagtgccttcgggttcctgatcg

SEQ ID NO: 112657 - DNA, 696 bp, Zea Mays
ccacgacataccttgactgtcggtcgggaggcactaactgctctaggaaaggcttggtcctagcggcagcctttggtagggtaggtcaagatgaggaagggcagatgttgccgtagacattgtgatgctaacgggggttcccttggggcttctcgcaagcggggagcggttttctggaatgctagctattaagcactcctaggttgggtcatgacttgccccgctggacaaggagctatgtttttatttcgatcccgataggagaaggttgtggaattaatccctaacggggtccgtcattcccacaaacctgacctgagtgagtcatgttgttctcttgaggggagctgagatcgaggcctccaaggctcctagcaatgtcaaccaagccctttgtcgaggaggattgagcagtcaaggctctaatcatcgttccctcaccatcgacgacgaagtcgaggattccaacacggatggttgttttgggggcccaaactgcgtcgtagtcggccatctcgagcttggagaagaagacgtccagaacatccaagggcactaccaggtgtgccaacagtaggtgtttcgaactagctctgacaagtaaatttgtttgtgcgtgttttggatccggatggtgtgcttagtcggttcaagatttatactagttcgggcagaacgtccctttatccagccttc

SEQ ID NO: 112658 - DNA, 704 bp, Zea Mays
gtcagggcggcttggtctatttaaaatatactttcagatatataggcgagtttgatgagccaaacgatgaatggttaagcagtattgaggctaccactaattgcttggggcctacacaagggccaaagatgatgcaatgacattggccttcgaaggccgagccagaaaagattgaataaagtttttgacgtcatcggtttcctataccctgattattgctatccctcacaaaagcagggaaagaagaggaaaactgccgcttcggtcatctctgttatgccgaagggcaaaaagattaaggtcttaacacaccgaccgagatacattgagacaaccacagtgccgaagcttggtgaagggacatctttcgctgccaaagtagagcaacctgctcccaccatccttggggaagacctaactaaattgtcaaaggttcatgaagtcggttcagccgaaacgccagaacacgatgccgaaaccaaagagaaagcggccaaagagacagagccagagctaccaaaaatcttgagcccaccagcagaggcagaattgccgaagtttgcaaaggctcccgcaacaacccccaagaggagaagaatggctagcgtgctagacactgtcatggagataacaagggcattgactcctgctcctgcgaaaaaggttgccgaaattgctacgactcgtgttgaaaccgaagtcgg

SEQ ID NO: 112659 - DNA, 422 bp, Zea Mays
gccgtaagggcacggccaccgccgtcacccggcctcagggtagaagacatgatgtgcgccgtctgatcgggaatgtagggcgcagattagatccgaagatgatgtgtcgtccgattaaatcatgcccgtggatataagatccgatggctacgagtgaatcgaattaatttaaatctgggccgaaggagatggatcagtgggtctagagcgcgtaccgtttcgatctagggtgggtgtaatccgggccgttcagggaggatccaatggcccattgtggtcgatacctcttcgctgcaccagtttacataagagtccctgaacttattagaaaacaacccgcagtcctcatgccactgtttcttgagtctggtgaatcttctaagttcgcccctgcacattccagaaaatgaggcccagtccag

SEQ ID NO: 112660 - DNA, 590 bp, Zea Mays
gcgcacggccgggaggcggcggtcgacggtgagcttatcggctacagccgcaaagcaggagggcagtcatggtgagtcaccggagttatccccaggggatggcttttacctagcagccttatctggtcaccggcgacgtgaatcgcaacggcggcggcgtgaatctcaatggagatcggtcgtcggcggtgagggacggtcatgctgtcgttctgatctgtccgagtcactgtaccatcagaagttcggtttatgacgcctgacagtcatagtttaggctcgattatctcacaaattttcatggcaacatacccaatgatctgtagcaaagttgtaggtctacaatccatttataactttactacaatgtgcccccacaaaaagtcactggatcatacttaaaatcaagccctaagttcatgtcacaacactgttaatctgtatttcagacttcaggcagtctgtcagtccatctttgattgggtttttctccaaatttctcataggatcatggcttgaatccttaaacaaagttgttctcctataattgggctacaaacttgttgtggtcactttgggcaaaaacccta

SEQ ID NO: 112661 - DNA, 771 bp, Zea Mays
gccccattccatactcggcgacaggattcaccgcgctcccttccgcgcctgctattaaaaggatggacacaggtgatccctccaacccatccccactctcctcagatccaccgattcacagccgttcttccatttctcagaggtaggccgttcttgcatttctcagttagacattctacacttttattaataatgatgatatgctaaagctcctgtctctttagttttaccatatgccagtgaccattcttgcagtgtggtctattttacattttgattatgtggggtagacatcccatgtcgcgattagatcacgtcccatatcccatatgaacagttaagcccatgagtcactggcataaggttgtgaatcggtattgaattgagttcttgaaattagtagtgccaagaggttttgttcataataatgttgacactgacatgttttttgttggttttgttcataataatgttgacactgacatgttttttgtttgttcatacttttttcgttgcttgatctatgattttggccaatactgactgcatcttgggtgtcatgatattggcagcgattcttggcagctgcagggaaaatggttgttcttttgcgtataatttaggggaatcgagctctggatttttgggatttcatggttcccattctgcatttagattatcgttctctctttacggccatatcttcagttcatgttttgttctggtatttggttcaggcactgcaacgctggacagttttaccatatgcca

SEQ ID NO: 112662 - DNA, 416 bp, Zea Mays
ccataatttcccaagtaaaaaaaatcttggataaaaaatggaaagaaattaaaccatacaattatcgaccttgtctatcactctctagcacaaacaaaagccttctatgtaaatataaaggagggaaataactaaaccacgacattgtttgagaagatcaagcggatgtagctcttgaagaacgcatggggcgtgcccgatgaagcgacggtcggtggctgcgcatatccatagaccgacccaggaagcgcccaaattaggcaaatttgaccctgttgataccttgttgcaaacgattccttcatcaatagtacaaaactgcttgtatacaaagattaccaatggtacagtgcagtataatatctatatcaaaataattgcaaagaaacttgatcaccttctcttgttgctccttc

SEQ ID NO: 112663 - DNA, 868 bp, Zea Mays
aaatagagcgccaggattatatttcaacctcaaaacgaaccgatatgcatcgtaggccgttggatcctagatcctcggccccaattctattaagcaggattgcatcccccacccattgattcgctcatctatggtaacggatcccaggctgaactggtattccgtagtatgatctggtccgttcattagtcgatcaacgaccagcatgccccccactcctctatgtggctaacaacggttattcgatgcgctttatgacgtatcttcatgttagtcacgtattgaaagcatgtctaactatgtcattttttatacatttttaattgcatatcaaaaagcgtcttaaggtttctatagacgattttaatacgtgttttgcaacgtgtctataggttactgacgattgaaagcgtgtctaatttcgtgtcattctaatacgattttaatagcgtgttaaaaattgtgtttaggtatctcttcacgttgaaagcgtgtcaaataccgtaacattttgatgcgttcttaaaattgtttcaaataacgtctttatgtaccgccgccgtagagacacttttgtgtgcgctacaactaaaacgtacatacaaggggggttttctagtagtgatcggtcatgcacggcgacgcccgagcgcagacggtggcgccatggcacatgaccatgaattctcccctctgaagcccaaacctcgaggcgaagagtgttacacgttccagggaaaatagcaaatctaaaggaagagttcgcaccaggatttgaggcaacgacgtggccggtcgctgatgtcgagcgaatccaaggcggagcttgactctggcgagcaatcgcaggtactctggccaactccac

SEQ ID NO: 112664 - DNA, 931 bp, Zea Mays
gcatgacacaggtcgttcggcgggtgggcgagaggtagaagatgattggccgcctgagtaagcagccgtcgataaccctccgcatttggggtccacgggaggccatcggctatctgcgccagtactcctccaacttcacttggcatgttcaaagctcgggcgaagtcagggtacaggtttcgggcgagaagcggattctcccgtcggagcctagcatcttgttcaactagttcccgctctcgttcttgagcctgacggcgatcacaattcacaatggtgggaattgcgtcgttctcgatgtgttctttcgtcagggtttcccccatctctgaggcttcgtcccgagagacaggttgtgctgggtcccgttctccggcttcgtgatgtcatcgcatgtttcggcgcctgtttctccatcgccgagcatcgcgcggtggaggttcctcccccagcacggtgggttcatcatcagagatgggtgatgactccatgactccagtctcccctaaatgaagaggacgtcagagtagaaaggagcatgtatggtggtgtgcttcttctcaccctcctttgagggcggaggtgttgggaggattgctcgttgtgttctccttcctcggtatggaacattcacttcccttcttcgagtgatccgtgtccactccttagtgggcgaggtggacaatagagttcgccgagctggggaggccctagttgactagctttccatcctctagggacttttgagcccagacttgcgtggggccatgccttgtcgagctgtgagcaggggtatggctcacggtttcacttcagcttcctgtggaatttccgaggagggtttcttcttgggtggagttgctatgaggtgcagagttccctctacgtccgctacgcatgagatggtcccgaagcagaaaatagctcccgg

SEQ ID NO: 112665 - DNA, 602 bp, Zea Mays
gaattctctattacttaagttgttttgatgctcatgcttactttggttcacataaaatgatggttcttggtttggcatttgagaaaaaccctgagtgacactggggtgtcacagtacgccactagggccattggatgagagatctaccgcacagatttaaaatatccaaactgttttccatccgccagatcgggatcgaacgaccacggttgcatcatcgccaaccggtacccgaatcagatcttgaccgttaatccctatcaacggtcgcactccttcccccaaccctcctacctacgacgcacatgcggcgacggccgcagagcccactgcagaggagttcgccgtcgaactccgtccgacgaattggggccccaaattccaaatcaataggtgttgtacgtagagaaggatgaggcgaagctatgggttagcagactacctgcgagaaaggcgcccacaaggctggccacggcatggtgtgatcgtcggtgatttcccaagtctggtgagaaattgggttggaaacgggggtcgtcgtcgtccgtcaatgccacgatgagccagcacacacccaggcggccatccctgaccacagtgcg

SEQ ID NO: 112666 - DNA, 482 bp, Zea Mays
ccgccttttgcccagatttgagtgataaatctgttccctatgcttcgggcttcggctggaatgtcaactagatctgatgttgaaagattgaaatttggcttattaacaatttttgcgtgagtgcatccggccttcataaaagttgtggctgtaccgcacgaagccactaggacacagaaatccacgtgcccagtgagaacttcgtcaagggcttcaacttcatttttaatgtgattaaaggtcttggggatgtctttggccaaagggttaaattcttcagaagcagctccaaccgagttgaatatccccttcaactgtttaacgcaccgactggcgaagtcagcacacttgttccgaaggttctcaaaagctttatgtatcttcgtattccttttagtttcggctgtgacctttgcttcaagctcctttgttttatggtcaaagtgccgtgaactttcttccaaaactgttcgagcttcgtc

SEQ ID NO: 112667 - DNA, 315 bp, Zea Mays
tcaattaacacccttcattgctgatactttcgggtacacatgatctttaacttgaaagaacaagggtcggggtcgtttgtctgcataacttttctgccgagcttgagcttctttcaagtagtgccttaaccgttgaacttttgcttctgtttccttgactaagtcagacctaaaataccactgttctccaggttctcaccaatttaatggtgtctgacatcgtcgcccatacagtgcttcaaatggtgccattttaatgttctcttgataaccgttattataagaaaattctgccaatggcagacaatcatccca

SEQ ID NO: 112668 - DNA, 322 bp, Zea Mays
acctagggaaagccaatgtggtagcagatgccttgagtcggaaattgcaatgcaactgtgttatgatggattctcgcatcaacaccctgtgatgagttgagcaaaatggagattgaagtgattccttctggtgctttgtcacacatttccgttgagccaactttgcaagaccagatcatcatgtcccaactcagtgataacggagtgcgaatcattaaagagaacctccatcagaagatagagaaatataaatgtttccgccaagatggaaagggtattatggtttgaaagcagattggtggttccaaaaaataaagatctc

SEQ ID NO: 112669 - DNA, 716 bp, Zea Mays
gggaaattagtgttgtcgaagtgaggtggcctcaaggtatctatccgtcccgatcttaatagtgttggctcaacgatggttaagccaaaaggtttagctatgatacaaattgaaaggaacgttgacgcttaagaggtaatggtgaattaggataactatttttacactaatcaaggcctctagttttagctcttaaacaaaacctatacagataaccaaggaagctagggtatctaatgttttgtctaagtgtttctacctctaccacaaaacaacttttgtagcctaggttgaccaatcaactagcctatcaactaggctaatatgataaagcacacaaccaaaagcaacaagtaaatgtggaagcttaaatgagatagatatacaaacttttgtagacgtgtcgttatttttatcgaggtattaagaacttcgcaaggttctttctaatcctcattggagcccctatgcaaagaaagcaaatgtgagggccaagctcccggtccggtaactacgtagatagccatgagccttttccatgcgcaagtgctgcttcgctacgaaccttgtccacactcaagtcgtggtccactttcgacctatctcgaacgctccccgccatctctaccatcgagcttctagttgaaacgtcgtgggtctcgttctctctagtacacgatggcgaccacaccacaaacgtggttggtgtgatttca

SEQ ID NO: 112670 - DNA, 287 bp, Zea Mays
gtgttactgtaggttaactacgaatatggatttaagcacgagatgtcgatggggatagtaaccccaacatcctgatcattttcgactatcacgattttaatatcgcatctgtctctgtctatctagactcttcctaaagttttcacgaagatcggaatgtatttgttccgaaaattagtgagtcctgtgattatttaaaattcatcaattgcgtaatacgaatttagaaacttagttcggtcctccgattttgtgcgaaacgagatttattagaagtcggcgactaa

SEQ ID NO: 112671 - DNA, 577 bp, Zea Mays
cggtgtttgataccgacaacgtactacagagtgtatcacgtaatgtttttagtaggacagtgaagctcgatggtttatgctagacgcgacggaatacgacgagttatacagattcgggccaccgctaggcgtaatatcctacgtcctgtgagtttctggtagtcatgttgctatgagttcgagggtttacaggtgggtactgagggtaggagatgaaggtcgtctagcaatctagcgggatctaactttttgtagaggtaccatctcagccttatatagccgagtgaggagatatccttgtacagatcaaaataattatgcagtttatccactacttgttatgattgcgccaagtatttcggcattaagttggtttattccgcaaagctcgcgcccacctgcatgtgcagaccgagtcttgcggcattctgttggcctctcagatctagtgcgtgggagtttaagtcggcttcagttacctcctgtcaaggcccacgatgtgtcccttggacgacttatcggtgacattcaagcagcccatgaagcgagttcgcgtcttgatgacccgggatatcca

SEQ ID NO: 112672 - DNA, 331 bp, Zea Mays
tggctcagattagattttaatgtaaaccaaaccagtatgctcttgtgtccgttagatctcacatcattgactcgagagacgtccacgctatgccctgatcattacggtttatcaatggatggacggtacacaacatacatgactaaatcgttgtctccctctaatcgcaaccatcaggcaacaaatcaacggtccaaatcattctccctctccatgcctgaccatgcggtggtgctgtgtcccacacggtggtgagttcgccggaatcctgcacgatccccaacgtgatggtctaacccgtgcgcgagcttgagaaaaatagagaggagag

SEQ ID NO: 112673 - DNA, 860 bp, Zea Mays
cctttactttgttcaccaatgaaatcaaaattttgtctttctatagaccttcgtttctcaattcaatcacctcagagcgaaggttgttaagagccattgtacagccttcgtcttcggcgctcttctgagctctcaaggcattgctaagaattaagccctgcaaagaagaagaaacagttgagcatggcagtaaaatacttcattttctagcttcaaaattaacctctatacctttatactattgtacgtgaggctgtcagcaagatcatccttcgataagaccgaaaagccttcttttggtttagaaaacccatactcttagccatctcccggcaaatggatatttctttgttattcgggagacaatacaggaaatcatcttcgttactaccattgaacactaaggcccccttcggatatttcagtctttgggcgtagttttttggcctccaagatttcttcttcagataatttcttccccgaagcatgtcgaacaatgtaatcagtatcctccgctaaggctttggggacaggagattttgctttttctgtcacgacttgctctgtcgtcttgccggtatttgaactttgctgacccatcttaccttcaggcacggcggtcttcggcttaataggcgctgaaggcccagcttcggcttcgacatgatttttggcagctttggcagttttcttggtaaaagcaggagttaaggccttcgtggtctctataacagcgtctaatacgctggccatccttctcctcttgggagttgcggcaggaattttctgcatctttggcaaatctgcctctgccggtgggctcaggatttctggcgttttcatcacttcttccacctgtg

SEQ ID NO: 112674 - DNA, 454 bp, Zea Mays
gtgagcatgttgcaccgacttaagacgttcctgacttaagtcgattgctccgtcggtagggtatagtgatcaccctaagtcatgtaattttgagtcgaatacaatctcagtcagttgtcagtcaagagtttgaatgtctttggaagatgaaagctttattgatgatgaaaccttctagttacagagtacaactttccttcgtgacttttgaggcatcgctaagggtagaactttctgaggtgctcaatgttccatgagttccccacttctgtgtcgtccatctgagtaagccgataggatcccggccgtgtgacctccgctacgatgaacggtccttcccatcgtggtgacagcttgtgtcgtccctcccccgttagtattcagcggaggaccaagtctcccactgcaaaggatcggtgccgcacaactttgtcatggtagcacctcaaggtct

SEQ ID NO: 112675 - DNA, 846 bp, Zea Mays
gtatttcacgattcatgaacactattctaaacgagagagagagttgggaattgggagggtaatgcttactgaattgggctgctccaaaatgcatttcaagttcagtctagttggaaacttcctccataaacaggcctaaccattcctgaccccgcggtaagcgatctgaaaacctattgggccaaagcccatgagctctacgagcttggaaaaagtgaagtgaagcactaggccacagagggcgacggatgggacaacaaacgtgacagaaaacttgagcactcgcatctcgggcggaggacagcttggcagcacccgtcaaaattttcagctccacctgactgtattcgagggcttttgcgagagcctggagaagagaacgcaaacgcatggctgcaaagctagcaagcgcctggagaagtggagactggagagcatcggaaaatgtagccgtgcttggcatcaaaagctgactgaatccaaggccgggaaatgtagcccctggaggagtagcagctagcagtagtgtagtagtactatgcagtctctgaaaaaaagtgagccagacttccgtactgtttgaacaccagcttgtgcttgtcctaggaatcgtagctttggaaaatggtcgcactgctcgtaccgtgctcgtgttgtgttgctccgcctcagctgaaaaaaagctactaggtacaaaaaaaaacttgtgtgcactgttctaaaagccgcgttggatcagccatcctgaaatccggctttgccctaatgggaatcggagctgtagcaacagagaaggtaacgaaagacgagcgagctgcagctgtctcctgatcgagtgaagcttct

SEQ ID NO: 112676 - DNA, 530 bp, Zea Mays
cagaaacgtgctacaaacggtgctcctctgtctgacacaatagtccttggtattccatgcaaacacactatctggtcaatataaatttctgcataattttctgccctatgggtggtatgtactggcaagaaatgagctgtcttagttagcctgtccacgatgacccaaatagaatcgtggtgtcgggatgtgttgggtaaacccacaataaaatccatgatgagatcctcccatttccaagatggtatggggaggggctataatgtacctgctaccttcaaatgactggccttgattctttggcaagtgtcgcatccagatacatacttagcaatttccctcttcattctggtccaccaatacaaagatctgagatcatgatacatcttgttactgctggggtgcttggagaatttggaaaggtgagcttcatccaatattttctttctgagttcgggattcttaggaacaaccaatcggtcttcaaaccatagaactcccttgctgtcctgacgaaagcatttgtactt

SEQ ID NO: 112677 - DNA, 603 bp, Zea Mays
aagtcggtaagatgtcttttagagtcggagaaggaaaaaaaacagacaatgccaattctgaggtaaaatgggccttttgcttatatatgtccatggacttcaaacttccacaatctcttgaggccttcaaaagcccaatctaatcgatccagtccgggtccagattttgactcctgctccaggctcgccaagtcaacgatttataggatcgggatcccacttcgagaagctgaaatcgaggggagaagatgcctgccagtggaagcaaaggcgaactccgctgtcttcttcctaattaaaatcaacccagcattccggcaacctaatcaaaaccaagtgcgtgcttcacatgtactcgcacgcctccccaggctggcaagctggattatattggtctcatcgcaaggcacttcgaatcatgcgtgccttaatcaggagcagatcgagatgacacccatgcaaggatcgatgtacagtgacagatccatcgatcggagtatttaattagctttcacacactacgcaacattatggaaaatttcatgggcagtttccctatttttcaagctatatatcggaaccggtagtattgtttttaattcc

SEQ ID NO: 112678 - DNA, 323 bp, Zea Mays
tgccaaagcagcaaagctagtagagcgtctgctaacaaacagtcgatcaacaatcatgcagcaacggagtgagagtgcaaccaaaaaataagcaaatgattgaccttatcagttcaatgctctataatgaattgaatgaagcatgactgcatgagagtaccacaagcgcagtcagctatcgatcagaaacttgcactgggaacaagcgtgcagcaggaatatggaacgagggcgcattcaccattttatgatgttaccctcgtttcggactcggtagagaatgtcactatgcccgtgtccttgctaccgcgagtcaaggtcaa

SEQ ID NO: 112679 - DNA, 441 bp, Zea Mays
acaatacaagtatgttactactgaagctaaaataatttacgaagctaaatcatgaaagatatacctataagctggcacgttctgtggcttcttcagcttttctggcccgttccaaggcgtcatgagattctttctcctctctaatagcttcgtcaactatctcttggccacccttcagccataattctgaataaaaactttctgcttagagcggtggctttggccgaaggatttttaatgtcgtcggctgaaagcgagaatcctggctgaaccacagccttggcatgttcgcagcctaccttttcaaggaccgatacggccccacgagcaccggcgaaggcacagaaatatcctctgtcactaagaatctcttcaaaagcttcaactttgtcgttgatccagcggataaccccgtcaggatcaccgcgaacaaagttttgc

SEQ ID NO: 112680 - DNA, 445 bp, Zea Mays
ctcacaaagaaaggtggccgcgatgaaccgagaggaacaggtgtgtgtggtcaccacttttaggttttcaggggcactggggttttcttgagatggatggacagcccaagtgacaaactaccctcatcagagcctgaacacactttgtactgactcactttggccaagaattttagagacaacaacaaggtctctatctgcacccagttctaaagcaaggaacagggagtatggaggtgggttcctagactctatatgctcacaggagaatagacttaaggatcacaactgcatgcccttgtgcacgtggacactctcacttaagcccacatagagtctaagcataagagaaaacctttgaacccattcactgcatgtttgacaggagagcacctaagcacacagctgagtcatcacatttggatatgcccaatcctgcctctgc

SEQ ID NO: 112681 - DNA, 305 bp, Zea Mays
ctgagcaaggccactgctcccctgtgaaaggatcaagatgctcaaaatgaggttcaattagactcctccaaattttcttttaaaaataaaattctattagcaagcccaactttccttttgcgtctagaagtttgttaatctatcaatcaaaagtttgcaccctatgttttaaccctatattcctatgctagcatgacaattctagtaatattaatacttgattataattgtttaaatgtaaatgctcaaagtagaggaaggattaggaacgtcttgatgttttcatgatatcagtcatcacttcc

SEQ ID NO: 112682 - DNA, 488 bp, Zea Mays
ggctgagcctatcaacaggttcaacacagccctcttctaaatagtgctccactcatttaccttctaagagcactcgcactctcctagaccaactcaaataattcttgcttccttctagcttcacatcatttggaacgagttctaattttaattcagatgagataggcaaagccttggggccaatcatacctagtcccatgagttcctgaaccatactcctcatctcatttctcatctcactttttgtgattagtggatcctcttctttcttgtcaccatgaatcattgtccttttttcagcctcttcctctaacctttttgcttcagtctcctctgaactcatcatcatcactgcctgcaaacactaagacgaaccaggcttccttcccctctctcaattaatctgcagtacctccaacctcactagtcgtagcaacagcccgctctctttgtaatcaccgcccccagacccatctgctggactgccg

SEQ ID NO: 112683 - DNA, 923 bp, Zea Mays
gcggagttgttacgtatgcatgttgcctgccgattaagagcactgtaccaccccttgtgcaaggttctcgagcgcgacggcagtgccccgttttgatcccacttggtagatccgatccatcacggttagtctttggtctgtcaaagatctgttcaatatccatacggctaggccttgcatggtggatggacgttctggtgactgttgggcagctggcgttagttcggagtggggattgttccgggagtcggctcaggtcagcttttaggcctctgttccagacggcgtacgggtgacgatcattaggcccagccacgtgcaggacgttccggtcgtatggtgaagctttaaccgtagtggttcgaagcctgctcggtgcggataaagcgggatttccaaaggccatcgactctttgcaccaccaaggcgtgaatccgatgcgagcccagggagaacgatcgcctctttatggcctatatgacctggggagccgaacacggctcggactgacatttatgtgtgttttgtgcatgcagagaaccactcggagcacctcgacaccttcctgatcaggtataggttaggtggcacgccaggcaaacctcgaagcccggccgtacgccaggatctgggtcgttgaccgagggaccagggcccactagtagtgctgggagcctcacggctcctcgtgtcgcctgccgtctctcgtcggtgggtttcggacgacgagacattatggcacgcccagtgggaccgacaatgtcaacatctgcgaaatcagctgctcaagtgacaaacaattaggcgaacatggctagactagggcaagaccggcccatcacatatgaagagctgcctccagaacaccaagcgaagtatgatcagatcaaagctctttttgaagccgacctcatcgattcttt

SEQ ID NO: 112684 - DNA, 275 bp, Zea Mays
ttgtactattatactccctccattccaaaataatattcattttagctatttcttcttacgtctatattcaaatgaatgatgataaacctagacatatatctaaaacgtataaatcaaatgttgtatgaactcactataaccacaaaacgaattctaatatggtatagatggagtagaaacgattcttgagtgtgatattcaggacaatccatttgtggccattgattttttcgctaagaaacgtagtactacctcctattgagcaccatttatgg

SEQ ID NO: 112685 - DNA, 368 bp, Zea Mays
gtgtgttgaaggggataagatggggaccctggatctagaaactgatggatgagagtcgattgtgggcggtattaaatccaaatcatagtttcttcatccagcggctatggggagaatagggtgtcgcgaagcgtggaccgtggatacgtgatccagtggttgaaatgcaatgatgggccattgggaactcgatctaatccgggcgctcgattggggatccaacggctctcaaccacccgtaccccttcagccaagatatcttactaaagagacccttacttttgcagtaactaaccccgatccactgttgctgtgcgctgggtctcgggattcttacgtggtggccccttccttctctagtatttggc

SEQ ID NO: 112686 - DNA, 464 bp, Zea Mays
ctgctaacggagcaatcggcttaagtcggtaacgacttaaaacggtgcaacatgctcgcgcttacttaactcggggtgaccactatgccctgctaacggagcaattggcttaagtcggcaacgacttaagacggtgcaacatgctcgcgcttacttaactcggggtgaccactatgccctgctaacggagcaatcggcttaagtcggcaacgacttaagacggtgcaacatgctcgcgcttacttaactcggggtgaccactatgccctgctgacggagcaatcggcttaagtcggcaacgacttaagacggtgcaacatgctcgcgcttacttaactcggggtgaccactatgccctatttacaaaagcaatcgatttaagtcagtaacgacttaaggcgatttcgcatgcttacgattactcatataggggtgacttctatatcccataaacaagtttcaaa

SEQ ID NO: 112687 - DNA, 620 bp, Zea Mays
ctccccagccactctctgtaatactcatccataactcagtcttgacaaaccagtggagcacagtagggatacacagatcttttcaaggttggaaaccaacactgaattctattgagtccaacactccactgtccacctgaaccccttaggtttacccctttatctctctatttccaacagcaacaaatcgaccaaggctaaccaaatattctcacaaagcaaagtctaccatcttgctaaaacacacaggtcaaaagtttcagagccccaaagtttcctctcaatactcagatatttgaagcctcatatctatcctctatgtcgagcacacaggacaagcaagcaagcaagctcctgccgatgtgcagtttgagcacgccgcttcccctccctcctgtccaactaaaacaaattcatacccccacacgcccagctaatggattgacttgaaatcccctttgaactactagccttttgcattttaaatcacagcttcaaatcacagacaagggaaacatagctgcagcgtggaaagttttttttgctcccaaaaactgaacccagttttcagtcacctaaaactgaattcagcactaatcaactgaacccctacctttaac

SEQ ID NO: 112688 - DNA, 612 bp, Zea Mays
ggatccaacaaggcgacacaacgctatcaccacctctgtggcgttagacgctgatcgctatcacgcatggtctagcggtccagtgatagctaggtgccacctcctccctgtagagaatccctacttcgtgtcgtgaatggaggctggcgaagcacgcgatgggtgtgaaatacatgggaacagctgagtggatgggggaagggaacgaaggcgtcaccctttaagaggaagatggggcttagcgaggagggctgaggcagcatcgtgggcgaccgagagagggagaggaggtgtcacgacggttgtgactttgagggacatgcttatcttgacttagctcattcatggatggtacacttcgtggttgtctcatggatgccagggactaggttgttccacatcgctcgagggagacgacacacgaaggggaagatgacgcatgaaagttctgtattaaaggagtagagatgtgaattcttatgttgagcctccacaagctcatgagcaagtcaataactaaatttggatgaaaactctaggataaaatgatgagtggcaatgaggacactcttgaagcctctccaaccatatcatgaccgtcgaaaataaaat

SEQ ID NO: 112689 - DNA, 519 bp, Zea Mays
ttgcaaataaggctcgacaaaggggtatcgtaaattctgagtcgcatgattaagatcctgcggtctggattatatctgagcccccgcaggcacgcgagccaaaggatcagtaatctacggtgaggattctattaacacgggatctgatctccgccccacgatccctaattaacgaaccggatttgatctcgtgaaaggttacacagccttctaatcacagccacacgccgccgatccgacggcgaccgacccatcatctaccccaggcagcacagccctcagactccgcagcccacggtggagcacaggccggcgaactcctatcccatgcaaagatcaccaattccgacaatttcttggtgcaaaagcaggtgcacacgacgacgaattcactgggatgatcccccaacatgactttgcccaacgatggtggtcagagtgtcagacacacatggcggagcggcattgtcggtgaaagcgcatggcccacatagaaatccaaacccggagcacgacaag

SEQ ID NO: 112690 - DNA, 376 bp, Zea Mays
gtggtcggccttggctggttactgaacaccttagggcttttgtgtcgttgcttgagtatgcttgggaccctctaactcacttgtgcaagtagcaatcgcattcgattgcgagcgagtgattgccagtgcattgtgttgaaagattgcaagctgcgacactatgttaccgagtttcaagctagtgtgcttgttccttttggaggttgctacctcctagatggcttgatatcttgtctgaaggttgtgcacgtgccaccacttgtaagaagatcggcgacaacctttaagcttgcctcaatggggattaagaccaccaaatcttgagataaaaaatcattatttcagcactatttttcctgtttgcatgcaattcgct

SEQ ID NO: 112691 - DNA, 322 bp, Zea Mays
acgttgccacaccgaaactctcttgctctagttactcagtcgttgccacacagacttcttcctcgctgcttctgggagggatggacatccggcggcctggtgtccaagcttgtagcacttgaagcatcaattaggccggcggcaggtcacagcaaggtgtgtggaggaaaatcaattataacattttccccagaggtccacagggaccatcgacagggaaggtgatcaccgcgagacttacttttgtgttgcaccacttgccagccgtcttcgtccagtcgctagggcaccggccgactctgcaccttaggtcatgagccga

SEQ ID NO: 112692 - DNA, 438 bp, Zea Mays
tcacatcgggccacatactgtgctatctcccttttcatccctttctaccaatacctggtcttaaggtctaagtacatcttggtggtccctgggtggatagagtaagctgagttgtgggcttcatcgagcagggtttctcgtgtttctcccactggcacgcacaggcgatccttgaaccagagggctccttgattatctgtcctgaggtccgggagttgctcctttcgtgctctttccataagcttggttgtttctgtgtccaggcgttgggccttgcatatgaggtcttctagatttggcttgacttccaggctaccgttgtctcccagacatgcatttagccgagctgattctttcttccaatcttccaaaaagtttgctcctttaaccccgaaaggttttctgctgagggcgtctgctaccacgttggcctttccg

SEQ ID NO: 112693 - DNA, 364 bp, Zea Mays
gagcaagggctaagagactcacgaatgtatcctttatcaagcagtgtctccacctggcgctagatctccattgtctcatctggatttgtatggtatggggcacggttcggaagagaagcgcttgggatgagattaatctgatgctcgatgccacggagcggtggaagacctggtggtaagtcagtgggaaaggcatcagcatactcctgcaaaaggttaacaacagtagggggtatatccaaagacggcgcatcatcaagcggaataggcatacgagtgcataacagggcatatgagcctcatgtaaatcatcaaaatcagcatgtgtagcaagtaaaataggagcattcaactttatttcaga

SEQ ID NO: 112694 - DNA, 421 bp, Zea Mays
aaccacatgtcctcaaatgtaacaatgtccttttcgcttacaccaacaaaagcatgttttcgtatatatacattgatggtgtcgacaccaactgaatatgccctcatgtaccattcatgaaacagtttaatactagctgagacctttcttagtttctccaaagtgtgtagaggtctgcctgacacatatttttaggcacatttttatagttcgcctgggttggcttatttatctttatggtcattatctcggcgtatattgcagacttctcatgctcgtggatgaatatggagtggagcccttaatggcgatgcttgtggagacagtgggtcaaaaagaggatgaggagaagcaggtgaagtttgagaaggtgataacgatttagcaataggatctgcaggtgaagactcttgcattaggg

SEQ ID NO: 112695 - DNA, 924 bp, Zea Mays
gtgaggtttttaacgaggcggagccatgtaatataataccgcaaagcccgccaaataaaagaaaagtcaaactggcaccacggccatgggtctcgaaaaagaccgcgggaacagccttcgacattcgacgcacaaaacagtcaccgcaacaggcagcctagacagccttcgtgtgtgacacgtccgagcaaaagttgcctaagggtgcagctgaacaaaagcacaataagtgcacgacaccacccacagggtgcgaagtcttcaacgaagacacgttcgagcagaaatcgcctaagggtgcagccgaacaaaagcacaataagtgcacaacaccacccacagggtgcgaagtcttcaatgaagacacatccgagcaaaagttgtataagggtgcagccggacaaaagcacaataagtgtgagagatgacacgtccgagcaaaattcgcccaaggttgcagccggacaaaagcacaacaagtgcgcgtcaccacccacagggtgcaaagtcttctacaaagacagcttccaatcaaaaaacgcccaagggtgcagccaaaaaaccaacacaacactcgcggtacgcgatccccactacataaacaacctaccgaacatatgccgcctatgggcgcaactggataagtgaaaaaagttgtgcaatcacctatcaaaagcagagtcccctacgacacgaacgtgattacaaatcgaagccaactcgcaataggcacaacataattacatagcacaatcacaaataaacaacaagcgaagggctcagcggcaccatcgcacaatattacaaatcacggcttttaccctcacaactctattgcaaagagggggagggcagtgttttcacttaatatcgcaacagagcaatgagggcaacaaaaatgtcacataggctcctccttcgaaa

SEQ ID NO: 112696 - DNA, 652 bp, Zea Mays
aaccaaagtgtccaatggatagtaaaaggtgtatgcaacatgtttgaatgatcaaacctctcatacttaacctttccgtcgtgttgctccatttggcttgtttgagcttggggttggacttcaaaacctcaattcaacataacttgatgcctttagaaaactatgagctccatcaccctacaatggtcaacaagaacaactccaaacacaagaatgacctaaactacaagtcaaggcatacttagctctttgtgatcttctaggttctgactttgatacttcagcacttcttgtgaccatgactccactttgagctagatcttgagccttatgacttaaaccattaaaccataagcattacctcaatgggtgtaagtcacatccatatatcatagtcttcaatgcatcatgactcttcatagcttgaacaaccttaacctcttgcaagaacctcttcttctccatggccttaggtaccttagtcttcctgaccacccttgctcttggtacctcgaagtccttcttgccttcatcctcagttcaatctgttatctctaagtcatgcatattgagttccatatagcaatgtccatccttcaacttgacttgtgatgtccacaacccatagtcattcaacctattagaacatcac

SEQ ID NO: 112697 - DNA, 305 bp, Zea Mays
tttcaagccggttcactaagtctacagcaggaattcttctgttggtgacccgggttgagtcagctagacctcggtacagataggccgggcatgccctgtccttcaacggctgaatgttcttgaagacaaaatcagcaaccacagcctctgcagtcagacccctctccttcagtagttcaacttcagccagcaaagcccctgcctcagccacctcctgatccgtaggggactcggtccaactcggagtacgaacatctggctgtctccctgaccgtggggggagagaatttccgtggttctcaaca

SEQ ID NO: 112698 - DNA, 279 bp, Zea Mays
cttgattaggtgtattggtgtgtcgagaacatggtttatgtggcgcatgtgattctggaaaggtcttctagaaatgtatgatatgatttgtgtcatacttgttgcatccatgattgtgccaggtgcccgtgtttatattattggataccgaaagcgggcacatgctgcagatttgtttcgcgtacaggatcgttgtctaatatgatgcataagtgatcgcaaccaggcgtagcgaaagaggcataatcacaagtcagcagcacctcagtaagctttctg

SEQ ID NO: 112699 - DNA, 502 bp, Zea Mays
aatgctcgatgactccttctttaagaagccaccactagccgacccctcctttcctactgaaggaggaggtcagttcccatacgaggggaggcccaaggagacggacaaccagacgcaaaaacgacggacggacggacgggaggaaggaggacgcacagacgaggatccaaaggcgggagccccgccgccactctgtagcccttagttccacctccctccaccacaagagatttgggagcctctcatccctctctctcgctcgcttgtaacccctactacgagcatcgatcagcaatggtgccggtagcgcaagcctcgaatactggatgcagagacgttctgaccgaaccaatataaatcttgcgcccaccacacacacaggtcttgagctcggaacgcacacacaaatttatttgccagagataagttcgaaacacggacacttagccccttttgatagatcaaattcgaatacggacaaataatataccttgcatcccta

SEQ ID NO: 112700 - DNA, 1702 bp, Zea Mays
ctttgtcaagagaaggaatactttaagtattgtcaaaatagatctaggtcaacatgttttcaccccatcagcttcagaattcatacagactgcaaatatgataccacaactaacatatatagaaattcttttccagggaaaataatagggatgagttaatttgatatacaggttctcagttttaaagatttcagattgcttgaaatgaatactgtgcctgttgacttcctttttccctctagaacacacttcatttttttagaaaaaaatgcagaaaggaagaggggttccaaaatggaatggttcaagatccgcatgcacctctgaagttgaactttgcaagcgtctcagagatggtcgacaaggacgctgggtcaccatcaagaaccagcgctgaaagcctttccatcattctgtcatcaaggtattttgacgacaaactttgagtatttgttaaggatgtataatctggttctggtgtgagaccttcgtagtgggtcagaggtaagcactctttatataatatataaatgaagaaaaagacagggctttaaaatgtgtggaatcgcttgtttcaatggtaagttgacctgtatttggactgatgcacaactgcacaaagaagttagtaaagccaagagatatggtaactcaagcaatacatcagcatccaaagtcaaaactatttttctatgcaaaagcttgcaaccatgttgctttcagggtgccatactctctgagctatggagtattcgttttcaagaaaaaaaactagtgggaaactggtaaaatattaacatgcaaacctctaccgttctatttattcctctttgtttgcgatttgtagcatcaaatttgacatgctaatgcaattacaggaaccactaagtaccaaactatgatggcagtaattgccacagcacatggttttagcaatgtccgtgggaatctgttgacaaaatgacatgcagaaaatgggggacaaaagacaacaacatcgcattaaatgaagccgcggccatttcggtgccattagtataataataatacagtagacccctgggaaacgaatatatgtcataccatatctatgggcagtccaaaatggcattgaaatctactttttttttgctccctccaaaaccgccctgtttcatttctctatgaaaccaggagagggaaaaagtaaatgccagtccttgagggcgatgtctttactagttctagggagatttacgcccagaagaccacaaccaatctgtgattcccagttccattttggtaaaagtctcgcgatgacattatatacttaaactagctctgagaagattcaattctatttcgtacatttcagcaattcctggttcctgctacagtaatattttggagctggccccccttatggtgcaatgcaatctccaggcccgttctctgattgtatatgtatataccatatcatactagcaacaacctgcattcatcagtcggtcatagcagccggcaagcctcgggtgccaaaagaagaagaaacgatgaaaaaatatcaatgctaaatgaactcagtaatccacgaaaaattaacgagcggcgtacgaagtggaaacgcacatggtagaaagtaccgcaaaaaccgctaagctaaactgcggcgccgcgtaatcatagactaagggtttatccacctgcagacgctcactgcttg

SEQ ID NO: 112701 - DNA, 323 bp, Zea Mays
ttgtttttaagaacattcagccactgaaagacagagcgtacccagcttatctgtatcgtggcctcactgattcgacccgggttaccaacacaaggattcctgctgtggatctagtaagccggcttgagatgattcttagaggcaaggtgtcgaatattggtgctcctgttgcatactcagcctggaatctgcctccttccaaggctttcatcagttttatgtcaaatcctcctactggtgatagtggcttgggtcttagagtgcgaccttctcccaaagaggttgaggctttggttgtttcgctcggtgaaatccccgatgac

SEQ ID NO: 112702 - DNA, 877 bp, Zea Mays
gaattattaggattattgatgcgtgtggagcctgatataggtactagtgagagttgtggcacaagtgctggcaacgacatccaggtacgcacatcgtgttattatgaattttgcataattacatgtcgataatgatccatgtatgtaatgatgttgtaggtcgaagcgtatgaaacagaagacatagttatagacaatttacgcaaattagatgatgggaacgaggtatggaacataattttataatgtattatttatgttgctctataaaaattgtgtcttcactggagtttgcgttatttcacaggaaaatttaatggagtctaatataaatgaatgcaatgctaaggatgatcaatgtaatatgccgatattaacattggaacataacactgatacgcgactggttgatagtagtgctacggatgtggaagctagaaaggtaaaaacattgctacaatatatgatgaaatacgtgaatataaaaactgacttaatatctttgatttgtagaaactggattttcatatggaaggtgtaaacttagcaagaccagataaggccaagcctaagggaagaacaatcaaaagtagtgagcaacaagttcttaaattgggtgcgaaaggagctaaggagatgagcaggaagtgccagaaatgtggcacagctgatggtcacaacagccgtacgtgtttaactgtggaggataatagggttcgattggctaacctatctggacgtaagcgagaacggcctcctggttcaaggaacaaaatcatagctgcagcaccatagtggaatgagacatcaacgtcgaaaaaaagaacagtggatgtcagagatgatgattcatctggtagagagtagaataccataa

SEQ ID NO: 112703 - DNA, 396 bp, Zea Mays
tgaccatcagtaacgaattgtcactttcaattagttatggctggagtcatgaagatttgcacgctcttgacttgtgatcaactgcacgaactgtatgtcctatggttttactgagctaggtcatgaagatttcccatgcgtacattgggtatgttttcctaatctcaccaccgcagcgtacatgtatgggcacacagaaagctggggatctatgtgagaattcattctccgtcgatcattaagtatttagaatctcattgtgagaatctatttatggcccatacactagcttaaatcatgagcttttctagccattagggggagatttcaagtaccaaaaagaatgccaggaaattataatgaatgcagtaagcattcaagcttaggatcacgtac

SEQ ID NO: 112704 - DNA, 566 bp, Zea Mays
gttgatatagattaaaaccaaacgaacatgtcggcaacttctagccaaatctctatttctataaagcaccagtttcgatcattgttctgcacgaatcatataagtcttcccctcccctacttaccactctttttatatgtagacatcgtatattaacctccaatttcccatctcttttccatccatgtattactcatccagattcttccgcatcaccataataaaatcttactgggcgagtcactatagagaacctcgagcagacatcctgctaggtgagtcaccatagaggaaatcgagcgggccattctgttgaagctaattttacagcttttttaaaagccaacttataggtcgtttgtttgaaactgacaagatttaagaataacttgcatgtatatatcaggatgcccttccacaactgcttttccttctccggagcccctaaccaatacgtttcgcttgtaataatgtaacgcatcactggaacttggagctgctatgtacgccatcaaagggggtcaccagaaacccacctcacaaacatagcaaagcattgccttggc

SEQ ID NO: 112705 - DNA, 549 bp, Zea Mays
cgataggctacacacgacatggcagcgtgcgggttgcatatgagctggcggttggtagtgcagtgacacaagcatgtcagcacgataaggtgatgagagtgaagtgaggtggatagtgtggtggcatgaggcacgatggtgcatgaacaaatggcgagtaagcgatatagtgtacgattgtgaaggagagaaagaatgagaggaatttgtacagtcccacacaatggatagacttattgcactactctctagagcactggacgtacgcggtctggtcgaggtggtcaagtcagagatttaggttaaggggattagattgtggtgactagttgttccctggttagggttgccggattggagttaccttgattggggttcactcgtcatgtgaagatgcaactctgtgttgtccttagggtaccccaaggggtaactttttcaaatatgttaactccacaagtgttcaaaatcttgtgcctgtaagttatcctttctaagaggattttcacttccttctcaccaagccacttgacttaagtacatcgcgag

SEQ ID NO: 112706 - DNA, 377 bp, Zea Mays
tggtcgctggagtagtaggcatatacctaaggtttctcgacacgtcactgatgaacttgaggtcgctgaagaaaatctcctatcccggtgcaaatctcatagctgccatcaaacttgctatgatcaatgtgattattcctatctggcgcgccaactgtcgaggaatttttgcagtgaacttatgaagggtggatcatgagatcaagaactaaaaatgaatgcacaaagaacatgagacttatataggcttgggctctcaatatgagataataccttatgtcttgtaattatggtgtctattgcctacgcaactatgatcagatgatgtgtcctagattggcgctcctaccccttttatagtccaaggaggtgcggta

SEQ ID NO: 112707 - DNA, 446 bp, Zea Mays
gtgctctggcttctgttttattttggactcatacgagtcgaggccaccaatgatatacatgatatcttgcattggctctagaaacttgctcctagtgtcgtcgttttgagttgttgttcctagtggtattggagctttctgactttgggtctttgggtttacaccctttcaggagtttctacacaaaatccctgacatgtcagcactcttgtgttgtatgttggctatatggatggtatatgcatctcccctccttgatgctttggaacttgttgaagcccacctccttgatggttgcattacctcggcgttgtcgagttccccacttgaccatgttgacttgacgatcggatctacgcttctgggctttcttctaattgaccttatggttggctttgactttatccttttgtgatgaggtcatactatgcatcacttctttgcct

SEQ ID NO: 112708 - DNA, 480 bp, Zea Mays
aagagtgcgggccagaatagtactgtttggtggattacaagggcgcgtgggccctgagggtttaaacaaaaaatttgcggagattgtcaatattccaggaatgctctaggtcttcgccggatggcgttgttagcctgtacgcgctggggacgctttcgacttgacgatgaacggaccctcacactttggctccagtttgcctcgtgactctgtctgggtggttcggacgagtacgaggtctccttcgttgaactctcttgggacgaccacgtggtcgcgccaggccttggtttgagcttggtatttgttgagggcctgcagggcgaagacgcggtctttgtcgatgaggcctttggatgttggttcgtctacgtcggggactgctgatgtgcatgtttggggtgacccatgctttatttcctgcggcgtcatggcctccgatccatatagtagatgaaaaggtgtgaatccggttgccca

SEQ ID NO: 112709 - DNA, 920 bp, Zea Mays
gaacaagcctgctcaaggagaagagataacaccagagatgatgcaagaagtgaatcgcaatgctcaagccgtgagcataatcaagggaagcctaagtccgaaagagtaacgaaaagtccaagggaagagaggacgctcatgacatttggaacatcctcaaaatgtcacatgaaggagaccctaaggccaagagacataggattgagtccttagagagtgagcttgttagatatgattggatcaagggtgagtctctccaatcactctttgatcggttgatggtattggtcaacaagataagagttctaggaagtgaggattgaagtgactccaaggtcgctaggctattcatgagagcctacaaggagaaagacaaaagtttggcaagaatgataagaggtcgcgacgattatgaggagatgacttcttatcaattatttgccaaaatccaacaacatgaatctgaggaagctccaaccaagacaagggactctcatccttcggttgcaaatgatcaagatagcactaagaagggtaaaaatctcaagtccaagaaagtggttgaagactcgagtgatgatgaaaggtcaagggatgatgacacgacaatgttcatcaagaccttcaagaagtttttttgaaaggatgataaatttataagtaaaggaaaaataggacatgctatgagtgtggcaaaatcagttattttatagcggactgtccaaacaagaaagaacaagaagggaagaagaatttcaagaaggacaaattcaagaaaggagagaagggcaaatgatattttaagaagaataagtatggtcaagctcacattggtgaatgaaactccgatgagggtagttctagcttggacgaaaaagaaggggtgacaaacattgctgcctaatccacctcgacgtctc

SEQ ID NO: 112710 - DNA, 474 bp, Zea Mays
gccggaggggacagcgccgcccctgtgcccgaggtagacgaagttgttgtttacagaagcttcatgatgtcagggcttcggtttccattgagtaaatttctagttgaagtgctaaagcttttgagatttttattcatcagattacccccgaggccataatcaggatggggatttatatttgggccatgaggagccagggactagagccgagtgtaaaatgcttctgcaacatgcacgagctgtcctattagacgaaggatattagcaaggagcagtatcataataattttggttgttatagcttcatgccccgctttgatgtaagctatccagttcaacgtttcggaagaggtggccaggggcctggatggaagaatggttttatgtaaagaataacttagttgaaagggaagatataaaggggattatccaatgccctatttggtctcgcttcggcatcagaaggctggctac

SEQ ID NO: 112711 - DNA, 470 bp, Zea Mays
tcattgagatagatgatacaaattgattgtaacatactaataataagcagttgtcaaagtggacctaaatagattgattgaactgggttgggatgagaattgtacctacgacatcctggcggcgaggtgtgaggactcgttgtcctcctcgctcttcgacgtgcgcactcctcctctagccctggctatctagcgtccacacgtatgcctcctctctctttgggccgtgacaagcttctccttgatgggaactctttcggctccggcgtccgcatgcgctcagacaaaaaattgataatcagataagccgagagggaaactaggtgtagctgggcagtgtcgacgaagtgtcgcatgctcaccatttatcatcctcggatgcattgtcgtgttagtcaccgaaatatgtagtttttagaaaagcaaatgataaagctaaatataataaaatactaggtatgtacccgtgc

SEQ ID NO: 112712 - DNA, 475 bp, Zea Mays
agtttttatcgtctccagcacatctaacacactggccatcctttttctctttggggttgctgccagatctttttgtacctttggcgcctccactcctaccgaagggcttagagtttctgatgtttttgtctcttcgggtcttggttcttcaattttgtcagccttcggcaatgcagccggctcttcaattctctgcgtaagggcaggtctttcggcttcagtagccgaagaggtctcaccgccaaagtcaggcactgtggtcggttcaatgtagcgcggtcggtgagtaagaaccttcacctttttcttcttcggcgtgggctcgcttgaggcggctgaagcaacattcttcccagaagttccactctttctcttctgcccccgtggcgggtagcagtaatcagggtacataaatccaatagcatcaaaaactctatttagcctcttctttttcgactcccgaaggccgcagata

SEQ ID NO: 112713 - DNA, 658 bp, Zea Mays
cttgggaataatgtgatgtattgctatgtaagaaatgctttaccttgtgtcggattggtaagtctgggctaggtcgtgatatgtgtttctcttgccttgctttctaaaagggacgatagttgttcagtccattttgcctctaacaaaaaaaatgttgtctgtcctgctcgtgaaaagacccccttccccaaataatctagtggttccctagtgaaaccctttaaaaaaatcaaatcacgtgcttgttttggtgtttctgacccttgagtgttttacccttgaatttacacttgcacagcttatagaccaccacaacttgaccgctggaccaacccaagtctccttgtgcacttgttgtgtcaaaaaaatttgttgggtgtctagttgcacaaaccctatcaaggccatgttactttccataaatccttgctcctaaaacttcatagcattcctgttgatcatcctagctgatcctgtttgccgacctctcttttcacctggatctagtactctttttccttgtgaattatgttgtgactttatcattcgaatctctggatcccttgatgattctgccccgttgtctggttatctgctataacccgttctcaagtatcggatgttgatcttacctaaatctctcaattcttgtcgatct

SEQ ID NO: 112714 - DNA, 639 bp, Zea Mays
atatgtctctcgtcgaacctgttccagatcttgtgctctttttcgcgagatcattgaactgctccttctcacgaacgacatgttgctcgcgtcggcaatcctcgtctatccccgtctaccccttcggcgtccacctcgttatcttgggcccatgagtcaccgctgaccgtcttcgtctaattttatctaactctgtttgccacccgcctaacccagtcttcgtcgtacactgtgtcacataactcgtcgcacaactgtctctttcgctcgaccaggacgtgatctgcgacaaattttgcaaccgcctttcgcatcctatcttgtctataaaaacatccctagccgtcgcataacccctcgtctcgcctagatccagatcgcaggccgtgaagggcaacacttaccaggtacggggacatccctcctcttgtttccaatcgccaaaccgcctccgatttcccgagacccagatcacacgagcatgcccgttcggttaccggcgacgcaggtaagccttctcttctcccttttccttccggcgacgtgtagcagccctttcccccaacgaagcccctcccacggacgcctgtctcgaagcccattgccgacggatccgtccagccaacccccctagtctca

SEQ ID NO: 112715 - DNA, 640 bp, Zea Mays
cttttgtactgaataaaaatcatgcacatagttttcgatcctttcacttctaaaactagtgatgacaactatggcatggtcacaaggtttaccggtgtggtgccactccagacatgaacactccttcgctcctagatcaacaatatgtctttcttgtttagggctattatcaaaaacctcagcatgaccatttccagcatttacaacttttaaatgaccaagtcctctagaccttatattcaattgatgtactatagctggcaagatagttccacatagtttgccaccaattctcctccttttctcccaaaggaccataataagctctctaattttgtctgctagttgaactactggcaggtctttgtgatctttgacccaattgttgaaacactatgctaaattattgttgatgtagtcgcattttatatctggatcaaaagtactcctcatccacttgaacttgtgatctctatttagccaggtaatcacttcaggatcagaatgcaaaatgggcccaatatgtctatcaaattcagcttgtctatatgctctagaagcaggatacattcctctataactatttccatggaatcttttgatgaaattttgcatcagatgtctgaaacattctctctta

SEQ ID NO: 112716 - DNA, 461 bp, Zea Mays
aggcgacgacctagatgactctagtgatgatgatgaagacgatgatgaagaagaagatgaggaaaacctcaacgatgaagccaacgaagaacatcagaaccactatgtggggttatggcctgtcactaaacattacacctcaatgttcgagacagggcacttccctaacctgctgcaggatgttttgcacgcgttgggaacctacgtccgacccctgtgctagaccaggcgagtgtacgagcctcctcgggcttgctactacatcactcgcattcatgtcagggtgatggatgcaggtgatagagggttcaagactctgtcagcacatgagtctctgacgccgctatccacctacctgcttcggtcagtgatgctgctcggcgaactctatggtccctcagccacacctaccggcagcagctacacaatacaaagtacaggcatcttcctctgcgtattca

SEQ ID NO: 112717 - DNA, 365 bp, Zea Mays
tcaagcgttatatgaaccggtattgaataaaggccactggatcaagatccgagggcccgagttcaatgaagccaaaatcaatcccctcccatcgatgagcgatcaacggtccacgatgcccgatgccaagacgccgcccagatctaatcgtgtgcgtccactgtggatccaacggaccaggcgccgtcttcctccgccgcctaggtcagccgacggcaagggtctgccgcgcggtgctccctctgccggcgaacccagaaccggccctacagttaacaacttccttccccaaaacgtgctatgcgcagatagaaacaaagcgaaacggattctgggtcacttaccacaatgcgcgcagaggggac

SEQ ID NO: 112718 - DNA, 422 bp, Zea Mays
cgccggcctgacctctcacttccgccgccgctaaccgccgccaataattcagatggacgagcgaacatggacgcggctgtaaagttgtattagtttcctgccgtaactgcgcctttattttcgcgcacgaaaatcacgtcttgcctcatcccaaaacctgccgtgaacgtttgcatggtttacgctatcttgtatcacaacgttatgcagtcgtaagcgtctagcacatgcagatattcgtgcgcgcgattcctggcatgcaaagattccatttatgcatgagttatgcacatttgtacacaaatttatgcttgcgtaattgcatgtcgcgtgtaaagcgggatacgtggttatcctttgcataaatggcgcaggctggcgtccagtgggcctaacgcgacccgttcggtctccctggctgg

SEQ ID NO: 112719 - DNA, 333 bp, Zea Mays
gcgttcagctttgccattttgagaggaggtgtaagggcaggagagtcgtgagtgaatgtcgctggaggcaaagaatgtggtgagggcattattaacaaactcagtgcgattatcagcctgtacaaccttgatagggaggctgaactgtttgtggacataagcgcaaaaattaatgatgtgagtggctacctcggacttacggactagagggaaagtccagcaaaagtgagtgaagtcatcgaggatgactaggtagtactgcgcaccagagacactggcaacgggagaggtccaaacatcacagtgaataagctcaaatggtagagatgaaac

SEQ ID NO: 112720 - DNA, 524 bp, Zea Mays
ctttcttgaaaggcccgatcatgtccagcccccagcatgcaaacaaccaggtcacagaaatagtctgtagctcttgcgcgggtaagagctgttgttttgataggaattggcacgcctcgcacttctggactaactcggcagcatcattcttcgcagtcggccagtaaaacacggatctgaaagcttttcccaccagagtccttgatgttgcatgcatgccacactgcccggcatgaatctcatctaatagctgtctcccggtagccgaatggatgcacttcatgaggactcctcctactcctcttctgtacagcaggccccctatgatggtatagtggcccgactgtctcccaatgtgctctgtcatggccttgtcatccggttcctcttcgttccttatgtacctgatgatcggctctctctagtcattgggatctgcctctggctgacttagggtgttgcattcctccatctgatccgtgataatgctcggttgctgtatttcttggacgaagataccaggt

SEQ ID NO: 112721 - DNA, 1183 bp, Zea Mays
gggatagataacctgacttcctcttgtccatgacttagctcaatagtcatttggttggcattaataacaaccttattttaggctaaccaattcatgcttgaaatcacatctacgtcttgcccctttataactatcatattggtggggaaatcatatccgactaatttcacgggtacatggaagactacttccttagtaaaaatttgacccctaggtgattgaatattaagacccttctttgattcaccacaggtatgcaatgcttctcaacaaaagctttgctcatgaaagtatgtgatgcactagaataaaaaagaatgacggtgggatgaatggcaacagaaaacgtacccaccatcataggctctccttcaggtgtggtagccacttgagtatagtagacccgtccagttttcctttcacctttgcctgcctgagtgcttgccacatttcccttgccttgagatgtgcttccagaagccttttggaagtttgatttcttttgcttcggatagggacaatccttgatgaaatgcccagacttcccacggttgaagcagctattagatgaactgggtagggctaggaaacgagtaccaggggcactcggctgaatattttgagtagggatagctgttggacggatgaagactggttacttgaaaggatagacgggtggacgaggaaaagagcgatttgggttaaagggatgaatcaccaaccttgaccgcttttcggatccttgagaggatccctcactcccttcacatccaaacctttttgtcttttgctacccctaattctttgcctccatcgagagtgttgtgctcacggccctgctgaaagtgagatctagacacatggccatctttcgctgtagccaatcattcagacctctcatgaaacaattcttcttttttaggtctgtgtcaacttgctctatagcatactaggagagatggttgaatttggtaaggtattgcatcacatagtctcctccttgatttaagcaaacaaactcttccagtttcatctgcaaaacaccatctagaacataatgttccctaaatgcctgcttaaactctgaccacgtaacaagatgaccttcaggttgaacagctacaaagtttgcccactaggtacaggcaggacctctcagttgctgagcagcaaacagaggctt

SEQ ID NO: 112722 - DNA, 512 bp, Zea Mays
cgcatctatgagggagtctatcctgggcaaaggaaattcatcctttgggcatgccttgttgagatctatgaagtcaatacatattctccatttcctgttggcatttttaccattacaatattggctaaccattctacgtttgttatttctctaattactctagcactaagaagccttttaacttcgttccttgctccttcggctttatcatctgacatttttcgaagcttctgctttcttggacagatggtgggatctacatatagagaatgttcaataatgtctctgttgacagcacataggtcattgactaaccaaacaaagacatctctgttgttgagaattttgttagggtcttttcttgctcctcggttaactgagatccaaacaacaccttctgatcggttataccttcacacaagagcatggattttggctgatttgccgaagccgctttatcccttatatgcttgtgttgctggtgggattcagcttcgtctataatgtggata

SEQ ID NO: 112723 - DNA, 667 bp, Zea Mays
ttattaaatttgttttgaatttagggctctgatatgaattttgggccctgatgtgaatttcggatcctaatgtgaattttggacttttataatttcggaccgtccgaaatgagccccgcacgtttaagcaattacgtgcctggtcgtgggccgagggctaggctcgtgggccggctcgataaggcccgaaattcaaacgagccagaccggcctaaaattcaaacaatatagatctttttaggcttgggtcaagccaggcctggcggcccgaatgtatacctataccagacatgaaccgtccggacgtacgcagagtatgagccgctcctacgtccaggtcacggaccgtctgtgcctccgcagagagcaacgtcaggtggtttgttctagtgtttggcatcaaaatcagcgacaacaactcccaaataagtggggtacaaacatgaccataatcgatcggtgacttcaaccttattctgaatgaagtggacaaggggcaaaccttcttccacgtaccgatggctgaactagagagctccaagtcctagatctgcacctccacggccgcacctacacctggaacatcacagtgaggatctggcagaggcggctttcagggaatcagaggtaaaggatccgatccaccgcgcatctcagagcaacttac

SEQ ID NO: 112724 - DNA, 327 bp, Zea Mays
gtgccatctagtgctacaccggacatgtcatgtgtcctttagctgacttagtctcattttgcatactcaatggcaagtcgtatttagtggggtgtccagtgtgccaccgtatacgtatagtgcctactatatctcaaagttcattttttggcctctctacaagtcgtatccagtgtgccatgtagttccctgcctgttctgagatgtttcttcgacttcctttgcttgggctttacttggcttgtatcttgaacttttgatgacttagacaaatgtgcattgagtccttaaagttcttctaagtcattggcttgacaattttattca

SEQ ID NO: 112725 - DNA, 618 bp, Zea Mays
aagctttggagcacacacatagtaccaggctgtcagtggctatgcgatggagttactttctctatagatttcaaactactacccttgagtggatatgatctcatcctagacatggatcggcttgaacatcacagtcctatatccatacactagggccacaagtggctggaatttgcatataaagggaaaatggtgaagctacagggtgtgctacctagaactcaaacatgtataagtcttactggagtgcagttggaatccttgttcaaacagaaggatgtagagcaactactatagtaactacatgtcactgcccaagaaactgaggtgatacctgaagcaatagctaagctgattgaaaaatcccaacaactatttctagtactaaccagtttacctcccaacaggtggataaatcatactatcccactgctaccagtggtacaacctttcagcttaaggccatacatgtacacaccacaacataaagatgagatagaaaagcaagtcactgagatgtggagcagtggaattatccaagagagtactagcccctttgcctcacctgtactcttagtgaaaaagaaagatggggagtggagattgtgtgtggactac

SEQ ID NO: 112726 - DNA, 1113 bp, Zea Mays
caaatctagagctgcgtcgcgggaggaaaacagagtacctcgacatccccttcaaggatagcatcaagggatggtgcctcaagtggttcattgtggagaaccactgcaagtcccttcccccggtcggggaggcagccagatgttcgtactctaagctgggtagaatcttcaaccccttcggagataatggaggcaaaagtattgcttgccgaggtctgcttgttgaaagacaaaggtctgactgttgaagctgtcaagctgtggtcgttgatttcgtcttcaagaatattcagcctttgaaggacagggcgtacccggcttatctgtaccatggcgccaatgactctacccgggtcacaaacaaaagaatccccactgaagatctggtgaaccgactggatatgattctgaggggcagagtgtcaaatgatggtgctcctgttgcttattctgtctggcctcgctaatcccacggaggccgttgcaacagcgccgctgacctcgccctcggctatatatgcctcagccgtcgtaatcttcgccttaacccaaacttggcgtgtataagccacaccgttgaggggagatcgagagagagacaaagaggagaacgggtcgtcgccatcgactcacatcgggtgcgattctccggcatcggcgggtgatcaggaattgtcacatgttcggttgggcaagttcgaggccgtcgacgagcgtgtgacccttcagagccagacaaattgctcatcgtcgttcatccccgccgagagcttgtgccacgtcgagaatcgaccgcaccacgacatcaccggaggtatgaagtcatcgaatgagttctactttgttccctctacgtgtagaatagaatggaacatggtttggagccctagggcgccaaatcgagtatcccatccatggcgccgtcgcggatgtccgccatagttcggtgggttgggggtgctgtggcggtggtcatcggtctaaaattgaacgacctagattagatcgaagaaacttgttcgctacatacggtttcagccatagatcctaaatcatgcggacactgatgatcctggttcgtgtaagggttgatggcacataaggtaccggttc

SEQ ID NO: 112727 - DNA, 749 bp, Zea Mays
caagaactaaatgctcactatgagatgattctttgcctctctggcgcggtgaatccctcacagccacatacaacatcgagctgggtcaccaacaaagccatctacgtgatatcgatcaccaagagtaacaagctctatactttcacttgatcatgacaatcctaaaatgtgagtggtgtgtgatctaggtggctctctcttgcactaatgaggctctaatcgcgagattatgatttgttaatcacctcactatgcaaaggggtcttgcaagctctatgcaatgaaatactaagtggttgggaaggcaagacattcaatatagctagtggagggggacataaatacccaactacaaaaactagtcgttattgcacaacataatctgtgggcacaccggatcgatgctaagctggcaaactccaaatacaatgttctctaaaagattggttcggtggaccaccggatggttcggtgcccaattccagatcaagcacagcaaaggtctctctgatagaacggtccggtgtgccaccggactggtccggtgaccagcagagaccccaatccattttctaagtgtttttttgaattggtttttaatccaaacttcttgtggacctatgtgagatacctagcactagttttatgcatgggtacactaccacactacatgagccaagcctaggtcaagttactcatccaaaccccctttataatatgtctaaaaagaaataaaaggactatttcta

SEQ ID NO: 112728 - DNA, 506 bp, Zea Mays
gagggagaccccgctcggacaccctcgggggctgggccatagtttgcgctacccacttgagccggatcatctccggcagtaccctcgggggctgggcaatgacttgcgtttcccacccgagccgaatcatccctggcaacaccctcgggggctgggtaagtgtcaacaccatccttgaggaccaagttctctgcaacagccgcctctaaggctgaaggtccctcagttacttccatgggaacaagatgatccaagtcagtttcctgaccctcaaggccgcgctccaaggtcgatgaggcgcgggacgctgcccgggatgacctcaacccggcgtcgagcacatcaacacaaacatccgtcgcaccaccatccgctggctctgataacagatcctctggaaccatatcttcaagagtctgatcaaagttcgccagggacaattcttgtagaccaatgagagcagacagagcaggagaaggaactccactactttccccactggcgac

SEQ ID NO: 112729 - DNA, 898 bp, Zea Mays
tacatcggtgtcggtggcatcaggaagttcattcctctttcgggagaacctccagatctaatcctggagggtttccccactcttcttggtgcattgcttatggccccatgagctcctaggatgtttatacgtgccctggaaatttccacgaaagccttctagaggtcagcgtagtcgtggttggttctgctcggtaaatgctcgagctaggctcttccccccaacgaggtggaaggggaggaactggatgatcaggtgatcatccttgatcctcaccatgcggcaggcaaggtgatagtcttccaaccagacaccaagattggtggttctgtcgtacttcgtgatgtttgctggcgcacacactttcattggaaactatgccttccagattgcacgcccgaaggcacgtggaccggtcctaggtggggttgggactataatcatgccacttctcgggcgcgtgcaaatgctctgcttctttttgctcctgcctccggttgttgaggatgtggtgggtgtcgtggatatctcctaggcggttcttcaggggaacacacaacctcatggactgggagggatgtgccccttgctccaggatgaggtcgtgtgggcgtggtagctgtttgtgccggtcaattttcttttgctgcattgtggccttctccactaggttgtagaagttccggtacattgcccttacctttagttcgtctggctttgggacggatcaaagcatcatggctgtcgcggccatgttctaccctgtgtgttgaggaagtaatacgcgtcgttgctgccctcgacgagatgatcgtagacctttcttgcccgaggtcttttgacctcatggcgctgtcactcaatgtcattatagacttagtcaagtttttggatgagg

SEQ ID NO: 112730 - DNA, 325 bp, Zea Mays
aactctatgaatcatgaaattaaatatttatgaaactatataatgaaactttatgatgtattgagtgtttgtttcatccatgtttcatttcattctatatgacacaggagtcttgaaaacaatgccactaaacacccactaagacaactatatgtttaaaactaaacaactctgcaggcctattgtcggacagaacactctgcagctaacgaaaaatctataccaataacaaatgtgacatcaaagacattgcaaggatgcattattggtggcatcatcagacgcaggcttacttatcaatgaccctaccaagattaattcaaac

SEQ ID NO: 112731 - DNA, 303 bp, Zea Mays
aatatcacaataattttggttgctacagcttcgtgcctcgctctgatgtgagttatccagtttcaacatttcagaagaggtggccaggggcctggatgcaagagtggtttgatgtgaaaaatgacctggtcaaaagagaagatattaagggtatcattcaacgccctatctggtctcgtttcggcatcaggaggccgtctcttgcccttgggaatgacgtacaagcgtgccaagctgcttttgacatagtttgtacttacattggcactagggacatagtctaggagcacattgtttatagag

SEQ ID NO: 112732 - DNA, 337 bp, Zea Mays
ctgaataatcccttggctcaacatggtggcacactgacgctctaattcatctttgtgggctgctggatagcgatatagccgcacagccaccggtgccgaacctggcagaaggttgatgcaatgatcgcgatggcgcggtggtggcatacctgaaggctcagcgaacaccggcgtgaattcctccaataaggctggaaaaaggtcatcagagctgcacacccgaactgatggtgcccgcgatccggctacgccggtccagcaaacacgatggtcgtgatgccagaacgacatggtgagtgcactgaaatcccagaggatgggtccaagagaggccaac

SEQ ID NO: 112733 - DNA, 538 bp, Zea Mays
gctgattggattaccgcattcagtcgttcttcttcgagtatatcaatgtcctccagcctggtggcctcgacttctgctatgttttcgaagatcaaccttggtgccccgaacttgagatcggcgggtagcactgcctccgacccatagaccatgaagaaaggggtgtttccatgcagagctcggctaggttgggttcttaggctccaaatgacatagggcaattcccttatccactttcctacgaatttttcattcttatcgaagacctttttcctgagtgcctccagtatcatcccgttagctcgctcaacctgctcgttggctcttggatgtgctacagatgcatacttgatctgaatgcatttttgctcgcagaagtcgaagaattctgaacttgtgaagttggatcctaggtcggttatgatgctgtttggtatcccgaatctgaatattatgtcttgtatgaattccacggctttagctgaggttaaagaagcaatgggcttgaactctatccatttagtgaatttgtcgattg

SEQ ID NO: 112734 - DNA, 443 bp, Zea Mays
ccgcgcaaaagtcgcctaagggtgcagccggatcctccgtgcaaaaatcgactacgggtgcagccggaccaacacaataaatgtgcaagatcaagtgcacaagtcgcctacgggcgcggccggatcagcgaaggcacgcaggcttatcatacaaattatagttacatacatgcagcgagggcatcacacattacatcggctcaaccttcgggatgatacccatctccctatagttgaacagcagtatcctcaattcatcgccctcaaacagacttagcagctctccctcacctacactcgccccagccggcgaggccagcaattcccgcttgccagtcccgtccacacgaagacgaccaccctccacctcaccatgatgacgcccatcacttcacgacaactcactcactctccatttcgccatcgcccttcgccgcctatgc

SEQ ID NO: 112735 - DNA, 788 bp, Zea Mays
aataggactcataaatgtggactgtgggaccttccttatgtgaaggattgattttgatgcacaacattgacgtcatgcacctagaacaaaatgttagtgaaagccttatcagcccttgcatgaatatcactaacaaaacaaaagacaaccctaagtctaggaaagaattagccttaacttgcagtcaaccaactctagagccgggagaaagtgagaagaagccacatgctccttatagtctgaaacctaaaaagagaaagaagtaataaggtggttgaaaaaattaaaattctctgatggttacgcggcaggcttcagaagatctatgaatgtgaagatcatgaagctaactaggttgaagactcatgactaccacataatcatcgaaaaacttattcctattatgttgcagggttatgtgtggaaggcattggtcaagataggctacttcctgtttctgttttaccaggttcgaagcggctcattctcttgcagccacaaccaattctagagttgtaactagagctatcgatgaccaagggaaggtgattaattatcatggaggcattgctctttccaactcactagattgtaattcctagccaagaatgtcagtgagagaggtttggaagcttgtatgtgctcaatatatggttcaaatggccaagcgagatgttcaacacccggactccatctatttatagcactccccgtaaaactagctgttatggcaaactgccccctttctgcgcactcatggacggtgtgcgccctatggcctgatggtc

SEQ ID NO: 112736 - DNA, 322 bp, Zea Mays
ctttcaagtcaatgatcatgtatacctgaaaatatcaccaatgaagggtgttaatcgattcaggataaaaggaaagttggcaccccgatactttggctcgttccctattcttgagcgatacagaccagtggcgtacagacttcaactgcctgaaacattatctgcagtacataatgtgttccatgtatcctagttgaagaagtgccttcggattcctgatcaaactatcgatgtgatggatgtttctttggaaccaggtttgacttatttagaacatcccattcgagttttggatcacaaggataggatcactcgaaaaaga

SEQ ID NO: 112737 - DNA, 563 bp, Zea Mays
tgacctcattcagagctcgataatcaatacacatccttctggtgccatctttcttctccacgaataggacaggggcagcccaaggcgaggtgcttggctggatgtaacctttctctgatagctcatcaatctgcttcttaagctcaaccaactctggtccagatactctgtaagctctcttaaagatgggggcggtgccaggaagaagctctatggcaaactcaacttttcgctcaggtggcatgcctggtaattcctttggaaacacatctaggaactcggacacaaccttgataatctcaagtggatctgcttcactgctatcgacagtcatctgataacaacttcctttctttggcttaggcgggactaacttggtcaccacttcctctcctagtggggacatcaacttgattgtcctcttatcacaactgataactgtctgatacttatctagccaattcatccctaggatgacatctattccctgagtacccattactatgagattagcggggaacactatcccccttatttccacacttacattcaagcaaatgcta

SEQ ID NO: 112738 - DNA, 581 bp, Zea Mays
caaagtgataaatgtctgtatgatcgcatcaatacttggtgaaaaaattataataatcgcggatagcgaaaacataaaagcgagccttgagaaccccaaatactctcttttgtgtgccctcttagcatacaacaaacatcaattttttagagtttgtggaaggagaatggtcttctcaaacactggtcacagcctcacaggggtagatggcatcgacgagatagtgccttggttgtacttatgttcattcaccgtgaagttcacatccagtaataccccttgagcacattagcaaacaacaacgactggttcaacacgctgacgtcgttgtttcaccctactaacccaaaaaagtaaaccaaatctatatgtcatacaagataaccgtctcgagcacgaggatcgtagatctaatgtcacccctagtaatttgtcttttccatccaacgggatagttccctcacttttaatacatgcaatttatatactaagaaactctctctccccctttgctaaaagacatctaagatcgtcaatactaggacaactactatactcatcaccaaaatatgaaatgaaac

SEQ ID NO: 112739 - DNA, 644 bp, Zea Mays
caaagccaatgttgtggcagatgccttaagtcggaaggtccagtgcaactgtgtgagtatggatgcaaaaatcaccaccctgtgtgatgagttatgcaagctgaacatagaagttgtttcctctggtgccttaagttatatttcagtggagcccaccttacatgagcaaatagtcatggcacagattggtgacaagggtgttcaagtcattaaggaaatgattgaacaaaaggtggacaaatacaaatgcttccgtcaggacagcaaaggaattctatggtttggagaccgattggttgttcccaagaacctcgagcttagaaagaaaatattggatgaagctcacctttccaaattctccatgcaccccggcagtaacaagatgtatcatgatctcagatctttatactggtggaccagaatgaagagggaaattgctaagtatatatctgaatgtgacacttgccagagagtcaaggccagtcatttgaaggtagcaggcaccttacagccccttcccataccatcttggaaatgggaggagatttgcatggattttatcgtgggattgcccaatacctcccggcaccacgattctatttgggtcattgtggatagattgaccaagacggctcatttcttgc

SEQ ID NO: 112740 - DNA, 287 bp, Zea Mays
cagtaaactcactagtagcagctctaacccgcgcattctcaggaaactcatgacatgcaaacttttgatcaaccacaatctcccaagtaatgtaagcatcagggtcatatttactatcaaaaggaggtattttaaatttaaccttactaaaagcatcatcattaccatgtacctcacatcggcaaaaaccagccatacctctacggttagtacgtagtcgccagcgattaggtgcttcttggtcatcttgttcagtatcagcaacatagtcatcctagttaccttcg

SEQ ID NO: 112741 - DNA, 1085 bp, Zea Mays
cttaaggaccttaaccaagagctccgagagtactacgactgagtcatcaagactatagacgacaggctcattgaccacttcacgtggacccatagttgtggcaacaaggttgttaggcgcccgaaatttctgctagacgtcaacatcgccacatgctcagaggagtgcaacaccacccttctgcaagagatgaactacacgatccatcaagcgatggcacgacaattagagatcctcctcaactccatagagggtcattacatgagtggtaaatctattttggtcggaaactacactacattaaggcccatgtttgggtcacataaagaggaaaagttgttctatactcgatccacagagctgatgcaagattcgcgcaccagaggccatgaaaggtagaactcatcatttactgccctagtgtatcgcttgatgtcccttccgtctatgaccatctattatcagcattcattccggataggttcgagtgcaactcgtagtataggccactacacgaggggaacacccaccccagtactcattctctaccactcgtcatagaaataagatcgatgatcataagctactaaagtgggaagcaaactatggtagtgggccaacactcagcagcacaaccacattttatgggagtgtcgacatggctgacatgcaggaacaactggcagagatcctcaaatatgaatttgggatgctaaccaaatagacggcaatcagctacacgaagcccaactcgaaagagttcaaccagataccgcctccgcccaagttcaaattgcccaaattccccaaaatcaacgacggtgatggcaccaacacgtcaaccatgtgtgctggtatacgactcaattgggaataacaacaacgatcgaaaacgtcaaccatgttcagctcttctctctatcgttatcaggacctatatttgactggtctatcactctaacccgggtccatcacttcttggacgtaaatggaggaccaatttcatgcccatatcttcttctactctctcatggccctccgacaggtgcggggaaaatcagcaaatcaatttatttagatgtcca

SEQ ID NO: 112742 - DNA, 604 bp, Zea Mays
aaaatggtttggtagtgatatcctcccctacatgtgtgcttggatggtttggtttcaagcttacacatatgcaaagatatgaagtttgtggggacattatcactactatatgatgctaaagtatacaagatagaaatgtacctttgtagcgtgtttactacttttcatcgcactcttagcatcatcttgctagaaacaagtgaaactagataccacatgagatcaacataataaatagggttgtagttactcctttcacactaagactaagcttataaatatcactaaatcactcatcatccaagtcttagttctagcaaacacttacacacaagtatgtaggaatataagacaaatgtgatgcaagcaagcaatgtaatgcacaaacaaatgcatcaaacatatgttcacgagcttgctccccctacttgtgtgcatctcttgttcagtaaaatctcataccattatactttgctcttgatccatttgtattcattctagctcaattgatcagtagttccccatgagttcatgtccaattttctcttgtgcatatttccatatctttgttccaacttgcacatttgcatatctttgttccaac

SEQ ID NO: 112743 - DNA, 658 bp, Zea Mays
agcagtcttgcagtttgctgaactaacataaaattatcttggatgaatcggcccttgataaacgcactttggttcctagaaaccagcttgtctatataaccactaagtctacttgccatgatcttcgtgattaattttgcgaagctgtggatcaagctaataggtcgaaagtccttggcaagtatggcatcctctttcttaggcaaaagagtaatgaaggctgtgttgaggtatctgaaattccgaaagtccttgttccagatagccatgatagcagccataatgtcttttttgatgattgaccagcagaccttatagaaacggcctgtgaacccatcaggccccggggctttgtccggaggaagctgcttgatggtattccacacctcctctgagattggctgctcaagcccctgaaggtcagtgtgctgcatttctaaggtgtcaaggttgacagttctggatctttgctgccctgtaccaatcagatctgaataaaaggaccggagcacctctgccttatcactatgactggtcactagctgctccccgtcttgaattttggctatgaaatttttccttttccgataacgagaccaagagtggaagagccttgtattagcatcaccatctttgagccaagcgattcttgatctag

SEQ ID NO: 112744 - DNA, 368 bp, Zea Mays
ctggcaagaaatgagctgtcttggttaacctatccacaattacccaaatagaatcgtggtgtcgagaggtgttaggcaaacccataataaaatccatgctgaggtccttccatttccaggatggtatggggagaggttgtaaggtacctgctaccttcaaatgactagccttgatcctttggcaagtgtcgcattcagatacatacttagcaatttcccttttcattctggtccaccaatacaaagatttgagatcatgatacatcttgttactgccggggtgcatggaaaatttggaaagatgagcttcatccaatattttcttcctgagttctggattcttaggaacaaccaattggtcttcaaac

SEQ ID NO: 112745 - DNA, 629 bp, Zea Mays
gcggccagccccaatccggtcagcttatccctctctctccctcgtttgagcactctcatagctctgtgatgcttaccgagccaccaattcgaactgagagaccaccaatcatcgggaacgcgatcaaatgctcatggccttcgcggttctcgtgggcaggatagaataggccaccatttgcgcaattaaattaggggaaacgtttgttaggtaatgaatttggtttaggtcgaagctgagcgccagtcattgccccatccggccggtcttggtgctcgccggagctcggctgtgcgcgcaacgccttcgtggacttcaaaccgagaatagatagaagtgcgagggtgtctttgtaattgtcagcgaccgtgttaaatagtgccttggactctatcggggtattcaagaagacagggacccttctgcaaggttgccaacgcgggcgtgggcgcgccccgtttctctgtgttgctgggtcgtctgagctgaaatcagcccaacactattcacaagtttctccttttcttttaattccagagctaaaacaattatagaaaagtgtagaaaaattctaaaattgtgaaaccaattttcctaggcttcttattttccatagtatttaataaaat

SEQ ID NO: 112746 - DNA, 653 bp, Zea Mays
gttcctcgctgatctgataataatgggtacccgagatgtagacatagatgtcgtccttgggatgaattggttgaccaagtaccaagcataccttagctgttataagagggctgtgaagttggtgtccttgtcaggagaagaagtgttggtggagttggtcttgtcttgaccaaggaaaggaagctatcaccagatagctgctcatagtgaggcagttaatccgctcaaagtcatcaaggtagtatcagaatttctagatgtgttttccgaggagttaacaagcatgccacctgagggaaaagtttaatttgccatagagcttatccctggaaccacccccatttctaaaagagcccatagagtgtccgtacctgaattggtggaactcaagaagcaaataaacaagttgttggagaagggttacatcagacccagcacctcaccttgggtcgccccagtgttgtttgttgagaagaaagatggtacgtagaggatgtgcatagattaccgagctctgaatgaagttgttggggggtctcattctctgccgaaggtcctcaggatgaaggaattatttgcaattagtggtactgagcgccaaagctataacaggtgtacgcgaaacactgaagagttagagctttggctcaaga

SEQ ID NO: 112747 - DNA, 554 bp, Zea Mays
cttcgattttgcgcacttattgtgctattccggctgcacccttaggcgacttttgcatggagagtcttttggaaaagacttcgattttgcgcacttattgtgctattccggctgcacccttaggtgacttttgcatggagagtcttttggaaaagactttgatcttgcacacttattgtgctattccggctacacccttaggtgacttttgcacggagtgtcacacgcgagggtaggctgcactgcctctcgctgtgacttcggagtggtcgaatgctgaagaccgtcgatgcggtctttttcgacatgctgtatctgagtttttgcgggagatttttgcaggtatattacatggctccacctcgttaaaaacctcaccccctgggaggaaaagagtgcgggccggaatagtactgtttggtgaattacaagggcgcgtgggccctgaagttttagacaaaaaatttgcggagattgtcaatattccaggaatgctctaggtcttcgccggttagcgttgttagcctgtacgcgctaggggacgccttcgactt

SEQ ID NO: 112748 - DNA, 951 bp, Zea Mays
cagctgctccgagtgagctcgcgccgaagaggagaaaagtgaaggttcttactcaccgaccgcgctacattgaaccggacacaatgcccgaatttgggcggtgagacctcttcggctactgaagccaaagaacatgtgcttacgcagaagattgaagagtcggctgcattgtcgaaggcatcctcagccaaattagttgagccgaaggccgataatattgaagagataggggtcgaaggaacaaagatattaaaagttataagcccttcgacagaagtgacagtgccgaaggcacaaaaaggtcttacagcgaccccaagaggaaaatgatggtcaacgtactagatgcgctggagacgataaagacctcaagctctactccaaggaaaactgccgaagcttcaaaagaacagactgagacaaaactaaccgaaaccgaagctataaagagccaggccgagaccaaagctaggcctttagagcccgccaaggagaaatccttggaaaccggagaaaaggaaacggaaaaagaagttgcagaataaattctgcctgaaaaactgccactcctactcccgaagcatcttccgaagtacttgattatattgtacgacacgcttcgagaaaaagattatctgaagaagagatttttgaagctaaacactatgcccgagaactgaagtatccgaaaggggccttagtgttcaatggcacagacgaagatgacttcttatactgcctcccagacaacaaagaattatctgtctgccaggagatggccagaagtatgggctttccgaagctcgaagctggcctttgtgctatgacgaaggacgatctggcagacagcctcgcatataacagtctgaaggtacaaaaattgtatatttggaagtttataaattttgaattattcttttgctcttatactaaattttttcatatagggtt

SEQ ID NO: 112749 - DNA, 542 bp, Zea Mays
gctttgtagcacatagtctgaaaattaatcttcccaatcggctgtatgggaaatctagtctaagtggacaagggtagggggtgtttgctcattaaactaagtacttttttgacccaatagtggcaatttagttgtaactcattaagaaggcattgaaatcttctcatcatagccctattaagattttgttgttcttgtccttagctcaatatataagattgaaaccccactagctacccatggactagaacacgtggagcgaattgtgtgcaggtcatttagaaattggactttttgatcatctagttgaggaccataaacttcattaaaccaccatggagtgccactaacatgatcaaattgtgttgaaattgagtagatgttagttctaatctgaagcaccatacaattaagtcccttccaagacaagaatcccccatacacatgtgccagccactgggagaaaaaaatcaccaaaatcacttccaagcaaggataacaccatatgtcaagagataatagctttctttgtttcatgtaag

SEQ ID NO: 112750 - DNA, 441 bp, Zea Mays
cggccctggaggtcgtgttccggacgattaatgggatcgatgctaaaattaaagcttggggaagcttcacgggttcatcagggactaggtacacgattgaatttaggccgaacgaggatagggaagcgggtcgacagagagggtgtatacggcggcgttctatggaacaacggagtgttccggtggtgggactctggtaaacttcaattggttggcatcgagagcaacaggaagctaaggacatgctagaacaagaggcaattgggtgagtactaacccgagaagggctgcccacgaagaggtccttcacggcggcagaagagaccgatcccagggaaatccgatgatctccgatgatggtggacagaatagggtggctagtgagccgttagcttcgtaactaagggacaaagaacagtgctcggttgatttggatgacgg

SEQ ID NO: 112751 - DNA, 436 bp, Zea Mays
gttcttgtataacaacagccattaggccagtatcaagatgtcaccgttcgaagcattgtatggacgaaaatgccagacccctctcatgtggtccaacgtaggggaaaagacactggaagggcctgcctttgttaaagaggctgaagagaaagttgccctgatccgcaaaagattacttgaagctcagagtcggcagaaaagttatgcggacaacagcgaggagagaacttagatttgaggaaggagacttcgtctacctcaaggtctccccgatgcgtggtgtcagaaggttccaagtgaaaggaaagctagcaccgcgattcgtcggcccctatcccatcattggcagagtgggacccgcagcgtaccgtctagaattaccagaatccatgtctgatatccacaatgtgtttcatgtgtcccagctccgcaaatg

SEQ ID NO: 112752 - DNA, 445 bp, Zea Mays
ataatgaatcttcttaaactctccttaatcttgtcatgaaccttgagagagaaagactctcaaaccctaataaatcctatgtaagccaagttaagcataaagggtaattgggagaagtcatgggggaaaaatgcaaattttagatatgatcaaattacaaagttttagttcatcaaataactaacaaatcatagtaagagagtttggccatttgtttttttaaaattccaaaatcagcccttgaaccatgaacccttggagaaattcagatttctgaatttctgaatttcagacctctttccaaggatcaactgcgttctctgcttttcgaaactcaaaaccaggagatccaaatatcaaagttgtgccaaattcccttgaacacgccctggaaaagtttgaactcaaaccaaattcatttgacacagttttggcgcagtttgac

SEQ ID NO: 112753 - DNA, 707 bp, Zea Mays
taattctgaagctcttccggcacattctcagccacaatccacaccgaatgcagtttggacttaggcttagcctgagaactccaagaagaaacagaaattttggcacccgacaacttcattttcaattcagggaaattaatcatctcatctaacctctcttgagagggaaatttcatgaggaagccagaatgacacttagtagctttccaagtgcggccccaaggaaagtgaaaaccgaaatccttctcaagatcctcggccgtgatcaaaccctcaacgattttaaccaaaccaataaaactgcgcttaggtttgttggataatggcttggcgaaatgagaagagtaaaaccctagcccatctgccgccataccaacaataggcatactgggtttgttctgtttggggagaacacaccgagcgatgttgtgagtttccttgcgacagatctcgcaccacaaagatttaaaacactccctagcatgatggccatccataccacatttttggcaaaaaaaacctacgcaccagttcattctcagatttcagaatggtagggggaggggttttgaggatacctggctggccgccatcgccgggagtggagacagggatgtcatctttgccatcaggttttccggttccagtcttcaaccgccagctgagattccgattcttcccccacgactgggaaccctgcggagcat

SEQ ID NO: 112754 - DNA, 271 bp, Zea Mays
tgacaaaatttcgaacaagctcagtggctggaatgagaaaaacctctctatggctggcagactaactttagttaagtgagtcattacctctcaaacaatctaccttatctctgctttacgggctcctaaggaaatattgaatttaattgactcaagaaggaaaaaattcctttgggctgggtgtgcgcaaattacgggaggtaaatgcaaggtaaattggatccgttccgcaaggccaaaagagtgtggaggcctgggtatccttcatttt

SEQ ID NO: 112755 - DNA, 742 bp, Zea Mays
ttcggacaaatgtccaattagttgagtgcggcttcgtctgataaaaactgaaatggctagagtgaggtctactgccagagtagcacacgaaggggaagaagctggagcttctgagatggcccctatctcagaaatgatgaaacgttctaggttaattgtacaagaagaaaaagagtcagttccaacaaaagatgttactgttgccgaagccgaaccaactactgtcaaagctgacaatgataatgaagatgatgatggtattttaataccaagcaaacccaaccatattgagtttgggaaatccatggttaaagcggaagatttggttttaatgaagaaattacgatattttggagagaacgatgacagactagttcggtttgctggggaagaagtgattccagaaccaagagatgacgaagtcgtagttttcaaaagcttcttcatcggaggacttcggttccccctatacgagatgatcggtgaggttttaaagaagttcgagatctaccttcatcaactcactctgaatgtcatagttagaatcaacgtatatatatgggctctccgaagacaagggaagagtgccaacgctgaaggattttgccgggtgcatgaactccacaaccagactaaggctagagctgttgggctgtacaataacttcggatgttacaacttcgcataccgaaaggatactaaagcacatgtgattatttatcacaccaaatggccaactggc

SEQ ID NO: 112756 - DNA, 378 bp, Zea Mays
ttatgagttcggtgtgattaaggcttacctattaacctaactgttcaacaagccctttctcatgtgtggtacaaataggtcttaaaggttttaaagggcctttcttagtcttttctttttattaaagatagggtgatttgaatagcaccaacatttataaaattccaaaaaatctacaaaaattacaatgggttcctactggtcactagaggttgtcacatgaatatgggctcagtttgaattaaggtactcactatgcaatattaataaaacttaaagcaaaaaggggcttaacactacacttcatagtgaaaagtgtcaaaaatagattggatgtttttcacactatctctctggtatgtaaatggcttctatcat

SEQ ID NO: 112757 - DNA, 452 bp, Zea Mays
ctggaatatctgattggcgtgaaattgcgtgaatatgttactgaaggtgttgtgaaggtgcctgaaaagtttgggttcaatcggagcaattttgagtggtttgggcatttcaccgagcatgtggcgtgcggaggtttagggtttcggtgaaaaggctatttgaggtggtgaaaccctccctaaggagctaggaacctgcaggggattcaatggagcactagggcacacaatcatgcactgggattcactggaattgataagaatttgagattgagcacaaagggtggaatggaaggtttcactgacctagaaacagagagggaagggaagagggtgctcaccgagagaaggggagcaaggggagcacgagcaggatcaccacgccggtgatcgccggagagggggtgcaaatcgccagagggcagagagccagagagcagagaggaaaagag

SEQ ID NO: 112758 - DNA, 526 bp, Zea Mays
cgccaccatcccttgccctgcctcctcgtgtcgtggagacaatcactcctccactgctggccgagccctgaggagtcttcactcctgtccttggtgtatatggctcgcgtggggttgtgataaggctgatcccatctgtactcactctccattgattttgtctatttggggctgaacgtgatgtggagaaatgagtggagatgggtgcaggctatgcacacccaaagtttctacctagatctgctgctgctgttgtgtatctttccctttttcccgattagagatcgggtttgcgtcgaccaccgccagtcgactcgcacgtcctcgacatcggcttcaacaacaccagcttcctcatcttcttcgacggtgcaactggcatggcctgcggtgtaactagaacgcctgcctgtgtcgtgcctcttcgtctgcacgtccatttatgtcggctcgtcgtcgccaccaccgatcgggaggctccaccattgacatcaccatcgtcgtctccaccatgcacaccgtcggc

SEQ ID NO: 112759 - DNA, 368 bp, Zea Mays
cgggtaccctatagatgtgaagcatgtggcccacataggtctgggcaccagtgacacatccccaagctgggtaagaatgtgtgtgcgtttttcatacagttcttcaactgatggcgatgtgtgtgtgtctttatttttagacggctgaattcaaggggacagatgattcatcagcaggctctgtgaggagcacggctgcgcagtcacggaagacttcttggacctctgcaggtgattcttttcagctctccgctcataatcatacaggcagcacgagtaatcgtctgcgcttatgattaggggggcctgaatcttctcgtcctatttcatatggagtaatgattattagtggcacgtctatatcacat

SEQ ID NO: 112760 - DNA, 533 bp, Zea Mays
gaaaggcatcaaattccttattcacatactcagttccatagcatattcttatcattttaacttgattattgaattgattcttaatcagtgcacaaaaattttggaagcatttcaacacttcatttttaggcttcatcaaataaacccatgtcatccgagagaagcaatcaatgaaggtaacaaagtacttcattccattaatagaagtcacagggcacgtccaaacatcataatgaactagcacaaaggagatatacttctgatacctcgactaatataagatatccttgtgtgttttgcaaactcataggcatcacacaatagcttgctcttatccaccccacgcgttacaccaggaaaagctttgcatatcttaccaaaagagagatgccccaatctataatgcaaaagcatcactgcaacttccttctcttccaacctcgttgccatcatagtgcatattgtgtcattagtctcctcatgatccatataccacaatcctctacgtttggtagttgtgccaagtctcttcc

SEQ ID NO: 112761 - DNA, 481 bp, Zea Mays
gcttcctgttccacaaataactcaatggagtgcaaacattgtaccctgtgacggtgtagtagctagtaggcaaacagaagaggggaaaagctaggatgtgcagaggagttgtaaacatgctacctcgtgttgctcgtgttgggaataggaggcaaactggaaactcatattagatagagcacaacgtggatggtgactataggaagactaagctcatgcatcaaacattgtccggccattagagatctatttgtcccttctagaaagtgagacgaaagttttattattttaacgggctgattgtgtgccaatatttgatgattgcatgttgctacaaggaccttatgcctcagttaactcatctcagtgccacagcggtgtccgggcatgtgtatccgtttgtgctaggcgaataagatggattacacgtagcagccgcatgttgctggcttgggcttgttgcttatagattgctcggttg

SEQ ID NO: 112762 - DNA, 383 bp, Zea Mays
tttgtgtatttacaattcctagctagagtacggtctttaaaatacatatgatgccttcaaatataattgtttttgctagcagatcttgtgctttgactgagttaattgcttatttagttgattatatagtcatgttaagcgcataaatgactcgatacagattaaatcatcaccaaattctagaataaaacatgtagagttgtaccacaatagctagaaatatgcagtctcaggttcccatctttgaactcctagtcagatagctgaaggtcatgtacataaaagaacgttgaggttggggagagttcgatttcaaaagatgtaactgcagtgaacctctgactaacctgtagtgattacagtgctcctacaagccttcagat

SEQ ID NO: 112763 - DNA, 378 bp, Zea Mays
aatcgagcagaagtttggattagtccattgcacagaaacacagaagttgttatttgctgcccaacaactgagaggccctgccagttcctggtgggcgaattttgtagcagttcaaccagccagacataaggtcacttgggatgaattcaagctagcattctgtgaacactatgttctagagggagtgcttcacatgaaacaagaggagtttattcgactaaagcaagggggagatactgtaatggagtatatcaacaagttttaccatttatcccaatatgctattgaccaagtgaacactgacctgaagaaaaagaattgcttcatgaggggactcaacgaccggtctaatcatggacctgagaagcgaaccagtat

SEQ ID NO: 112764 - DNA, 592 bp, Zea Mays
cagtttagtctacagtgcaaaattgtgttctgcaggctctgctgagcaggaccttagatcataggcatgctgcagtttttcattgaccttaaccctgcagtgggcagctattaattcctctccctcgttatcactcaaagtgcacgcatgatactgctagatagacctgcaaaggatataagattacgaaacagggttgccccattcacaaaaaagaagcatagcctacaactacaaagataccatatccaaggacaggagcggggaaaaaaagccttttgcacaccatatcatccaaggacgacaaggtagccttttgcacatgcatggtcgtcgcgttcacaccatatctcttcactctttgggggtgttgaaatatgtcacctagcttgcacaagtcagatttgcattgtggttgtggagccgtatattcgctctgtttaaaatgtggtcatccagatcatggcaaagatatatatacatatttctaaatattccttgcgcatttgctcacacaagaaagaacaagtccgtggtgtgcgcactttcttcgcgcggcgggattagtgtcttgagggccaaactaactttc

SEQ ID NO: 112765 - DNA, 373 bp, Zea Mays
atcgctcaaaacggggaattgagtgaaattgaagcctggtatatcggattggcgtgaaatttggcgaatatgttactgaaggtgttgtgaaggtgcctgaaaaatttgggttcaatcggagcatttttggctggtttggacatttcaccgaacacgtggcgtgcggtgaattaggtttttggagatatgaccatttgaggattgaaaccctcccaaagggagctagaaacctgcagggatattaagggacacataggaacacattccaccacatgattcacagagctttgacaagattttgaatttggcagtcaaggggtggaaagaggttcactgcacaccagaagaacagagaggggagaggcagagggag

SEQ ID NO: 112766 - DNA, 1504 bp, Zea Mays
aaggggagaatggtctcgataagtacatcatagagcggaaatgggatagcgtgacgacgaggtggtgataggagagcgagttgaggagagagttccatgaggcgaagtcgtgcaaggcgtcgggatgtccacgaagacgatgaaggatgcgtggagtaggggctatgggagggagcaacagaaagtgatgagattgcaataatccacctcttgaagttatttgataatctagcattaattgggcactcaccgaccacgatctactggacacccaatggagatgtcgcgtagcataggtgcgccacgtgaagcctccatgtgcgcccacacaatgccttgcccgcgccgctcgccgctcacgcaccctccctcgcagtcgtgctagccaccgactacccgcaaagcaagaagcttgtgccttccccctgttgggatagaggttgaccctgacctcgatccctcttaacaactacgaagactatttgatagcacaagaattggtgcaacacttgggcgagggatcacatgatcggtgaaggcaaggggggctaggacgtgtcgagggcctagggagcaccgaacgaaggctgaggcgccaccagtcaccaccaagcgtgcaaggtcctccctctctcagcaagtcttcgcaaggcaacccttctgaggaagctccacttgaagaccgcaagacgaagagcgctagacactgccaagcggctacacagtcatgggcgtggacccatctgacccacctgtcagtccccaaggtgggtgtaattaatggtgtaacaaagaatagagccaacgtgatctgtaattaccatgttggatggtatattcgaggcatgtagtaggtaaccaagggcatagcagtattttagtcttcaccccctctgttaccctataaatacccatgtcctgtagtaggatgggccacccttgacaagacatttgtgctctcatccatccgtgttgtcgtgctactcacttagtcacttgccacctatcacattgttcccaagtgcttgggcccattgtttctagtcccaacatttggcccccaccatgcttgcttcgaagaccaacccacaatgcctcccaagaaagaaaccaccagatctaactcctcggatgaggccacgaaggcaaccctcgctgctaaaaatggtaaggtcactttcattgacaacatcccacccccacaatcaacaatgccaccaacatgacgaagagagaaaacaaccaagtccccgagccaaagaccatccacctccgaaggcagcattcacactcgtagctctgaaagcctagccaaagacgccccaaacccgaggagtcacccctacaggccaccgtatagccagacctcacaagaaacatgagacccccaacccacttgtgtctacatctctccaccagaccgagtgagacaaatacttcctacaggatggtgagggcctaggaatcaacatagaggaccaactgctactgcgtatcctctgca

SEQ ID NO: 112767 - DNA, 453 bp, Zea Mays
acaaggaccaacactgtcagtcggatcaggggttagggttggactgacagtgagctcggatgaactttggaggctgaattctgtgtgattcaatgagaatttgatcaagacctttataacgaaatcaaagctggtttaaaggagagcaactttgttacaaatggatcagtgagttgtcacagaaaaattagagaatgaagccctctaactcgctctgttaggcgctctgatgggggttctgatggtacagtagatacaatgcacctcgccgacgattaccccgcgcctggattcgcgtcggcgatgcgattcgtgcccaagggcacacggataatgactcagggtgaaaagatctccaccgtggatgagaccgtgagccggccccgtacccacttgccctgcgaccggtccaggtgacctcactggagtttgcctcctgccgctcaaatgcca

SEQ ID NO: 112768 - DNA, 816 bp, Zea Mays
ttggaatatgaagttggagattttagataacagacataacgtaatcaccaaggtaagatcaaggggtgagaaaggtaaaggtaatagcaaacaaaagtaggcaaaggatggagttaaaaactcgcaagggacaaagaagatgatatgcccaagagaaaataggtaaaacatacaactctcaaattgagatgggagaggggagactttaaagggtaggtataagatgaacatcaatgcaagatatagaagtatcaagggtaaaggtgataatcataaagagcatagcaaaggatggacttaagtcaagactcgcgaaatggcaaaatggagaaaacaatcactggtaaggtaggtaaggttccaacaaaatggttgaagtaaaagaaattattaccgagggaagttatatggaaacgatgagaacgttaaggatgtgaggaatagaacgatcactcatagatcatgaggaaacaaaggtggtcaagagcatgtaaattgaaatgtcttaaacaaacattggggtacaaaggtaagcatttatataaaaagtaagagtatgcaagattccgaaggtgtgagcatactaagaccaagggagtacgaatagccgaaagatagtgacttaacaacagaataggaaagggtctcaaaagacaggatgatcatggacatataaactgaaatgtttaagtaggcagtagaaattcagaggtaagtatttaaaacaagggtattgaagaatccggggatacgagcatgtcaataccaatggaatagagattgctaaatggtggcaatttaatgacagaagaggaa

SEQ ID NO: 112769 - DNA, 554 bp, Zea Mays
gtggtggcatattgtttgagagtacttaattaatactctctctgtcttaaactttaagatattttaacttttctaaatacatcaattttattgtgaatctaggtacgtcgcaaagcctatgtatctagcaaaaaacggatggagtagttaatagtccaggactctgggtgacaaaagcagggtatccattatctactgacagagtcggccaaaaagtgcaggcacagagaaacatgtattcagtcaagcaacagctctacctattagaagcacaattgtggttcatgcaaaaaaaaaaattctcgaacgcggcggatgcatgaaaacgagtcatgcatacccggtacctcgaggaggacttggaaggagatgagctgctggtcgcgttcctggaggaggacagcaaggacgcggcgctccctcatcttgtgcaggatgccgacgctcaccgcggcggctccgacggccagcagcaccagcagaaggtacgggggcactctcttgctgctccccattgcgtggtttcttgatctatgtttgcatgattccatctc

SEQ ID NO: 112770 - DNA, 498 bp, Zea Mays
ctttggtaacggtgtcgagcgggccccaggtgcagaggaaatccccaagcctgaaggcgagttgatagtttttgaggcctttttactgccgatcttcgcctcccgacacatcggttcatggtggaggtgttgcgacgatttgaggttcaagtccaccagttgatgctgaacgcagtggtggcgcttgcgaagtatgtctgggtagttacttcctacggcgggcagccgtctgtggaggtattcaccaagaattattgcctgcattggcagaagaggaagatagggaataagatagcccaatttggatcgtgcaccttcacaccgaggactaggaagacttcggctgaggttgtggagatagtcccctacgctaggaacaaatggggtaactggtggtatttttggttctatgtggctcctggtgatgtcgaaggcttgtcgagtctgcctccggccatcctgtgctcacactgttatgtggtgttccctcgattcgag

SEQ ID NO: 112771 - DNA, 1136 bp, Zea Mays
cttaagtcgattgctccgttagtagggtatagtggtcaccctgagttaagtaagcatgcaggttgatagtaaacaatttgagcgcctttgagaatgaagtctttttattgatgatatattccccagtttacagaatacaaggccgtcccaatagcttttgaaatatagctaggggtaaaacttcctgagatgttctatattccatgagttcccaatttccgtgtcatccatttgagtaagacgatacgatccaggccgagtgacttccgctactatgaatggcccttcccaaagtggtgacaatttgtgccgtccctcccccgttagaattcggcgcaggacgagatctcccactgcgaaggatcaatgtcgtatggccttatcatgatagcgcctcagagtttgctgataccgggctgactgaatcaccgtattcaatcgttcttcttctagtatatcgacatcctccagtctagtagcctcagcttccgctatgttttcaaagattaatctcagtgccccaaacttgagatcagcgggtagcactgcctccgaaccatagaccataaagaaaggagtgtttccatgcagagctcggctaggttgagttctcaggctccagacaacatatggcaactctctgatccactttcctacgaacttttcattcttgtcgaagactttctttctgacacttccaatatcatcccgttggctctttctacttgcccgttggctcttgggtgcgccaccgaggcatatttgatctgaatgcttttttgttcacagaaatcgaagaactctgagcttgtgaaattggatcccaggtcggttatgatactattcggtatcctgaacctaaatattatgtcttgtatgaattccactaccttagttgaagttagagaagcaatgggtttgaattctatctatttagtgattttgtcgatagcaaccagtacatgagtgtatcctacttgagctttcttgaaaggtccaatcatatccagtccccagcacgcgaacgaccaggttacaggtatggtttgtagttgctgtgctggtagatgctgctgttttgacaagtactgacaggcttcacacctctggactaactcggctgcatcactctttgc

SEQ ID NO: 112772 - DNA, 596 bp, Zea Mays
gatggtgctatttggggtaccttggatgttttgctgggagtggtcgaattcgaggacaaattctttttaaggggggtagagtgtaatatcccaaaaaatgttaaccaaaagttgatcttcggtgcatggatgtgggaaaatggttgtgggccattggaagttcggagtccgcatatgtgaagatctcatttaaacgatattatttgagtattcatttgtctgaatcggggcatggatgggagatttggttgtgagtcatcggtttcgcatcaagggcattgggggcatcgctccctcctcctctcaaaaaccctagttgtcctccccttccctcatagcagcagccgccccctccttccctcatttttgcagcagccgccccgccttcttctccatggcagccgctcctctcctccccaaggtgctgcacccacctccctctaaaccctagccgccccatggttcctcctttggtgtgctgcattctccattggtggattggtgggaggaagaagaaagaaagaaaaggagtcaaggtgatattgttttccttttggtaattgtgctgcaatttcgttggattggatgtgggggtt

SEQ ID NO: 112773 - DNA, 294 bp, Zea Mays
ccgccatgattgtcgtcgtctcaaattgacgaagcacatagccgattcctttaaattgagcactaccctcgctctgcctctctattacgcgctcataccaccctcagttagtctctctcatgcatcgtagcccctagtcaccgaatttcccccaaatcggccactcgcgccaccatgaggcatcctgccgtgatcagccatttccaggtatgttcatccccctctgtgccatgttttagcatccttaaacgttaacgtagctcatcggcccaaccgatggaacgctaccacgat

SEQ ID NO: 112774 - DNA, 373 bp, Zea Mays
caatcacctcggtccgaaggttgttaagagctattgcacagctttcatcctcggcgtttttttgtgccctcaaggcattactaagaatcaagccctataaagaagaagaaagaattgagtatgacaacgaaataattcatttccaacttcagagttaacttttatacctttatattgttgtatgctaggctgtcagcaagatcatccttcgacaaaattgaaaggccatcttccagcttcgggaatcccatactcttagctatctcccagcaaacggatatttctttgttgtccgggagacagtataagaagtcgtcatcgttagtgccgttaaacactaaagctcccttaggatatttcaattttcgtgcat

SEQ ID NO: 112775 - DNA, 1150 bp, Zea Mays
caaatgctcttcttctaacatgtcaacatcctctagtctggttgcttctgcttctgctatgctttagaatgtcaacctgggtgctccaaaaatcagatatgctggcaacactgcctctgatccatacaccatgaagaatggagtgttccatgcagggctcggctgggttgggtccgcagactccagactacatacggtagttccttaatccatttgcctgcgagcttttcactcttgtcaaatactttcttcctaagcgcatcaaatatcattctgttagctctttctacctgtccgttagctcttgggtgcgccactgaggcatacttgacctggatgctcctctgctcgcaaaaatcaaagaactctgagctagtgaagttagatcccaggactgtgatgatgctgttgggtatcccaaatctgaacattatttctttaatgaactcaactgcttttgttgaggtcaaagaggcaattggtttgtactctatccattttgtgaatttgttgatggcaatgagcacatgagtatatcctccctgagctttcttgaatggctcaatcatatccagcccccagcatgcaaaaggccaggttacagcgacagtttgcagatgttggccgggtaagtgttgttgctttgaaaggaactggcatgcatcacacatctggactaagtctattgcatctttctttgatgtcggccaatagaaacatgacctgaaagcctttcctaccaaggtcttcgatgctacatgtactccacacagcctcgcatggatttcctctagcagatgtctccccatagccgagtgaatgcatttcatgagggctcctcctgcacttctcctatatagcagatctcctatgatgatatagtgagttaattgccttgcaatgcactctgttgcggccttatcatccggctcctcatttcttatatatctgataatcggcttcctccagtcgtttgggtctgtctttgcctagtataccgtgttgcattcctcagcgtgccttattgcgatgcttggctactcacctcctaaacaaaaactccgggtggaacctaggcccgactagaccctagttttgacagtgcatctactgctgcattgcgatccctttccatgtgatggaattccag

SEQ ID NO: 112776 - DNA, 546 bp, Zea Mays
ctcctggctccgccactgggagtaggggtcaatgcatcgccatggtgtaatgtcaactactcatgctcaaccctaattcacaaacaaccgtcacaacctaaaggtcgaggctccaaaccgtaaaagtcactcacgttcagcaggaccccgcaaattcatggaatagaaactaaacaaattgtcaacaaagtggaaggatgtacaaatgcaatggtcaatttgatgcatccattccagccaatgaaagatagcaatcttagagacatccatcccagcaaatgaaagatagcagtcttagaggcatgcatcgaagcgggctagggtttccttaccaacaaaagtagaagtcggtccaaatctagatagatctccaatccgcactgagaaacaatatgtgaggatgtggacaacgacgagaagggacttcgagctttaggttttgcggaacagaatcggaagaaggcggtcgtcaggcaagagtaaagagaaagggtgcctgtaacggcctccagtatcaagaaaccgactctgatactggatctttct

SEQ ID NO: 112777 - DNA, 374 bp, Zea Mays
gtgataacgggcaaccaccaaagctgactgtgacacttcctggcggaataatccaactgagcgccacaaatttctcgacgacgttcaacctctgccgcaggtgccggaaccaccgtggatggggactgcgcgaaccgaatctcggtaaggttccattatccgcaatcgctcccacctccgtatcacgtagagctatttggattaggagctggagcgctagaatcgtggacatgccccaccggggagtcctccaccgtgtgctgtgaccgcgctgccgttcgtgaagagggatgcgggtggccgacgtccattcatcggatcatgaatggccaagattagggcctagggatctaatcggtatgattgaatcctaa

SEQ ID NO: 112778 - DNA, 414 bp, Zea Mays
ctgtgtcttctgtgtgtgtatgcattgtgaagttcccttgcaggtgatgttctccctttgggaggtttgcccctaaaaacccttgtttcacctcttttgctacaccacgcacaccaggtgttcgatagaatgtacaaaccagccttctgtgctcaaatcaaccccaactttttccagtgggccacatatactaccaatattcctcccacttcatatcaccttcggtctaagccaaaaagatcaccatatcaccaattgttgcttctccacatgagttcactctctgcaaacccatttagtgctatgtgatacccttgtctttccaaaacccgttccaactacataagatcacatcctctttatccaccaataatcaatatgtgtgtcccatgtcatcctatgttttccatgcct

SEQ ID NO: 112779 - DNA, 650 bp, Zea Mays
agtgaaagggtgtttcagagcaataaaatgggcgtacttcgagaaacagtccaccacatccaagattgtatcatagccactggacttgggcagtttttcgatgaaatccattgcaatatcctgccaggcgccttgaggaaccggaagcggttgcaataaactagttgggtgaactctctctcctttggccttttgacaaatttgacactgtttgacaaaatcttccacatcagtattcatgcccttccaaaaaaccaatttcttcaatcgatgataagtggcgtgcacccccgagtgaccacccgtggcactgtcatgcaatgttgccaccaacttcgtccggagagctgaattttggccaacccaaatcaaactgcccttcctgatgactccctgagaaagagagtagccatactcatccgagctgtggacacacaaccgagccaacagtgactgcgcatcagaatcagtcacataagaattggtaacttcttgaatccagcgaggttgaacttcactgactgctgtcaacgccatcacacagcccacccgagaaagagcatcagcgactttgttctctttgccctgcttgtagattactttaaactgcatccccataagcttttccatggccttacgttgcaactccg

SEQ ID NO: 112780 - DNA, 488 bp, Zea Mays
aaaaagtaggggttgcttttgaaaagctacccaatgtgaaaggagcttaaatgacacttgtgaagcctttgagtctttggcccacagcacaaggttagaaatggtgcaccttttctttctaagaccaagaccaagaatttagcagtcgtttccaccctacctagtttgcaccagcgcaggtacatctaatcgaaatgaccaggcaacctcccatcagccggatcaagctgggcccacggacccaaaagcatcagcaaatagccaaatacaacacaaatttaaaccaggatatccaataagcaatttgccaattctcaagtgtgcaagttgcatcatgaatagagtacaccaaaccaaaagtgaaggacaccagtgtaacatagtactggagtaaccgagtaaggtccttacatatccttattctccatgcgctctaggtaaacaggagccaccgcgtaccaaccgagaagctcgaggtagagcctgta

SEQ ID NO: 112781 - DNA, 526 bp, Zea Mays
gtagtgtgtagaattcaaacaacaacaatgaaccaaaattaaggattgagagcaacactcaacaaactgacctttttgaaggcgtaagacaggaatggtttcctgtagatccccttagaggtcctctctgtagcaaggaacgaagacactaaaacaattaggccataacataacgcacgcaaccaacaagagttaagggtaaataatacaaagggcatactaccaacatgattccatgaaactaaaaaccatcaaaggggtagcaacattggccagcctttcacggaacggtgtagcaactccaaaatgcactgtaatgcctggccccctagcgaatgaacgcattttccccaatagtcagcgacacaaacacacatccccacccctttataagctaccataaattagaggtcgtggtgttgagggtggagaaggaagacatgtcagggtgggaaatatgcctaactgtcaagtggacgttatattatgaattatttactaataccggtatcaaataaacacgtgg

SEQ ID NO: 112782 - DNA, 370 bp, Zea Mays
cttcaacattgacctctcaaacaattctttcagcggtaagctacctgtcagcttcacacagatgaggagcttgaattcaaataatggctcgagcaagcgatcacccacagagggctcccattgttcagcaataaaagcaaagccgccatcgttgcccttggactaggaactgtggtcgggtttctcctcttgttgtgcttatgtgatcgtgtcaaggattgtccattgaagaatacaggagcaatccgaaggccgtagcgacaaccgaagactcctagttctccaactcttgcctggtgctgctattccaaaacaacaaagagttcagtaactcgaattaccagtttctccatcccattttttcatatat

SEQ ID NO: 112783 - DNA, 599 bp, Zea Mays
cagaattgaaggaaggggtcgccggtgaactgggttctgttgttggttttgatcgaattacggactccaaaccgataaacgatgtcccagaagaatgaggcggactccgatgatctaagttttgcaattggtttttgccttgatccacttggtgaacttgtccaccgcgactgaagccctcaggcgccttcttgagggacccaaccaagtccaatccccaaatcacgaagggtcaggtgatggggatggttttgctaggcttatgccaacatgtgtgtctatcgtgcgtagtattggcagccttagcaagtctagactacttgctcggcgtccgccatggcggttggccagtagaaaccttgtcggaaggccttctaatgaggtatctaagagctatgtggtgcctgcatgtcctcccatgtaaatccatgagcagttctcaaccttcctcgaccgatacgtatttcggcttgatccctaaggcattgtttttgtaaagtgaccgatttacaagcacgaaggacatccctttgtgagacaatcgtctggtctccgtcaagtcttctgggaaagacacgtcagaaagcctattgatgaac

SEQ ID NO: 112784 - DNA, 676 bp, Zea Mays
attgtgaagtatatttgttgagaaaacattcagaagttggtttaaagatagactgaaccctctttttctcatttaccttccacacaccgacttcagggctctttgtctttatcatcttgagcttaagatcatcagaggtaaccacattcttacctttagtagttttggcctaatctgtccgaactaacaccctcttgtcctcgaaatcaattatattgatagggaactgatctttataaagcttcattttgctagcttcttcgattgtatctgacgacgaaaataattacactcgttagtagaatgcgaaaatgaattgtgccatttacaataatcttttagccagctgctcagggggtggaataacatgtccttctcttagtctaatgatgttattctgtaataagacatcaaacaatttatcacacttggacactccaaatgtaaatttgatatcttcccctttccccgtcgggtagtagcattccatacccatacccataaaaaaatctacccgtcagattactcatatatgatcgcaagtataaaatcttacccaaacccatacccgcgtgggtaattttacctgtcgggtaacccgtaccccctaggaaagtcttaaattccaatgtaccaatcacttaaaatattaaataaacatacaaaaacaagttca

SEQ ID NO: 112785 - DNA, 428 bp, Zea Mays
aaccaagatctagtcctatatccgtgttgccaagaaggcacaaaaacgattcaggaaaaacaggaagaagtccactgcagcagatcaacagagttgcagggtgatcaagatgttgtctcaaaccaaagagattgcctcctcaatgctggaatcctcattgcatctcctgtcgagggaaattgtgatgacaagttccaccagatagttccttatctgcaagacaatccagaagagaagagttgttgcgaggatgagcaattgcaggagttggaattcgacattgttgagcttgagaatggagttgagtctttgttccatacattgatccagagcagagtttctcttctgaacattcttagcttgtagatagatcatccaagtatgacctatgattagcatctgccttttagaggaccggctgatcatgc

SEQ ID NO: 112786 - DNA, 341 bp, Zea Mays
gtagcaacagatttccaaatactgagattatactttttaagaactttctcaatataacttttctgagatacaaaagagtaccagcacgacgatcacgctgaatttacatcccaagaattttctttgccggtccaaaatctttcatatcaaatttatgactaagttgagccttcaattcaataatcagtgacttgtcatgagaagcaatcaacatattatcaacataaagcagtagatacacaaaagatccatttgggaactgcttcaaataaatacaatgatcataattgcttcgagaataaccatgtgcaagcatgaacgagtcaaacctcttataccac

SEQ ID NO: 112787 - DNA, 946 bp, Zea Mays
aactcttaatccatcgcgattttgccacaagtcactacaacaaatttgtagagctactgtagtagtttaagtttgattaagtgtttgagccctagagctgtatggaaattagagaaaaatggacttgaaaatgggctgtcagtcaattgtcagtctgaaattcagactcgcagtgacatcggatcaactttaggaccaaatagcgcccaatccattggatgttttatcaaggtctttataacaaaatcaaagccggtatgttgtacaacaactttcatacagacggattggtagcttcccatatgaaaatttgagaatgaagctccttaacttgctctgtcaggcgccctgaatgaagttcccatggtacaataacctgaattagatcaggtgcagtgaatctcaccaccgatgaactcatgccgcgattcgtgctcattggcgcgtcgataactgtgagaggtaaaaagatcggaagggaggaggatttggtcctggatgtgagcttatcggccgcactcgattgcctggcgacgtgtctgtgcggtcgatgtcaacgggggatgccggcaatctcagtcacgccacgtcataggccgttttaccacgtcgttgcgagtcatggagagtaactagtgactgtcgtaagaccttgccccagtacgcgccatggtgaactcactttagcaacaatatcccttcaccgtcatgatccaaatctcgttcaaaatttggagcaaccatgaccgacttctataaattgagcgcatcccttgctccgcccctttgtcacgaacccaacgcaactccaaccacgtcatgccatctatcgttgctcgtgaattctggttttctcccaattcggtctgccgtgccgccgtgagacaccttgccgaggccaaccatccacaggtcggtttgtgcttctctggtttgtgttctagca

SEQ ID NO: 112788 - DNA, 415 bp, Zea Mays
tcgcgctccaggaggctggtctggtggggctcatcggtcgccgccgtgggagtttggcgccgccgcctgtgctgactgggggaggaagaagggccctcactgtcgatccggttgcggacgactggatctgtgcgttggataccgcttcgggtgggagaaacgactgccgttgatcctagatcgtatggccgattggggcactcggggtatgaccgtggattgaaatccaatggccccaagtgcataccggttcatttaaatgataggactgatctgggacgtccagatcagatcgggtggctgggacatgttcttaccccttcggccagaacgtgttacaaaagagcccccaaggatttagataataaacccgccatcctcggcgatgttcagatcattacaaccaggtccaaat

SEQ ID NO: 112789 - DNA, 490 bp, Zea Mays
gtcgtggattataactcgatggttcgtgccggggcacgaggaagagagagtcaagcgatttttagcaggttcggaccgtttgagtagcgtaataccctacttcctggggtgactttgtatgagggatgtgtttacaagtggtgtctaccgaatggtgaggtgctaatgagataaaaatgatggggatcccccttggccttatatacacgactatagggcacttcccgcgtacatgttgatcacactcttccaacttatctcctaactaatagcaaacaaatttcgtttatcctgaggaaaacccggcgcgcccgatccaagctatccccgacgttcaaggatgtcgagcgcgggaaaagcgaacagcttcaacgggatcaccccaagccatgagtaatccgggcgtcagcccatcgccttcctgggtcagcccatttccaccgttatctttgtccggcccacgacgcgacgtccctacggggtgactggc

SEQ ID NO: 112790 - DNA, 341 bp, Zea Mays
gttcagcttcggtggtgaaagcatcaattcctgtggatactgaagatgctggcggagccgaagctgaagaacttgcaaccacgattttagaaattggtaagcttatataagatgtggttgtgcatcagacttgtgtggttgcggagggagacatttgtgcagtgcttgagaaagggaagaaaattgatgatactctttcagaaggtaaagattttgacctttggcacctaggtggccaggaactttctgaggaagataaattagagctgaaagaattttctatgtcttgctgttaccaaccggggtccatgctcttcagtggggtcgatgaagaaatctta

SEQ ID NO: 112791 - DNA, 451 bp, Zea Mays
tagcgattggaaaccttcgctcggaagtcataacattaagaaacgaagctcttgaaaaggataagatcctactctctttggtggagagattaaaatctagcgaagcccggctttctgctcaagctgaagcccatgaagccgacatacaagagctaaagaagaaagttgccgaagcaactgagaatcttactgttgaagtagtaaaacacgaactatgtgaaattgaaagatcaagggaacagaaaaatgttgatgagcttcgtgctgctaaggaaaaatgctatgatatggctatggaatgtgctaaaaatctgaagaacaacttttctaaagttggtgcattttcttccgagcagaaattcatccgtggcaatcatgatgaagttattcaatggataaacggcgaggtcgaagttttcgaggaaatccttagtgacaaaggggacttctg

SEQ ID NO: 112792 - DNA, 549 bp, Zea Mays
tacctgttttaaccaacatcagcatccatcatgttgtaggtcatttaagtagtaactctgagaaggaacaaatatgcctatttagacaggttactggaaagccctggactttagatgagtttatcaactatgtgcaatacttacaaaaccaagtggaggtatatcacgaatcatgaatagttaaatattagtgctaaaattgtggcacttacagacaataatttgcaaatcatataggggatgggtaaaagatatcagagatgctctcactttaaaggcaacaatggaatatatctaactatgtgctcccatgcattaaagataacaataccgagagctaccacgcaaagccagtgctcccctgcatcgacaacggtcagctctcagcgtcgagtggtctggataagcacgagctccaccagcgatagctccatgctacacgggtcaagcacgggcatgtggcggtcccaattgttcacctagcagaagcagccgcaggcgtagtagcacaccagcgccttgggatctttgatctctaggtggagcgag

SEQ ID NO: 112793 - DNA, 1107 bp, Zea Mays
tgtttgcgggatatagaagtcatccctatatgagtaatcgtaagcgcgtcagatcgccttgagttgctactgacttaagtcggttgcttttgttaatagggcttagtggtcaccctgagttatataagcgtgagcatgttgcaccggcttgaggcgctgccgacttaagccgattgctctgtttagcagggcatagtggtcaccccgagttaagtaagcgtgagcatgttgcaccggtttaagtcgttgccgacttaagccgattgctccgttagcagggcatagtggtcaccccgagttaagtaagcgcgagcatgttgcaccggtttgagtcgttgccgacttaagccgattgctctgttcagcagggcatagtggtcaccccgagttaagtaagcgtgagcatgtcgcaccgccttaagtcgttgccgacttaagccgattgctccgttagtagggcatagtggtcaccccgagttaagtaagcgcgagcctgttgcaccggtttaagtcgttgccgacttaagccgattgctccgttcagcagggcatagtggtcaccccgagttaggtaagcgcaagcatgttgcaccggtttaagtcgttgccgacttaagccgattgctccgttagcagggcatagtggtcaccccgagttaagtaagcgcgagcctgttgcaccggtttaagtcgttgccgacttaagccgattgctccgttcagcagggcatagtggtcaccccgagttaggtaagcgcgagcctgttgcaccggtttaagtcgttgccgacttaagccgattgctccgttcagcagggcatagtggtcaccccgagttaggtaagcgcgagcatgttgcaccggtttaagtcgttgccgacttaagtcgattgctccgttagcagggcatagtggtcaccccgagttaagtaagcgcgagcatgttgcaccggtttaagtcgttgccgacttaagccgattgctccgttcagcagggcatagtggtcaccccgagttaagtaagtgcgagcatgttgcaccggtttaagtcattgccgacttaagctgattgctccgttagcagggcatagtggtcaccccaagcta

SEQ ID NO: 112794 - DNA, 342 bp, Zea Mays
atttgtgctgggcattcaaccaccaaaattaattgtgggaaaaggttaaccctatttccctttcactagcttgcagtctgagctagcagagagagactctaggataatttgtttgagaaggctaactcagtgagtgcccctgcacctgcgcagtgtgcactttgtgagggtttgcaatctgcccttgagtcctgcagacacgacaagacaagaatcaaggaagaaaacacatacctttgatctatcttgagttgagtgtcgtgcagtgagccctagttgggcatgatggtcagtcagttcaagaggggaactagaggactggggttagactttgctactaag

SEQ ID NO: 112795 - DNA, 561 bp, Zea Mays
gtttctttctgtacacttattgcatggcatcatctatagttaaggttttattgtttttgttctgttgcatcctgatccacatgtcattttagcattaaaatccatttatgtctatcaaatttagctctgttgctacagttcagttgcatctgcaaccttttaacatttgcctctctctatgttgaataaatatgagctgttagcctgtgacatatgcggcatgcaaccatacagagtagtcccaatataactttcaacaaactcttgttatttcttctcgactcattttcgtatacttgagatgtttgtaaagattgtaataaattatatagtttcattttccacaccgtccgccaccaaatttcattacacatattacaaaattaaaattatatggtttcatattctccttagttttctttgtctgctttcatgacattgaaagataactatttccatttgttgttctgtatgtgtcatcatagatgaaattaatatttgtgtctgtttctttcttacatgcttttcaatacctcttattgttgtttacacctaaccttt

SEQ ID NO: 112796 - DNA, 496 bp, Zea Mays
tccaggagttcccgacttctgtgccgtccatctgagtgagacgatatgatcctggccgagtgacttctgctactacgaagggtccttcccataagggtgataacttgtgtcgtccctcccccgttagagttcgtcggaggacgagatctcctactgagaaggatcgctgccgcacggccttgtcgtgatagcgccttagagtctgctggtatcgtgctgattggattactgcattcagtcgttcttcctcgagtacatcaatgtcctccagcctggtggcttcgacttctgctatgttttcgaagatcaaccttggcgctccgaacttgaggtcggctggtaatactgcctctgacccatagaccatgaagaaaggagtgtttccatgcagagctcggctaggctgggttcttaggctccagacgacatagggcaattctcttatccattttcctgcgaacttttcattcttatcgaagacctttttcctgagtgc

SEQ ID NO: 112797 - DNA, 423 bp, Zea Mays
tctacttgcccgttggctcttgggtgcgctattgatgcatatttgatctagatgcttttttgttcgcagaaatcaaaaaactccgaactagtgaaattggatcccaggtcggttatgatgctgttcggtattccgaacctggatactatgtcttgtatgaattccactgccttagctgaagttagagaagctatgggcttgtactctatccacttagtgaatttgtcaatagcaaccagtacatgagtgtatcctccttgagccttcttaaagggtccaatcatatccagtccccagcacgcgaacgaccatgttacaggtatggtttgcagttgctgtgctggtagatgctgctgttttgataagtattaacaagcttcacatctctggactaactcggctgcatcactctttgccattggc

SEQ ID NO: 112798 - DNA, 308 bp, Zea Mays
cttgtaagtagtcttgaccagaatgaagtgagccactttggttaatctatccacgatcacccatacggaatcataccctttcggggtgcgaggcaacctgacaatgaaatccataccaatttattcccacttccattcgtgtacctttaacaggtgtagccgtccagctggtctttgatgtttagctttgactctttgacatacatcacacacaaccacgtgtgcagctacatctcttttcagcccataccaccaatatttctgcttcagatcttgatacatcttggtgctactaggatgaatagaat

SEQ ID NO: 112799 - DNA, 300 bp, Zea Mays
aagtggtggcttagatgggaggacataccaagctgaggaaacaacgatctaccatggcagaactggtactaaccatggcttagccgctcctgggatactgcctccaggcctcgttgctaattgccataccactcaacataggtgtcagctgctagagacagccccaacctggcctgtgtggaggcacatcaactcggcgactttatgtttctcccccatagtagatcctacggagcatacaaaaaaaggcagtaaggagatgcatggtacacgcttatttgcatatggttcttcatcaac

SEQ ID NO: 112800 - DNA, 284 bp, Zea Mays
agtgtgggaaccgtagatcttagatggacgacctagattgaaccttggcgtaccccttcgagtcattaaaccagggtcgtgaattccggatccgacggctagggttgagcgcacatgaataactagcgtgaagtctaatctggcgcgcagatgttgaatccgacggtccatgatccacgataccccttcgctggccctttttgcgcataagcccctagagatactggatatcaacctgtcgtccggggttgcagtgctctaagtctcaacttcttttacgcccg

SEQ ID NO: 112801 - DNA, 280 bp, Zea Mays
ctggcgcggaccgtccgggaccatgggcggaccgtccacgtggtgtgaccgaggcagatagccattgatctagccgttgatctattagacgtatccgttggagatgtcagaatcgaccgttggagggtcgcggaccgtccgggccctatccgcggaccgtccgccagtgcaatttctggcagatgcgccccaacggctatatgggtggttgagggctataaaagccaccccaaccagcccattcaaaagcattcattgatccatttcatacacaagagtt

SEQ ID NO: 112802 - DNA, 1043 bp, Zea Mays
tagtgataccaaagagtaacatatgagatcaacgcaactccaaaccattgttttgagctgaaaggatgtgtggatggacctccaatcggaagtgcaaaaactgtctctgacagtctaggctataaagcaaatgctacacccagcagcgctgcactaggcaaatcaaccggtacattttgaccagcttttgggcagaatcagaagcttttcttaactaccgcctcctttggtagacacattatcagcctaagcaaagcttttgttggatgagtttattaatctgtcgacatttttgcatctttacatcagtggttcattgtattttcagggagaaggaccggtgtggaaaaggacgccgggcggtctggtaggctgggctacctgcaaagatcatgcatttgctttggttgctccatgcatccaccaatgattgcctcccgctggaatgaacatccggggcaggagaggaaagcatagaaaggaagagcatactggccttcttcctaagcaaaataaaggcaaagaagggtggatcactcgacctttccgacaacggtggaagagagctaggattacaggtgagaccaggtgaggcacatgagtaacatcgacgacgacgggacctgcgatgtggcacagtaggagacaacgacggagagtgtggacgacggtgaggaggaggggaccgtgacgtggacaccagggtgatgcaggcgacacgaacagcgtcgctgattcccttccccatctcccacctgcactgacacacccacgccctgatttgggatggatgtatggatctggaatcaagccgtgaagatatttgaatgttcgtttgaattctaagacaaggattctaagacaacaagacacttttcctcttgataatgtttggtacaaaattttctgaatattttcccttgtgtacaatacgagtgcaaagattaaaactaaaacttttcccttttccattcaaccctggcaggaggaggtcatcgggtcaattatcgctgggacgtggaacgtcgtggaggtcatggctg

SEQ ID NO: 112803 - DNA, 521 bp, Zea Mays
aaaagacgtattgtgaaaaaatgtactaaatagtaaatccagcttagtttcatgatatatataaaatgtaaaacttatctttgtaacttgatacagatggtaaaatagacccacatgtgattcgatcattaatgtcacacaacatatattttgctttaattcctatcattcacgcatcaagggctttagtaagctatatctatcctatgttgaatatatcagtacttttacatttatattgccaaactttaaaaactcggtgacttcaaactgtctcccacgggtagagtaaaatagggatacgtgactgttgataatattgtttgatactgtttgtagagtgaagtttaaaatagtggatgtgataggagatcggctggagatagccttagatatttggactcaacaaaggaaactcaacatctaaattgcagtcctcacctgaaccctaaccagattcagcctcccggtcccccaacccaaacccttgccgcctccgcctccttctgttccgccaccgc

SEQ ID NO: 112804 - DNA, 322 bp, Zea Mays
cgcgatgcctctgcatttattgtggagaagacgtgccgcgtgtctatcccgctgacaggcgatgtgctccctcagcatttaatgtgtcatgtccacttcgttggtaggcggcgcccaggccatcctgcagacggcgtacctgtccagtccattgtcaaacagtacgcccatgctgcgaggtgcactgtgtccatcatcacttatacgttaccaaggaagcttcccctgcatgccgatactacacggatctcggatgttagggcgcaagaagattgctccagcaacggatattagttgctccaaatattacatttgttatgtt

SEQ ID NO: 112805 - DNA, 415 bp, Zea Mays
gtttgaatcttggaggatcagccaaagatcgaataccatacatgcgtgcgtgtgcgtgttccctaattagtcgtcgtcgtctcaacttgttttgcaatatagtggcatctgcacgatacctaacgaaccaataccggcccgacctactgcgaaacgtaaacaaaggagagatcccgcaagtcttctcacacaagcactcctctccgatccaaacgacatgaggatgcagctagctaggcctgcctcgcaaacgaattaattattgagttgatatatatacacacactgtacctaatatattcatagtgccagattggttagctatgtaattaaaagttttgggcacggtgcgtgcattatatatgcatatgctgcaagcgtacgcgcagtcgcgcagacacgggaggcgcgcgcg

SEQ ID NO: 112806 - DNA, 306 bp, Zea Mays
cggagcaatcagtttaagtcggcgatgacttaagacggtgcaacatgctcacgcttacttaactcggggtgaccactataccctactaacagagcaatcggcttaagtcggcaatgacttaagacggtgcaacatgctcatgcctacttaacttggggtgaccactataccctactaacggagcaaccgacttaagtcggcaatgacttaagacggtgcgacatgctcatgcttacttaactaagggtgaccactataccctgccaacggagcaatcggtctaggccggtgatcactatacccctg

SEQ ID NO: 112807 - DNA, 566 bp, Zea Mays
gttttgtaatggtaaaaattctatcgttggggttgtaatggtagactccatagaaaatacacccttgattccttttatgaatagataatctcatggtaaataatattcaccttccatccttgccttttagtcttttgtacccctctccctcttgtgtgcacatccttcgtgtcaccaagccctcttgtgactccctttactgaatgagagtgaaagtccatgcatacatccacatgatgttaaagaaggcatggcaacataaagtacaagatgatgaagatgggagaatggcataacaaatgaggtcacctaaccccttcattgtctaggagtccttgaggatgaagtaatcatatatgcttgccctagtatctgatggggtacttcgggagaaagccatcggagagtggaaggagcatgctaaccatatcttccattctcctatgtcgatggagatagttgtttgtacgtaccttttcgagtgggcttttcgggctacctgcctcaaattttcttagaggcttactacattattacttgatcacccttgaccatctcaaccccaa

SEQ ID NO: 112808 - DNA, 596 bp, Zea Mays
cagctccatcactagcttgtacactggtcttcctttccccttcagatgtcttgactccgaggaggaaggcggtctgaatgttggcctggacttctctaggctgtgcgatcccaagtccatgctgcagtcctatacacgtgcgatgagttactctccgacggctcggagggctacaacaccgacgaagggagctacgactcgataggggagtgcttccatgcagaccatgagagccctcgatggaggaaattagctcgacatgccttaggaagatgacgagccacagccacccccatgcatcagggaaacaggggagccaagcggggcccagacccctcctaggagtcacgtggcccacctagagcggctccttgagttacacgtcaagctcggagaagaacaatagtgactacaacaacttcagcaggccctagaaaaagaagtcactggcaaggtcctcgacgaaggcgcacacgccaaggcacgcaatgtacaacgttgcattatggaagacaccgaagccgacgtgcccccggtccttaatcaggctagtcaaagccttgccgtagcagcaatcttgctctgcaccatgccag

SEQ ID NO: 112809 - DNA, 528 bp, Zea Mays
cgccgaaggcgtaagaagagttaacgatcgtccgatcaagcgcggatggctcggattagattagtcccaccgtgaactggtacgcaatctcgaccctcagatttggatctgacgacatagattttaaatactaagatctaactacagccactggatatgagatctacggtcaggattgattgcgcgaaggggtaagtagtgatctaatcttaaccgctaaacctgagatcgacggcttctatcgtgtcgttccccatcacctgcccttctcggcgaacagacacggtggagctctcacatgcggtggcaccatggccggacacggcgaatcagcggcttaccaacctaaacagagcaaaactacaccgagagaaaggggagagggaggcgaactcgccagagcggtcataccagccttttgtcgcaaggacgagtccaacgacgtgacagcgcgactccctggcccaattcgactccgacgagcaattcaacgctcctggaatgaagacaagcccgggcgacccttgc

SEQ ID NO: 112810 - DNA, 405 bp, Zea Mays
ctaaaggatagttttgcaaaagtgggagtgtactctttagagcagaaattcatctgcggtgaccctgatgatgtcgtgcaatggatcaacgaagaagtcgaagcctatgaggaaatcttaagcgatcgaggagacttctgcgcgtttgttggcgcccgaggggtcgctgcaatcttggagaaggccgattgtgagcacattcaggctgcaactaggccaggatttgtttttcggcggaagatattaagaaccctttggctgaagcctctaccttgggtggtgagttctactccgatgtgtggatgaagggtggtcgtgacatgactgatgaagctattagaaaaaatgagaaagaatctcacgacgcccgagaagaagctaagcgagctgaagaggctactgagc

SEQ ID NO: 112811 - DNA, 651 bp, Zea Mays
accgagcggagttttcgctaccggactctgcaaacccctcggcccgacgaataaatatcgagccccgcaccccctagccatcttcatcttgggagagcaccacgaaccatgagctcgcacaaaagagggacaccgaccgccgccagccacatcctcgagaaagggcatcagtggagccttgattggtagctttggggaatcgctggaccatcacagatccattggtggagatcggtagcacagaggatcagtgagtgattgggaattcgtcatcggagtacatcattgctgcggagccgcttcgtttcgtggtcaaggtatgctactgctctacgaccggtaagaactcaaccatgtcattcgcctgaccttcctcttcaagtagcgcctgtctgagtgaagttgtatgccggggtggtcgatttacttgtcgtcggcgatggcaccgtcgggctcgccctatgcgtcgccggggcaagccggaatgatgagggtgcgtgtcgtggtcgtcgatatgcaagcggacggtctagattagaaccagggcgtaccgcttcggagtagatcctggatcgttgatcacggatcaaacgggctacattagaaccctgtttattaaaatccgaccatcgaacttagatccgatggtca

SEQ ID NO: 112812 - DNA, 562 bp, Zea Mays
tgacaagaaaatcaaggaatttaaggcacaaattagttttggtaaagccctagattttacataacatggacaaggcacaatatggtttaaaaagagaatctatgtaccagaaatcaaacacctacgccaactcatcttaagataagctcatgattcggcttattctattcaccctagaagtacaaatatgtaccaggacctaacggaaaaatattggtggtacttttgaaaagagatgtggctactcatgttgcactatgtgatgtgtgtcaacgagttaaagccgaacaccaaagaccagcaggattgctacaacctctcaaagtaccggaatggaaatgggaagaaatcagtatggatttcatagttggattaccccgtactcgggatggctatgattcaatattggttatagtggacttgactaaagtggcacactttatacctgtgaaaacaacttactcaggagcccaattagcagagttatacatgtcaaggattgtttgtctgcatggagtaccaaagaagatcgtatcggatcgaggaacccaatttacctcgc

SEQ ID NO: 112813 - DNA, 438 bp, Zea Mays
cggttgtgtcgtcaaactgcaccgtgggcaagcgtgtccagtgttctagcgccggtaagaagtccatgtaccgctcgttcgtccctttctttgcctttgacacatgaagaatcgggatggggtcatggtacaccgggaattcctcgccacggtgtgcttccgccgctctgggtgcacgccgccgtgtcgggtgtcgcagggaggaagacaccgatagcaccgtagattaggaagctagcggctaggattgtctggcgtactcgtataacaggaaatcaatcctgtccgttgatcaaacgacctaggcgtgggatgtgattccgggctggcgagctctcgtccattagtttttgatcggacgaccaccagtgcgcgcttgtcttgtagttgaggatgtaatctggatcgttaaattataatcgggtgacccgtgtggag

SEQ ID NO: 112814 - DNA, 648 bp, Zea Mays
ctgggcggtattgaatccggtattgtaatcccagcaatttggtgaacaccttatgctgtcaaggtgtatgaagacgttgttcattcaactgtgtgaggcttttatggttggtcaggataacaaattcatggtgctgtaaataggatctccattgctagacaaccaagataacaataaggtattctttttcataggttgacactccacacgatttaggggccaaggctttactaagaaatgcgaggggatggcctttctgcaagagtacgacgcccacaccaaaaacactagcatcagtttcaatgaaaaaggtgggagtaaaatctggcagcgctaacactggtgcctgagaaagtgcattttgcaacgtacggaatgcgataacatggtcactggtccaaacaaatagagccgctttttcaggagcgctttgagtggctggcagattactccaaaatgcatgataatttgcgataataacctgctaggcccaaaaaactacgtaactctttgagaaaggagggctctggccaagttgcaatacctagattttctttgggtcggtgcatactccttgagcactaaccacatgccccaaataagacacttgctgttgggcaaacttgcacttggagagtttgactttcc

SEQ ID NO: 112815 - DNA, 285 bp, Zea Mays
acaacatactaatatccaaacaacctcacccatgttggaccagacagccggtggtctcccaccggctgccattgatatagtaaggtaagagatagcaggagcgtttcgagataagctcggagttagcatgatccctggcgggcagtcatatcgaaggccttatgatagccgatttgattatcacccatacccacaaggaaccaggatacctgaattcgcaaaatatttgggtgaccaaggaaaaagcatgcgggaacacataggccagttcttagcacaactagg

SEQ ID NO: 112816 - DNA, 309 bp, Zea Mays
tagaaacagcaaaaaccttgaatcctgctcctaccaaaaaaattaccgaagcttctaaggcacaacatggagctgaaacgaaaaaggcagaagtcgaagctacaataattcaaactgaaaccaaagctgggccttcagagcccgctgagatagagcctgccgaaattgaagaaaaggcaacataagaaaaggccacagagcaaatttcatctgaaaaggttgcaactcctgctcctgaagctttaaaagagggcattgattacatcattcgccatgcttcaggaaagggactttctcaagaagaaaaac

SEQ ID NO: 112817 - DNA, 462 bp, Zea Mays
ctcgcagcgggtagcggtaatcagggtatacgaagccaatagcatcaaataccctgtttaatcttttcttgccccgacctccaaaggttgcggatagagcattatctgcggctttggagtatgctccaagtagctcatcactggtagcttcaatacacttcagccagtcgtcgtttggctcatcaaacttctccctaaatctgaaggtatacttcagtcggaccagaccaccctcactagaatcagcagtggtctcctttggcatatcctagctctccacaagtggccataccctgaaggatatatgctcttgaatcaaatcccttgtgccaatgaaggaacacacagtgctgaaagccctctagcatgcttcgacattgccatcaatttccaccttgggccttcggaggccgaagcgagaccagatgggtcgctgaatgatttctttgatgtcttcccttg

SEQ ID NO: 112818 - DNA, 525 bp, Zea Mays
tcactcgcgcgcgaacgctttgggcgagcaccttcaagcttccgagtttccacctcttcaccaaattcctccccagttgtgatagccattggctcggtgcaggtagagtcggatgattcccccgccagcaggctaagcacaacatctatctcagcgtcatcagtgctagctggcatctcgaagtgagtctgcctctcatcttcgggaatgttctgaattgaagtaatcaaggctttgatatctgctggagaaggtcgcactctaagacccaggttaccatcacgagcaggagggttggacacaaactcagaaaatggcctgattggcagcaagttccaagcagaatatgccacaggagcactagcatttgaaattctacccctcaagatcatgtccagtcggctcatcaaatcttcagtgggaatcttcttgttcgtgacccgggtagaatcgttaaaaccactatacaaataagcagggtacgccctatccttcaggggttggatgttcttgaaaatgaaatca

SEQ ID NO: 112819 - DNA, 405 bp, Zea Mays
cttcaagaataattgtccgcacctaaagacattcgtacctacctactccaactcggtgaatggccccaagaatgttacggcacccgcctccaagacaccctccaccaacaactagttaaccaagacttagttccacggcagggctcgagtgaaccacatcaatgcccaggaagctcagcaagcccctggagtagtactcggtgagttcctagtcgaatttacccctgctgctgtgctttttgattccagagcatctcattctttcattgccactagttttgtggaaaacatggcatccccactacaccattagaagtccctctggtcacccggaccccagggttagaccttctctgccacctcaaatgctcccaagtcagaattcttttaagtggggtagtattc

SEQ ID NO: 112820 - DNA, 393 bp, Zea Mays
tgacagaaagacttgcgacttaatgcatctgccacaacattggccttgcctgggtgataatgactttccaattcataatctttaatcagctcaagccatcacctctgcctcatattcaactctgactaggtaaagatgtacttcaaacttttatgatctgtatagatatggtagatattccccagcagataatgacgccatattttcagggcatgaaccacagcagctaattccaggtcatgagttggataatgctcttcatgcggcacaactgccttgaagtgtaggctatccctcggccttcttgcatcaagacacaacctaaaccactgcctgatgcgtcacaatacacatcaaatggcttttcaatgtccggttgagctaataccggag

SEQ ID NO: 112821 - DNA, 745 bp, Zea Mays
aaggagtcgtggccaagccaggttcatctcctaggctagatcgccacctccgtcaagtcccataaagggaagaatcgacatcttcagccttagagaaaggggtcaagaggaaccataagaccctggagaagaggacactctatagctatagcaccaagccttcaaagtaactccgagcttagaaaataatatctaaaccacgggccaggtgaggtccggttttgccacgtgtccagactggtgcgaccagtgtagctagagcctagatcccctcggatgtggtacgagcgcacagtctggggaggcctgggaatgtcgtgtcatcgcttattcccgggctagccctttgtcgagtcagaggtcgagtgtcgatgcatggacaagacatacccgacataagcctctagcataagggtccgccagcattaggtgcagatgggatgcatacttacccacaccaacaacaggtagtgtatcccctgcattaaatgtgtgtgccaagtttgtaacatgcgactttactgttacccgcatgttaccgaggcaggagcattgactcaatgtgtcatttgggcgcccttcattatgagttcactattcttcatgcattaccgaggcatgaagggatagatggaagagatgagacgacaccgcccacacctatgcatgaaaatgtatcagactacgtcgcaacctaccacaagggctgcgtgcgtactttgtttagacaaaataggaggatagg

SEQ ID NO: 112822 - DNA, 581 bp, Zea Mays
cttaagttgagaacaccaagactgtggggggttgatatccccccggatcctcatggacactaaaacgtatcacgggccgcctgatgggcctcccactagatcatcctacgtgatgggtcaacataatgtagctgggttaggcgagcctgatccaagacgacaaagaccgacgtccgagttaggcgctactgaagcattgatatctcgggtggtgcagatgcaagcacccggggagctatgcattcagcgataactcgggtgacaaggcaatcaagactatgaatatataggactacaatccacgacaaagaaggggataagtgaagtagatagtgatcacaacttgtaaagggataactctctagtcatgtatataaggtcgaggggaaacccctacaaaatcatctcatcacacaccatttcacctcacttcatcaatggcagctgagccatctcaaagctcgcttgtaatcctcatactccagaaatcaatacctagccacaacagaaagtagggtgttacacaattcaaagtggcctgaacctatataaatctatgagcaataccgacatgcctctat

SEQ ID NO: 112823 - DNA, 642 bp, Zea Mays
ctttggttatcatccatctgatagcaacaagaacccaaatgaagaaagtagaagaataattacagaatagatcaacatgatgacatctgacgattagagttagaaaattgtgcttttgaccattgtcctttggatagtagctacaaatttgtggaatcaccgcacgagttggtattgataaagtggtggtagacagaactggcataaactaaaatggattatccacaactaaaaaacaaggaaccaaatgaaaaaagtagaagaataattacataatagatcaacataatgacatctaacggttagagttaggaaattatggttttgaccattgtcctttggatagtagctacaaatccgtggaatcaccgcacaagttggtattgataaactggcggtagacagaactggcataaactatgtcactccagtggattatccataactaaaaagaaacgtacaagcaagggaatacgatgaagcatcatgcatgcttatgcacatcagcagatgctatatgctattaaagacacatcgatacaaaccagagatgcatagtacttatcaacgatggcttgtattaacagaaaatacaaagaacctctagattagtaaataacaccaaagcacgacccaactaac

SEQ ID NO: 112824 - DNA, 423 bp, Zea Mays
ctaaaactcctctacgcactggcgcctcaggaggtctcctttgaacatgtccaaactatctcaaccgatattgaatcaatttctcaattggtgtcaccccgatcctatcccgaatatcttcgttttgaattctatcccttcttgtgttcctacacaaccgacgtaacatgcacatctctgctgcactcggttgttggacatgtcacctttttgtcagccaacattcaacatcatataacatcatcggacgaatcattgtcctatagaacttgtctttaagattttgtggcaaccgcttgtcacagaggatgccagatgcatgataccatttcaaccaagcgattgaaattctatgcctaatatattcatcatttccaccatccttttgtagcattgatcctaaatagcgaaaagactccttcc

SEQ ID NO: 112825 - DNA, 454 bp, Zea Mays
gtcagcatttatgatagtataatcgaattatagaatttgcatatatcatgcaacgaatctgggaaggcagttcacctatgcatgcgtcaacatttataccgggataaatagattgaataatgtgcataaaccatgcaaaaagaatctgttgatgcgcaaatcatgtgtgacgactttacaagtttgttcagtgtttacaactgcataagaacatgaaacgtaacaacataaaccatgcaatatcgcgacgtcagaccatttatgctattgtatatacgtgaccagtttgtgcgtagatctgggttggattgagattaggaaagtagtgctgtaaattcgcgataaatgtgggacggttaccgcataaaacgttgatctgtttcgttacgacgaatgaggcacaaattacaacgcgaaaatcacgcgctccgatcgtgctagggttctggctagg

SEQ ID NO: 112826 - DNA, 514 bp, Zea Mays
atcgttgaaaaatcctgaagaacaaagccaagtggctagaccttgagcaagggcctatgaatgtggataggttggtgcttgaaggaaaggattcagtccccatggaagatgggagtacattatatctagcgcacaataagaggcctctcggaagagacaacaccaaggcaaccagaaagaagacatcatcagatacaacttcagatagtggataattcatatctaagatgtctgatttgaccctcaaaaagcttgagtactgggcacggtcagattgaactctaggtaacgacctacatcaactcgtggagttaaaaaaaggagtgcctatccatcaaggcaaagagagaagtcagggaggcggagttggcagccttagcacgggcaaaagaacacatcatggttgttgatttggacaaccgcaatccaacaaagggcatactatgaagcaatataggatgaaatcatgcaaaggtttgcaacatctaaaaagtgaatctagactgcactaaat

SEQ ID NO: 112827 - DNA, 430 bp, Zea Mays
ccattttggcgccactgcaatctcaccgctgggacgaaggggagcggaatttcagagaagaaaaaagtggtgcgaggcagaattgcgaagttagggctcagaaatcaaaagtgcacgttgacacgagtataaatggggttttcccggggttgggcgtcatttctgaaaagggccaagtcatcactcagaaaaacgagacttctgacataacctggccgttatctctaaaacgccaacaacatcaagcactacccggacgttatctataaaacaccgatagtgtcaagcataactcggttgttacttctaaaacgtcggcgtcatcagttatcgctcggtgattattttcgataacgccggcaacgttagatgcaaaagtgaactatcaagcacttataaaaagaggcaatattcattcagaccaaccaag

SEQ ID NO: 112828 - DNA, 368 bp, Zea Mays
gtctcttctcgccacaccgaccatgcggtgcgggcttggataaaagatatattgccgccagtcacctgtaaaccttcacatgacaagcagtatgatctgaccttagacctacaacccgtaggagcgtgtacagtgtactatatatacaatgcgcccccaagtcaagagtaacatgcgtgccgcgcttcttcaaacaaacaaggccatcccagacatcttctggactccctgcgatcgcttcggtcctcaggctcagggatgttctcacttctcagaacctcacctgccgccctcgcaatgcatagttcgttgcgttagatatgaatttcggactcggtcaacggacggagtctggaatgaactcgcgc

SEQ ID NO: 112829 - DNA, 302 bp, Zea Mays
aaattactcgacccgaaaaaattgggtaacccgaatgctcaggcttatccatacccatatcttcctacttcgtgtacatactgaccttccatagatgtttctcctcctccaaataaatactacaatagatgttccttcctaccactaaagctcctaccatcgacacacctcctccaccaccattcatttattcataccctcctacatatccgtatgaataccaatatggcggtcttgcatttagattctatggtgcttatcctccattctctccccatatggtgctcctcttccattttgtc

SEQ ID NO: 112830 - DNA, 955 bp, Zea Mays
tcacttttagataattgaatatggttcctttggatggaggcttgtagtttgtgattcttgtgtatttagccctgagaagctatagtaaagttaagcctatagttagtggacaaaattgttttagtaaggtggatatttctatgtttggaaattgaagaaaaaaagggataaagatggtcctgcagtcgaactgaagcagatcagagggagcaaaatatctgcagcaaaagatctccctccactagagcttctagccatttccaggcaggctgtggtagaaataaagttacctcacatgaaaaacctatctaaagtttcacctgccatagctccaacacaccgaagataaagtgagaacatgaaaaacctatctaaaggtgactcagctgcttaactgtttgaggtgctatccaacatgcagtgaagtagtatttattggttcactatgtttcacctcgacgtggtgaccatgtaggagataagtggagcatgttggctctcttttatcctctgtatatggccccaaagaagccccaacttggttgcaacaactattccttgttatggcatatgaaagcacaaactgaactccaccgagctctagctgattccatgctttctccaccgcgccaccccactcacatacatctaggttaagtcctcaatcctcctccacccctctatgtccctgtgaaagcgtgaacgcaagatgagcccaagcagtggtgaccacacccactgaaacacccacctccctgtggtgagccttccctaggaggtaatatgttcaaattgttcatgtttcataacccatgtgtgatggtgatgctgacggtgttgcccttttgaatgctaccatggtatcccggccagaacgctgttaggtttgtctacagttcgtcaaaattcccttaaacacgaactcggcaggggtttaggagtttcttctcagatt

SEQ ID NO: 112831 - DNA, 592 bp, Zea Mays
cttagccttcgaagaatctctgtgccaccttgtattaaggagccgaagatatatgtttgtaaactcatttgatttggaggaaggtggaatacaaatgtcaaggcatatgagatgagtttttatactcgaccactcattatcgtttcattttatattgttttaatcacatcttcttttaaaaggtcttcatcctttgtgataacactttgaagaagtgttaagacaaggatgaaggtgtacataattaacttgtgttgccttgattttcaatgtctttaggggattgaaatcaagtatccaataacaccccttttgggcctcccacgtcgcttgggccaagcccactctaatgcacacaataacgatatacaacaacgcttcgactgaaacatcccacacaacattttcgactaaggacctcagtttctccttgaacttgttcagaaacctagtttcatacctcagttcctccctaaactttataccaaaaactagtttcgtccctgctgccgaccatgtttcacctcgatcaacaccttcacattagcaacacacaaccatgtacgagcacaagtccacgagttgaatcaag

SEQ ID NO: 112832 - DNA, 456 bp, Zea Mays
gcactctcaggggctactttttcaccagctccatttcggtgatatcaaagtccttgacaccgagtggcggataaaccgcaccttaatccaccggctgtcctccaggatccacacacttcatcacctccagaggctctgcgcctgcagcgggatcagcgggatcagcttgacactcttaggtttataacccattggttggggccggcgccttcgcctctgggtaaattgcagctgcaacaactaccggaatgttatgcgcgtatgggaatacaagcaactccctcgctacttgcgctaacatcacgttttcgcaaccacaacctagaggcacctctcgcacaacccatcgcttagcactccccgtaccgactctcatttgagtcaactccttccccaacttaccatagtgactttcttgacgatgtccttgtcgggtatggtacatacgtcaacctt

SEQ ID NO: 112833 - DNA, 676 bp, Zea Mays
gcctactgggatctgttttctgcagccatggccaacgagcccccaaaacccaaccgaggttctttaaatcactaatcccaagaccagtagaccacccagctccttgggacgggtaaccttaggccaagccaggaggcaatgaccaccacagaactctttcctgtccctccagaggaagcccttcctctgtttatcaattgctttgatggcccagacaggaaggtcaagtgccaaagctgcataaatcatctttgccgtcatgacgaactgcacatgaatagctctaccagccttggtcatgagctcagctttccatcctggcagaaggctggccaccctatcaacaacggcctagacctggtcccttgtgagtttcttgggagacaaaggcaaaccgaggtacttacagggaaaatctgaaatattacatggcagcaagtcatgtaagcaattcacctcttacccacaacagatagggaacccactactcttctggatattagtccttagacctgaagctgaaccaaaaagatgaagaatatacataaccacactaatgtccgaggcagtagggcttagaaataacactgcgtcatctgcgtacagcgagatatagtgctgcatattccttgtagagagaggttgaagaagcccttcctcagaggctcgctgcacg

SEQ ID NO: 112834 - DNA, 591 bp, Zea Mays
gctagggaaagagggagaggggtagcggcgaggctctaccgaggaaggggcagtgaggagtgtcggtagtgggtgctgcgtggaggagaataggggttgtgggcacgctgccatgtgaagccatggtgagagcacgacgatgaagacccgatgaagagaaataaaaattggggaaaaattaggggtatggtgaaatccgaccctgatgattgtgattagaacatctttcttatgattccggtgagaggaaggggcagaattgggttaccgaacctaagctaccgtacacagagaactggacgatagttacgatcgattcacgatgagacagagaagggtggtggagatttctcaacaagaggaaaggatggacgaccagtggaccattggtggcgaggacatcgatgctttggggatggagaggaagacgatgctcctcctcctcggttgttgtataggtggtaatcgtgtttgtcgaggactcctcgcttcgggaaacatccatgtgcataaccaaggggaaactgacgaggtataatgtgaagggaaactggtgtgcgatgcgagcgaaggtgcacgaatgtggcgggg

SEQ ID NO: 112835 - DNA, 546 bp, Zea Mays
gaaacctgctgggcagaaaaaacgaaggattattcaggtggccgaagtcattcagcagacacctccgcaggcgtcggtgccgaagataccagttattgttagcactgctgcctccgaagccacagcaaccgaagctgaaggtgccgaagctgaagatcccgaagctgaaggtgccaaagatgtgaatctggaggccgcacttgctgaaattgataccatgcttctgggtgcgatcgcagaagaaactgccgcagctgctgaaaaaggaaaaggtaaagccgaagacatttccgaagaggaggagtttaattttcaagatatacttgggcaagagttatcaaaagatgaaaaagaagaactgaagaaatatgctatatcttgtggatacaaaccgggagctctactttttggtggagtcaacgaagggaggctaggatgtcttcgggaccggactggagctaaggtggtcagcactttatcaaagagtgttggtgttccaaagatcgaggtggacctttgcaggtaccggcgacagcatatcaccgg

SEQ ID NO: 112836 - DNA, 305 bp, Zea Mays
tttggatcacgatccattaccacccctacttgtcatgcgtatgtttactgtaagagtacgatcgatccacaatccaggtgcttgtgtgctagtaaaaccgtcaggtggtgaagctctgtagccgtggctagctgtcctttgtttgcttttatgaatctgaacgagggacacaacacaagggccggccatgtatgtatgtacgtacgtcgctagtggtcaacattgtttcctcgcagtcgcaggcagatccatgcataagctacaggggaaggacagctatgacatgaacaacatgtcccagtgca

SEQ ID NO: 112837 - DNA, 413 bp, Zea Mays
taacgagaatgatgaatcgttaatgtgtcgaagtgtgatagttcttagtagtgatgaatctgatgatgaatacgatgttgagtcatggccttcggagggtgaggggttgagaccgtttactgagatggacgacgagtcttcggaagatgatctagattattttgtggcgctagatttgtctttcgctgagtctccgtcaaggtttgctcctactgtggttgtggagacatcacctagggttgcctcgagtgagccatggggattggggtgtcaaaatgaagtgtgggaatgcttggtgagtctttgcaaggcattggagtccctgaagacgccgccgaatgggaatggagaagtttcatctctggaatggaatgtggttggagggaacccgaggaatcatccttgctctgacg

SEQ ID NO: 112838 - DNA, 470 bp, Zea Mays
acgcgcactggagtcgcaccggcgatcagtggaatgacatgattgcagtcacggattggtggcataccggtaggtggttcaaaaacatctgaaaaattggatagcaactgcaccataggtgtgggcaaactcatttcattgaacctgagcgactccttttcaaccgtagccacctacaccaccgctccaggttgcagaacagccgaaacaccatataaagtaactgatgactgctgataaggaatgcatacccacttgtgtaaccaatgaatgtgcatggggctgtaagaagataaccaatccatacccacaataatgtcagacaggtaattccagcacacgtaaattagtaataaacacacattcttgcatggaccaacaagcactcttgatttgatgagaacacttaagacgagtaccatcagccacctgaacaactaccggtgctagcagctttgtaacaacagata

SEQ ID NO: 112839 - DNA, 739 bp, Zea Mays
tgattcaaagtgtcaagaatcttgataggatactccatgtaagtcagatcaccctaaacactgagttcttccattggtaactgctcttcagggacacagaggcacttcttgagttgtgacacgtggaacacatcgtgtacatcagatagatgatcaggtaactcgagttgataggccatctccccaacttgcctaaagattctgaagggtccaataaagcgaggggataatttgcctttaactttgaatctcctcattccacgaagtggtgacaccttgaggtacacatgatcaccttcctcaaactccagtggccttcttcgattatcagcatagctcttttgcctagtctgtgccacctcaagttctcccggattatacagacttgttcttctgcctcttaaataagttcaggcccaaagaattgtctttctccagtctgatcccaatatagaggagtcctacacttcctgccatataaagcttcaaatggtgacatcttcagactagcttggtaactattgttatatgagaactcagcatatggtagactcttgtcccaactgcctccatcctgaagggcacaagctctcaatatatcctccagtacttgattggtccttttagtctggccatcagtttaaggatgataggccgaactgaaactcaactttgtattcatattctcatgaaagcttttccaaaatctagaggtaaactgtgagtctctatctgaaac

SEQ ID NO: 112840 - DNA, 957 bp, Zea Mays
accctgagttttagataagcgtgagcatgttgcaccgccttaagtcattgctgacttaaaccgattgctctgttagtagggcatagtggtcaccccgagttaagtatgcgtgagcatgtcgcaccgccttaagtcgttgccgacttaagccgattgctctgttagcagggcatagtggtcaccccgagttaagtatgcgtgagcatgtcgcaccgccttaagtcattgccgacttaagccgattgctccgttagcagggcatagtggtcacactgaattaagtatgcgtgagcatgtcgcactgccttaagtcgttgccgacttaagccgattgctctgttagcagggcatagtggtcaccctgagttaagtatgtgtgagcatgtcgcaccgccttaagtcattgccgacttaaaccgattgcttcgttagcagggcataatggccaccccgagttaagtatgcgtgagcatgtcgcactgccttaagtcgttgccgacttaagccgattgctccattagcagggcatagtggtcaccccgagttaagtatgcgtgccaattgacagtgaacaatctgagtgcctttgaaacctttttattgatgatatttttctcaatttacagaatacatcgtcgttccgagagcctccgcgatgtagctacgggtagaacttcctgagatgttctatgttccatgagttcccaatttctgttccgtccatctgagtgaggcgatatgatcccggccgagtgacttctgctactatgaatggtccttcccatagaggtgacaatttatgccgtccctcccccgttagaattcggcggaggacgagatctcccactgcgaaggatcgacgccgtatggccttattgtgatagcgcctcagagtttgctggtatcgcgctgattgaatcaccgtattcagtcgctcttcttcgagtacgtcaacat

SEQ ID NO: 112841 - DNA, 824 bp, Zea Mays
cggtatgctgcggatcccactctgccaatgatgggataggaaccgacgaatcgcggtgatagttttcctttcacttggaacctcttgacaccatgcatcggggagaccttgaggtagacgaagtctccttcttcaaatctgagctctctccgcctattgtccgcataactcttctgccgactctgagcttcaagtaatctcctgcggatcagggaaactttctcttctgcctctttgacaaaggcaggtccttctagtgtttttcccctacgttagaccacatgagaggtgtctggcattttcgtccatacaatgcttcgaatggtgacatcttgatgctggcctgatagttgttgttgtatgagaactctgtgtagggtagactagattcccaacttctatcgaatgctagcacacatgctcttaatagatcttcgaggactttgttaactctttcggtctgcccgtctatctgagggtgataagcggtgctgaaatctagctcggtgcccatagctttctgaaggcttgtccagaatttggaggtgaactgggttcccctatctgacactatctttcttgggatgccatggagtctgactatctctttgagataaattcgggcaagggtggctcctccaaaggtagtttttactggaatgaaatgggctaccttggtgaggcgatctattattacccagatagagtcattccctttttgcgtctgtggtagtccggttacaaaatccatgcctatttcttcccacttccattcaggcacggggaggggttgtaataggcctgcaggtttttggtgctcggcc

SEQ ID NO: 112842 - DNA, 398 bp, Zea Mays
agtacttgcccatagaatcggttgagcaatcccagtctttatttatctggcttatgactactagtgaatctccgtataccatcaacttcttaacgcacagtgacacggcaatgttcaacccgtggatcagtgctatacattctgctgcattatttgatgctgggaataataactggaatgcatacttgagttgttcacctccaggagcaataaagaggattcctgcacctgctccctgcaacttcagcgagctgtcaaagtacattctctatatttcggtagcctcagggttgtccaggacctgatgttcaatccactctgatacgaagtcaaccagttcttgagtatttactgttgtgcgaggtcggaactctatgtcatgagctcccagctcacac

SEQ ID NO: 112843 - DNA, 296 bp, Zea Mays
tgcgttaagtcgcaaggcttcctgccattgtctgacgatgaagacttctgacattacgttatgccaagaaatggagaaattgaacctaggaatgatatagcatgggacttcaaatcacttgaagcttgagtcggtcctcctgcaaagaataactgacgcacaaagaaatgatgagggtatgaaacacatccaggagaaaatagcggctggtaatgccaactatttcagaagagatgatcaaggtgttgtatggtttaacaaccgcatagttgtgcctaagaatgaagagatccgcc

SEQ ID NO: 112844 - DNA, 582 bp, Zea Mays
gtggtggtgtgtgcgctagtctgtttctgacacatcggtgggtcaaacttgtttcctcgtcaaatgggtcacctcgacctatcatcaagcgatagagagtcgtagggcggtctttatttaatcatgtcattctccctgtttgcttcaccttcctctcggctccttatcgcctcatcttcctcattcagccttcttcctcgcccttgatttattcgtcgtgttttctatggcaacctggcactgaccctcaacacaagcacaaccccctacacaagatggtgaataagacattcaagaagatggcaatgatcaagtgggagttgaggaagaataggacaaggaggaggcaccacatccaagagtctgcaccaccaatcaacgagatcatccggtggacatgatccttggagacataaataagggagtaaccactcattctcgtattgctattttttgtgagcactactcttttgtgtctcccattgagcctttcaggattgaggatgctttgaaggatctagattggctcaccggagactccaaggccttcaaggatggctcaccgccacaccgctggcttca

SEQ ID NO: 112845 - DNA, 493 bp, Zea Mays
gttttttaaatcgtgttttggttctataatgaatttgtgattagtaactttgaattgtacggtgtcagttttgttggtattttttctatatttgagctatcatatacataattatgtattccttattttattcgtttgtttcacggttggacaactaatatcatcagggtggattatccgactaatatccgttatctatccgggtaatatccgatatccgtttcttatccgccctggttattacccgatcacgtcctgtatccgtcccggattttcactatccgtatccgataaaattgtattagggtaggatacgagatgacctaatatctgtccgtatccgtcccattttcacccctactccttacttggggatgagcacgtactctgcgtcagcgaggttgcaatctaatgaatgcaatgagtaagatatatgcatggcatgatatgcaatttagcaactaaaattgtagggtgaaagattaattaacag

SEQ ID NO: 112846 - DNA, 320 bp, Zea Mays
gtgatgtagggcattttcttccatctcggccatgacaggtcatttgtacagttgctgctgcttcagtctatctgatactcagtctcccccttttcagatcaggcgcttcttcccattcaattcaaaacccaacacggcttgcagcttgcaaggaactgattgttcccattcttgtcctgccttgaagaagactcattgcgcattacattgtgaggtcaaggtgtagactgtagactcacggctcttttatcagcagcctgagcatgacgcaaaaacctaaccagagccgagaacaggcttgccccatggctgactctgac

SEQ ID NO: 112847 - DNA, 519 bp, Zea Mays
ggaatatctggatcagtttgtagtcgtattcattgacgacatactgatatattcaccgaatgaagaaacacatgaagatcatctatggctagtcctacaaaagcttcgtgacaaccaattgtatgcaaagttctcaaagtgtgatttttggttgaaggaagttgctttcttaggacatattgttactgatggtggaattaaagtggacccaggaaagataagtgagatactaaattggaagcaaccaaaggatgcgtccaagatcagaagttttcttggattggcaggatactacagaagatttattgaaggtttttccaagttagggaaacctcttacttcactactggagaaaggtaaagagttcaaatgggatgaagcatgccagaattgttttgaagaactcaagaaaaggttaaccactgcacagatattggtaatgccagacattcataagggatttgatgtgtattgcgatgcatcacaccttggacttggatgtgtgctaatgcaataatg

SEQ ID NO: 112848 - DNA, 318 bp, Zea Mays
gagaaattgccttgccaaatactgacagcacccagaccagaagtaaccaagccgcgatcaccaggatcccaagcaaaaatggaaaaattgccttgcccaaccaagccaatgccagcaccaatatctggaccaataagattgtgcccagcgcccatgccagtgactacaagctgatcaccacgcaacttcctgaggtcttcctctcctgtcgtcgctaacagcatggtggaagccaggtagaaagacccgattgtgcatacccactcgccattccgcaccaggtgcttgcagcactctggcagtcccttgcagatcttc

SEQ ID NO: 112849 - DNA, 331 bp, Zea Mays
tgcatgcatgcgtgaatgaacaagtgttggatacagttgcacccaacatccaacttcggccacaggagacgatgccagccattgctagcgtgcatgttcgccgccgcttgacacgctacatgatggttctacgcatacgcctttgcttttgcttggcatccaagagagtaaactagcagcagcgtcgtatatatattgtacgtaataatagaccaggggttccatgcgtatatagagagagtagtagaaaacggacgctgtcacgcactgtgctttggtagtttcggtgggcggcgccaaacgcgaggtgcagatcgacaagcaagttaat

SEQ ID NO: 112850 - DNA, 587 bp, Zea Mays
aaacttgctaatttcactcttataaattattttatcagccttacctctttgaaatttcaactgagttgactcttctcttgtagatggttcgcactctccaaactacccgcatcaacaccagctatgcccctcagccccggcagatcccggtctacccagtggtagtcgaggaaattccggcggatctccctcctatccgagtggagaatgtagtcaacctggaggacaactcggaggaacagctgccgacgcccaccccgttggcagagtccctggccttcgcagctaggtcatcgatgtcagcaccgtctgcaccagccttccaagcacctgcacctggaggagatgatcccgacaactccgaagacgacgatgacgaggatgacggcgacgaagaaggtggagacgaacacgtccacgaggaagctgactacgcccagcaggacaacttcatggggtttggtcccgttgttgaacattatacatcaatgttcgagacggggcatttccccaacctgctgcaagaagtgctgcacgcgctaggcacctacgtctgccccctgtacgaaacaaggcgagtgagcgag

SEQ ID NO: 112851 - DNA, 466 bp, Zea Mays
gtcgcctgcaatcgacgtgcgcacacgtcttagtatgcgcatagagatgtagcagataaaggcagcagcaaaagcccgagaggcactaacctggccgctttcgacgtactggctgtgagtggaatggaactacataacgcgatgcatgtgctggcgccgaagtggatggccgatcaagtgtgttcatgtgttcgatagtagctgttcaaagacataacagatgtttggttggccatgcgaaagggaaagagacagattggctttaattaaggccatattcaacccaaagaacgcataatatcagtatagactttgtgaaattgcaaaacgttgggtaatgggggtctcgacgtgaacactccatggtctctcatgtactcccatccattagcgacaacatagacaacaacagtgatgccaaactaacagggtcgtatggaagggaagatactactgccacatctcc

SEQ ID NO: 112852 - DNA, 739 bp, Zea Mays
ttcagaagtgatgaaacgatcagctctggttgtggctgacgaaggtacttctaatgtcgaagctgagcagactgtgattgagggtgaagatgttgagagtgaagaagactacaacattttgattccaacgaagcctagtcatctagattttgaaaaatctactgtgtctgaagatgacatgcctatgatgatgaaactgggctatttttgaaaagctgaaagcaaacttattcgatttgctggagaagagactaccccaaagccgaagaaggatgaagttgtggttttcaagagcttcttcagagcggggctgcgatttcccctgaataagatgataggggaagtcctaaagaacttcgaaatatatcttcatcagctgactcctaacgctattgttaggctcagcgtctttatctgggcccttcgaagccaagggatgagcccagatgccgaagctttctgtcacgtgcatgagttgcactatcagatgaaggccaaggcagatggtcttcacgaaaattttggttgttataattttgtgtatcgaaaggatacgaaggcaccagacctcagctaccacacaaagtggccaaccggctggaaaaatgaatggttttatatgaaggctgatgagaaaaacagggagaagttgatgaccatggtcatgagtccactaagtttgagcttcggaatgacccgacccttatgcaacatgcaactggggtcaccctatcagttg

SEQ ID NO: 112853 - DNA, 629 bp, Zea Mays
gccgaaggaaactgctgctggctccagtcaaggtggcttggtttatcttaagtataccttcgagtatagtagccaatttgacgagccaaatgatgattggctagatgctatagaggtaaccagtgatgagctgctaggagcctactcgaaaatagaggacgaggccatgactgttgccttcggcgctcgagggaaaagaagactgaatagagtttttgatgttattggatttgtgtatcatgattactgttttcctgcctgaaggcaaggaggaaaaaggaaagttgctacttcaacctcttctagtgtgtcgaagccgaaaatggccaaggtattgacacgtaggccgaagcctattgggacgactgaggtgccgaagcttattgaaagtgccgaggctaccccctcagccatggaaacagctcctgccatgtcagtcgaagctagtgcaaatctggtaaaagagccggaatcagaaaagatagcagaacagccaaaggtgctaagccctctagctgtaacggggctgtcgaagctatctactactacaacaacaactccaaggaagagaagaatggctagcattttagatgtagttttagaatccatgaaagcgccaactctcactt

SEQ ID NO: 112854 - DNA, 860 bp, Zea Mays
gcacggagttgggatttagatgagtcgggttgagagaatagaagtcaaggagaccatagaaaaagggagaaactagcaaagccaaccctctaatgaggaagggcacaaaaacaaccgctttgtgagtatcctctgttgggacggtaattccccgctagatccgccaagagcataactctttggacgaaagaacaccgacctcgatgaggcaaagaagatcagtttctaagacaacgaaggcgtagttaccgtagaaagggagttggctattgggatcaaccggagggatatcgagcatggtgaccccctgtttcctcttcctaggctccatctcaattcttcaagcaagaaggctcaggaacaacacaagaacgagtgggagtttgagacgctagagtgcggcagaggagaaacagagttagggttcaagcaccaagaaactattgacaaagatatatgtgcacacactaagtcgggggtagcgtagcaggcaaataactcggactggtcattggcacaacagagcaaagcgaatggaccaacgtttccaaccaggccttcccgagttttttcaagaaccaaaatcacaagagtcgatgggattttacaggggtcgagtcatcgaataaattaggagagcaaaagtataaaaatcagttctcattcattaaggggaagagcattacaaaggaaacagggccgactcattatgagtggaccctggtatcctagtcctcctattactactactactatgattacaacaacacctactaatactactgctacaactacaactacactatactactatgtacactggtggcatcttgccactggcgttatcgccgtcaccgtcg

SEQ ID NO: 112855 - DNA, 1257 bp, Zea Mays
ccaagagttctctatcattcaatatgcagacaacaccttcctggtcatggaagcatgccccaaacatcttttctttctcaaggcaatgttgaaatactttgccacatcaacaggcctacacgtaaactatcagaaatccaacatttatcccgtcaatgtctccgacgaaaaaatggacaaccatgccaaaacttttaactgcaaaattgggagcttcccctttacttatttgggcctgcctatggggaccaccaaatcaaagttggatgcattcatacctctcatctagaagttcaaaaaaagactaacatcaacatccatatttctgttgcaagcaggtagactttagatggtcaactcggtcttttcttcattacctacttactacctctgcactctaaaactgcccagctcggtcgttaaacaagtggacaaatattgaaggcactgtctttggcaaggtgtagacatcaacgcaaaaaaacaccccaagcagcatggcagttagcatgtagacccaacacacaaggtgtccttggaatcatgaacatcaaaagacacaacgaagctcttcttccttgcataaatttttcaacagacataacctaccatgtgcgtgcctgatttgggacaatcactatcacattggtgaaatcatagtttctaggagaaaatgatctttttggtggaatgatgtcctcaaaacaatagacatgttcaagactatgtctaaaccgctgattggtgatggttgttctatacaactctggtctgatagctggggaaacaaggtgcgtcaagaactgtatcctgaacttttttcctatgcagtcaacaaaaacatcactattcagccaaaaaagactgggctcaaccgcgaacctccttcacctgtcgttatttgttgaagcgtttacacaatttcagctcctaggcaatgagctccagaatacccctctttcggatggaaaagacgagtggagatacaactgggggccctcgaactactcctcttagaaggcatacaaactaatccatgttaatcccccagccccctggacattcgctcgcctgtggaaaacaaagtgccaatcaaaacaaaaactctttttttggctgcttcttcatgacaagttcaacacaaggggattgctcttaagaagacatatggagcttgaatcatatacatgtgaaaattgcataaggcaaaggatagaaacttggtcccatctttcttgagatgtagcttcgctcgta

SEQ ID NO: 112856 - DNA, 410 bp, Zea Mays
ctaacttctaagtagtcatagtatctttatttttctttatttgtaatataaacggaatatgtgatatgaaatgggtaacttgatcatgaaatgggaacttgatctaggtgaatctagttagatatggcgatgcacatttgtaaaatatagtgcgtcgaaccttacctttgccacgattctcgtgcctccctaccgtgtgcgctttcccttcacaccgaccatcttctctgagacacctttgtggctcttgatcatgtcatgaacccggacagtttgtgttttccagcaccgtaattgtctccatgaagatcgaggccttgtctccctccccatccaggatctctgtcagcatgctcaccactatcgaccccagcacctctgcgggtgccatcgctggctctctcatcctt

SEQ ID NO: 112857 - DNA, 705 bp, Zea Mays
ccgggtggccccacttgtcagtggttgctgagggtagagaaattggtgtaactagggctatgtgcgtacaactctgtaattaccccgttgtacaacatattcagggaatgtagcaggtaaaagggggcatggacgtatttaggtcacctaccctcggctaccctataaatacccccttgcactgtagctagacaagatacgcttaacaagacatacgtgctccctgcctactgttttattgagccacccgtttgccatctgtcacactgctcccaagtgcttgggcccactgctctcagtcccaacatttggcgcccaccgtgcttgcttcgaagaccaacctgcgatggctcctaagaaagtaaccaccagggccaactcctcctcggactaggccatgaaggcaaccctcgcttccaataaaggcaaagtcaccttcgccgacaacatcctacccctcacagctgagaacaccaacgggtctgaggcagaaaacaacaaacacccttgaactgaagacccgcctaccttggagggcagcattcacacctacagctccgagagcatacctgaaaaccctcccaacatgcattacctcaacattcatcacatggtggataacattccataatttatctctaatgttactcttgtccccactcttggaaaggatagtgagtctagcaatcttgttgatcactgctg

SEQ ID NO: 112858 - DNA, 754 bp, Zea Mays
catagcaaaccactaaatatgtttctccaaatctgcccaaaacccaaagactgcatgacttcaatcagaaaaaggccatgaaaccgagtcgaaagccttagatatatcaagtttgaaaagtagacttgactgcttttgctgatgaagaaagcgcgaggtttgctggactaacacatagttatcttggatgaagcggccctgaataaaggtgctttgatttggggaaatcatcattcagcttgctcgctaatctgttagcaaggattttggtaattaacttagcaaagctgtggacaagactgatgggcctaaaatctttgacttgatctgcaccctcttttttcggaatgagagtgatgagggctgtgttaagcacttgaaagttcatgaattttctgctacccactgctgaaattgctgccataacatcacttttgatcacctcccaacatgttttgtaaaacctacccgtatatctatccggtcccggggccttgtcagagggcaattgtttaatagtgtcccaagcctcctcattaaaaggagcatctaaggttgtcaagtcaaagtcggggatgcccaactgctccagatttattgagaattctctgtcactgcattttcccaacaagccgtcatagaagtcatccaccaaagcagtcttagcttcatgattagtatgaaccatcccattagagaccgacctcaataaaattcttctttctgaaccgagcatgcatgtgaaacagttttg

SEQ ID NO: 112859 - DNA, 473 bp, Zea Mays
aagggaaaggctgccctcgtggacgacatccctcaggaagcctttgacgatgaggcgatcaacaacaagagacaacgccaagacaatccgcctaccacagagggcaccgtgcgcacatgcagctctaagggagtacctcaggcacccccgtcgggcttcagccctagaggcagaggacattgtcgaagacggtgaaatcttaggcatttcagtcgaagaccaactcaagctgcgagcccttcacatcaagaacaatcacttatagaagcagaaagaaataattgcagccaagcgccagcacatcactatgcaggccaaggtcaggcaaatgatactagatgaggagcagaaagctagagaactggaacaacaagttgcagatatgcaaggcgaaggccgtcaccaaatgcagcagaattctccctacataccagccatggctccaaccactttccaagggataaattacctta

SEQ ID NO: 112860 - DNA, 422 bp, Zea Mays
gcactccccaaggtgaggaactaggacgaatataccctgaatcctgtaactccttcaactgattattgagttcttttaattcttttacagacattctataaggtcttttggaaataggggttgttccaagtaagaaatcaataacgaattgcacatctctatctggtggcattccgggcaactcctctggaaagacatatgtgaaatccctaacaactcggatgtggtaaccaacaaattgtccgtctagtaggtagatagcaggtttagtggatggtgacaaggttattgtgacctcaaatctatctctatccagactagtgagttcagtcgttcccttagcacaatgtataattgcattgcattctttcaaccatttcataccaaggatcagatctatttcactttcttctagcacctcg

SEQ ID NO: 112861 - DNA, 396 bp, Zea Mays
ccatttgaagccctttatgaacgaaagtgtagaacaccgctttattggaatcagactggagaaagtcaagtatttggtccggaaattctccaagaggcggaaaagcaagtgcagatcatcagagaaaatttgaagacagcacagtcaagacagaaaagctatgctgataatagaagaagagagttgatgttcgaagtaggagactttgtataccttaaagtttcaccgatgagaggaatgaaaaggtttaaggttaaaggaaaattatcacctcgctatattggcccattcaagattttggaaagaaaaggtgaagtagcctaccagttagagctacccgataatttatctgacgtgcatgacgtatttcacgtgtcacaactcaagaagtgcttg

SEQ ID NO: 112862 - DNA, 530 bp, Zea Mays
agcacgtgcatttattgctacacacatagcacagcaccacttagaacatttttacactctgactggtatactcctgaagctcctgcattttctccatttcctactctctgttacatttctgcatcttctcagggggagttctcttgtcgaggggaagtttttctttctacccttgtttgtgcttgatgagttcacttgtcaacaagggggagagattttgagatttcccggttcctctatcaagggggagaaatttggtcttttgggcttcctctcatccaagggggggaaatgtgttatttggagttgttggtctctgggagagatttttgggagtattgtgatagggggaggagaattgagccttttggagcttttgctagttgtgtggagccgtttgcctctttccgggggaactagttttaattttagcttttgtgctgattttatgctctgaaatggtttttatgctccgataaagctttttgtgctccgatgagtttttggcttctggctagtggtgttgagcc

SEQ ID NO: 112863 - DNA, 1169 bp, Zea Mays
gtgacgtccggcaagcgcgtcgccctcgggaacctcactaacgtcttccgcggcagctgggggtccggcgcggcgaattctgcgtccgatgcggtacggctactcattgcgcgctcgcacgatcggagcgtaaggtttatctgatggatccgttccggtaggttcgtcgctttggttctcgtaggagggggccacgccacgcgtaggaatttgccatgagttgtggtacacccgtacagggaaatgtgttgatcaattcaattgcttcagtttaatttggcgtggcatttctagggtttatgccgctttgcactcttctcgatccatttgatctaataacggcacatgttagttccgcattttctcgatcattttaacaacatttgctgatgtcttttggagatattgattttccttctcttttttatttggctgccttgttcgatgaaatacttctgttccacgggtcttaagacagtatattgtatttcgttgtatcataaggtattttggtaatatattgtatttcgtggtgtcataagagatgttttggtgttttcggaatcgagcaacttgcaatcgcaacttaggtttttcatagtttttggggtgctgggtgtttcagttccagagatactggcgtttcatatgcactgcactgtttcgaatattctgttactaatatattgcttccctcgtgaagtttatatgcttaattgcttatgtagctctctgtttgtcattgtaatcgttcagttgaacaactttaatagacaacgttaatacgttatagtttcctcttactacagaaattgagttctaccaaaccagatgatgttaagaaaggatcctatgcttgcctgcgcaatgtgaacacggaacggggttctagcagaaggctggcctctgaacagtttgatcaggcagtatcacttcttcagaagaacacatctcttccttctgtgccagacgttgtatcaacaggttgcagctcacccggcctgtctcaggattgctcggtctccatggaggatgctatgtcaacatgcaactcaacagaaagctctgatgttgagtacctcaataataatgacgacccctcaatgacatcttcttcgcattggtgggccagtgatagacctcatttctctgatagtatggatgttgca

SEQ ID NO: 112864 - DNA, 898 bp, Zea Mays
gattgagaaaaggggagaaaatataactgaataccagactcaaaatccattttcccaactgactcacctgctgacgccctcggctcagcgccgtagtaacctcaccgccgctagaaatctcacaccggagtggaaatcatctcccacggccagggagtcatcacatcgtatcagagccatcggagtcggtgatcgttgaagagaagacgcaacgactccttctataaaaccatccgtgcagacctggtttctactggaagccatggatgagagagatcgagcagtgcaagggaattgggaccgtatgtttgaatctggagtttatgactggaagactgaaggaggtggagagagtccagcaacaattgttgatgcagtcagagctggcggcagtggtggctgaacaagctgctgttgagaggaatgatctgtaccggaagttggaggaaacaggttgagaagtatctcagttgaggttggaacagatgggaagagagctgggtgaaacatcgccttctactcaggaacaaggaggaaatgtccgaaggaatcaacaacattctcatggtgatcagaatcgtggaaatcaatagcgaggcattagaggtgatcctcgccagtctgctgattcaggtaatcaagcaatccccaaactaccttttccaaaattctcggagggcgatcctgtggtatggttggaccagtgcagagaatattttacaatctaccgtgtgcctgagtctatctgggtttcggtggcctctttgaatttggaaggcatagcatcacagtggtggaagagttacaaattgagaaacggaattgggggttggcaggagtttgagggggcagtaacagataagttttggggctactgcatatccaaaggttttaagga

SEQ ID NO: 112865 - DNA, 754 bp, Zea Mays
cagaacagagtgactagtgattcgttggcttcacaatgaagggacgaagagctgtgctcggttgatttggatgaagggggaagagagcgcggtgaatttataggcccagtgagccaccgcgaaggccatggtgataaccatcaccggaccttgctggcgaccaacgacgacatcggcgctggccttttctaagagtttgccacgttccgccgcgacagtaatgccgtcagatcggtgatggcgtggatggacagagaagagcggcgacggtgaccaagcttggtcggaaggatcagtggccgtgtggcggtcggaataattatcttccaccgcgacgatcttacccacttcaagaatatcatcgcgaggagatgctcgccgaacgctcaacccgaccacgacacaaatcacggcgcagatcggtaccggcggcgaggtgtgcggtactagagatttttcttgctactgtaccattgggacttctgcttaaagcgcctgacagagcataatcaaggcataatttctccataatctatgtgacaacctcataatgcatctgcatcaaagttatagatctataatccatcttcatttttgctatagcatccctagtcgaattcctactgaatccaacccaaacttgaacttcaaacgtgaccaatgtcactggtggtcatacttttctgaaattggtgttcagaactgtccaattgacttctgacagcacgccttctcactcatttatcttcaattt

SEQ ID NO: 112866 - DNA, 632 bp, Zea Mays
gaaaagtggtcatgagtctattcacgcaggaacacaattgacacaacaatttaataattagttaagagacaactaacaaaaaggttcaatctggctcgggatcagtcaagatcttcctcagaatccatctccacctcttcatcatcaccatatcccaccatctaatggtctgtccttgcatgagcaaccctcactaacaacttagcgccttcctgcaatagatcttgcaactcgttttttcttaaccccgcccaataataaatcagagcacatgtatgacaaatgacctaaatcggagacttaatcaaaatattttccaaacacttattatttctagctttccataatgcctaataaatagccgatacaccaacaacataaatttctttggcattaggtaagttttctgaaagccaaaaccagcactggccccatgtcaccagggatggcattcatttttaaacatttagcaacacattcccacaacactcttgcaataggacaagtaaaaaaacaagtgattaatcgactcaggtagaggacaaaaatggtaggacatatccccaacccactttcttctaagcatattatccttgtcaacaataccttattttctagtaacaacataaaaa

SEQ ID NO: 112867 - DNA, 303 bp, Zea Mays
ttcagtgcatgttgtgcctggttccgctttggttgcagggacaggtgccgcaatcccagcaggtgatcttgcctcggataattgggcaccggtggtccctcaggctgggccatctttaacctccatggtcaatgggactacgatgcctctgcagattggatctctgaacatggccaaccaaaccttggctgcttgttcacggactgctgtggagaggaacctggtggcgactcagcaaatgaagaccacccaaggtgttgtccaggatcagagcctgcgtggcgagtctgagcccgaaaatca

SEQ ID NO: 112868 - DNA, 773 bp, Zea Mays
gcaaaagctacagccgcggtggtggcgacaacgatgacagcagcaagtgaggcaatgccggtggcaaggcatcaccagcttagatattagtatagtgtagtgtagtagaaggtaggtgtagtagtagaagtagtagtagtgagtagggatcttttgcaagggtcggttcataataaaccggctcttcttctgtaatgtcactcctgcttatataaataaagcttgttggttttaactatcttgaatattgagtttcttttggtctcattctgcatttggagtttaattgttggtactgagttccttgttatgttcgatttcctgtctcccgactgatctctcccgattgattctacatagaagtgtgtttcctatccgacttagtttgtctgacttaactcgtccgactttactcgtctgacttaacgtgccctacttagcatttcttccatttgatctgaaacaatcatttctctcgcgttggtgcttgtggaaggtctggagcaaacacgtatatacacgcccactgtctgacagcttctagcgaacaaaccctagctctattctttcaccgcaactctccactttgaatttctcatgcatcagcgaatccacgctcaattccaagcttacgaaaggtctcatggcgcccaggaagaagcagggggcacagcggccgtcatccccatatcgatcccaacagccagctccccttctgtggtaactatgcttccgttgtctttgaatccgatttgctccaccttgtccaaatt

SEQ ID NO: 112869 - DNA, 569 bp, Zea Mays
caatgttgagaaaatcactgatgagatgttagctgggctgtctggggactcaagtgacaacgagagttttgatgttgagagtgacaacgaagatgccgaagatcggctatggaggcaagtcatgatgtttttggaaaatccattgttaagcaagggtagattgaagcaatgaagggcaaatatttctatgatatatccatagtgagggctggaggagagaataatgttcctcttcaagaggcagacaaagtgcaagtattcaaaagttttatgaaggtcgggtttcgctttcccttgcataagatccgtctaaagttcgtgaaacatatttgattgataacataacattttgaaggccttcgacaatagaagcccgtaaaagttggcattggctatttctcgatattccacttcaagaaagcaactaggatgtcttcataattaatcattaaacatcaaacgcataacatgatttttaataaattagaaaacatgtagaagatgaatgtatgttaaacgcaacttatagaagcacatttaaactagctatacatatttacatagtagat

SEQ ID NO: 112870 - DNA, 810 bp, Zea Mays
aagatcaataggagcacgagggttaaagccatacactacctgaaaaggacttaccttggtggtggagtgttccgcccaattatatgcaaactccacaaacactcttcccacattttcaagtttttcttcaatattgctcgcagcattgcagacaatgttctattcacaacttccgtttgtccatcagtttagggatgacaagtagtagaaaacaacaattttgtccccaatttgttccatagagtacgccaaaaatgactcaagaattttacatcacgatctgaaacaatagtagaaggcataccatgcaaatgaacaaccacaacaataacgatcaattgcatcaactttgaatggcatcaagtgcatcacgttttgtccccaatttatccccaatttgttccatagagtacgtcaagtgcatcaactttgaaaaagaggttagcaatatgaatggcatcatccgttttgtgacaaggtataaaatgtgccatcttagaaaaacgatcaaccacaacaaaaacactatcgctccccctcttcgtcctagaaatatctgcccacggaactgaaggaataggaagaggcatatacaaaccatgtgggttcaatcgtgacttagctttttgacacgtcgtgcatcttgctacaaagcgctcaacatcacgccgcattcgaggccaaaagaagtgtgtggacagcacagcctctgtcttcttggcaccgaagtgacccatcaacccaccaccatgcgcttcctgcaacaacaaaagacaaaccgaaccaactggaatgcataggcggttagct

SEQ ID NO: 112871 - DNA, 777 bp, Zea Mays
ctccgttagtagggtatagtggtcaccctgagttaagtaagcgtgagcatgttgcaccgtcttaagtcatcgccgacttaagccgattgctccgttagtagggtatagtggtcaccctgagttaagtaagaatgcaggtcgacaatgaatgatttgagcgcccttgaagtctttttattgatgatatatttcccagtttacagagtacattgtcgtcccaatagcttttgaaatacggctaggggtaaaacttcctgaggtgttctatgttccatgagttcccaatttccgtgccgtccatctgagtgaggtgatatgatcccggccgagtgacttctgctactatgaacggtccttcccatagaggtgacaacttgtgtcgtccttcccccgttagaattcggcggaggacgagatctcctactgtgaaggatcgatgtcgcatggtcttatcgtgatagcgcctcagagtttgttggtaccgtgctgattggattatcgtgtccagccgttcttcttcgagtacatcaacatcctccagcctagtagcctcggcttctgctatgttttcaaagatcaaccttggcgccccaaacttgagatcagcaggtagtactgcttctgaaccgtagaccatgaagaaagaagtatttccatgcagagctcgactaggttgagttcttaggctccaaacgacgtaaggcaactcccttatccattttcctgcgaacttttcatttttatcgaagacttttttcctgagtgcctccaatatca

SEQ ID NO: 112872 - DNA, 289 bp, Zea Mays
cagcacaaccacggcgttaggcgtcaactggtgaacctgcacttcgaacctttgcaacacctctgccacgaagcgatgtgccgggaggcgaatgccggtgacgaaaaaagactcgaaaacaaccaactcgccttcaggctcggggatctcctctgcacccggcactcgccagacgccatcgccaaagtacccaagccgctgcatctccagcacgcggaccgaggaaattcttgaggtgccaaactctacggtatggtcgggctgcaactccatcaccgccaaatcgctc

SEQ ID NO: 112873 - DNA, 615 bp, Zea Mays
caccagtccactgcgcaccaccctgccatggacgacatggacagagtccacctcgccgtggacgacatggacagcgccgcccgctctgcagcctgttcgtcccagcgtcctatgtcgccgcgacctacaggtacttctcgtccacgctccctcctctgctgtgcactacacgtagctactgatctagttcaccgtcatttttttgccgcctccttcgttttagggttcctttttttgaccggccgcgcttcgatttaaagtttcttcgctatctctgttttagggtttgagtttttgctaaacaatcagtgacctccctcacaaatcatttacagatttgcgtttatcacatgtacaatttccaaatgttactgtatactcaaaggtttacggtttgttttcttggaatcacagaatttttttcgtacattacaaagcgtctaccagggatcttgtccgtcttctggttttcaagattaaaaaaacctctttcttagggtttattttcttcctctgttacacccattttcattgcaacttccttttcgaaacatgttgagtaatacccctcctccttaaggactgcaacaacgaggtaattatctcttgtattat

SEQ ID NO: 112874 - DNA, 356 bp, Zea Mays
atggttccctcatcatctttagcaaattcttccaagtcttaagaacttaaaaggtcatcttcactttcatgaaattcatcctcctcattgacagggtcttcagaaattggatttaaatcttcattcacaatcccgaagtcagacttctgaataatatttttgccatgagacaatggttcacccactttttccactccaagctcttctttcattttgtctcccacatttctggcttttttaccagttttttcacaagcagggtcatccataccttgcctatccactgcatgcagtttggattttggtttggcctgagaactccaatgtgaaacggaaatttttgctcccgacatttt

SEQ ID NO: 112875 - DNA, 721 bp, Zea Mays
tgagcaactcagggagagaagaactctcttctgcactccgtattcatcattatttgtttctaatcctaaccccgagtgaagtttgttttcaaagtttataatttacaggtttcgcctattcacacctctctaggatacattcagcaccaatgttgaggatagaggggctcagacaaaagcagaatgtctctaggaagctttgagggtggtgacaatggtgctggtggtgtggacagggggctcgagtggctacgagctcgatttgaggtgagcagggcgtgtcgagggttgggttttatggccctatgccattaaagaggatatgggatgactgtgagggtaatgtggccagggatcaccacttgaatgatagggatgtcatctgcatttaaagagcgaatatatgaggaggaaatgttgggagcaaaggttgggatggttgcgtgaggtctctgtcatcgaccaagtttgagcacactttttgataagtatttgttatacaaaagttaatttattctctctctttaattgggagaagtgaagcacatgtgataaaaggttttctcttcatggtttgaatttgtatgattacaatgacttggcacattatggaaatatggtgttacaatatgatactttatttgtatgtgttagaaagaatctagtcatttcttgagccaacaactactagagcatatgctttgacggtacacatcagatc

SEQ ID NO: 112876 - DNA, 504 bp, Zea Mays
gttgaacagtgtgttctataatagctctgccttcgaaggtgtttttcactaccttcgaatttctctttctaaagtcgaaggtatctttgtaatcatttgtaaatagaaaaggacaagccaagttggtttgcttaagtgttttgttacattatgttgctctttcctgatgacccattgttctattcttgcatagatgaatgtacttatacaaaatttacttaaagattttaatattctcttaccttctccctttagtcaatcccttcgaagaatggattctactaaagggagaaagaaaaggttctcatttatgttgccttgttctaggtttttttcaggaactaagagcaagggaacaacattggcgcccacatctagtgaactcacgacatcaagagtaccttcgtcatgcctttaaagaagtccacgactgttagtactgttctcactcccatagataagaatcaagtggacaacacacttctttgtgaagcacaaaactgg

SEQ ID NO: 112877 - DNA, 398 bp, Zea Mays
ctggccatctgtttgaggatggtatgctgagcttcgtattacatgggtcccaagtgattcttgcaatttctcccaaaatcgtgccacaaatggtgctcctctgtctgatactatagtccttagtattccatgcaaacgaactatctggtcaatgtagatttccgcatacttttccgtcctgtgggtggtgtgtaccggcaagaaatgagctgacttggtcagtctgtccacaacgacccaaatgaaatcatggtgccgggaggtattgggcaatcccacgataaagtccatgcagatgtcctcccatttccaacatggtatgggaaggggttgcaaaggacccgctgccctcaaatgactggccttgattctctggcaggtgtcacaatcggatatgt

SEQ ID NO: 112878 - DNA, 483 bp, Zea Mays
cgacaatgtcgatcgtagctcgatggttcatgcggaggacgtcagaacacagagaattgcttggaggttgatgattacaaataaatacagaggataaagacgattacgacatgtgagtctacccttttcgtaggggttccctctcagccttatatccgactaaggaaagatcatcccacacaatctcagagaaccattcctatccaccgacttctgctagaagcgtgccacgtcttctggtgttcagttggtctttgtgaggcctgtacatatgcttcatgtgtagggcgcgatcttgggaatcttcgcgcccacacgtacgtctccttcggttgttttcggttgcacccgtttgaggcccactaggtgccttacagtcggcccattaggggccttgtaggcagcccactaagcataaaagtgccatgatgacctgggggatatctatcccctataagcccccgaggcacaagtcgatttttg

SEQ ID NO: 112879 - DNA, 399 bp, Zea Mays
gtgaaaccatcagtggacaagcctagacgaacactcctagcgtctcttgcaaattctgggtcaaaacgatccagagccttccaagcatcgccatctgatggatgcatcataatgtctggatcttggctctcacgttctccttccttatgccacaacattagcttcgcagtttctggggttaaaaacaaacgtttaagccttggggtgatgggcatatatcgaagctgtttaactgccacttttgtagcaaaagtagctccatcctcttttagtacctccgcatatcttgatttaccgcatatctgacaatgggtggccgcttcatattccttccagaacaacatgcaattgtcttcgcacacatcaatcttcttatacttcatccaagaccggacacga

SEQ ID NO: 112880 - DNA, 524 bp, Zea Mays
tgaagggcacacagaggaggcaaacgcctaggacgcctcgccaaccaaaattggtgaattggtcgcaacgactaaccaaaaagataagcatcggccttttgtcgaccggttgacggacggagctctccttgatgacgcaatcgaggccaagcagatctctcgcaaggcaaaaatcctttgtgatcatcaacggaatgctctacaaaaagggtgcctccgagatcaagcagaagtgcatcacgatcgaggaaagacaacgactgctcgctaagatccatggagggacatgcaggcaccacgcggccccacggtcgctggtcggaaaggcattcaggcaaggattctactggcccaccgccatgacgaacgctaagaggatcgtccgtacctgtgaatgtttctagtactacccgtggcagatgcacatgccggtctaggccctccaaaccatacccatcatatgtccatttgtagtatgggggttagatcgggtcgggcctttcaagaaggtgcccggaggttac

SEQ ID NO: 112881 - DNA, 609 bp, Zea Mays
cgtcaagggcgcggcgcggccgtgaggtcgcagtcgtgggtacacctctatcctctatcgccggcggttgccggtgtccccaccgttgaagcagatcgggcgagagtgcatatgttgttgttccttggcgccacagcaccatggaggagggcacccagcctaagcctcacgcgttgtcgattttgtctcattgcgagcaacctttgatatctttatctctgatttcttcccgagttcaaggacccacactgatgttcttgctggtgctcattgtgaagcaatggatgttgttgttttggatttctccgctccgagtctgaatttgggattttcagatcctgcggctattactggaattgaggttagatccatatcattagttgtttaattcatatataaggactacgccacagactccaaattaactccacaaatttcagtacaactgtttggcgacgacgtacggagaggccgacggcttgacgacgatagagacggctactcgactgaaggcgacggccagatcggcctcggtgtctagatcgacatcgacgtctactaccaaacacttcttcccctcgtcggagttggcatcgcaggagcaagagt

SEQ ID NO: 112882 - DNA, 689 bp, Zea Mays
agaagcttgtgcatctgaaggtacctggcctttgcctcgtggaggacctcgctgacgtagtagaccggcttctggatggttcggacccctatggttagtcccgggtcctcaacctcttggccttccgtcaacatcgtggtggtcgaaccaccaccttctcctgggggaacttgttgactcccctgtggttgttgtgccgccctctcggcgaccagcaccatgctcaccgcctcggaagccactgcaatgtataagtacaacgactcccctggctccggagttaccagtattggcagggatacaaggtgctgtttcaactcttgaaaggcatgttctgcctcttcggtccaagagaatggaccggacttccgcaatagcctgaaaaagggcaacaccctctcagctagtcttgaaatgaagcggctaagggcggccaatgaccccgtaagcttctggacgtccttgatgcgggccagaggcctcattgcctcaattgccttgatcttcttcgggtttgcttcaatgccccggtgtgaaaccaggaaccccagcaacttccctgcagagacaccaaagacgcacttgtccgggtttagctttgtgcgggttacccgcagcttgttgaagaccagggttaagtcttctactagggtcgaccctctcttagtcttgaccacgatgtcatcaac

SEQ ID NO: 112883 - DNA, 1476 bp, Zea Mays
gtgatatcctgaccttaggtctatcttggagaaatatttggccccctgcagctggtcgaagagattgtcgatccgggggaggggatacttatttttgattgttacctcattcaaggatcgtaatcaatacacattctcatacttccatcctttttggtgacgaaaaggacgggtgctccccagggagacgaactgggacggatgtaccctttttgttgcagctctgcaatctggagttttaattctgctaactctgtgggggccatgcggtatggtctctttgcgataggtgcagtgcctggaatgagatctatatagaattccactcctctttcaggtggcattccaggcaactcttccggaaatacatccatgaattcttctattacagatatgttttctgctgccagattaaacatcattggatcattggcgggcggttgggcctgacaggaaactgcttttccttgtcggtcggtgagaaggacggtcttacttgcgcaacttatgatacccttgtgcttagttagccaatccattcctaggatcacatcaatcccttgggatggcaagacagttaagtctgctaagaacactaccccacttaaaaaaattctgacctgggagcatttgagttgccatagaaggtctgaccccggggttcgggtgaccaaaggaatttctaggggtgtagagggaatgccatgtttttccacaaaactagtggctataaatgaatgggatgctcctgaataaaaaagcacagtagcgggagtaaattcaacaaggaactcaccgagcactactcccggagcttgctgggcctcttgagcgtcgacgtgattaactcgtgctctgccctggtactgggtcctgctctgctgactgttggagggggtgccttggaggcaggtgccgagggaatcttggggccattcaccgagttggagtaggtaggttcgggtgccttcaactgggggcagttattcttgaattgactaggtctccgcagtgccaacaggcatttgctggcggttggttgcttgcaaccaagggggcctgaaaggagctctcactctgttgactgtaacgtgacggagtgggtccagctggtctattgaagcttggtcccttgggtggaagcccgaaggatcgagctctctggtgacggtcttgctgctgagctcggaggacctggaatttcctcttgaggtgccctttttcttcctcttttgccctttccacttggatggctttgttggagaggtgcgagaagttgaggaattcttggctggcgaggatggtcttgagttctggtcttagcccttttagaaaacaggccatcttcctggtctcggtgctgacattgtcaggcgcgtaacgagccaactctgtgaacttgtgcacgtactcactgacagatgatccaccttgagttagttcccggaattcatcttccttgagttgaacgatccc

SEQ ID NO: 112884 - DNA, 1359 bp, Zea Mays
caaaattacttaaccgggcctttgccatctttcctcgggaatttgactgctatgcagtacatgtgagatttacaacataaaatattaccctgttacatgttttttacttaacatcaaatcttaaacttttctctttcaaattacaaggagtttgggcatcaatgcattgtctggatctgttccaaaggagcttgggaaccttgtgaatcttgtatctctgtaaggaaaatattttgttgataccatgacactattccattagaaatcacctctaaatttggaatcataaaactagaaatatatgtttcatgtcttcgttcattctagtaattatcttctgtttggaaaagaagctacagatcatgcttccaagaatagatatttcagttgtcaattcctttttgactaaccttcattgttttgctaattttgcagaggcattggctcgaactacttaaatggttcccttccttcggagttgggaaacctggcaaaacttgagcaattgtgcgtctagaatctttactgatttggggcattccatacattttcttattttcattttgagaaaaatcaaattttcatctgtcaacgatgggcttagtctaggattgttgcactccatacattttttaataggaaaaggtagttgcacgtaagattgtttagaacctaaaacagtttgatatggaatgcagttttgttggattgacattgtggaaagggttagtttactttaaatagtatttgttttgttgtactgttacactttattttacttataaaaacttatttagatggtttcaaaaatttaaagccatgcataagtttttaaaattcaaatactatttagctgtaaagtgaacttttctctttcattcttctcttggaatagtaggcgccatgacttatattttttcatatccatatctcttaattgcaggtatattgacagtgccggcctaagtggtcccctaccgtcatcgttttctagactaacaagaatgaagacactgtatgcctataaaagttgttttgttgaaaatgttgttccatgcaattcaaacttatattttattttctggtgtttaggtgggcatcagataatgattttactggggaaataccagattatattgggagctggactaatttaacagaactgtaagatttttttactaaccttcattgtttgtaattacttttgaaaggaaaatagtacagacaaattggatgtgttcttatgtttttcatattactttgattctgtttgctccaaagagaatttgtataacatgctacaattatccacaagttgatccttactcttagcagaacttaagttagtaggtcagacat

SEQ ID NO: 112885 - DNA, 330 bp, Zea Mays
tactctttttggaaggatcgatggattcaaggacagagggtggctgatattgcgccaagacttcttcaagttgttccgaaaagaaaaatcaatacaaggacagtgcaagaagctataactggaagagcatcgatgtcggatattcgaggggccctatctgtgggggcaattgttgattatcttcacctctggaacttattgttaactgctgaattaaggcagaacgttgaagataagcacatttttaggctggctgccaatggaaaatattcagcgaaatctgcctacgaggggcttttcattggctcgattccttttgaaccgtatgag

SEQ ID NO: 112886 - DNA, 429 bp, Zea Mays
gccaaggaaaggcacttatcccaattcttaccatagtgtaacacacaggctcgcaacatgtcctcgagaatctgatttactctttccgtctgaccatctgtctgaggatggtacgctgagcttctaatcacagtggtcccaagtgacctttggagctgctcccaaaaatgtgccacaaacagtgctcctctatcagacacaatagtcctcggaattccatgcaaacgcactatttggtcaatatagatctctgcataattctctgtcttgtgggtggtatgtactggcaagaaatgagcagtcttggttaatctatccacaatgacccaaatagaatcatggtgtcgggaggtgttgggcaatcccagaataaaatccatgcaaatatcctcccatttccaagatggtatgggaaggggttgtaaggta

SEQ ID NO: 112887 - DNA, 349 bp, Zea Mays
gaaatgtgggaattgggtagctcttctcagaccgaggcacgaaactgtaacaaccaaagttgttgtgatactgctcctttccggtagccttcatctcatacgacaactcatggatgttgcaaaagcatctcgcatctggtcctagtccttggctcctcatagcccatataaagatctccactttaatgatggcatcgggagtaagttggtgaaggtaaatttcaaaggttttagaacctcgaccaacaatttgtccagggggaaccaaagtcccgctttcatgaagcttctgtaaactaccacttcgtcagcttcaggaagaggaacattattctctcctccggtcctt

SEQ ID NO: 112888 - DNA, 543 bp, Zea Mays
ctcccatgaaaaaccaaggctccttttggatatttcaaacttcgagcatagtgcttggcttctagaatctcctcttcagacagcttcttccctgaagcatgtagaataatgtagtcaatattttcagtcaaagcttcggtcccgattttttcagaagcaatttgttctgccgatttttcttcagacacgacaggctccgtttcaatgggcactgaaggcctagcttcgacttcagcttgagactcagtagctttggctttagcttgaacaattttcttcataggggaagaggtcagcgccttcgtagtctcgagtacagcatctagcacattggccatccttctcctcttgggggtcgccacagaagatttttgtgccttcggcagacttgcccctgtcggagggctaaggattcttggcatttttacttcaactttcggctcttcagccttttcaaccttatctttgattgtttcaattgtatgcgtcttcggcattacagtcagttctatagtgctctgaacaatcggaacagtctgtgtt

SEQ ID NO: 112889 - DNA, 697 bp, Zea Mays
ctgtcttttggtcatgttatttatataacgactacttaagatcagagctcctttatctgttgggttgacatatgcacttgtagcccatattgctcatgagattgtatatatattgtcgtatccactactagcggtcttacgaaaccccaaggttactaaagccatggattagggtttgagataactttcaaatgcactcatgattcaattttctttttacctggtttgtgccgatcagaattaatgtctgcgcccttcttcagtttgttgtggcctaacttgtgaaacccttgctatctcacaacttccatctgttagacaatttattttcttccctagttacgaggatttcttctctgattatgtgccagcagttgtttcctccgtacgtagctgtccttgattaggtgtggacaattggttccttcctccctgactgtttccttttagcgcccagatcatctccccgattattgtttccacgaattcaggtggagcacgttctggtagaggcctattgttctcctgctatttagttgaatataagcaacatttcgcgctattatggcatcaagagattgttacgatcccgtgagaactcgcttttggtaatacttgcttgcccacgtcgcctccccgatgttgtgccgtcatgccacctagtgaccctctgcccgttttccggtgaccaacaaca

SEQ ID NO: 112890 - DNA, 349 bp, Zea Mays
gcctactataccctactaatgaagcgaccgtcttaagtcggaaacgccttaagttggcgcaacacgctcacgcttacaaaaccaagggtgctttctataccctattaacagaaacaaccagctcaagatggaaacaactcaatgcttcgcaaggcctcgatagacctcaaaaaataaattgttctgaaataaactatcctctgactcaaccaaccagtatccagttctttgttttccttttaagcactatgcaggggcatccccacgaggaacattgtccataggaccactagaagcagatggatcactcgaggtacctgatgcagcgagtacatccgccataatgtca

SEQ ID NO: 112891 - DNA, 417 bp, Zea Mays
ttttaatgtcgttggctgaagggtttttaatgtcgtcggcagaagctttggctaaagggtttttaatgtcgtcggctgagaaaacaaattatggctgaactacagccttggcatgttcgcaaccagctttctccaagatagatgtgcccccccgcgcaccagcaaaggcgcagaaatctcctcgatcactcagaatttcgtcaaaagcttcggtttccccgctaatccactggacaactccagggtcgccacggatgaatctctgctcaaaggaatatgccccaaccctagcaaagttgtcctttaatttcttggcgcattccaaggatatttcatgacacctctctttggaagcacgaagctcatcggcgttcttttgtgcccttgacctttcgatctcgcaaatctcatgcttca

SEQ ID NO: 112892 - DNA, 495 bp, Zea Mays
attgttttgagtaagggtaggagtgggacagaagaaaactagttgcttgaagagacaagcgtgtggacgaggaaaagagcgatttgggttaaagggacggatcaccaaccttgaccgcttctcggatccttgagaggatccttcacccccttcacacccaaatctttttgtctttccctgccccgaattcttggcctccaccgaaagtgttgtgctcatggccctgatgtaagtgagatctagactagtggccatcttccgctatagtcgatcattcagacctctcatgaaacaattcttcttttcaggtccgtatcaacttgctctatagcattctgggagagatggttgaatttggcaaggtattgcatcaccgagtctcctccttgcttcaagcgaacgaactcttctagtttcatctgcaaaacaccatcgggaatgtaatgttccctgaaggcttgcttgaactctgcccacatgacaagatgtccttca

SEQ ID NO: 112893 - DNA, 553 bp, Zea Mays
gtaacatcggaggaagtactcgtcgctgaaacagagcaagctgatgttgaggagaccgagtctgaagatgattatagcgcaacaccaagtaaacccaaccatctggatttcgggaaatccactatcttcgtagatgatctgcctaagatgatgaaattgggttatttcagtgaaacgaaaaaagagctggttcgtttcggtggggaagagactactccgaagccaggaaaggatgaagtagtggtcttcaaaagttttttaaggctggtttgagatttcctttgaacaagaggatcgttgatgtactaaataagtttgggatttaccttcatcaactaactcctaacgctatcgttaggcttagcgtttacatctgggctcttcgaagccaaggagtggagccattcggtgtaggcttctgccggatacacgagctgcattatcagacaaaggctagaggagatgggctacataaaaattttggctgctacaactttgcctatcgcaagaatacaaaatttccagtaattagctaccgaagcaagtggccagc

SEQ ID NO: 112894 - DNA, 460 bp, Zea Mays
cttccctctcctgaatggcttcacctaggtggagataacttaactatttaagttggccttagtccacctacaatagcaaggtggtacccaccataccatgcacatgtgagtgggcctttggtatttataggaattattatttggaccaaatccaaaatctttaacaatcccccaccagatcctagaggcacatttcatcctccctgtaccaaagtattgttaatataccatcttttcgatggagactaggtaaggtttaacatcctcctagaatgactagctaggctcatccacatctacatattagactaagtcttgaatttacagtttggtgtgaacaagtttcacttgacgtcaggactgatactaggctaccacttgcctactccacaagtggagcgtataggtcatgctcccgtctctcttcatgagattcttaaggaattcccaattcctacaa

SEQ ID NO: 112895 - DNA, 773 bp, Zea Mays
caggggattcgcggcgtggactacacgccagggcgaggtccgagaacgccaacgaaattctggacgtctagaacggtggatcagggacgagcgccggggagctcacgcgtgtgaagaagctcgacaccaatatgatgctgttctggcgtcgagaggcgaggcgatggagagccggcgtgagggatggatgaacacgagcgacggtgatgaagaccgggcgtcggtgaggtgacaggagttggtacacagggcctggcaaacatggagataagaacgatcccttcctttcccccccctccggctgctctttatatggacacagaaaagctccaacagtggctggtttcagggaataaacagcgaaggatacttaggagatgtgggcaactgcatgggcgtgagtgcgtggctccattccaagcatccacgctggtcgcatggacacagcaaggcaggaatagggtagatttttttttgctgttacctcccaccgagcacaacagattcagtcgccagaataaatgcctttcaattcacctaggatatttcagtcctggttaaagtctgaaccgaccctgcaattcatctcatccctatctcttcctctgcacaaaagtgaaacacggcagtgaccaagaaatcttctgcagattaataacgtgaactccatcacatgactgaaccttctctgttcagccccccttttccttttggactgatttcgagtgccatgaaattgtggcaaatgaacccccctttaacacagatcttct

SEQ ID NO: 112896 - DNA, 1190 bp, Zea Mays
aaagaaggcccgatacaaaagaccccttacgggggccagaaacacgcatacaagaaggattgcttactgcaataggttgactctcatttatccgtttagaaattgttttactaacacatgattgcccatctgagaaacttgctggcttgggcaaagttctttttgccctgctatataactctgagccacatttcagtgacataatatcagtgtctgaacaaatttggagacttgacctcggaattgccatttagttttctttagaaatagaaacaataatttattagattgcttactgtgatgaactttgagaaaataaaaccaattgcttttgatgacatcaagttaattgtgattttcatgtgagatgaaaatttcaatcaacaaaatcagtataatgtacatctttgctcaaatagcaagataattttgatcatacctgtatgttttcaattgacaattatacttcacatgttatgtttatatatgtgttctgaacctgccatgctaagagtaccttgaaagcaatgctttatgattttttttttggaatactaagttttccttgagagttgagttggagcatgctctttatcttttgacactagatctttagaagagaaccagtagagaagatctggttattcatggtttaccttgaactgtacttccatttatccttttagtccattgttggttccatttgtactctatttctgacctaggctgcttatatacaaaaaaaagcacttgtctgtacacaaatgctcatgtggagagacatatgtagatagaacagaatattgcatttgtattgtaaggtcatcatgaactgtctgtcaccttattctccacgatcatgaacaaattagaaaatgaacatcctggtgcctgtcatcttatttgcaaaacatctcttgcgcagtacatcgattggtaatatctcttgcatgggcagagactgtggaaggcaatggttatttttcaaatctgatgagcgagtcattcagcccactgcttgaccttgaactgaataccaattctcaagatcaactgtcacagaatatggtagcagcaccaaccgagagaccaaatcagagaagatcaaagaatttcagcgagcaggaagatgcactatcggtgtcatcttgactcaatgttagcatggatttagttaaagaagcaaccga

SEQ ID NO: 112897 - DNA, 470 bp, Zea Mays
ttgtctgttaaattgattgggagaggtggttgtccgattataagtcgaatctctaatgtgcagtatctcaggcggagtttagctgtaggtcatgcatagttgagggctataaagataaatttgggtgcaactttatcgcaaaagtcgtggacaattttcaaaacttttccaacgtgtgttcgttgtagtttaagttgagtatagcaggagttataggtttttgaattttagttgtccattgtttcaatcctatcagttttgcaacaaaagtgttgcattgttttatcggtttggaaaccaaattcgagacactcattataataaaagttttagggaatgttataatcttttcaatgagtttatatttgcaaaattttgttagctatagggagttatgatatagtgtatagaatgtgcttggataaatatgtgggcaggcataacatgcttaaattgattcttgtttgcat

SEQ ID NO: 112898 - DNA, 986 bp, Zea Mays
tcagaaattgcgcacctcaaatacatctctaaacacttattaactctttcactttgaccatcagactgaggatgataagctgtggtaagagctaatttggtgttgagtgaggaaaagagagccttccaaaatttgctagtgaacaccttatctctgtcagatactagagacctaggtgtaccatgcaacttcacaatattgtccaaaaacacttgagccactttggttgcagtaaagggatgtttgagtggaaaaatgtgcatacttagaaaatctgtccaccacaactagaatagagttatacccttatgatttgggtaatcctttaataaaatccattgttagatcttgccatgcaccttgagggattagcaagggctaaagaagacctggggtgtgaatcctctctgccttagcctgttgacacactacacattgcttaataaagcacaccacatcagccttcatgcctttccaccaaaacaaccttctcactctgtgatagttggcctaacccctagaatgaccacccacaatattattttgcaaggtatcaatgattttagtcctcaaggcagaattgttagccacccatatctaatctcccttcctgatgacaccttgctgcaatgaaaatcccccttcattgggactatgtatagccaactggcccaacaacacctgagcctcttcatctgtaacataagagtttaccacctcctgaatccaaataggttttacatccgctactgattgcaaagccatgaaatgtcccaccctagatagagcatctgcagcctaattttcatttccctttttgtactcaatttgaactacagtcccatcatttttgtcatggccttcctttgcaattatgaatgtaacacctggttctccagaaaaatcagggccttatgatctatcctgatgatgaactcagctctctgaagataagttctccacttctccactgccatcaataatgc

SEQ ID NO: 112899 - DNA, 406 bp, Zea Mays
atttttactgttcttatatgaagtagtatgtatgtgggacgagcacaaataagaggaatttgacctacaagttttgcttttggtaaccatcaacaactagctcgaactgtcaaacctatctgggtagtcaaaacaaaggattcgaggcttgcacttattgtttggatgagattaacatcacgtatttaaagcattgttgaaatgttgtttacatgggacatcattggtttattattgctaaacattcgataaggaaaaaagataagcacttcaatggcaaggagacctaagccaacccatcctaatgagaacattatattccattggtaaatcaatattagtgtagtgtttatgaagggatctggtagacaaccaattctaaatgaaaatagaaagacacccatat

SEQ ID NO: 112900 - DNA, 319 bp, Zea Mays
ttggtaattcatccttttaacccaaatcgctctttttctcgtccacccacctatcctttcaagcaaccagttttcatccttcccacaccttcccttgctcaaaacaatcagctaaatgcccctagtactcgtttccccgccttacccagttcatctaacagttgcttcaactgtgggaagtctagacatttcatcaaggactatccctatccaaagcaaaataaatccaatttccaaaaggcttctcgaagcacatctcaaggcaagggaaatgtggcaagcactcaggtaggtaaaaatgcaaggaaaactaggcgag

SEQ ID NO: 112901 - DNA, 436 bp, Zea Mays
atctcggcatatgccctattcctcctctcatcgttactaacagatatctggatgctatccacattactctctgcaacagagcatggccgacgccagaacgttagctgcattgcatgaccgactcgttaaaactgaagcaatgacaacgagcacctggctatacctgacattctgtacaaaaccagctcagatgatcaagcgttccctctttgtattacgctgcccgatcactgattcggtgcacaaggcagccccaacactgccattaaacgaatcataaatacatgttagaattcacagagtttgtgttcgcatcaaattcggagtgtattacattccagagcggcgggcggataaaacgagggctataagaggcttagttgaacacctagataaaatcgaaaagttggaccaaatcacctacatcagtacgaac

SEQ ID NO: 112902 - DNA, 687 bp, Zea Mays
cggggactgtggccaggtggacctggacgccgaggatttcatcaagaagttctacgaccagctgcgcacgcagcaggcccttgccaccgccacgccggactactgcggcgggtatgcgcgaccggtctctggcatcgcctagaattcaacccacgcatccacacgcgtatgcatatgtaatatatatgtacgtgtccatagagtatttgtttgaacatgcatgatgcatgcatggataaagcatgttcgtttgagagctagctactggtggtagagctagtctagagcttggtctttgtgatatgagggagagattttgtacaacatcatcatatcatgtttgcaagctagatccatgcatgtatagtactcctatatatgtgtacgctgtatgtgtatattttgttgtagtgacatgtatcaattttactgcaagtaaggtacatgttgcaaagacattagcatataagaacactggtgtattacatagtataagaattgcgctcgtgtgtgtggttcctgatgtcctgcatgctggccctctgtccatgccagggacttgtacatagtgttgttctagaaaccactgctacatgtaattttcagacaatctatggtcggtatgctgacaaagatcgatggagctgtctggaatagtggaatcttctactcatgaatatattctag

SEQ ID NO: 112903 - DNA, 373 bp, Zea Mays
caatgatcaatgccctaaactagtctagatgggaaagtgcctagacaaggcacttaggtgccaagtgagctggtgagtaggaccacctttcaaaatagaggctgtaatgatggtatactggtctgtagcaaagtagtattatgtctgttgggtttgattatttacagtttgcaatttatcagcacacatgatgctagtaatagtagtattctggtaatatggaattatttcatctgtttcagtgaccgctgcactgtaccccattaatttatgcatgttcccttatgaaggacttatgttttaattcatgccgtcatggagttccaagtgctgcttaacatcaactagaattatccacatatgatagcttgtt

SEQ ID NO: 112904 - DNA, 330 bp, Zea Mays
cccaactaaacacaaaaaagtccaacgcccaactacagagcaacgagggaactaagacagtcccccttgatctcacaactcccaagcaaacagtcttaatcagcgaagacctttcaccaaacaaagaagcaagacttatctcctgtctcaaccgcaacaaggacagccacgccatcatcgaacacagtctagcatcgaaccctctgtgcgcccaaggaagcagcgattacggaaaatgtccgacgagaaaatagaagcagtgaaagtcgagatgcaccgtttattagtagcgaagtttatcgagccaatagtctaccccacctagctcac

SEQ ID NO: 112905 - DNA, 479 bp, Zea Mays
cttctccatgtcggtgcattggacaatgttgagcatattatctaccggtttcaatcgatcatcagcttgcagtggatctagggagttggagaaagcgggtggcttgtggctcatgaactcgcgatgcttatccctgggtgatggtggtggtggtggatgttgctgattattgtggagttgagcttgcatctctgccatggtgttggacatctattgcagcaattggatctaggcgacgaaaaaggcttctgacccagcaggcggaggatttgggagattcgtctcctattcaggattagctactgccctccttcggtgaatgcatgtaggtagatcgacacctcctcccttcttggtatgaccatctaggttagagacaaaggataagatagatttgcagatacgacaaatgagtaagtacggaacactcgacttttaggtcacggtcttttgggtcacaatagctcagtagattaaag

SEQ ID NO: 112906 - DNA, 397 bp, Zea Mays
gaaagggagagtacatagaattggtaacaaaaataaaagaaaagaaaaaagaggagagtacatgaagagaggatagaaatggatagttttataaaatctaaaagaatgtaaaaaataactatggacctgaccgaggcggacacaccaggcaaggcatctttctggtgactggccagggtgcgttgtggaccgtgttggaccacatttgccactgtttccatttacctcctccctccccctcccgggcaaaaagatgagtgaggaattcattactgctgctcagctctggtacaccaaacatcaaatatctccgatacactggtgaacaaagtacacaaaaatatctccgatatagtttcacaggaaattagggctttgccgtatacctatccatcac

SEQ ID NO: 112907 - DNA, 1022 bp, Zea Mays
cccacttaaaagaattctgacttgggagcatttgagctggcatagaaggtctaaccctggggttcgggtgaccaagggaatctctagaggggtagagaggatgccatgcttttccacaaaactagtggctataaaagaatgggatgctcctaaatcaaaaagtacagtagcgggagtaaattcaacaaggaactcactgagcactactcccggagcttgctgagcctcctgagcatcaatgtgattcactcgtgcccttccttgatactgggtcttgttttgctggctgatggaggagggcgccttgggggtgagtgctaaggtattcttggggccattcaccgagttggagtaagtagatcctaatgcctacaactgagggcagttgttcttgaagtgactggggtctccgtagtgccaacaggcatttactggcggttggttgcttgcaaccgagggggcatgaaaggagctccgactctgctaactgaaccgtgacggaatgggtccagctggtctaatgaagcttggtcccttgggtggaaacccaaaggatcgagttctctggtgccggtcttgctgctgagctcggaggacttggaatttcctcttgaggtgacctttttcttcttcccttgccctttccacttgcatggctttgtttgataggtgcgagaagctgaggaaatcttggctggctaggatggtcttgagttctggtctgagccccttcaaaaatgggccatcttcttgacttcggtgctgatgtcatctggcgcgtagcgggccaattccttgaatttgtgcacgtattcactgacagatcttccatcttgagttagttcccgaaattcatcttcattgagctgaacgatcccttggggcacatggtgctctcggaaagcagtttcaaactctgtccaggtagcatctctgatggcagcgttgaaggtatcccaccaagctaaggccattccggaaagttgatgagcagccagttgaacacgctgattctccgggca

SEQ ID NO: 112908 - DNA, 511 bp, Zea Mays
gaaacgcgtctttgatttctactagtgctgaaaaatctgcgctatttacagaactgttgttctgctagtttgttacttttatcttgttgtgcttcgataggacacgtcttagccagcaattgtgacttgtgctttggacacttattgaacttcgctaatctgcactcgattttgttccacattcacatacatattgtgcctgtcctacagctccacatactatatcttctgatcaatacagatttgaccttgcaatcgcggtttcactacctcttggtaagtatcacgaaccagcctccgattgtaccatcctttgattgtaccagagatttgcgcctacgtcgccgtcttcatcaaaacacagaaggtatgccacaccgccagcaaggtaataacaatcatgctcctaacgacccttatgctaagattaaattttctataccatcttttttgggtcattatgatgctgagggatatcttgattgggagatgatgatagaacagaaatttg

SEQ ID NO: 112909 - DNA, 390 bp, Zea Mays
gccttttccccaaactaatttggctattaatcaactatggagctctggccacggtggccgtgagcatcacggcaagacagccgtgttcccggcgatgggtggcggtctagtcaaattaaaggggtcggggagcatcgcagatgtatgagaatgctcaaacaagggagcagaggacgggaactgaccggagttaggctggcgacggtgagctcggtttcacggtgacggaaatcggatttgggagtaaactccgaattcgagcacacgagtggatgattgtggccgattagcgctggttagctagctgactacctcacggagctggacacgggctcaatttatagggctcgcaagcggtggccggtgaatcggacgggacgcgcggcggcc

SEQ ID NO: 112910 - DNA, 711 bp, Zea Mays
gaagggtcacaacattcggtatttactatgcaaatacagttgacacgctctcgcatacgtttgttttgctcatgacccgaacaaattaagatgtgtgcataacttaggactggagatccgaacaaattaaggtgtcgggtagccaaacaggaatttggaagaacggctagaatccggaatgcaacattgtaggatggctgtcagatgcatactgtatgtgcaacatttggttacaacgtggagccgcacgtggttgagatgaagcaacgtcacgtacccccacaccacatatatcgcagaagtaggtaatcaaacataaattcgcagtacagcacgcaatactgacccggatggcacgcaatccggggcaaactgaacggggtggggtcatgtagagagagaaaataagagggaggggggaagaattcgttttgagcagaggccagaaggaaagatatatttttttttttggtcgagcgctgacctcgcagagcaagatcgggaggggaggggagggagggattccttaccagggagaggaagagaaaaggcgaggtgaacccaagttcaaatcgaggacggatggcgccctctggatctccagtcaacgccacacggcaccgcggcgccactcctagtccttaggcctagtcctagaaggtggggggaggaaggagggcggaggaggacaactccatgcccgtgtccatg

SEQ ID NO: 112911 - DNA, 355 bp, Zea Mays
cgtgattgctctcacgggtgccttctgaaggtgtctgattggggtggttttgctcgtgcttcgcttgcagtgtgacgattccgtgtccgcatgaagggcggatatggctggagcagagaggcctgcagcgcgcgttgtactggcacattgaggcgcgcgtcgtgttggatctccaggaaatccctgactccgtatgtgctgtcgcagattgaacttccattaactgctagggtgtgaatattcatgtcgaccagtccatgagggtgtgaatgcaacatttgcgttttgtcagcgtgtgttcttcttcttgctgtgtagctgctgtgctattgtgtctctccgacgtatttcttag

SEQ ID NO: 112912 - DNA, 666 bp, Zea Mays
cgatgagactgaatgtgatgagtgaatctacacatgtcgaacatcaccactttgcagaccaagtgctccaccttgctagatgagcgcgacgagttgagatctaggtctatcctattgggtgcgtgtaccgtttgtcctggcatgcaatctgagctagcagagagagacgctaggatagctttgcttgagaaggctagctcagtgagtgcccctacacctgtgtagtgtgcactttgtgagggtttgcaatctgcccttgagtcttgcagacacgacaagacaagaatcaaggaagaaaacacataccttagatctatcttgagttgggtgtcgtgcagtgagccccagttgggcatgatggtcagtcagttcaagaggggaactggcagaccggggttaggctttgctactaaggatgggagtgtcgctctctttgggaaggttggtgagtgcagtggtttgacaccttcagagacaccttcacccactcccaagcttatcaaaaccacctctgctaagcctgtcacccctatgagagattgtgtgattaatgaacctatgagagctcctcctcggaaacaagtgtggcttccaaaacctaaccatattaggaacacactttacacctttcccgacatctctagcgatccccttcctagagccccc

SEQ ID NO: 112913 - DNA, 929 bp, Zea Mays
cttagccgatgcatctatggtgttgggtgcaactgctattccaaagctagatgtgcctggcgaattcgctgcacgtttaccctgattctcttcttgtatctgttgaactatagatcgaatctgtctaggcatgttgttgcttatatcttgcttaaattcagatctaaatgcatcgaaagaattatgcactccctcagaaatcatacgcggaatttttgtgacatcagccccatacttgctagctacataagtatcaatcatgtgagctagctcttcgcaagtgacagatgaacttacctttttgccggacgtgcttgccccaacggtctgtttgatcacaccattcttggtttttcggaagaaagccaacctctcgttccgtttctcttccatctctcgtgcgatttcttcttcaatctccttcctgtctgcctctgtaagatcttccatcgtgactttgatcacgttcaagggatgaacttcagatttgtctggcgccgctttcttcgctgtcttgtcctccatagccccgactatgattggcgatgaggacgccaatcaccagcagtttgccgccgtgaaacgattacaaatcgctccccagcggagtcgccaaaatctgtttccctcaatctgctcgcagaaaacaacaaaagtgatggtgcttttgctgtgtttgccgcgaccgccaatgactgttttttttcttcgtgaaaacaatcaaagaattcccactttcgcagagaaacttggatgttttactcaacaaaacaccaaagagaaatagaaaagggaaatagatagtagataataggtctagacactataacaacatgtttcttttttttctctctctaccccttcagcaacagcatacaataatgcttttatatcctatctcaagcttatcccgagactttatcctaaag

SEQ ID NO: 112914 - DNA, 511 bp, Zea Mays
cggaaaaacactaacagaagcagtatcaggagcagagttagacaccaaaggaagattgtaatccatgctaagtgtgacgcctagtgggatcttagctccgagagcacccatcatatcctcggtaccatgaccacagacctctaaggtggccgagccagttgggctagtgggaagaccagaacccatcgccatagcttcctcagaccgaaccagcagtgaccctacatggacatccatggagacaactgagggagaaccggtaccaagacccttagggactggatcatctttagctgcacccttgggggctgaagcatcctcatgaaacgaagcaccctcgggggatagagatacacgacaagatggcggggttgtttctcgcctagccagaaaaataatagagggcgtgccgtctgggctctctatacggatgtcggcacctctagcttcagaaagctccagcaaaaggtcctcaggaataaactcctctagtacgttgtcactacaccaa

SEQ ID NO: 112915 - DNA, 434 bp, Zea Mays
aaaaaaggtgcgtcacaggagtgtaagccccgttctgttagtccaatagtggaccaagtgaataactgtgagacaaagttggccatttaacccagagccggctcccttttaattgggctccacacgtgtctcagccccccaccgaagcagggagagccagctcgtgggccgtacacgtgtccgtgggcgcatcgctgcgcattaaggcccggggactttccagggctttgaaagcccgctcacttcatcctgtgacgcggccaagaatgccaccacgctccttatatacacggtctcatgtacctgaaccggcgatacgggactaatcgtccttgactgggaatgtggcatgctatgcctgtgtccactccctcccaccacctccaccatggcccgaagcagcttatgggccgctcattcccgccgtttattct

SEQ ID NO: 112916 - DNA, 1157 bp, Zea Mays
actgtgctgagcatggaaccaaaaactgggacaataaggtattctgacagaaaacaatgagaagaaattcaataacaaacaccaattcgttattcaaatttaggaagtgaacttacagtttttcaagaatttttggtgaagatcctgcatgtgaggtcaggaaagaacacaatgtcagaatttcagactcacttagcatcaaatagaggactttaagtaggaagaaaagtgcgggcactaacatttgccaggttaaagtcaataagataccccttcttcagtttgcgacagaaaaggaagtttccaggtttgacatctctatgcactaccccctgaagacaggaataccagttatcagatacccaggattaccagtaagcaacagaaatcaaaagttgactaggtagcatgcagttatacaaacctgtttatgtaagcttgcaagagctctgaaaagacagtgtccataccactgcagctcaagcaaggttatgtcttttttcaaaatctgggatataaagaaatacattaaaaaaggatggataaatgggtgcttaatagaacagcttcagaggaagtagattagaaaacactaaacctctggtctgtcatgctcaacatgttctagaacaaaacagtctagatcaccacttttcaaagagcattcatatttaatcacacaatttttgcctctgcacaggagatcatggcaattgcattaaggttactatggataacaagaactcgtaaagttttagggagagggccaggtaataattacccaaaacgctccagtatctttagttcattattaacatgatgtgaatgagcatttgggtgaggacctgttagcataaacatagttattttcttcctcacaaaatcctaataaaaaaggagaaatgactacatgaaaactggtggtttgctgttcatacattttatagcgaatgtttttccatcttttgtcctctgagccctataaacagtcccataacctcctgaaataataaacatcaccacttggtcagcatttaaaaaggaaaaccctaaatgatagttttgaaataaatagataggattcttaccagacccttcctcctcttctatgacaaaacccttgaaagcaggaagtggttttggtgctacatgaccct

SEQ ID NO: 112917 - DNA, 522 bp, Zea Mays
ggcagggtcaacgacatagggtcgacgagagagcgtgagtagacgcatgaagacgctttctaaaaagcttatttgcctcctcccttgcatcatctcgaaggcaactggttctagagacctgctctcctgatcgcagatgtacgttggcgctcgagatgaagaagactacagtggcagagcagaagaaagaagaggcaaaaacctaattcatgtgggctatgttttggcgatggctatcagacgccttaacaacagataaattgaagtataagataagatcagatgatgcgtactaattaaacataatgattgacgatgtggaagtgatatgatcgacaacatggaagcagtagggtcgacgaagtcgaagcagcatggtgacgatgtcaagcggcagggtcaacgacgttagtgatagggtcaacgagaagagtgtgagtagtcgcatgaagacgctttccaaaaagtttatttgcctcctcccttgcatcatctcgaaggcaactggttctagagacctgc

SEQ ID NO: 112918 - DNA, 291 bp, Zea Mays
tcaaaacaatccatagaaaagtgctgaagtagactcaaatacttcattatgaactcatgttgaagggttgtaaggatccaatacaggaggcctgaagaacgcgtgagcacaatatcatcaacatagagaagaaggtacaatatctgtcgcaccgatagatgaacagagatggtctcagcaaattccagcaacagcaaataaatagtgtcggtaccctggattaggggtaccccttgctacggtatgaaggcacgatgcctgtgcggctacccttagccgcgcggagaacag

SEQ ID NO: 112919 - DNA, 522 bp, Zea Mays
ttgtcttggatgaaccgacctttgatggatgcactttgcctttgagagaccatagattgtagcttatcccccattctgttagctaggattttagtgactagcttggccatgctatgcactaaactaataggcctaaagtccttgacttggtcaccaccctccttttttggaataagggtgacaaaagctgaatttaatttgctaaagtgaccaaatttcctgtcccaaatagctgccaaaacctgcatcacattttccttaatggtaggccagcaagccttgtaaaatctttctatgaacccatcaggtccaggagctttgtcggacggcatctctttaatggcttcaaagacttctttttctgtaattggtaagtccaaatccttcagattatgagagggcagccccaagtagttaagattaatagtgacagttctattcaatcttgttcccagcaggcttctatagaaatcatctaccagcatggctttgtgagcatgatcagtaaacacattatctcca

SEQ ID NO: 112920 - DNA, 322 bp, Zea Mays
ctctctctcccccttgcagatggcttcggataaaaccacgcctgccgcctccgggattggagcagggtttcccctgagagctgaaagggaagccgatagagaggaaactgagacccacctccccgcacctccagaactacccttagatctagccctagttctagccaaccaaacccgactcatcgaggtcctcactcgaagtctggaaaatcaacgtccgaatggtggaagaccataagacaggatgggagatttcctaaggctcaagcctcccacgtttgccagatctagcaatcccctcgatgccgacgattggctgcgc

SEQ ID NO: 112921 - DNA, 401 bp, Zea Mays
atctatccaaccttcctttctgtctagtcatgagaagtggacacgaattgggttactccttttgaactgaccccgttaattataggttaattacatgatatatttatgcatatgaccgccataaacaaaggacaacgaatcactagctcttggaaatgttaacgagcaatggctacaagatccctgttaaatggaatgctacaatcatttagtagtttggttctataaaatagagatattttttggtaaaaacacaattttatcagagatttcagggaaaactagtctaaggttgctagactgttaatctgggtttacataactaacatgttgtttggactatatgtaggaaactaaactgaggtctgctaatctctcccttacccgttatttcatccttg

SEQ ID NO: 112922 - DNA, 341 bp, Zea Mays
gctagacctagcacaagaaaataggcggttgtgggacttcgagtcaagtctccgaagcagactgaagatgtgtatccttggctatgctgttattgaaagggcacagaaaaggcataattctcgtatgttaagccttagattcggtgatgccaacaccaaattctttcaccgaaaagctagctccaggaggcgaaaaaattgcattcaacgactaagggtcggcaatggatgggccttctctcatgaagacaaagcccagagatccaaaacttcttccagaatgcgatgaaacaaccaccacctaggaatgttgaccttaactgggagattatctctaatag

SEQ ID NO: 112923 - DNA, 453 bp, Zea Mays
cggttgaagaaggttctggtggatggtgctagcagcatcaatgccaccttccctagaacactccagtcattggggatctcgactgcccagctcattgagttggataccccattcttcagcatcataccgactgaaggagagtacccgctagggcatctcttcttgctggtcaccttcggtgcttcagacaattaacgaaccaagttcctgtgctttgtggtagctcaattcgagtgcaggtacaacaccatcatcgggagacctagactggtcaagttcatggccatcccgcactactcatacatggtactcaagattctcggacctcaaggaataatcactgcccgaaccgactttcaaggagctgcagtgtgctttcaaggggctatctagacgaccctcgccaccagaccctcggtagcacttccgacgatgaatgacgacgcatcgacg

SEQ ID NO: 112924 - DNA, 423 bp, Zea Mays
attccctctctggtgagtatcctcctctttcccctttctctctgagctcctaccacaagtgaagcaccccttttccaccctttgtgtgccaattccaaattctgtgaattccagtgaatccaagtgacgcaaagtgttcctatgtgcttcttgagtatccttgcaggttcctagctccttcgggagggttttcccacctcaaatagccatttcccccaaaccctaaaactccgccccccacgtgttcggtgaaatgcccaaaccagccaaaaatgctccaattgaacccaaatttttcaggcaccttcacaacatctccagtaacatattcgcaaaatttcacgcccatccgatattccaggctttaatttcaccaaattccccgtttcgagcgatcgtttccgagccgagtgcccaaatctc

SEQ ID NO: 112925 - DNA, 916 bp, Zea Mays
acataatgggagagttcctaaggctcaagcctcccacgttcgttggatctagaaacccgctcgatgttgatgattggctatgcacagtgaagaggaagttggaagccattggatgccctgaaaaccagcgtgttcacttagctctccaccagccctccgtgatggctctatcctggtgggacaccttcagtactacagtaagagatgctacctgggcagaatttgaggctgctttccaagaacatcatgtgcccttgggaatcatccagctcaaggaagaggagtttcgagagttgactcaaggagggagatccgtcagtgaatacatccataaattcacagaacttgctcgttatgcactagatgacgttagcacagaagccaagaagatggcccatttcttgaaagggttaagaccagaactcaagactttccttgccagcaaagacttcctcagtttattgcacctctcaaacaaggccatccaggtggaaagggcccgagaagaggaaagaggtcacctcaagagaaagtttcaaattctccgagctcagcagcaggataggcaccatagggttcgatcttttgggttcccttccaaggggtcaaacctcaacaagccagcaggatccgctccgtcacgtttcaaccagcctggtcaaagttccttccacacccagtctattgcaagcagccaacctccagctaatacttgttggcactgtggagaccccggtcacttcaagaataattgtccgcacctgaagacatccgtacctgcctactccaactcggtgaatggccccaagaatgtttcggcacccgcctccaaggcaccctccaccaacagccagttaagcaagactcagttccatggcagggctcgagtgaaccacgtcgacgcccaagaatctca

SEQ ID NO: 112926 - DNA, 297 bp, Zea Mays
cttaagacagtatattgtatttcgttgtatcataaggtattttggtaatatattgtatttcgtggtgtcataagagatgttttggtgttttcggaatcgagcaacttgcaatcgcaacttaggtttttcatagtttttggggtgctgggtgtttcagttccagagatactggcgtttcatatgcactgcactgtttcgaatattctgttactaatatattgcttccctcgtgaagtttatatgcttaattgcttatgtagctctctgtttgtcattgtaatcgttcagttgaacaac

SEQ ID NO: 112927 - DNA, 573 bp, Zea Mays
tggaactggtggccgaacgtttccagtgggatcctgctgatgatgagtagctatatctgtagagagaaggcaagggtcccgctgggaagcggctttgtaatattttttggtctttgtaagatacttttgagtactatttatcgagcagtattagcacttatctgtatgctatttgtccttgttgtgtatggtgttaccaactcctccctggtacttggcccccctgggatgtaggctcgacgtgtcgaggctggataccagtatacctaagaaagagttggcaatggcccccaggaggtagcctcgattgggacctggacctgtacaccgcttcggctaggaagtgttagtagcacacccataggacccatcgtctagtattagccatcctttgattcatgcaacaggacctgcaggattgagtctgggaagccaagcctcatgtctagacctacaagatcacagctccaaatactagggcacccgttgcagagtggtggaggtgcaggcttagggtacgggaccatgctaagcggctaaacagcttcggaccaccccaggaaacaagcgccc

SEQ ID NO: 112928 - DNA, 414 bp, Zea Mays
gggagacgaactaggacggatgtaccctttttgttgcagctctgcaatctggagtttcaattctgctaactctatgggggccatgcgatatggtctctttgcaatgggcgcagtgccaggaatgagatctatatagaactccactcctctttctggtggcattccaggcaactcttccggaaatacatccacgaactcttctattacggacatgttttctgctgccagattaaacatcattggatcattggcgggcggttgggcctgacaggaaactgcttttccttggtggtcggtgagaaggatggtcttacttgcgcagcttatgatacccttgtgcttagttagccaatccattcctaggatcacatcaatcccttgggatggcaagacggttaagtccgccaggaacac

SEQ ID NO: 112929 - DNA, 481 bp, Zea Mays
tgtgggttatatcaaataaactcactaaaagacacaagagcatggtcgtaatgctctaatcagtggcatagctttaggcggtcaagtatcagtgatgcctataggtgaaacctacttacacaagactagcaattcaaggatttatccattgcaaagtcgtgaggaggtgaatcctgtaatgcaaggtgtagctcaacccgtatcgggtctgcactataaagctggtatatgaaagtgtagagattgagtcaattggagaccttagctttggtggggattattagaattaggcccactagtgtgtggcccaatttaataaggaagccaaggtggtgtgtagagatggcatggggctttaatcccatgttgctcatctaggtaggagagaaccaacttatatgtgggagtgttccctactcttagcatgagacaaataaagggatatggaggctaccacatgctcgctcgctctcatttcgcg

SEQ ID NO: 112930 - DNA, 463 bp, Zea Mays
ttgcttccaccgacagcaaggatgaggaatccgacttctctgatgaacaggtgggggaccctcacttcaataatgacaatgatgatgaagccaatacctcggcggggttgtaaggctttggcctcccccttttgggccgtttggtgtttttggtacactggttggcaactattttgttggttaacggttggtgctggcgcgcatgtggcgctctttgatttttctgaaacttactctgatggaatcgaggtttatttcctgtttgatacaattaactctgatggagtcaatgactctttgctgcctgaaatggttaattttgatggctggaggttcggttattttttatgtgggctctctttgcatttttcttgttgggcccattggatgccttattcccctcatgtcatgttgattatgtggccctttcaattctactgcttatggatttatactggaagaa

SEQ ID NO: 112931 - DNA, 700 bp, Zea Mays
tcgatgaaagtgtacctcgtttccgcatccaccagcctccgacttaggtaggttaccatatgctcctttacttcggtctcttgcgtcaaaacagctccaaaaactttatcttcagctgcaatgtataatatgaacgatacgcctacttgtagcacttttaacacaggagccgaagacaaatactttttaatgaggtcaaacgcttcttgttgttctgcccccaggtgaattcggcatcatttttaagccgaaggataggagtgaaggaatcaatcttcttggctaggttagaaataaaccttcgtaaataattttccttgccaaggaacttttgcacttcaagcttacaggtcagaggtcccacattccaaatggacttaatttgatcagggtctatctctataccatgttcatgaatgatgaattctaagaacttaccagccaacactccaaaagcacatttacgtgggtttattttcagaccataccgacacattttatcaaaggctttatgcaaaccagctatatgagagctaaactcagccgatttgactacgatatcatcaatgtagacttccacagtgtttcccaacagctcatgaaagattaaattcatagccctatgataagtagcactagcatttttcagaccaaatgtcatgacaacccactcaaataaaccaatgaagcctggacatat

SEQ ID NO: 112932 - DNA, 395 bp, Zea Mays
aaaaacgaatacgaagaaaattactaaggagatcatggagggtttatccgaagattctgaagacaatgacagttatgacgtggagagtggggatgaagattctgaggatcggccctggcggccaagtcatactatcttcagaaagtcgactatcaaacaaagtcatattgacaccatgaaggggagatattttcacaacatgtttattgtcaaagttggaggagatagtactgcccctgctccggaggaaaacgaagttgttattttctgaagcttcctgaaggtgggccttcggtttccactgagtaaatttgtggtcgaagtattaaagatattccaaatctttcttcatcagattacccctgaagctataatcaggatggggatatttgtct

SEQ ID NO: 112933 - DNA, 368 bp, Zea Mays
atttttagtagctttgctgaaaagtggttttttatgatccaaagggcacacgagaatttgaaaaacaaggtatgacaaatcaagattttggttagtactttccatagttggaagaaaatagaaatgatgctacaaggtgcactctgtgactgtaagctgctcaatagatttaatattccttttatgtgccatgcgaaataatagaattttgatggaattgaaatcatgaatcgtgtactgaatgagttaaggaaaatagtaatgttaaacaactggaggttcaaagctcatggaaatgttcttctgtgaagtctacaggtgacaggtcaaccaattttatttttcttcattttagatttttataaaag

SEQ ID NO: 112934 - DNA, 512 bp, Zea Mays
gtaagaccttcggggacctgatctgggacaaggtagagatctacgtcgatgacatcgtggtcaagactagggaggggtcgactatagtggaagacctgaccctagtttttggcaagctgcgggcaacccgcaccaagctaaacccggagaaatgcatcttcggtgtctccacagggaagttgctggggttcctggtttcataccggggcattgaagctaactaggagaaaatcagggctattgaggtgatgaggcctcccgcccgttttaaagacatccagaagcttacggggtcactggcagcccttagccgcttcatttcgaggttggctgagagggcactgcccttcttcaagctcctgcggaaatcaggcccatttgcttggaccgaggaggcggaacaagccttccaagaattgaagcagcacctagcttccctgccgatcctggttgccccagagccagggggaccgctgtacttgtacattgcggcagctgcagaagcaataagc

SEQ ID NO: 112935 - DNA, 417 bp, Zea Mays
actggggcaccaacatttgacaccttgcctctaaggatcatctcaagtcggttcaccaagtctgtagagggaattcttctgttggtaacccgagttgagtcggctaggcctcgatacagataagccggttatgccctgtctttcaacggctgaatattcttgaagataaaatcagcaaccacagcttcagcagtcagacacctctccttcagcaatccaacttcagctagcaaagcacctgcctcagctacctcctgatccgtgggggactcggtccagctcggggtgcgaacgtccggctgtcttcccgaccgaggggggagagagtttccataattctcaacaatgaactactccaagcgccatcccttgatgttgtctttgagagggatttcgagatactcagtcttcctcccg

SEQ ID NO: 112936 - DNA, 854 bp, Zea Mays
ggttcctctagtacggtccttcacagtaatttctcaaaaaaactgtaagagaagaccatttatcaggaaggacggaatgggagcatttaaacgccacaacattaaaatgtccaggagcccatttggaataaacttttcatctggctaagaatcagtttatttgagtatagaaagtacaatccaattgttgagaagcttagaactaaaaaaatgatggaaaattgttcaaacatccaagttatatctgcaacttattttagggaaatgtttttttggttgtgggaaaaaggaacaatatatcaagcacacagagtagcgtaccattgaggtgtaggttgaggtggtcgctgtttagcagcaaccccgtgctcacagtcacgtacctgttaatgagagaaatcattagttggaccttatcgtcatcagtattccaatagatgaatattggagatcaggacataatttaggaagtcatggttaccagatctatttagctaccacacacatatgatttaccaattcttcctcaatacagaacaaacaagcgacaagtaaatatttgcaatactacaatcaatcgctaatccaacagaatatacatgtcgatcagcaagagcaaaccagccacaagtaaatattttcaatactacaaacaatcgctaatccagcacaatatacatgtcgataagcaaaagcatattgaagaaagttttgactaaactcaccttgagaaactgaaggccgatcaacaaaagcgcggggagggggaagaggtggtcttgtccctatcgtacaccgcggaggagcagcccaacacaatatgatgtgttgatgcagtggctgatcgatagctc

SEQ ID NO: 112937 - DNA, 495 bp, Zea Mays
tcgctgtaatgaccccataagggggaatattccggagctatagtagataatcaggggcataacaatacttaggagggcacacccacctactcggttacctgtaaataccatcgcattgtacattgatgggacatgcttaacaagaagctacagttccctgcttaatgttttgttgagcacttgttccccccttcttgagtgtttgggcccacctgaccacgtgtcagttaaccttaaccccaacagaaggcaagtgcaatctcttttctttagattaatattgcttaaaccaatctaggtatagacgtaggacttatatcttgtccttttcagcctaacaaactcccttaataaactctttgtaatccatatctttattctaacaaactctatttgtatccatatgaactaatctatctccctggatcatctaatatcggcctcttagtggggccagcctagaggctgcttagaccttctttcataaggtatgcc

SEQ ID NO: 112938 - DNA, 619 bp, Zea Mays
gtatacttgtgttgagcaatgtcatgctgctctttagatttttgtaggctagaaaagcaaccgtttccaattgtaatgctatgggggcttcatgtaatctcaagcttgttggtagcacaaatatttgattagtccccattctctgtatcattaaattatttgttttttcctggtgttccttcttggaataatttcagggaccttatgtttgctcattttccagagtatgaatgtgttccctgattcatcttggaatatattcaggctggtatattttgccgaatttccatattgtagatggatgtatatcatgttcctcgttgggttgggatagtttgagtccactgttgtggtagccgagctatggagagtttacttccttgcagtgctctttgcggtggcagctatgcaaagatccggagtttgtgtttgctatggaaacttccatacattttctggtgctttgtgggcgttgaggttcatgtttattttcctcaagttggacgaaatggtggcttgtctgaacaaatgactagtggcccctggtgttcatttggttaacggttggcctgtctgaacaaatgactagtgacatttggttaactgtccaagtagccgc

SEQ ID NO: 112939 - DNA, 630 bp, Zea Mays
ggctaacggcacgcaagtctacgggaccaattggagtgcctcggcatcaactggccccccgacatgaaagcagcagcagtggaagtaatgaccccatcagagatcttgaagcccgagtgagtcgacttcaagcggcacttcaacataggaccgatgcttgggtcgccgacggagatagaatcaatgaactaagaagggacatccgtcacctgcaggatcagcttgctgatcgagacttagcacttgactgggcagtacagtcttgtttgctagcatgcgctaaggaagcaagggctcaggcccgaattaaagaacttagctcaactgtcgacaacctgtaggtctactgcaatacgttgcacgaggaagtccatgtactatactcacaattacaccctagtgtgcctgcacatcctgctgaagcggaagccggaccctctcacgttgcgggacgcgcgctgggtggggagttagacctttttgagccccctccttccttgaggttggttgacgtctggactcccacacctgacgatgaggccgccaaaagtaacggaaagcaggactaatggtgtaataaaagtagagtagtgtattgtaggttgtactgttgtataataggttgaactt

SEQ ID NO: 112940 - DNA, 587 bp, Zea Mays
ccaaggctcttattaaagtaggggttttcatatgggccatgaggagccaagggttcgaaccagatgccaggtgcttctgtaatattcacgaattatcctatcatacgaaagcaactgggaaagagcaatatcacaataacttcggctgctacaacttcgtgccccgctctgggaccaactaccctatgcctacatttcggaagaagtggccaggctcttagatgcaggagtggttttatgtgaaaaatgatatagactagagggaggatataaggggcatcattcaacgtcctatatggtctcgctttggcattagaagaccttcagtcacactcgcaaatgatgtgcaagcgcgccagacagctttcaatactatatacacctacatcgacataagggatttgattcaagagcatattgcttacagagtatggccccttgcgagtggatgggaaatgccgaaggaagttgtcggtggctccagccaaagtggcctgatctatctgaagtacacatttcaatttagggatcggtttgacgaatcgaatgatgactggttggatgctatagaagcaacaattgatgaa

SEQ ID NO: 112941 - DNA, 386 bp, Zea Mays
gagaaatggtcttcacaaacaccggtcaccaagggtagatgtcatcaacaaggtaatactcttagttgcactcatgaccattcaccgcgaagttcacatttgaagcttcacttttgaacatgttagtgaacaacaatgactaactaagcatgttgatggcgttgtttgaccatgccacccaaaaaagatatgccaaatccgcaagtcatatgaggaaactgcctcgagcatgatggtctggtatccaatgtcgctccttacaaactattctctccatccagtggagcagttctttcacttgcaatgcaagtaatcgatactccatatcatacaagaaaacctcctttcctcccccttagataatagccacttgagattatcaataa

SEQ ID NO: 112942 - DNA, 515 bp, Zea Mays
ccatgaatacattgttcatcagattcatgaagaaggctggtgcattcattaggccaaaagacataacagtgaactcatccaatccatacttagtaatgaatgtcgtcttcggaatgtcggagggtcagatcctgagctgatgataacctgacctcagatctatctttgagaacacgctggctcctctcaactggtcgaacagatcttctattctgcgcaaggggtacttgttctttatcgtgacatcatttagagcttgataatcgatgcgcatccttctggtgccatctttcttctccacaaataggacaggggcgacccaaggcgaggtgcttggccttatataacctttctctgacagctcatcgatctgcttcttgagttcaaccaactctagtccagataccctgtaggctcttttagagatgggggcggttctaggaagaagctctatggataactcaacttttcgctcgggtggcatgcctggtaggtcctttgggaacacatctggg

SEQ ID NO: 112943 - DNA, 323 bp, Zea Mays
atctttggcatattcatttccactctccacatcaaagttgtcactatcgctggaatccccagacaacccagctagcatctctttggtaatcttttccacgttggtcttttccattgcttcgtaaaacccagccattgtggggtctgaaatcttcttgtcctcagccatttggatgatggttacaacaaatgccgaagctcaaaaatcaatcgagctcgcaaagagaagaaggctaagatagcaatcacaatgcaaacaactaaatggcatgaaaaatattcacggcataggcttccatatatatactcagagctccaccgctc

SEQ ID NO: 112944 - DNA, 457 bp, Zea Mays
cgcagaccaaagtccacgacgaggaacagccctcgccgcactccggcgagcttattccggtcggatgacgccaaggctggagctcccgggcgacagggacacaattgaacccctactgaacacttcccctcacttaatttcgcaaatgggtgcctggttggctctggccacggtgatcgtgggcgttgcggacagacaatcgtgttcccgacgaccagtgggtttctagttcaattgggcgggtcggtgagtatcaaggacaagcatgggtgctgaaactagaacacaattggcaaaatcggacctgatttgagcggaccacggcgaggttagaacacgcggtgttcttgagcagattgggggaaatgcaaaattgaagctctctggtggagtatttgaggtacgggtgagtgcgctagatgtgtgattacataacgaagttgatggtgcactcaat

SEQ ID NO: 112945 - DNA, 418 bp, Zea Mays
aaattttcatttgggttgtttggagtcaaggggttgaacctgatgtcgaagctttctgtgaagcattcggtcaaattcatgagctatacttctagacgaaggcgaccggaggccttcacaacaactttggttgctatacctttgcttgtcgaaggggctcaatatttccggctcttgcataccgaagcaagtagccgaatgaatgggcaaaggagtggttttatatgaagaatgacttgaatgcacgggctgatatgaaaggcattattcatactcctattgctacaagctttggttataaaaagccaacatgctacatcaacttcgaagctcaggctaccatagttgctttcaatgctatttgcacacatattggaatgagggatcttgtttaggaattttagcttttaagacatgg

SEQ ID NO: 112946 - DNA, 363 bp, Zea Mays
gcaacatgctcacgcttacttaactcggggtgaccactatgccctactaatggagcaatcgactaaagtcagtggcgatttaagccggtgcaacatgctcgtgcctatgcaattcagggtgaccactacgccctattaacaaaaataatcgacttaagtcagcagcgacttaaggcgatctgacgtaattatgattactcatacagggatgacttctatatcccgcaaataaatttcataatcatcgcgcgtcatttcattactgcaaatttacgaactgatgaattctgagacaataggagagtaattatatcattcgaatgctgaactgatgtcctctaacaaatactcgatcatgctaac

SEQ ID NO: 112947 - DNA, 577 bp, Zea Mays
ttactgcactagcatgttttgaatcggtctttccttactctgtgtcatttactatgttgtggcctgactcttttttcctgtgataatcataactatatgcattgtatgtttataagcgggaaatacattgtaagataatttgctgttcctttttgatcttttgctgcagagagttggtatgttggtcagctcttgctgtccatctagagtactgtaggagtatggcaataggccaactatctagtggcatacatcagccatgtagtagttgggggctgagctaagacatgtactagtgtaccatatagttggtacttggcttgtatatatactagagtactagacaatgcaatagagaaagcagttcagtttgctgcacattcagtgcctatgtgtgtgctctgttgtcaccccagttcatcttctagttctacctagccatgggttgtgggagggagtgagctgattggtcacctgtgcagggaaattgagggccattagcaatgttttgctaaagtattgctggatactatttggaactgggaggaaataaattttgttgatctaactactggtt

SEQ ID NO: 112948 - DNA, 354 bp, Zea Mays
gccacctcaagcataatatgagaatccattagttctcatgagaagacttaagctggccatagttggcttgtagggttccatacttgcatgagagctaaactaattcttccttgaactcattattgtccttttataattgagcaacactcaaagagttagtaaccaaatcatgctcaattgaaaactttttataccttaaagttgttgcatttacttctttcaacttggagatgaaaaactcttcttgtctctcaacagattgctcttgtttctcattctccatctcaggttcatcattattttcaacaagattcacgaagataatcaagggtatagctaccctcaattttagtt

SEQ ID NO: 112949 - DNA, 292 bp, Zea Mays
tagaggccgcccctggatgagtaattgtatgcgcgccgagtgtgctgcgccagtttaagctagaattaactcagaccgatcgctccgttagtgtggtttagtggccaccccgagttaagcaagcgcgagcatgttgcaccgtcttaagtcatcgccgtcttaaaccgattgctccattgatagggcgtagtggtcaccctgagttaagtaagcgtgagcatgttgcaccgtcttaagtcatcgccgacttaagccgattgctccgttggcagggcatagtggtcaccctgag

SEQ ID NO: 112950 - DNA, 537 bp, Zea Mays
attttgtatgctaattgcatgtctaaagtgctttcttctgccatagaaagtgttgtttagtaaatgatccttgaatttggtattttttatgtttagtttcgaaggagcctgttaaataccctggccaaatggaccacaaaagcttatttgcaatgtgcatgtccgcttcttgcacatttgcttatatacaagaccggagtactatgattttcgtcgctactttgattgtgctttgagtaaaaaaggttacaaaaataatgtgtttggtagggaacatagcgataaatagtaacaaaagaattaaatgcacattgctgatcgctttatatgttatgattataaatttacattcaattaaactattagagagtacatggaaaaaaagcaagcaacaatagaaaaatggtattaataggagaacaattactaagtggtggcggtagggtcagctggtgcggttctgccatcaggtgtactcaattctttcataagaggtagcttgttctacatcaccacaacatcacaggaatgtaaatt

SEQ ID NO: 112951 - DNA, 590 bp, Zea Mays
ggaggagacgccggccccagagctgccgctggtggacgagatgttggaggcggtccgatcccgtggccctggcgtccatgtggtccctacctttgctggtgagtcctttgtgccacgaagactgctgtgatctctcgtttgggttgtgaattggggatgttcatcactagttggggatgttctgcagaggcgttctgtactttagttcactgggaaccatccccttttagcttattgttgtgcaatttgaacgttgttatcggaggccagctaaattggtgtgcgcagttgcttcatgacgtgttgattactggtgtttttggtatatagctttatttagtggcatgctgttaatttaagtactttactgtctgacctagaattttataacatgctgttaattgaagtatctagctgctttaactgctaatttgttacgtagcttcatgctgttaatttaaatggtaataatttgcttttgaggtttcttgtaccaagggggactgatccatgttgcatttttctcatcgttcatgtaagcaagctcaactgctcaatagctacgatatctgtatctatgtccagttgtc

SEQ ID NO: 112952 - DNA, 590 bp, Zea Mays
gtaaataatgttgttattgtgtatacaaatttaatatgagactaacgcaacttgaacggactaaatcagagttaaaacgagcaatatagggattaatttagtttttggtcatttttataattaaatcgagctctagggacttatttgcaattcttagggactgctaggtaatcatcttaccgcacacatggacgacaggtagattactatagagcacatgttctcttttgctaaagtagacggccgaaagggtatgagcttttgtagaccgttggatcaataatctacggtgcagattagatcgaagtctccgtcgttggatctgagatcgacaacatagattttatgatagcagatcggattttccccaccagattgaatcagaggacccacggcctcggctgaatcggtacgcgaccaatcccatcacagccgtcggatctaaaatcaacgctcgagactaaaggatcccgcgatctgatctcggccaacagatccgagatcaacggctacgattttcgatcacgatggggtatttgagattccatcgtgagcgcacatcatcggatcgatggccagggccgtttctc

SEQ ID NO: 112953 - DNA, 309 bp, Zea Mays
tcaagaattgttggtgcaactcgccagcaacccgacagcagtacctgagtacaccctacagcacggtatcctccgccacaagggtaaaatccttgttggttctcacttgcccacccagcagtccattatcggcgccttccataccagcgccgtgggtggtcacagcggtatcccagtcaccacgcgccgcatcaaacaactcttctgttggcggggactcaacaagtctgttactgacttcgtcagttcatgttccatttgtcttcaggcgaaaccagaccgtgcacggtacccagggctcttgcaacc

SEQ ID NO: 112954 - DNA, 273 bp, Zea Mays
gttctcacaggtatgaagtgagccacttttgtcagtatgtccacaatcacccaaatggagtcataccctgcaggagtgcggggtagtccaacgatgaaatccatgcccaaatttcttcccatttccactcgggtatcttaagcgggtgcaatagtccagctggtcttttgatgttcggccttgactctttgacacacatcacacatagccacatgtgcagccacatctcttttcagcccataccaccagtacttctgcttcaaatcctgatac

SEQ ID NO: 112955 - DNA, 537 bp, Zea Mays
acccagtgaattaaaggttttgaaaatgcttggatgcattgatgacaaaaaattaatgtggagactatccctgagtcacaggaagatgaaatcgtggtgtttaagagctttttccaggcaggccttcagctgccgatacacacaatggctgctgaagtgttgaagaagtacgaaatctacatgtaagagttgacaccaaatgcaatagtaaggcttggtgtcattatatggactgtacaaaaccagggtgcacgagccgacaccaagtgcttctgtagagtgcataaattgcactatgagacaaaggcgagaccttcagataatttgcacaacaactttagatgctacaactttgcttaccaaaaggattcaaagtttcatgtattggcctactagaccaaatggccaagtgagtgggctaaggaatggttctatgctaaggtagacacgaagaagaggaaggagtttaaagatatagtgaagaggccattgaagataggctttggcttaaagagacccatctacaacaagggcaaa

SEQ ID NO: 112956 - DNA, 481 bp, Zea Mays
cctctgtatctgaacgtatattttagatagaccaggccgccctgactagacccagcagcagcttccttcggcatctcccagttattcacgagcggccatactctgtaggcgatgtgctcttgaaccaagtctcttgtgccactacaagtgcacacaatgttgaaactcctctagcatgcttctatatcattcccaagagcagtggtcggccttctgatgccgaagcgagaccaaatggggcgttggataatcccttttataagttattcttcacataaaaccattcttccatccaggcacctggccacctctttcgaaatgtcggaactggatagctcacatcagagcagggtacgaagccaaaacaaccaaaattattgtgataccgctccttgccaatagcctttgtctaacacagcagctcgtgcatgttacagaagcatttcgtgcttggctctagcccttggctcctcacggccca

SEQ ID NO: 112957 - DNA, 443 bp, Zea Mays
caagatcgaaggaaacataggggtaggctcagtctaatctggaacgttgatcaagtgatcaatgccccagggtcaccaccacccacgtcgagctaagcacggcggtgccactggggatcacggcggattcacgctgtcgaaggtgattctgcactctggtatgacgcttcctatctagcccggtgctacatgatgcctagatgaaagcgagtcggtctagagggttctcaccatgtttttgccatgcagacacccgcccacggcggagggcagcaccatggcggcgccgaccaatggcgagtaattcctcaatccttgcttgctcccatggctccacagaatcacgaacacgatccccggatcacgatgaatcttcctagccttcatccgagtctctggcgatggtgcagcgatcggtcattggcggtgactgggatttctca

SEQ ID NO: 112958 - DNA, 440 bp, Zea Mays
gttgtgtagtctgccagcatcgtcgcgggctatacccggaccagtgggaggctacttgtttggtgcgccgtccggacgatgatctccggggtgcagaggccttctcatagcactattctattactgagagggatattgccaaggcagccatgcaagatgcagcacgactggcactttctcagtattgcttgttgttcagtggggtagttgatgacctcaacttgaagtactaccctcgtcgttcgaccggcagtgctggaggtgtgattgcctcgccagttggtgagggcaatcctaggctgaacaacatggtcaacttggctgacgtgctcaacacagagttggaccacgcccttgacgagttgggcaaggttcgggcggaggttgtggaattgcgtgctgagtgcgcagcacgccactatctggatggtggttctccc

SEQ ID NO: 112959 - DNA, 578 bp, Zea Mays
acgcaacccaaacaaaagtacaattatgaccttgatatctatacattgctctaatacaaatatcaaggataaacaggtcttttcattgctggcttgatttcatgtatgaccttcgtgatcatcttaagccgaagctttaaaccttgtcgaagctttgctgctttttctgcatgtctgttacagcttcggcactcagttcctttgacgtatctttgtcaaaatgaattacaaacgatttcttcatcctaaggaccttccgtagagaaggagacccccaacaacatgcataccgggtatgtggagcaatctgccataccaggtttattgccatgcacgaacaagaagacaacgtcaagagagctacatcaatgagactagcatagacaataggtcgtgccctcctgcacacaacaagtcccatgtgaggacctccctcttaaaaatagccatagttaaaataggcaatgggagcatagtccgactttagcaagataaatggagcgacacaacgattcgcctaaggtaccaacagcttttctcctaagaagtgaacaaggatataactctaagctaagcaa

SEQ ID NO: 112960 - DNA, 682 bp, Zea Mays
accaaggtaaaagtaggtaaagtacaatgctcagattgagatgaaaagaggagattttaaataccggtataagataaacatcaaggtaagatatagaggtgataaggataaaggtgataatggtgaaacaacataatccatggacagggttaaggcaagactgacgaagtggagaaaacaagaaagggtaagataggtaagtttcccacaaaatggttgaagttacagaaattattaccgagggaagttataaggaaacgatgagatcatcaaggatgtgtgaaataaaatggtcgctcatggatcattaagaaataagggtggtcaaaagcatgttaaccaaaatgtcttaaacaaacatggggatataatggtaagtgtatataaaaataagtgtgtgcaagattccaaggatatgagcgtaccaagacaagggaacagaaaaaggcagagggtaacgacttaacaacggaatagggagggatcttagaaaaccagaagttcatggatatataaactagagtgtttaagtaggcaggagaaattcagatgtaagtattcgaaacaggagtattgaagaatctaggagtatcagcatgtcaatactatgggaataaaggtagtcaaagggtagcaatttaatgacagaggtgggaagagtcccaacagacaaaaggttatt

SEQ ID NO: 112961 - DNA, 447 bp, Zea Mays
gaaacttcgctatcatctaccagcaggcagcagcgacatggtagtgtatagggcattcgcaggcatctgattcaccatctttttttttccttcccgagtccatacgggccacggcaaccggacctcaacatcttcagtacgtagcagaatctcttctcactggcctaaaggctataacaaatcgagcatgcgcgtcgtcttttgtcagatctgaatccatcccgctctcaaaaaagaagatggaaattaggacatttttttagtaatttacgatgatggcggggaaaagtgacccggttgtagttatttatctcgtttgaggttttactcttggagttcaacctttttatggtaacctaaaatacgtagaacatcattatttttaatgtataggacattttgtataggtcgccttgttagagatagctctaagtactcaagagagaa

SEQ ID NO: 112962 - DNA, 718 bp, Zea Mays
gagaatttttgcggtgagcccccacaacacaaccatagaacaaaaggtggaagtaggtggataattggctcctttgtgtgcgccaccatgtttcctggtagagtacgcacttgtgctatacacctacacatatacccaggtaatggttggtgtctggaccaaatgataggattgttgagcaccaccatgcaattagcatgaagaggcccacccactagctaaactattcatctctgttgtgccagtgcctttgtccactcactcaccacaaactctcttatgctaagctcttgctcgcatgccaccatatatgcagggtatgggtatctctctcttctctacgcacatatgaatgagcactcagtttcatcgtcgtcgtccttcgtctctccatagaaaacacaccagctgcttctcgttcttccgcgtcgtacgtaccagtaccaccctcctggattaccacctccatagctttgatatctctcatccatcgattccctcctagaatccaatccgatgcggcggccaccacccccgccccaagtggcgtcctcgtgagaggttggcagcgagctacatcagcgagaagcctagggcgcgcagtatatctcggaatgtgctggctcccaacagccgcgaagcgattctcccctcaccctcgaccacgagccgcctatataaccatctccatggctccccctcccaacccccaccagag

SEQ ID NO: 112963 - DNA, 277 bp, Zea Mays
gaatgtgtgctacactcaggatttgttcaattttctttttaccccttcatgcattctaagtcaatgtcgatacttctttcattttagggagacaacttaagcagtagcagacaacaaaaattgatagtgggttggtttcacacggaccctgttgaaagctagaaaaatgtaagggaaagcaaaaaatgtgaatgggtacatcatattctcagtgaataggatcaaacagaaagaccttgatatcaatttttagttgctggagtcaggggtgctttca

SEQ ID NO: 112964 - DNA, 336 bp, Zea Mays
gagaagattgcacatgaaatgctagctgggatatctgagggttctagtgaaagtgtaagttttgatgtacaaagtgggaatgaagatgccaaagatcagccctggagaccaagccatgttgtcttcgggaaatcaactattaagcaagggcaaattgatgtaatgaaggggatgtactttcgtgatatctcaattgtgtgggctggaggagaaaataatgtccctctgcctgaagctgatgaagtagtactttatagaagcttcatgaaggcagggctttggttccctttggataaattactagtcgaattcctgaagaccttcaaaatttatctt

SEQ ID NO: 112965 - DNA, 602 bp, Zea Mays
cgcagatgtccccgcgataactaaggatctcttcaaaggcttaggcttcttcacctatccaatcaattactccttcagggtcacctcgaatgaacttttcttccgaagagtacgcacccaccttagcaaagctggttttcagtttcttacgcaatccaaggatttgtcaaagcatctctccttggattcacgaagctcctcaacattcttttctagcctagcattcgaccattcacttatctcttgctttacttttgcaacttcaaaattttcattagccttggcaagttttctctgaaggttctcaacttcggctttatgggcttcagattgagcattaaattttgcctcgtctttcttcactctgtccactaaagaaagcagaattttgtctttctctaaagcttcatttcttagtttgataacctccaaccgaaggttaccgagggctatctggcagctttcatctttagcattcttctgtgctcttaaagcattgctaagaattaagccctgcaaaaagaggggagacagaggatcagcgcaagaataaaagacaaaatataatctatttataagcccataacttccgtaccttcaga

SEQ ID NO: 112966 - DNA, 682 bp, Zea Mays
caaaaacagaaggagatacttgaagccaagtgccagcgcatcaacatgcaagccaaagtcaggtagatgatcctagaagaagagaagaaagcagagagctggaacaggaaatcgcagaaacaaagggcgaggacgccccgacgccaccaacaacagcaggcccccgcactcaacataaaccctcgtcacccccatgccagtcttcgcactagctaccttccaagggttaaattaccttgatgaacgaagccttcttgcaccatagcttcaggcctccccttggctgcaaaacttcagagcaggcagttacccaaagtataatggcaatgcagacccaacttagtacatcatgagttaccatgttgcaatcgcattatctggggggacgacgccaccatggccaagtcattcatcatagcccttgagggcccagctttcacatgatactcaagactgccatcattatcaattgattcatcgaagacactctacgacaaattcctgttgacctttcaaggttacagacccgagacagacgccctggcagaattctcgctctataggcagcaagagaaagaaagtcttcgagaatattacaaaaagtttctcctgttgaaatcacaactaccttcatttgatgaccacatagccatccactatacaatcagcggccttcgggcag

SEQ ID NO: 112967 - DNA, 624 bp, Zea Mays
cttggagactggcactggctcaaccactccgtatctagaaagtcaataaaggacactaggtaaactgatgtaggacttgatagagcgtaatgatagacaccaatgtgggggtgttgtggctactgtatcctgacatagggaggagacgtcatctagggcgtttcttggtcgacaagaacctcgagggacaacatgctacgcgatgacacctgaccttaactcgcttcgtcgtaccctacgacacatgtaacgagatccctctctcaccttggcctttaaactggaaggaccatagtttagaagacaagcaatcacttgcatacatcaccagaacaagtcattcacaaagcacttgcaaccgcatgagcactcactccagagacttgggagcttgatccctctctagcttgtttgcaaccccctactataaactagtgcagggtaacatgaatcactcaactgaacgtggggacattctgcctgaactagtataaacttttgtgtcaactacacacaccatccactccaaggcatacaaagcatgatagtaactagccaatggttacaaaacaccgacaattctaatctatttgtgtctccatcacttattcgaacactagtcac

SEQ ID NO: 112968 - DNA, 541 bp, Zea Mays
atatcagcatgtcatagagagagctgatcatcacaatgttggaaggcaaaatccatcatcgtcccatgaacttgggtacacgccatcattcctaagaatattcaaacaacaacttgaaagcactgactgatctggatcattgtgattaattaaaataaggttagcattcaactgagaataaatttccttctctagttgtttagctcgcattcttgtaactggaccatcagtatttgttgcattcttattctttataattttagtgtcaatgctaggggtgtcctcatcagcctccctctcttgagaaggagtcgtcctcgactctgactcaccaacaaatggaagcaagtctttgacattgaatgttgcactcacattggaatattcagaagggagctctagtttataagcattatcatttatttttgcaagaaccctgaatggaccatctcctcggggtgataacttacggtgttgaggaaatcgatccttgcgcaaatgtagccacactagatcacctggtttgaaaagtacttttttc

SEQ ID NO: 112969 - DNA, 1069 bp, Zea Mays
atccaccaaccttcggcttagatatgtcaccacatgctccttttcctcagtttcttgtgtcagaacagccccaatgaccttatcctcagctgcaatgtataatcggaatgatactcctgcttgtggtgcttttaatacgggagccgaagataagtattttttgatgagatcaaatgcttcctgctactctgccccccaagcgaattcggcatcattcttaagccgaagaataggggtgaacgcgtcaatcttcccggctaggttaaaaataaaacttcgtaaataattcaccttgccgagaaacttatgcacttcgaccttacaagtcggaggtcccacattccgaatagacttgattcggtcagggtcgatttctataccatgttcatggatgacaaatcctaaaaacttaccagtcgacactccaaaagcacatttacgtgggttcattttcaaaccataccgacgcattttatcaaaggctttgcgcaaatcagctatatgaggactaaactcagccgatttggctacaatatcatcaatgtagacttccacagtgtttcctaacaactcatggaagatcagattcatagccctctaataagtagcaccagcatttttaagaccgaatgtcatgacaacccattcaaataaaccaatgaagcctagacatataaaggctgttttagacgtatcctcttcggccatgaaaatctggttatatccggcattaccatcaagaaagctaataattctatttcctgatgcattattgattaatgtgtcggctatgggcatgggatattcatctttaggagttgctatatttaaattgcgaaaatcaatgcataccctaagcttacctgactccttctacaccggcacaatattggagacccactctgcgtatctgcaaggtctaataaaattagcttctagcagccggtggatttcgtccttgattcgtgggagaagatctggacgaaatgttctagctttttgcttgaaaggtctgaaaccagacttaataggcagccgatgttcgacaatctctcggcttagtccagac

SEQ ID NO: 112970 - DNA, 354 bp, Zea Mays
gttcgttgggaaaacctaggatactctccttttgaattatctgatttggacgccatgatcaatgatgatgagattaagaacgtggttatgggcatgcattcagagaaagcggctggacctgatggcttcataggccttttctacaagggttgttttgagatgattagataagacctctccaaagcgatcaatgatttttatcatcacaaatgcaaaagtctgcatctggtcaatgaggcaaacatcgttcttctaccaaaaagggagaacccggacaagatagacctgtttagaccaatcagcctaatccatagttttatgaagattataaccaaaataatggcatcaaggctg

SEQ ID NO: 112971 - DNA, 385 bp, Zea Mays
ccaacaattacttaattcgattctcaaattcacgctttaggaaaaacaaaaaaaaacaaggccttcaacagttctgtatatgtattccctttctcccatgctcactaaattcacagtcgtgcttctgaaattaccgctcgtgcctaggccttcccaatatcatttttatgttgatttcctgcgcacagttggtcgattcgcgcctttgcagagcaaaccaacagaaaatcctgcctcctccctccatctgcacgccaagaaagggagctgccactacagatctgttgcccctgctcttcatcctgttccagcaggacgtcctcccgcgcgtcagcgtcacagggcccgccgtcgccgagtagcccacaaatttgccggcctcgag

SEQ ID NO: 112972 - DNA, 897 bp, Zea Mays
ttcgggttgcactttcgaagcatcggcaagttttcttgaaggagtagagctcaaggtctttgctgtctccagcacaagatctagcacatttgccatccttctcctcttaggagttgtggcagcactcttttgtgccttcggcactgttacctccgatgaagggctcaaaatttctggcacttttatttcttcaatatttgactcttcagctttacccttaccagcctttgtctcaactagctcagctgaaggtagcttcggcattgtagctggatcttcaatcctctgcgcaggaggaacaatttcttttgtcttggcggccgaggaggccccttcgccaaattcaggtatcgcagccggttcgatgtaacgcggccggtgagtcagaaccttcatcttcttcctcttcggctcagccgtgatggccgaagcagcaacctttccagcagcagcaatcttcctttttaccccttgccctcgcagcgggtaacaataatcagggtataagaagccaatagcatcaaataccttgtttaaccttttcttaatccgacccccgaaggctgcggacaaggcattgtcttcctttttggagtacgctccaagcagttcatcacttgtagcttcgatacacttcaaccaatcatcatttggtatcatcaaacttatccccaaacctaaatgtgtacttcagccggaccaaatcacctttgctacaattagtgatggtctccttcggcatttcccagctttctacaagcggccacaccctgaaggctatatgttcttgaattagatctcttgtcccaataaaagagcaaacagtgttgaaggccctctgacacgcttcggcggcgtcatcaatttcgaccttctgccttcggaggccgaagcggg

SEQ ID NO: 112973 - DNA, 288 bp, Zea Mays
gcgcaaagactccagaacacgttgttttccgattgggccgactttggttgtagtttgttctgcgaaaacggtatccattgacgtcatacccataatatttcttgaccctataagcaaagccgttggctacttgtctcaacttggcactcatagacggatctctttggccctgcaagtattcgcaagttaaaagacgctaaattgagttcatagacggatctctttgacaaactaagcacgtaccttacgtttgaaccaggaaatgaaatcgggcaatccatttctcgc

SEQ ID NO: 112974 - DNA, 492 bp, Zea Mays
tgttgctgctgtgcttgaagtatgggtgtatctgtatatgatgcctgaagcagaaactttttggttttgtggggtgtggacagtggactactgcagtgctgctgctattgtgcttgttgtgtcttattgagttatttcatccaagcgaccaatccaattagccaagcactcaactgctatgtttgtggactactacctgtaacctgtgtgactgtctttgtgaaatgtgaacccttttatgtattatctgtcttcagtctgtgtttaattgttttattagtggactcacctactgtctttagtctgtgtttaattgtttatttgtgcagtggactactgggctgccttaatccttatgcccttatgtatttgtgtgcacttgtattctcgcagggtgctttatatatttgtaatttgtggactactgtcagtactagcctgtgtattgctgtttttttctgacttccgattatatttttgctgttgaacatg

SEQ ID NO: 112975 - DNA, 617 bp, Zea Mays
ctggttctctattacatagatggacaatatgagagtaaagccgcaaacaatctctacacatcaccttggcttcgttattaaattgggtcacacactagtaagcctaattctaaccatttatgtaggtttggtttgagaaatatggtaatagtctattatttttccattcctcgttttattgttgggttcctggaatagaatgatttgatttatcattatttaatatcttgtaggctcggctcctccagaaggaaacgataaaaaaggaaagaaatagaccccagaactgttgttctattcttctgcccgtttcgaaacgcccagataattaataacagaaaaggctctcgttgacctcgcttcctccgaggcatgatctatggctggtggcaggcagcagcccagcaggcaaaattgtcaggcacgcaagatgtcagaagaattgcaacttgctcagaccaagcaaagaatcgctacgctatcagtataattacttgcagcgaggacaaaaaaataaagaaagaaacttgaaatcatggagctggttgttgcgacttgcgacgcggacccgtgtcaccgtgtggctatcttacaatcacaatcacacaggttgacgg

SEQ ID NO: 112976 - DNA, 429 bp, Zea Mays
gaacgccaggttcagatgcctcaccgctggtgaccgtgcacccggattcgtgcccgcaacggtgattcgtgcccagcgcagatggataacgaagaagggtaagaaatatcgtaccgtggatgaactccgaccactattctactccggccgccgtactcgcctaagacacgaccgcttcggataggctcacctgagttagtcacctcgtgaccttgtgccacgtgccttggtgctttaaccccgccacagtgagtcaccgtagccacccaataatcgccggtgagctcaccacggtgaaagccaccaattgattgcgcaagtgcaccccttctcttcggtcgccgcgcgtcattcccccaattagtcaccactgctcatggatcctataaattgagcacaccctcggctccactagatattaaagcattc

SEQ ID NO: 112977 - DNA, 284 bp, Zea Mays
ggagcggatgactaagtctatgctgagcaaccccacaagcggaatgaacaaccaaccctctgccaagcaatctcacgaggcggagcaaatgactaggtcccatgccaagaaacctacgaaggggaagggccaatccaatgttgctaacccgcgtcagcatgacaagacgcgtcacccccaaaccacgttcgggccacgagtatggtgctgaaaagtccctgtcaaacacaacattacgccaccgcatataatctcaggtgaactcccagttatgtgtaaaaccc

SEQ ID NO: 112978 - DNA, 508 bp, Zea Mays
cagtgactcagctgacgacaagcacaactagatgtcgtggtcgaggagctatggcatggagtgcagaaccagacagatgatgcttggtgcctcctccttggtaccatcgtagctggttccatcaatgtggacgacgttggtgcaaagacggagatgggtacgatagggacaaacatgcacacgggttccacaagcccgacggtcgatgcaagcacctctgcccctatccttggtaagctttctagaaggaggggtccaacctcaaaggtatggttgaactttgaggaggttactgcgatgcagagaggtaaggaggtaagagtgtctgcaatttttcttcactgcaagaatagcatgtctgctaaatcatcttctagaactagccatttgatccggcacccagatctttgccctgctaagaaagaaaaggatagaccaggaaaaactcagtatttgctaaaatataatgcaaatggatctaataatcactgggagtactcccccttct

SEQ ID NO: 112979 - DNA, 489 bp, Zea Mays
caggcagtagaaaaactgacctgcatacatagtagcaccttttatactctgttagcttcagttcaattatttctatgcatgggtatgagcaaaaggcgctgggacgaagttggcttgatttcacattttgacacgagggtggtcaatgattaattcgacataatttaagctcatgttaggcaagcctgagggtgattttaaggaatacgtacaacaagctggtgctcgctggggtcagtgtgcttgttgtctagtatgctaatagtggttagcacgtctctgttatattggtggaagctgcacttccttccaccactcaatgttttgccatggcacctaacgatgtcatacagatctatttgcagcaaccactagatttcagatatgagcatttgcagacaatgcaccccccctgcactccgtagtctaggaccagttttgtcaaaacctaccagcgtaggcatccttctggtgagacagagagtatct

SEQ ID NO: 112980 - DNA, 819 bp, Zea Mays
cacggcacatgcacgtacgccagcgcgccgtgatcccgggtcggctcgtcgcccatgcacagggtgtcactgtgtcgttgaggatgtgagaacagggtgcgaactattggtgcgcatctactcgcgggcaaggacatcaacatcatggagcctcgcgttgtcattttactagtgttttaggcagggaagagaactgcaggcttctgcgttcccggtgtgagtgaagggaaaaccatgccagcctttctcatgtcaaaccaaaactcctccaattctcaagcgccacttcagttcaaggataccatgctccaagcattcagcaaaacaaccgcagcacagagcatctcatctggacacaatgcagatgagctgatagcctgcccggtgccagcaaaacacactgcaacccaaagttagtatgtctctattaggtaaggtaaaataggggacgcataactataaatgacaatgtttgtagagtgaagtttgaaatagaagatacgatagaggatctgctctgctggagatagcattagagccaacatatcaagcacacataaaatccaatttcagatatgcaaggacctgctatttcttccaagaaaatttatggagcttttctgcatcttcaaaacaagagtacagtctgttggataagtgatagtgatctcaggcccatggaataggtatgcgccaaagagtcatcaacttcttccccacctgagtcctagatgacctctacttccgactaccgatggcggactaccctgaagatcacgattagtcatcaatccactaacgcgttcgagatcctgtggc

SEQ ID NO: 112981 - DNA, 375 bp, Zea Mays
gggtggatggccatgattaactcaatgaaacactttgtgctgaattctatccggaccgttagatcatagggtagcagtcgagatctaatcacacgcatttttgcgacactcgtcgatcctagatccgacgaccatctccacataacgcttcaggggtagtttaaatctaatctggcgcattgaaatttgatcggatggccccggtcgcccgataacccttcgacatagagttttacataagagaccttgggcttttacataactaacccacagtcctcatgcgggtgtagctagagtcctgaggatctttcgaattagcccctgaattctttggtatttggcacgcagtccagtgagcaaagaaaacagatagtt

SEQ ID NO: 112982 - DNA, 416 bp, Zea Mays
aagagtgtgagctccctgagtccaacagaactaaaacatccaagccagatatatgtcccacaaatttcatcgtacggggaacctccagaccagtaaccgctgctttcgacaggtgcaatacattaagttctgtttccccatcagctgtatcttccactgaatcttcctctagcagttgcaccatcttccacatctcctcaactaagtgcaattgaaccaagtcagcacacttgtgacctcgtgcaaatggtgccccacacttgtagcataaacccttcaccttgcgaaaagcatataaggatgtgagccgatcatcagacgatgtgcctgtagtagttttgtcctcccctgttgcagaactgctcttgatatccctggctgtcgaaactgaagccccaaaattcttagtataagtt

SEQ ID NO: 112983 - DNA, 293 bp, Zea Mays
aagccttgcctcgaggcatcacagaagacgacgaaatcctgatgtatatccggtagtgtcaaaacgggtgcggtcgtgagcttctcctttatgatctggaaactttcttcacacttcggggtccacgcaaacttatggtctttcttgaggagctcggtcataggtcttgctatgctggagaatcccttgataaagcggtggtaatatcatgccattcccagaaagcttcgaacttcactgacgttggatggttgcctccattttgatactgcttctaccttggaaggatctac

SEQ ID NO: 112984 - DNA, 420 bp, Zea Mays
atcgatgttggaaactttgaagttcgacgaccattggatcgctcagagccgagaggtaagggtagagactctgcacgtcccccggtcctctcggcgatgatcatgatgatagtctagaggggcaagcgacatcgtgcgtcatgtcgcctcgaccgacctagggccaggctgttggtggaggctgctaccgactcggtcctagtggcatggctacgcgtcggtgcaccatgatctcggttgtactcttctcgccgcctcatctcctccacatgctggcgatcacgcgaagtgttgatattgctctgtgcgtttcgtcgactgttaatgatgtggcgtagatcattcagcgggtgagcgaggggaagaagatggttcgccacctgggtgaggacctactagtagccctccatgtcacagaac

SEQ ID NO: 112985 - DNA, 659 bp, Zea Mays
tggccctggtctctggaggtggttcttcctctaactcttcacctgttatgttttctttgtcttctttgttgaccatcacagaggagcaggtggagagctgtggggatgaggagctgacgcttgtggctagctggttcacgtggtttcacaacaatcgccagaaccggtggcatagcggggtccaagaatggatgctacaactatagcaatcccgaccacttcatcgctagttgccccaagaagggcaagctataggctggctagcgcgaccaccactcttgtcgcgcaagggcaagcgtgagtacacctctggcacacaagtccaaggagacgtttgacaaggaggcgctcaagaagaagtacctgaagaaggccaaggtgaaggagcatgccttccttgcctccctcagtgacctcaaccatgactccagtgactcatcttcatccttgagcgacgagacaagctaaacggactctgcttcctcgccgacaccgtaggattcctctgcactgcacatggcacttggtgaggacacgttggccacggcaacaaggacattgatgacgactccacctctaaggtatctctttccgcgacaatctcaccgctgaggtagaggagtagatgtctactattgggggccatcctcttctgaagg

SEQ ID NO: 112986 - DNA, 593 bp, Zea Mays
ccctgacagaaacaaactccatatcctaacaaactccctctaacaactccttatttctaggacttgtctaatatgtaacaaactccatatcctaacaaactccctctaacaactccttattttcgactttccctacttgcttcttaatataatcatgtgcagctctcctgcgcgtccgagaaaaaaaccctgctcttattatgtattttttgtgtgcaaaatctcagcaatctttttctggttgtaaatatggttttgaatactacttttttctttggcaagtataagacttagattcgatataagaggtaaatggtttgactaatccaattgactggagctaaatgattggtagccaatccacacacttcttgtgtcatcgctctctaaagggaaaagattgtttcacagtgccattttgagtgaagaggaataacgtaactagatattttctaaagccggattatttcatactgaattttgtttcccttaaattgaggttatgaggaaaaaccatggatatcctgaacagacgtgaacaatacaccgcatagggctaggcaaaaaacccgtaacctcaatgttgtttgttt

SEQ ID NO: 112987 - DNA, 530 bp, Zea Mays
cggaactgcagtcctttgtgtcacaaaagaaacacggcaccatgatactaaattgcttgctttaaactctaggcgtattgcgaggccgatgaggatgggtcagacggttcctagtgaggtcaggatgcatgggaaggctgccatctgggtaaggagcgtggggagaggcgtgtgcctgtgctcctgaaatggtgcaggcggcgcagtggcacttgtgaatcctgtctgtccgccccaatctagtgcaaccgaatggataaggagatggtggaacttctgtaattttcagcaaaacaaagcaataggtgaaggtgttggctccctgaattggtgcgaaacccacccaaacaatgttttggccaccaccgaaggaaatgcatatcatttccactctgattccagcggcagtattcccattaggagtcatttcttacgattctgatgaaaaacggtactgaacggcccctaagtcccaatagaggaatattagaagtagtcaaaattacagcatatggcaatactaatatcat

SEQ ID NO: 112988 - DNA, 285 bp, Zea Mays
gagttcctagtatagtgtggtgtatggagccacactaaatatgtatggtgtcttgtagtgccaagatgcatacttgacattttctttgagttccttgtttggtggatgaataaatgcctcaccaaaggcatacggtgtcgcccatacaatgcacactactcaccatggtgatttggttcaaaattgtgtactaaactctagttacactcatatcaagtgtcatgtctggtgcctcacaaacacatctagtgcctcaccgaacagatcaagtgcactctaaaaaac

SEQ ID NO: 112989 - DNA, 554 bp, Zea Mays
accgaagcattgatatctcgggtgatgcaattgtgctcacctgaagagctaagtgttcgatgatgactcagcggagaaggtgaccgtactccggatatgtagggctacaagccaagataaagaaggagataagtagagtagatagtgatcacaacttgtaaagtgataactctctggtcatgtatataaagccaaggggggacccctacaaaatcatctcatctcacatgtctcacttgacacccaccctcatcgacaacacctgagcacccacaaagctcacctgtaatcttcatactccaaagaaaacccaatacacagccacaatagtaagtagggtgttacacattctaaagtggcccgaacctatataaacctttgtgcaagatcgacgtgctcctgtatgtaccatcgagtcgcagtcaacgacaccgtcctacccaaaagcatcacatgcgtaaacccaggtcacaaacactgatagttggtgtgcttggtagggggttcaacgttgatctatgacgaatccatggccatcagcttaaacatcctga

SEQ ID NO: 112990 - DNA, 2132 bp, Zea Mays
gttatggagtccagaagcatccccaaaaagttttaggatgtcaagggtggtagagatatcagcctgggtgggatgcaaaaacagggccacatcatcaacatagattgatattctgtgtaattttttcctgctgcataaatgttgtaacaaaccttcctcagctttgaaaaatagaaaactcagaacatccatagaaagaataaacagcattggagacaaatggtctccctgtctgaggcctcttctatgttggataattgtgcctggaccgccattcaaaagcacttgagtggtagatgatccaagaagctcacatatgatgtctctccatatcagaccaaaacccatctgtttcattacttcaatcaagaaaggacaagaaacagaatcaaatgcttttattatatctaacttgaagagcaatctggccttattctgtgaatgcagtaatctggatttctgttggaccaacatgaaattgtcttgaataaatcttcctttgatgacagcactttggtttggggagactatctcattcagtttttttgccagtcggttggcaagcaccttggtgactaatttggcaaaactatgtaccaaactaatgggtctgaaatccttgacctgatcagccccctccactttagggatcatagtaatatatgctgaattgagtctgctcatatttgtgaaatttctgtgccaaacagctcccactgcctttagcacatcttttttgataatattccagcatactttatagaaccttccagtgaaaccatcaggcccaggggccttgttagaaggcaaatttctaatagtgtcccaagtttcctgttctgaaaatgggagatccaattcagagagattatgcacaggtaacccaagagcctcaaggtttatagttctttccctccctgcagccagccctataaggttgtatagaagtgatctacaagagcttctttctcagtatggctagttaaagtattctccccatctctgagtttggtcaccaagttctttctctttctatgtctggcatgcatgtgaaaaaacttggtgtttgcatccccatccttcaaccaactgattcttgatcttaatcttgccatagtccttttgaatgaggtcaacaacaaggattgctttttaagcttatttttaagccacaattcagcaggagtaaggaagatcctgggcaatctcaaacctgtgcaaaagctcctttgccaaagccaactaggaagtcacatggccaacctgcctatcactccaactctgtagtctcctctcctagaattttctttaagcttcctttgcaaggtcagataaggacaaggagaaggtccaacagaagtccaagcagcctgtacagtatcaaggaatccctccatgtttggccaaaatgcttgaaagtgaaatcctttctttccatggaaattatcctttagaccgagaagcaggggtcaatgatcagaatcttgggaggcagagctttgaagcagaacattagggaaatatgatgtcaatgagcagaaaaccctatcaagcttaaccaacacagggttgtcctgctaattagaccaggtgtattttctaccatgtagttgtattgtatctctcttagagcaagatcattgatcacagacctgaatctacccatcatagccctatttaggtttgaattatttttgtcagagtcccatgcaatgacccatgtcccatcacaagcagccctgatgtcctaaatttcttgaaggaaaagaattttctcagcatcagtctgaggcccatacacacaagttaaccaccagggaattccatcatctttgcaaaactggacagaaacacaatgggcatccatcctttgtactcctgtatgtcctacatttcttttcgaagcaactagaattcctccgctagcaccaacagaaggtagaaaaacaaattcagtaaactcaactcccgatgtcaccctgagtaataagttacatttttgtttcctgacagcacactatatccacctgaaaggaatccaccaggtctctaacagtatccatccgaacagaagaattaagacccctaacattccaaacaagaattttagaaggatccatagaaaacaaaat

SEQ ID NO: 112991 - DNA, 544 bp, Zea Mays
actcacccccatgtgtttggggtgccacatcatggtgctagggcgccgtgggggtgtaataggaggtttggctgggatggtgtaaagatgggtgattgtaattatgttctgcatactctgcgtcggattgtccggtaagatacgaggaccatccagctgtctgcgcggactgtccgaccatataggtggaccgtccggagatgcattcggactgcctggtgttgtgagtggatgattagaaagggtatgttagggtttgtgcggaatacggtggcccaggtgtagatttcggtaattcagtttggaaaacgaggtcggctgccgtgggtacggacggtctgtgctcatgcgcggacggtctggcgattcgcagatcggtggacttacccccgatttgtgtagaaggttgcagttgttcaagatgtgtgttcatcggcatcctgtagagtggttaggatcgaacgtgtcaatttgtggccgatgaatcatgcatattttctttagtctcgacctcgcgcgatggaaaatttaaaacaacaaattt

SEQ ID NO: 112992 - DNA, 656 bp, Zea Mays
gcacctgtccaaagtcctctttcaccgaagtcggttgaggtgtaagccacccccagctcctggaagaggttgctacggattttcctcatggttgtgttctcgagcggtctgaggcgcttgtcagagaggaattcagactccaacactgtgctttgttcgttgtggtcactggttcgcgacctcagtgaatgctcttgcagcggtggcagcagctgggttcggtttgctggagaactcctcattacatcgttctttccaggaggacatcgtgttgatctttgactcggagcgcatatcaaacatggttaacggtgttgtgctcaactcgccttcaggttcgttcaagttcatcaggtggtctaggcttgctcatgcagatatagttacgttcccctcccttgtcatggttgagttcagaggggtctcggttcatgcttagggtctgattactgctcagaacctgctgcgagatcactttgttgaggtggagcttcatcctgactctatcaaccgcctcgattttttctgctaggggtggttcccgccggggctcttgccgatcaaccggacgcagagacgggagtaggaacacctccatgaacgaccgctgcggaacccgacaaacgacctctccaggactcgccgctgaagaggag

SEQ ID NO: 112993 - DNA, 517 bp, Zea Mays
cgtcggggatgtggttcctcatggtctagaaatgctttatgaacgagcagagggactcatcattctggtgtttgatggatttgaggtcccagggccgcactagtttatcagaaaggaattgaaaattctcaacaaactagtggtagaagtcggtccagccgttgatgcagtggcacgggagatgttggagccattagagtgcgtcttgttctagtacgatcggcaggtacactttcatgacatcctttgttgccatggctgcctaggtggctatggtgtagacggctaaccaaccatctgggtcttgtttgggctcgtacttgtcgatgtttgagaccttgaagttgagcggccactggattgcatggagccgggggagagggctgaaacttcatgtgtcctctaggcctcgtgacggtcctcccgagtgtggtcgcgatggcggtcccttggcagtgactgatgccatgagtctcgcggcctttctcgagccgatcagcctagcgtggggctgttg

SEQ ID NO: 112994 - DNA, 331 bp, Zea Mays
aagacatgccaacatgagtaggacatatcggttatattgaaaggcgtgaaaccatcagtcgccaagccgatatgaatatttgttgcatcgcttgcaaactctggatcaaaggtgtcaagagatttccatgcatcaccatctgatgggtgctctattaacgcatcttttttgtcagtacgatctttgtgcacctcatgtgcatagtggtcttcctcgagagaaacaaatgtttcactctaggagtgagaggcatctaccgaagctgtttatgtgcaacctttgtcaccaccttctcccatcttcgtttacaagctccacataccttgacttg

SEQ ID NO: 112995 - DNA, 406 bp, Zea Mays
ctcagctcccaactagccattaagtcatggaacttctacaatgtgacagtggtgcatattgatgtgacacttccgtgcaagccaacaatgaaaatgagattgaagcttagtctagctcgactaatgtgtgaggaaacaagcatggtgggttaaagttgagcacttgattgcacattgaagcgtgcattttgcatgccctttaataatatggttattcctatactgtacttcaaatacaaaatgaatttatgaacttcaataagtccaccaccacaaccttcctgtaatgggagtccaccatgttatataatttcctcattactttctcacgggcttgtcaacttgataaatctcattagtcctctaatatatggttattagcaccaaaaaccacatcagagattaa

SEQ ID NO: 112996 - DNA, 479 bp, Zea Mays
aagtcatagtcttagaggatggacctagggagactatggttggggtccaagatcaagtagatgccaagtcctggtctattgtatcctttttgagttaggctgcaatggaagaggagggccagggttgatcatcgcaatggttatgaacctagcaacatcttgtcgccactatttagtagtagcctcaccaacatgtggtgctaatggattacggaggagtgcctccacagtgttgagagaactaatgacatcatctatgccaaatcaaggtgtcgatgagcccgctgggatgactagcgctgggagaaaccttcatgcttggtggacccctcgccttggtcctaaagcaaggctgtgtgcgtggcacacattaactgatcacactcctatagagcccatgagggcacatgttgtcaaggtgttgtgcaccctagtcggggaacatgccaaagctaggcttgtgggatccatgttgtgtg

SEQ ID NO: 112997 - DNA, 272 bp, Zea Mays
ctctgccaaagatatccctgggaccctcgaatgcgtagagaaagaggttgatgtcctcgatgaagttatcaccggccacggagacttctgtgcgctggtggcttctcgtggtatagtcgctgctttcataaaggccaggtgcaatcatgcaaagactgtcaatagaccgaactttagcctttcatcatcggatctggttgatgttccagccgaagcctgaagcatagggaataggttcatcactcaaatttggctaagggtggacgcgagtt

SEQ ID NO: 112998 - DNA, 297 bp, Zea Mays
gcatctgaagattgagtttgacttctctccttccttgatgaggttgatcttttatttcctggccttgagctcattgattcgcggtgagtgcatatcatcggggtgggggaatgtggttaagatagatttggatgagataggctacatgatgtaggtctaaagttcatttgatgttaggtgggaatagacagattatgcaatccatcatgacactattggttgggttagctcttatgttcacggttgagttggtctaatgcactaattttaggtttacgtgcatgaggagagaacaag

SEQ ID NO: 112999 - DNA, 694 bp, Zea Mays
gttgtaattatttaactctggctgtggatggcgggtttgtaatatctctaggggctcttctgtaagatagccatggtgaaggggtacgggtaaaccccagccgcccgatctaatcctgacggctaggattaggtttttgtttaaaacgaattggtatgcactagcagccgtaggatcaaagatatccggcccggatctgaagtcgcgaaggggtatgtactcatttattcctgggcgcacatcgatggatcaatggcccagaactacccatgccatgatctatctccctcgcccgctctggatccgatggtcataatcaattgggcatgaattgttttccttatctctaatcccagacacccatcaggcaatcaatggctgaggggcgtctccctcgtttcagtcgagcagagcggcgcagtggaggttccccagcgcacagtgatctaggattctagtgccccatccgtaatccctgctagtgctacgcaaatccgagtgaataccaaggatagggatgggtaccatactagtggttagaccacacataagcttgcctccaatggcgcggcggcttggccgagagcaccggaaattggacgacagattctcggtccaccgcacgacaccacgcccggctacgccctcggaaatgttctatgggtgatgccgaactctttttaccacttgtcgg

SEQ ID NO: 113000 - DNA, 953 bp, Zea Mays
ctacacgcgagcgttccctgaggtactaccgaattccttttctagagtgtccccaaattccttgagaagatcatcaaggctagcgagggacatatcctcgatatcgggcaaattttctatcttggcgggggctggtgatgggggagctttcttccttctttccgtttggcatccttggctcgtggttttctttcggattttctttgtgggggcgatcttcttaagcttcttatcatagtccatctttaaggttcgataagcctcacgggtgttggcctcctcgccttctgctatgtcgagacactcttggagagatgccttttccttcttaagctctttgacttgctgctctaggctttccacccgggagtttaggagggtgcagtgggaggagagatcatcgtagtgggtatcgagggtgtggaggtacccggccatgtagacaatggtggggtcatcctcggtggggtctctccctgagagagcctgaagtcttttcctccaggtgggggtatttttattggtgggtgggaaataacgaagaggggtttcaaagatctctctgctgtagttttggcatagttgtttgagggcctttcgggcaacactttggcaagtgtctgggaagcgatgcccgatgaaggtaacttggaaggggggtggtttgggtagcttcggctttctcccaggtagactgccatagagcatttctccattccattttcgcggtattccttctagacatattcgggcttcttgcggatccccatgcgcagtccgcaactccgtagaaggtgaggaaagccttcctcctctgagcagtatgatgtcctaatgacccaagagttttccatctggtagaagaaaagaagggtctgttaatatcgggaaaggagagaaaatgtttcttggggtaagaggtgttttcttgctaagcaacttttaaggtcagg

SEQ ID NO: 113001 - DNA, 769 bp, Zea Mays
gaatttatcttggaataatttggctatttattcccgaattttatccatggtagtcggtggtataggaccggatctcgagatgttaggctcatgtgggtgggcattgttatgtcggtatttcatatgaggataatatgtgtgtggtggtgtgaatccctctaactccttatgtgtcgggcgatacttggccctaggtgtgggaatgcttcgactttggtggtccgaaggtggagaaagatagtggtgttgtggtatataatgtggctaagtgttgtgcatattgcatcaatctgagtgttgtacattggacagtctaggtcaccagatggttcggtgagatgttagacagtccgcgatgggttaccgggcgatccgaccgtggtcaagggtgttgtcatatagcacaggggttgtgggggcagtggttgcccttggtacgagttcatcgatataccatacaatggttgggattgagaaggctcatttgttgccgatgtgtttggtgagattgcctcaactatgacatcgtgagatggaaaattaggaacaatggatttttcgaatgcgcgtgcaagtctcttgagtgactgttccatcttatcattttgtaaatctacatattgtctaagagatcgtatgtcatcacatttacttatagtggtggttgtaggcgaaggtaggagggactccaggctgatctctgcttgcttggtgatcttctagtgttgatctaccgtgaagtgtgatagaaatctctccttctcttcac

SEQ ID NO: 113002 - DNA, 386 bp, Zea Mays
aatttagaaccaacaattcgacttgcaaattttattcaagtcattaatgcactaaaattactacaaccaattaacaacacattgtccacgataatcacccaacaatttgcgttttaaattagacatcacatgagcactactacttttcatccgcgaccataaccatacgcaatttggctacaacatcccaaacgggtgcaggaacactagtttctagttttaaccccatgattgttccattaatcattttaactacttattcggcatcgaccgacttaaccttcatctcgacggtccgagcaccacaattcacgaaagtctacctagacatctagcatcacatagagagtctactaattaacttgcaaccacttgaagtactggaa

SEQ ID NO: 113003 - DNA, 550 bp, Zea Mays
tgttgatgcttgtggtggagatagtggattagaaagaggatgaggagcagcatgtgaagattgtagaggtgatgatggagtaaaggtactaaagtttgaggaggcgacgatggttggggatgagacgatgacagtgttggtggatcaaccaattcgacatcccttcgaggccaaaggatgaaatttttgatggcttgtccaagtgtctcgattccttcggacccagggatgtctagcatgtcgtcgtcagatcattggacgattgtcgtcacttctaccctgcaataatcatctggtatgtcgctttcatgaaattgtgtcctgggattgcatgcctgttcctactttcttcgtgcgattattgttaataccatatcttataactagtgtgcacatcactggccttgttatgtcatcaactggataacggaccttatttcccgttaacgcgacagagcttgggacggttgtacaatcggtggaagctggcggttagctgctggaattatttgcagctatggagtggtcatctgttgaatagacatcacac

SEQ ID NO: 113004 - DNA, 566 bp, Zea Mays
tgaaaaaggaaaagagcagattgaagacattttggaagaagaaaattttaattttcaagatatacttggacaagagttaacagacgctgaaaaagaagagctaaagaaatatgctatatcatgtggatacaaaccagggtctctgctatttggtggagtcaatgaagggaagctaagatgccttcggaatcaaaccgaggccaaggttgttaggaccttctccaaaagtcttggcctgccgaagatagaagcggacctctacaggtatcaacgacagcatattgccggtagcttgctctatgctaatttcaaggtacaatctcgactttttatttcaaggtaaaattaagatgttttctgacgaaggttgttttggcagagtatacttctaagtaaagtgctaagaatgcaacaagatcttgaagatgagaaaaacgaagctaccatcaaagatctagacaacaaagtcagaaattacaaagctgctctgaaggaaaaagactctgttattcaagatcttgaaatcaaagttaaagatcacgaagctgccttggaaaagaaagact

SEQ ID NO: 113005 - DNA, 516 bp, Zea Mays
caaagcattgtcttcttgctctcttaggaattaattgtaaaagattcggggccaattctcccacagtgctaccgagtagccaccggtcagtccagaatttggcatcaacgccatttccaacctttgtttccaccgtcatatgaaagagagcttgggccttatagggtacctgaatgggcaacccttaccaaggtatagaagaatctgttttttgtagccaaagccatcgcttcaaggttgagaacccccaatcctccatactgcaacggcctttgacccttctgccagaacacaaggcaattgcctccatttgatggaataagtcttgagcatctagaggacaacagtcgcttttgactgtcctttgtagtctctttagcatctagaggacaacagtcgctttttgactgtcctctgtagtcgctttagcatctagaggacaatagtcgcttttgactgtcctctgtagtctctttagcatctagaggacaatcctgttgtgtagtgtgtgtgaga

SEQ ID NO: 113006 - DNA, 290 bp, Zea Mays
gttggaccgtagaggtggtccaaaccgcatacgggtgaactcaacgaagcgggaccaagtgagcacgtcgcccgtgtcccgctccagagtgtagaaccactctgccgccacaccgtccaaatggagtgatgcctgccacaccttctcatcggatggagtcctcatgcccctgaagtaagtctcacatttattgatccatggcagggggtcggactcaccatcgtagtggggaaaggagacattgggtcttcgatagccaccatcgtcgacgcggtcacgaggagcagatc

SEQ ID NO: 113007 - DNA, 284 bp, Zea Mays
actgggtgggaaagttactggggtttgatttttccgtggaatacaaaaccggcagcagcaatacagtggctgacgctctatcacggcgtgacaccgaggatagtgctattttggctatttttgggcccagatttgagttcatcgaccgacttcgtctagcatatgatgaggaacccgcactggtcgccctcaaggaggaaattgtcagcgatcttcgcatgactccctggtctctcatcgacagtatggtggctttctagggacgcctctacattccgccagac

SEQ ID NO: 113008 - DNA, 711 bp, Zea Mays
ttgaaccaaaggactccttcttcatctgtcctgaggtccagaagttgttctttgcgagctttttccataaatcttgctgtctccgtgtccaggcgttgagccttgcatatgaggtcttctagcattggcttgacttctaggctgtcgttgtttcccagacatgcattcagctaagctgattccttcttccaatcttccaaaaagtttgtccccttcttcccgaaaggtttttggctgagggcgtcgactaccacgttggcctttccggggtgataatggatctcaaggtcataatctttgatgagttccagccatcttctctgacggaggttgaggtctgactgagtgaagatatacttcagactcttgtgatcggtgaagatgtgacatttgttcccaattaggtagtgcctccatattttcagggcatgcactatgctgccaattccaaatcgtgggtgggataattctgctcatgcagcttgagtaagcgtgatgcataagcaatgactttctcattctgcatcagaacacaccctaagccttgccttgaagcatcacagaagatgacgaaatcctgatgtatatctggtagtgtcaaaacgggcgcggttgtgagcttcttctttatgatctggaaactttcctcacacttcggggtccacacaaacttattgtctttcttgaggagctcagtcataagtcttgcta

SEQ ID NO: 113009 - DNA, 696 bp, Zea Mays
ctcgtcgctagtgttttggagccaccactggtgttctggagccgcagcctgtgttctggactcagcagaggagaggaattgcctttatactaatgtagacgggccaaaaaaatagaagcccactagcccactagaaaaccctagtcgcctggacaatttctggtcgatttaccatctagtcggacgactaattgcccctaatcgacggctagtcggacgacctgatactctagtcgagtcgtccggctgatcaaccactaccaggcgacctgcctgactaatcgcgattaatcccgattagtgggacacttgaaaacagtggaaaatttatcaggggaagtggaagggttattttgaaaactgatgcacgatgggagggttgttttggaaaattatcatgactgcttgcacggtttggaccaagtggttggtttgcacctgatacattccctttacacaatatttactaatgatggattttgtagtgcagatgaagactggatgtgttgcacttgtattatgtttaaacataagtgttgatccacctgatgtaattaaaatttccccttgcgcaagattggagtgctggataggtaaacttttagttgactatatatttccaaatttcaaattagttgaaaaaatacagtaaatgaactgcttttcacggtgaaaccatgtctttcttttttatga

SEQ ID NO: 113010 - DNA, 366 bp, Zea Mays
atttggagaatctctcgcacttattgtgttttgcctctttataaagagaataaagtatggtgtcatctgctatatgcaaacaatgtgatgctccattctagttgccctaaaagttccgctcaagtctttctctcaaattgtgctcaaagaaatactgttggatcagaaagatgatttggatatcatgctctgaaatttataaggttcaaaagatctttgttaaggattataacaccggtactctcttgtagtatgatgaagctagtcggaatcagaaatcatccttaactaatcttattttgaaaatccgaatgttgtgttagctctttatcttaatgtcatgcaagcctcttatgcagtctgtct

SEQ ID NO: 113011 - DNA, 929 bp, Zea Mays
gcgcagtatagctacccgctgtatagtcctggcctggtatatatatccagccttgcgtctgctagctagctatagctagccgcctaaatcgtgttcgatctcatcaagtatcagctagcgcagaaagccgttggctcctcttccccctaccttgcaggcgcgcgcgcgatggcacttgcatgttcttttctttctttctttctttcaaaaggaacaagaaaagatcattgagaaagatgcttcatttgcttgacatcaataccggcccattgagttacatatgttctgtctgtctgtcaggatcctaaatgaagtatatattaatacgaaatttaactgaaaaaatagtagtaagagtgatatatctatgtcttttatcaataccaatcccaacgaagaatttgggtttatcgtttcaaattttatccttttttctgtacatggcaataataacattagccagttacttagttcaaaaccaaaacaaacagaatgaaaatatacattctttacccaagcgttgatatatccttacatacagtgggggtgtttggtcaacgctcgtgcatatacaaatattattgcactacctagctagcttagtgtattttttgaagaatagctagcttagtgtatagtcaacgtgcaattgatggatggacagcacgtatgtgtaaaacacatcgatcctccagagtgggtaatcatagtacgtagtacaactcagagacgcatatatatcctactctgctacgatggattatccagggaacaccagcaggaacttttttgtgggccataatttcagctagcaccggccggtacatagcatttagtccttgttcatggcactaccacaagctagcttcttcttcatcctttgacaagtcacttcttattcccatggggaaatagtagatatctagaat

SEQ ID NO: 113012 - DNA, 606 bp, Zea Mays
taagcgtgcagccgtgcacaaaaacagatgaaaaaattttctccccacatagaaccaggatggggagccattctctgatagaaaattctccattgattgatatcaattgataatccaacagatcaaaaacaaaaaaaacaaagcaagaaaagcaccaatctcaaaaacttcagcatcatacttcacattttccaccttcacgtgcaatagcattctattaaaaccttaacaacatttcatgatactatgatagactatctcaaataaaattactcatctcacctcctatgtcaagcttcaatctataaagttatggtcagcaagtcgtgcaaaacattgtaagctgctggagatagcctaaacagtatagtatgcagtgcaaaactgtgttttgcacggccatatgcatattgctataggctaagagcactaaatcaatcaattagcaagaaagggcaaaaatacaacatgtacaaagaacggcgataggctacactgaacttaggtattatgcaatacagctggtgtctgctaactctaatgttgacatatttgtaaaacgccccttgtatcttacaccaaattgtatatttcatctgactaatg

SEQ ID NO: 113013 - DNA, 686 bp, Zea Mays
cccggacaacccagaggctactgaagtttggcgaatgtatttcgatggctcgctgaagctatagggagcaggcgcggggatcctcttcattgcccccagaggtgaacaactcaagtatgcacttcagctattattcccagcatcaaataatgcagcagaatatgaggcactgatccacgggttgaacatcgatgtgtcactaggcgttaagaggttgatggtatatggggattcactagtggtcataagccagataaataaagactgggattgctcgactgattctatggacaagtattgtgctgccgtccgaaaattagaagacaagtttgaagtgttggagttccatcacgtggaaagagaccacaatgcaacagctgatgcgttgtcaaagctgggatccagtcgggcgcaggtcccactcggaatcttcgtccaggaagtgtcacacccaagtatcccctcagatcatacagaagaatgcaacaccttgagccaaccagaatcggaccctaatgactggagagagcctatcattaggtacataaagaatgaagaagaaccggatgataaggctgcagcagaacgcatcgcaagacagtcggcccactacaccctcatagggggcgcactgtacagaaggggtgcgacgggagtcctcatgaagtgcatttcctcgactactg

SEQ ID NO: 113014 - DNA, 947 bp, Zea Mays
gcactaaaattactacaaccaattaacaacgcattcttcacgacaatcactcaacaatttgcgttttaaattagacatcacatgagcattactacttttcatccgcggtcataaacatacacatttagactacaataagcaaatcatcgtgactacgagcttaaccaagtcatctattaattcggctaactagcgcaacaacataggccgctatacatcccacacgtcggcttgcctcttatcgtcacaatccgaaacaacacatatataacaaacacttaacgaaatcgactcctatttaacatgagttggctaatcacagtagaagacctagcgaaccattttagacatcgtaactcaggaacatgggttggagccaattgatcagggtttctcaaccattgctcaacttgaattagttaacacacaagttacctaaatagcacatttttgggggtctatcatagagacattaacacatggcataaaactccataagacctacatttgctactgacaccaacaatacttaccgacctattattcaccacacgaacacagttacacgccgcatactagtttctaacataatcctcacataactcgtaatcccactactcactaacaataaatcacgcacgacaactaccacatcaaccggttaatttatttggacaccgcctgcctagcgtaccactagtaccccgcattttgactcgactcataaacataaaggaagcgatgactacttcggcatgtcaccacctctctattcaagcaaagacaatttctacctgcaacgaccaacattcatattgagcacactttatattttcctgtctcgcattcaaccatggggcggcgtgcactcgagacatttccgtttagtttaacgcaatcactactacaacgcatctcggcacacagaatcatccaccgacttgctc

SEQ ID NO: 113015 - DNA, 561 bp, Zea Mays
ataaaactactaaggatatcatggagggtttatccgaagattctgaagacagtgatagctatgacgtagagagtggggatgaacattctgaggatcggccctggcggccaagtcatactatcttcagaaagtcgactatcaaacagagtcatattgatgctatgaggggaggtactttcgcgacatgtctcttgtgagggttggaggagacaatactgcccctgctccgaaggaaaacgaagttgttatttaccgaagcttcttgaaggcaggccttcggtttccactgagtaaacttgtggtcgaagtattaaagattttccaaatctatcttcatcagattacccctgaagctataatcaggatggggatatttgtctgggctgtaaggagctaggggctggagccgagcgcaaagtgcttctgcagtatgcacgagcttttatacgagacgaaggctactgacaaagaacagtaccataacaacttcggttgttatggatttattgctcgccccaatgcaagccacccagtgccaacattctggaaaagatggcccag

SEQ ID NO: 113016 - DNA, 370 bp, Zea Mays
cacgctacagttcaccctagggtacaccagttcgcactggcggaggccagcgcccagttcagcaatcacctcagaggactccactgcctcgtcaggctacccccactggtaccccgatgaaattctcaggacagagtgcaggcactacttgcttcaagtgtgggaagactggacattatgcaaatgtttgcccacagaggattgctactaccccagttcagaataagcagcagactctaggatctggcaatggatactctattgccaaggttagtcaagtcaacgctgatgctactcctgatggagctgacattgcacttggtatgttttacattaatgctattcctgcaacaatattatttgattctgg

SEQ ID NO: 113017 - DNA, 493 bp, Zea Mays
ggacgtatgaccgagctacgaagacaaacttcaaaatgcatgtttggtaccagtactccatgcatgacttaccagcgtatgggttattctgcgcctggtgtgttcacggtaagttcccatgcccagtttgcaaggaagctctcaggttcatttagttgaaaaagggtggaaaaatattcgtccttcgataaacatcaacaatttctccctcctgaccatccattccgcctagacatcaaaaactttacgaaaggtgtcgtagtgacagaccgcccacctgcaacgatgactggtgccgaaattcgtcaatagatagatgggctcgtggccaatacagaaggtggttttgtgggatttggtgagcagcatatgtggacacataagtctggcttgactcggctcccctattttgacgacctgctccttccacacaacattgacgtgatgcacactgaaaagaatgttgccgaggcattgtgggcaacaattatgg

SEQ ID NO: 113018 - DNA, 382 bp, Zea Mays
aggcagaggaggaaaaggagccatgatggacgcttgagcgctttagataggccgctagctagagtaaagaaaaggttcatcatgcatatgggcttttagctttcacgctagccatacaggctctaagcatgtcgcgaaagcaggcggcacgcagcgtggaaatggaatcgatggatggcgccggccgccgatctacacacggaacgaatagagcagcgggagtgcaggaccaccggccaccgctgagggcccaaccgtctggtctggtgatacctatctgcagacggcagtgggatttggctggtctttggagctctgctcatccgattccacgacgtaactgcttcagcaagtgaacggtgctcgatcgatcgagagcagg

SEQ ID NO: 113019 - DNA, 1169 bp, Zea Mays
ctcaaatatcatttatactatcacaaccccatcagagtctcttctcaaggagctacagactgtcgaggttagatctacggaatttatctttaaatttgcacgattcaatatgcatatattaattagctgcttgttaccaagtttatgttagattttagaagattgctgatcgtggctttgtttggaggatatatttgtgtgaatggaaataaagcactcagcccttccattgaagagggtctagcaaactgttcgtaccttgctacgattttcatttatgaatataatatataaaacataaagacagatgtgttccgttggttaagtagatatgaatgtagatttgaagtcaacaaccatggtttaagtctcgatcgtgaaaaccgtggatctgggaaaaatgttgatttcatatagtagagatttgttatgataacttttgtatttaagacaaacttggtaacaaagtacataggatccaaaagttcaatccaaataccccaatatgcccttagttcacttcgtttttagtcctgtaagatcctgacatgctatacgctttgttttttcataacattgcaggaaatgaagcagcaatgcgacatgaaaaggttcaaatacaactcaagtcaacctttttttctcatttatgattaattgatactttgttttactaatatttctttttcctttcatcacagagagacatatgaagctatgagggcatcctatacacaaaaaggaaggtcaaggcattccaaaactgaaacatactctgcagaacaactgcaaagcgctctcgctgagtaccaagaagacgcagcgctgttcatatttcgcttaaagtcattgaggcaagggcaattccatagccttttaacacaggcttctcggcatcatgccgctcaggtaggttatttcttcctgcataacgctgtcagttggcctagcgattgggtgaattaatacataacctaactgtcacactgtcctttgaactgtagttaagctttttcaggagagggttgaactgtcttgaggcactcgaacctcatgtaaaggcaatagctgagaaacagcacatcgactaccagttcagtggtcttgaggatgatgcatctgacaacgatgattacagctcctaccaggatgattgcagtgacgatgga

SEQ ID NO: 113020 - DNA, 381 bp, Zea Mays
caagcgggtcactaagctacttgggttcgacatatgtttctgatccatgcagaggtacttacatttttcactgaaaattagcttaggcgttacggtcgtcttgttgtttgtgaccttgcacccttttcttcttttttgtagggtctttacttaatgagaaccccaactcatttaccattgtgataggaccaaaattcacatccaaactttgcactacatctattgcatgtttgcttttgtgtcccgttccgatatgctgcatgcttagagtttcagacacgatgcacaagtaatgcactggcacacagagttgcaattgcaggcagctgcgcttgcactacacatgcgcaaacaattccaacagaatatatagtagtaccc

SEQ ID NO: 113021 - DNA, 515 bp, Zea Mays
aggagacatatcggtcggtattgttgaaccgagatcgcctcccgactcttaggaagcaaaatgatagtcccaaagttgagactatacaaagggagattccctgtgtggaactcacgaaacaaagccataagatcatctttaataacatcccaacagatttgataaaattctgccgggaatccatcaggacctggagccttcttatgttccatactgaaaaccaccgcttttacttcatcttctgaaaatgactgagtgagcttctcgttctcatcttgagtaacttgtattatatcatctctaagatcctcatccggaataaaagacgtgctttctggggggccaaagagatttttataataaccagttatatgactttttaattctccctcgtcgtatacatgccggaaagtaagtaagaagattcataaaagcaaaagaaagggtatgaacagcgtcaaggttcgggtacatgggcaggcatagttcctctgaaattgatgacgttataaaga

SEQ ID NO: 113022 - DNA, 378 bp, Zea Mays
aatatgtcatgtggctcttggatctagttatccagtgacatggtcatcatgctggtctcgccttgcatgtgcatggttatttgacgtctagataggtgcaggcctctctttttgcttgcagctctattgttggatgaaatgcttattagatccaagggtaaacaaatgattgcataccttattctcatcttgctcctacagcatgcatttgcatctggtttgtcattgccaccattagttacactcataacaacatgtaattgagtttctataatagacatatcatatgtgtggttgcgccaatgggttggtatgctactggaaatatcttgatttgcttgtcttgataaattttaaacaatttttgatgaggctagg

SEQ ID NO: 113023 - DNA, 853 bp, Zea Mays
ggcaaatagaagataaatttgaagtcttggagttccaccatgtagaaagggactataacatagcaacaaatgcattgtcgaaactcggttccagtagagcccaagctcctctagatgtatttgtgtaggaagtgagtcaccctagcatacaacagaacccgacagaagagtgcaacgcaacagaggacacattgccccttacatagccagacccgaatgactggaggattccacttatgaggtatatcaagaatgaggaagagccgaatgacaaagcagatgttgagcgcctcaccccatagtcacctcactacacccttattgggagcattctatacaagcgcgggaccacttgtgttttcatgaggtgcattgacacatcaagggcaaacatttaatggaagagatacactcgagagactatgggtccacatagcatccaagacattagtgggaaaagctttgagagcagaattctactgaccaaccaccaagaaggacgtcatcgacttggttcagggatgcaaagcatgttagtttttggctaatcaacaacatttgtcggcacaacaaatatagaccattccagtttcctagaccttcacatgctagggttggatatgatcgggccattaaaacaagcacagggaggatacatatatgtgctgacagccattgataagttcactaaatggattgaatacaaaccaatagcctcactaacaacatccaaagcgacatagttcattcaggagattatcttcatgtttagggtaccgaacaatatctttaccgaccttggatccaacttcacgggatcagagttctttgagttctatgagcaaaatgcatc

SEQ ID NO: 113024 - DNA, 298 bp, Zea Mays
ggacacggcggccggacggaacagtgcccatggcttaatagcggcgaagatctttctaccccgagtcgttatctgggcctaagtgagcacaaatcacctcatcagcgtgaatccacgcgtggggtcgccggcagccggttcactgaaccaacagatccttttggtcactataccatcaagaacttcttcagtcggtctaacagatcatgtttggggcgaatttcctccagattttgtatggtgactagatcaatgctctgcatcaaagttgtagcctaacaaaccagctttaactttg

SEQ ID NO: 113025 - DNA, 336 bp, Zea Mays
caaccttcaggatgatacccatctccctatagttaaacaacattatcctcagctcttcaccctcaaaaagatttcgcaactccccctcacctacgctcaccccagccggcgaggccaacaattcccgcttgccagccctgtccacacgaagacgaccaccctcaacctcactcaacctacgcttcgccaccgccctttgccgcctacgcccagcactcggaccgggaacaacatccatcacacgcggagaagtctccaccgcagccacatccaatgccgcgaaataatccaaatcctcatccgaagactcctccgtccacaccagcgaactcccag

SEQ ID NO: 113026 - DNA, 283 bp, Zea Mays
gaccaaatctctagtacaaatgtaactgcacacgacattacacgctaccaggcaagcttgggcttcttctgtcttcacaatagttggccttttatctcgaagcgatatctgataggccattgaattatacccttaatgtcctccctcccgtccaagtcatttttacatagaaccattgtttcatctatgagcttggccatttctatcgaaaagttgggacaaggcgcctagcatccgaccggtatacgaaggtataacaaccaaagttgttatgatactgcct

SEQ ID NO: 113027 - DNA, 435 bp, Zea Mays
cgggtatcaggcggatatcgggtacccgtcgggtatagcagcttggtgcattctccctaaatgaagtctagtgcagttctgagcgtcgcacatcgccatgatcagcggaggcacataatttgcttttccgagtagtgatctgacactttagagataatgcatgacccaagaaaccccatttatactcgcgccgacgtgcctttttgatttccgagccctaacttcgctttttccccttagccgctcctctgcttccctgaaatcctgagcccgctcatcccgcccgagaaattgcgatggctcccaagaggaagaggcaaagcactgttgctagaatcatcccgcccatcgaccccaatagccagtttctgttttctggtaaccacatgtctattatctccgaatatgaccttctccaccttgttaagattgggg

SEQ ID NO: 113028 - DNA, 740 bp, Zea Mays
cttagctacctcctctcaccattatcaaaataaatgttgattcaagattcttcagacacaaccacaactgaagcctagaaagagatccaaggtgtctttgtctcacaaaaaagtggaagagccgtcaatgtacgtgtcaggtatcgtaattaggggtatccagaatatgcatctaaaacccgcttaacacctaactacccaaaaaagatcataagacacatcccccaaggtcaagaaaggttgagccacgattcactcgagaccccgctcgacgatcgctcaaaaccccgcctcatccgggcctgtccttaggcaaaggcagcgctcgaggaaatcctcgtcccgcccgaggtcccctcttcacggaatgacaatttccacctcgcccgagcccgtctcagataggaggacaaccccgagcccgacctcagtcaaaggtgataggattcgtggagatatgggcatttaatgcgaatacctaccccacgtgacgccgcagacggacagggagcgacgggaccgtggtcccatccactttcaccaactatgatggcacacgagttggaataacgaccactgctcccccatgacgtctgttgtactcaagcaactctgaacgggacatgcgtatgttagggcatggtctcaccctcgggagagaattctgccttgcccgaagtcggcctcagcctcgaagaaaactctgcctcacccgagatcggcttcggccaactgctccg

SEQ ID NO: 113029 - DNA, 572 bp, Zea Mays
ccgcctctcggccttgtgccacgtggctctgcctttccaccgcgtcgccgtgactctctatggccgtctaatcgtcgccggtgaggtcaccacgacggtagacacgagttcatgcgtgccagtaactccctgcccctccaaccgccgcgcgtcgccgttaaaattcccggccgccgctcttgcttcctataaattgagccctccaccagccccgcaaggtcatcagccacccagccaccgagaatcgctagcaatcgtgcatcagtgagcttgaatttcggttttcccccaattcgggtttccgccaccgtgaaaccaacctcaccgcgaccagccccgttccggtccgttcatcctcccctctccctcgtttgagctttctcataactctatgatgctcgccgacccacgcaattgagctagaaaccctctggtcgccgggaacacgggtgtctcgccgcaacactctcggtcaccgtggccagagccaaccaggcacccaattgcgaaattaggttaggggaattgatcggggaaggtccaatttggcgttagttgctcggggacaccag

SEQ ID NO: 113030 - DNA, 299 bp, Zea Mays
ccgcccagagcttctcctgcgcgccaagctgccaatggccggacgggattcttgctcccaggcgaagcactatctctcccacaacctagaacactcgatagctcctcacggattagagctcacacagagagaatttcgcattgcggaaggaggaagatgaacagtagcacatgaggcaatttgtgcccaaacgctcggcgacgaatgcctctcttcaattccttgctgttagtgttaggtggctcaaaggttacaagggagttttatagctcgcccgacgtgcccacgtcccacgcgct

SEQ ID NO: 113031 - DNA, 459 bp, Zea Mays
cggaggtaacagaggcaaaagtgttgcttgccgaggtttgcttgttgaaagacagaggtttgactgctgaagatgtggtcgctgatttcgtcttcaagaatattcagcctttgaaggacagggcatacccagcttatctgtacagtggtatcaatgactctacccgggtcacaaagaagagaattcccactgaagatttggtgagctgactggatatgattctgaggggtagagtgtcaaattttggtgctcctgttgcctattctgcgtggaatctgccagcttataagtcattttctgaatttgtgtcctaccctcctgctagtgatggtggtctgggtcttagagtgcaaccctcccccgaggacattgaagctctgattgcccctcttcggaatcttctcaatgatgaaaagcaaactcatttcgagatgccaactagcacaaacgatgcagaga

SEQ ID NO: 113032 - DNA, 450 bp, Zea Mays
ttctcttttcttctcgtctgccttaacgtaaaaccgttcactcatccaaccagtgggccacttggtctggtagcctatcaagggggcattcatattctttctgtatgcaaagttatagcatctaaaatttttgtgcagaccgtcagcccttgcctttgtctggtaatgaagctcatgaacccggcagaacccttcggcgttagcactctttccttggcttcgcagagcccagatgtaaacgttgagcctgacaatagtgtttgaggtcaactgatggagatagatctcaaacttctttaaaacttcacctatcatctcgtaaagggggaaccaaagccctgccttgaagaagcttttgaataccacaacttcatcttccttcggctctagaattatttcttctccagcaaagcgaactaatttaccatcattctctccaaaataccctag

SEQ ID NO: 113033 - DNA, 764 bp, Zea Mays
cccaacataaggcactaagttttgtatgaagaaaactatggcgtgggggaaaaggtgactagaaggaaatcagcaacacgacactaatgaaacacaaactgaacaaaacaaaatactgaaagagaatgcacgatacatggtttgggtagggaatttttttgggtgcggtttatgtggactataggatggtgaacaactctcaaactaaggaataaaactcaccgagcaacttaaaaaatttgataccacttgatagaactggaatgccccgatctttcggtaaggtggataatttcgatttggtggtggagatgactctcacgatccgactatgaatgaacaggtcatggcgccttagcaatggcagaaccaactcgaaatagttattgaccttgctggtggcaaaatcaacctgaacacgaagttctattcctgcaagcaatcgaagaaacaagcaagaacaagatgtaggcaaaactgaatatcaatcactcacgagttgggctttactaggctgtccataggtagccattaagcacaactgaagtactggaagtttgcacaatggctaaaactatcaaagaaaaacccacccaaggagggggcataacccctagctaaatagggaggaggtggtgggcatccatccttcccacaagataggaaataggcgcccaatcagccgcacaatctcctacccacaaggcagggaataggcgcccaatcagccacacaatctcctgcccacaaggcagggaataggc

SEQ ID NO: 113034 - DNA, 424 bp, Zea Mays
aggcggtgctgaggttgatgatctagctgcgaaggctagtgattctgccaacagggtgggcataggcagaagttcctccaagttgtcctccaagatgactccacgctccactcgaatgcgagggagatccacaggagtttcctcaactaccactgggtagacaggaacttgccgtggcggagggatgatgttggtgttgatccgagtggtttgaatggtacggaccatctataagagaaaatgtcaacttagttgatgtttaaagaggtaaggttaatggaataatttcgtaaggacaaaattagcatgttttgaacatactaggttttccatttctaactaatcttacgacctagagtcaacattgctttgataccacttctgtcacacccggttctgggggcaaaaccgaatgcatagcata

SEQ ID NO: 113035 - DNA, 342 bp, Zea Mays
ctgtaatgcagtatctcaacaagttgaatcatttgtcccagtatgccaccgaccaagtgaatactgatctgaagaaaaagaattgttttatgaggggacttaatgacaggcttcaacggaaaatggcaacatgtctggatcttacctacagtagggttgtcagtacagcactggcagtagaagccaaaaatgccgggcatggaaaatcaaaggggtttggaggtgaaaggtcaaatcaagggcgtgagaagagaaccaggttggtgatccgaccttttaatcaaaattgttcttcgccttgcccactttcctatcccttcaagcagcctgttttcattcgtc

SEQ ID NO: 113036 - DNA, 413 bp, Zea Mays
ttcgtttgtcttggcagatgaggaggtcccttcgccaagttcaggtatcacagccggttcgatgtaacacggccggtgggtaagaaccttcatcttcttgcccgcagccttcggcacaggctcgtctggggtggccgaagcagcagctttcctctttttccctgtcctcgcagcggatagcggtaattggggtaaacaaagcgaatggcatcaaaaactctattcaatctcttcttccccgacttcctaaggctgtggataatgcattatcttctgccttggaatatgatccaagcagttcatcacttgtagctttgatacatttcagccaatcgtcatttggttcatcgaacttatccccaaatctgaatgtatatttcagccggaccagatcaccttcgttagacttagtg

SEQ ID NO: 113037 - DNA, 732 bp, Zea Mays
tcaatgtctcttgcatcaaaggtgagtgggacatggggccacttcgctggactactaggccagtgatagagacgtggttcacccttcggtaatgattctttttccgttgcttgttttttgaaatctaaactggaccctccagtaatcatgtggatgaccccctgaatggtgggttggcgaagtgctctttgtgatttggtcgtggggggtacttgatagggttgttggtttggttgttgtagaggtggtgggggtcggtggaagggctaatctctcattgcttgggagttggggtgttgatgggggtagttggagggatgttggttgtagtttttgtggtaatgcgggaagggttggtgattgtcttcgtatcgttggaggtattgtggatggtacctgtgggctatagccctctcattgtttgcaggggccattccagccatatggtcattagcttcctttgttactaggcaatctctggtcgaatgccctacgtcttcgccatggaaaatgtagtagagctttctttgctgcagagggcctctcccacagcctctccccccttgctgcactaccaccgtgggcttggtgtgaggggtagtcttgacgttgatgggggccttcgcctggttgctgttgattggctacgttgtgaacttgaagttgttgttggccttgctcttggagagggtgctcttgttgtgaacctctagtccatgacttgctagactg

SEQ ID NO: 113038 - DNA, 847 bp, Zea Mays
agcacattagttccactaaggattcttggtgaagctagatctaaggtgtccgaaaaacgggcagggtatgaatagggttggtagcatatgtacacaacaaaatgacacataagcataagttgcttacctatgtcttggttatggtgaagctaaatagtaactccaagatccgatagtcctagaatggatccttcaacttgtgtagcttgcggtcatgtactattatagagagaatgaccctaagactctaacaaaggtcacaaccaccaccaagattatgcaagtttaagcgaccaaggattatgatggaacaagcaagattgtaaagggaaaagcataggacgacggagctatactagatggactcaagcactaacactaatggtggccaaccattcaagggtccactagggaaggtcttcactcatggaaaattctaatgtggtttggttggttgtgaaacacaatgctaggtgaaacaatggctatgagggcttgaactacgatagagaaattggcatgcgttctctctatgaatgatagcaagaagaatggaggaagaagacaagttctaggaggaaataatggtgtggtacaattacataactaaagcagtggggtgtcatacacgacgacaacacatgatatgaagcatttccttgtgcacatgggcacaacatggcaaagaggaaggatatgtgacaacatgtggcactaaagttccgagtatgtcgagcatctagttgggtgaacaactaacctagttaaatgaccaaatgattgaatcatttttattatggttccagacttcacaacttctctattcttctcatgatcaagaataaaa

SEQ ID NO: 113039 - DNA, 354 bp, Zea Mays
cggcgtcaaagataccacctattgagagcattggtgttgccgaagctgccgccaccgaagctgaaggtgccgaagctaaaaccgttgaaaatgtgaatctagaagccacacttggtgaaattgataccatgcttctggaagcggccgcggaagaagctaccgtagtcactggaaaaggaaagggtaaagccgaagatacttcggaagaagaagaattcaattttcaagatatacttggtcaagaattatcagaagctgaaaaaggagaactgaaggaatatgctatatcttgtggatacaaaccgggggctctgctttttggcgaagttaacgaagggaggttaggatgccttc

SEQ ID NO: 113040 - DNA, 374 bp, Zea Mays
gttttctcctcatcctcttttgccaagctgatctgatggtatccagaatagcagtctaggaaggacaacatagaacatccagcggtcgaatcaaccacctgatctattctatggagcccgaagggatccttcggacagtgtttgatgagatcggtatagtcgacgcacatgcgccaatccactttattcttttacaagaacatgatttgccagccactcacgatgcatcactactctaatgaaccctactgccactaagcgtgctaattcggcgcgaatagcttctcttttgtcaggcgtgaaacgatgcagtttctgtcgaatcggcctttcttgaggatagaccttcaatttgtgatcgaccagttctcttg

SEQ ID NO: 113041 - DNA, 459 bp, Zea Mays
ctcttgtcatggtagaggaggtttagatatggagcctgtggggatgatgatgctctaaggaaatgtaacgtctctgcaggtgaccatgtgacctcatctaaaactaggtagtcaaggatagagtttgtgttggcttaaatccattgcaataatcttgtaaataactaagtaggtagtactatagatccatcatagttggtgtacatctagtcctgtgtgagttagaatcatgtgtggttcaccgcaaagcctagatgtgtttcggtggagcgccacgacgtgaacatcgtgagggaccatggcatgtatgagaggatagcatgtactttttttgatagatacaatttggaagaatgattatctactcacatcacatgcatgcacttattttgagtggatagtgcataccatgcagtttacttgtctacacattatcttgttggactgattacgctggat

SEQ ID NO: 113042 - DNA, 380 bp, Zea Mays
cctctgatacgatgaacggtccttcccatggtggtgacagcttgtgtcgtccttcccccactagaattcggcggaggaccaagtctcccactacaaaggatcggtgtcgcacaactttgtcgtggtagcacctcaaggtctgctggtacttggccgattgaattactgtgttcaatcgttcttcttccagcacatcaatgtcttccagcctggttgcttctgcctcagctatgttttcgaaagtcaacttaggcgccccgaagatcagatcggcaggcagcactacttccgacccataaaccatgaagaacggggtatttccatgcagagctcgactgggttgagttcgcaggctccagaccacgtacaacagttctttg

SEQ ID NO: 113043 - DNA, 571 bp, Zea Mays
ttggctatggccattgattttcctccttgggctttggaggcagttgataagattagaaagggttttctttgaaaaggtcacacggaggtcaagggaggacactgtctggttgcctgggggagggtgtgcagacccctccatatgggaggtttgggaattttctagtttgaaggaattatgttgggctctccatatgagatagttgtggctacataaaactaatttaggaaagccttgggcaaacctccctattcaagttcctaaaaaggcaggatctttcttctccattgttttggtctcataagtgggaaatggagcacacactctgttctggacaaataaatggctcttgggtcagaatgtgtgcaatctggcgcctaggttattcaccataattcctaaaaggattgctaataggagaactattcttgaggctctttccaacagaaagtggatatctgatgtaaagggtgccttgtctgtgggagttatagttgaatacttgaacctttgggagattctatcagaaatagtgttgcaacctgaagtaaaagataagcatgtattcagc

SEQ ID NO: 113044 - DNA, 497 bp, Zea Mays
caaaaggttacacataagtgatggtatggccagaacattatttcaaatgaaatttgattatggcgtgataagaatgaaagtacctcatgaaacaaggatactatttgccattgcctattgtgatgaagtaatgggtatggggaaggcaaaagagtagtataccatatttttataattgtgggaggccggactagtatctatctcccaaggtttaggagtcttgagggacgtgttgttaagggccaaaattagtcactcttgaccccaaaccaacacttgttattgttgttacttggaagcctacgtcatggagatgtaggcagactcttatgtcaatgtgggcctagagacacagacccaacaagctgttggagagcacctaggtgtgtgcaaagtagatgtactcacgtggatggatgtgctagccaagggttggtgtagtgcacatgcacaacaaaaatatttgttgacaataacaacacgtaaggaaagattgc

SEQ ID NO: 113045 - DNA, 718 bp, Zea Mays
gcacctgccactccactgacactcagcacggcgatgcgcatcaccacaacaaaaacacaccagccccagcccgggcttaggaacagcctgatacctctgagtagttcctcccgaactacccgattcagaagatttgccatggtaggggtggtggcgctggtgctgagacttgcccctcttgtgggctggacctctagtgttgccccttctcgcgtcctggccatgaggctgatcaacacccgaagacttctatgactccatggtgtactggtgttgcatctccacacccaatgcgtgctccactgtagtatagaaatccaccaacggaaaggctcccaaggcatgcctgatagaaggttttaggccctgacggaactggcacgccttctccatctcattgtaagccacatgaggaacaaggcggaccatcttgttgaagcccacttcatactctgtgatagacttcttctcttgcttgtaggattgcaaatcaatcttcattttctctaggaaggtgaccgggtagaacctcctctcaaactgcctgatgaaaacatcccaggataggactcctggtgaagaagagtgagctgcctgcacgcccctccactagatttgagcctctcccttgagcagctgtatgccaaagcgaacacgatcaccatacacaatctcaaagacattcatattatcctccacgtatgttagccaatccgcc

SEQ ID NO: 113046 - DNA, 357 bp, Zea Mays
ctcagtagaggcaatgatgccgcccatgaggattaattcggtcggtggtaaagtgcaagcagataagatatgctcaaatataagggtggaaataagggggatagggttccccagcgacctaatagtaatagacacccctgggggtagatgtcatcctaggaatgaattggttaatgaagtatgaagcgaatgttagctgtgacaagaggaccataacattgaagtccccgtccggagaggaggtagtggctgagctaaggatgcctaaaacagcgaagggagattgtcaccaaatttcggttgatagtaaggaggccaacccgcttgaggctatcagggttgtgtcggacttttcag

SEQ ID NO: 113047 - DNA, 588 bp, Zea Mays
tttgttttcaaattagggctttggatgttgtgggcacattaatacattattattgatacttttatttttatatccacaaatgcacaatcaaataaacttcagcatgatgcacaagttatttatgtgttctttgttttaattatcaaattttgaactagggttgattacatgtaatgataagtagagatcacaaactattgagattatctcaattctcattattgctcttttgagtattacaaatcctaccccccttaacaaaaatctcgtcctcgagatttaggaaggtctagggaaaaggtggggaaaatttatgcgcagctcttcttctctttcccaagttgcttcatcttcaccgtggtgactccattgcactttgcacatctttataaccttattccttgtgactcgagtcagtgtatcaagaatcttgatggggtactcagcataagttagatcttcttgaacactaagatcctccattggtaactgttctccaggcaccctgagacatttcttcagctgagatacatgaaatacatcatgaacatccgcaagatgatccggtaactccaattggtatgcaac

SEQ ID NO: 113048 - DNA, 590 bp, Zea Mays
cggaggtggatttggggtagcctccccgttgcttttagcggcctcgtcgtcaggtgtgggagtccatacgtcgaccagcctcatcgaaggagggggctcaaaaaggtctaactccccacccagcgcgcgtcctgcaacgtgagatggtccggcttccgccacaacaaagtccgcaggtgtactcgggtgtaattgcgaatacaagacatgaacttcctcatgtaatgtattgcaatagacctgcagattgtcgacagttgagctaagttccttaattcgggcttgagccctagcttccttagcacaaaccaacaaacgagactggactgcccagtcgagcgccaagtcccgatcaacaagctgatcccgtaggtggcggatgtcccttcgtaattcattgattctatctccgtcggcgacccaagcatcggtcctgtgttgcaactccgcttgaagttgactcactcgggcttcaaggtctccgatggggtcattacttccactgctgctgctttcgtgtcggggagccaattgatgccgaggcaccccaattggtcccgtagatttgcgtgccgttagccttgtgcgtg

SEQ ID NO: 113049 - DNA, 317 bp, Zea Mays
ggccaatattagatttctagtgcgatgaagcggtacgcaattggaatcgttggatcagaactcaacaacagggattttattaccgtagatctgaatctacctgtcggatctagatcaacggtcctaaccaaatgcggcgaaggggtatcatagtcttctaatctgagccgtcccaagggaatcgaacgttagatgggtcatctccttcatccgaccgctaccgacggcggtgtcgccccggcggtagaaatcccgtcgccgaactctccctgcccggtgattccgagcaccattcaccgattctactagtgcgaaat

SEQ ID NO: 113050 - DNA, 404 bp, Zea Mays
cggtcggaaactatggcagcaggaagcccatgaagcttatagatatgttggaagaatacttgtgcaattgtgacagctatgaagggatgtgtcaacggcacaaaatgagcatacgtagtgaagaggtccactattaccagaatgcaatcaaagcgcttggatttgggcagtccatcgatgaaatccatagagattgtattccaagcagcagttggtatgaccagtgctgcagaagacctggagcacgagttcggtctggcttggcttgttggcacacttgacaagaatgaatctagttttgaacaaaagattacatcccacgccaggcgaagacctgcttcagtttccagtaggttactggaatgcccgaatggcctcccaatggactttggtgaaaaacctcg

SEQ ID NO: 113051 - DNA, 1021 bp, Zea Mays
ccaatttttcaggaaattcaagaagtatctaatatacttgaagggggtgtggacaatgttcaaatccctatacaaatacattcctttgaagaggtaataactttaacaactatgttgatttgtggttgtacatacaaatgatttattggtttgtgttattggcttatgtttgagcttaaaaatgtgttagcgggtacaggttaatttgtagaatcacacggatatgaatgagagtggtggccatgaacaaaatgatcatgccagaaaggtaataatggtattagagtgaatgtgggactgcataatattatgtgttgaaaaaactgtacttttgaattgcagaaactggattttgcagtcaatggtataagcttggcaagaccaaataactcaaaacccaagggaagaacaatcaaggggagtgaacaaaaggttattaaattgggcgcaaaaggtacaaagaaaatgaacaggaaatgccagaagtgtggtattgccgatggtcacaacagtaggacatgtttgtcattggaggagaatagagcatggttggctagccttgctggtcgtaagagaggtcgacctcctggatctatgaacaaggttggaagtaacgctcctcattggaatgagacaacaacatcaaaaaacatgcaattgatatcaacaacagtgagtcacccagtgattagtatgttgtatgtgatacaaacatattttttcagtaaacattgcatgtgtcacacatgatttatatacagttgattgttgaagtctctaaaatgtagcgtatattctgtactaatgttgcatatttggtactaataaaacatcgtatacaacctgatatgataaccgtataatggatgaactatatgaccagaaatgtgatgaatgagcaatatgcattgtggataacaaataacaaagagtgtgaaaatggtcggcataccaataagaatatagacagattaaccaatagtataacattaaatgaattggtcgtaataataagaaatgt

SEQ ID NO: 113052 - DNA, 548 bp, Zea Mays
tgactagcctattgcagtcaaaggagaagggatttgaacaaagctcgggagaaaaggaaactacttcggctaccggggggaaatgctgggggttagaagaaatgacgaatgatggacgtaatgcaagccaaccaaaacactccgtcctcggcttcggcagaaaaaattgttgtgcctgctaatgccaaagatattgctgaagctaaagctaatgaagccagacctaaagctaagaacctagggaccacaatgtcagagattgacagacttatatctgatatggctcccgagaaagacatagccgaagtatccactgataaggcttcagaggacatagagttggacctacgacacctaggcggccaagaactgtctgatgaagatatttctgaattgaaagaatttgcccttgctagcggatacaagcccggatcagtggtatttgacggtgtggacgaagagattttggagtgtattcctgaccgggccggagcaaagattgttaatactttatcaaagactataggattttcgaagcttgagtggga

SEQ ID NO: 113053 - DNA, 527 bp, Zea Mays
atcaatagagggggcaatttttctttgcgaagcatgaaaataagggaaggtgttttttcgctgaaggctcaaaaatggtatgtacacaaatttcatgcatcacaaacaaatatattacattaatatacatataaatatttgatgtttgacccatatacaaatattacatttcctagtatacaagaacttagtcttccttcagtatcctctcggtggcttcatgtaaaagtttgtcaacgacttcgtcaacaacttcgttagcaatcttcattacatctaaagtctctttcattattggatccgcctaaggattgtatggctccggtggtggcgaaaggccagctgtagtaaaaagcataatgatgaattttcgaaaatataaacaaacaacgagacaaaaagtttttaaaggatacctataatcaatgcgcattcagtagcttctttagcctcctttgcctccacttgtgcatcgtgagattctttctcactatgctttatagcttcatcggccatctcacggccac

SEQ ID NO: 113054 - DNA, 639 bp, Zea Mays
gtccaagactaacttgatcatatacaactacctgaccttgtgcaactaccttaaccgtcagatgggtgcataacccctctattttaacctgacagagattctgacgtacctacaccatataatccatactatctcaaaagattctaacataccctaataatatttattctatcctaatagatctatctaacctaaactaaattactctagtcatatccaatcctatctaatctattcaaacctaatgtgagtcactcaaatatgattagctaatgctgaggaaatacattggaccgtgcccctataaacaagtttgagatcttagatcaactcgacccaacccaacaacttgacctacaaaacaggttacataactaatcctatctagcatatagctacctactaaaccctctatccatctgttacctacagatctatcttaacctcttgtcctaaacccggaaggagacaccaaagctcaagaaggaagagatcaatttcattaaagaagaataggaatcaagatccacaatcttagagggagtctttccttaccctacccttcttgcccaaacctatctatgctttaaaggcatcttctatcctacataataaagtggacatacatatatacaccca

SEQ ID NO: 113055 - DNA, 406 bp, Zea Mays
ccagaacagagcccacgtgcaagggagcagggagcgcaaggagccatgggccatggccgggatagggagaggtcaccgtggggaaagaagaggaagaggaggctcaccttggtgacgagaagacgatggcgcggacggtgagccgtccatggcgagcgcagcagagtgattcggttttgaagggtcgtgggaagatgggcgatggggaaccagagaaaatgggaggaagcagttaaggagaagatgaacaggacgacgtgggagaatttgcatgcgagcggacccacatactgcagttttccaattgaaaaacaaacgcacggcgtggagatcgtacggggcacatgcatgcgatttcttcattcttcacctccttcctgtaactgcacatgggtgcatgcaggca

SEQ ID NO: 113056 - DNA, 668 bp, Zea Mays
aacaaacatgtctttacctcccagataggccatgagaaaacacacaagcccaacataacacgaaaccacacgcagagcggtgctcccagatagtaccacctcactaggtgaaggaggaagacaatacggttggcaagagaaggttccattttgaatccttctggaccagaatggagggttttcaggatgtggtgctggaggcttggaattctgtgcatccggccagatgtccctttatcaccctggataggaaactcaaggagacagccaagagatcacgcacctggagtgataagcaggtagggcatattgtctctcagctttgtctggcaaagaagttgctgcataaacttgaaatcgctcaagatcacatgaccctcgctccggccgaaagctggcttaaaaataggctcaagaaacagtccctgttgttggcctccttcaagcgaacgatggcaagattaagatcaagaataacaaggattaaggatggggatgcaaacactaaatatttccatatgcatgctagatatcggaaaaggaaaaatctggtgaccttgctgaaagatggtgataatattgttactagccaggctgacaaagctaatctagtggaccagttctattccaatcttattggtcagtctgtgttcagggaaagcaccatt

SEQ ID NO: 113057 - DNA, 1175 bp, Zea Mays
gggatatgtgggtgggcgaggagaagaacagtttgggttgaaaggtcggattaccaaccttgccctctttttaggccccagcgttgattcttcacccgcatatctttttgactttccttgtcccgcatttttggcttcaactgacagtgctgtgctgacagccctgttatatgtgagatccagacatgtagccattttgcgctggagtctgtcatttaatcccctcatgatgcaatttttctttttcaagtttgtgtccacttgatcaatggcgtattgggagaggtgattaaatttgttgagatactgcatcatagaatctccccttgcttcagacgtatgagttcttccagcctcatctgtagcactccttgcggaacataatgttccctaaatgccagtttgaactcttcccatgtgacttgatgtcccacaggttgaatggcggaaaagtttggccaccaggtgctggcagggcctctcaactgttgggcggcaaataggggctctgtgtctcagtgcatcggattagcccgaacttttgttccatcacccgcacccattcatcagcttccaggggttcctccgccttgacaaagagcggtggacgggtctcagagaactctagatatgtggtgtctcgtggtccttgaggttgacctcttccttcgtgttgctaaaattgatttcccgccatttcccgcaagaagtgcgtgttgtcggcggtagcgttgactaaggcagcgatagcttcagccagtgtagcaggtacaggtggtgagttgggagtgtcctccccgccgcgggaagttcccgccccatcatgagcatgagttcgcgatgacatctaaggacgaaaaatatcctgaattattacatgccaaacacacaccatctttgttacattgctgaactgtaataattatacatacttagtgtacaacttggcttccttatttattttacataaggacattacttaaactatactactctaatcctctttgtccttagctgctccattgctcgcttcagaagaccattcatctgcaaggttcatggaaggaggggctccaaaaaggtccaactccccatcaagtcctccattagctgttccagatggtccggctcccgttgttacaacttctggtggcacgctcggatgcagacggtca

SEQ ID NO: 113058 - DNA, 895 bp, Zea Mays
catgaacaagcaccaaagttagatgcattgaaatttaatttacaacaagcaatacgtaaactgaaacattgttgggagtctaagacgatgatgcctataagcattgagatggaaaagtgaataggagtatcagtgctaaaggatcctaaaaattgtagaggtctgggaaagagaatttccaattacacggtgaacctgtcatatttaacatgtgatggactttaaaagttgtaaataaatttattattctgatccactaaaattgtacggatggaacaaatggtaactccctttgctcacttttaaattgagattctgccattgtgttaaaaaacaatagatatggattcatgatttgaaccgtacacgtgcagcaaaatgcttcacgaacggcggccagaaaaaagaaaacgaaaaaatagctcgtcgcaccaatctcccataccaatctcgaccgcagatgctctccatggaagcctctcctcgtttccttgatggaaggtgatttatttctcgatttgggccgattggagcaatcgttggctggatttaggggcaatctgttggccggattgatttatcgattgtgctaccgagtagcatgcgcttgattgtgctgccgaggagcatgcgtgcatacatggtgaggagttggggcacaatctgttgcccggatcgacacgtagctgccgaggagcatgcacgcatggagtatgctgccgagtagccgcggatcgacacgtaggctggcatagcagcagcgagatttgcgggagaggagaggcggggattgcggctgcggggagaggataggtgggggcaagcttcaccatggtcggtgtggacgtccacgttacatgcttatagagtagtagagattggttagatttaaaat

SEQ ID NO: 113059 - DNA, 446 bp, Zea Mays
gtggacgactgtggccaccgggatgtctgtcatggcctcgccttgtgggattgtggaccagaggctacacaatttctcactgtaggctcttcgatgccggcattccgccccacaccatgtccggcctcgttcccaccgtcgctcccggtgagaccctctcctctagagttgccatgttcctctcgacgcctagtatcgtgcctcgtatggaataaagccccggttagtcgtaggttcctcgctggagattagctccgcctcggtcccgccctgctgccaggacacctcctgtcaccaccgcagtccggtgagggagaaagcattgtggctgtcgatctggccttgggcggttcggataaggatgcagagtgtcgttcggatgtagcatctaggtcgtcaccttcatctcgaacggttgggatcacaacacaattattgagattctg

SEQ ID NO: 113060 - DNA, 790 bp, Zea Mays
tgccaggcagggagagataggaggggaggttggaggagatagagtagggggcgaagagatcgtgaaacagggaagaagagaagctacgggaatagaccgtgaaacagggaagaagagaagctaaatgatgacgcgtaactagcggcgttgtggataatttacctacaacttcatgaggaggtattttcggtaccctaaatatggggtacccaatgcggttgggtcaaggcaggacccctgtggctacacgtagccgtggatgacgagcgacctaccctgactctgaacttgggcctgtccgacaggaccaatggcctccagatcggtgctaccacaggtccctgcggcgggattactcggtaactacagtctgggaccgacctccagcaggacagtctcgagcccccatgtgtgccatctagacctcccctcctatgttgccacatgtccagaccatcacagatgggacctagaccccccacaagtaccatccgggcccccagacaagggtggtccagagctgccacgtctgcgtgcacctctagccattattccttgctcaggtggagacctggtgttgtcgcgtgtcctatgacgcgtgacgtaagcccctagcacagggggtcactcgcgttcaatgcgggcagggcgcacgattgttcacacctgtaacaggtggcgcgcattgcacattgaatgtgggtggtgtgtgcagtccgtaaggcctaaaacgcatcagtaacccgcgcgttaccgaggcaaagaccattgacccagtgttgcgcgtggg

SEQ ID NO: 113061 - DNA, 536 bp, Zea Mays
gctaggtgtcgtgtagtgagccctagttgggcatgatggtcagtcagttcaagagggaaactagcggaccagagttaggctttgtagctaaggaagagagtgtcacttgttttgataaggttggtgagtgtagtggcctgaaaccttgaaagaaaccttcagccaccctcaaacttatcaagcttactccaccaaaatctactaaccctattgtgagatatggagtgcatgtggagcctttgagaattccacctcagaaacaagtgtggtgtccaaaacctaaacatctcaggaaccaacttaacacccttcaagctaccactattgttcctcctctaaaagctccttaggcacccaaaaatcccttccacaaactgactctacctaagagagatgtgagatttcaatgtgattattgtgagagggagggtcatttgggtggttcttgctttaggatgaagagagatgagcgatggggttctaagttgagcagcgggaacattaaccgcccctctcatggtgttcatggtcctctt

SEQ ID NO: 113062 - DNA, 274 bp, Zea Mays
atttatagctggcaaataattatactataaacttatgctttccaattaataaatgtattgtcatctaaggagtactacttcaatactggttctaagatagttgtaattactactctaataaagaagtacgatgtttcctgctactaacttgatgccacttgagtcggaagtattttacctaaatgtggaagttgtatgtgctcaaatacaaaaatacagtagattgtttgatactgctggataccataccttggctacaaaagtttaattcctg

SEQ ID NO: 113063 - DNA, 373 bp, Zea Mays
cacggcaaccgtgaaccctacggcaaggcagccgtgttcccggcgattaggggcggtttggttcgattggaagggtcggagagcatcaccaatacgtaagtatgctagaacagggatgaaaaaggaatgagcagacctggggacggctggccgcggtgaggctcgtttcacggtggcggagaacgaagttgggggaaattggaaattcaagctcgctggtagatgattgtggctgattagcggtggctagttagctgacgacctcacggagctagtcacgggctcaatttatagggaggacgggcggtggtgatcaattcggccgagccgtgctggcggccggagatgaggaagaaggcggcgcggtgaattc

SEQ ID NO: 113064 - DNA, 378 bp, Zea Mays
gaggaattaaaaataatgttgtttaattatcgggaggtgggtattatcccgaaggttgaaccgatgtagagtgtgtgatgccctcgcttgtcgtgtggtagtagagggcgcaatttgtatttatttgcgcggtgggtctggtgatccttcgttgtgtgtatgtaatctatttgtattgtaatgtggcctattgcccttcgcttgtccggcagcacccttgggcgacttttgcacgaggttgtctttcagtaaaaagacttcgtattgcacacttgttgtgcttgtccggctgcacccttaggcgatttttgcacggagtgtcttttagtaagacttcgtatcgcgcacttgttgtgccagtccggctgcacccttagg

SEQ ID NO: 113065 - DNA, 815 bp, Zea Mays
ggggcaggtaggtttggggaacatcagagccttgctatgggtagaaccatcgtagttaatcgatgttccatgcgttggcaagcgtcctccccttctcgtccttcaacttgaaggtgcccagtggaagtacctccccgatcatgaatggtccctctcatggtggggatagtttgtgccaatctttgttggtgtggacccgtcataagaccaagtctcctatttgcagggttctttggacgtagtggtcgtgacaccttcgtagtgtctgctggtacttcgccgatcccaaaagtgccatatcacatgcttcgtcgagttggtccagcgcgtcctctaggtttgactcgttttgtttggttgcatactattttacccttggggcaccatagtcgaggtcggtagggagcaccgcttcagctccgtaaaccataaagtagggcatatacccagtcgagcgattcggggttgttctcaagcaccagaggactgttgtaaccacctcctgtcattgttggccgatctgcttgagtcgcgtgaagatctgagatttgaggccttgcatgatcattctgttggctcgttcgacctgcccattcgtgcgagggtgagccatgtcagcccaatctacatggatgtggtattcgtcgcaaaactctaggaacctgtttccagtgaactacgtaccattgtcgattatgatcgagttgggtaccccaaaatggtgaatgatgtcggtgacaaatttcaaggcctgatcagaggtgatctttgcgatgggccatactttgatccacatagagaatttgtcgattgcg

SEQ ID NO: 113066 - DNA, 742 bp, Zea Mays
tggtgaaaggctcagagcatggcacaatcgctgtgaagcacgacaactccggtgatggccataaggccacgtcgccggtgcaaagggtaggggacagcgaggccacaatagctcatacaaatccgcgacgagatcttttcatggtgagcgaaatccacacgcccgcagcacgaatcccggcaaccaacacaaatccggtcgtgcggaccgccggcggcgagattctgagctggcggcctaatccagatactgtaccatcgcggagtgtattcagttgacctgacagaccatctttgagctcgattttctcccaaattcatatggcaacataaccaatgctctgcagcaaagttgtagccccacaaaccatcttcatctttgttatagcatccctagatagattctcactggatcatggtcgaaatggctctcaaacttggttctaggccactgtcagtctgatattcagacttcaacaccctgacaacccatctttgggactaattttctccaatttcttcacaataaccatgcttacactcttaagcaaagttgttctccttccatagagctacaaaattattttggtgacctagggcaaaaaccttaaaatttgaaagttacaaagctccaaagttgagcccatattactgaatttcagacttaggtgtatggggtttaagtggtgctttttgcaaatagacccaaaacttagggtataacttgcaaatccacatatttt

SEQ ID NO: 113067 - DNA, 657 bp, Zea Mays
cgatctccgattccatgtccgcactcgatctcctctcctccccaactctagcctctcggtacaacgctctgaggccgttgctggcggccgaaccaagctagcaccgccgccctcactgtcgtgccgcgattccgtgaaccaaccatagcacaatttcgcgtgaagcacacgatagcggacacacaatgaaccgctaagaatagcgtgcgcgagcatcatccgctattttagcgaacattttatagttcactgctggagcacatagcggacgtttctaccgctaaatttagcgtacatggccatatagcggcccttgctggagccagtttaaagtggcatgaaggctgcagaagagtggttgcgaaattaaagagcaattaggacaagccctaacaataagacatgcttgtgttagggacaagcaaaaattccagatctaatatcctgtgattgagggtgatgcccatatccttcaggttacagttaggaaaaggctacacacttgcaaagtagagtggtgctaatgttgtgatgggcaaaaagtagttgtagatccaaaattcattccacatagatgaatgctttgatacacacacacggtagtgctatttcgcaccacacccgcgcgcagcctcgcagatgcagcaacagccctac

SEQ ID NO: 113068 - DNA, 448 bp, Zea Mays
gtttttgatgctattgggtttgtttatcctgactatcgctacccgccgcgggggcagaaaagaaagggtgcaacatcgggaaaggctgctgcttcggctgcttcaagcgagcccacaccgaagaggaaaaagttgaaggtccttactcaccgaccgcgctacattgaactagccatagtgcctgaattttgcggtgagacttcttcagctattgaagccaaaggacctgctcctacgcagaggattgaagagccggctgcaatgccgaagactgacaaaattgaagaaccgagaatcgaagggacaaaaacattagaagttctaagcccttcggcagaagtggaggtgccgaaggcacaaaaaggtctagcagcaacccccaagagaaaaaggatggctagtgtactagatgtgctggagacgataaaagcttcaagctctactccag

SEQ ID NO: 113069 - DNA, 632 bp, Zea Mays
gttactatagtcgatttgtagctggttggttgagctacaactttgttaaagacggattagtaagtattcacatgaaaatttgagatctaggctctgcaaagtggtctatcaagatgactgaatgagaaactgatggtacagtatcgaaaatatcccaggttcagttcatctcgccgccggcgaccacgcgctcagattcgcgcctgacgctacgattcgtgctcaacggagtactgatagttgctcggggtagtaaatatcgccttgtggataaacttgagccactgtttcactctggccgccgtgtccgcctgactcacgaccgattcagatgaaatcactagagttagccacctatcgaccatgcgccacgtgccttggtgccttaccacgtcgcagtagctcgtattactcatgtccgttaatcgccggtgagctcgccacgatgaaagccaccaatttcttgcgatagtgctctcctctctctccgaccgccaccgcgccatcccaaattcacgggccactgcccccggagcctataaattgagtgtaacgtcggctccgcaaggtagtcaagtaaccaatacaccaactcatgcctcaaatcgtccaccagagctcgccaattcgag

SEQ ID NO: 113070 - DNA, 391 bp, Zea Mays
gccatataaaattatgctgaattatcgttaagtttgattctttattttgatttgtaggtacctggaggaccacagaagtagccctgaccccaatgaaactttgggataattcattcagtcacatagatattcgtagctcctacaagatgcctacattgtatgttactaattcacttatcgtgtactcctctccagcttctcatatcatttaaagacgctggaaaatttctacaattttctgtagattccaattcgtgaatgcatttggcctagccaccacacgaaattctgggcttccttgctctctttgttctttcatctttccgcaacaatcagctacttgaggtaactatgcatctaatacacttcatatgtgctacatgtattttgc

SEQ ID NO: 113071 - DNA, 552 bp, Zea Mays
gcaacacgacgcaatatttgtgtcgttcgaacttggctgcgtcatgtgattgctatgtcgcgctctccattaatcggatcgctcccgttgagttagaccgtcatcgctgagtcgcgtatttttcgcatgccctatatgcattgtctgtctgccgcgagccacaattgcgcctattgcgcacgttgcgtggacttgtcttgtaccccgactatcgagtcacaacagcgcctattgcgtttgttatgaaggcttgttgtgttgtagtagccctgatggctacacacgcattgacgtcggatacgcttgagcttgcattcgtgtggattatggtgggttgttcaagcccctgaagtcacattacgcgcaacctccgtaaacaattttgtttgattatatattttatttgattgtgttgtgtggcatcataaatttatatatatcgccaagtggccataacaactatattaaatctaggaaattaaatcgaaatacaataaaacatagataagttaattctttgctctctcctcatgcataaagttttacccgaag

SEQ ID NO: 113072 - DNA, 418 bp, Zea Mays
gtttgggctctggggccgggctaagcatgcattttccagtcacatggcctgctaaatcactgaattgtaagagggccccggggtggagccgctgcaagatgggacttttgaaattttaaaaacgcacactgaactgaaacaacgctgaagcaaacggagcactactgattctgctaacaaaagaagagaaaaaattactaattctagccatgcacggtcagactcgagaccactcatgagaagaaaagatgcatggagaaattaacagctggcttcatcaacattcagggacagatccaggttactagaactccagaagagaaacaaaccgcaagaagacgagctcttttgtgctcgacaagcacgaaccatgtttacattctcacaacagggacaggaaggaggccgcggcggccag

SEQ ID NO: 113073 - DNA, 390 bp, Zea Mays
atgatctatggaatactgtaaaccacatttataacaaagacctttcgctttacgatatgcatacagtgaagcaattctgtcctttgtagaagaactcttgttacccattgttttatcctcaggcttgcccaaactcagctgtctgacattcttagtgttctgttgctgaaccatggggtgtcgagtaggcctggtaatagttgaagcatctgaccagcgataatccctctttttcagcatggtatttgcctcctcctgcaattgagcaagaacaacagcagtatccaaatcttgtggtctttgaagcatgacaacgactttaatatcatccctaagaccatcgacaaatttcaatgtatagaacaacagatcaggcatggattgataagc

SEQ ID NO: 113074 - DNA, 586 bp, Zea Mays
ggtgggtcaacatcgactccagaagcaggcggaccgtgtggccgcggcagcaaggaaggcacaagagagggagttcctcatagtggcaaggacagaaactaccgcacatgacatgatcgatgaaatatctactaagaaggtggtctgggatgcagaagtgttatttgattttgattcacatggtctattgcaacggctagctcaaggggagggtgaccagacgcacaacaattgtgagcagggtgttgtgtctgatgttccatgtatgttggttggaatgccacatcaagccaatacacacctgatgttcagtgaagttggtctaaaagtggcttgggatgaggagatgcaatctgaaactcacatgcatgaaggtttactgaagcagcttgctcaaggcggagaagatttagaagaatcgactagcaaggctgctgatgttgaagatgtgatttgtaatgagaacatgctacatgacttcagttcacataatgatttgcggcaacaattagctaatgatcaagtgttccatgcaaggtctgacaatgagatccgggatgaggaaactgggcatgatgagttgttg

SEQ ID NO: 113075 - DNA, 4148 bp, Zea Mays
aaaacaaccaacttgtcctcctctcgtctccgcgcaagggaagagaagggaagggaatgggactgcaagtgcagcccccgttcatgctacggccagcctgcagctacagcctacatttcccttgcctcagctgtctcgtactgacctcactgctacgcgacgcacataaagcaagcaagcaacaaaattttagttcagctgatttcagctgcaagtgtttttccgttagattttgtttggtgcctgtgagcgtctgctccgagcaacaaaatctgggagattctagaggaagaaggagatcagatagggaggggaattgaagtagttgttcgatatatttctcagcctgaaatcgttacggtgcctgcctgttcatagtatttaagtatcaactattacaaggttggacggcctattatgccacctagtcctctcctagaaacttggcattgggattcctgatgcgacgacccaactccaacccagccatgtccgacgacgacgcctgcttctcgacgcacggtacctagcgatgctgacaatccccctccataagaaggcgtttgtccccaagcggctgccgaaggaaaacgctggcgcagagcagcctcgtcctcccaagtatcaagggcagcatcataaccagaccagcgcactcgaacttattggtcgacgttgtggccgccccaagaaaaggatcgtcggtcgagcacatgtataaggtaaagaagtgctgaccagaatagaagatttgacactgggcttcagctgggacacatggaatacgggatggattgacggagatgatggtaactgcagcctgtatgccacactgccgacacgttggagtaccttgtaaggaccaaaatatatgtaggagagcttatggttggcgcgagtagccactgaattctggatataaggctgaagcttaagatacaccatgtcgccgacagcaaagacacgttccgataggcgtttgtccgcttgaggcttcatacgttgctgtgcacatagcagatgatgacggacatcatgggtcataagctccctctgctataaccatgattgcaagtctgacaagggaattgcatctactgtagatatacccaggtggtgtggatgatagccatacaacacctcaaacggagatttacccaaggaggaattgaatgaggagttgtaccaatactctgcaagaggcagccacttgctccattggctcggttgagaactgacaaaacaacgcaagaaggtttcaaggcattgatttactcgctctgtctggccatctggccatctgtttgcgaatggtaagatgtgctcatgcgtaactcagttcctgaaagcttgaacaagccttgccaaaaggcacttgtgaatatccgatcgcgatccgagataatagccgagtgcataccatgtaagcggtagatactgtccaagaacacctgagctatcttgtaggcagtaaaaggatgagcgaggacaatgaaatgggcaaatttcgaaaatttatccaccacgatgacaatgcagtcaaacttgccagatttggggaggccttcgatgaaatccaaagacaacacctgccaagcatgtgaaggaacttgcaacagctgtaacaacctagggtactgagatctatccgatttggcacgcgagcagatgtcacaggagtagacgtattgtcggacaacatacttcattgctggctaggcaaacagatgtttcaggcgactgtacgttactggaaaaccagagtggccaaccgaactgtcgtgcaatgagaagattatctgttgttgtagtgtgggattgtggacaatccaaatgcggcctttgtaccgaataatgccttcctacaacttgtaaggaccatctgttgtagaggaattagacagatctgccaacagtttaaggcgtgagaatcttgatgatatcctaccaccacattcgatagccattgaagagtgcccactgatattgcattgagtgaaagaggcgaatgaggacaccgagagagggcatccacagccctgttggccgatccctgcttgtataccacctggtattggagtcccaacaatttagtgaagacacactactgccaaggagtcttcagacgctgttcattgagatgagttaagcttcactgattcgtgaagatgaggaatgttccatgctgcaagtatgatctccagtgattcactgcaagcaagatggcgaggttctccttttcataagcagaaagacccatattcttgacacccaaaggcttgcttacgtaagcgagaggatggttgttttgtagcaggactgcccccacacctgctctagaagcatttgtttcaatggcaaattgtttggtaaaatctaggaggcccaacacgggtgctgaagacaaaggctgatttcaacaaggcaaaagcagtagcatgatccgatgttcataaaaaaacacaacatgcttcttcaggagagcagtaaggggcttggcaatgacaccgaagttttgaacgaatttgcggtaataacctgtcaacccaagaaaacctcgcaactccttagagttagttggtgtaggccaggatacaactgcctccactttggccggaccagtggccacgccaactttactaataatatggtccaagtaagctatttcttgttttgcaaatgtgcacttagtaagcttgacttgccagtggtcttgaagcaataactgcaacacatgttccaaatgttttagatgatgtttccaagtgtcagtgtatatcaggatgtcatcaaagaataccagggcgcgctgccgcaataatggcttcagggtgcagttcattgctccttgaaatgtagccagtgcccccgtgagaccaaatgccataaaacgaaactcaaaatgcccatggtacgtttggaacgttgttttgtacagatcaggaggtgccattctgatctgatgaaacctagcgcggagatccaaagtggagaaccatgctgccccatggagttcatcaagaaactcatcaattatgggtacatgaaacttggccttagccatgatggcatttagatggcgataatccacacaaaaccgatgagtcccatccttcttttttaccaaaattaccgatgatgcgaagggacttttgctatgctggattatgtcagaatccaacatctcattcacctatttctcaatctcagatttgaaagaaggagcatatctatacggacacatttgcataggattagctccgggtagcagagggatctggtgatcacagtccctgacaggaggaagactagtaggtaactaaaacactgatgagtacttgtccaataacagttgaagatctgtgggaagctctttgactagttcttgttcagatgcgggcaaggtatccaggctacatagctacaccagagcaccgtgtgtttgtgatgcctgcacgccaaaaagcttaactgaaatgccactagttgatagagatagccacttatctgcccaatgcacgaccataggactatgtgtagacaaccaatccatccccacaatcatatcataggttgggagatccaatatcttgaggtcagaggtgaaatggtatccttgaatagactaatcagctgtgagcacctctgaaacacaagacacactagcaccattcgctacttggatccataaaggagtcgagagtggaacaatatttggacagtgccttgttatggtggagctgacaaaggaaactgaaccacccgattctaataaaaatgagcaatgaaaatcttgctagctagctgacaaatctcatggttttcaggtttgctccagtggttacaaccgactgacatagatggagcaccctgagctcggctttgatccccaacactgattgattatctttagatggaggttgaaactgatgccataattcttctaccaagtgaagcggaacagtatccggacattgatggcctcggaaatatgacaatccacatttgtagcagaggccctaggccttacaaaaagcatagacggagtagagacaatccgccataactggtgcatcaagatgttctagggctttagagtccactagcttgccaggagcagacttgggcggtggaggtagcggaaaagg

SEQ ID NO: 113076 - DNA, 376 bp, Zea Mays
gcaatcacgtgagggccgcaaataggccaaactttggctagtcatcgtctgatctggttgatattccggccgactcggagtataggtaatatattcatcacacaaatctgggtgaaaggcggtcgcgagctggctggagacgaaattcggaatctgcttagcaaggtgtagaaaatctttctaccattaggcctttattttatattttcccttaccatgttccttattacccttattgttgtccctttctaggatgatgatgccgaaggtcgatgagccgaagctggttttgaagcattgagggccttaggaattccttttgctgatatctgtagaaacacttggaaactctttgtacaagaaaatgtattatttg

SEQ ID NO: 113077 - DNA, 413 bp, Zea Mays
ttgtaggaagagggatgaaaggtgtgggtttgataagaataaatgggacacgtaccattcctatggtgtacatgccccatctatttagaggtgtgcaactaggccgagaggtacatggttgccatcccaagcaatatccaagtcatagtcaatatggacctcatgatgatggctttgcgtctcagactcctagtgaatcatgtttccctgttgtggtgatatttttacccaatgtgacatgggatgtttggcttgtttcaaacccctcctttaaacaattggatgaacactagtactcttcatagcatagtgttgtaccattttctcatactttgtatttctattgagtaggttagaggactagagaacatgtggttcattgactctagatgtttttcttgtatgactagtag

SEQ ID NO: 113078 - DNA, 548 bp, Zea Mays
aaaaatttgaccatagccgaagcttgcttactgcatcgtcaaccgaagctattcattttgctcaagcttcgtaacaagaaagaacttcggcaaagttaaaaaaatttcaacttcataaaaaacaagaaagtcaatcatcagatggctagggtacgctcaacaactagggttactcgcgacggagaggaagccgaaggtgccgaaactgctccaatctctgaagtgatgcaatggtcagggctggtagtatcggaggatgcacctgccgctgaagctgagcaggttgatgctgaagaatttgaatctgaagatgactacagcgtcgtgccatcaaaacccagtcacttggagtttgggaaatccaccgttaccgaaggtgatatgtctaagctgatgaagctgggctatttcagcgaagcaaaaaaggagctggttcattttggcggagaagagattactccgaagccggaaaaggatgaggtggtagtgttcaaaagcttctttaaagcaggattaagatttcctttgaatgggatgattggtgatgt

SEQ ID NO: 113079 - DNA, 314 bp, Zea Mays
atgagttcagcccaaaattcagacctgctacagttaacctatttccaattggggtccttgaccagacaggaggcggttgagcaactcttggaattacaaggaggggagagtgtggatacaaatgcgacattggttcctgagtcgatcaagcaagtggtggaccaatatcaacatctgttcttgaaacctaccggtcttcctcccaagagggcaattgatcatgctattgagctcttgccaagcgcccaaccttttcggctaagaccttatcggtatactccacaatagaaaaacgagatagagaagcaagttaa

SEQ ID NO: 113080 - DNA, 311 bp, Zea Mays
gcatggagaatttggaaaggtcagcttcatccaatatcttctttctgagctcagggtccttgggaacaaccaatcgatctccaaaccataaaatccccttatggtcctgacagaagcacttgtacttttctgtcttccgcttgagcatatctttgataacctgaacacctttatccccaatctgtgcttggactatttgctcttgcaatgtgggctccaccgagatataacttaattcgccggaaggaacaacctccaggttcagcttacacaactcatcacacagggtggtaactcttgcatccatgctc

SEQ ID NO: 113081 - DNA, 626 bp, Zea Mays
aattcgctgttagaacctattcaagctgtttacattactacacgggaccttcgccataaatgcgatggactagcaccgccgtccgccgcgcagtcagtactcagtatgctactaggtttcatgttcgtgtaatagggctttcaacagaacacggcgtcagcagaaagcagtccggtgatgcgctgtttggttcggacgatttgggccgtaatccatttacggggtgccgttgattattttgagttgggcctgtccgccatccgtttccactccagcctcaccatgacaagttctcgaagatgtagagaggcctcaaaggatgatgcacgtcggaagaagttattaggccccgcttgctgccaacaatttcacctaggggccgtttggattttgaacgaattaaaatccgcttagaagagtaggctacttggtttgattgaaatttgatatttcaccactttataaagttatatatgtaagtctatctcgaattcataagctgggggagtggaaattgattttatgcctagacataagcatactatttggtttggaatttgacatttcacccctatatttacacatactattgttaatactattgttagggtacgagtccaggtgac

SEQ ID NO: 113082 - DNA, 606 bp, Zea Mays
gccagatggtccgggtatttgatcggacggtccggcacaaagtacacagaacctaatgatattgattattacctgactacacatccatcctagccaaacctcccactgcatcatacaacacctcagcaccataatatgacatcctagatatgtgggggcgagtactttttggccccctctagaaggctggaaagggacaaccagccatacgagccgcatcaagaaagcattaatgcctcacaaaatccaagccagtgggtggggagacaacataatatccaaacacccacacctatgctggactagagagtcggttgactaccaccggtcgctattgacatagtaagagaggagatagctggggcgttccgagataagctcgaagttagcatgatccctggggtagtcatatcagcgaccctatggtagccgatttgactatcacccgtaccccatagaaccaggattctcaaattcgcaaaattttcgagtgaccaacgcaagagcatgcacaaacacataggccagttcctagcacaattaggggaattggctgacacagaggtgttccacgttcgtttattctcattgtccttaacagggact

SEQ ID NO: 113083 - DNA, 414 bp, Zea Mays
aattgaactagaccacgctagatcgccgggaacacctcgaattcccctcggttttcgccgtcggcgtgaatagagggattttgagctagaattgtgcaattgatagagggattagggtcgctaggggtagaatttggtgtcgaccaagtaagaagcttagcctttgcgtatctcggccgttacaggctcaccggagggcgtgttcaccgtcgttcgccgtcagggacctgggtctgcgaagaaacagaagtgcaggggcctaagtgagaatgtcagagagacaatgaatagtgcgcaagggttcttaaccggttattcaaatagccgaggtcctctaagcaaagttgacatcgcgagcacgggtgcgcgcgtgtttccctatccgtgggctcagttgggctggtttgagcccat

SEQ ID NO: 113084 - DNA, 600 bp, Zea Mays
atggtacccttgtatcgtactctcaattggtatcttatcattgcttaatcattctttgggtaacttatcatttgagatatcctccatgattaactcttgttgtgttcgtaaataaacctgcatcccgttgtgagttatgctatatggttttatgattagtctgtgtgaaaatatgacatattgcttagtttatatgatgaccctattgtggcactatgtgttatgtctctaatgcattctctcgagctatgaagtgcataaataatagggaactttcaattggaactttcaattggtttgtggtaataactgatgctctcatggccatactggtaaaaggcaaaggtatggaaaatggaactgtgcaattttattgaatatcttgaagttccattgattgtgatcatagttgtgttcttgcatttcactggtagtaccgtggcttaggagacttatgccttaaaatgttttttcttctggtgtacctaaagaaccttctgaaactatgatgtgcttaagacatgatcgtgttgtttttcaattggtatatgtgatgtaatgatagttaagtatgaagcatgtttaaattgcgtgtaaatg

SEQ ID NO: 113085 - DNA, 530 bp, Zea Mays
caactacgagcgatcaacaacaaggtgctggaagagcgagcaaccaaagactagaagtagggacattttgcacgaaccattataaatcttacgcccactgagcacaccatctggacttagaacatgcatacacatatttggaagctcaacccctagatttccccgctaacctagtagtaatgggtattcaagggttagatgtcatcctagggatgaattagctgcagagaaaccaagcaaccgtcagctatgacaaaaggacagtaaagttagtgtccccatcagggaaacaggtagtgactgaattattcatgcctgatctagaagaaggagactgtcaccatatgtctgtagattgtaaggaggccaacctgcttgaggccaccggagttgtgtcggagttccctgacgtgtttcctaaggagttaccaggcatgccacccgagcgtaaagttgagtttgcgatagagcttgaacctgacaccgcccctatttctaagagagcctatagagtgtctggaccagaattg

SEQ ID NO: 113086 - DNA, 712 bp, Zea Mays
gccttctaatgtcgaaacacaaccatatgagacgttgaatgatgcccctcacatcccccctctgattcagatcattctttacgtacaaccattgcttcatccaagagcccgaccacttcttttgaaatgtaggcacatgataatttgcctcagagcagggtacgaagctgtaacagccgaagttgttatggtattgctcatttccggttgccttcgtctagtaagataactcgtgaatattgtagaagcacctagcatccagctctagcccctgactcctcatagctcatataaaacccccccaatttgataagggattcgagggtaagttgatgaaggtatatttcgaatgtcttcagaacttcaaccaacatcttatgtagtggaaagcaaagcctagatttcatgaagctcttgaaggccaccaccttatcagcttcgggaagggcaacagtgcttccccccggccctcactatagaaacatcatgaaaaaaatttcccttcatcgcttcgatttgcccttgtttgacagtttatttcccaaaaacaacatggcttggcctcccgaccgatcttggaaatcttcattcccactctccacatcaaaactgtcgctatcgctggaatccttaaacaacccagccaacatctcattggtgattttttctatgttggtcttctccatagcttcgtaaaacccagacattgtgg

SEQ ID NO: 113087 - DNA, 429 bp, Zea Mays
gtggtttatagttgacaattatggaaattctctcccctcccggtcgggaagacagccagacgttcgtaccccgagttggactgagtctcctacagatcaagaaattgccgaagcaggcgtgttgcttactgaaatcggattactgaaagaaagaggtctgactgtcgaagctgtggtcactgattttgttttcaagaacattcagccactgaaagacagggcttatccagcatatctgtatcgagggctggccgactcaactcgggttactaataagagaattccttctgttgacttggtaagccgacttgaaatgatcctcaggggtaaagtttcgaatgttggtgctccagtggcatactcggcctggcacctacctcctcccaaagctttcaccctttttgtgtcaaatccacctgtgactaacag

SEQ ID NO: 113088 - DNA, 440 bp, Zea Mays
tggcggcctgcacgactgtcgactccttggtgtggcaggacaccagtgcaaacactgcagtctctgcccttggcgagatgcccacaaggatctttgttacaaagattcatagagagacataccttactaataatgaggcgatcgtaggggaatttgaagtatattcttgccaaatgatatccaccgagcaaaccattaaggtgccttcagaaacctccacgttgcttcaggttgtcacctctgttgaggatgttattttggttaaggatgtatcgtatgatgaggaagctaccttggttgcgcaaagtacttttgtggagtccatctttcttaccaccatcgaagactgtccttctcattctatggttgaggaaaatacgaaacctgttttggtggaggacggatcagatgatgaggaagctaccttggttgcacaaacg

SEQ ID NO: 113089 - DNA, 458 bp, Zea Mays
ggcttggttgactattggcttgcctactaccatctccaagtatgagcttggacgtaccaagacatacacccatgacatcctccaatactcccactttctcaataggttagtggtgacatataggaaccaacactagagcctaatgtagagttttaagtagaccttcccaaaggggtttcacccattcaagtcctagaccacaaataaatgattgatcaagtccacacacgacctcacctcggtaaatgctttgtagaggtacatgaaggtggatagggaaagcatagtcttgggcataagatgaccaatctagaggccattgtaatcaaaggtttggtgggaaaagtaaggcaccaacaatgtactcaccacccttgtcctaaggagtttgtggctgaaagatcaccacatggacttgggtagaggccgatagtgatatccatcttaggaaatatcag

SEQ ID NO: 113090 - DNA, 488 bp, Zea Mays
gctgaatggagcgtgttgaaaggggttggagcatgccctcatcagcagctttaacaattaggccattgagaacatccataacgatgatgaaaagaagaggggatagcgagtccccctgccgcaggcccctcttgtgttgaatgtattccccaggtactccattaagcataatttgggtagaagaggtcataagtagcccactaatcacatctctccatatggggccgaatccaactttttccaacacttcaagaaggaaggaccaagacaccgaatcgaaggccttggaaatgtccagcttgagaagaattctgggctgtttttgagcgtgcagcaatcttgcagtctgctaaactaacatgaagttgtcttggatgaatctgcccttgataaacacactttggttcttagaaatcaacttgtccatataaccactaagtctgtttgccatgaccttcgtgattaactttgcgaagctatggatcaag

SEQ ID NO: 113091 - DNA, 649 bp, Zea Mays
ctctgagcaactcttccgagaagcagacatctagatcaccgctgacaagtgtgcccaagacctcattggccacacgaagcttgcaccccagcagtcgtacaaccattgggacaaggggtcgagagatgaagtgcatgatgtagggcccccgacgattggccccgtcggcacgccacgaggcaacaacacccgaacacaagatgagatcctcgatacccactacccgtattacaaggatatgtgccacaccttgtgtaactacaagtacttcaaaaatttagttggcaatggcttaccattccaactgtttccgccacctttgccacgaagagagcaagtcgtaccagaacagtcgacacaacaggaaggtggcagtggcaatgccttcccacacattgactaggaggtcaatgtcataatcaggggacgtgggtccaaggagaacaagaagcaatagaagctcaccgaccgacaggtcctagtggcgacccacagtactctgacaccatatcggtggtcaaaacactccatcacgttcagtcgagccaatcaatgacttaagtttgatcacctcagcatgtaccctctgcctttcgatcccatgatccaagaaaaccgagtcaagaaagttttggtggatgggggaagc

SEQ ID NO: 113092 - DNA, 1040 bp, Zea Mays
ctaccatcttctcttagtagacttaaagattgttcttttgatgtttgttccaagatgctagattctatgttttcccatataaaaaccacctcatgaggcactccttatcaacctgagaaggccaaaagggtatcaaaagacttaaggtcagacaagagggtgtttgagtttgtcaacaggaagcattccaacacaagttcaggctttgggaacagagtaaagaggccactggaaaacacaggccacaaaggttaggaaaattcagaaccccctcccggctcgttgacctaacttcttaggaattgcatttcgtttctacagcagcagatgtatcaccaacatcagggtccgagtgagctcttcaccacgaggacatcctttccaatggagcagcatccgtttttgcgtggaggaaatgcccaaggagattctgggctggttctctcaactgacgctaaaccaaggctgaaatggacacctgagttacatcagcgatttgtagatgcagtcaatcaattaggtggagaagagagtaagtattatattcttataccttctcaagatatagagaccagctgaattcttatatttctattcatcacccagaagctactccaaaaacagtcatgaggctcatgggaattccaggactcaccttgtaccatttgaaaagccatctccaggtactttggaatcagaaacccgcctgctaaaaatgatattcttaactgctgcagtaatcaccatttcttgggtgttacagaaatacaggctcagcaagaacctccaagctcaagcaaatgccagtacatcgaagaatggtaagaacaagctgtaactcccatatttactattataatgaaacaatataagagttagtaacttgtaaccataggatgtacgcccgttgctgataggattcccggaacaaccgcagcaacaatgagcagtacaaatgttcttcctcaggcagagaagtaaggactatgttaacactctgtaattgtataaaatcccaatactgaaataatactcttttc

SEQ ID NO: 113093 - DNA, 743 bp, Zea Mays
attcgtgctgggccaccttgggcccatataaaagcggaccggactgagctcatatcgggtcaccttcctaccttcgcgcttccatcaaatcgatttggcgcatgggttgtggtggcgagctgacgacctgtgcttccatcgggtgctgctaagccatcctccaccgcgacaatcatgaatctcagaagcaacgcatcaccaacggagtgatcgaggtcgaccacgatggaacatcaatttgcggtagaagaagatgtcgatgtccgtgaatccagttatttgcgacctccagtttgaaagcagactacagttgctactgtttcgctgagattgggtctcttgcggatcagttcatcgtattcattctacatggtatcagccttcttcgttcctacagcaatcctgtgtctcaccttccacatcaatggctcactccccactcctttccaacgactcctctgatgatgagctcgtcgttctagcacccgcttcagttatccaaagcatttccatccgccagcacgttcctgtcgtcctcgacatggacgaggggaactatgggcaatggcgatgcttctttgaatctgtgctcggaaaattcggcctcaccagccatgttcgttcttccaccccataccgtgaccatcctggtgaatggcgcatggttgattattgtattgccaactagatccgcaccacagtctccaagggcatcttcgacatcatccgttgcgaccgcaatg

SEQ ID NO: 113094 - DNA, 475 bp, Zea Mays
ttttcaacaacagagtgtgaggtgaaattatgaaaagcttatactttttgctccatctcattctgtttcttacgtgagagcatgatttaaggagcctggtaggtgaagctgctttcaaacgactcatttattggtgaagaacagctcaccacagctcgtggataagcaattaattttgttaaataagcaagacgctacatttgtcgcttcataaatactcacatggccaaatcaaatctctcaccttgatgctttaattcctgaaagctagcagcaaggttcaattacatgtggtggcaaataatataactcgtcaaccgcgaatataaatggttgcctcctccatgcacaacaacactggagaggattttcgatggctagagttattttcggtggccgaatcctgactgtcgaaaataagcttattttcgacggccatgacgcacgcgtcaaaaattaacggattcaaacgcca

SEQ ID NO: 113095 - DNA, 473 bp, Zea Mays
ggtcaattcaagcttctttgattagtgttctagcctccctcaagcctcttgttgctcgtagacccattcgattaagctagactgcagtaaatcatcttgaacacctcggattgtctctgatttttgccgtcgtcgtgggtagagagatttcggccagattcgtgcaattagttgagggattaggatcgcctggggtaggatttggtgttagacaatttagggcactagccattgcgtattccagccagtacaggttcgccggaggcatactcatcaccgttcaccgtcgtggacttggcgctgcgaagaaacagaagtgcagtggcctaactgtgaatgtcagagacatagataaatagtgcgcagggttctttaccggttatttgaatgatcgaggtcctctgcacaaatcggacatcacatgtgcgcgcgcgggctcgtttcacccggtaatggaccgacctgggctggtt

SEQ ID NO: 113096 - DNA, 1309 bp, Zea Mays
tggaatgcacgctaatcccaactgcataaactcatatggatacttcccaatccataaagctgctgacaaattcttttgtgacatgatcaagttgcttttacgtcatggtgcaccattcgatttacacacagttggcaatgatgtcattgagaacctacttccgctccatgttatagttttgaatacttgcatgcataagtatctagaggacaatctttctatcagcgtaatttaaattattatgtctacaagcttatccatctgctgtgtttacctgaaatggttcgtttcgcttctcttctatgtacgaagctcttcttatgtcacatgacataaaatgtaattttagtcatgccatagatataagacaggtgttatattgaattagtgatactaaaggctgagcatcatttatctccacttgttagataaagtaaagtttaccgttgttaatcttctgtattcatgtgttagtgcatgttgttatagcaaaaaactatgattcttcaataaaatatacaaaaattgttattagtaactgttttttcccttgccttggagaatgtttctaagccatcattactttgataggagaagatgaagtaatacatttaaagttattcaacactacttgcttgcatacaaattctacataacacttagatttgtgttacttgttgttttacagaagatcttcatggatacaattagacttcttgctgaaaaaacaaataatctacttgaagagctctggaactacattgagaatgtaaaacttatccagtctgcggttttactactggctgcttaggggaagatctgtgggggttgttcctcgaagataaatggcagtaataagaaagatgagtttgacattatcaatgagcgtatactgaggttttcatttgtcttgagatgggagaaaggttcaaatggaatgaccagaagcttctaaaggaaaggattgttcttgttgattgcactgggttgcttgttaatataatttctcgtactggcgaacctctttctgcatatattcagtcactttcagaggtacggatttttcattatgttgtagcttcagtgcctcatacgcctgttgcttaatattttaaaaatatgttctctactattgttagttgtgttattttaaaaaaatacgtgcacaaactttagcaagaagaatgttaatagttctcatgccaactgaaaaataatagtatatgttgtataattgtatttgacaactttgtaatcagactatcagagtttattcttttaaacaaactctacagaaatgaactttata

SEQ ID NO: 113097 - DNA, 565 bp, Zea Mays
ggttgcaccaatcggctcctttgagcccattgtcatctttctagattgataataatcatgattaaacgaagcaatcatgcattgaaagcgaccaacagcaggaaataaatttgactaaagcatgcttgagtcaattgtttattatggagcggtgcaagctatgtgcatgacgatgagatctaatctacaatatgtatcatgctgatgatcataaaaacatccaccattaggagctgatgaacatgtacgtgaacatagatcgggacctctaacggagtccattcagaataaacaaagagactaaacatgtaagatagggtgctagatatatgttgatctctcgagttgttgcatgcacatgttgcatctcgtatgtcgtggagtgtagcaacagatcaaggaatgcatatctagcgatgtaaaatcaatataataatatgaagctcaaagacaaatatattgaaactacaaatgataactagcagatcttgtcaataataacacttagtaaaagatctaccgggtaaggtaataacattgtactgccctgacatgatctactaga

SEQ ID NO: 113098 - DNA, 1155 bp, Zea Mays
agtggagctagggtcctgactgaatagctggcacaacagtagcctgaagagctggaggaggagcagactgcactagaggtatcggaacgccggtgtgctagaaaatgtgagtcatgaacgcctggtactctaccctgtctgctaggagctgctaccgtagagtgtcctggcggtcctgaatagtctggaacatcgatagcatccgctcagacatctgctgctaaatagctacctgtctggtcttctctgcggccaaatgagcctctgctaagtgtgtgactggagaatggcagccaaagcagggtcaattactggaggagcagctgaataagcagcactggagctaccagcctcgtgatcatgggaacaaggtggcacatgaggtggtggcagaatccccagatcctcatcatcattggaagaagtatccacaactgcaccctgatcctcaaactgtcggatggcctcgtcctcaaccctaatatctgatgctggagctggagctggaactgtgtccttaggagatgggcgatagaagacaaactgaagtcgagaggcctcgagggtggcctggaactgaggaggccgaatcagctgagcaaatatatgacagagatagtgagcgtacaacagctaacgccgagcatggagagcatccaaaactatgtcctcaatctcacagatcagaaaatcgaccatgtcaaactctgagtgagagatgaaggcaccgaatagctagagctagatatgcatggtggcctctctgtatcccatcctgggtagcaaagtgtgcctcatgagctcatgtaggaaccttgctgctggagtgaagtctgctagagaacgttgtgacccatctgtgaacggaggtcagaatagggtagcaacatgagcagtggcaggggcaacttcgtcgtgagggcaacaaggaggatctgacatgccataacacaagctgtggagcctcatcgatgactcaggaaatccaaacagctctctgatctaggtagcatgcaaggtcacatcctctcgctcaaacgtgaacctcatccattgatgatctgggtctatccatactgtggcatagaagactctgacccactcctcaatatttatgccaccgaaggtcagaagagagtgtaaacctggcagata

SEQ ID NO: 113099 - DNA, 285 bp, Zea Mays
cgatcgctcatggatcatgaggaaacaaaggtggtcaagagcatgtagaatataaaggtaagcataaaaaagatgagagtatgaaagatttcaaggagatgagcataccaataccaagaaacaagaaattgccgaaagatagcgacttaaataacagaagaggaaagggtctcaaaagacaggaatgtcatggacatataaactgaaatgtctaagtaggcagtagaaatttagatgcaagtatttgaaacaagagtattaaagggatacaagcatgtcaatacc

SEQ ID NO: 113100 - DNA, 716 bp, Zea Mays
ctcgactgcaagggtgtcacgtgagggagaagaaatcgaagttactgagacaacaccaatttccgaagtcatgaaacaatcaggtttagttgtgacagagggaaccactgacgaaggtacacctgctgccgaagcggaacatgtcgttgccgaagaagaagatgttgaagaagatgaagaagattatagtattttgatcccatcaaaacccagccatctagattttgagaaatctactatgtatgaagctgacatgcccatgatgatgaagcttggctactttgggaagctgaaaggaaacttgtctgatttgccggagaagaaaccaccccagcgccgaaggatgatgaagtagtggttttcaagagttttttcagagcaggactgcgactccctttgaacgagatgataggggaagtcttgaaattttttgaaatatatcttcatcagctgacccctaacgccattgttaggcttagtgtcttcatctgggccctccgaagacaagggatgagcccagatgccgaagcattctgccgagtgcacgagttgcactaccagacgaaggccagggcagacggtcttcatgaaaattttggttgctacaattttgcgtatcgcaaggatacgaaggctccagttctcagttaccgcaccaaatggtcaaccgactggaaaggtgaatggttttatgtcaaggctgatgagaagaagag

SEQ ID NO: 113101 - DNA, 400 bp, Zea Mays
ggcgggtgaataggtgagaggggggaaagatgggcatgtgtcgttggtctgtggagtaacggcctcgattagatgagagtagagcaattcgggtgggcagatctggagcattgatctgcaattgtgtgactaagaagagaccgaacttaattaaatctggagtgttgattcgatgatcaacagacccaactacttatcgattcatgcatgggagatctaatcaggggcgtccatagccgatcgtgcgtcccagtttccatcttaccccttcgaacatcacaatttttctaaagaaacccccgataacaggtaatcatcccgcagtccgccccaataggaagaatgcaacaactaggtcctgtttttatcactttagcccctggcgtcttcagaaattgag

SEQ ID NO: 113102 - DNA, 529 bp, Zea Mays
aagatcgcctcaacaccctagctggtgtagtggcaggtcttaacactgacctagacagtgccaccctggatctctctagggtgcacttggagctggaggatgcccacgctaggattgcagccctggaactcaacttcaaggacgggatccccctgaagcccaagtccccgccatggcgttgtcccctccacgcaagaggattcgctatggggagcccgaatccatcaccaggctgctttaaatatttttaagatataagttgtaataatatagtttccacgccagacgatgaacacctcttttataatttatgcttataataataacaaccttgtgatggtgttggttgcaatgtttgatttggatttttgcttgagtgcaatggttttatggaatgatggccataagagcatataaaaaacaaacataactttaataataagctattcccctctagaatctttcttactcctcactcctctaagaatttcactttctaaccaaccagatggtgaactctcgcttaggt

SEQ ID NO: 113103 - DNA, 1146 bp, Zea Mays
cgaagctagccgcgggctcaatttataggaggagcgagtggtgacgggtaatttgagcagattgcgctggcggccggagatgaagaagaaggcactggccgcgtgagtgcgtgtccacagtcgtggcgagctcaccggcgacgatgggactgctatagggagtcacggcgacacggtggtaagactcggacacgcggcagacatggagatggcacgacggcggtgagcagctttatccacgacggtgagcagctttatccacgacggtgagcaaggggaggagtaccgcggctgaccggggtggcttccagcttgacggcggtgaggatctttcaccctgagaggttatccacaagtccggtgcacgaatccaaacgccggcgacacgaatcgcggcggagggatccgtcggcggtgaggacagccgcgctggcggtctgatccccaaacgttactgtaccatggcgatttgtattcagtccgtctgacagacaaagtttgggcctcattttctcacaaattcacatggtaactaattcgaggctctgcagtaaagttgtagactaacataccatctccatctttgttatagcagctatgggcaaattcttaatagattagtcataatttgtctccaaagatgatccaatgtcactgaccatataatcttcagcttatttcattctgacagcccatctttgggctcacttatctccaaatttctcacaagaacatggcttgcccacttcagcaaaattgttctcctttgtttgctttacaacattgatgtggtgacctagtatgaattctcactattttgaaagctacacagctctaaagttgggcctataaccctgatttcagacttagcataagaatcacaattggggtccttttgcaaataggtccaaaacttagggtttggcttgtaaattcacatatttgtgacccaaatgacttaagatacttatttaatttggtttttgcactttagtccaaaagtggactaattttgcacataagcccctagggtttggttttagggttttccagggttccaattagggtttctggtatcccaggggtataaatgtgattcaactttatttttggggatattttataactatttccctaaacccttta

SEQ ID NO: 113104 - DNA, 346 bp, Zea Mays
ctcaagtgtgccctgaaactacggaggccgaatcagctgcgcaaagatgtggcacaagtagtgagcatatggcaactgtcgacgagcacgaatgccatccaaaacggtgtcctcgatctcacaaataaggaaatccacgacatcaaactcagagtgagagaccagggcaccaaggagccagagctggatatgtgtggtagcctccctgtatcccatcctcggcagaagagtccgtctgataagctcaaataagtacttggctgctgtagtaaaatctgccggtgaacgtcgcgacccatctgagaagggcgggcggaacagagccgcgacgtgagctgtacccgga

SEQ ID NO: 113105 - DNA, 2008 bp, Zea Mays
ataatacgatggaatgaagtacgtagtgattaattaaggattgttcgagacttaccattgcagtctgtagggcgaggaatgatggcattccactgcaacacattacttgagtctttacccccgcatgagatgtaacacgtagggaggtcaaaggtagtgttccttgaaaccatgtacacacataggagcaacgacctttttccagttcatgaattgaccagatgccgatggaatagaggaggacatcgctgcatgagacagtagggttttgtggtgctgtctcctggcaggagagcagcgccacgctggtgaagtcaagcccgcaactcagcgaggagcaagtaggtgacggcggcagcagtagctgcatgatggtgacaagtagagaaacagaggatgaggccatcgactgctctagtatgtactagtgggtagggtagtggcgattgtgacccggtcgttcctatcgattgaggtggtggtccattttatagcccatgcaaacagccgggcgctgctgcgtctgcgtgggccatccctctctcgtttgatcggggacgtagagcataacaacgcagagcagagcagctagccagcgtccctctcatcactagtagtactatcgtacaaccagcccagcagcagtagactctcatcattatcgtacctctaccagcccagcagcagcactgcttgccggcgagtctttaccccctcatgaggcataagacataggcaggtcaaaggtagtgttccttgaaacaatatacacacataggagcaaagacctttttccagatcatgaattggcaagatgtcgatggaatagaggagggcgtcgctgcttgaggcagtagggttttgtggtgccgtctcctggcaggagagcagcgccacgttggtgaagtcaagcccacagcaagcaggtgacggcggcaactacaacatcagcatgatggtgacgagcagtgaaaaggagggtgaggccatcgacagctctagaatgtactagtgggtaggctagtggcgattgtgatccggtcgttcctatcgattgaggtggtggttcattttatagcccatgcaaatagccgggtgctgctgcgtctgcgtgggccatccctctctcgtttgataggggacgcagcgcagggcagagcagagcaacacatagcagagcacctagctagcatccctctcatcactagtagtactatcgtacaaccagcccagcagcagcagactctcatcattatcgtaccactactagccctgcagcagcgctgcctgccggctacgctgctgctgcattcccgcatgcttgagcaagttgtagctgtagggagggggaatcgcatcacaggagagctgaggtggagcgccgagacgagaggatacacatcatctctatttcacgtgtgctgatttaattagtatgcgtgcggttgtaataattattaattaattcagaaattgaggcgtcgacctactggtttgtacctcgcgctttgggcgttggactgcaaaaccaggagtagtagacacaacatccgaggaagcctgcaatggccacacatgctacgactgcgatggcggctatggcaccagatctaagcccgtcgggagctggcggtggcggttggcacacacccttcttctccagctgccagaagcatggatatgtaggagtatgcacgtagtataataataatacgatggaatgaagtacgtagtgattaattaacgaatgtccgagacttaccattgcagtatgtagggcgagggatgatggcattccactgtagcacattacttgagtctttacccccgcatgagacgtaagacgtatgcaggtcaaaggtagtgttccttgaaaccatgtacacacataggagcaaagatgtttttccagttcatgaattgaccagatatcgatggaatagaggaggacgtcgctgcatgaggcagtagtgttttgtggtgcctcccctggcatgagagcagcgcc

SEQ ID NO: 113106 - DNA, 658 bp, Zea Mays
atcggagttatggttacaaagttataatttatgggagatctatgtggtccaaatattaaactatattataaattgattagtacacaccatatgagagaatattttatgaataattaactcaaccttaatcttaattataacttgactggagatcatattttaatcaaattataattatggataggttagctttggtttagaaaagttaatctagtagacataggatacataaatatctaactataaaagtatgagacatggtataattaatgttgttactgcatagcaaatatttatacgaagctaacacaacttgaacggagaaaatcaaagttaaaataattaagttatgaagtttacaagtgtttggatttatttttatacctaaaaatcaatttctgggatttattcatggaatttaatagaatttggaccgagggaacaaaatcacgagagttcagggtccaaaccctaaattccaggaccccattccagtagtctttaccctgggttggatggaggattatttttgaaatacttcagggtctcatttgataatgtgcgcggctgacgcaacacagaaaatcctggaccgccagatctagatccgaaggatcagatcacgttgtcgaaccgttatcctatgatctaatcccac

SEQ ID NO: 113107 - DNA, 428 bp, Zea Mays
cttaagttgtgatacgtgaaatacgtcatgcacatctgataatctatcgggtagctctaactggtaagctacttcaccttttctttccaaaatcttgaatgggccaatatagcgagatgataattttcccttaaccttaaaccttttcattactctcatcggtgaaactttaagatatacgaagtctcctacttcgaacatcaactctcttcttctattatcagcatagcttttctgtcttgactgtgctgacttcaaattttctctaataatctgcacttgcttttccgcctcttggagtatttctggaccaaatacttgactttctccggtctgattccaataaagcggtgttctacacttccgtccataaagtgcttcaaacggtgccattttgagacttgcttgataactgttgttatacgaaa

SEQ ID NO: 113108 - DNA, 823 bp, Zea Mays
caaaattctccgtcgcagccgcaacggctttcatagacccgaaaaggcgcctcaggaaaccaacagtcccacagtaaaatgacacttgtcaacggtcgcatttcaaaaaaccctacggggaccacttcaacctagcgagggtagcgtttcggccatctcccaggaaagacttcaggaccagctcaccaagttgaaccggcccctcgggagtctagtgttggagcgaaggtcgttcgcccccctcatacttggaagggcatgtccacccacctggttacttataaatacccccgcattgtacattgacaggacacgcttaacaagacattattgctccctgcccattgttttgttgatcacccgatcactcctacttaccgttgtctgggcccactcgactacgtgccagtcggttccaacacatggataaagtccatgtataactacttcgagcttgttgatggaccctcgccccatgatggtgttgtaagggtagaccatgtcaactgtgtcgatggtcacctcttcacttgcattgggtgctatgccgaaagacaacgatagctctatctttcccaatgagaacattcctttccctccaaagccatataagggattgtgggctggctagagcaagatgtgatttattgtcaacgaggactttgtgcaggtcctagtctgtgacattacaatttatcaccagtgcatctgaatggggcgtgctatgaaggtcggtgtcccttgcatcgaaggtaaggggaatgtgtgaccactttgtttggaccactgggtcagtgagagcgacatgattcacccttcggta

SEQ ID NO: 113109 - DNA, 367 bp, Zea Mays
catagatcacttcaacggttgtagcgtgtcattagtcactgcatcttcgggcagccgattcattgtgccacccgccaccgtgggcagagcttcttgctatatcaatcacagtagaagttagccagaccgattcaccctcgtcataccactctgaatcaccacgcgcggggaagtagtagggatcctgggagctaggtcacgtttacgccgacgatgcgcccccacaatagctctgatgccgtggtgctcagctgctggaattgggggaggaagtgtgagtgtcgatctgctggcgaaggtctgcgattagaagttagagagaggcatagagagtcgtggattagcggatgaacggtttagatttgat

SEQ ID NO: 113110 - DNA, 480 bp, Zea Mays
tgcacgattacacctaatatgttgctatagataaaataatatgttcctatagatgtatcggtgtttcgaacctcgctccgacaagtaaatttattgtgcgcgttccgggattcaaacggtgtgtgcagtgggtgaaagatttatactgattcggacataaagtctctacatcaagtcatcggtggcttgtgctactgacaccattgatgattaaagctcgtaatagggattacaagcaggcgagagaatgaggagaggtcatggtggaagtggagataaatgttacatagcggactcttatgtaagtcttggcttggcggcggagctcgacctctaagtcctcgtcgatgtgtcctcctcttgttcattgctccgtcgtcttcacgtatggggtccgtctgttgctcgtgcatgtgtcccttgttctgccaacctattctttttatagaccgaggaagcggtcggccagcggtgggttcc

SEQ ID NO: 113111 - DNA, 497 bp, Zea Mays
caatttttggtttaactaaaatgttgaggataattgtaattatgcaaagtttaagaatggaagattcaattttcttgtgttatatgtggaaaatatcttgttcgtgaggagtgataagaatctgctattattgatcaaaaggtttttatcctctcatttcaatatgtggatgatgtcttaggaattgagattcatcgagatagagcaaaagaggtattaggtctatcgtaaaagacatacatacaaaatgttgttaagaaattcagtatggatgcatgtaactacacacatgccctagtgatcaagggtgataagttgagaaatgattagggccccatgaaccatatatgagattgatcgaatgaaataatttccatatatttcaactaccgaaagcataatgtatgctcaaaagtttattcactctgacttggttttcataatatggatgcttagcagattgcagaagaatctagtgatataacactacaaagttg

SEQ ID NO: 113112 - DNA, 412 bp, Zea Mays
gtctatagccgtgtctcgttccacgattccctgctgcaagcgattaacctccgctgatagctcagcaatgcggtggctatctcgtgcacgctccctatttccatggcacagttctgacatgagtcattccaccttggcctctagatcccctatgggatcattgcttccgctactgctcccctcatgtcgaggagccaactggtgccggggcacacctcgaggtccggttgccttttgttgggtggtcttggtacgcgccatacctccataaaatgggaagatctatttagtacagtttgaacatgatgcatgcatgacataatgattatggaaccaaatttttgttgatcttgtacctcctacgtatactattatttggcactttgttacccaacttcaaaagataagttac

SEQ ID NO: 113113 - DNA, 320 bp, Zea Mays
ggaagagattggtatggatttatttactggattgcctcgcaccccgaaaggatatgagtctatatgggtgattgtggatagactggccaaagtggctcatttcattccggtcaagactacttataaggtatctcaattggcagagttatatatggctcggattgtgtctctacatggtgtaccaaagaagatcattttggatagaggatcatagtttatcctcggattttggaaaagttttcatgagaatatggatgctaagttgaattttagttcggcctacctcagactgaaaggactaatcaagtattggaagacat

SEQ ID NO: 113114 - DNA, 442 bp, Zea Mays
acttgtaatactattttgactcattgtccatcatggtagtgtcggtatccattattgtcttgtcgtgttggtctcgttctagctgtagtctactcttctctatctccaacagctgatcttcacgacctttttggtctctatctatttccaaccttgcttctctcattttttaacttcttcaatgaaaggatcagtttcgtcatcttctcgctttcttgctctcatctttttcttctcagctttccttcctggtggtcttgcaacgttgagttcaccaccaattttaccatctccagccgtgttgtgttcttggattgtggcccacttcggctcgtgcctaagaatgttccatgcatgaaacaaagaaaaagccttcttccttaacctttggtatgtaccttttgcttcggcaatctacaaagaagcacatatttgacacttc

SEQ ID NO: 113115 - DNA, 463 bp, Zea Mays
ctttgttttaatcattttaacttaaacatttaggattgcgttggtgccattgatggcacacatgtattggctagggttcctagttcaatgagagcagccttcatggatagaaagcacacaacgacacaaaatgttctagcagctgttgattttgatttgagatttatctatgttcttgctggctgggaaggttcagctcatgatgccttgattctatcggatgcattggaaagatctgatggcctcattgtgccaccaggtaattccataacatgtttgaatatgcttttaaattacttcataatcaaactaactagaatcttgaagaatagattcaagattctatacaacaagccttttcatccatatccgacacaagttaagcttgtgttagcatgcaccatccttcacaactggattcttagatatgggctggattcacattttccttcagaaaacactt

SEQ ID NO: 113116 - DNA, 470 bp, Zea Mays
atatccaaattgcctggcaacgtttgtcatgtgttgcaaggatcattcgtagtatttatgtcacctaacaatatttgtcatgcgctgcaagtgccatccatagtatttgtgttacttagcaacaacgcttatcatgtgttgcaagcattatatgtagtatttatgcaaatcagtatattggttttgaaacttacaaagtaatccctccatcccaatttatagatcgtttgattttttagacactaagtttggcttactcgtcttattaaaaaaatcataattactatttatttttatcatggtttaatttttttcatacttctgtaaattcgcgcgaagggagcgccacgccagttttttccttctgccattggattcattttggacggtgattagtgaattcacataaatgttggctggtgatctctatatttccaattccccttgccctttctggaaccggctgggga

SEQ ID NO: 113117 - DNA, 611 bp, Zea Mays
gccgaactgcctggttggctgcttatattatcgacaactataaccgttccaaacagagttttttctttccattttgtcatctctgacgcatcagagaaagaaaaagggacactaatggcgtacaaggtacaaagacaagcacagataccaggcatctgaaccggaatcaagcagacacggcaggaaagccatcagaggaaaggcaactgaagtcggcaaggctagcacgaaagcactcgataagcccaagcacagatcacagacagtccagcacgaagtctgctcgcgaggccgacacacgcacacactagcagctcctttcatcgccttccagcacggaaggtctttcacagtcccagcagcgcaagcatccacatatgaaattcaaaactcgtatcaacgcataggacacacatgtgacctcagtctcttcaaattttaattctcttgctatcagctctcgcttgatttgcgagcttcgtgatatacacaagtgcttgttgaatgtttgaagagaagatgtctgaggagaagaaggttgtggaccccgctcttgctgaattttacgaagctatggaaaaaacaaacacagagaacatcacaaacaaaat

SEQ ID NO: 113118 - DNA, 345 bp, Zea Mays
aaagaacatcttaagggttgggatgttgtgtataaggtatcgccgcacgggagattacctgttcctaacgatgaagattataacttagacccgtacacatatgatggaaagttcttccaagaaaatgggttaggagggcgatttgagatagacttaaccgaagctatcggaatggacgtagatattgaaatggttgttgatgaggaggatgatgacgtgcaaaatgagaatgacttagtaatccttgaaggcaatgacattaatgacgaacttgtgccttcagatggtgttgactatgaaatggttgatagtgatgatgcgagttatgatccgactaaccccgac

SEQ ID NO: 113119 - DNA, 1202 bp, Zea Mays
cggagatccattgcagccctgtggcaattactcaaatcaatagtaaaatgtctctgcaaatcagcacccagtagattgcaaaaatacccttcaagaatttgctgcatgtcatcatgattggtagccattcttccatcttcctcatgtttggaaatgaaattctttttcttccgataacaggcctgtaaatgaaagaacttagtgttggcatcaccctcctttagatagtggatccgagatctcaaccgagcaacagtcctttcaagagacgcaaggctaaggcagcgttgcttcaacatgtttagcaaccaaacttccccactggacaaaattctgatatcctgcgccatttccaacctatgcaacacttctctgacaagccccagctgcatccttacattacccacttctttatgcccctaggactgcagcacgcgagctaaccttttaatcttcaatgacacctgttccaatgagcaggagctcctaactggcatgctccaagacgcacccaccacctccagaaatccaggaattttgggccaaaaactctcgaagtgaaaccgtcttttcccatgcagccatctctgacattgagggttaaaggacaatgatctgaagatgtggtagcattactatgaagagaagcgtccggaaatagatcttcccaacagctagtgcaaaaaacacggtccagcttaacaagagttggagcatccctgtgattggaccaagtatacctccttcctttcaaatgaatctctttcagatccaaggaattaataagcctacggaagtcccccaacatagccctgttaatattggaattgttcttgtcttcctccctaaaaatcagattaaaatccccccaatgatccatggtcccacacaggtatctctgatttctcttaattcatgaagaaaagaggatttaagattgtcctggcgaggaccatacactccagtgaaccaccaacaagtaccatttcgctcctgcaattgaactgagaccgaaaattgcttgataactgaagccatagatgaaaaaactccatcacgccaggataacaacactcctcgtctggtaccaatcgctgggctataaacaaaattactaaatccagaccccaaaattgagagaatatcaaagtctaaaatagaacatagtttggtttcctgcaggcaaacaatcgaaggtctag

SEQ ID NO: 113120 - DNA, 317 bp, Zea Mays
gatctgaacaagaaacgacagaccgaaataaacttatttcggcatcaataatttgttccgaaaacttccttcgtcgagttctagataaatttgtttggggataaaaatcattcgagtgggtcgggcttccgattttgtattctcttgatctaataattttaaacggacacaagactcgacatattgcgaaataaatgtgcgatatcgatgcggcatcaagagtgcgatcatttccggaaacgacgtcacacatcgattacgtgggcgagagcctgtgcacattgttcttttcggatagcgcgggactccaaatttta

SEQ ID NO: 113121 - DNA, 464 bp, Zea Mays
gttgcccatacatttccatcatttcagaggatgcttgataaggctcttgctattgaacacaagtgtgttcaattgggagacttgaagaggaaggcaatctcacaagggcaaggtagcagcagtgttcgtccttgctacgtttcaccacagggtacaccaactcgtccaggaggaggaccacgtccagctcagtacgctccacaggggtctccacggacacctcccactcatcaggttgcctccattgccaccccgacgaggcctacaggacagaagaccgaccctacatgcttcaagtggagtcaggttgggcactatgctaatgcttgtccggtggggaattctggtacaccagctcagaacaagcaacagactcctggcaagggatattctatagcgagtgttaatcaagtcagcgcaaatgctactcctgatggtgctgacatcgcactgggtatgtttta

SEQ ID NO: 113122 - DNA, 530 bp, Zea Mays
ctctcttgctgggggtgatgccatgaaaaggcgcggccccagcccagacctgggaccgacctatccccatgaggtccaaggtgtcagcatagatgatgttgaggttgcttcctccatccatgagtaccttggtgagatgagtgttgtcgatgatggggtcgacgacgagtgggtacttctccgggttcgggacgtaatccgggtggtcgtccctgtcgaaggcgatggcgcgattggatcagtctaggtagactggtgttgctgcttcgactgagaagacttcttagtgctcctgcttccgttgccttgaggagatgtttacggaaggtccccaaaatatcatatagcagttgtgaacgtcgaggaactcctcgcctttgtcgttgtccccatcactagggcctttcttcttgccttcttttgtcgaaggaccgggcttgttgtagaagcgctggggcaagtcacactcgccgagggtgtgcttgacggggcccttatggtatgggcaagattccctcatcatcttgtcg

SEQ ID NO: 113123 - DNA, 627 bp, Zea Mays
ttttcccatcacagcttggtaagcaaactcatgccctctgatacattatagtttgggaagcatctattataaaccaatcacttgaaacctcccctccctgtactactctaaataaacctcatccaaagtctgatgtactgaggtatcaagatatcacctcaaatatggatgtgcacaagatatttctccatctaagtatgacatagatatgggtgtgcaattagttaatggatcttgggtagaacaagggaacaagtctgattttagtcagatatgagtaaaaatccttgagcctgcacagaaatgttgcatctcaagctaattagccattcagagcctgtgtggatatggtgctcctcgagctagttagccattcagtctcaccattttattgcttcactaccatccctaaaccttttggcttgatccatttcctatattgaagcattcacaattaagccaaactgatagcatggttttggcctccaaacaacaatgacataaaatgcacgagcacgacaacacacttttacttgctcacgactgaatgtattgaattgccaggttgctaatggccccagtgaatgacagaacgagcttgaccatccccatcaaagttgtgttcac

SEQ ID NO: 113124 - DNA, 916 bp, Zea Mays
ctcttctgatgggttatttttggggtatgccttgcaagggcgagcgtaccgtgtgcttaatcttgctactaaccgcatcgaggagacatgtgaggtcaccttcgacgagacaatgtcttgtttctcttcagtttttgagtgtgcaggtgatgatgagattgggcagaatatttttgaggaagagaaagaggaatacagatgtgatgacgacgatgatgatacccagcctgtagcgcaggaggagcctgacgcgcagactgagcaggagccctccacttctttggaagatggaccatcgccgacacgtacatccacagcagagcccgcagcttcaccgactgttgatcatgtaccggctgtagttgagggggaggcgatttcagaacgtacagcaccacgacacattcaggatcgtcatcctcccaagaacataataggtaatttggatgagcgcacaacaaggaacagaggtatgaaaaataaaaattactgtgtcttcgcgcatactgcttttgttgcctcttttgaaccccgagatgttggacatgctttatctgattctaactgggtcaatgccatgcatgaggagttagaaaattttgaacggaatcaggtttgggtttttgttgatcctccaccttcttgtaaaccaattgggactaaatgggtttttaagaacaaacaaggggaagatggtcatgttgttaggaataaagctaggctggttgctcagggtttttctcaaaaagagggtattgattatggtgaaacttttgctcctgttgctcgcttagaagccattcgtattttgcttgcatttgctgcttcacgtggttataagctttatcaaatggacgtgaagagtgcctttctgaatgggtttatagaagaagaagtttatgttaaacaaccgcct

SEQ ID NO: 113125 - DNA, 351 bp, Zea Mays
atatgttcaaagagcgcgggattataatgccaagagagcaattgccgtgttcaggatgccaaatgcctaaagaccgatgaaggggatgccaatattgcaaaaaatctcatcctttatggcttgtttggtagccaggataccgaagggttgaatagcaagaggattttagcccctccaatcccctctggtatccttactcccaaacaagcccttagagagtgacaatgaaggcaaccgacaatttcatcggtatatttttttctttaggcctcatttggtttcactgaaatttttggaatctgattctgcatagaatccaagataatatcacacaatgcaggcaaagctaga

SEQ ID NO: 113126 - DNA, 553 bp, Zea Mays
acacgacaacgtgccttctccgggtctccccacctcctattcgtttgtgtagacgtaccctgagatctagcccaacccatgtaaaaagaaaaacaattccatggactggtcttcaactccccgttcccgattgcgacgacaggcgaaggggctaatgccactgcactagggttcaagcgcccgcagtttggcgcctttgaccttcaatactgggttcatgattcattcctcttcctgtccttggatggcgacgtcgttactgggacccacacaggcacaaccacacatccactgagctgttgaggacctgaggtgagcatcacttcgtgagcttctctctcgtcttctcctgcttctatctgaaactctggttgcctctcctatttggtctttagatattgatgaaaatgagatatgatgaacgatatttatgtatttatgtgaactgtgaagcacatgctagttgctaaattacaatagacagagtaatagaaaagagatgcattgttgagaaattgatgtatcacattttctctttgtttatcaatataga

SEQ ID NO: 113127 - DNA, 325 bp, Zea Mays
agcgggcgcgtaggtgggcatgaagggtgaccatctgtgggctgggtgcgctgctcgtatgctcggggcagggctagggctagttataggtaggttgggcagtagagctcgacgtcgatgcagaggcaaccaggaaggctggcgatgaaaagttgtgcctactggtgcgggggaggaagtgtagtcgcatggtaaaggagcgtcgggatgccttcctagtagagtagtagtcttcgatcctcgaccgaaactggagacaggctgcctcgcccaattggttgctttggaggggaggtccgaagcgttgctggaaaagctccttgaa

SEQ ID NO: 113128 - DNA, 564 bp, Zea Mays
cagtttggccttgggttacaaagtgagaccagacatgccgaatatcaaactcagaagaggctaaaatacattttctggctatttttataacataaaaaggaaggtctattttatagtagttaggtctgaattttaaaaagaaaacatgggtagtggaatatatttaaatcactggagagccgctagctgtaacattccatctgaaatagcacaatggttgaagcatgcactatatgtgagcgagggcatctaaagtgcataggataggaatgatgcaaaatcaacagaaatacctgattgatcttgcttggtttatagagaacgccgtgtcacactgatcgttcgaaggatctagaagagggccagaggctggaccctgggaggagtaatggagaataacaacatacattcctgaagtgactaagattacacgatttcttctatctagtgaagtgactaagattataggatttcttctatctagttagatcacaaggttctgttcttttatgatggtgcataatcaaaacagaagatggaaaatgcacgaaaacaattaaagag

SEQ ID NO: 113129 - DNA, 807 bp, Zea Mays
gtggttgagaatccaagcattttcaaagcggaagactctagatttcagaatcattatggagatggaaactaggatgggtttgtgatccaaggtggggcgggggagagcattcaaggagatggaaggaaaagggctagtagctgggtattagagaaggctcgatcaagcctagtaagggtgggattagcacgacaattggaccaggtaaaggagcatccagagagagggagctccatcacacaaatgtcattgagggtggagtcgaaggctgagcaaagtctgttgttcatttggctagagctcatctcatcgggggatcgaatagggttgaagtccccaagcaagagctaggggccttgaaccaagatgaagagttcagagagcttagcaagaaaggaagggagtgttggtgataggcataggcatagacattcatgagggttatcgtgccatcgaagagagatgatgagagggtggtggttagggagtaggttttctaggtgcaagagacaatagagaagcttgagtgataattcctcctgagggcccgtcggcggggttagatttgaagttcctgacatttggtggaaggaaggtacgtgtcggcgttttggaccccgggggaccctcaaccgggccgaccagtgaattttatcgctgcgtgcccctgtccacatgggttggcgcaagatggaacacaaggggaaatgcggcctatattatctcgcgccaaggggtgctcgtagtaggggttacaagcgttcgagagagagagagtgagcctgttcgtttgctcgtccctccgcg

SEQ ID NO: 113130 - DNA, 344 bp, Zea Mays
tggcagcaataatcgttggaacttcttcagttttactcccagaagcttcggcaaaggaacaaggtggcatcttcacagattctagaacagcttccaaaacgctagccatcctcctttttcttggagtgcctgtggtagttggcagcttcggcaatattgctactttcatcttcggctgccctggtactttttctgttactggctctggctctctggccaggtctgcaataattccagtaggcacaacaggaatagcctctatggccgaggggggttgtttccaccctttcacttagcttcggcacgtcgtccgtctcaatgcgcctgggtcaacgcgtcaaaaa

SEQ ID NO: 113131 - DNA, 429 bp, Zea Mays
tgatgatgatgatgatgatgatgattttgggattcctccgcctccgcctcctatgcctccacgctcacatgatcatgaggctgggagttctagtgctgcccctgctgcccctccggctattgaccctactattgcttcgattcttcagacactcactcaacagcaggctcacttggcagccgagcagtcacgccaggcagcagctcatcagcagttatccgagaggatgctctcgatgtttcagactatacaggacagacaggattcccttcagcagcagcttctccaggatcgggctgagagcagggcattcatggctcttatgttgcagcattctggtgtctcagttcccctggttcagtctgctccacctccttcgcttcaggctccagttttgccagcgattcagacaggaccctctcttccttc

SEQ ID NO: 113132 - DNA, 464 bp, Zea Mays
caagaattaagagatatcaggaatacatgtgtgggtccgtggatagttgctggtgattttaatcaaatgtacaagtcagaagacaagaataattctaacattaataggtctttattgggcaatttcagaggtcttattggctccttggatctgaaggagattcctttgaatggtagaagatttacttggtcaaatcagagggcggttcccacccttgttaagttggaccatgttttttgcactacctgctgggaggaggctttccctgattgttttctttatagcagtgcctctgaagtttctgaccactgtcctctaatccttaagctcaatgcggatcttagagggaggcgtaggtttcattttgagaacttttggcctaaactcccggattttttggaagaggttgctgcttcctgggatcagccgtttcagtcttcttgccctctggagagggtgtcgat

SEQ ID NO: 113133 - DNA, 1119 bp, Zea Mays
gtctgactgcagaggctatggttgttgactttgtcttcaagaatattcagccactgaaggatagggcatacccggcctatctgtaccgaggcctagctgactcaacccgggtaaccaatagaagaattcctgctgtggacttggtgagccagctcgaaatgatactcagaggcaaggtatcaaatgttggcgcccctgttgcatactcggcctggaacctgcctccttccaaggcctttacccattttgtgtcaaatcctcctgctggtgatggcggtttgggccttagagtgtgaccctctgccgaagaagttagtgctttggttgcttcgcttgaagaaattcttgatgatgaacggcaggttcactttgaggtgcctttggatcccagtgatgcagagataagtgccatgcttgatatgttagctgaggattcttctgatgccgctcctgctgaaacattggtggcggtacccatccctgaggctgacaaagctttggacgctcagaagtctgtcaatgttcgtccaaaacgttctcgccgagccaatcaagcctcttttcctgcttaggggggagaaaaagaagaagagacgtcttcgtcgggtgtctagcttagatcagggtgcccgtccttctgctcctgttgctgaggaagtgttgtgacttaatttactgaagctgatcccaatgggtgtgactcgtctgacgctgaccccaatgggtgtgctgtccgtgttgttgatgaggatgatgaagaagaggacaaaatccctctgattcggaagaacaaccggcgttacatagctagtggggaaagtagtggtgttccttctcctaccttgtctgccctcgttggtctgcaagaattatctctggcgaactttgatcaaactcttgaagatatggttccagaagatctgttatcagaaccggcagatggtggcgcgattgatgtttgtgttgatgtgctcgatgccgggttggggtcatcccgggcagcttcccgtgcctcatcgaccttagagcgcggtcttgagagtcaggaagctggtttggattgccctgctcccatggaagtgactgagggaccttcagccttagaggtggctgctgcag

SEQ ID NO: 113134 - DNA, 445 bp, Zea Mays
caccgtattcaatcgttcttcttctagtatatcaacatcttctagtctagtagcctcagcttctgctatgttttcaaagattaacctcggtgccccaaacttaagatctgcgggtagcactgcctccgaaccatagaccatgaagaaaggagtgtttccatgtagagctcggctaggttgagttctcaggctccaaacgacgtacgacaactctctaatccactttcctgcgaacttttcattcttgtcgaaaactttctttctgagtgcttccaatatcatcacgttggctctttctacctgcatgttggctcttgggtgcgccaacaagacatatttgatctgaatgcttttttgttcgcagaaataaaaaactctgagcttgtgaaattggatcccagatcggttatgatgctatttggttccgaacctgaatattatgtct

SEQ ID NO: 113135 - DNA, 2395 bp, Zea Mays
gaacataagctgcaaaccgaaatgactttgtctcaagggtgaaaggacaacttaatttacatgatgcatagaaaatccaaaaaggatctaatgtttagaaactctaagcaacaatgcaaaacttcaaaaaagatctaagaaaaacagaacatctgtatgtacggacagacttttttttggaccaagagcaccaataatctctaatgttttatcacaggggaacttcaaggcagcctcagtgcctcacaatgttcatcctcatctttatcgtcaaaacctcctatctagcaaccacatgtctggtgccgttaactgaaacaccctatttcatctggtgcttcatgtcattgcaacatgtacaatgcggcgagtggcgaccctgaaacaaccatgcgcttccatgccaactttgctactggaaagccttaagcctccaatgacatcaaaagattggggtcggccaactttatcttgaccagtagccaactttatctagcaaccacatatgtctggtgtcgttaactgaaacacccgcttcatgtcattgcaacatgtacaatgcggcgagtggtgaccctgaaacaactttgctactggaaagccttaagcctacgatgacatcaaaagattggggtcggtcaactttatcttgaccagtggctactaattgacatgatccaggctttgtctatgtttgaacttaggcaaaattgaaaatggaatattagcaaaacggttcttagagaatagtgctattgaggcaaatctgcctgtaacttatagcaacacggtaagactagatgtgatgccaacaagtcactgatagtagtagtagtatcactaagaactttgatgggtgtagcactgtagcattcattatgaatgtgatagtacctattcgataccaaaaaaatcacagatgttgaagtttgcatttttttttgttctatatgtaggtatacattcgccaccatgatcgtcgaaatatttacaggaccagttaggtatccagaataatattgtttactttttatcaaaacttactagttgaaagaccagtgatcaccatgccacatttaagtggttgatgaaaatgaaattaagaatttgactaatgctacagcctacagcaacacagttgggtacaatattttcgttttgtatggattttattattaatacagaaataatcagtgtcatagagtaaaagagtaatgccacatgcaatttatacaccctggcaacatgtccaaacacttatgcaggagaagatactaggttgtggcaagcaataactaatttcatcatttcattattgtcctgctcgcaagagtagcgagcagaacgttacatgtgccatgacttccggggcctattagctaacttctagctaacgtattcagtaagagttgatagatagtgttcagtttccaggtaccataatcaattcacacgaccagcagctgcacccaatttgccgttttttagtttggtcggctaactgatatcctaagaatgtcccacccaattcacacgaccagcagctgcacccaatttgccatttttaagctcggtcagctaactcatatcctaagaatgtcccacccaattcacacgaccagcagctgcacccaatttgacatttttaagctcggtcagctaactgatatcctaagaatgtctcaccccattcctacacgacgcgccaaatccagcgaagtctagtataacatcagttcaagcactaggtacagcatctgcaaactgcatcacgtccattacccggtccttgggtcgccagttggagacgaggccgctggtagagagcgcggcggtggtagcttcgtcgatcccctcgtggcgatagtcgcacagcacgaccacctggggcaggtacgcctcggacgccggcttctccacctcggggacctccaacccgttcttgggctccggcccgctggcgacggggaggtcatccgcgacgtggttctggtggtggttgtggtggtgatggggtagcggcggcaccggggccaatgacggcgacggcgaggacgaggagtggccgaacctggacgccatgagatctcccaatgccatcgacgtttgctgggttggtgggggaggggtttagggttagggtttagatgcggctgggaggatggagagagggggggtgtaggtaggtgggaggagaagcggcgtctcggactctcggtgcgggaggaagcaggcgacgccgagcaaggagagcgattgacgacgagaaagtaaaataaaactgctataaaactaaaactagtagcttactcgcgccttattcgaatttttttcctaaacagtcaacatattagtttaattttaatccgtatcgactgatattatttctatagag

SEQ ID NO: 113136 - DNA, 287 bp, Zea Mays
ctctgagcttgaggagaaacatcttcaacatcaagccgactcaacccgacggtactccgagcttgaggagaagtattcccaaggttagatcgacctagcttgagtttctgcttctttggacgacgtgcattctttgaattcttctcttaatgctcagcttgactctgaaagggcggctaatgaggtaagctttcttaattagatctgccatgcttttactgcttactggatgcttgagagttgattcttgtttgtaggaggagaaacaagcacttgcagcttctcgc

SEQ ID NO: 113137 - DNA, 524 bp, Zea Mays
ctttttctgctcatcagcagaaggatcaggttgactggctcggcaagggcgcctcggacgagtactggcaggcttctgagtatctaaagtcgtaccagcctctgggaggggcgccaccaccaatgtcccagcaggagcagcgtcagaagagtcctcagccagcaaatcaagcatagcacttatctctgcatcactaggattcagaggcacctcaaaatggacctgccgttcatcatcaggaatctccccgagcaaggcaaccaaggcactaacttcttcagcagagggtcacactctaaggcccaaaccaccatcagtgacaggtggattcgacacaaaaagggtgaaggctttgggaggaggcaggttccaggccgagtatgccactggggcaccaacattcgacaccttgcctctaaggatcacctcaagtcggttcaccaagtctgcagagggaattcttctgttggtaacccgagttgagtcggctaggcctcgatacagataagccgggtacgccctgt

SEQ ID NO: 113138 - DNA, 401 bp, Zea Mays
atggcgggttgttaactataaagtgcagggactcttttacaaaagtggacgggcgaagggggtatctgttggttctggccatgcgatctgagatggagggttcagattagatctactcttgacccgaaccggtatgaagacagaaccgttggatcagagatccacggcccagagacattcttggcgaaagggtacgcacgatatgattccagccgcacgtgaccgatccaatggtccccgctagccccccttcttccatacctaggccacaacagcgacggtaagcccaccatggaagcgctaaggccaaggttgccaaccatgccctggtgaaccaactctaaccgaaatgatgccatgcaaggcatagatcaaggtgcaaccaaagagcggagtcttac

SEQ ID NO: 113139 - DNA, 515 bp, Zea Mays
agaagcaaaatcctatgtttgatcaaatagttaaatagtgcatattcctttttagtaataagcacaaatgttaaggattttacttcatgtctgtgtgacttgtggatgatgaatcatgtatgttaattatctaaagtaatcatctttcaccacatactcccttgcgctattaacatctctcttgagtattttcaatgagcttggaaggaaaagagacaactacaaagggaggacactcaaatgaaaaaggaagaacatcaaggacaataacacctacttggacaataaggtcttcacaacaatcgatggtgtggttgtaagcattccaaattcttttcattatggaattaccaggcttaagttgattattgcaaattttataagcctcgatcaaggtgtgtaatgggtctcccttttgtgtctttaaaggtgaatgcatcaaaatcaattctttcaatttcttgatgcatatctttagggggagttcattcttatattttgattatgttgagact

SEQ ID NO: 113140 - DNA, 570 bp, Zea Mays
ggtggccggagatagagaagaaccttggcgcagtggattcgtgtctaccgtcgtggcgacttcaccggcaaccaacggggagctagagtgagtcacgatgatgcggtagacaggtagagacacgcggcggatggcggtgagggcttaacggtggtgagaaccttatccgaaggatcagtgcgcaagggggaggcacggcggctagccggagtggcgtctagcgcacgcagtgatgatcttttaccccgcgatgctatccatcaactcccggcacgaatccagtcgtcggtgacacgaatcgcggcgaaggatcggacgtcggcggtgagggctccctgcactggcgtcttgatcctcacaaagcactgtaccatggcgattttcagtcagatgaacctgacagccaatctttgagctaaattttctctcaaactcatatagcaactaatccgggactctgcagcaaagttgttcctctataatagctctacaactttgttatagcaaccctaggtagattctcactggatcatagtcgaaatggctctcaaacttggatctaggtcactg

SEQ ID NO: 113141 - DNA, 325 bp, Zea Mays
ctttgctataaagaatatgactcgcaattctatagaccatgcacaaaagagctaacaagttgttccaaaacacacaatttcgggttctggtttttttacaagtctaaaatctagaactgaacattacatttttgggccattgtttcttccagttccgtatagctttaggggcataacctttaaacaaacttatacacaaactactggtcttccactttgatacataaatgttaacccatagctgtatggatcagccaccaacaggcttccaaagttgcttcagaatataaaatcttcaatttcagagattgaagtctgaaactcc

SEQ ID NO: 113142 - DNA, 563 bp, Zea Mays
tgtcacaaggaagcttcaaggcagtccacgccctatctttgctcttccaacgtagccacggccatcttaatcttagccccctcgcaaaacgatcaaggtccagaacaccaagacctcccttgtcctttgggaggcaagttaggggccagttgacgaggcagtgccccccgctgcaagcttctggattgccccctttccacaggaagtttctacgcattttgtcaattgtttgcagcagccatttttgaggtggaaaaaccgttaaatggtagattggttgtgcgaatagcaccgctttaacaagagtttctctaccggcctttgacagcaatttgcctttccagcctgccaacctattgttgattttttctattagaggttgaaggtcatttcttctaactttcttgaaatgaaggggtaacccgaggtacttcccggggagactagagtatttgcccggaaacacctccattagtgcaggccataatgctgtcgggtaacgaattgggtagatttctgttttgtcatagttgatctttagcccagagcacccctcgaacgcg

SEQ ID NO: 113143 - DNA, 419 bp, Zea Mays
gatgaccagattgtaccggtaaccagagatgcttggaacagggcatgtctaaaggtcatagtggatgaggtcgaaggggtgaataggtcgggacatggaagaagagaagggtaagcgaatataacacccaagctgacaggcatggcaaagcgaggtgtcatcgccacaagggcaagggatagtcgaggtggtcgagagtcgagagaggatgtcgtggctgaggtggccaagacgacagtgtcaagtggaggcagaggtagtggaggtaaggttgtagggttgggcaacataggcggaggaagatgggttgggggaagcgaatggggtatcggggcccggagctatcgcatcaagcaaccatagcatgagtggtaagaacctgtattgtgaggccctagggatcgaactcaatagagtag

SEQ ID NO: 113144 - DNA, 465 bp, Zea Mays
cggcagatggtggaatgatggaagtttgtgctaacgtgtctgatgccaggttagaattatcccgagcagcatctcgtgccttgtcgaccttggagcgcggtcttaagagtcgagaggctgatctagattgctccgttcccatggaagttgttgaaggtccttcagccttagaggtggctgccacaaagagctcggtcctcaacaatggtgctagcgtttgcccagcccccgagggtgttgccggagatgatccggctcggatgggtagcgcgagctatgacccagcccccgagggtgtccgagtgggttctccctctcatacttccatagatgttcatgtagggtcttctcctccgcattctggttgcatggcagcagcacgagcttcgggtcaggaagtcgccttagaggccagcgctcccgatgacagagttttgatttctgctgatgacgccgaattggtcc

SEQ ID NO: 113145 - DNA, 419 bp, Zea Mays
atcaacattactttcttggtgcatgacatcaatgttgtgcacaagaatcaatgacgacatataaccgagctcccacagaccacatatatgtgtccagttggggtccactccgaatccttagtacttgtcccccttttcattttggacaaggttgttcagctgagcatatatttctgctgcgttcaaatgtttaggcggtcctttggtgaccacggtgttctttgtaaagtttttcttatcgctcctaaagggtatttcctaggcaaccagcaacgatgataatcgaagtaagtgatctttccaccatgagcaacacagaagcaatatgtatctgaaccgcaatatggacatgtcaactacaatgtgtactacaactggtaaaaatagaatacaccatgaagtcatgcaccaaccacaaa

SEQ ID NO: 113146 - DNA, 387 bp, Zea Mays
cttatgttttcctattgtgtcatggaatgttcgcggtctaggaaatttagataaatgcaccgttgttcgtgatgctctgattgttgctcaccctttcatcatttgcatccaagaattgaaactctgtgaccccgacactttcgcaagtatttccttcctacctccaaacatccacgacttagcatctatccctgccgctggctcccatggtggtattatcaccgctagggacccctcctgcttctcccttgtctcctacaccaacaccctgaaaaccactctctaaccagtaccctctcttcacctctcttcaatgccctgataaccattacaaatgtctatgccccaacatatcaccatgaccccccttcttacaccctaccccgc

SEQ ID NO: 113147 - DNA, 338 bp, Zea Mays
aatttttagtcattgtcgctatccttgtttttcttatcctaaaaggtttgtttccttgtactaacagtgaatttgattctcaaaattggatgtttggctgtgaatgtgatcagattcgtcgagagggaaaagatgggggacctaattttttgtgttggttttgagattatgtagatataaatgacaatatacacccggaccttcgataattgtccctatgagcagtaactgccagacgttatggtcggtatgatgtcaatggttttcgttttcgttctacaaggttcgaagatgctcatcctctagctaccacaacaaattccggagttctaactaga

SEQ ID NO: 113148 - DNA, 444 bp, Zea Mays
ggtttgctgcaacttgagattctgtaaatagaaatggctgattgtgtttttctgcagaactatttagaacccatagctcttattgaattgtacattagttttgtgactggaagtcgtgtgtttgcagtcaattgcagacacatgatgatcttgtttgttattgcaagaacctgagtcttgttgtacttatctgctctcaagatgttcttgtttagattaactgaatctgtctacttcttctgatactttatacgcagtctgcctgtccgagctttagcctgagttcctaatatgtgctgcaccccctccccctgtccgagctctagcctgaatttgtctacctcttccgattccttatatgcggtaacaaattgtccacaatgattgtagcatattactcattaatatacacttgtgtgtgaacctgtttgtttgcttgtctgc

SEQ ID NO: 113149 - DNA, 473 bp, Zea Mays
tgatgcactaagggtgtatttggttgtcttgctaaggcaaaggcaacacaggactagtgcagtgtgcagggctccaacttggctgctttgtgctatgcattgagtgtttgtttggtttggttacaagctgggcattattaagtagtgtttgggtggttgcttcacaccttgcattgcattaagcaatgcgacttctctggtttggttagctgcagtgtgcacggtgcagttacctcaattgcaacttggtgagattaccgcaatgtttgaaaaaacattgccggcactgagcgctgtttaaaaaacaaggtgggcacttcaacagcaacactgtgtgcggtttaatgataggttcataatatctagacatccggcgtcgaaaagggaacagaggtgagtgagaggagagtgaggcggcagggaaaggaatgcaggaggtaaccctaatgccgctcggggtctcctcgcagagc

SEQ ID NO: 113150 - DNA, 397 bp, Zea Mays
gtttggtatgattatccttatttacaagaaaattatgagtggaaataaatgaatttcaaataaaagcttttttagcaaagaaccaagtttagcctttcctgatcaacctacatgacatcttttccatacttgttgaataccaaaagtacttgctttacataatatttctcaactaaaggaagtgtatgggtgtacgctgatgagcacggtggcgaagtctagactcatggtcttctcgatctatgcctgtggaggccactagattcgttgatataaatagtcgttgttaaggttataattttacaatattttaaaaacacttcacctcctcgaccttcttcctccctttttcattttaaatttatctaatgctctctattgttaaaacgagttttca

SEQ ID NO: 113151 - DNA, 1224 bp, Zea Mays
atcttttaattgattagcaaggtttttggacttaatccagttttagtactgttccattggctcttaattaatcgaacttggaccaagcagcattttctgctcatcttttttttatttgacaaggtctgtcctgtcttttttatttgtcttacacatttctaacatattttgttatcaattgcagttagttctcccgttggttgatttgtgtactggggcatattggattggaggagccagaaaacttgaaaacccagagaattactttgaacttatatttatgtcctgatttatggaatcccatttctaagagatgccatcatcgataccaccaccgccacaaaattttctcccactgccatcaccaggggttgggcagagcactcgtattaaccttggggaaatcaagctaaaactagttaagaggattggtctagagcgagcaaagaggtactttgagcacctgcagaggtttttgtctttgaagctgagcaagagtctatttgacaagttctgcctcacaatacttggtgatgataacattcagcttcataaccacctcgtttgctcaattctccacaatgcttgccaagcaagtgggccatcgacagtcagtacacctaaatcaattggagttgccaagaattcaaatcatgtcttaagtcctacagtccctttctctgacattggtgatgttctgcatcatcatgtcaaggaccactatccacgaagcagaaatgcacatgtcgtccaggagaatggtgttgtgcgtttgtccaaactgaagagatttccgcagcctcacagtgaacttgtggaactactgtccaaacgatcacgtgtggagaatgcatattcaaatttatcagaccccataaatagcaactgtcctggtgtctctggtagagaatatgtggaagctgttgcacagcatgctcgaggtccaataattgccccactaggggttgccttctgttctggtcatttcggtgggaattcaaaaaccttgacacttccctctggtgctagcagtgatgactctatttgttgttatgaccttggtcagctgtgtgatacttcatcactgagacagcgtatggggagaatagcagaaacagaagggttggatgctgtgtcattagaatgtgctaattcattgaataatggagttgatttttacttgaaataccttattggatcatgtattgagctagtaagagcaag

SEQ ID NO: 113152 - DNA, 290 bp, Zea Mays
ctgaaattggtgctgtctcggcggtttcggtctcctttccttcatgagataccctagcagtggatctcaccctggccatttgtgttttcaagttctttgagccgaagctgatctcaggtgacgaagcgcttgcttggaaatgcagcacaggaagcttcgactaacccgtctgtttatatagcaatgaatgctctgtgataacttctcaccaacccgtctgtttatatagtgctgcagggggagaaggcgaaccgccataccgcttacactggctgagcggtggaccgacc

SEQ ID NO: 113153 - DNA, 701 bp, Zea Mays
attgagatcagttttgagtaggatttagtgactatttgattggggatgcaataccaaaattaaagttggattattggataacaagtttgctatagacagatgatcaagtcgctacataaaaatttgagaaaatcatccctcaaattgctctatcagatgctctgatggagatcgccatggtacagtacctgcaaaagatcgttggtgcactgaacctcgccgccggtgactcccacgctcggattcgcgtcagtgctgcgattcgtgcccagtggcgcgcagatatcttcgcagggtgaaagatctttggcaagagatgaagatgggacactgtggtcgctctgtcaccgtgcccacttgcgccgcgacgtggccgcgcgaacatcaccgtcgtgccgccgttcctcgcggtcatgccacaccgtcagccattttaccatgtcgcaatagaccatagttgatagccagtctatcacctaagtcattacctcagtgaaagccacgacagcttgcgctagtgaactccctccctcctcggccgccagcgcatcttctcaaaattgggtgccaccactgataaccactataaattgagcgttcggctagctctgttaggttgttacgtgtccagtacaccagccctcgcctccgattagccaccgtagctcgcgaatttcaaactcccccaattcggttctcgg

SEQ ID NO: 113154 - DNA, 454 bp, Zea Mays
ctccaatggtaacctcaactctgacctatgtgcaggcaataccctttatcgggatacactacatcttagggtagtcgtggatcccgtccctaccacccgctgaagaataagctattgcaagaaacatttagagtcatatatgctactaggagcacccctaaagtcaaaacaagaaagttgttttgtcagacatgaattttgcagtcctaattaaattatccacatttgttggccatgatttttaatttgtattacaccgtccacattatttatcaagggttttgtctacatatataaattgtatattgtctttgactttttcatgtgtatagtttttttaccgtggacgtaaatatagtttatgcctccctctctttggtgcacgcgtgccggaggagagccagagcagaggttgtagcatgcagtgttgataggtaggctggccgtaggtggc

SEQ ID NO: 113155 - DNA, 974 bp, Zea Mays
gatgagtcagattcagattgtaaaagtcaaggagatcgtgaaagaagggagaaattggaagagcaaggccgtggagaagaaaaggaatgtaaacgacggactcatgagtatcctccatcgggacagtaaccccacgacaaatccgccaggaataaagctccttcgaaggaagaactccgacaacgacgaggtggagaagatctgactcggaaacaacagacatatgattacctgtgaaaggcaattggctgttgggatcgatgggaggaataaccacagcgacagaattctgactcttccgcttgggcgccatctcaatctcgtcggcgaactgagcggaagcgagatcaaagggaaacagaggaggtttggaggcagaaagtaaagctagggctcagaatgcagaggcatgcgacgacgcggtacaagtggggttttctcgggtcagacaccatttctaaaaaagtgcccagtcatcactcggtcgttatttctagaacgccgatgtggctcggtgtaactcggcagttatttctaaaaacgctgacatcaccaatcctcactcggtcgttatttctaaaacaccaacgtggcttgatgtggctcagctgttgtttctaaaacactgatgtcaccactaatcactcggccgttatttctaaagtgctgatgtggctcgaaaggactcggttgttacctctaaaacgccggcatcgccaaaaaccgttcggccgttacccctgaagacaccggcagtaaaccagatcgttctttctccacgtaaatgtagacagaattaaaatgcgacacagcaatgacaagtcattactcaagagttacttctaagaacaacggctgcatcggatacaaacacaaattgtcgatcaactataaagaagcgacgcaaaggcaaagggtgtacacaagatcaagcctgagtttacttcattatataaggggggaatttcttgcac

SEQ ID NO: 113156 - DNA, 271 bp, Zea Mays
gaaaaaagagaatgaacagagtttttgacgccatcggcttcgtctaccccgactaccgctacccgctgcggggacaggggaagaagagaaaagctactgctttggtcgccccagctgagcctgtgccgaaggctgcgggcaaaaagatgaaggtacttacccaccgaccgcgttacattgaaccgacggtggtgcctaagtttggcggggaggccccttcagctactgaatcaagagaaactgctcctcctgcgcagaggactgaagagcc

SEQ ID NO: 113157 - DNA, 469 bp, Zea Mays
aggacagtcagtgagtatgtgcacaagttcacagagctggcccgctacgcgcccgaggatgtcagcaccgaggccagaaaaatggcccgttttttgaaagggttaagacccgagcttaagaccatcctcgccagccaagacttccacagcttctctcacctctccaacaaagctatccaagtggaaagggcaaaagaggaagaaaaagggcacatcaagaggaaattccaagtcctccgagcgcaacagcaagaacgtcaccagagagctcgaccctttgggcttccacccaggggtccaagcttcaataaacaatctggacccactccatcacgctacagtcagcagagtcagagctcccttcagacaccctccgttgcaagcaaccagccgccagcaaacgcctattggcactgcggagaccccagtcacttcaaaaacaactgccctcagttgaaggcatctggac

SEQ ID NO: 113158 - DNA, 523 bp, Zea Mays
tggagtgtgacctttgagccatggttggaccattaggaaggttgcatgaaggcccatgccgttcaaggagggtatggaagtgattagtcctaccttcacaattgatctagctggcagagatgtcacaacgttcatttgtgatgtggaggctgaggcatgtaaaattattgggaaatatgtgaagaaaatagagttgccaaagagcatcgatattcaaggttgcaacattcagatcaatcgatgttttgagctaaatcatctagaatatgggccatattctgaggctatgaaagaagatgtggaggagacttcaatgaagtggaggtggaataataaggagcggtggttgtgaaaggtggtgggacaaggaggggacttcaaagtgaaaggtgggggtgcctaagtcgagaataaaggaaaaggctcaaattcggtaggccgagccggtggggttgttaagtggggaggcatctggctcggtggaggaaaccatgggttttatcaaggacttggctgccacttg

SEQ ID NO: 113159 - DNA, 513 bp, Zea Mays
cggctggatattttcactctcccatttctttacacaaagttaaatgcaattatcaattactcgctttcagttctaatcacactggtctggtctgtttcggactgaaaaccattttcgtcgagttccaattaatttgttcgggataaaatcgtaagagtgggtcgagcttccaaattcgtattctcttaatctataaattttaaacggacacaagactcgacatatcgcgaaataaatacgcaagatcgatgcgactttgaaagtatgatcctttcggaagcgacgtcacgcatcgctcacgcgggcgagaggctgtgcactgtccagacaccggttagcacgtgccacgtgccacgccatgtcacagagagacacgtgctacgcaagcgtgaaagaatttcaaatgaattttcaggaaccacagttgatttcaaagattagagtttgggtaagacatcgatggcttaaccccaagcgatcaatgtttacttgttttaattaatttttagtcac

SEQ ID NO: 113160 - DNA, 533 bp, Zea Mays
tagcttcatccaaatcactagcagaggaatacccaccatcgtcttttaccaccaaaacatgctgttaggacaatcacgctgcacgtgtccatagcccttgcatcgataacatagaacatctcttgttctacctgtggaggctactgaagagccactacctgctggtttctgggcagatttggttgctgaatttgtggaagatgcacgtggtttgtcgccggaggaaggtggtggtgctggtcgactcagcgagggagttggtgttggtgtacggcgggtcatggacgtagtcgtgcgctgctgccatggtgtagattttcctgtagaaacattagaccttgcattagcacgtcgtccctgcacttccctttcagctttgcaagcaagatgaaacaatcgggttacgttagcataatctttataagcaaggatgtcctgaatttccctatttaacccgcccaaaaatctagccacagcagattcctcaccctcctctatgttacaacgcaacatacccatttgtaattcctgat

SEQ ID NO: 113161 - DNA, 532 bp, Zea Mays
ggcaacagataaactatccgcggatagtgtttctggacatccatatccgcgacttatatcggatatccgaatccgtacccgttacccgctacgaataaaaaacagtatccacatccgttacccgcgggtaacgggatatccgcggatatatccgtttgcccactacacatacaacatatttaaatccagcaaattcaaatatgataacatatttgtccagcaaatttaaatatgataaaaacatacaaccataaagaatttgtccagcaaatacatgtattaacgcatacaacgagcaatataaaattgtctagcaaaatcaaatctgaattattcaaattgataaaattacaaacatacaactggtccgtgaagtggttccaaactccagtgaccccacatgtcaggttactttaatggatattcgggtattcgggtatggatactgatttttcgtacccgttttaaaaatatccacggatatcaaatgctacccgtatccgtatccacgggtacaggctcgtacccaaaa

SEQ ID NO: 113162 - DNA, 741 bp, Zea Mays
gcataagtcaaatcttcttgaacactaaggtcttccattggtaattgctcctcaggtaccctgagacatttcttcagctgagatacatgaaatacatcatgaacatccgcaagacgatccggtaactccaattgatatgcaacttctcccactcgctttaagattaagaaaggtccaataaagcgaggggacaactttcctttgactttaaaccttctcataccccggagtggtgacaccttcaaatagacataatctccctccttaaactcaagcagtcttctccgggtgtctgcataacttttctgcctggattgtgcagttctcaaattctcccttatttgctgaacttgttcctctgcttcttgtataatctcaggcccaaacaactgtctttcaccagtttgatcccaacacagtggagtcctgcactttctgccatataaagcctcaaatggtgacatcttcaaactggcctgatagctattattataagagaactccgcataaggtaaactcttatcccaacttccaccatgtttaagagcacatgctctcaacatgtcctccagcacttggttggtcctctcagtctgcccatcagtctgtggatggtaagccgaactgaaatttaatcttgtatccaaggactcgtgcaacttcttccaatatcgagaggtaaactgtgatccccggtctgacacaatcttctttggtacaccatgcaggcatacaatccgt

SEQ ID NO: 113163 - DNA, 538 bp, Zea Mays
caggggcccctgcgcaagtgttcccaagactcggaacaacatccgcaaggacggcgggttgaattctatatcactcggggtctcttatgcaaaagatctaggttgaatgagtatggagaaattcgggctgcacgatctgatccggacggctcggattacaacgtggtcataaccgaaccggtacacagcgtggggcatcagattaagatcctacggctagggtgttatgaagatgtgatctaatcccggtcatcgaactaccatcctacggctcggatccgtttgatgaaggggtatgctgattctaatcctgaccgtccacgcagagatcaacgtcccaaaacaatcagctgcacaatttaatccccactgttggatgaggatccaacgccaagaacgtcatctgccaccccaagcgcttggacacggcggagcataccccgcgcggcgggcttcacgccaacgagcagcgcatccagggttacagagcccaaatcctagaatagattggcgcaaaacgtagaggggcagctagcgg

SEQ ID NO: 113164 - DNA, 438 bp, Zea Mays
tccaggtcgcggaccgttcgggtgcaggctccggaccgtccgtggtagctaggggagttctcctgatagagtcggctgataacaaagccgatgaatggaggacccccataattgattacctaagaaatcccagtgttagaacaagtaagaatgttcggcgtacaactttcaagtatgttttaatgagtaatgaactctatcgccgaacggttgatgacatcctgctcaaatgcttgggccctagtgatgctatattagctatggccgaagtacatgaggggatttgtggcacccaccaatcagctccaaagatgaaatggctattgcgaagagctggattctattggcccaacatgatagctgattattttaaatattataaaggatgccaggtatgtcagaagttcggcgacctacagttggtccccgcagccgaat

SEQ ID NO: 113165 - DNA, 543 bp, Zea Mays
aacaaatcataataaaattaatgataacttattattgttttgaataagacgaacgatcaaagttttaaaaataaacggtgtcatatacggagggagtactagcttagtaccccggttgaccagaggtgcggtgtgccttaattcgatcgttttctcttgtttcctcagcgttcaccacatgcactgcacttgcaagccgtacacgttgactagtggggcaatgctagcttggtgaggttttttgattgattcccagcttttagacgaggtcactccacaaaaaaagctaagcaacggtgctgacctgaataaataaaggtggtcgtagattattggttatagccgtcgtcacaggtcacacacacgcaacaagcctatagcaggattacaccgattatcatcgggaaatagaaaaaagggaaatgaacgaagtacaggagacagacgacgagagggtattgtctattcttaagacccccttgagcaagctacacggataattaggctcccatcagacgtcatttgtggacacgtaagctattg

SEQ ID NO: 113166 - DNA, 470 bp, Zea Mays
gtcgtgatctgctggtgcacctcggcgtagccagggaaaatttcggtactgcggtgacttggacctgtggtaattcactgccggacttcgaccaagcttcgaatccgccatacgccgaggacagggctgcccgctaccttcgtgctggtacgaacctcacccgatcacttgaaattacttccttgtcgtgtagatcccacccgattggagtttggacgcgtagtatcgaggttaggttgtgcacggcgatggcgccgctgtgggttcttgggtcatcttcaccgtcggtgttaggaggtgaggaagaaagactcagactgttagatccgtagcgggcggtcagatttgactccggtcccgatagcacctcgaccatggattcggagttcagcggccaggattaaaatgtgtcataccccttcgttcaaatgaaccataaccgttaatctggcatcctgtgtctgcgggtg

SEQ ID NO: 113167 - DNA, 439 bp, Zea Mays
cctcctaaagatccatttgcagcccacaagcctgcaaccagctgggagatcagttatctcccaagttccattcgagatgatatgattgaatccatctcgctacggacagcctccctccagtactctgcatccggagatgtatatgcctctgtgagggagtgtggttcttcatccactagataaataatataatcatcacccaatgacttttcagtcctttgtctcttactcctccttaactccaaatctggagtctggtcatggacgcttgagggtagagaatatgtctgagatggaccatctggggctactacttccttatcccgcatagggaagatgctctcaaagaatgtcacatcctgagattccattatgacatttatagcgacttcgctcgtctcggaatggaccactagaaatctataagctgcactgttat

SEQ ID NO: 113168 - DNA, 495 bp, Zea Mays
ttgctggtgaatcaggtttcccgccctttcatagaggaacagagtattgtcagtagtagcattaagcaaggtagcaatgacctccgctagagttggaggtacatgtggtgggattagggtctcctccccactacctcgagaagtccctgcccatcttgaccacgagtccttgtcggcatctggagaagaaaaacatgctttattattacatagcacagttacacaacctttgttacattattccaagctctgacttattatacatactcagtccatacaactcactttccttatttagactaaacaaggaaacaacctactactatactagtctagtcctccatattcttggttgctccagatctgctactagctttaggagggcgaacatccatgatgttcatagaaggaggggctccaaagatgtccagctccccatagggtcctgcttcacctgctcctgctgcgtcagcacccatctctgcaacttcaggt

SEQ ID NO: 113169 - DNA, 464 bp, Zea Mays
agtaattaagttcctataattattctcacacaaaaaatgtattttctaaatgaattcctttgattttctgttctttggactgagcgcactatttacagaaaccctaggggctacagcgcaaattgttctaagacacagagccccgggtgtggacagcgggttaatactaacaaaatagaggggctctttagcgattatgccgagccgaaggggtaccgggtgactaaagtcgttggatctggattccacgattaggattagatccaatcccccctgaaccaggatgcaatgatagctgctggatcctatatctacggcccggatcctaaataaccgagatcgaatcgtattcatcggttcactgatctacggtcagggttctcctaaatgaaggggtaagccatggacaaatccgcaccgttaatcacccaaatcaacggcccactggttgtcttcttccccaa

SEQ ID NO: 113170 - DNA, 740 bp, Zea Mays
ctgtggttgaacgttttgttgtccatttgcccaacaacaactatgttcggtatgaatcgggtgctaccttagcatctctcctagagtgccccacagcaaaaagttccatgctaactgagtggtttaacaccaatgcaagaaatcctagataccgacacctaacatactgtgatttccctactgagtggtcttggcactctttggatcgactatggcagaaaagaaccccttgtcacaaaattggacggatgtactacgttcatccaacggccggtgaactgtactacttgcgcatgctattgatgatagttaaagttgcaacgagttatgttgatctaaggacatttagtggcacagtatatgctaccttttgcgaggcatgtgaggcgaggggccttcttgagagcgataacgaatggagccttctctttgacgaggccatcgtctctacctcatcgcaccagctgcgccaactctttgtaacacttaccctccattgctcggtttgcaatgtccgtgctttatttgataagtactgtctctatttcagggatgacattcaccactcactcacccgcacattggccaatccgcgctacgttgtgccactggaacaacttatgtcgctgctgataaagaagctaacacaactgttttctaacagcagagggaatattgaagacttcaacttgcccaaactgtctacacaaaatgatcccatgtttgaaaataggctgctt

SEQ ID NO: 113171 - DNA, 302 bp, Zea Mays
tagtgtaggacatggaagaagaaaagggtaagcgagtgtgatacccaaggtgacaagcatagcaaagtgaggcaacattgccatggggacaagggatgacagtgccaagtggagggtagaggcagcagaggcgagggtgtaagttgtggcaacatgggcggaggaaggtggggtggtgaagtgaatggcatatgatgagcagagctgttgcatcaagcgactacatcacgattggtgagatctcgtatggtgagaccctagggatcgaaccccatacaatagtggttgtcagtggtgaagcg

SEQ ID NO: 113172 - DNA, 474 bp, Zea Mays
agttaagtcccttagggacaccgtccttagggacacacaggtggggatctcacttaccaaagcctatagagcaaagagatacgcagtgcagaagattggtggtgagtaccatccgacaaaagtctacaatttatgtgtgattctttctttgctttatgtgtgattctttctttgctttatgcagggtctaaaagacggtgttagggccattttcccacatgtagagcatatatattgtttgaggcacttgtatgctaacttttcaaaggctgggttcaagggtccccgactaaaagagctaatggatagggctgcctatgcgtacaaggagtttgatttcaaacaagctatggatgatattaagaaagaaaacactagagcatggaaatggttgtttgacattgatagtaagcattggtcaaggcataggttcagcccccatgctaaaactgacttggtcgttaataacattag

SEQ ID NO: 113173 - DNA, 387 bp, Zea Mays
gcatacagcaatagagaaatcattccgcctatttgctttcttggtatcagcctaattaccgatccttcctctctacctgctgcttatccctccttggttgaccagcaacttgctgatcctgctgctgctcttccccaaccacaaccagccaatcctgctgctgctttagcctctgtcaatgtccgttctcatatccctttcactctagaactccatcctctcaactacaatagatagcgtgagctattccacactctagtgggaaaattcagtgccattcatcatgttgatggcacagcagtgcctgatcctggcacctctatctggatagcgactgactatgttgtgcactccctcatctactcatcagttttggatgaaatcctc

SEQ ID NO: 113174 - DNA, 372 bp, Zea Mays
tatttgtaattttatacaaagttgtactgtggctcgtcaccataaatagaggtacaatgttgtcagggaaatgatccccggtccctaaagcccaccggtcagtaagagcgatgaggaaagagcctctgatcgctaggggcccattagtcagtcggaagatgtaggttcgccaaccctggaaggacccgccctcggtcgaaacccacgacaccgagcctggggtcgggcgtggcggaacctgacaagggagttcaggcatgttggaagggaaccaatcgagtggatcccacgtctagcccatgacttacctgccataaatgattgccacattaatcacgcctggcaccaagcaacaacgtaggcgtcggtctg

SEQ ID NO: 113175 - DNA, 375 bp, Zea Mays
gctgaatcctgacaggggcgggagaaccaccatccaaatagtggcgtgctgcgcaactcagcacgcaattccgcaacgtccgcccgaaccttgcccaacttgtcaagggtgtggtccagctcggtgttgagcacggcggccaggttgaccatgttgttcagcctgagattgccctcaccaactggcaaaacaatcacacccctagcactgccggtcaaacggcgagggtagtacatcaggtcgaggcccttagctaccccgctaatcaacgagcaatactgagaaagtgcatgttctgctacatcttgcatggctgccttggtagtatccctctcagtgatagagtaatgctctaagaaggcctctacaccctgg

SEQ ID NO: 113176 - DNA, 666 bp, Zea Mays
acgtcatggacatctgctagatggctgggtaattccagttgataagccacttctccaactcgctttaggattatgaagggtccaataaagcgaggggacaactttcctttaactttaaaccttctcataccccgaattggtgacacctttaggtacacgtgattatcctcctcaaactctagttgtgttcttcgggtgtccgcatagcttttctgcctcgactgtgcagttctcagattctccctgattattcgaacttgttcctctccttcttggataatttccggtccaaagaactacctttcaccagtatgatcccaatacataggggtcctacacttccttccatataatgcttcaaacggggacatcttcaaactagcttgatagatgttattataagagaactctgcgtagggtaaacttttgtcccaactgccaccatgcttaagagcacaagctctaaacatatccaccagtacctaatttgttctctcggtctgcccatctgtttgggaatgatagaccaagctgaaattcaaccttgtgtccatgcactcatgtaacttctgccataaccgggaaatgaactgagatcatgtgtcagatacgatcttctttggcacgccatgtagacatacaatctatgacatgtacaattctgcc

SEQ ID NO: 113177 - DNA, 652 bp, Zea Mays
gaagggtaagcgagcatgacgccgaagctgacaggcatgtcaaagcgaggtggcatcgccacaagggaaaggcatggctgaggtggccaagagttgagagaggacgttgtggccgaggtggccaagacgacgatgccctgtggaggcagagggcagtggaggcaagggtgaatggttggacaacatggccggaggaaggtgggtggggaagcgaatgggatataggggatcagagctatcgtatcaagcaactatagcatgagagtggaaagatctcgtatggggctcggtgatcccctagggatcgaactccatagaacatcgattgtcagtggtgaagcgatgaatcaagagaagattctggatgatgttgaggacaacaaggatgttgttgaggtacaaaggactcgaaaggactgtgtcacctacaaggtgacagggagttgacccattaccaacaacaatgaaggaaaggtagggctatggagatgggtaaagagatagctataggatcaggagtggtgtggaacgagacgctaaagtcgggaacccagttggtgggaggaggggcggcgagaagagagccaaggaaggcacccctatagagccaccggggggttagggccaagagtgtcaatcatgggtagtggag

SEQ ID NO: 113178 - DNA, 344 bp, Zea Mays
gtcaaaaactgtggtccacttgtccatatccagtggcgaacgcaggacaaaatttcaggtgagacgataacgtaggagacaaatcaatatactagaccatttgataaaattagtttcatggtaatattatggagattaagtgataatatgatgataatattatggagattaagtgataatatcaggagtgttctaaaataacatgaataccgaaacttcattttggccaccctaaaggagagttggagagaacaaagggatggactggcggggactggacgttagggcgaagtggacgtatcagcacgtcggtgtggagagttagcgactccaccgcaaaatga

SEQ ID NO: 113179 - DNA, 307 bp, Zea Mays
ccagcttcaagcttcgggaaccccatacttctggccatttcccggcagacggataattctttgttgtctgggaggcaatacaagaagtcatcttcatctatgccattaaacactaaggccctttcgggtacttcagttctcgggcatagtgtttagcttcaaaaatttcttcttcaggtaatctttttcccgaagcgtgtcgaataatataatcaaggacttcggaaggcgcttcgggagtaggagcggcagctttttcaggcaaaatctgttctatagattcttcttccgctgcattttctccaat

SEQ ID NO: 113180 - DNA, 488 bp, Zea Mays
acaaaatccagaagattggaagcgtttggaacaaaacccatagatgcgccattaagcgccctaacaaggtcatgtgcaaagacgccttttttgcagatcaccaagcaaggggcggaaaggagctgagacaaagtagagcggtgccgaccgctgcacccctcaccaggcgaagcctggcgatgccacgtatcctgcgacacatagcgtggaccatcaagaaaatccggtatcgacacccggatcacaacacgcctcagcattaaccgaggacaagatgtatacctgcccacatcagtggagggcgctacaactgaagcacacagaccaaacagtggctcacgcattacgaagaaggccattgactctctgcaccatgtcggtagctgccatcatggcctccacggtagcacgcggggtaccaaggcgaggggtgagaggcggagaagacaagacgacatcgccagagcatccctatagacaacagtact

SEQ ID NO: 113181 - DNA, 409 bp, Zea Mays
aaacaaatgagtacagagaaaatgatttagtaggaggaacgacagaacgaaaagagctaagttacctgaagattagaaaagaatgagggcaatcccaagtcatgagaagctgtgttgtagcttgacgaaggaagatcaaccggaacaatctgaagagcatcgtcgggggttgattcagctccactagcagatattagaattctggcatccggctcaccgacctccaaggcgacttcctcactcgaagttaaagaagcatgcatcgctatcactccatcagatcatggtggagacgacccaacgtggacgtccatggaggtgtgggaaggagaactcactcggacacccttgggggctgggttacagctcgcactacccatcggagccggatcactaccggcaacacact

SEQ ID NO: 113182 - DNA, 293 bp, Zea Mays
tatgtgatgagttgtgaaaattgaaaatagaagttgtttcctctggtgccttgagttatatttcagtggagcccactttacatgagcagatagtcatggcacagattgctgacaagggtgttcaagtcattaaggaaatggtcgaacagaaggtggataaatacaaacgtttctgtcaggacagcaaagggattctatggtttggagaccgattggttgttcccaagaaccccgagctcagaaagaagatattggatgaagctcacctttccaaattctccatgcaccccgac

SEQ ID NO: 113183 - DNA, 1363 bp, Zea Mays
gccatgtaaacacacaaagaaaaattaatatttggaagttctgaatctttaaaaagttacgatttcataaaagttaatccaataacagggaaaataccagagaagattttgtccatatcaacaataagacccttaccagtaaaatattgagactcggttgcagcacagaaaaatgtttaagagcaggtaacaaaagaggtggcatgcgtttgcacagatctggtattgtaagtataagtgtgaagtatttctttgaagcaccattcagatcaacaccgccctttgctttcttagaatcgaatgggcgcaaggctaaagtgactgcactagcagtaataagaaaatcatcatctgttgcagttgcagaacttttcttcgctgaagtaacatgaggaccaagagactttatatattgcctaacacaattatacatgccactctggcacgtaccaataaattcaatcaaactctgtacagaagcatctgcagcgctagtgttctcactgttcaaacttttccatgttttgcaatcagttagagagacagccaatctcatagcaatagcagtcatgtcgactatgcttccatccttgcaacaggaatggtcgtacctggcaagaatggaagagcacagtgaaatcagctttttggcctgataaagccaaatagatctctcttctggtatacccacagcaaaggagcagaagtttttccttgcatctacataaaaaaagatacaagtcagtaaagggatgtgtgttgatcagaagaaataacatgaggaacctgcacaacaatttggtgttttgttatatgactaaatctaatcatggctcatagcctaatctatcatataactaagcaagattattgtggatggcatcaaattccatactatgatataataatgttcacctaagtttcaactttcaaatactcacaacggggatgtttttcaagcctagcatgcagctgtagctggttagacccatttcttcttcatacaaccaaaatttggaatacatattaactaaaagcactgaactaaatcagtttgaacaatatcatgcaataaagtcagcagcataggaactgatgcctgattgttaaatttcatattaaatattgtgcagtaccataaacagaattgccaaggtgggaaatacgattcaatgtgccgctggcatgtgacccagtctccacctgccagactcacgagtgatggaacttcccaatataaacatcttagtgatagcactaaggtaatttactttatttaagaactcatgcaccatcactatggcacccataaggccaaaacacttctgttattagatcactgactagatagtagagtcaaaca

SEQ ID NO: 113184 - DNA, 418 bp, Zea Mays
ctaataactcgcgggaaactattagatttcacctagaaacggatccaaacatctcccatatatatgaaagggtacgaccgattgaataaaccaacaatcgatctgtcaaaccaattttatcttatgcattagaccgaggagtggttatagccgtagtttagcttaagttatagttctccaacctcaatcttcacctctcttctgttctatattgtctagaggcgctttgggtggcccactgacctcaaaacaaccctacgatctctcctccctaatagggctccttccggaaggcgggatctaggttctacatgaagccgtttgtgccatcacggacagtctgccgcctacacatgaacggtccacgtgcctgcaaagaagagtagagttgtctgtgcagtcacggatggtttgatgg

SEQ ID NO: 113185 - DNA, 678 bp, Zea Mays
ccttgttgtccggtaggcaatatagaaagtcatcttcgtcagtgccgctgtataccaaggatcctggggatacttcagatccttggcatattgcctagcttcggcaatttgctcctccgttagttttttccctgcagcgtgacgcaccataaattctaattcctcaatagatgcttcaggagcagggaattcagattctttggtagccttctctttttatgatggtaatggtacttccgcggcatccgaaggccttgctttagcactctcctcagtggcccccaaaggtctcgcttcggtgggggttgagggcccaacctcaaccgcagcttgtgtcatgctagcttcggtagatccctttacaatttccccctctgtagcaggcgctgaggcaggaggtaacactttcactgattctatgacaacatccaatacactggccattctccttctctttggagttattgaagcaatcttttgaaccttcggcagttctacttctggcaatgaactcaatgtttttggctgctctgccgctatcttcgggtttggctcttcggtcgattccacccttgcttcgacagtagtgggttgacttgactcaacagtagaggacccttcaggaagccacgactcttctgctgtttctgtgcgattaggacgatgtgttaaaacttt

SEQ ID NO: 113186 - DNA, 340 bp, Zea Mays
cttcattgggatatggccggtcactgagcattatacttgaatgttcgagacggggcacttccctaacctgttgtaggatgttctgcatgcattaggagcctatgtccgacctctgtatgacataaggcgagtgtctgagcctccccgggcttgctactacatcactcgcgtgcatataagggtgatggatgcaggagatagaggtttcaggactctatcagctcatgagtctctgacgccactatccacctacgctgcttcggtcagcaatgctgctaggcgagttctgtggtctcttagccacacttaccggcagaagctgcatgacacgaggtacaac

SEQ ID NO: 113187 - DNA, 290 bp, Zea Mays
atcgaagataattattgcttgcatgacattgcataacttcattcgagacagtgctctacacgatcgagactttgaccaacatgtacctactagccttgctcatgatgtacccgtaggtgagagtagtagtagcacatctgatgagttagacatgagtgcatttcgagatgcaattgctaatgcattagtgtcgtagtttaataagtgaatgtaccgatagttatgttgtaatgaactctagtgtttttaatgtaatgaccttcttgttggttcgatgtttttatctgttt

SEQ ID NO: 113188 - DNA, 292 bp, Zea Mays
gtgattgatgaacctatgagagatcctcctcagaaacaagtgtggcttccaaaacctaaccatcttaggaacacacttgacacctttcccgacatctctagcaatccccttcctagagcccctcagccatctgaaaagaaaatcctcttccacaaacaaaatccacccaagagaggggtgaggtaccattgtgaatattgtgagagggatgggcatctagcttctttttgctttaggaggaagagagatgagcgacgggtttctgagtcgagcaggaaggacatgaaccgcc

SEQ ID NO: 113189 - DNA, 373 bp, Zea Mays
aaaatgcgtggaggagatgttgttctgatcgggttcgatctggccttaaacaagccggctgaaataaagagagcaggcggtcccggttgtagagttgagtgagctgcatttttatttgattaggatgggtttaggtggacgcgttgttgctgaggatccaactgcaactgccggactgcccacatacatcatgccaatccatccacccccatctgcatctgcctgcaatcagcaatctaccaacccgcggcggcaccggagtacgcggcggctgcttctgtcatgaactcattcattcatggccggtctctgcctctccatttattggtcgtgcagttagcctaagtttaaactaacactaacttgcacgctt

SEQ ID NO: 113190 - DNA, 402 bp, Zea Mays
tctgtatcaaagttgtagcctaacaaaccaactcaaactttgtcacagaggttttggttaaacatccattaaattgagctccacaaagtcccaaagttgatccaatttactgccttctctgaatattagagagccttagtctgacagccagactttagggccatttagctcctaattttgtacaataccaaggtttaagtacttaatcaaagttgttctcctatagtagctctagacttttgatgtattgaccctaggcaaattcttggtatttttagatctacagagctccaaagttagccttgctcactgatttttagacttagtcatatgagaggaattgagtgtctttttgcaaataagcccaattcacatcttttgacttgcaaatcttcaaatatg

SEQ ID NO: 113191 - DNA, 397 bp, Zea Mays
cttaagttgattgctatttgagagtttgtttgcaagtggacgaacacagaagctttattgataatgagatctcttgtttacaatgtgtagcttgccgactggagtttatggtatcactacgggtagaatctcctgagatgctcaatattccatgagtttcctacttgagttccatccatctggctaagccagtagcacccaggccgagtgacctctgtaatgatgaaaggtccttcccacggtggtgatagtttgtgtcgtccttctcctaccaatatgcggcagagtaccaggtctcctactgcaaaggactaggtcaggcccaaatatttccctctctccagcttgtgaccaatttagcggtgtcctacaccttctcccatacaaggcctcaaaa

SEQ ID NO: 113192 - DNA, 354 bp, Zea Mays
ctgggactctgggtacctatcactgatctccccttttacagatggtactgaagcatgttactgtcgatttaatctcttagttccaaatcgccttgttaggtattggcctagtgtgtcttcagttttttgagcctcaatgcagttctggtcaatggaaactagctgtatagttgtatctactaactgtttttaactagatcaatgttgaaatctgtttaaataaattgcaaggtcatatacttgtttttgtggtagaattttgtaggaacccgcagtgtttaaaggtgaatccagtgatcctcatctgtgcttccacattccccatctcggacatatccccaaggaaaccgtctt

SEQ ID NO: 113193 - DNA, 411 bp, Zea Mays
caaggccgcaagggcctgtaggctgtagctagtgtgggccaatttgccaatatgggaaaatatgggaaattcccggtacaatacgggataccgtaaatacgggcgggaaacaccctcaaccgttttcggacccgttcccggacatacctatcccggttcccgtaccgttttcttattttcccgggaaaacgaaaacgaacggttcaaaacgggaatacggtacgggatgagacggtgtttttcctgatcgttttcatccctacggacggtgatcatcatatcgtagtatgtgtcgtctatggcagtatgggctccaagcatgccgatctagaccagttgcagcagccgagctactcctgcagattgcttaaagctaggagtagtagtcagctagctatctagaccatcgat

SEQ ID NO: 113194 - DNA, 349 bp, Zea Mays
cagataagcgttgcctggtccaatctacgagctgacgccttaacctgggaagactataaggtgttgaagaagagatttccaaatgctgtgaattggggataatccaactctgagcagggggaaggtgttagcactgcatgagtagttggtttaagggtttagcagatttgtgagaagttgggccttagccttaatagagattaagagggggattatgggccttggttcttaggtcggtaatcaagtgtaaccagtataaatatgaatcttgtaatggagacgacattgagaaatttgaataaacaaaacaccaccccaaaacttatctgtgtttcatgcgtcgcgcaag

SEQ ID NO: 113195 - DNA, 468 bp, Zea Mays
aacttatccttatccctctaatcctgatctcctagcgtggcctggcctatgggctgcttgggccgcctttcatatgttttacccaccataacatctctcccctcctccaagaatagcttgtcctcaagctgaaaatgggggtaggaagacgtgaactgttgcaatggctcccaagtatcttctatcggctgcgttccactccattgtacctgaacatgccagacacttcgttgtcttcttgctttgagcaccttctctggtgagggcagcagtcgaccattctccattgctggaagagcaggaggtagcactggtggggcgcctttgtatggtttgaggagaccaacgtgaaagacgtcatggatgcgtgctcccgttgggagttccaggcggtaggcggtcatgtcgattctttctgtgacacagaagggtccagcatagcgaggtcccaacttgcctttgggtcgg

SEQ ID NO: 113196 - DNA, 275 bp, Zea Mays
tcacgatctggatcagatgctaacctcgacgccctttcgcccgtgcaggcgagcttgctagccataattcagacacgacagcctcgtgatcaagctcaatgagcgatgagattcttggcttcgcttgcagtgcaaggggacgcagttggtcacacatgagaatgattctttctgtctgatggtcagctgcagttgcttcaacctctctggctatataaaacaaggcaaagcttagaagggagaacaccattacaacagcttgcatttgctctttc

SEQ ID NO: 113197 - DNA, 359 bp, Zea Mays
gcggggccggtccgcgggtgcgccgcgggtggggagacggaggtggagactgcgatggagggagtgatgggaggctggcgccgagcgtcggcagtgaatagggcggaggcgctggaggggaagggggagaagactaccgcccgaagccggaggtcggacgtgctgtaggagggagatggtggcagtggtggccatggtctggagacggacccgagaccagaggcctccccggcgagcggcggatcggaggcggagagggtggtgggtccgctgctggctgctcagggcctggcgccgtgtgggggaagggaggcgacggacatggggtgttgtggtgggaaacggaggagccgatgagg

SEQ ID NO: 113198 - DNA, 344 bp, Zea Mays
actaatcatgtgaaatatgactcaaatccatcagtatacaatgcctcattatctcacactatatgtgttgtttttgctattaaatggggcaaggcacttgcgttggttggttggtggggtatttatagcccagaactggctaattagtcgttactgctaacttaagttaaattagtgatcgttgaaccatctgacgacaatcgctggactaaaccactgggtccgatgagatagaacagtaactattgtactactgtgttagacatttgaatcttagccttgggcatatggtttgacgcccatcatcggactagtctgacatccactagaacctctttggtcac

SEQ ID NO: 113199 - DNA, 1063 bp, Zea Mays
gttctatatagcattatttcgatctcttcattgttcagcaaaaagagaagctttggaatagaacagacaaagccaagaattcattttatctgggaaaatcaccatataactagcttttgatgaagcaaatgatgatagctacttgacaagaacgaaacaagactagtatccgcataggatccatcttcaacaacagatattcctgctctcatacgaagaaatcatcaggagtagagaggatacaacaggtctctacaagatcttcacatttctatcacaaattatcatcactagtagtttatatgtcaataattatggatcttccggcgccaaggaccaatgacatattaatgcccaatttcacttcaagctctgtggtgatgtgggatttcatagttatttgtctactcttctcacttctagtagatcagaggtagataatggtaagcatgccaatgggtggagttcagtgtagttcgactacataaaccccatgtatgtgttcattcaggaccgacctttaccatttagcttacagtgtataccaaacttgtcaaaggactatctcgagtcaattcagtgactattagaatttacaattctgagagatgtatgcaacataagcataaaggtcctagacaggatgagcaaagtggttcgacgggaacacacaatagttttcataccaacacagtgaaaatcttctcagaataacctctcggtatactcgcaacttcgtgttgctagcgactacatgtccttttatctcatagtttgcttcatgtcattcagcgacaaagagagcaatgtgctaacatctggttgagcaatgtatgactgagatttttggtcataaattatttggtaaggtcatattgcttactaataaaatcccaatttgtgatgtcttatgccaaaaaggctttcatgcattatattatatatcttcgggttacttcgggtaaaactttatgcatgaggagagagcagagagttaacttatccatgttctgttgtatttcaatttaatttcccagattattcaagcactatagagcttgat

SEQ ID NO: 113200 - DNA, 501 bp, Zea Mays
atttttttaaaggaaaatgtaaagacaaaaatgagtaagaatacattggattaaaacactcttttgcggaagcgttgtgcaaccttcagtagatatgccttgactcaggcacagtgttgttgattgtgcgagcttcggactcctctcgaaggtcacgctgttgctgaacctgatgatgcccttctggctgttgattgtgactaggggcaagcgtcggtggtggtggcaactaagcccaggaagcttgggaatgacttgccaaatcaacagaggtcgtaggctgttggttgcccacatacttcgggatatacggagagtaacacgaagcagtatgcaagacctgcttcggcttcagcgatttccttcttccggttcgtgacttggcacgtccttgcggtgtgtcccttgtctttgccatagaataggcagaacagtttcctgggctgattaccataccttccccgaagcttctcccccctcggcctctcggggttggtggcc

SEQ ID NO: 113201 - DNA, 694 bp, Zea Mays
cttaaaaataatctcgtcctcgagatttaggaagatctagggaaaaggtggggaaaatctatgcgaagctcttcttctctttcccaagttgcttcatcttcaccatggtgactccattgtactttgcacatctttatcactatgtttcttgtaaatcgagtcaaagtatccaaaatcttgatggggtactccgtgtaagtcaaatcaccgtgaacacttagctcttccattagtaactgttactcggggacacggagacacttcttaagttgagacacatggaattcattatgcacatcaatccgatcatcaggtagctcgagttgataggccatctctccaacttgcctaaaaaaattctgaatggtccaatatagcgaggggacaatttgcccttaactttgaatctactcattccacgcagtggtgacaccttgaggtacacataatctccttcttcaaattccagtggtcttcttctattatctgcgtagctcttttgcctggtttgagccactctcaaattctcccgaattatacggacttgttcttctgcttcttgaatcaattcgggcccaaagaactgtctctctccagtctgatcccaatacaaaggagttctgcactttctcccatataaagcttcaaaaggtgacatcttcagactggcctgataactattattatatgaaaa

SEQ ID NO: 113202 - DNA, 346 bp, Zea Mays
gtcgggtctggatgagacatcagttgaagatgaccttttcttatgtacatttttgttcaccgtatgtaaatgtatgtcatgggaaaaatatgctaagtgctaacatcacattctgtcatgcgctcatgcttccttcgcttttagcatgattaaattgtatctttttctttttctgctagagaatactgttaagttctggtctatatgttagttgtcctggtaccaatagaactgacttattccaacaagaatgccatgcaaccagccattgacttgataatttgatatagaagtgctatgggccaattgtgtttgcgttagaatttcagtagtgaatggaatgtgg

SEQ ID NO: 113203 - DNA, 421 bp, Zea Mays
atgacttcatcaaggacatcaacctccttttcaatacattcgagtgccctgggtatatcttcggctgagaggctagtttcttcggatgcagctccaactgaattaaatatactcctcaatcgggcggtgcattggcttgcaaactcgaagcatctctctttcaaagccttcaccgcctcactaagcttcgaatttctctcagattcaaccttaagtcttgctttcagagctttgttttcctgttcgaactgattaacgttttccttcaaaagtgcttgagcatctaacaggtctttgcttaacttcttgttctgagtttgtgcttcgacaagggacccttcggctgagcatagcattttgtctttctccttcaaagagtcttcgagttctttgaccttatcctctaagcccttgacaatga

SEQ ID NO: 113204 - DNA, 394 bp, Zea Mays
ggacattgctgttctgcaatttgcaaaggtccatccttttgtttttgttcattgcatgctagtatttgcacaaaacataagataaagaaaaggaacttctagctggctgtggtgagaatctggattcgttccctgggactctgtaaacttactgccttgtgggtttatatatagcttgcctcacattcgttgccttcttggattgaccttgatctgggaaaggtggtctgtttgttgtccatcttttataaagtgaactttttccatccattcaacatttcttataaaatcctggacttgattgtatccttgtttactctgaggtggacgttgctttttgtaatatgttatgttttcttctaatatatagcagtacctttaaacaatgtccgtg

SEQ ID NO: 113205 - DNA, 521 bp, Zea Mays
attatttcaaaatcaattcaaagattgggggcttgtgggggatagatatccccccgggtccactcaggggcgaaaacttcgcccggggccacatggcagtcgcccctctatggcatcccaccgtgggctaggcaaatggaaacaatggtagcaggccgacccaggagcgcgaagggcccacacctaagctagtcacggtttggacgtgatcatgttaaggtcgttcgctttttccgcgcccgactcctcaaacgccggagatagctcgtagcagaggcactgggttttcctcgggacagtgaaagtcgtttgctattaattaggagataagcaggaaaagtatgatcaacatgtatgcgggaagcaccccatggtcgtgtatataaggccaagggggatcccctccattttcatcatcattagcatcccacagcttggtagacaccacctgtaacaccactcacatacgaagccatcccaggaagtagggtattacactcttcaaagcggcccgaacctgc

SEQ ID NO: 113206 - DNA, 444 bp, Zea Mays
tcaatgctcaataagctttctaattaatctaggcatcttattataactccatgaaaggaaatcaacatacttcttaagaaccatgattagatcacttcaacttgcaattttgatttataatcattgacctagacagagccatcctcaatataatctttttccaatgggttggctaatgtgaaaccttggccaaacttattgatctcgtcaaccatattaacataagatgatgaatttgtatagacaatttcaacatcatctcctgcccattaactgagaagatgatgcaagctagaagggatacatcgatttacatgatctgactgtgcccaagtattaaattatagctacctttcacctccatgacaaagaaggacacgaacaaagtcttgttcttgatggtaagctccatggatgtaactcctttggctagaataggatcac

SEQ ID NO: 113207 - DNA, 380 bp, Zea Mays
gatcacacgtgggtggaccagatcacagcgcatgtttatgaaccagtatcgaaccgtggccgcccgatcgcgatccaactgttcaaatcgaatcacgcgaatggggcacatgatctaatctgaatcgttcatcgagggatcgacgatcaggagggttttcttccccgcgacagtgcccaaacgatggtgcgtgagaaccatggtggcgatgcattccggtgaaccggcaacccgatgctatggcaccccaaatcggtcgtagaccggcgctatacgtatagaggatgagctgagtcaacggagtagatcctcaccgatgaagaaggcaggagcagggccagccatggcgtagggcgaaccggcgacagaaatccttcaac

SEQ ID NO: 113208 - DNA, 1016 bp, Zea Mays
taaacaaaagctaggttaccatgaagatgatgacattgcggttgacagagtgcttaacattggtcatccaccaaatgtcataagacgagtcatcccaattgattctcaactggattgggagaattatgttacttcgattatgaatacccagttgcaactcatggaggttgtggtgtggcaggttgtagtagaccgccccccgaagactatgatcgtgttgtggatgacgtgccagctgtgcctgatgctcaatctagccccaatttgatcccattaagtcagccaggagatgacctgcagatagattcacttgggtgtatccctttggcacagacgaattgtagtaagtttcattggcatcacatcttctttttggaccacgagcactttgttcattccattgtcgtgggactgatgatcttgtaaatcggtaaatgttgcaggagagaccgctgctcttgtggttgatcctcagaccgtggcatgtggttgcttcggtgatagatttattgcctcgaacagtcctgagtttaggaatgaagaggagccatatgcctttgatatggctgctgatttagatgatgatcgtccggttggtgaactcacagagtgatattgagatgttgaaacgtgtttttccagacgaccgggatccaagagtgcatgagttcagcgatcttagtctttctcatcaggcaaatgcagaaggaagggatgatgtgctgctagatgctcctgaggtcggtcctagcatgatgattgaaaagggtagggtcttcaaggacctgcctgccttgtagaggtggttgcagcattatgcagtcttacgtaagaggccgtatagagtacttcattcgtacgagaaacgtcgttacacggttgtatgcgacaaggataactgtgcatggagggtctatgctatgatacaaaagatcaccgcaaagtggaagataacaaaagtagtggggctacacacctgtgttgaacatgagttaacgatgaaacgtcgccaattg

SEQ ID NO: 113209 - DNA, 405 bp, Zea Mays
caacgggtcgaataattaggatcgacagcaacaattggacaggatttaatttgacgaatactctgaaatatgaatttttaccagttacctattatccgaagatttggatctggacgagaaacgacagaccgaaataagctgatttcggcatccttaatttgctctgcgtaatttgactaaaattagccgaaacaatatcggctagtgtatattcggatcaggaacaaaagcaaacagaccgaatcaagcaacatcagctttgatattataggtcgtgtttgagtcgatcgaaatcagaccaaccttcgtccgttaatgacctgaatgctttagtactctgcccggcacaaccggctggggaccaaactccatcatccctttcgcgcatgatttcacagttacccg

SEQ ID NO: 113210 - DNA, 766 bp, Zea Mays
aaaagatcttcagattcatcccacctcgccatcggtgaccctcgcgccgtgatccgtgtcggtgctacgattcgtgctctctggtgaggggatagtcgcggaggggtaaaagatccgaaagggggatggatcaagccgcccagccgccgtacccacttggtttgcgaccggccgagatgatcctcgccggcattggccgcttaccgttcgtgcgccacatgcctaggagctttaacacatcgcagtaaactgtagtagtacgtccgtccatcgccggaggccttgccacggtgacagccacgataacccgctccggtgaatcacctcctctcttcggctgccagccttccctttcaaaattcggagccaccgctctcagacactataaattgagtgtgttgctagctccgttaggttgtcacgaagccagagcacccgccctcgcctccgatcgtccaccatagcgctttaattcgggtttcccccaaattggttctccgtgccgctgtggatagctcttccgtggccagcgtcgcctgaggtagttccatcccaattaccgtttgttctagctcccttagggtgtagtgatgctccccgtacttagaagttgaacgctactgtacctagtcgctgggaacagcttgatctttccctcggtacttgtcgtcatcgtgagcagaggggattctgggtcggactagctcaattaggggatgaactaggttcgcctgggatcagggatgctagcgcaatgcttgactta

SEQ ID NO: 113211 - DNA, 411 bp, Zea Mays
ataacataaacaaatagatatagagagacaacattctattgttgtttggttgctaaatgtgtacatttagctacatccgatgttgtttaagactttagatcacttgtcatttgaaaagagtcggtggttacaatggccaattgtgctataatttgtcacctaaatacacgaggatttaatttatatactaatgcatattaggctcgtcccatatttgtcaaatacggaataaatacgggttcaatccggaaaaaacgggatcccgcaaaaacggacggaataagccctctcccgtttccgtcccgtttccatatttttccgtaaatacggaaatggtcgggtcaaatgtagaaaacggtacgggtcgggacgggattttttccgtctgttttcaaccctaccgaggtctag

SEQ ID NO: 113212 - DNA, 569 bp, Zea Mays
tgtaccctgactaccgctacccgttacgaggtcagaaaaggaaaggtgtggcacctgtgaaggatgttgcttcggctgctccaagcgagtccgcgctgaataggaagaagatgaaggttcttactcaccggtcgcgatacattgaaacggctacagtgcctgaatttggtggtgagacctcttcggctaacaaagccaaagaaactgcgctaatgcagaaaactgaagggctggctacaacgccgaaggtaccattggtcaaattgggtgagccacaggtcaagagaacaaagttatcagaaattacaagtccttcggcaaaagtatccgtgccgaaggcacaaaaagatcttgcaattacccctaagaggaaaagaatggtccacgtattggatgtactggaagaaataaaaacttcaagctctacttcaggtaaaatagccgaagcttcaaaaacgcaagttgacataaaacaaattgaagccgaagctgtagagagtcatgctgaacccgaagctgggccctcagagcccgccagaaagaaatccctggaaaaagaaatgaaaaag

SEQ ID NO: 113213 - DNA, 603 bp, Zea Mays
cgaaacagccccgatttccgaagttatgaagcaatctggattggttgtgacagaggtgattgttgaggaagatgtatatactgctgaggctgaagaagttgatgtcgaggaagaaaatgctgatgaagaggacgactacaacattctagtcccatcaaagcccaaccacttagattttggaaaatctactgtctccgagaccgatatgccgatgatgatgaagctcggttacttcggagagacagagaagaagcttcttcgttttgccggtgaagaaaccatcccagagccaaaagatgacaaagtggtagttttcaaaagctttttcaaagctggattgcggtttccgctttatgagatgattggggaggttttgaataattatgaaatttatcttcatcaactgactcctaacgctatcgttaggttcagcatcttcatttgggtccttcgaagccagagaatggatccaaatgctgaagccttctgccgagtacatgagctgcattatcagatgaaggccagagaagatgggcttcatgagaattttggttgttacaatttcgcttaccgcaaggatatgaaggccccggtgctaagcta

SEQ ID NO: 113214 - DNA, 272 bp, Zea Mays
acttggcttctttcttcagcaattcagttatgggcttcgcaattcgagagaaatctggaataaatcttcagtaataaccagctaatcccagaaaactccgaatctgatggacagtcgttggcggctcccagttcatcacctcttgcaccttatcaggatcaacggctatacctgcctgagagatagtgtgacccaagaatttgatctcctttagcaaaaaatcacattttgacagtttggcataaagatggtgctcttgcggacgttgaagc

SEQ ID NO: 113215 - DNA, 629 bp, Zea Mays
atgggggtcgagcatcttcatcttgaggtatgtgtagttagggatcacgttgaatctcacatagcatggcctccctaaaatggcattgtatgcccccaggaaatctaccacctcgaactccaatcgcctggtgcgaatgtgacgggtaaaatgatttgtccgagcgggctagcaccaaagcctggcatgatgccatgaattggtgcaacgctggggcacagcgtagagcgtgtgattcctagggcatcgaaggtctcaacatatatgacgttgagggtgctccctccgtccatgaggaccttagagaggcgtttcgtgtcgacgatggcctcaacgacaagggggtaagtcctaggatgcgggatcttacctggatgatcacgtcggtcgaatgcgatcgggatctccatccactggcagtgtgggggctaggtggctctgccacgtccacctcatggggcttgatttatgacaacgcttgatgccaacaacttcgagggcaggcggtagagcctcccccgcttgccgcttaatggtggcgggttggttgagactttgcttcttcacttcatttcccacaaaatgttcgagtgccatgcatgtgttgactggctcatcggggcaggcga

SEQ ID NO: 113216 - DNA, 317 bp, Zea Mays
agcatgttatatttttgcttcagatgccatctcgaactcgtgcacatgatggcgcgggaacgtcccgtggtcaagaagatacacccaatccaccgccggtaccgcccacgttggccgaggctatcgctgccttggtcaccgcgaccgctgacaacacccgcttcctacatgaaatggctggacatcaacttcagcaacaaggcaggagggcttatccgcagggaacccgtgaaacttcgtacttggatttctcggaaacccgtcccccactattcgtcaaagccgaagatcctctcgaagccgacgaatgggttcgg

SEQ ID NO: 113217 - DNA, 945 bp, Zea Mays
gtcaagcctctcgtaatctaggtattcgaagtttaacgcgtccatcacccaattcagccttcgtttcggctgggtgctgaaggcggcagtcattaattggtcttcctttttggtgtagttgccaaggatttcgttgcacattgtttcgataatttctagccactctttgcatggcttcttgaattgcttctcaaatttaaatcggtaagggagccaaacaagttcgtactttttaccccctcctttttcttaggcattccccaaccactagaggttggaaagattctatttgccaggtactcttgcactagatctctagttctgattttggctgctaccactctaaattctacttcggcttccccaaccactagaggttggaaagattctatttgccaggtactcttgcactagatctctagttctgattttggctgctaccactctgaattctacttcggctagctggcatggggaaccaagttgcatgtggcacaagggccttgtcatcccgaagcttaacttcaatggagtcatgacatagtcattagcttctcccttttcttctggtctgcttttatgtaaatccattcgcttgtccaaccggtcgacaacttggtacgatagccaattaccggggccttcgtatctttctgatatgcgaagttgtagcagctaaagttcttatgaagatcatccgctctggcctttgtttgatagtgcagcttgtgcacccggcagaaagcttcggcattaggactcataccctggctttggagagcccatatgtagacactaagtctaacgattgcattaggtgtcaactgatgaaagtatatctcaaaattctttaaaaccactccaatcatctcatgaagagggaatcaaagccttgccctaaagaagctcttaaaaacaatgatttcatccttccttggttgcgaa

SEQ ID NO: 113218 - DNA, 310 bp, Zea Mays
tatcatcagtaggaacatgtatttcctgatcatgttgctgattatcaggggttggaacaggtggagtggatactggagcatttgttggaggcattgaggtagtgggggatatctacatttggaaaatataataataaagtagttgttactgaaatgtaccagaaatataaatgtatcgttataaaaaaatggttaaacatacatatcatcacaaactacatcaatatactatcaggatgcataaataaatgagagttttcaaaataaaatcaactgaaaggtgttgttgactgtatgagtataaattaat

SEQ ID NO: 113219 - DNA, 352 bp, Zea Mays
ctgtgccataattctttgtgtatgtatttattcaaattttatatacttatgactatgtgactaatacgtgctcacctcttctatcatttcagtgaccttgcctgcccgtgagccgtctcctgtcctgcctggattttcacctctcatgtgagctttccaggtagatatcctctcttttaatattctatcggctgttatcgacttgtgcttagcttctctctctcatttgcagtcatcaggtcaggatgtcgcgcatgaagaatatgtcggcgccagggggaggagatgacgaggatcctcctcgccccttcaggcaggtcaagggaaagaccgtgtatttggagcagcagga

SEQ ID NO: 113220 - DNA, 457 bp, Zea Mays
cgaatacgcatttttctgggcttagcttccatcggtagcgtctcaagctgttgaagactagttgcagatcctcgatgaagttttctgtcttgataaccacatcgtcagcataagcctccacccgcttgccccagtgattggctaagcatgtctggatggctctcttgtaagtcgctccagcgttcttgaggctgaacggcatggaggtatagcagaaagctccaaatggtgtgatgaaggcagttttctcctcgtcctctttcgccaggctgatctgatgatacccggagtagcagtctaggaaggagagcatagagcagccagcggtcgaatcaactacctgatctatactagggagtccgaaaggatccttcgggcagtgcttattgagatcagtatagtcgacacacatgcgctagtcaactttattcttttttagtacaagaacagggtttgc

SEQ ID NO: 113221 - DNA, 365 bp, Zea Mays
ggcactggacaacctcatacgccgtacaccctagccggtactatggcgaagctgtcgccgcgggggtggtttccactcatcctcatcgtaccaagcagcaactccttcaccacgtctctacggtcatggaaagcagtaatttattgtctctgagctattgcacttctatgcgccacggagagtaagttctagtgaactatctggtcacgccgacaggttcggtgtcatccaaattcgtggcaagagtggccgatgcctttaaattgagtgttctccctgctccgcccctatgttaaacacccagtccatcgccagccaccttccttcgtccaccataccccgtaaactctcggattcccaaaatt

SEQ ID NO: 113222 - DNA, 389 bp, Zea Mays
gaaaaattgtctctggccaatggaaagtcttcggaaatggacgattcaacacagtatagaagtgttgttggagcactacaatacttaactcttacttgaccatatatttcatttgcagtcaataaagtttgccaatttctacaatttccaactgacctgcattgggcagccatcaaaagaattatgagatatctaaagtcatgcactaaggttggttgaaaatttccaagacttcatcattacttgtgagtgtttttttagatacagattgggcaggttgtcttgatgataggtctacaggaggattcacaatatttttgggatctaatctagtttcgtggagtgcacgaaaacagccaacggtctcgtgatcaagtactgaagccgaa

SEQ ID NO: 113223 - DNA, 453 bp, Zea Mays
accaaaaccaaacagggtctcacaatctccccctttttggtaattgatgacaactctacaaagatttatcgtttttgttctttttccaagctagcttttcacacaagtgtaaattgctagtttggcaaagttcttatgttccttatccaactttaagatcatttgttaagatttggataagcaccataaaaacggtttggtagtgatatcctcgcctacatgtgtgcttggatggtttggtttcaagcttacacacatgcaaagatatgaaaattgaggggacactatcacaaccacatgatgctaaagtatacaaaatagaaatgtacctttgtagcatgtttactactttttatttcatccttagcatcatcttgctagaaacaagtgaaactagataccacatgagatcataataaataggattctagttactcctttcacactaagact

SEQ ID NO: 113224 - DNA, 781 bp, Zea Mays
taattattgtgcttttaattgaattttggaggggtagagttgaaaaccacaacccaaaatcctacaaccaaaacccgtaccatatcattttcgtaaagacaatatcatttttaaaaattacacatttaaaatttgaatttcaaatctctattatattatagccgtcaataagtagattaatcatggaacagctatttgaagccttttatttttccttgtggacaatctagcttggactgtggggtccgtatgttcccaccatggcacgcgaccttcatgctcaacggcgaaacaatctattcgctttggattaaagctagctgtttgtattctataatccataaagacaaaaacaccgtaaaatcggtgaacaggctgaatggcggaatgccaacgacaaacgatgggacatcacgtttcataagctctcattgtcctgctctcaatatgtcgacagcttataatatgaaaaaaaaacaacaggcaacataaatattaggtacctatcggaaagaacttaaatattgggtacacatggatattctaaaatgaatatcaacacaatcagattaaaaatcatttttctctccgaaggttttaaaggttagaaagcaggaaacatattctcaactgccttttatacgcatgttaattgaaattatcattcaagaattcaatacggttctattggttacaactctgaagctcatgtgtatcaacttaaaacatcagtgacaaagagtatttgaaagattaaacgctaggaaagcacatgcttaat

SEQ ID NO: 113225 - DNA, 387 bp, Zea Mays
ttggcatcggaaggtggttggagctcagctcgtctacatcgcggccttttcctgtgacgtttggtttggttttgatcgaaacctcgtcgtcgccattgctctgattgcttgccttttcctgtgccgcggtttacaccgatcgatttcggtggtgctgggttgcttttgcggccgtgttgacggagaggattaagtttcagctcaataatgtgggagcttcagcagcaccgggcagatgaattttctgctctgatcgccctctccatgtgcagcccctcccatcgcattctatttctagctttacttttgggtttgggttttggggttttccatggcttgctgagtttttactaggcaggttcacgcgctaatgacgtttcagtgcgg

SEQ ID NO: 113226 - DNA, 443 bp, Zea Mays
aaattgagttttgttgagttttggctatgatttggtacaaccttagagtgccagcgacatgaagagctacaagaagatatcattagtatccatagcacaccattattgagtacaccatggcctatggagaagcaaattagcatattatacacgcatcgagtgtttaggatattccaaaatgagtggtagatgttagggaccatttctttgttgtacaaattgtgcaacaaaagggtgtcaagattgatataattaatgaaggatctatgagggaaagggtggttcagtggattgaatcaatgatatttggaacctgcactgcaaactatttgagaggatgagaattccatgtcgtcatagtattataacattgagaagtgaaaagtatgaggttccttcatcttattttttgaagagatgggaggaaagatgcaaaaggtaaa

SEQ ID NO: 113227 - DNA, 305 bp, Zea Mays
taaatagttcgagtgtctttgagaatgaagtctttttattgatgatgtattttccaattacagaatacaatgctgccccgatagcttttgaaatctagctacaggtaaaacttcatgagatgttctatactccatgagttccctatttctgtgccatccatttgagtaagtcgatatgatccaggtcgagtgacttctgctactatgaatggtccttcccatagtggcgacaatttgtgtcgtccttcccctgttagaattcggcgaaggaccaagtctcccactgcgaaagatcaatgtcgtat

SEQ ID NO: 113228 - DNA, 808 bp, Zea Mays
tgggcagagtggtgaactggtgtttgacgcgcttgccgacgagttgcaaattgggtgaggatcgacttctcatctgcttgttcttaagtctgaaaattcactcatagttcatttgtgttgtgttttttagcccatagcttttagatgcctggtcattttggagatagtatgggggtcatgtaggtttttggtttagaaaatggtacttaaatgaaagcaaatgagataaaagggtaactttgtatagacaaggaacattgtccagcactagacaggagagatcatgtcacataaaatcctcaagctgaaacaagaacatgttccactggattttattatccttttgttattaaatttggcctggggctttggtaatatctgaatttgccactgcatagagtagtaaacctaaaaaattcagctaaaaagttattaatggcccataccttttctgtgatatgttttggtagttgaaattgattacaatgttaccttttcaaatatatcggcaacatcttttaggactatgacagttatcaaatttgtggagttcctaaacctgtgatacatctcgactgttgtttgatagagatcgtgtgaagataatttttaaaatcagtgttcacataaaggtaccattggattcatatttgaaagcacttccatatgctatgagctttgttgtcatgataaacatcataatatatgatatattggtggtcaaagtgtggtgttggcaggtcaaaccgcactttacatttcgaaaaggatggagtaatattttagccttgattttgacatccttttt

SEQ ID NO: 113229 - DNA, 375 bp, Zea Mays
tgtcgccgaacattccagcgttggttcctccgtcggtgagcttctcgcttaggaggttcttccccgtgcacggttggctcgtcgtcgaagatgggagacgattccactcttccccggatgaagaggacgttggggtagaatggagttgttgtggtgacaagcttctttctatccttctttgagggcgaaggtgccagaagagcagcttggcgggcctctatcccgtttgcttctttttttcctcgtaatatgtgtccactctttcgtggatgaggtggacaacgtggttcttcgggtaaacgaactctctgctcctggcttgcaggaggtagtcttcgcccggggtgctggaggttgcgctatttgctgcctcgt

SEQ ID NO: 113230 - DNA, 302 bp, Zea Mays
tgaatttcgatctcacactgccattaaaactcaagcactggttgacttcgtatcagagtggaccaaacaacaagtaccagatgacccagaaattgcagaagtatggcgaatgtattttgatggctcgttaaagctgcagggagcaggcgcagggatcctctttaccgcacctggaggcgaacacctcagatatgcccttcagttgttatttctagcctctaacaatgcagcagaatatgaagctctgattcatggactgaacattgctgtatcactgggcatcaagagattgatggtttatg

SEQ ID NO: 113231 - DNA, 393 bp, Zea Mays
gtaagtcttccagaaacacatctgggaattctgacacaaccttgataatctcgagtgaatctggctccttgctatcaatagccatctgatgacaactttctttccttggttcaggtgagactagctcggctatcacttcttctcctagtggggacaccaatttgattgtcctcttatcatagccgataattgcttggtacttatctagccaattcatccctaggatgacatctattccctgagtacccattactatgagattagcagaaaacactatcccccttatttccacacttacattcaagcaaatgctatcggctcggattttaccaccggctgagtcaatttggatgggggttgacatggtagttactcgaagattatgttcttcta

SEQ ID NO: 113232 - DNA, 444 bp, Zea Mays
ggggacagatatcccccgggtccactagaaggcgaaagatccttgcacgaggcctcgggccatttaccccgcaaggccatctcatcgtgggccgggcgaagactactagcggaatgggccagaccgaaaaaggtgacggactcgagcccagacggtccatcgaatcatgcactattccaagaaaccgtccgactttcccatgcttggcaccctcgaatgttagggtggattagggatgagtcggcgagattttcgggagattggttaagtcggtttgctattagttaggagatacgtgatcatcatgtatgtaaggagtgccccatggtcgtgtatataaggcccagggggaaccccatcattttcatctatctcattagcctctctccattcagaagacaccacttgtaacacaccacatatagatccaccctaggaagtatg

SEQ ID NO: 113233 - DNA, 678 bp, Zea Mays
catgaagagggaaaaagttcagttgactgcgaacactggtttcagtaaagaggtttttctgcaaggaacaagccacccgttgaaggtgatctaattttattaactttcctgatgtgcatttggagcatttggaactccgcataggtttgatcttctggttttttaattttcaattcaggaaaagagtaggcaaggagataaattgtttttcctgcatgaagccattgttgagaattggtcgagcaaagtttttaatttttcgtacagtgtgagtttctgcaatgatgttccctgcaggccgatgctgaactatcttgtgaatctagctcatcacgatattcagcagattaaaacttataatcttgctgaatattctgtcccctgcctaatttaaattttatgttgatatgttgtaggtttactcaggtgatttgtctggtggtgtgtttgtgcaaccctcaatattatgtgactatgatgatagagatagcttctgcatttttcttttacctggaagtggcaacagaaaggttagttgctgctacttgcaacattaccttgattgatatccctgcacttggaatgtttctattttaaggccagggatgtcaagctgatacagctccttttaagctgcatggagttttaccttgggattcttctaaattctcattcgcc

SEQ ID NO: 113234 - DNA, 506 bp, Zea Mays
ggaatattttctgttacaacaagcttcaaagggttaatatagattagtaatattcccaaaacatggtagaagaatatgcaaattaaagccaccaaactgacaaactaattgtatattacttactaactgaataatggaatagccgtgacgaatcccacagaaattagtttttattatatgaaattctaaacatatatcggtggcgaggctaagcaaaccagtaaaggtgatgttgaaacctataggagaattgacttgttcgtacacagcaacagagaaattcctaccaatgaattgcagtcctgtccaaaacaaaaaagtgactggtcagcatcaattttcactgaaataaaaatccttcaaatctatctcgatgaacctcaatttgtacctctctgcatgttctctctaccaacattccatctcttcaacgcaaaaatacaagacaacatggataggagaattaacttgagatataatatgtaaaacaaaactacatttaagag

SEQ ID NO: 113235 - DNA, 983 bp, Zea Mays
cactagccagacatgctcagggacatagcctcgaaccatcgcaggaagaatccgttcaatccatatgtggaagtcatgactcttcatccctaagactcgcatagtagataagttcacccccctactcaggttagctgcatacccatcaaggaacatcaacatcttgatccactgaagtacttccttcctctgggccctgcttaggacgaaatcggccttaggccttctccacatctttccgccacttggcggcttcatctctaggcttggtctatcacataacgctgccagatcaactcttgccttcacgttatcctttgacttatcaggaatgtccataattgttgcccatagtgcctcggcaacatttttttagtgtgcatcacgtcaatgttgtgtggaaggagcaggtcgtcataataggggagccgagtcaagccagacttatgtgtccacatatgctgctcaccatatcccacaaaaccaccttctgtattggccacgagcccatctatctgttgacgaatttcggcacgagtcatcgttgtaggtgggcgatctgtcactatgacacctttcgtaaagttcttgatgtctaggcggaatggatggtcagcagggagaaattgtcaatgtttattgaaggacgaatatttgtcaccctttttcaaccaaatgaacctgagagcttccttgcaaactgggcatgggaacttaccttgaacacaccaggcacagaatagctcatacgtcggtaagtcatgcatggagtactggtaccaaacatgcattctgaagtttgtctttgtagctcggtcatacgtccataccccttcctcccaggcacgtaccaattcatcgatcaaaggctccatgtacacgcccattttattcctcgggtgtccgagaattatcaacgacacgaatatattctgcctttgaaagcacacaccagggggagattgattgggataacaaacacg

SEQ ID NO: 113236 - DNA, 1225 bp, Zea Mays
atgtcggcaccgctagcgaggagactcgaatgcttattcaatcctccctcatggagagagtgtgtgcgactcagcagcaggatcgtctattgcaggaagctcgaaagagggttggtgatggtaaaccacgggagttcaccattgatgagaatgatttggttcgtttcaggggccgtctttgtgtgcctcagaaatcagaggtgaagatggatatcttgagagaagctcataaaacgccttacactgttcaccctggcgaaaccaagatgtaccgagatttgaagcaaaacttctggtggaagcggatgaaggttgacgtttctaagtatgtggccgcctgtgaagtatgtcaacgcgtgaaggccgagcataagcggtcggcaggtttactgaagccattagaaattccagagtggaaatgggagcatatcaccatggattttgtggtgggtctacctcgttcccctcggggcagggatgttgtatgggtggtagtggatcgcttgactaagtctgcacattttattcccatgaagaccacaaattcaacttcagatttggttcccttgtatatgaaggaagtagtcaggcttcaccgggtacctaagtccattgtttctgatcgagactccaaatttgtatccaaattctgggcgagtcttcacagtgcattgggcaccaagctttcacttagtgtcgcttttcaccctcagactgatggtcaatcagagcgaacgatccaaaccttggaagatatgttgcgtgcttgtgttctgtcatggaagggtagctgggaggatcatcttgcattagcagagtttgcttataacaatagctaccaggcaagcatcaagatgacaccatttgaggctttatatggcaggcggtgtatctcccttctgtgctgggagactttgggagagagatccctggttggtcctgattgggttcagcagacttctgaaaaggttcgagaaattcgtcagaatattttggcagctcagagccgtcagaagagttatgttgttgtgaggaggcgggatttggaatttgcagtgggtgaccaagtccttctcagggtatcacctactaaagttgttgttcggttcggtgtctctggaaagctcagcccgagatacattggaccgttcactatcttggcccgagtgggtagcctggcttatcgcttgctactgccggattccatggcaggggtacacccagt

SEQ ID NO: 113237 - DNA, 403 bp, Zea Mays
ttcctcactcagtttttcacgcgtcgcgttctcccctaataactcatgagactgcagagccacaaattggttgggcttccttgtaaacaatctgtcttctccatgtagtcatgtagggttcagaagcttgtttccagcacaaaattccctagcttgtattggtaaaaatttatatagaaaaaactactataacagagaagctagggagaagtacccagcttttattgattcttgacctgatagggattatacggaaaaatgatttaataaaagggtgcaaaaagaagaaaaagtaattgtggctgctgggattcgagcccaggtctccacggccacaacgtggaattctcaccactaaactacagccacttttttgtaagtcttgtgcacttacgatatcttt

SEQ ID NO: 113238 - DNA, 1307 bp, Zea Mays
ccacccgttcgccacccttgttttggccactaagacaggtaaggctgtttttggcctcgcgtgagctacaacacatgttttcatggccgaacaaccaatttagtgtccaaccatagtacactagtgttaaaaccatagtacacatttttgtccccggaggcctgtaaggctatttttggcgtcccgcgacacatgttttcttcgtcgaacaacaatttcatgcctcccgcccgccaaacatgttttggctactggcatgggaaaggttgtttttagcatctattgagctacatcacacaaaacacttaaatcctaaaccccgagccccaaaccctaaaccatgaacccgtaaccgcgaacccttagactaaaacccgacccccaaaacacaaaatcacaaatcccaaactccaaaccctaaacattaaaccccaaacgctaaccctcaaatcgaaacccgaaatctcgaatcccaaaagcctaagctctaaacctcgagccccaaacgctaaggcctgaacattgaaccccaaaccctaatttgtgaaccctatacctcgaaccctaaatcaaagacccgaccaccaaaacacaaaactccaaaccccaaacttcaaaccctaaaacacaaccctaaaaagtaatgtaaggctgtttttggcctcgcgtgagctacaacacacgttttcatggccgaacaaccaatttagtgtccaaaccatagtacactagtgtccgaaccattgtacacgcatttggccccggaggccggtaaggctatttttggcctcccgcgacacatgttttcgtcgtcgaacaacgatttcatgcctcccgcccaaactctaaacacagagccccaaaccctaaagcccgaaccctgaaccctgaaccctaaattgtgaaccctataccccaaaccctaaaacgaaaacccgaacaccaaaacacaactccaaacccaaaaacacaacactaaacagtaaagtaaggctgtttttggcctcgcttgagctacaacacacgttttcatggccgaacaaccaatttagtgtccaaaccatagtacactagtgtcactgtaaaccctaaactccaaaccccaaactccaaaccctaaaacacaaccctaaaaagtaaagtaaggctgttttgggcctcgcgtgagctacaacacaagttttcatggccgaacaaccaatttagtgtccaaaccatagtacactagtgtccgaaccattgtacacatttttggccttggaggccggtaaggctatttttggcctcccgcgacacatgttttcatc

SEQ ID NO: 113239 - DNA, 521 bp, Zea Mays
ccatggtttgaagtatgaagtctttcttttccaaagtagcctcatggtcttttatcttcttctccaggccctcaattataacttcattctttttgtccttgaagtcttgttgcatcctcaggactttgcttagcagtaagctctgataacataagcttcatcagaaaacaatcttcatattaaaaacaatgaaaagttaagaattttaccttaaagttagcataaaataggctaccggcgatatgttgccgccggtacctgctgaggtctgcttcaaccttcgggaggccaacactctttgataaagtgccaacaatcttcgccccagtgtgatcccgatggcatcctaagctttcttcgttaactcccccgaagagtagcgcacctggtctatatccgcaagatatagcgtactctttcagttcttctttttcagccttcgacaattcttgcccaaatatatctcggaagttgaagtcctcttcttccgaaatatccttggctttctcctttccttttcc

SEQ ID NO: 113240 - DNA, 724 bp, Zea Mays
aacctgtaaggtcgaagtacagaagtttctcggcaagataaattatttgtggaggtttatttgtaacctagccgggaagattgatgccttcacccctatccttcgacttaagaatgatgttgaattcacttgggggacagaacaataggaagcgtttgatctcatcagaaagtatttgtctttggctcccgtattaaaagcaccacaagtgggagtaccgttcagattgtatattgcagctgaagataaggttattggggctgttctgacgcaagtgactgaaggaaacaagcatgtggtaacctacctaagccggaggctggtggatgctgaaacaaggtacacttttatcgaaaagttatgcttatgcctatttttagcatgcaccaagtgtagatgttatttactgtctagtcattgcaccgttgccagtcaaaccgatgtgattaaatacatgttgcaatacccgattatgagtgataggattggtaaatgggcttatgcacttatagagtatgacttggcctaagaaccattgaaatctatgaaaggtcaggtcgtagcagattttattgtagaacatcggatcaatgatactcataaactagacatatcatacctcactgttactccctggactttatattttgatggatcagtttgcaatgaagggcaaggaattggcatcgtgcttgtttcaccaagtaatgtctccttcgacttc

SEQ ID NO: 113241 - DNA, 846 bp, Zea Mays
gtcgcgacatggaactctcggcttgctattgcgcaacaaggtcgagaagaccctagagcttgtggtgggccctctattcgcctagagtctcagcctcacgaagcttgtcaagaagcactgtggctaccgcaacgttctagctctcctaggggaatcatggtggtccacttccgtcatggattatatggcagagacattcgtcattgcagcatacacttgtccaacatatttttgtgaccgtcccaaccgtcgtcgtggtgtacctcatccaccggtcgggggcacttactgctttgggaaggacttggtcctagcgatggctttcggcaaggtgggtcgagccataatggagatgtgagtgtctttttagggtatctgttgtgaagcactcctgagccaggttgcgacctgctcctccaaacggggagctatcttcgtgttctgaccctaacaagaggaggtcgtggaatgaatccctgatggggtccactattcctacgaacttagcacaagcgggttctatcgtgcaccgtcgtacgtcacttcccttgacggacctgagccagaggcctccgagccccctagcaacatcggtcaagtcctttgtcgaggggatagggattttgagaccctgatcattgttccctcgttgttgatgacgaagtcaaggcttccgaaacaaatggtcattccggggccccaaactacaccgtggttggccattcgaagcctggagaagtcgttgggaacgcgcaaggccgctaccttgcgcgccaactctcgatgtttcgaactagctccgttaagtacatttattagtgtgtgttctatggtctggatggtgtg

SEQ ID NO: 113242 - DNA, 572 bp, Zea Mays
tacctagaagccagaacacctcgccggacttgtcccgtctgcggttccctcggtccaggtaatctaaccatccattcgtcaattccttccatgcacacactccctgtcacttagtgaacctccctgtgcagtctgattaagctctactaccgtggtgtggccggtgcagacatcgccgacatgctccgccgcctggatccgtggctagaccagctctagacaccaaagacgtcgacccgtaccttgatgtgaccgctagaggctctccttcctcgcccgaccctacgccggaaccctaccaaaaccggtaagccgctcctccgtcttattcaccgcgggtactgtgtaacctagccaggaaccataggttagaggttaggaaaacctagggggttgtgcgtaaaggtctctactcaggtgaatagtacgccagggacccgtctgaaagaaggttttttcctttctttttcaaaaatccattttaaataatcagcagaaagctttaaaaattcataagttagggaaaatatgaccaactttagtcaaacaaattttactaggttctggacaag

SEQ ID NO: 113243 - DNA, 620 bp, Zea Mays
tggggtacgacagtgcacgacctagcaaacgacaccataggggctacgaggcccagaagcaggagtcaaactccaccctagtagaatacaagttctcattgtaaagtctacccctgagctataaaagggcaagacaacccccatcttcacacacatcctatccatccagaactgcacacaagcacccaactgtaacacactccaagcaatacacgatcaacactacagtggactagggcttcgttcggcccaaaccagtataaccccttgtctcatatccacgttcgagccccccatatatcaccatttggagcgagtcctcactagcacccctgccgaacataaatcttattatcccctggttcccgaaaccatgacagttggctgccatgtaggggagctgttagtgtgccaagaaacattcttcactccgatggccggttcatcagcattcacccctgagagccacgtcaagttcggcaccctcaacttcctcgtcaccgtgtaacaccctgattttgggggtataaaatttctttctaattatcacccaaaatcatgtgttactcttctttttctcactctaggtttcttctctctctagattcattctcccttct

SEQ ID NO: 113244 - DNA, 462 bp, Zea Mays
ccgaggcatgcacaaaatcccttgaagaaaatgtcaaggacttgaggattgtcaagaggaaggaacaaaagaaaaaaaataaatacctctgtcaaaagcctcaaccatgcctccacacaaggtaacatccaaggtaatgatcaagtcacacttcgcgctaagaaaagtaagaagtgtagtgaatgctttgaaaaggggcacttgattaggtcatgtccctatattaaagaaaatggcttgattattgacaaggatgataaactttgtttcaaatgctctaagaagggacatttagttaagtcttgtccccatgtgaaacaaaaaggcatagaaaagaaaatagttactaaccatgtagccagcaagaaacaagggaagaagaaatcttcaagacatgaagatcgcctttgctacatatgccgaaagaaaggacatcaatgtaaggaatgtcctattggtaac

SEQ ID NO: 113245 - DNA, 708 bp, Zea Mays
ctcccagtgaaaccatcaggccctagggccttatcagaaggaaggtttctgatggtatcccatacttcctgatctgaacaaggggaatccaaatccgagaggtcatgatatggtagtccaagagcctctagatcaatagttctctctgtgaattcagactgtccaatgaggttgttgtagaattggtccaccagagctgttttttcaggatggttaatacagatattttctctatctcagcctggtcaccaaatttttcttttttcggtatctggcatgcatatgaaaaaatttagtgtccgcatccccttcctttagccatgagattcttgatcttaaccttgtcattgttcttctaaaggaggctaacatcaaggactgcttcttgagtttattccttagccataattcagcaggtgtaagagccctatgatcctgggcaatctcaaatttatgcaatagcttctttgccaaagaaagctaggaagccacatgcccgacctgcctgtcactccaactctgtaatcttgtagctgtctccttaattttcctatccaaggtcagaaaaggacaactggaaggctcaacagcgttccatgcagcctgacaacttcctgaaaaccttccatcctggtccaaaaggattcaaagtggaacctcttcttgccaagagtattgtccttaacacctaaaagcagaggcagtgat

SEQ ID NO: 113246 - DNA, 604 bp, Zea Mays
cgcaaggttccctagactcagcgaatagtgagcggggacggcgggttgattagctaatttatcaggggcgttttagcaaagttgcggcaccgaagggggtacggggctggctgggccgtctgatctgagatggaaggctcagattaaatcgagcaccaccccaaaccggtatccagtattggcccttagatccgagatcagtggccgtggtttaatgaaacgagatcccctcgattaccacacgatttcagatcaacggtggtaattcaaccctggtgatcggttcacaacctttaatctcgtgcgttgggaacaatccgatggtcatcgtatatcttcaacctcacgtgctcctgcctcccctttctctctcccatctctcacgctgagaaccgaggcagcgccgatggttctgaccacccccagaccacgagtttagagtgtcgatgctttaatccaacccatgaaatacacagcgggtagaacgacgaaggtattatgcggctccttacctttatccgagcagtggagtaccctgccccattgccttcccatgcgtgcggacagcataagcacgaacaccagggcggcgttggcgagcgtg

SEQ ID NO: 113247 - DNA, 393 bp, Zea Mays
cttgtgttttcggggaaaaagttatagaagaatttgacatgtaacaatggaaattggtgcatctttgatagatgaatgcagcagggttcgatgctatgcattatgttcattttcctgggttagtgggctttgacaagaattctgtgtgtactttcattagttgtttcttaattatcctgtttaaatatttattgtttatgtgtcctggcctccaattttgataattactactaacatactctaacaccctactgtaactagtggcagagctctcgcctcttggcaaggtggggccattaccataccttgagtttcttccgtacctactgtaatatgctgtttcatttgctaactatgctataaatcatgctacattgttctgtttgactgtct

SEQ ID NO: 113248 - DNA, 612 bp, Zea Mays
tcggctcatttgtgtttctactctgctcgattcagcgtctgcttacttgcaagcgtatgcctgagacgcattttgctgcggatggtataaaagctctcctgtgatccctaatctttatctttactatacgaatcttggatctattcttgaaaagaggagatagccacgtagcttgccaaaaacagtaccgtgtgataaagctggaacggtagatcgttaagctctgagttttctcggcccaccgatactctctcgcctctgtaaaatatctacccgtgtgatttttgtttgcagacagtcatatacattcgcaacgcacaacgaagcagccatcaatccttccgtatgaagagaagctagcggctcattgcatgtatgaatcactttctgcacactgtttccaaatcatgtcaacatcgactcttctgcttggctctgagaatccccaaatctcatcagcaccagcacccactccaccctcccaatcctgtcaacccaaacttccctcaaatctgaatatcaaatcacctctccaatcctccccaaatcccgctttgccctgatgatccctaaatctcatcaccaccagcacccactcccctctccaaaaac

SEQ ID NO: 113249 - DNA, 473 bp, Zea Mays
gataatgaaagtgcagtaaaattgactacaaatccggtccaacacttaagaactaagcatattgatatacgacatcacttcttaaggggtcatgttgaaagggagatatctttatatattccattggcacggatgatcaattagccgatatttttacaaagtcattggatgaaacgagattttgtactctaagaagtgaaatgaatgtgatcgatctctcaaatgtagcttgaggttgaacgcacatgtgtagtattgcatttcggttctaaatatgctctctacgctatttattgggtatttttgatgaatttttcattttagattgatctaagtagtttgatatgaaaatgtgcattcctcaaatacataatgtgtatatgcatgcatactaacccttggattggtcgaaatgtccatatatgagcatcaaatcagatttgaaattcaaaatcagaaagtgaacagaattt

SEQ ID NO: 113250 - DNA, 371 bp, Zea Mays
taagtttgacgaaccaaacgatgactggttaaaatgcatcgaagtgacaagtgatgaactgcttggatcatattccaaggcagaagataatgcattgtccacagccttcggagatcgaggaaaaaatagattgaatagagtttttgacgctattggcttcgtctatcccgactatcgttacccgctgtgggggcaagggaagaaaaggaaagctactgctgtggccgcctcggccgaacctatgccgaaggctacaagcaaaaagatgaaggtccttacccaccggccacgctatattgaaccgaccgtggtgcctgagtttggcggggagacttcttcagctgctgaaccaaaagagcccattcctccta

SEQ ID NO: 113251 - DNA, 893 bp, Zea Mays
gcggtggacgagtttctgaaaactccaaatacatggtgtcttgagggccttggggttgacctctgccttcctgctgatgaaactgattcccagccatttcacgtagaaatcgagtgttatccgcaatagcattaagtaagacagtgatagcctcagctaacgtgggaggtacaggtggcgggtttggagtttcctccccaccgcgggaagttcccgcccggtcttgagcatgagttcttgatggcatctgaggaagaaaaacatacttgattattacataccacaagtacaccacctttattatattatgccaaactggtactaattatacatactcactggtacaactcaactttccttatttaatttacataaggataccacctactactatactactctagttatcttcattcttggctgctcccgctccactgccagctttaggagaacgttcatctgcgaggttaatggaaggaggggctccaaagagatccaactcctcgtaaggtcctccactagctgctgcagatgtttcggctcccattgctgcaacctctggtggcacgttcgggtgtagttggtcgtatagcacgtgcatttcctcatgtagagtgttattgtacgcttgcagattctccagggctatgcttagctccaccacccgggctcaggcattcgcctcgcaatcctaggctatagagcgtgaatttacggcccagtctagccctgtctcgttccacgatctcccgctgcaagcgatcaacctccgctgacagctcagcaatacggcggctatctcgcgcatgctccctgtttccatggcacagttccgatgtgagtcattcaactctgacctccaaatcccctatgggatcattgcttccgctacc

SEQ ID NO: 113252 - DNA, 602 bp, Zea Mays
gcagcaccggtggagttggagggccaacgtttttggtgcttctctgtccgcggaaggaagattggagagttggtgatgacaaagtttatcctgtgctccgaccaaatcatcaaagaggccacgattgaggtactgcttccccctgcatcatagtgtttgattgtgattttggctcaacaatcatgcaaattttggagagaggacatatagggttacttgtgtatgttgtggatttatgagagaaagagtgattgtcgtgattgctataaattcacaagagaaagagagggtctcgagcgtctcctcccaactctggtctcgcttctaccatggcgactatgttctgtagcatccatcgtcgtcgtcctcaacttcatatcgaagccagatgaggctccagttcatcctcaacgtagccaccatccactcctccatcgtcctcccacccctagctagtaccagtagcccttaacctttacctcatcaaggttaggattgttccacctctacctcattaaagatcattccaccactacctctatctattgattgtggtttgcgtacaaggctcgcacccattgcttgatatatggatttgtttg

SEQ ID NO: 113253 - DNA, 578 bp, Zea Mays
acaaacttcaccttctctgtcgtaggcgctacagtcgtctttttctaaagaatgtagctttggcccacgagtcaggaccttagctctcttcgacttcggtgcaccggaagaggtcgaagtgctagtttttctcttccctccttgttttcgagcaggataacaatagttaggataaaaaaacccaaacacatcaaaaactttgttcagtctcatttttcctcgagcaccaaagacaatggtcatggcttcgtcctctgccttcgtgtaggctcccagcatctcatcactggttgcctcaacagcctctggccaatcgtcattcggctcatcaaattggcttctataccggaaggtgtatcttagataaacaagaccacacttgttggagccagcaacagcttctttcggcatctcccaatcattcacaaaaggccacaccttgtaagcaatgtgctcctgtacaaaatcctaggtaccgatgtaagtgcacacagtattgaaagccattaaacacgcttgcagttcgttcccaatttcaattgacgaccttctaatgccgaagcatgattgttggtcac

SEQ ID NO: 113254 - DNA, 397 bp, Zea Mays
ggcgcctctcccagaagctggtacaaccttggatattcagatacctgtcagtgttcgcccgagacgcccttgccaagccaatcaacttgattctcctgctgatgagcagaaaaagagacgtcttcggcgagtatctagcttggatcgggacgttggtccttcggttcccgctgctgaggaagtgcatgtgcctgagtttactgacgctgaccccaatgggtgtgctccatctgctgctgatcccaatgggggtgctccatctgctgctgatcccaatgggggtgttgtttgtgttgctgatgaaaacgacggggaggaagaagatgaggtccctttgactcggaagaacagtcgacagtatgtcgccagtggggaaagtagtggagttccttctcct

SEQ ID NO: 113255 - DNA, 472 bp, Zea Mays
gtaaacgctaagcctaacgatggcgttaggagttagctgatgaagataaatcccaaacttcttcaaaacatcagcattcatctcattcaaaggaaatcttaatcctgctttgaagaagcttttaaagactaccacctcatccttttccggctttagattaatttcctctccggcaaagcgaattagctcctttttggcctcactgaaatagcctaacttcatcaacttaggcatatcatcttcggtaatggtggacctcccaaattccaggtggctgggtttagatggcatggcactataatcatcttcagattcatcttcctcagcaccaacctgctcagcctcagtagcaggtgcaccttcgtcagaaacatcttccgacactactagccccgactatttcatcacttcggaaatttgagcagtttcagcagtttcggcttcttctccatcacgtgtaaccctagcagtg

SEQ ID NO: 113256 - DNA, 275 bp, Zea Mays
ctgagatgagctagccacggcgaggcgtctttcacggtggcagaaacagaattgggggaaatgggaaattggcgagctctggtgatcaattgagggcatggcttggtggcttggtgcttgactaccctacgggcccgtcggggtgctcaatttatagtgtgcttaagcggtggcctccaattttggattggcgcgctggcggtcggagaagaaaggagtcactggcgcacgagattagtggctgcaaccgtggcaacctcaccggcgatctctgg

SEQ ID NO: 113257 - DNA, 706 bp, Zea Mays
ttggtctcccttgactttgttgacgccaagtagtacacgtccttgttcatcatttgacacgatgacaacaccatctacctcctgttctacgtcaacgacgacgtgctcacggtgtccagtgccgccctcattcagcatacgatcgcttccctaaagtgagagtccaagatgaaggacttgggccctctccacaacttcctaggggccaccatggagtgccaccccgagggcgtcttccttcaccagcagtagtgcaccatcaacgttctggagcgggctagcatgtccatccgtatgccttgatccatgtttgttgacacctagggaatggtccctgacgatgatgcctccccccagttggcaacatgacggcctaccaaagcttcactgggcctctctagtacctcaccttcacccgacctgagatcgcctataccgtcgagcaggtgttccctcacatgcacacctcacaagagctgcacctcaccagtgtgaagcatattatttgctactccatgacactcttgaccacgaccttcttcttcgacccacctcagacttttgaactgatcgtttacactgacgctgattggggcccgacacgtgctagtcgacctcaggctatgccatgttcttcgacctccactttatccacaagcgtgtcgctgtcggtgatgtcaatgtcctccgcatcctgaccacctcc

SEQ ID NO: 113258 - DNA, 291 bp, Zea Mays
gtcttcatcaactctgttagacgcaccggtgcagaccacatccatcctagtaggtacctagtgcacagctggttccatcaataagggggtcgatcgaggatatactgttagtctgatatactggttccatcaataagggaacttggagaaaaggtgattcaaaagaaatcgagcccaaaccctagctgtacccggccgctgccgccggcggcctccccatctgccggcggcggtgaaggcgatggtggtgcctcaaggcccacctccgtgtccctcctttcctccccaaac

SEQ ID NO: 113259 - DNA, 276 bp, Zea Mays
gaagcgccaaggaggcctcaatgtccaacgtgtttcaatataaaagataaacaaaaaccaaaatgtccactaaggcttgcacaggatcagagaggttggaaggggattagattttttattcaattttgactagaaagaaattcattttcctctgatctccttcaatctacttctaaataagctcgaacttcacgttctattcggattggataggaacgaggggattaaattcctctctattaatcttttactagcaagggattttaatctcattca

SEQ ID NO: 113260 - DNA, 1280 bp, Zea Mays
cgctgtagcacgctgaagatcaaacagcctgggatccgcagcaagtggtcgcacctcagtctcatcgcgctcccggaagtgagcaggtgggataggaggagcggaagcgggagcggaaggagcagtggaagctggagtagtggaggtggtaggtatggctgaggtggtggatggcgcaggagtgactagagcaggggaagtgggtggtggagtggtagcagtggagggagtggtaggagcggaggagcgaggacgagaggcgtgacgacgaactcggtaagcaatctgatctaaagaaatccgtagctaatctcctctctctctctctctctctgcctgctcagcgactgctgctgctgctcgggctgctctgtccagacactgcttcttgcggccttcctgttgctccaaatgcacagtcttccccttgacctgcctaaaggggtgagaaggatcctcatcatctcctccccctggcgccgacacattcttcgtgcgtggcatcctatcccgatgactgcaaatgagagagcgaagctaagcacaagtcgataacggccgataggatgtcaaaagaacaaatggctacctagaaatctcacaggagatggagagaatccaggcagggcaggagacggctcatgggcaggcaaggtcactgaaatgacagaagaggtgagcacgtattagtcacatagtcataagtatatgaaatgtgaataaatacatacatagagtgttatggcacagaaatcgagagttatggcgatcgagaggtcaaacgacgcgaaaacggcgtttgaacgagaaatagtgtcataggaggtttgaaattgaaaatgaggcatgaaatgatttggaattgagccgatacttcacgaataggtttatatgggtaaatatgagtgaagtgtgtgcttggtttgattttaggtgaagaaaatggaatttgggcacttggctcagaattgatcgctcgaaacggggaattgaatgaaattgaagcctggtatatcggattggcgtgaaatttggcgaatatgttactggaggtgttgtgaaggtgcctgaaaaatttgggttcaattggagcaattttgagtggtttgggcatttcaccgagcatgtggcgtgcggtggattagagtttcggtgaaaaggctatttgaggattgaaaccctcccaaagggagctagaaacctgcagggatattcaatagagcactagacacattcacaaccacttggattcacagaatttgataggaatttgaatttgc

SEQ ID NO: 113261 - DNA, 401 bp, Zea Mays
attttattctagtattgcctatactctacttattcattctattatatctgatctcagtcttgtccttgcgacatctttgtggatgcccctttacaataaccttctggtcttctgggattctttactcttccatcattaaatttctaccatttggcaatctctattctctttgtattgacatgctcgtatccctggattcttcaatactcttgtttcaaatacttacctctaaaaactctgctgcttatttaaacatttctgtttatatgaccatgaccttcctgtcttctgagatcctttcatgttccgttgataagtcactatctttcggtattttatattttcttagtcttggtatgtagcagtcgactgttggatgtgaccattacccagacagtccg

SEQ ID NO: 113262 - DNA, 519 bp, Zea Mays
ttaccatgtacctcacgtcggcgaaaaccacccatacctctacggttagtacgtagtcgccggcaattaggtgcttcttggtcatcttattcagtatcagcaacatagtcatcccagttaccttcggcgccctcatcacgcccaccattggtattagcatgcatctcatcaaatcgcctcaagagtgcgacaaggctcttgtcaatatgagcaactgtcatttccacatttgcaagtttggtgcttgtgtcgatctgtgtggcctccaattgccccatcttttcattcgtcacctgcatgtcattatcaagaccttccatgagcgtcttcaccggccttacaaagtgttgtatgatacccttggtgcgaggagagtgtggcatattatgagaagcatcatcaacctccaatcctgccatggttagacgaacagaggcaacaagaaaaaaaaatgtgaaggaataaaaactctacaactattaggatgtagctactgcaaggcactcactctcaacctgc

SEQ ID NO: 113263 - DNA, 496 bp, Zea Mays
gttcctgtctacctagtggtagttgaggaaattcctgtggatctccctcgcattcgggtggagaacggagtcattctggaggacagctcggaggagtttctgcctacgcccaccccgttggtagaatcactagccttcgcagctagatcgtcagcttcagcactggtagcaccagcagtccaagcccctgctcccggaggcgacgacccagacgactctagtgacgatgatgaagacgacgagaaagaagaagaagatgaggaaaacctcaacaatgaagccaacgaggaatagcaagacgactacgtggtgttatggcctgtcactgaacattacacttcaatgttcgagacagggcacttccctaacctactgcaggatgtttgcatgcgttgggaacctacgtccggcccctgtatgagacaaggcgagtgtacgtgcttccccaggcttcctactacatcactcgcattcatgttagggtaatggatgcagg

SEQ ID NO: 113264 - DNA, 589 bp, Zea Mays
gattcttaggcttcaccgagtgtaaaaaggttgttcccctaattaaaaattactgttttggggggtttttttgcgattcttaggctttgccgagtgtttgatacactcaacaaagagacaaattccggtagtgatctctgaagattccaagcagaagtttatgttttataggtcgagggggttgtgaataataaagaaaatggtgtgtgtatactgtcggcaccctgaatcaggggtaccccttactacagtatgaagacacggtacccgtgtgaatatctctacccgcgcggtgaacagcacccgaccccaacacgtgggcagtcccaaggacgccatgtggacagaagaggtgatatactccaggacaccatcagtaggtccggacctcctcaagaaagcgtcagacccctgtacacatagcccggacctccgaatatgatccaggactcccaagtgagcaagccggaccccttggatgaggtccgaacccctttgagtgaggtacaggccacccacaacaagatcccgggacagggaataccatgccctaggtcaaggacaggcgagggtccggtactgacacgtg

SEQ ID NO: 113265 - DNA, 470 bp, Zea Mays
cttgtcctagcagatttgaacaaggttctaaccacctcgaaccggtccctttgaatattttgaggccatttgatgaagtgccagtggagggaggagtcgtatatcaatcatggcctgaaccggagaaggagggagcacagaagccaaaattagcagatgtctctagcagtccagctatgtgcacaagaagcaagaccaattacacctctagtcctaccatgggaactaggagcaaaaggaagctcaatgtctgatgtgctacatattggagctctagaaaatggagatgtgctagctcttttgtttaaaactgtgatgtgctagctcttttgtaaggcccttttgtaatagccaaattggtgtggcctagatagctcaaaactgaaactgatgttctgaattgcatgtcatatcaatgtgtaactgatgtgttatggcaagtagtggcacgtaaggaaactgaactttta

SEQ ID NO: 113266 - DNA, 822 bp, Zea Mays
tgaaatcttagtgtttttggatgccttgctaaattaatattgttaagcaaattgaaaatgttttgccccaaagtacatgttatggaagtcctccgagtgaatcttaagaaattaactagccaatagctcaataacaccatcttgttatgggtgaaagtgaaacccagaagtaaatatgcatgtaacacagtgctgacttctgacaacgttttactgaattaagcaagctatataattgcttgatgtttaaaagcactactttcattagggtcatattgcccttttggattcgtggcaccaaagacagtagtccttgtactgagtgttgtaactaatccagcctggaagacaaataagtagtaatgctgagttaaagtgcacactagtaactgtgaatagtacagaaactggctatttttaaaagcagcagtaccttcgcaatgctaattgtctgttgctccatggcttcatgtattgttgttctgtcatgctctcgcatgctattgagaagaatatcagatttaggtgttatatatctccatgataattagtgttggaaaacctaaccctaaacagggtggatgttatgtgcgcgcgcgtgtgtgtataatatatatattcatcacctagggtgcacccgagccaccccccacgcccatgtaccccccatccggtcaagcccccccccctcggcccatgtccagccgcccacccgaccgagctgatcgacatgaaaaatgattgactgaaaaacaaagaatgacttaatgttatctagactctcgaatgatcgaaaaaacataaatgtaggagaaaatatgg

SEQ ID NO: 113267 - DNA, 703 bp, Zea Mays
gtcgattcctctggctgagtaactcgggcatcatatcgtcgtttttaggggtgatggccgagctattatcgtcaacatttacgcttctgaagtagcgcccggatgatgacgaagccacatcagctttggaatgactaatgaccacgtcggcgcttttagagataactgtcgagtgactgaagacgacgtcggcattttagaggtaactggcgagtgactgaagacgacgtcggcgttttagagataactgccgagtgactgaagacgacgtcggcgttttagagataactgccgagtgaatgatggtaacgtcgacgttttagaaataacagccgagttagaacaggctgcgtcggccacttcgtagataatagccgagtgatgatgtggcacaccggtgctttagaagtaaccgccaggtgatgacatggcacgtcggtgttttagaggtaaccgccgggtgatgactgggcgctttttggaaacggtatttgacccgggaatatcccatatgtactgcgctttcagccgcctctgctttccgtgccctagttcttgctttcctgcctccagatcttctctgtctttttgcaattcggctcccgctctgttcaccgttggagttgagatggcgcccaagcgaaaggcctcgagttcatccgctgcggttattccccctatcgaccccaacagccagttttct

SEQ ID NO: 113268 - DNA, 374 bp, Zea Mays
ggtggaacttgggcttgactggaccccaacttcgacaatgcatttgttgttgcgttgcgatccctttctatgtgatggaattccaaaccctcgaatttgtcctccagctttcgtagcactgcacagtatctattcattgagtcggttgagcagtcccagtctttgtttacctagctgatgaccaccagtgaatcgtcatataccattaatcttctgatgtcgagtgagatggtgatgctcagcccatgaaccagggcctcgtactctgcagcattgtcggacaccgaaaacaggagctgaagcgcatacttgagttgatcacctccaggagcgatgaaaagaatccctgcccccgactccttgcaatcttagcg

SEQ ID NO: 113269 - DNA, 628 bp, Zea Mays
ttagttgcattgtcagcataataatgggacatggttgggcttatatgatatttatgcacttattgatgcaaattaatggtcggtttttaaaggatggttgagaaggttaagggtttttaaaggatggttgagaaggttaaggattagttacttctaagtgtcaatagagttattgctatttggacatttagattagtgatagaccttattttccttttaagtcatacatgtctagctaggtcgttgtcgctacctcaccggccctaagttgagatttcatcgccctaatgacatattcagcaaaccccaaaggtagaatcctttgtgttctatgcatctagtagctaggaaactgaaggattaaataggcaaccagaggaggataaattgagggccaataaaatttgttcacacttaagcaatctcggcttagttgacaaaatctcaatccaaacctctaaaacaccaaggctctgcaaaaggcacaaatcaggaacacctcaaccaatttacggttagatgccttgaacaagtttttgaaatgaatatctaattagcaaaacaatcggaatgcaaaatagatactaaaaagttctagaagaagaaaataaagaattttccctaacac

SEQ ID NO: 113270 - DNA, 667 bp, Zea Mays
caaattactccaatttgatccaccacacttggaaatctcccaatgtaaaagttgcttagttttgatgctctaccactttgatatatgcaccttggtccaaaagtgtatagaaattgatttcatctcatagagcacaaattagggtttctagggttcttattagggttttgagtgctctagggtttatgtgccactcaaactctccaagtttagtctcctatgaacatttccactaacttttgagataatactcaatttattatcacacacacacacatacctctatcccttggttgagtacccgatcctagggttaaggatcacttcaaatcatcacatcacacttgttttgaacttttagcctagtggctgcactcttggtgtaacatacataatgaaatgtcaatgcacatgatgtcatgcacaagttttagttcttgtaacaccaggggtgttacatgcgctattgtcgaccgtggatcttaaatcatgcggtgtacataggataccggttccacaaattaacaaatctaatcgcaatcgtgcgaaattgatccaacgaccaaggttggctgataccgctttaatctcgtcgctttacaaagaagcccttatagtttacaggtattaacctacgatccactgcgtatacaaaacaatcacaaac

SEQ ID NO: 113271 - DNA, 624 bp, Zea Mays
tgcttcctaaaaatctagaacttaggaagagaatattggatgaagctcatctttccaaattttccatgcaccccggcagcaacaagatgtatcatgatctcagatccttgtattggtggaccaggatgaagagggaaattgctaagtatatatctgaatgcgacacttgccaaagagtcaaggctagtcatttgaaggtaccaggtaccttacaaccccttcccataccatcttggaaatgggaggacctcagcatggattttattgtgggtttacccaacacatcctgacaccatgattctatctcggtcattgtggacagattaaccaagacagctcatttcttgccagtacataccacccacaagacagagaaatatgcagagatctatattgaccaaatagtgcgtttgcatggaattccgaggactattgtatctgatagaggagcactgtttgtggcacgtttttgggagcagctccaaaagtcacttggaaccactgtgattagaagctcaacataccatcctcagacagatggtcagacagaaagagtgaatcagattctcgaggacatgttgcgagcctgtgtgctacactatggtaagaattgggataagtgct

SEQ ID NO: 113272 - DNA, 344 bp, Zea Mays
cggtacccgacataattcatgaaagccttttggcatcggatatatcacacattggaattctattagcaagcaaaacgaccttatcaaatgttttaaggctataaatctcagttataaattgctcaaccagatgttgacacattgctctctttgttgttgaacgacatgcaacaaactttgagataaatggctagtaccatagcaacacgaagttgtgagtacactgggaggttattctgagagaaaaatcaccatgttggtgtgaaaaaccattgtgtgttcctgacgaaccgctttgctcgtcctatctaggacctatatgcttgtgttgcatacatatctcg

SEQ ID NO: 113273 - DNA, 859 bp, Zea Mays
cggttccgaggtctggtccgctgagataggcgcgcctgtgtttaacgtagtgcagacagacggcatgcaggacagacggcgccgttacacggttgtttgaatggcaaggcggtaaacatatggtaaaggcgcggaattatagggaatagtttccacatgcaaacttgattactatgttacgtgagcgcgtaatttatggatcttgcatggggtgtaatggcggcaggtaaatataacgtagcataagatgttgaaagatatggcataaaaccgaaacggcacaaaagttgcataaatagtatataccgtttggcgtaaaacgttcagtcattgtgcgtaaatagtttattatggatattagttttacattgacatcgccataatatcgggacggtttcggaaataatggggagaccctgtaaacgtggatgcggttacttgtatagtatctgtgatttcctttcatccaaaaaaagaccacaaagcctgcataactaattggaggtggagatggccggctctggagagtcgccgacgatggtaggagatggcgtttgtcttgatccagagacagagggagtagttgatggtaactcactggtcacaccacctcctgctctactgggtcctgtgatcgacgagatgagcataggggaagaaggagaacaaagggttcgacctcctatgtccaatattagctccagggagatggatacgcctcaaatactgcattcacatgtaagtccaattgttgtatttgattcttgattgattagattgttatgaacatattccatggtacaaacaacaatgtcaatgaatttgcaggaaaaaacattgatctaactatagtgccaat

SEQ ID NO: 113274 - DNA, 479 bp, Zea Mays
gccatggcgtcgctctgcagggcctgtaggcgataaagtgcgctcatacactgaatagtgatcctcctaacttggtcgggatgcatagcccacacgtccttcacgtgactcactcggttgcaccacatgaggtcatccctcttcttagcggggaagagtcccagtgggtgcatcatcatctccaggggatgatatccgcagaaggttgtcagggcttttagtgttgtggcctcggtggtgtcgtccgccctgaacccgacaatcttggagtcaagggaactccatctcggctgcagagggtgagactatagggtcagccaaaccctgcaacgtggcacccgatgctcctcatatagctgcaccgtatacagaggggtgtagggtaaccggcggagcagagcacctcccacaagatggagggaaaaccctcgtgggaaaggtagtcaaaactgaaatgagtgtctccaccattgataggg

SEQ ID NO: 113275 - DNA, 414 bp, Zea Mays
tctccggcgggtatctagtttggatcgggatgctggtccttcggctcctgctgctcaggaagttcccgtgcctgagcttactgacgctgaccttaatgggggtgctccacccgctgctgaccccaatgggggtgctccacctgctgctgaccccaatgggtgtgctctacccgctgctgaccccaatgggtgtgttgtctgtgttgctgatgaggacgacggggaggaagaggatgaggtccctctaactcggaagaacagtcggcagtatgtcgccagtggtgaaagtagtggagttccttctcctgctttgtctgccctcattggtctataagagttgtccctggcaaactttgatcaaactcttgaagatatggttctagaggatctgttatcagagccagcggatgatgg

SEQ ID NO: 113276 - DNA, 434 bp, Zea Mays
catacgtatttgatgaaatccggcacgcaagtctagagttgagaaccaagcagcaccatgtagctcatcaagaaactcatccaccacaggaataggaaatcgagttttaacagttatagcattcagatgcctgtagtccacacaaaaacgatatgtgtcatccttcttcttgaccaatatgactgaggaagaaaatgcactctgactgggttgaatgattcctgcagccaacatctcttccacttgtttttcaacctcagatttgagggctggtgcatatcgataaggcctcatatggaagggttgtgcaccaggtagaagattgatatgatggtcacaatctcggggaggtggcagtcctttaggtactgcaaaaacagactgaaacttgtacaacaaggtctgaagatcagctggcaatgcagatagaatag

SEQ ID NO: 113277 - DNA, 483 bp, Zea Mays
acaaagtgagtcacaaagaaaatctcatcaaacacagggttgtgcactgctaccccatatcgaatccgatcaaactccttaatatactgatcaagggtatccgtttgcctcaattccaacaacttcctcaacgcatttggatacgcttcagccccaaatttctccaccactgctgcagaaaattcttgccaacttcccagcccatgacacatcttgtgaaactgccaccattgggctgcagtatgttccaaattcatcgatgccactgacacccacatcgcagtaggaacactaaaaacagagaaatactccaaacaattgttcaaccatagcataggatctccttcagcgtacttcagaaagggcaacttcggtaatggaggatgatagggttctccatgtggacgcggttcgacctgtcccccttgcatgccccccattagccctcgctgttgttccattcgttcttgccttggtctgaca

SEQ ID NO: 113278 - DNA, 504 bp, Zea Mays
gtcggggaaggagaggccaagggcgcgctgctacttataggcatgggcgcgtgtgaggctgtgtttctctggccacggcgtagagcatgaacacgcgtgtgggttggcacgtggttgacggatagagcccgttcgacttctatcaaccgacatcgaacacttggcacatgttcgtctggccaccttcccatgtgtattgtcgcttgtccaaacctgatcttagcaaaatcttcatctatgatttgttgcttataccctaatctagagatattgtatgggggtcatcaggttttactcactggctgagaagatttgttacactcaagtgtgatctgtccaacagaccattaccgaggcaaacaccatggtttggtcatgtcatgcttcgagtttcaatgccaccttctgacatgagttagggcggctaattagtcacaactttgtccattggaactatttgttttagggtctgaaacctaatgaacgttggaggtttagttagag

SEQ ID NO: 113279 - DNA, 636 bp, Zea Mays
atactcctccacttaattattctgatataaattcaagagatgcctcacgacttgggaatactcctccaccccaaattttgcattgacatctctagagaattgcatccaatttcccaatccatgcttcatcttgtgcacttgtagccacatcacaacattgccttccatgtacatggctgcagatattgcccaaactgccttaacaacttggtagatggtgaagtagtcttgacatttctctaaccaaattctaggatccgcccttggaacttggggaaagagtacttgggttgtgctggttatccatgtcctcctgcaccctgatctccaacatctctgaaccagttggaatttgctcttctttctcctctttttgatcaccctgatcaggcccctcctaatgacctagagcctatttcttccaactctctagccatcacctccaactataaacgcgccaccaccttaccaggttcctctatctggctggccaggatggtgtgttcctcctctgccttttttgccaccgttgctgcaagttcagcttgaccttccagacattgttgaccagcttccaccccttccaacttcttccccaaatggtccagcaccttcatcatctgctcccacttctcc

SEQ ID NO: 113280 - DNA, 517 bp, Zea Mays
agctagacttcagcaccgcctatcaccctcagacagatggtcagacagaaagggtcaacaaggtcctcgaagatttattaagagcctgtgtgttaacattcgatagaagctgggaatccagtttgccttatgcggagttctcgtataacaacagccattaggccagtatcaagatgtcaccgttcgaagcattgtatggacgaaaatgctagacccctctcatgtggtccaacataggggaaaaggcactggaagggcctgcctttgttaaagaggctgaggagaaagttgccctgatccacagaagattacttgaagctcagagttggcagaagagttatgcggacaacaggcggagagaactcagatttgagaaaggagacttcgtctacctcaaggtctctccgatgcgtggtgtcagaaggttgcaagtgaaaggaaagctagcaccgagattcgtcggcccctaccccatcattcgcagagtgggacccgcagcgtaccatcttgaattacc

SEQ ID NO: 113281 - DNA, 387 bp, Zea Mays
gcccaatcaacccatcaccagttgccttcatccctctaattgcgcttgataccgtggtcgccaatcgattttggtcctgagaaacttgagtcagcgacttcatagacaggtccatcttcgtctgcaggtattgaatcaacttctctccctccatttgtctcttctccatctctgtcagttttgttgacagcacgttgaatccatccatcttcttagatagttccatcagcgtcgcggatgaggcatcccaaacttcctggaacttctcggcaagacgcttctcgacgtcgtccatcaccgagacgagttgtcgtgcctgcgaggtttgacgactgggcgttgtggcttcgaatcaacttgacgacccacagaacccttcgttcccga

SEQ ID NO: 113282 - DNA, 577 bp, Zea Mays
ggtgcggcaggagtcctcatgaaatgcattcactcggttgctgggaagcaattgctagatgaaatccatgcggggcagtgtggaatacatgcatcgtcaaggactctggtcgggaaggctttcagatccggtttctattggccaacagcgaagagcgatgctgccgagttagtctagaagtgtgaggcatgccaattcttatcaaagcaacaacacttacccgcgcagcagctgcagaccattcctgtaacatggccatttgcatgctgggggctggacatgatcggacctttcaagaaggtttagggaggctatactcatgtactggttgccattgacaaattcacaaaatgatagagtataagccaatcgcttctttgacctcagccaaagcggtggagttcatacaagacataatgttcaggtttgggataccaaacagcatcatcaccgacctggtatccaacttcaccagttctaaattctttgatttctgcgagcaacggagcatccagatcaagaatgcgtcagtggcgcacccaagagccagtggccaagtagaaagagccaacataat

SEQ ID NO: 113283 - DNA, 646 bp, Zea Mays
gagaacttgtcatcaagtagagctgagttggctcatcattgaaaaaatatcgcagtttctcgttctctgttgctctgttagtggatttttttaacccccactgcatggcaaaattgggtgctgctgcagcctgcgggggttttagctacgagtatgttaatttgattgattggaatccttcgagtagtagtcctgctgagactgaaacaggggatgttgcattgcatcgtgactgatgggattgcgactggtatcgtgttggttgaattaccgtggaatttgtagtgagggtggttttgggtaaatgctgctactgttccgtgggcttgagctgtacccatgaagtttgcgctgttgtttcaaagcaaatttgtgcgataggttgggagactatgagggcttactggattcatccatccatcaaccttgagctagctcaacatttttcaaggacacagcttgaaaacttccgtagcttctttacttaggtttatactctgcatttcgaaggtgtgaacctgactgattgcttgagggtagcgaagtgaggctcctcttgttcgagcagtgaagtgatgctacacttggagtaatgctatctgtactgtgttcaaacttcagagcctgctcatcaacttagggacca

SEQ ID NO: 113284 - DNA, 282 bp, Zea Mays
acagtgctgcttttctgatttagattactaaataaaagcacctaaactcaactaaccaggccactaagggctggaacatgcacacgcgcaactgaagtgtgtgggtgcgcatgatgtgtgcatgtcgcctaatgtgcacgcccgcgagacttgccccacatgaactgtgcatgcgtcaaaccaactactatcctgcttatttaacttaaacaacaagctaaatagaaaacttaaagggcactctaaagacatgcaaggattatctgacattttcctcctaag

SEQ ID NO: 113285 - DNA, 348 bp, Zea Mays
tcggtggtcgtggaagagaaatgccaatatcgtgaagaagaacttgaagccagatgatctctgttgtggcatcgtcgacgtctttatattcagctttagtgcttgaccgggacactgtagcttgcttatgagaactccaggaaataaggttgcccccaagaaagacggcgtacccatcagtactacgtcgatcatccaaattaccatccagaaaaggcgctaagtagcaatgatccagtctcgataaaacacaagccataatcaattgtgtcccggagataacgaagaatgtgtttaactgcagtccaatgcactaaagtaggggcagcaatatattgacaaacacga

SEQ ID NO: 113286 - DNA, 359 bp, Zea Mays
ttgttccctttagctttggcatgctccattcacttgacgttggagatgttctattagccaagtattcttgaaccagatctctagtgctgatttgctcagccactaccctgaattctgatatagacagttggcatgctgaccctggctgcttgttgcacaaaggtctggtcattccgaagcttaaagccaacgggcacatgaccatcgtcatcagtttcccccttctcttttcatcggctttaatataaaaccattcactcttccagccggtcggccacttggtgcgatagctgaggactggagcctttgtatccttgcgatacgtgaagttgtagctgccaaaattttcatgaagacca

SEQ ID NO: 113287 - DNA, 623 bp, Zea Mays
aaaagcctgagggtactcgcccaaagcgtcgtcgccaagtcagtcgtccggctgcgcctgctgaagaaaagaagaagaaaaggagacggcttcgacgattgtcatgcttggaccagggtgctggcccttctgatcctgttgctgaagaagtaccgacagaggtctttactggagttaatcccactggtggtgtacctgctgaagttgaccccaatgggtgtgaccgtgcaccgactgaccccaatgggtgtgaccctgctaaagctgagcccaatgggtgtaatcctgttgcagctgagcccaatgggtgtgatcctgcaccatcttttgtccgcatttttgatgaggacgaagaagaagaagttccattaattcgcaagaatagccgactctacagaggtagtagaggagttagtgatattccttctccagccttgtctgctcttgttagccttcaggatttatctataacagattttgatcagacccttgaggatgtcattcctgaggatatgctgtcagagccgactgatggtggtatgatggatgtttgttccgacattctagatgtgggattggaggtatcccggtcagcatctcgcgcgtcgtcgaccttggggcgg

SEQ ID NO: 113288 - DNA, 944 bp, Zea Mays
aacaggtaaaacacctctaatggcatgacaagagtatggcaacatacattgttaaactgaaacttgtgaatcacttggaaatttgaatctggactgaattaagatattgggaggatgtttagttaggcagtgtagcatttagagaccaattcctagtctctataacattgtagggaaaaagagtgcttctgttaatgcgtctctatgctctaaccctttaagcgtctcttttagaagctccttagttagaaataatttattggcatggcaccattcagtagctcgtgtgatgaatgttcaactaatagatcaaagtgtcagacttccttttatttgattttacccttgcagggcttgcgaaatttgtgctttttggttggttgaaacttcagacaactatatgtatcgatcaatacaaaggctggaatattattgcacattcgcttttctaataaaacaccagtttaaaacacacatggcgttatttcacagaagcaacgaagaagacagaacttaggttctgatttcagacttcaaaactagccatgatgatttctacaataactctttccccagaaaggttcaatcacttgtccgttgtgttgtgacacgtctaatttacatgcatggcttcacatccattcttaacaattgaagtaaaatagtaaaatattttgaatcttttacagggtgtgtgaaatctaactaccaacggggacatttcatcaaacaggttatggtcacacacttcctctgtaaagtcctgacaaaagaccaagaggagcgcctacctctccggctcgacgccaaagacgccgtccctccgtatcacaaactcgcacgattgctctggcaggtgcggcgcaaacgccactttcatccacctccttgcgctcccgctggtgccattcccttccacctcccgcgtcaggaacaggcgcgtg

SEQ ID NO: 113289 - DNA, 374 bp, Zea Mays
cccgccactcatctctcttcctcctaaagcaaaaagcagccaaatgaccctccctctcacaataatcacagtgaaatctcacctcactcttacttggagcctatttatgggatttgggctttttgggcagctgaggggctctaggaaggggacactagagatgtcaggaagggtgtcgagtgtgttcctgagatagtttggtattggacatcacacttgtttctgaggaggggctctcacaggctcctcaatcactccattttttacaacaggggtggcagatttaggtggattgagcttgacaagtttgggggtggccgaaggtttctctgagggtttctgaccactgcactcaccaaccttaccaaaataag

SEQ ID NO: 113290 - DNA, 539 bp, Zea Mays
ggataattttgctcatgaggcctgagtgcccttgatgcgtaggcaatgacccggttgtcttgcatcaaaacacaacctagtccagtgccagaggcatcacagtacacatcaaatgacttgctgttgtcgggttgcgctaacacggatgttgtggtcagatgctgcctcaaggtgtggaaagcatcttcgcacttctgaccccaatcaaacttggctcccttcttcaacaattcagtcatgggcttcgcaattcgagagaagtctagaatgaatcttcgataataaccgaccaatcccagaaaactttgaatctgacggatagttgttggcagcttccagttcatcacttcttgcactttatctggatcaagagctatgccagcctgagagatagtgtgccccaagaatttgatttctttcagccaaaaatcacatttagacagtttggcataaagacagtgctctcgcagacgttggagcactacatgcaaatgaccgacatgctcttcttcattctttgagtacaccaagatatcgtc

SEQ ID NO: 113291 - DNA, 476 bp, Zea Mays
ttggaaactcaaatctccttgggatccatttcatttccctccctaggtttagccacccctcctcccaaactatcccttaggggtttattaggtcagcgtacacaagtcatgtagatgagacaacctatgttgaatgagagagttgtcgagttcaacactgtgatgtgttgttcataggtacttgagcacattggctatcttgtgtgtaattcttattcttcaagatataagctttatatgagcatgattaggacatggcacaagtaagagaaagggttgcaagatataaccaaaataatatggtaaagtagtatggtattagatccatgcttatttattatttctatggatagaagattaggtctgatcttcccaaaggtaagtctattgtagtggagatcttgacgtttatgatctaaaactacgaacatggataaatgtagcataaagaacaattagacttactagcccatgtg

SEQ ID NO: 113292 - DNA, 337 bp, Zea Mays
gtgagagggaagatgtgaggggcgttattcagcgtcccatatggtcacacttcggtattagaaggccgttcaattgcaattgggaacaaagtgcaggcgtgtttaatggctttcaacaccgtgtgcacttacatcggtactagggatttggtacagtaacacattgcttacaaggtatggcctcttgtgaatgactgagagatgccgacagaaactgctgctggctccagccaaggtggtttggtttatctaagatacaccttctagtatagaagccaatttgacgagccgaatgacgattggctagaggctgttgaggcaaccagtgatgagctgc

SEQ ID NO: 113293 - DNA, 654 bp, Zea Mays
gtgaccttcaagaatctagggatcttcagctctcatgggttgaactgggttggatggagcgggctcttggatccgcagggctctatgttggttatgggttaccaagtaggcctccatcaacttctggacatgctcatccttggcttgcttcagggcttcaacaacaatgacttcacgactttccaaggcagttgcacgggcttgagctatggtgagatccacatggagctgacggttgcgcttctctgcatcttctgctcgggcaatcatctaacggtggtgccgagccaagaaatcatactgtgcatccagggtgagcaggtatgcagtgaggtacacgactgtggggtcgtcctgaaacagctgctgaccttccaatgcatgcatcctggccatccaaatgggacggtctctttgaaagggcggaaagaatctgagcggtgtgtcggccacttcttcataaatctgacacatggccctcaatgccttgtgagcgacgacttggcaggtgtctttgaatctgtgcccagcagcagtgacactccattccacatggtgcggactggatccaatgtatacagtcatgacacacttctctgtgccatgctcgatgaattcacgaccatcatactccggctgactcctgattccgag

SEQ ID NO: 113294 - DNA, 371 bp, Zea Mays
taggaatctctctgtcgtattggctgttaccatgcttccctcaatccctcttcaggtaaaaccgtaaaagcaaattcttgccttgcgtgtgcaggtccattcagcagcgtgggataacagtatcacaacgataatcgtagactgcctgtttgtttaggagtatgttagttccttttgcattatttaaagtttaaactggttgcagctaattgtttgggtttagaaataacaggggatgtttacaagacaaatagacacgatgatctttccccacatatgtctttcatcttgctatcttctatctctgattagttggctaaatcctaggagaaacacatatataatgtgtcatttaacataagtgctgcaat

SEQ ID NO: 113295 - DNA, 1070 bp, Zea Mays
aaaaagtgcacaaaaacatctaagggtatgaagtcaccttagcaaatgaagtgactgagcaaaagttgcctaagggtgcagtcggattagcaaaaaatcacgaagacacgaccacaaaaaggcgtgatgttgtatgtggtgccgaactcactaagcaatgtagttgtcgctcagcaaaggggggcgagggcagcattccacatcaaagttgccaagcgatgacaatacacaggtcaaagtaagccccaaagtcctcgccttcatttacaagcacattattaggggttacaaaggttcctctttcgaaataagaccaacttcccaatagttatagaatatgagcttaagttgttcgccctcgaagagcgccctaagctctagttccctgatacggtaaggactaaggacccaaccaggcgtctttgtcatataattcaacaagattcctcttctaacttcaccctctcccctttgcaatggcctatgggcatcatacccaacatctcgcggagcgaaacccgagaaccaggcctgcctagtcccatgcgccgccatttatgaccaccttcgcaaatgacgcatcgacattacccaaccttcattttgaaacaccaacacgacacctctttacctttatcaagggtaatggggccctattagaaggcctctcattttctctagcttccgcagcggacgcaatgtctaacgcaatgaaaaaatcaaagtcctcgaaggattccttgtccatcttcgcgaagaagttcaaacaccctttgctatccaatgaccatgaactaaactcgaagccctcgttaataccaatagacgggctctggtaggacaacaacatgacgcattcggcaacctcaatgatttcctttcccttgatcggaaagccacaatccacctacataggcccagtcatcggaacctgcgcagggaccaaagtcagtgttagtgcacaccacaacatgagttaccctccagagaaagttttcacccctatttacacatgcttatcagtagaacgatacgaagctcccacaacattggcctacatttgtgaagac

SEQ ID NO: 113296 - DNA, 335 bp, Zea Mays
gttgtataccctttgtatctcatgcagtgctcaagtggatttgacctcgggttggcaagttacgaggaggtgaagttgggtctgtccgaccagacttttctggtgaaaaatgggcgccaacacatgtcaaaccaattgggtttgttttcaaatttttctagagtgtcctaggggtctttaggcgccattttgttaactgggccataaggttttgaggtttggaaaaaggtgaacatgtttgatctttgaaagagggctggttttgaacttgagaaaaacctgatttttcttttatgcccttctctttggtgacctttttgggatctttctgaact

SEQ ID NO: 113297 - DNA, 647 bp, Zea Mays
cgacaacgcagcagctaatgctctgtcccgtttgccccggccgtcccggccgtcagcagactgtttcgctgtttctcattgttccccggcatggttacacgatgtggttgctggttatgacaacaatcctacagccaaacagctgttaacaagtttgtcagtacagtcggatgattctggacctttctctctgcgtccgggtgtaatacgttacaaagggcgcgtgtggttggatggtaactctgaattacagcagcgggttctccaggcgatgcatgattctgctattggcggtcattcaggcatacctgtcacttacggccgattgaaacaactattttattggccaggaatgaagtctgttgttcaggcttatgtgcattcttgttcagtctgtcaacaggcgaagccggaaagggttaagtacccaggccttctccaaccattgtcagtaccgccgcaagcctggcatacgatttcactcgacttcatcgagggattaccccgttctggacatgctaattgcatcttggtggtggtggataagttctccaaatatgggcacttcttgattttatcccatccattcactgctgctcgcgttgctcgggtgtttttggatcacatctataaattgcatggattac

SEQ ID NO: 113298 - DNA, 393 bp, Zea Mays
taacatatataaccaaagcctatcaatagaaaatttcggcagcacctcccctgcacggggaggtttccaaaacctgcaaataaaagtatcagcactatagccgacacgcagatatacaaacgacacgatggccaccaatcacatctaatcggcatccatatccaccatcacattatatagaaactattttactaaacatatccaccatcacattatatgattttattcacattaatggtgaaatcacgtgcactcctaacacattttggggcctactttctaaatgaattttggggaaacaaatgaaccaaacctaaacaattatttaataccctaatcaattacaaatacaaacataaacaatctactccactacattatacaattacaaat

SEQ ID NO: 113299 - DNA, 365 bp, Zea Mays
gatcgaactgatattggccgatcgtccttgatcgaatcttgcatttcttccttggaatacacaaattttaaatgctaccacatgtactaagcgcggaaaatgttcgatttccgcgagcttgggggacagggttcctacacttaaaatacgaggccggcccgtcacctcatgaaataggaggccatggagaactctagctcctagaatatatgtcaacagggcttaaaagcgtaatgattccataccacaccttcggggaggcaactaaaatgaacaggcaaccagacatcgccgacggaattgcctcaccgaacagttccacaattcactggcaacttctcataaagcggtacgcactagcaaag

SEQ ID NO: 113300 - DNA, 392 bp, Zea Mays
taccttttggatcaaaatacaattgaaaatttctaagtttctaacatcatccatatagttttcgtttggttagtaccacctctcgcaatagccataaaaatgtacctcccgtcaaaccaatagaggaagttcaccctcagaggtggaactctcatcaaagcagcgaactgttttggtcaacgacaagataaaaaaggttaagactgagaagcagattatgtggacactaaaataagacaaaaaattaaggggtgtttggattgaaaatttgacggactcagccactgagctgatagaaatggagaagcatattggggtgatgttattaatgaatatgacaagaacaccccattacagaggaaaaggaatgcaaagcaagccaaaaatcaatg

SEQ ID NO: 113301 - DNA, 586 bp, Zea Mays
gcttgtgccatccctcccccgtaagtactcgatggaggaccaagtctcctactgcaaaggaccggtgtcgcacagctttgtcgtggtagcgcctcaaagtttgctggtatctggccgactgaattactgtgtttagtcattcctcctctagcacatcaatgtcctctagcctggttgcttctgcctcatctatgctttcaaaggtcagcctatgcgccccaaagataaagtcggcaggcagcactgcctccgacccatacaccatgaagaacggggtgtttccatgcagagctcggctaggctgtgttcatagactccagaccacgtatggcagctctctgagccacttccgcgcaagcttctcgctcttgtcgaataccttttttctgagtgcatccagtatcattccgttggctctttccacctgcccattagctcttgggtgtgccactaatgcgtatttgatctggatgctcctttgttcacagaaatcgaagaactctgagctggtgaagttggacctcaggtcggtgatgatgctattcggtattctgatcctgaacattatctcctggataaattccac

SEQ ID NO: 113302 - DNA, 328 bp, Zea Mays
aaaaaactctagatttgggtatataaaaaatcagatagttggatatgctcaagttctgagttcactactcgatgagtttggtgaaggaaaaaatagctcacgacgcagacgctgcttgtgcaactactctgttatagtaaccatgtgtgtgatttagatttctggaaacttcgatttgattcgtgtagacagtgatgatgataaaacgaagaatcagtctggtttggcaggcaggcagcagaaagtgggggacgatggcccatgggctgcctttcctctaaggcaggacaagaaggcccatatgctgtcttttctccgttacgtggaa

SEQ ID NO: 113303 - DNA, 459 bp, Zea Mays
gcgcgagcatgttgcatcgtcttaagtcgttgccgacttaagccgattgctccgttagcagggcatagtggtcaccccgagttaagtaagcgcgagcatgttgcaccgtcttaagtcgttgccgacttaagccgattgctccgttagcggggcatagttgtcaccccgagttaagtaagaatgcaggtcgaccatgaacaatttgagtattcttgaggtctttttattgatgatatatttcccagtttacagagtacattgtcgtcctgatagcttttgagatacagctaggggtaaaacttcctgaggtgttctatgttccatgagttcccaatttccgtgccgtccatctgagtgagacgatatgatcctggccaagtaacctctgctactatgaatggtccttcccatagaggcgacaacttgtgacgtccctcccccgttagaattcggcggagg

SEQ ID NO: 113304 - DNA, 329 bp, Zea Mays
gagagcggagagaaatgaggcgagggtgaggcaggggccgcatggcgggtggccgctatatctagatatcgggccgccgcagtgctacccgctagaatgggtcgtgccaagcactgtgggatgaaaattgtggcccagtccgacacggtgatcgggccatgctacctcgggcacatttctagttgggcgtgcggtccaaattcatgtcgtgctctgggccgctcagtgggcccagtcgatatggacgtctatattcgagaggggagggcaaggtagggcaaggcagggaccctccaacttgtgccctagaggccgaggcgaaggacctg

SEQ ID NO: 113305 - DNA, 883 bp, Zea Mays
gaataaccagccaaaatgcccaacagttccaaagaaagcaaaatctcgcagaccagtgattcgccatcacactacttgtcttcatcatcattgttttttttcttgtcattttgtctttcttgtttggttttttagggccgacacatcctgcggaattcttcttcttcttcagctttttgtctgacaaatcttcttctatcatactgcaaaaattttccccaagattcctgataaccttggcagacagggaaggtgggccatcgaatttatggagacacatcaaacaattctttttctggcaggatccctgtctgaagccagccctggattctctcagtcttttgctccacctgagatcagaatccacaatagttggatgggagggggaagagtccacatcttccaggttagagatcctgccctaagggccctccgagagaacattatccaaaaacttgtcatttgggcagctcttggggataacaaatgaaagagcctccagctcaggctccaacagagtaggtggtatctcggaagaaaggaaagacttggaccaattaaaagaatccggctgaagcagatttgacataaagaaggacgaccactttttgggaatcttcactgaaatttctggtttgcccataggtgcaaaataatttgcccaaagcctgtagaactgagccgtcctttttctttccatgtgcatttggaagacagggtctggttgccaatcctaagcaaacatataattcatctccacattgttaaaaacatggttaatttgccccaccggttgagcagctgggagcagggcatcctccaattcttgatgatccacctgatttaatgggccatcaacttcttgactcttgaggcccatttg

SEQ ID NO: 113306 - DNA, 370 bp, Zea Mays
gatgactctattctcggtcgcacgtatactaatcaacgatccgatttgagatccacttcgaatcgttgatgcatggatccatggtcattgattcaaaagggtgaaagagtattgtagcttttaatctcacacatcagttaccggatccacggctaacacaccatcgccttcccccggtcagcagggcagaggcgatgtgccccacacggcggccaccatggccggccttagccgatacgattttcgagtactcccacacccatttttaggtgcaacatgatgctaggcgcgtggtgatttgatagggaagcacataccagcgaaccatggtgcgagaacccccacccacggtgaggtgtgaaccgcggca

SEQ ID NO: 113307 - DNA, 495 bp, Zea Mays
aggttcatccggcaaaagtacatcttgaaatcagataacaacatcaacaactattcatagagactcaggatcatcgggttcatccagtaaaagtacatccttaaatccaagttctggaactggtactggtttgtgcctggtcgccctctccagctcagccaactcctcattgctaagtatcattatgctatatgaccttataaacaacagctcccttctagatcctatcacattgtctagtgtgtcaagtactctcagttcatttgatccagacattctgactttgatttcttggaaatatgctggagcggcattactcaaagctgtcagcggcctttcttgtcatagtgccagcaagtgtcgttaacagtgatctcagtcatgaagtaggagccagtggctacaatcaatctcagatgaattctcgtcatcccgaattctctgtcccacaacaaggtatatggatctgaatcgaaatggctttgcaaatatcac

SEQ ID NO: 113308 - DNA, 536 bp, Zea Mays
gttgtagagcttgaggagggtctagggacactagaacaagcaacagagagactggaactaacctgagttgggctagccacggttgagctgttcttcgcggtggcggagaccagtttgggggaaacaagaaattctcgagctctggcgaacgatcgtggttaattagcggtggctggatacttcactgccttacggagctcgtggcggggtcaatttatacccttagtgagcggtgggcgtgaatttgggcgagacgcgcggcggtcagagaaaggggaagttcactggcgcagtgaattcgtgtctgatgccgtggcaattactccggcgatcaacggggagcgagaggaggtcacggcgatgcggtggaagtgcatggacacacggtgcaaggccgggaagcagcggtcatcggtgtacttatccaattccgccgcggtgaacgccttgtacggtggccggaatactttactggccggagttatccacggcgatgatctccaagtgctatctagtttatttggtcacgagtcacg

SEQ ID NO: 113309 - DNA, 457 bp, Zea Mays
gttttttgtattggggtataaagtttatatgcattcttccggtatatatcggttgatgctaattcatataaaaaatgatagtggggaggcttggatggtagtatactttgagttcggtgcacttgcatccgttcacaattctctttgtcatctgcttctcttcatgttcttttccaaatataccattcaacacaaaaaggcaaacacccttaagtgcttgtcttaatgttcttttccaattacatcggttgctctgtgagacaaccactcactttgaatttcttaacaagcatttgcagttctctgtagccgtcccatagaacctctcgcgtcatcaaacatgaaacaagttattcttacccattgatgaacacatatatataacaacctagggagactgaatgcataagctcgcttgaaatcagaacctcgatgacaacatgatgactgattagat

SEQ ID NO: 113310 - DNA, 496 bp, Zea Mays
aaatgaagcctgcaatagtaccaacctgaattataactgaatgtagcaaacgtttaccagacaataaatttgagaaaaagacattagcaaacttgctcctcaagatcttttacttgcggtcttccttcttgaaattaacagacttaatcatagggagttaagaaaactcatgtccccagatggatcttactaataggtctctatgtttggtattttggacagatgtggagtgaggactgggccatctcacccaaattcagcaatcaaaatggtttgtgccggcgcccacgaccaagtcgaatggcattgacacggcccacgggcaggcgtggtcaaggcaagtgaataagaagtggaaaataaagcttgaaacacagcaaccaacatcacccagtcactcctcagaaagaaggcgccattaacaaaagcagagaaagcatggcagcagcagcaacgctaacttgaaataagcaacggagaatggaggcgagcagga

SEQ ID NO: 113311 - DNA, 756 bp, Zea Mays
gaaattagcgagctctggtgatcgattgagggcactgtttggtggcttggtgctagactaccctacggagctcacggcaggctcaatttatagcaggcaagagcagtggccggtgaatttggattgagacgcgcggcggccggagataacaggggttactggcacagtggattcgtggagtacaccgtggcggactcaccggcgatgattggatggctaacgtgagttatggcggtgcggttaaaggcttgaggcgtggcgcaactacggtgagcatcgcggatttcagtgatggccgtaaggccacgtcgctagcgcagggaaccgagggacagcgtggccgcagtacttgaacccatccgtgatgagatcttttcgccagtgagctcaatccatagcccatacgcacaaatcacggcgagcagtactgatcccggtgaagggtcaccggcgtccagctaacagaatctattgatcttttggctactgtaccatcgcacagcctattcagttggtctgacagggctcttttgagggcaatttgtgccaaattttgtgtagtgaccagactaccactttgcagcaaagttgtagcctaatgatcgagctacaaacttacaatagcaaccatagccaaactctcacaagatcatggttgaatttagtccaaagattactcaattacactgtcagtcttaattcagacttaagacagtgtgacagctcaactttgggcacacttttctccaatatctg

SEQ ID NO: 113312 - DNA, 623 bp, Zea Mays
cgtttatagcgactgattctgagtcgagtgcccaaattcactttcttcgccaaatttcaaaccaagcgcactcttcactcatattcactcatatatacctactcgtgaagtattggctcaattccaagtcatttcgtgccccatttcgaaattcaaaccttctatggcactattcctcgctcaaacgtcgttttcgcgtcatttgacctttgtttctccaaatcactcagtctctgtgtcataactctctatgtatgtatttattcacatttcatatacttatgactatgtgactaatacgtgctcaccgcttctgtcatttcagtgacctcacctgcccgtgtgcttgtctcctattctgcctggattctctctctctcgtgaggtttccaggtacttatcactttggttatgatcttatcaactgctatctactcatgcttagcctttcactcacttatgcagcactcaggtcaggatggtgtgcatgaagaatgtgtcagcgccagggggaggagacgataaggaccctccatgcctcttcaggcaggtcaagggcaagacagtgtacctagagcatcaggaaggctggaagaagcggcgtatggacagagccacccgtg

SEQ ID NO: 113313 - DNA, 399 bp, Zea Mays
tgtgaggatccaactggtgcgtataacaggctcaagaccatagtgaacaagatccaaagctatagaagtacaagatggacagatcatgatgtcattcgcctcatgctaaggtcatttactattattgaacctcatcttgttaatcttattcgtgagaaccctaggtataccaaaatgtcgcccaaagcaattcttggtaaggttgtgagtgggcgcatgatggtaaaagaagcaagggatgtcgacgacatcgccaacagacctcttcctcattatgagccgcaacccgttgcactcaaagcaacgaccaacaaggaggtgcttcccaacaaggtggcgcaagttgaggcgtccaaccttaatcaggacgaaatggcgcttgtgatcaagcgcttcaag

SEQ ID NO: 113314 - DNA, 623 bp, Zea Mays
tggactttctgatctgtgagattgaggacaccgttctggatgggattcgtgctcgtcggcagctaccctatgctcactacttatgccacatctttgcgcagctgattcagccacctcgttttcagagcactcttgaggcctcacgccttgtgtttggatcttaccgccctgctcctgagattctagtgccagcttctgcttctgtgtttgactctcaggccgaggatgcagctctacgacagtttgacactcagggtacaacagctgatgatgatgatgatgatgatgattttggggttcatcctccgcctccgcctcctatgcctccacgctcacatgatcatgaggctgggagttctagtgctgcccctcctcatcctcaggctatagaccctgcccttgcttcgattcttcagactctcacccagcagcagcagactctcacccagcagcaggctctcctggcagccgagcaggctcgtttatctgacaggatgctctcgatgtttcagagcatgcaggacaggcaggatgcacttcagcagcagcttattcaggatagggcagagaatagggcattcatggccctcatgcttcagcattctggtatctcagcacctctg

SEQ ID NO: 113315 - DNA, 439 bp, Zea Mays
gtggatgtctggcattaccaatattggtgtagtggttaaccttttcttgagttcttcaaaacaattctggcaaccttcatcccacttgaactctttacctttctccagtagagaggtaagaggtttcactaacttggaaaaaccttcaataaatcttctatagtatcccgccaatccaagaaaacttctgatcttggacgcatcctttggttgcttccaatccagtatctcacttatctttcctgggtccactttaattccaccatcggtaacgatatgccctaagaaagcaactttcttcaaccaaaaatcacactttgagaattttgtgtacagttggttgtcacgaagcttttgtaggactagccttagatgatcttcatgtttttcttcattcggagagtatatcagtatgtcgtcaatgaatacgaccacaaac

SEQ ID NO: 113316 - DNA, 637 bp, Zea Mays
ttagaatacaactagtggatgaagacgtcattaggctagcaaatgacattttgtgataccaggtttcctataatcccctctattcaaggcatacctacaaggtgtttatgtccactcaagaaaaacaaaacacatcaatatgccacattgtttctaaaattaaaataatgaccttggaaaatttagccaaattacgtgagtgaactgtacaaagataggttaaggttgtaaggcaccttttttccaccatacagttgcgaaaaagttggaatataaagaattcaaaacaatagatcaccttttaaacctcaaatgacgtttctatgatattgagggcattgtattcacaactagtggatgatgacgttattgggctagctaatgaccttttgtgatactaggtttcctataatcccctctattcaaggcatacctagatggtgtttatgtccactcaagtaaaacaccgtacatcattttttccacatcgtttctcaaaataaaataaagaccatgggaaatttatccaaattgcgtgtgagatctgtccaaacataggttacggttgtaaggcaccttttttccaccatacagatgctaaaaggttggaatataaagaattcaaaacaatatatca

SEQ ID NO: 113317 - DNA, 964 bp, Zea Mays
attttggtgaatttggatttggtggttttacaacgttcgagattttttgtcaaagtatagctgtttttggtgaatttggagctggtggagctctaccgaacaggttctaaatctcttaggtgctaattcctctgacttccaggggtgaccactggtcacctggtgttccccattcatcaacgactgtcttgtatgaaaaatatgccgacttcgtttgattttggtatccaatctttgacacatggttcatttcttcattcatggattgttatactacctatgtatatctcagtgcttgggaaggtttacatcatcattactgctactgtcgattcatacttctgcttaggtgctccaggtcttcacaccgtaggttttatgtgtatactttaatcttaattgtctctggccactatatattttatatctaatgattcaaaattctcttctctcttcttgctttgttcatatttccataatcgaacttgtagtctatgatgtattatctaagcttgactaactttgactatatatttttctgtctataataattccaaatacgttcaatgatcttcattttattatttgaatgatgttgaacttcctgttggggggtatagagaaacattcagaccagctgtcattcttcattatttaacttattttgcagattataatatttggagataaagttattctcgacgatcctattgagatgtatgtaatgagaactcaggttattgataacaatcataattcttttgtgcataggtttatctacattctttgtgcaacagtcttgacctaaggctatgcatgtactgttgtcttactgagtttaggaattgggaatagcatcttacaccattttgctttcagttggccaaactgtgattgcttgattgccttctattcctctggttttcctctgcaaaaggttcaagcatatgctgctttgagaagg

SEQ ID NO: 113318 - DNA, 588 bp, Zea Mays
atttcttacatatatagtagttttgagatataataaatgtcgttctacatgtctttagttttatggctattcctactcaaattctccgtgttttttttggtatttgcagattggaacatgagaggaaaagaactttaactcatggaaggaaaagatcatttttaatgcactaaacaaaagcattttatgctagtttagacagaatgcatcatcctccagtagatggttagacttatattctggcataatgtgcactaaacaagtgcctctatgacaatcgtgacttatgcatttttcaaatgatttttacaacatttcttgttatgttttacgctataattacctcaaatcacattttgttgcgtttcacaccaatttatgatacttcttgatgcgttttacgccaatcttatgatacttcttaatgtgttttatggcaacttcttaatcgtgtgatttttatgcctgaaatagtgggatcctttggttgttataacgttatcagtagtttacgctaagttatacacacttttacgcttttttgtgttcgtttttatgcaacatcgtgtgaagcgagatacacggcaa

SEQ ID NO: 113319 - DNA, 531 bp, Zea Mays
tggccacagagatacctgaaacctagaaaactgcttgtagtgggcagtcatagtcctcattgcggttcgagcataattcctcaagagtgccggttgctttggccagaagatctctcattgccggttcagcatacatccacatctctgctagaaattccatcctgtccactagagaatagtagctgaaccctgtactgctagctgccgtgccagtatttctaaggctgctaagcacaccacttcaattacaaacccttttcaaatgttgagggatcagagcacacactttacaggattgcttatgttaggacctaggagtcatagaagattgagtggcggccccaaactgggaaagtgagaatggttagccgttagcccaccactccgtggtcgatggacgcatcagaagacaaatggccagaacctctttgcaattctagtaacctggaaaagggttgccagccaacagtttttggtgtgccaactttcctagtgaacaggatttcactgaggtcctgtcacacaataata

SEQ ID NO: 113320 - DNA, 724 bp, Zea Mays
tgtgtttctatcccttcacacctcgaggtccacgacggtgaacgacgacgcgtagagcttccggtgagcttgtgccagctgaaatacgcaaggaccggaccccaggctcggctggcacctaattctacccctgacaaccatttcccctcacccaattgaaagattctaacacctaatcactctgtccacggtgaccacgcaatccggggacaaatcaaaatgttcccgtcgatctactctggtttagagcaattagtcgggccgatgagctttaagaatacacaggaatgctagaacaagagcgaggggaacacgatcggacctgtggagagctggccacggtgagctcacttttgcggtgttttggaccgatttgggggaaatcccaaataggagttctctggtgactaatcgaaggcacgggtgggtgcattgagtgcttgactacatggtgaagccgagggcgcgctcaatttatatgatttagggtcggtggctctcaatttggtcacggcgtactggcggccggagatagggaagaacacaggtggctgtgaccgtggcgttcgccggtgcaacggcccaaagactatactcctaagggtgccaccattactaccgcatagtaacaagctacggcgtggcgcaaccaaggtcaccggagcttccacggcgacgctggcggtctgtccacgtcgcaacggctacaggcacggtgataaac

SEQ ID NO: 113321 - DNA, 329 bp, Zea Mays
aattgttatcctcgccgattggggtgagtgtaggtgagggggagctgcaaaatctgtttgagggtgaggaactgaggataatgctgttcaactacagggagatgggtatcatcccgaaggttgagccaatgtaatatatgatgccctcgttgtgtgtatgtaaccgctatttgtatgataaggttgcgcgccttcgttgatccggccgcgcccgtgggcgacttctgcacggagagtcttttggaaaaggcttcgattttgcgcgcctattattccggctgcacctttaggcgacttttgcacggagagtcttttggaaaagacttcga

SEQ ID NO: 113322 - DNA, 935 bp, Zea Mays
ccggccccaaggaatctcacctaagggacgtgaaaagaatgttgagatatctaattcatactcctacatttgggatttggtatcctaagggttcaaactttgatcttcttagatatttagatgtcaattatgtcagatgtaagaatgtgccagctggactattgacaaggaaattgatcaagtgtcgacccctcctatctgtccaaccatcagacataagtgtgcaaccaaattcagtccaagccaactcatgagtctttttttatctcatctacactcttctttgccttctcaagcaatggcaccttaacatcatgatatgagggtttcacgtacccaggaccatattgcccaaccgcctcaagcatgatctcaaaggcccttgagttgatgacattaagtggtaagccgctctcataaataaaatcagcaacatacatatatgttatttccttctcctccttgctctttcgctgcaatgtagtttgagtgttgcccttacaatgcctctcgcgaaccacatcttcaggtgctttgcgaaacatggatgcaattgacttagaagacttcgacgcgtgttgattgttttggcttgcttcagctaagagccttctcttttgggttgttccggaactgagctgaacaactaaatgggatgctctactttccccttgtccaagtacttcaacttcatcatctttatcaccatctttatcatcatccaagtcaataggcttctgtctagcattcttcttcaaataatcactcatctctttgctaattgtcgatgttgtctttgggcacttagcaacatcaccatgaccaccaacaaggtgctgcctcaaccttctaacacctgcatgaacgattttgccacaaagtatgcacttcaccacatcttttttgttcaaatcaggccagtaacaatagttcca

SEQ ID NO: 113323 - DNA, 467 bp, Zea Mays
aatagtcttcatgtgtatggccttgacacatctgcaagtgtcacacctagccacatagcgtgcgatttcaattttcatcttcgtccaccaataatgctgtttcagatcttgatacatctttgtgcttccgggatgaatagaatagcgactaagatgtgcttcatccaaaatttgctggcagagctcttcattctttggcacaactatgcggttgttgaaccatacaacaccttgatcgtcttctttgaaacatttggcttttccagccctcatcttctcacgtatatgtttcataccctcatcatttttttgtgcgtcaattatcctttgtaaaaggactgactaaagctttagttgacttaaggctccttgttggatcattcccaggtttaacttctccatctcctggcatagtgtattgtcagaggtcttcaccataagacagtgacaggaaaccttacggctaa

SEQ ID NO: 113324 - DNA, 526 bp, Zea Mays
agctcttaaaaaatattgctgcttgaagcaacgtcacatccagatttatggacaaatccagatgcatcttatatgtatgctgacgactcagtgtatagaaatcaattaatcaatgtcataatctttattacataatgaaatgtcttaaaaataactgaataaaaataaattgaattaatagaacttctgtgggggataaatacccctaggtggccatgatccgagagcgcgatcagaagcaggagaggagggcagttacgtgggcacgaaggtgcatgaactgaacctcacgcatgcagaggccacgacgtgcttcttgaagacactgactttcggataagtcagagccagtttcgtagatagagacggattggtaacgatcgtgcgtggtgtgtaacgatgattcagtcgacataagggttgatttggtggacatgtaaatggaggggattcatgggggaaattgaatagcaaggggattctgtcgctatgatcccctccattttggagatcctaaggggaaaat

SEQ ID NO: 113325 - DNA, 418 bp, Zea Mays
ccccgagttaagtaagagtgcaggtcgaccatgaacaatatgggtattcttgaggtctctttattgatgatatatttccagtttacatagtacattgtcgtcccgatagcttttgaaatacagctaggggtaaaatttcctgaggtgttctatgttccatgagtttccaatttccgtgccatccatctgagtgagacgatatgatcccagccgagtgacttctgctactatgaatgatccttcccataaaggtgacaacttatgtcgtccctcccccgttagaattcggtggaggacgaggtctcccactgcaaaggatcgacgtcgcatggccttatcgtggtaacgcctcaaagtttgctggtaccgcgctgattgaattactatatttagtcgttcttcttcgagtatatcaata

SEQ ID NO: 113326 - DNA, 393 bp, Zea Mays
ccgctttcatctacactccgcctagtatcaatccgagttaggagtagggccttgggttaccggaatttacttgccggggtgcactggccgtgggctacgacagcgctatcctggcgaggtcacaaggttagggatgagatattcgccgtccatctcgtgatgtgcagctacgattagagtggacgtatcccttcgcgtaggtgagtgagcaccgtggatctttgatccttcggcgcagattacgtcttgcttcattgaaacgcgaccgtcgatctctgatcttgcaggcagcgttgttcagtaccggttcaatcgggtgacgatttaatcctggccgcccaacatagatcggacgacccatcgtggccgatacccctttgtccgagaactttt

SEQ ID NO: 113327 - DNA, 683 bp, Zea Mays
gcgaggtggtggaatgagcggagtggaaatgggagcgggaggggtaaaaatggaagctggagtggtggaggtggtgggtacaacagaaataatggatggctttggagcgacaggagctggtgaagtgggaggtggagtagagacagtggtggaaggtgtagagggagcagtggagcgaggccgtgatgcaaggcgacgaactcgataggctatctaatctgaggagatctgcagctgtcctccttgctcagcctgctctgcagctgctgccgctgcaaatgctgcacgagcggctctatccgtacgacgcttcttcctgccctcctgctgctcaaggtaaactgtcttccctttgacctgcctgaaggggtgaggagggtcctcgtcatctcctccccctgacgatgagacattcttcgtccgcaccatcctgacctgactgctgcacgagtgagtgaaaagataagtagaagtagagaggagccgataggatctcaaatgaagtgatagctacctgaaaatctcacaagagagaagatccaagcaggataggagacgggcacacgggcagacgagatcactgaaatgacagaagaagtgagcacatatttgtcacatagtcataagtatatgaaatatgaataaatacatacaccgagagtgaagacacaaaaactgggcga

SEQ ID NO: 113328 - DNA, 515 bp, Zea Mays
cccctttaattgaactagaccggcgcccatcgccgggaacacgatcacattgccgttgtgcttacggccaccgtgaccggagctccctagtccaccaatagtgcaattaagttggggaaaacgttcatggggactcggatttggtctcagccgaagattagcaccggtcttagcctcaatcggccggcgtagatgctcgccggagcacgaccgcgcttgagcaccgtcgaggactccaagttgtgaatttacagaaccccgagggccttttcgtgaactgtcagcgacttaacacaatagtaaatggacataattctgtttagccgttaagccgagggcctctgcgcaaagtcgcctcgcgggcacgggcgcgcgcgcgatttcgcacgggcctgggccgcgggagttgaaatcggcccagtactgctcctctttttcctttttctttttcagcagaactttgaaaaacggtagaaaatagtagaaaaatcctaaaattatgagaccaattttcc

SEQ ID NO: 113329 - DNA, 473 bp, Zea Mays
actaatattaaggatgttacttcatgtctatgtgacttgtggatgacgaattgtttatatctcttatctaaagaattcatcattcatcatatactcccttgtactgctaatatcctttttgagtatttttcttaaataagtttgaaaagaaaaagagacaactacaaagggaggacactcaaatgaaaaagaagacatcaagaacaacaacacctacttagacagtaagatcttcaaattaatcaatggtgtggttgtaagtattctaaacctttttttcattttttagaataccagacataaagtgattattgcaaatattacatgccatgatcaagatgttcaatgtattccctattctctttaaaagaaaagtgcatctaatcaagtcattcaaattcttgatgcatatccttaagcggagctccatttctatatcttgatcattttgagactaacattttctcttagtg

SEQ ID NO: 113330 - DNA, 309 bp, Zea Mays
caaaattgcaacttgtgttagaaaggtaatgagtttaccaagtgctaacacaaaggactcttgtgttcctagatcttgtcgactaaccaagatggacccatcaagcgatgggtaccaaaatatgattgacaagctttgcaggagaaggagatgatatgaaaccttggggtgcttgagagagtccattcaattcttatcaactcaagctatcaatcttcaatgatctatatccgtgattgacccaaggttatttttcaaattcctaagtcttaaactcatatcatctcgaggaagatattgatgttgtag

SEQ ID NO: 113331 - DNA, 672 bp, Zea Mays
cgcgcctagattcgcgctagcgccgcgattcgtgccctctgtggcatagattatgattgaccatggaaaaatcttcactctggatgagctcagaaccctgtagccgctatgtcatctatccactcacgccggtgacgtggccgagcggccaccgtcatattgtacgtcgttcgccgtgatcatgccatgccttgaccatctcaccacctcactgctagccgtaacaactcaccagtgaccgtcgtagctcctcaactagtgatcgccacggtagatcgccgcggtgactcctcccctctctccggtcgccagcgcacctttgtgaaattggacaccaccgtcctcgggtcctataaattgagcgtgccatcagctccgctaggtagtcacgcatccagcgcacccactcgtacctcggattgtgcaccagagagctctaatttgggatttcccccaaatcagtcaaaactccgccgtgtgtgagctcgccgtggccagctctccacaggtccaatcatgccttcctcgttctcgtttcaacatccctgtgtgctgtagatgcttagcagcccgaccaattaaagtagatcacgctagatcaccgggaacacttcggattgtccttgttttgcgttgtcactgtgggcagagagattaggagctagaaccttg

SEQ ID NO: 113332 - DNA, 350 bp, Zea Mays
gtgttcttgcatttcaattgggaatatcttggcttaggtaatttatgcctttaaaatgttgtttctttcgtgcacctaagaaaccctcttaattatgacatgcttaatatacatgattgtgttgatcttcaattggtatatgcaatgatagttaagtaagaagcatgtccaagttgcgtaaatgttatacttcctgtgagtattcaattggcttaggtgccactgaggcatgcattgttgtattcagtcaacctttcgtttagccttcaattggtgttaagtggtttttcatttgatattcaaattggcatctttgtgtgatgaaagtgatagagtatgccctgaccaag

SEQ ID NO: 113333 - DNA, 369 bp, Zea Mays
cacaaagagacactcagtgtggcgtggctgtttaggattggcatgaggctttatgtggctagatgggttagaactctctcccttacttggtttgggggtctcactcaattttcttttgtctgattcctctcttttcttgcgagccatatctgaagtatgtatctcctctagagataatggaacaagaaccaccttcttgtcattgtgaatgaaagtgtatttgttagaccgtccaaaatgcaccgagtccacatcaaattgctagggccgatcaagcagcaaatggcctgcttgcatggggacaatatcacaatccacctctccatgataatcaccaatggaaaatgataaatgaatcatggctgaaac

SEQ ID NO: 113334 - DNA, 484 bp, Zea Mays
aaagttgttgcttcggctactccaagcgaagctgcgccgaagaggaaaaaattgaaggtccttacccatcgatcgcgctacattgaaacggccatagtgcctgagtttggcgaggaaacctcttcggttactaaagcgaaagaacctgctcctcccacacagaagattgaagagccggttgcaatgccgaaggcaccctcagccaaattagctaagccgaagaccgataatattgaagagagaagagtcgaagggacgaaaatattagaagttttaagcccttcggcagaagtgacagtgccgaaggcacaaaaaggtcttacgacgacccccaagagaaaaaggatggccagtgtgctagatgtgctggagacggtaaaggcttcaagttctattctttcagggaaaattgccgaggctttgaaaatacaagtcgaagctgaaacaagaccagccaaagttgaaggtgcagtgaaccaagcta

SEQ ID NO: 113335 - DNA, 986 bp, Zea Mays
gtatatgcctggtaggtaggtgatgtggccctcaaccttagaaccgactgatgtgcgaagagccgtcaaatccaaatgttggtgagccttcaaggctatctaagctatcaggtgggctctataaaatgactcctatgtctgagtgttgaacagtggccctgctgctggatcatgctgagcgggaagccaaatatccactggtacgtgcttgaagcgaagaactctagtggcaatggatatgtgaagatcgaacaatcttggatccgcagcaagtggctaaacctcaatctcatcacactcttggaagcgggctggaggcaacggtggagtgacagagggagcgagagcattggaagcaggtgtggtgcaggttgtggatgtagcgagagtggtggtaggcactagagtagcggaagctggcgtggtagtggtggctagggtagagggttcaaatctggctggagtggagagtgcccgagatgagaggtgattgatacaaaattctatctggttagagccaatcctcatttgatctccttgctctgctctcttagctactgttgttgctcgagtagctctatccaatttgcgcttcttctttcctccctactgctctaggtagacttcatttcccttgtcctacctgaatgggcgaggatgatcctaatcatcacctcctcctgctggtgtggcattcttcatcctcaccataatgacttctgaaactgcccacagactactggcacgctacacaagaattagagaagataaacaagagtagtaaagtagtaaacaataatatggaatggaagagctagctacttagggcatgtctcccacgaaaaggccaagcaggggaagagtcacgcgatcaggcacaccgtcacactgaaaatgacaaaagaggtgagcatgagttagtcacatcatcatatagacatgaaatgtgaactaagactcacacccacatgaggtacatggggttt

SEQ ID NO: 113336 - DNA, 436 bp, Zea Mays
agccactcttggcaaggctctttgaattgtttcttaaacttgaagtgatagggcaatcgaacaagttcattctttttcttttctcctttcagcttcgacatattccattcactcaacgtcggaaataccccatatgctaagaattcttgcaccagatctctagtgccgatctgctcagtcacaactctaaattctaccacagcctgttggcatggtgaccccgacgacatacggcacgagggcctagtcaacccgtagcttaaactcaacgggatcattatcaacgtcttcaatttctctcttttcttgtcatcagctttgatatagaaccactcacttttccagccggttggccacttggtgcggtagcttagcaccggggccttcatatccttgcggtaagtgaagttgtaacagccaaaattctcatgaagcc

SEQ ID NO: 113337 - DNA, 548 bp, Zea Mays
gaatttggttcccgcgtcaccacacgtggcccatttaatgtcacatctttcttttcggtaagccttttgttgttccaacagcgattgaacacgttgggagagaaagtttctaaagatccactcctaggttgttaagtcccttcgctcctcaataaaatcaaacaactagatgatcaatttgttgttctcaattgtgctgttgaggttcatcatgcttttctaccactctttaagtgctttccttgttctcttgagtttggccatgagttttttattaggtccaactgatgaattgttgcatattaatccaagtgaaggcttgtcctttcaaggggatctcgagaaccttgatctaactaattaaagcattgagctccatcataagctagatattgccacctagtttattacgattcttaggcctacgtattaagttaaattctccaaggataatacatggcacatcctagggtaacaaatgacttgaaaaccattgcaagaaaactaattttccacttatcgtacaaggggcatatatatttgtgagg

SEQ ID NO: 113338 - DNA, 557 bp, Zea Mays
gccagaggagcaaagaaaacgagggttgtaagtattttgaaaagacaagccatgcggtccattgaaaaagatcagagggctactaaaaaaacaaaaaattttagtggagccgaaggattcggctcccaaaaaacgaaagtcctcaatcttggcccctgctgaagcgaatgtacaagatgtaccagagaagactgctggcacttcttcttcctcctctaccggtgttatataaatagtgaaggtaatgactgaacccttcccgtttgctatgctaagtccccttgggtcggatttgactagcttattgcagtcaaagaagaagggggttgaaaaaggcgcggagggggagaagaagactacttcggcaactggggcaaatgaggggggtaagaagaaacgacgcatgatggctatgatgaaggctatccacaagaccccgcccccggtttcggcagaaaaaagtgttacccctgctaatgccgaagctgatgaagtggcggcccctgaagctgaaaatagcagaggcccttttggaaccacaatgtcggagattgacc

SEQ ID NO: 113339 - DNA, 488 bp, Zea Mays
gcgaaattgggggtggagattggggctacacggccgttaggaactgtagtttcaccgtgtatactcaatttgagaggagggggcggaggctgtgcgaatttgggcttggatcatcacactgggtggaggtgtgcataccctaccgtggatcatggtgctatttatagccacggcggcccggccagctatctacggccatggataacttcattagtgcatgcataccacgtagggaagaggcacagtgagggagatcgaggcatgggtgacaccgcggcaaaagttactgagtcacggtggccgccggtgactaactccggccacgctcgactgggttcacgggattgcgccacgttcgaagttatccatccccggattgattcactggatcgcgcgagcccatccgattcaatagtggccctgatcttatcccctgtgttcttcagatatttcagtgctttggatctttaggatttgtctgaaccgac

SEQ ID NO: 113340 - DNA, 829 bp, Zea Mays
ttttgctttcctgtaggcataaagggcagcaagcttgtcatctatagctggaggcttggacactggcatagttggtcggtcgtcatttggaacagctttactgaatgctcgatcggatctttttaaatcccgctgcttggtcgtcttagccacctcttcctgcaattgagcgagcacataggcagtatcgaggtctcgtgggcgttgaatcaagacaatagatttaatatcactcctcaagccatcaatgaatttggttgtgtaatatagcgggtcagaaggcaaattgtatgcattcaactgatctaccaattgagaaaagtgctctacatactcagtgacagaggagtgttgtctaatgtgtaagagctgtctaaggaggtactcattggttttttccaaaactctcactgatcaacccaccaaatttagaccaggtaaggctgggtaatttgtactctatagattggagccaacgagcggctgaacctgaaaaatgcatagtagcgacttggatccaaaccattgggtcaactccgtacatagcaaaatatttttcacatctagactgccaaagtttgggaaactcgccatcaaatgtagggaaatttagctatggaagtttgcctaagtgggctgtgaactgggtaccgaacgctttacccccaaaagttgtatgaggaggtggataagtggagccatggaattcgtttccaacatggtactgagggtgctcaaatacatgatgaggaagagtaccaggtggcataccattggtcgggagaaggtgatggggatagaaacccccaagaccctgctcccatgtata

SEQ ID NO: 113341 - DNA, 413 bp, Zea Mays
attgtgcattggaaaaaaatgaagcctagccttcatgatgctttaaaaaaccactacttcatctgcttcgggaagaggaacagtgctttctcctctagccctcataatggatatatcgtgaaaatattttcccttcatcccttcaatctgtccttgtttaacactggactttccaaaaacaacatggctcggcctccacggtcaatcttcggcatcttcatttccactctccacatcaaagctatcactatcgctagaatccccagatagcccagccagcatctcattggtaattttttcaatgttggtcttttccattgcttcgtaaaaatcagcagctaaggggtctacaatcttcttatcctcagccatttgatgatgatcacagcaaatgccgaagctcaaaaaacaat

SEQ ID NO: 113342 - DNA, 462 bp, Zea Mays
ccataactcccaagaggaggagaatggccagtgtgctacacgctgtcatggaaaccacaaaggcattaactcctgccctcgccaaaaaagttgtcgaagctactacgacctgggccgaagccgaaactgccgaagatgctacgacccaggccgaagtcgaagcagggccttcagtgcctattgagacgaagcctgccacaactgaggataaggctgtgcaagaatctcccaatgctggcatggcagcagaccgggatgtgacggaaaaaactgaatctcttgctcccgaagcaccatcggaagatattgactatattattcgacatgcttcggggaaaagattatccgaagaagaaattttagaggccagacactatgcccgggaactaaaatatctgaagggggccttagtgttcaacggcacggacaaagatgattttctgtactgtctcccggacaaca

SEQ ID NO: 113343 - DNA, 600 bp, Zea Mays
tgcaactatcgcccccaagagctacaagaaacgggggaagataaaacttttgggcgactgcaacgggcacgatcgtccatccaggataccggaaagatgagtcaaacgagaataagaactagaagcaagtgtgtttttgcgtccaacaatgattagggttcagaagagcgacggagaagcctccccatgctttctttctagggagagagagagagagaggcgctaatgcagtatacaagatgcagcagagagattaaggaggccaatgatgacaaaactgtcgttttctgttgtccaaggaggaggttaatttcgacggtcattggctgactgccagtcaaaaaggtagggtaaaataactccaggccaaattcacccgcatcagcatatatatgtacggcatgtgacgatagatgacgaaaaacagcaataacaacatgcagatgcagggactcagtccaagctcttggtgcaattaacatgtccatgattgaaaacttttgcatgtgtgacagtggggttcatgtgatcagttgcttggataattacatcatgagagtgactgggtgcgtctttgcacttgcaaggaggcctgtcgac

SEQ ID NO: 113344 - DNA, 543 bp, Zea Mays
gatcactagagatgtcgagaagggtgtcaagtgtgttcctgagatgatttggttttgggaacccacacttgttcctgaggagtggctttcaaaggctcctcaatcacaccatctctcacagaggtgataggcttaggttgaacgattttgataagcttgggagtggttgaaggtttctctgatggtttcaatccactccactaaccaacctttccaaagcaagcaacactcccatccttagcagcaaagcctaaccccggaccgctagttcccctcttgaactgactgaccaccatgcccaattggggctcactgcacgacacccaactcaagactgaccaaaggtatgcattttcttcctcgatctaggtctcgtcgtgtctgcaggactcaagagcagactacaaactctcataaagtgcacactatgtaggtacaagggcactcactgagctagccttctcaagcaaggctatcctagtgtctctgtctgctagtatgcaagctaggacaagtagtacacacacctaacaagctcgacct

SEQ ID NO: 113345 - DNA, 491 bp, Zea Mays
gggggagctatgtcatggcttgacgagagaggatcagcaagaacaatttaaagggcgttgtcaggtgtgatctcagccccaccagcagataacagacctctcgcatccagctcgccgacctacaaggcgacttgtttgttcagatctgtggaagtatacaccgccgtcgccccatcggaccgaggtggagacgaacctacatggacgtccaaggaggtgtgggaaggagagctcacatgaacaccctcgagggctgggttgcagcttgctctacccaccagagccggatcactaccgtcaacaccctcgggggctgggtaactgccagcaccaccctcgggggctaggttttctacagcagccacctctaaggctgagggctcccttgtcacctccatgggagtcgggcaactcggaccaacgtcttggcattgaagactgccctccaaagtcgacgatgcacgagacattgctcgggatacctccaatcc

SEQ ID NO: 113346 - DNA, 566 bp, Zea Mays
gggctacgaccgtataacaagccatcgtaataagcgcagcaggcacaattatggctcggtaattggggtacacgataaaaccacgcaacatgcgcaacaagcgcaatcgtggctcgcggcagacagacagtgtctacagggcatgcaaaaaatatgcgactcggcgatggcgatctgactcaacgagagcgattcgattaatggagagtgcgatatagcaatcacatgacgcagccaagttcgaacggcacaaatattgcgtcgtgttgccagggcgcagtcaatattcagctaatgccataactcagccgattaccaacgcagcctgatcggcgtgtctgagtacccattatacaatttaatcactcgatgtgagtccgaaggctcaacacatagaaaatatttagagcgatttgagtatacacaatataaccttcacatgcattttaataaatttccgctaagtatttactacgggaaataaaagcagaaaaatactagaattaattcatgaatataacacatcagatgcaaaagcattttcccacatcgaagcatacattttc

SEQ ID NO: 113347 - DNA, 456 bp, Zea Mays
cttttgtccaacgcttcgggaccaggagcttcggtttttccagttgcaatctggtctgttgatttttctttagggtcagcatgctccatctcggcgggcactgaaggcctagcttcggtttcagcttgaattgttgtagcttcgacttctgcctgcttcgtttcagcttcgggttgcgccttggaagcttcggcaatttttcttgaaggagcaggactcaaggtttttgctgtttctaacacaacatctagcacatttgccatccttctcctcttaggagttgtggcagaacccttttgtgccttcggcactgttacctctgttgaagggctcaaaatctctggcatttttattatttcttcaaattttgacccttcagccttatccttatcagccttcgtctcaactagctcaactgaaggtaacttcggcattatagccggctcttcagtcctc

SEQ ID NO: 113348 - DNA, 421 bp, Zea Mays
cacaactccgatgatgttgtatcttcctcgagcgatgaggatactgagaggcgggtcgaggacaagctgaatgggctgtgcttcatcgccgacaccgcaagaggcttctgcaccatggcacttggtgaggacgcggtcgacactagcatcgacaaagacatcggcaacgacactacttctaaggtactaccttccatcgatgatctcgtcgctgagatagaagagctaaacgctgctttggctagttaggataagttgcttaggtaggctgctcgtgagatgatagagtttagatccaagtatgagagcacacttagagaacgtgagtcttctagggctttagttgtggtgtccgacgagactgaatgtgatgagtgcactctacaaatgttgaacatcaccactttgcagacgaagtact

SEQ ID NO: 113349 - DNA, 294 bp, Zea Mays
aaaatgtgaagaacaacttttctagagttggtgcattttcctcggagcaaaacttcatccgtggagaccccaatggggttatccattggattagcggcgaagccgaagccttcgaggaaattcttagtgacagaggagacttctgcgcttttgtcggtgctcgtggggctgtgtccgttttggagaaggttggttgtgatcatgacaaggcggtagctcagccaaattttgccttctcagctgacgatgttaggatcccttcagtcgaagctactaccttgggtaggaagtttc

SEQ ID NO: 113350 - DNA, 560 bp, Zea Mays
agttattgtggatgattatacacgcttcactagctagggtgttctttttataagataaaagtgaaaccaaaggaacctcaaagagattcttaataagagctcaaaatgagttcaacttgaaaatcaaaagaattagaagcgacaatagacagagttcaattatacacaagtggcagaatttcttgaagaggagggaattaagcattgatgttggaaaaatgggcgacaaaagcgtcatctccatgtcaatagggacaagttttaatttagattaatttaaatataacagagtaaagaatacaagtatatattgtaggctcatgcttccataattcttaaatttacatagaaattatgttaattatatcttcgtagagttccagcatgagcacatagaaaataaaattacaccgtatggccagcctattactttactaaaaaaatctcgatcctttgactcagcagatgggcgcttgccatagaaaagaacttggtgaactgaaatatatgatatgcactcatgccaacatgctaataagatactaaagaaatactaaaac

SEQ ID NO: 113351 - DNA, 316 bp, Zea Mays
agcaatgaaaaataaaaacaaaggatacatcgaatagagaaagcaagcctcaattttagtcctattttagtgttcagcaggggacttcagatcacgcatgtgacagaacctaaggttgaaaaccagtatgtgacagaacacatgcatcacggtaggatggcgaatctctccaatctccatagttcacaatttcacaggagtttaacacagcacaaatgtgagatactacgctcttgaaacattcttagaaatctgacaaggaaaacaaaaaccttttcgacacttgctacaaatgtatctttatcttatagcaaag

SEQ ID NO: 113352 - DNA, 768 bp, Zea Mays
gaacttggaagggcagggaaacgagcaacaggggcactcggctgattggtctgggcgggggctggagtgggacgaatgaacatgggttgtctgaagggatatgtaggtggacgaggagaagaacggtttggattgaaaggtcggattaccaaccttgtcctcttttcaggtccctgagttgatctttcacccacatatccttttgactttccttataccgcattttttgctacaactgacagcgctgtgctgacagccctgctatatgtgaggtcccgactcgtagccattttgcgctggagtctgtcatttagtcccctcatgaagcaattcttctttttcaagtctgtatccacttgatcgatggcatattgggagaggtgattaaatttgttgagatactacatcacagaatctcccccttgctttaggcgtatgaactcttctagcttcatttgtagcactccttccggaacataatgttccctgaatgccagtttgaactcttcccaagtgacttgatgtcctgtaggctggatggcggaaacgtttgcccaccaagtgctggtggggcccctgaactgttgggcggcaaataggggcttctatgtctcggtgcatcggatcagcccgaacttttgttccatcacccgcacccattcatcagctttccaggggttcgtccaccttgacaaagagtggtggacaggtctcggagaactccgtatatgtggtgtctcgtggtccttgaggtggaccccttcctcc

SEQ ID NO: 113353 - DNA, 871 bp, Zea Mays
tttttccccaacattcatgcagatgtctacaagaaaaggaagcacagatgtccatgagtttgatggaacatttcagggttcttatgcgaacttcaaagtgacatcagtcattggacatgtcttaaggttttgttttattctttagttgttttaagagtttttgtcacagctacatcatttaaagcatgcacatttgaattattttacatacacatttctgtatatcagtgttgaatgttgatatgtacagacatggtggactggtgcatagttgaagtgttaatattgaaagctacaagtagctataaactttagcaggatctacctacagatgtttagatgcttacagtttctgaacatacattttttttgtgttttcttaatctccttatctttaccagtgtagatttcccccctgcatatcagaactgggaaggaactgatccaatggacctatttgaggctccagttctgagatctgaatgcaacccaaaggtaatgtgttcatttacaactctagttgagacagaatgcaacttagttaactgttaggggtcaactcagatcgtaagacaatataactcagttaattgttggtgtaactcaacaaagtgaagcggtaataaactctattatgcaaatctactctacccatggatggttgatcaactatgccgtttctctgaaatttgaacttatgtcctttgccctccatttagttgactctaggtggaatctgaacaacaaatgtcctggttactgtttccaccatttttttcgcaagctcttaattacacctgcagaatctgcaaaagcactgaatcctagtggcagtgtttgtcttattctgtgtctttgttatatgttccac

SEQ ID NO: 113354 - DNA, 440 bp, Zea Mays
gaaatgtgtcatagagccatttctacctgttttggtgattaagtgttcaaggataccatagtcaagccacgagaccatttagtgtatatgccatcggtgggtgtagcccctccaaagtgtggttgtcccacatatgttaatctcatgttgaccctggccacaactataaacccaatggtgtcatatcaccgctactaaatgactacctcaccaacttccaccatagggggattacatagtggtgtttcaacatcgtcaagtgggctaagctcgcatctggctccaaaattgaggcattaatggatgtgacgacataaaggctataggggaaagcccttattcttataggcttcctctgtatgggccagggagaaagccagataagcgtcatgcctacacaaccatgatcattgtgtgtttgtagaggcgcttggtgttgt

SEQ ID NO: 113355 - DNA, 292 bp, Zea Mays
ctttgatttctactagtgctgaaaaatctgccctatttacagaactgccattcccactagatacttgtacctcctttcttgtgctttggtccaactgttctattacattttctaggccagcaactaggacgagtacttggaacacttattcagcattgctatctgttactgacttgtgtgccacatatatatatttagttagccttcctatagctccaattttctctcgagcagaacatgtactcctttgcaatcacacccacgctcgttggacagtcacatcggtcaccgt

SEQ ID NO: 113356 - DNA, 329 bp, Zea Mays
gtcatgatcctcagagaagagtatgagaacgatcataatgagatattagactgatccatatttaatacttgagagtgggttatagaagataacaagatgacgaggtagatctcgatgaatgatccagagattcggatgataaagccacaacatgattaacaaggaaaagattaccagatctaggcgaaaggagaggtcatcaacccagatggcttctaggttgagcagaggagaatttaatgaggattttggacaaggtttccaaaaagaatttgaggctagacatggtttgcatgaacagacagtaaaccatttttgacataaacaag

SEQ ID NO: 113357 - DNA, 281 bp, Zea Mays
cttgcctatctggatttttaatgaaattcttacacgaattcacgcgccgaatccaaaccgtaacctcatcacctggggtttttcacaaaatcctcacacgaattcatttgctgaatccaaaccgtaacctcatcacgtgtacgatgcgatgcttggcgacacaagtaccaacccgaaatctttgactcactttcatatagcagaccgcgaagtaagcatgtttgggagccagttgaaatggagtggctccgtccaggaaattttggaaagctggagcatga

SEQ ID NO: 113358 - DNA, 426 bp, Zea Mays
gcgtcgtcgcccaaatccacggccacctctcgcgggctctataaattgaccgtgcccccagctccgccatgtacccaagcacctaccgcaccctcctgcatcccaaatccctcactagcaagcacgaatttcagattctccccaatccggttctaaaacaccgtgaactcaaccccgccgtggtcagcccaactcaggttagctcttcccctctgctcccttgtttaagcattcttatacgtctgtgatgcttgctgacccacacaatcgagctaggagcccttttgtcgccgggaacgcgactgtcttgccgcaatgttcacggtcaccatggccagagcaatccttgtgaccatttgtgaaattgggttaggggaaatggtcgggatagatccaattgcgtgtcagccgctcagagaccctagc

SEQ ID NO: 113359 - DNA, 743 bp, Zea Mays
ctggggatgggtctgcggccgcggtaaaaatcttctgcgacgtggcgctaatgtcccgaggtggcactgcccggttaatcggcagtcgccggaccatcgccatggctctgcccgcgcgggtgagctcgccagcgcgtttacagctccgcgagcctcatccaactctggccatcggcctataaattgagcccgggtcctgcttcttcaccacatcacgcacacgagcacttgagcaatcgactcaatttcaccggagaaatcacacagtccacaaatccattccaccctgttccgagcgccaccgtgaaggacctctccgtggccagccctcttcgggttaatactcgctcaattgcctcgtgttccagcatgtccttagcttcctgttgctctcgacgccaatcaatcaaagtttaccaaagtcccaccaccggaacactccgttgctctgaagaacgtcgtcgtatgcaccctctctgtcgatccgcttctctatccccgttcggcctaaactcaatcatgtacctagttcctggtgaacccgtaaagccttcccaagcttcaattttagcttcgatcccattaatcatccggaaagcgatctccagggtcggtccgccgccgtgacatgaacaagcttcaaattaggtcaaatctctcaaattaaatgagggcttttgctctgaccggctagtgctagatgtttgtaagcctattactccttgtccgggtcaccttcgccg

SEQ ID NO: 113360 - DNA, 649 bp, Zea Mays
cacgaaacgtttttatccaagttagtcaatttacttgttaaaattataataaaaactcagtgcatggcaacactcttttcatcaaagcaactcttcttatcttaagaagacccctatcgcttcttctttgatcaataagcactggactttccgccttgatcgtagtagtatgctgaagcagctcaagataaaagccctgtttagccatggtcagatctcaatgttataaaatagcaaattaaactctaaagtagatgtgtcttgtaatttacaatcatgtttgttaaatttgtattaatttgatacaatcaatttaaatttatctttaaatattgtccttctagcgggacagattccccacggggttccccaaggggataaattccctgacggaaatggggatgggagaaaaagctcccacgtgagcgttcgcggggacggggacggagaatttctctccccgtggggacggggagggggagccattccccgacgggaaaatccctgttgccatccctacgcacagtgggtcaatggtcttcgtctcggtaacacgcgggttactggcacgcctcaggccttgtgttctgcacacgccgcctatatttaatgcagggcacacgacacctgccactggtgtgaataagcg

SEQ ID NO: 113361 - DNA, 366 bp, Zea Mays
gtcttagagtgtcttggactattatgtagaggtgttattgtatgttttggggtagagaacagtcgttgtcccattgttgatgaccttaggtatctgttagctaagggggaggaaaggggatttcctggtatgataaagagtatagatggcatgcactgtaagtggaggaactgtcccgttagatggagagaacagttcacaagggggctttggatccctggcaattatgctcaagacggttgcctcgtataacttgtggatctagcatgtttttttgggtggtggggatcaaacaacgatgtgacacacgctcaaccattcatcaacgttcactaatgtgttcaagggtgaagcacctaatgtgaa

SEQ ID NO: 113362 - DNA, 554 bp, Zea Mays
tgcctcagttcttaggacctgtagcatagttcggattgtcgtttggggcttggggcatctagacgcgtaagtccggtgaggtgcgccaccgtagaggtcggcgacgccgcctcaggccatcggggtcgagggggatggctcctggtcgtcgacccataaatggagggctcggattagagcatcgcataccctttcatttaatttagtcggagccattgagatcggaatgaatgtatacgatttggttaaggcgtgagcaactaccagacgtggatcgcggatcagtcggctagtagtgtgcactggttcaatagataggcttttaatctcggtcgcagatcatgatccaacaactgagataaatccgtacccctttacgtggcaaacttcataaaaaagctcttggaaaattcctatataatggagcgtgacgcaaagcggcatgaccaggtgatccacgtcacctgaatttctatcgcccgtccgatttgaaacacacgaccacatatcctccgtacgcagccacactccagccaaaacgatgggaactttcc

SEQ ID NO: 113363 - DNA, 713 bp, Zea Mays
ttcttcaaagacttacaaatgcagtttctgtcaactggtaatgctcatttgtttcagttcgaattaaccatttttccctcaaagtctttaccttattcatgtgacttacatatagttttccatttaaccatcttaccatatttttaatttacttctctactaacaggatggcaataaaaacacttgctgaactatctctacaagacagagatgtgatgtaaaacccaaatggcaagagtagtggaaagtccaagaattgagggttataaagagtttaattgaccacttgtgttattatttccatttttgcatatttcaaaccatggaattatccttggctaacaataaatgtactaaataaaagaatgatgcatcatgttggagtttaactgcttgtgcatttaattataaaaataaacataataaaaacacattaatagtgaaaaggaggttttgccctaatttataaacttggaaatttggaaaagaaagtgtacaaaacataaataaaccttatatttcccaaacaaatacttcttaaattcacaatataatctgagcacaaaatctgcatagaagtttgaatctaagtttgaattcaaatttaacttggaaatggagaaaagaaaatagaaaataaaatggaaaagattaaaaccctgcctgggctccctccctcagtattcggcccactaagcaaactaccacgcgcg

SEQ ID NO: 113364 - DNA, 844 bp, Zea Mays
cggaggcgtagacgcgtagtgatactgtgccgcatgactggcagcactcgccagcttagctgcatgggctcgcgcaggaacctcggttctgtttatacccattattgagccttttgtggagcgtttcatgggccatgttttcatgtggtgggctaaatttaagcaacaagtccacaaagcatcagctctatatatccaccacttaaaacaatactaagatcacacaacaaattaactccagtcatcttcttcctcaatcacatccaacggtctttgttttgtggatcatccctcatcatcattcatccatcgccaacgcaacaatgctccatgaccccaatcccgcgagccctgaacaacaccttcatggagtcgacgacgccaatgcgcgttcaacgtcctcgccccgcgacacgcaccttcatggagtcgacgacgccattgctgctgaagatggtgatgctgcacatgttgggcgagatccgcagctgcatactccccctcccccgccgatgggagcttcgagtccagcggcctagggtttcgatggcggaggcggtggcattaagcagagacatggtaatcacaccaggtgatactaataggtgagaaaacagagaggagaggaaatagcaatgctccccgccgcgtgcgagtggtgcaaatacggggcgacaccgaggctatcggtgaatccctagggaattttgggggcgagagagtggagactgatttctcaggcggttaggcgatgcccgataatgagattatcaagctatgctctgctcccgcctcgcttgcttcttccccttccctgctctcgcccgctcccccctgtctcccg

SEQ ID NO: 113365 - DNA, 574 bp, Zea Mays
tccaaggggtgaaagccgcagaaggttgtcaacacgtgcagagccatggaatcaacactatcctcagccctgaaaccgaaagacttcgagaccaaggaacgccagccgagttgcaagggatgaggctccaaggtcatcctcaccctacagcggggtacccggtgctcctcgaacaactgcaccgtgtactggggaggcatagcgtaaccggccccatgcagtacctcccacaaaatgcggggaaggccctctcatgcaagcctgtctatgtgggaatgtgcgttccctccttccgtggatacgtgagaagtcatctatgtaagggaaagcgtaagcgaaaaaagaaaaagaatcaaaaataaaaggaagctagtgcttggcttttctatgattaagttgagatcttcgatgtagacttaaaatcttattacgggtgcctctttgtttatgtagcttcctattaataatgacattttactatgaggctagaaaaaaaataatgcatgcatgctcgtcctaagcgacctcacatcaagcatatagggatataggaatcccccctatatcatagcag

SEQ ID NO: 113366 - DNA, 608 bp, Zea Mays
gggctgacaactacttttgccaaagaatggaggagttacacaagtacaccgaagccactaggtgctttggcggaagatttcatccaaggcatgttcgaagcatccataacccggtgcagagtgaagaaaagtcagcctagtctcagggtcaatcagcacaacaacaaacaagctctcaacaacaatcttctcatagcacattctgaccgccagctttgagagggagaaggggaggccaaagctttggagacaagtttaatgcacccccatggaatccattttatttattttgtggtgaggacaaagtccacacagcaagaaccttcctccatacaatcaacaagcaaaaagagcttactttgtcaaccactcaaccttcacagtcgaaggaggtgttatgtacatcttcatactgttcaccttatgtttcataatatgtccagcctcagtcataggagccaaggttgcatctaccttcggcctcaaatgcttcaagtaaccttgtgatgagtgtgtggttgtcttcttcttcctttgccccaggaccacctctttatgatcaggccccctggtcatcccaagtttccagtgcaagatttgcaacaagg

SEQ ID NO: 113367 - DNA, 340 bp, Zea Mays
gtgatgtgtgtcaaagggtcaaagctgaacaccaaagaccagctggactactgcacccgctaaaggtacccaaatggaagtgggaagaaattggtatggatttcattaccgggttgcctcgcacctcgaagggctacgattctatatgggtgatcgtggacagattgaccaaagtggctcacttcattctggtcaaggttacttataaaggttctcagttggaagaattatatatggctcggattgtgtgtttacacggggtaccgaagaagatcgtttctgatagaggatcacaatttacctcaagattttggaaaagctttcatgagaacatggatac

SEQ ID NO: 113368 - DNA, 826 bp, Zea Mays
ccattttatctgccctatactcaaggtatttctaccatttcaatcatacctaattgcatgtaggccatgcctggacatatagtttgtcatcttcatgaaaagcagactaggcagttgacgcattttaaaaggatgaacagtattatgtacctgactgaagattgaaactaactttagaatctgaagtatgttatggtgtacctgatttataaaatcaatagtgcagtagggccttgtttggctgcacacaaatctaccccaatccatatggcttgggacgattgaagtggaaatttaagtcgattttctacatcaatccctcctaaaccatgcggattgggggttggatttatgtgcagtcaaacaagccctagaacttacaggtagtccaagctaatcacggcttgatgtctctattatttctacttgaagggtgtgatataatatttttttccctgcagagggtaatgcaggatccatgcattgcgtctgatgggtactcgtatgaacgggttgcgattgagatgtggcttaatgagaatgatgtgtcaccattgacgaaggcgcgacttcctgacaaaaacttggtgcccaatcttgccctgatatgcctgatcaattcttggaagggagaggtaggagctactgggcccattcgctgagctttactacccaaggatatcgcattagaagctaatgctgtacaggtttgtcttgataacctccatacactgtagataccgtgatcgggtgagttctctgtaagtagcagttttgcagcatctcttagatagtacagtgtgatagatcctgaaggttacttcat

SEQ ID NO: 113369 - DNA, 762 bp, Zea Mays
acggagttgagctcgaacgagttgctgttggaccagttgaattaccatctttctttcatcaagccaagattgcaagcagggcacttcgcatgctgttctgaaatccacccctagatggcgtggagggtaaccatacaacacttcaaatggcatgagtttcaaggaagtgtgatagctagtattgtaccaatactcggctaaggacagccatttcttccatttagtaggacaggcttgaacaaaacagcgaaggtaagtttcaaggcattgattgactcgctcagtttgaccgtcagattggggatggtacgctgtggtgaatcgtaattccactccggctaacttgaacaattctttccataaagcactagtgaaaatccgatcacggtcagtcactatagatgaaggaaatccatgcagcttaaaaacactgtccatgaagtgttgagccactcccatagctgtaaacgggtgacgcatgggaataaagtggctgtatttagaaaatttgtctacaacgaccataatacagtttgagtgatccgatgttggcaaaccttcaataaaatccatcgtgatcattttccaagcgccatctggaactggtaaaggttggaggagtccagggtattttactcgttcaacctttgcttgttgacagactgcacagtgattgcaccagtctttgatcatctgtttcatacctgtccatctaaacattcttttaatcttctggtatgttaccaaaaatcctgaatgtcc

SEQ ID NO: 113370 - DNA, 287 bp, Zea Mays
cttcagctaaaggctctttactgtcattcgctgaaactgagaagcctgactgaattacagccttagcatgttcacaaccagctttttcaagcagtgatacaccccccgagcccttatgcatgcacaaaactctcccctaccagttagaacttcgtcaaatgcctcgacttcgctctctatccatttgatcacaccctcaggatcaccacgaatgaaattttgctcaaccgagaatgcaccaacaataataaaagcattttcatcttgtttgagcattgcatagcaac

SEQ ID NO: 113371 - DNA, 393 bp, Zea Mays
ttggtatcccatcattggtgtgcctagttgtgttggaaaaaattctatgtgattgtagtcctctaaaatacagcttagctattcaatgagatcatgaaactgaagcaatccatgcaggtatccatggtgttgattaggctcatggggcctaggcctcccctactttgatgttgattgccttgatggcatactaagccatcttggttatggccattattctttggtctttttgagttcagttgtctactctaacgcgtttgggtggatgctatgcaagattgtggctatcatgctatgtgaatcatcagagatgttgattccataataactttgagttgctcgtactaaggaggtaaattgggctttcgatgtagtgcattcgctacaaacatg

SEQ ID NO: 113372 - DNA, 435 bp, Zea Mays
gaaaagactcctcgacgacaagaagggtaaatgggccgaccaactacccgaagtggtctgggcactagacatgtttgaatgctgggcaactggattcactcccttttcgtctactatatggatcagaggccatgaccccgcaggaaataaaagcatgggttaccccgaacaagcgcatcagcagtccccgacgtcgacgaacctacgtcaaaagacctcattgacggagaccgcgtcttcgccctataggccctcaacaaataccaggctcaaaccaaggcctggcgcgacaacgcggtcttcccaagagagttcgacaaaggagacctcgtcctcatccagaccacccggacagagacacggggcaagctggagccgaagtgggagggcccattcatcgtcaaggcgaagacatcccctagcacgtacaggcta

SEQ ID NO: 113373 - DNA, 398 bp, Zea Mays
ttagaatatgcaacgttggagactggcccgtgcctgctgttctagacttacctgtccttcgagtgttagatctagagggatgccgtgatctgaggatcgtcgaccctgactgcattctaagcttgtttcatctgaggtacctgggtttccgcagcgcaagtggtgtcgtgctaccggctcaaataggaaatttacaccatctgcagaccatcgatttaagcgggactggagtgacacagctgccagaaagcattgtccagctcaagcgactgatgcatcttgttgggcaacggctcatcatgccagacgggtttggtagcatggaatcccttgaggagttaggtactatcgactgctgcaagtgccccgtcagttttggggaagacctggcacttctg

SEQ ID NO: 113374 - DNA, 515 bp, Zea Mays
gcccctagacgtccagtgcgcgacaccgttgaacaccctcccgttctctctctctgcttcctttcttctctctcgactgcgcgaatacatcagcgcatactcgttggtttttcttctggtagacggcaaacccctgggggcaatcaggtttatagggcgagcagggcgctagtgccggggattacggcaagccgttccgatcaacgcccaagaccaggaagcaagcgtacacaaatgcttggtggcccagtcgtcagtggtaaggcacccgcagagatgaggtcattccggacgtcagcacgacctcactacccgagaatacgttaaattattccggcggctggtattgcatgcgtgggctgcgagggcacgatttccagcccaggctgactgggcgatccgagctggagcttcacggccaaggtaacgttcttttcttttttctcctttttgtttgatttcgaatttaatctcaaatttatagtgaaattcctatttagcttaactgcacaaat

SEQ ID NO: 113375 - DNA, 432 bp, Zea Mays
ctttaacggtgatagcacacactctctccactgctctcttaggtgtcgataatcagatcagcaacttgtagttaccgttaggcgaatccaattgtattgtccgttgtagagcgttgattaccgccccatgttgactaagccaattcatgccaaggataacatctatatcttgatttggaagaactagcatgttggtaggaaacatgtgaccacctagctttatgggtatctgatataccatttctttagtatgcaagcgtcctccaggagattgtatacaatacccattctctactacctccaaagacaattggtgctttaatacaaacatccgatttatgaaggtatgggaagcaccggaatcaaacaggataccagctaaacgattggcgaccggaaaagtacccatcataaccggttcaccctcaggaa

SEQ ID NO: 113376 - DNA, 504 bp, Zea Mays
gaaagttcttaagacatggttcattaatcttataaaagtactaggagcatttgtcaaaccaaatggcatcactaaccattcatacaacccaaattttgttcgaaatgcagttttccactcatctctagctttaatccttatttgatggtatccacttctcaaatcaattttagtaaaaattgtggaaccacttaatttatcaagcataccatctagcagtggaataggatggcgatagcgaatggtaatattatttatagctctacaatcaacacacatcctccaagatccatatttcttaggtactaaaatcacaggaacaacacaagggcttaaactttcatgaacaaaacctttatcaagaagttcttgcacttgcctttgtatctccttagtttctttaggattggttcgatatggtggacggttaggaagtgtagcccctggaatgagatcaatttgacgctcaatcccatgaattggaggtagtccagctggtgtttc

SEQ ID NO: 113377 - DNA, 567 bp, Zea Mays
caatattctgagccaaccagagtcagattctgatgactggagggagccgatcatcagatacataaagaatgaggaggagccggatgacaaaaatgcagtggagcgtattgcaaggcagtcagctcactacactctcattggggaaacactatacagaaggggcgcgacaggagtcctcatgaaatgcattctttcggctactgggaagcaactgctagacgaggtccatgctgggcaatgcgggatacacgcagcatccaggactctagttggaaaggtcttcaggtatggtttctactggccaacggcaaagagtgatgcagccgagttagtccagagatgcgaggcctgtcagtacttatcaaaacatcatcatttaccagcacagcaactgtaaaccatacctgtaacttggccgttcgcgtgctggggactggatatgattggaaccttcaagaaggctcaaggaggatacactcatgtactggttgctatcgacaaattcactaagtggatagagttcaagcccattgcttctctaacttcagctaaggcagtggaattcat

SEQ ID NO: 113378 - DNA, 329 bp, Zea Mays
ccaatagaatcaaggcatcatgagctgaaccttcccaactagcaagaacataggtaaatctcaaatcaaaatcaacagctgctagaacattttgtgtcgttgtgtgctttgtacacatgaaggctactctcattgaactgggaaccctagccaatacatgtgtgccatcaatggcaccaacacaatcctaaatgtttaagttaaagtgattaaaacaaagacaatactaacatatttgaattaaatggttaatgtgcaatcctaaatggaatgaaaagtaccttgaagtacgggtaccatcttctactaacatgaattttaggatggac

SEQ ID NO: 113379 - DNA, 288 bp, Zea Mays
gccttgagccggaagttgcaatgtaactgtgttatgatggattctcgcattaacaccttgtgtgatgagttgagcaagatgaagattgaagtaattccttctggtgctttgtctcacatttccattgagccagctttgcaagactagatcatcatggcccagctcagtgacaagggagtgcaaattatcaaggagaatctccgtcagaagaccgagaagtataaatgtttccgccaatatggaaagggtatattatggtttgaaagcagattggtggttcctaaaaac

SEQ ID NO: 113380 - DNA, 571 bp, Zea Mays
ggggcaaggatccaaaacataacgaggcaggggtggggatgaattttccctacaaggatttgatgggaacccgagttaagagtcagatcctccccacgcaagatatgaaggttgaatctaacaaatcgtctcagtgtgaccctgtataaagatacaacattcccactcgctaaccataaccctcattttcttcactcagttgtcgctcgcctacatgataacatggtttatttgttgatatcataatatttatgctcaacaattaatccccataggttcctcgtggggattgggtccccgtttggggacgagaataaatcctcctcattaagcatatcgaggtcggggcagggaacagattttggggattagggaggggacggggagcactcccccgaccctgtcccgcgttgttaccatccctggctatgttccaactaaagatataggaccctcaatattttggccctacattcctccagcttacatcaatccatcttatacagtgccagcctacatgggacatattcataacagaactctagttctcaccacagcgcagacttcagaa

SEQ ID NO: 113381 - DNA, 352 bp, Zea Mays
tatggctcggtaatcggggtacacgataagtccacgtaatgtgcgcaacaggcgcaattgtgactcgatgatcacgggagacagacagtgcctgcagggcatgcgaaaaatacgcgactcggcaatggcggtccgactcaacgggagcgatccgactaagcaagagtgcgacatagcaatcacatgacgcaaccaagttcgaacgacataaatactatgacgtgttgccagggcgcagccaatgtttagccaatgtcttaattcagccgattaataatgtaacctgatcgccacatctgtgtacccactataccatttaatcgctcggcgtgagtctgaagctcaacgcaac

SEQ ID NO: 113382 - DNA, 574 bp, Zea Mays
tgctcatgctcccaagcgagggatgcaagacacattcttgcgaggcggtcatgacagcctagatggtggcgagggcagcaacaagagtggaggagtcttcaatcgatggtggaggtgccgacagggaggcgacagagccggtcagagcgagaaggaaaccatagggcacgcgccgagcatgttgcacgcgtaggtaccagcacgagcgactattggggggcgtcagaaatggaggccgattagaggtgggagggacatgggcggcctagacaaagagccaacagctatgggggagagagacaagagagagagagagaaaactagaaacctagctctataccatgtgggaaaccctgaccctaatcttgattgggtgaatattatatatgtgattaagtgggccaaagcccattacaagagtggtagacatgtaaatacagagatatactaccataactctagcaacaatctaacaattggagtcaccataggcctcggcgatggctccttcttggtcaaggtggtggcacgagatctctggccctccttccccgcgtccgccacacggtatagg

SEQ ID NO: 113383 - DNA, 637 bp, Zea Mays
cttaagttggaataattcgggcagttctgccacataatgcgcccgcattcgctgccaggtgggtccatcacgtctgatcgccctccgcctggcccttcccaccttgagccactgatgggtggtccccgcgttacaggtttatcctcctccccatcccaaccggaactccgtttctagcggcggacagggcgcgatctcctctactggtccaccgtgggtatcggggtttggctaaaatctgcgctaaggtggttaagatatggctctgtcccatagctataaatacttccccctcggttgccctggttaatggattagataaggagagaaggaatagatctcaaggaaagcgggcggagtgagagagaaccacgtgggacctgacctccgtcgccgccatgggatatggccacgacgtctccctgttcagagtatgggaggggtggttcgcgacgtcacggtggcatggttgcagaaactcaccggcggtgatgaaggtgcaccgttgctcggccggcctatgtctcaatcaccggtaagggcacgttcctgtagttcgcttcgctaagcgcagtttctgctcacgtaggcggtagcagaggagaacaacaaaagctggggcgatggtccgccagca

SEQ ID NO: 113384 - DNA, 414 bp, Zea Mays
tagaagacagcttgcagttcccacacgaaagcttcttgccatggatgcgtgtcctcgtcgtcggggtgtcagtaatggtgagtaggtgctactaccagttgactgtgagttattgtgaggtacggctggctcgagaggcttccgaggcaagaaacagatagctagcttatcttctggaatcactgtgtcaaggcgtgtgttgctcctgggaagaggagatagtttgctagcaagtgtaatgttacgaagatgggatccttgtgcaaaagttgcattggagtggagtgttgacgttagtacttgagatggattaatttatggctagtgagaaaggaggtgaaatacttgtaaatagtttgcctagtcacgtgtttactaacatcagacgtgtaaaattaatatattaagatgatt

SEQ ID NO: 113385 - DNA, 664 bp, Zea Mays
ttccctttgcttgacaccaagttcaaccccgaacgaccatttcccctcacttaattgcaaggttcgagctcttaatcacactgcccatgttgacagcgcgagcaacggataaatcgagacgttcccggtgatcctacgggctctaactcaattggatgggtcgaggagcatcaagggtacatcagagtactaaaacgagggaacagagggtgtgaacggacctgtagcgtgctggccacggcgagctcactcagtacggtgttctggcctgatttgggggaagtctcaaattggggctctctagttgataattggaggcacgggtgggtgcgttaggtgcttgactacatagcggagccgatggcacgctcaatttataggatccgtgggcgatggcgttcaattggaagagattgcgctggcggtcggagagggaagaagctactggcacaagcgattcgtggactttaccgtggcaagacaaccggcaatgaacgggtgggctaaggcgattcactgcgacgtggttaaagggtcatagcgtgtcgtgatcacggtggacgacgcataccttgacatcggttgcttggccacgacgccggcgcaagtggacgagcgatagagcggccatagtgtcccgagttcatccgagacgagatctttt

SEQ ID NO: 113386 - DNA, 769 bp, Zea Mays
cttgatgcgcgtcgtccacctagcctcgtgaaacgatccgagagaatggaggagggtacgacagggtgttaccctcacaattggggtgcgcggcgtgctggcagcccggtaatccctcaccggagtgcgtgcgcaggcttcatccgcgaccgatcgtcgactgtctagggtaagtcgtaaaaattaccttcctttagcttcacagacaatctaattgcgcgtaaaacgccgggattcggctattagtgcaccactaccttggattgcgctttcctggcaatggcgccgccgtgaatcggagcttcgctgtgggtaggggcctgggcacatcgtttcatggataggggttagccatgagattcatggtggtcgagcattcatgaaaatggagtcgggtgtgtgaattggatggggttcactgtagggcgcgttcgcaggtgtgcttccgctgctctgggtgtgtgccgccgtgtcgtgcgcagggaggtggtaaaaggatgccgcgaccattggatcttgatcctgcggtcaccggatcgcgtgggtgaagacctaatctgagccacacatcttcaatcctacggtcggaatcggatgccaattcgttattgtggccgatctaatcgtagcccttgatgtatgatccaacggcccataatgcaccataccctttcggcccgcaccatttgcataagagcccctccgtttctgcggacttaacctgcagtcctggcgccagccgatctgtgtcttagaaacttttacccag

SEQ ID NO: 113387 - DNA, 308 bp, Zea Mays
aaagacttacataaagtgtaacctaatcacacctaaattaacagcaagtctgacttagacaaatctttcattaattcttactaaataacaacaacaaacatcaactcccactttgacatgcttcacatgatacgatcccaccattcttcgaaatcccaactcatatcctcacattgttgtgccatgctaggaacttcaaggttctcccaaaaatcttgatcctcaaaaatcatttcccacaaactctttgactcaaattcatcattgtaatcatcttcggtgcagtcatctagagtgtaacatcttcg

SEQ ID NO: 113388 - DNA, 549 bp, Zea Mays
ggtagtggacaacgctgcgtggctctagcgatggcgatcgagaggggatccaccgatggagctaggcagagccgacgatagagaggcggtggggggactagcgggcgcgtaggcatggggttggggatagggagaggttgagcagcaagcccacaagaactacactgtggaaggggatggggagcgcacactgctagctacgtggaggaggagttgctcagggtggttgggtcggtgctgggtactaggatggggaattagggttagacagtagttgggccaggaggggagctcagaagaatgggccattgggttgatttgtaatgtcataaaaaatagattggataatttcggatatccaccagatacccgcgggcgagaggcaaaacatgtacccgacccaatttaatcacgggtcaggtacgggtgaaacccgcgggtcaagttttgtgcccaaacccgaatccaacgtgtcggatatccatcggatacctgtatccacgggcaaaattgccatccctaccctccatacagtgaactagatccctg

SEQ ID NO: 113389 - DNA, 463 bp, Zea Mays
gaccgacgaaacgtggtgccagttttcctttcatttggaaccttttgacaccacgcatcggggagaccttgagataaacgaaatctccttcctcaaatctgagttcccttcgtctattgtctgcgtaactcttctgtcgactctgagcttcaagtagcctcctgcggattaaagcgactttctcttcggcctctttaacaaagtcaggtccttctagcgtcctttcccccacattggaccacattaggggagtctggcattttcttccgtacagtgcttcgaatggtgacatcttgatgctggcctgatggctgttgttatacgagaattcggcgtacggcaaactggactcccaatctctgtcgaaagttaacacgcaggctctgagtaaatcttcgaggaccttattgactctttcggtttgaccatctgactggggatgataagcggtgctgaaatctag

SEQ ID NO: 113390 - DNA, 432 bp, Zea Mays
cttttccacaaaactagtggatataaaagaatgggatgctcctgaatcaaaaagtacagtagcgggattaaattcaacaaggaactcaccgagcactactcctggagcttgctgagcctcttgagcatcgatgtgattcactcgtgcccttccttgatattgggtcttgttctgctggttgatggaggagggcgccttgggggcgggtgctaaggtattcttggggccattcaccgagttggagtaagcaggtcctgatgccttcaactgggggcagttgttcttgaagtgactggggtctccgtagtgccaacacgcattcactggtggttggttgcttgcaaccgagggggcatgaaaggagctctgactctgctgactgaaccgtgacggagtgggtccagctggtctaatgaagcttggtcccttggg

SEQ ID NO: 113391 - DNA, 295 bp, Zea Mays
gccctcccgagcagtgagcggaggcatggcttgtggactcgcttcagcttctcacggaattcctgaggagggtttcttctcgggtggatctgctatgcggtgcagagttccctctatgtccgctatgcatgaaatggttctaaagcagaacatagctcctggctgaaggtgatcttgctcttgaagatgatggccatggagttagcgttgatcgacgacacacccctaacctggtgcgccagctgtcggcgtttggtatccgaccacacacccggggtaccctcatggtgctttt

SEQ ID NO: 113392 - DNA, 290 bp, Zea Mays
caaggtaggatagagtgatgagaagggtaaagaaaataacaaacaaaacacaacaaaggatagagttaaaaactcgcagatgacgaataggatacgaccaagggaaaagtaggtaaagtacgatgctcagattgagatggaaaagaggatattttaaaggtcggtataagataaacatcaaggtaagatatagaggtgataaggataaaggtgataatgatgtaaagcataattcatggtcagagttaaggcaagactcgcaaagtaacaaggtggagaaaacaatcaag

SEQ ID NO: 113393 - DNA, 393 bp, Zea Mays
gattgaatggacaatttgctaaataatcaagcttggattgatttatgttgaataaattcaagagacttcatttaccatgtttgaatgatcaaatctatttggattggcttgaaattcagtttacttgctctatgcatatgatagcaaagtctgtgcaaatttcataatcattggataagtgaaacttcttgattaagtcaatcttgtcagcacaaacacagcagttttcagcatgtacctaccgtgggagatgttatggctgtcagcacatatgaagtcaaatgagtctcaactttttacagctgttagcagacctattaaagcacatctccaccaattgtcgtggtcataggatctgtacatcaaaatttatgaatgtttctttggagtata

SEQ ID NO: 113394 - DNA, 650 bp, Zea Mays
taaaccatagaaaggtgaacaactctcttgagaagggttgggtctggtactgtatagaaacctaagttaaatgccctcaaacattcaccgccaatcggtgctgtgaactgaatgtgattcaaaagctaaaaacgaatttcagtgaattgtgaccaacttcggagtatcataacttgagatccaggcacttttggctctgggctgctgttaaagagttgaaggctatagtatggtaagcaagttcccttaggcaagtttgaccaggggctgcaaaaaaagtggagtaaaatgtgtttcaatttcctctgtcaggtgttgattgaagtttctgtttcagttaacaagagcagcaggttgaggtttcggccagtttttgggagcccttttgtgttgatcccagatgttatgaattctggatcttctagtagagtcttaatggatgctttcgtgaacaatttttatgtagattgatccctctgtcactgctgggagttgtgagataagtgggggtgaacaggaggggtttagttggggttttaaaattatggttgcagagaaataagataggtctgaaccaccgtgtgcccttgctgttttggacactttgagtaagtggatagacaatgacatggagggtaaggaaagatctt

SEQ ID NO: 113395 - DNA, 379 bp, Zea Mays
taaaaccactcatttttgtatcgcatggaggagggaagcgggatcttgaagtactccaccttttgaccggcgcagagttgaatgttggcagaaccaacgtataaccggtcgccatggcccggagtcactcgtgcgctaaagtaccaccacaacttctagtaggggttgatccccaagaacgcctcgcatagtgtgacatagctcgctatgtggaggacggtgttagggtggacattctggatctccagctagtggtattggaggatctctcgcatgaagggatgcaggagtaggctgaacccacgttcgtagaaggacgcaagcacgaccacctcatcattccttagacgtgatacctcaccctcgccctctaatctcc

SEQ ID NO: 113396 - DNA, 399 bp, Zea Mays
ttaccattgtctctgttgttgctggcattctgacattgacttcaattctttctccttgtggactggtcaatgtaaccatcctcttagcacaagatatcactccatcatacttggtcaagtagtctattccaagtatcacatcgattccacttgattccaaaattatcagctctactagaaaacttaggcctctaatttcaatattagtctgagggcatgagtgagtagctctaatttcacctcctgatgatcgaattaataatttcttcttcaagggatagtttggtatattatgtttttccacgaatgactttgttacaaaggaatgagatgctccagaataaaataaaactgatgcaggtatggagttaataagaaacataccatacaccacgccgg

SEQ ID NO: 113397 - DNA, 508 bp, Zea Mays
gaaggttgtaccttcttatattgtctttggataatatcataaaagcaagagaaacaaagattacattgagtttgtatgaaaaatttcttgattaagcccctgtattgcttcagtaaatgtgtttcgactctggcacagtgttgttgactgtccgagcttcagattcttcgcgtgcatcgtgctgttgttgtacttggtggtgcccttatggctgttggttgtgagactaggttggagccatgagtggtggtggtggtaatggggcccatgcaggttgtaagtggcttgccgaagcgactgatgttgtgggttgttggttgcccacatactcggggatgtgtggggaatagcacaaagcggtatgcaggacctgcttcggctgattctaccgtgctttggcttcaactatttctttatgcttctgaataatgacttagcatgtccttgttgtatgccccttatcttccccacataatagacaaaacaacctttttggttgggagctgaa

SEQ ID NO: 113398 - DNA, 595 bp, Zea Mays
cgggagatagccaaaagtatgggatttccgaagcttgaaactggcttcgctgtcatgtcgaaggatgaccttgcggatagccttgcatacaacaatataaaggtacagaagctgttaacttcaaatttggaaatgaagtatttcattgtcatgcttaattctttctttttcttgcagggcttgattcttagcaatgcctagagggcacaaaagaatgctgaagatgaaagctgcacaatagctctcagcaaccttcactgagaggtaattgagctgagaaacgaagctttggagaaagacaagattttaatttcattggtgagtaaagtgaaagaagatgaagctagatacaatgctaaggctgaagcccaaaaagccgagatcgaagaacttcggaaaaagctcgccgaggctaatgaaaactatgcagttgcaaaagccagcaaagaaattagtgaatggtcacaagcaagactggagaaaaatattgaggagctacgcgagtccaaggaaaggtgcttcgaaaaatccttggattgcgtgaaaaatttgaaaacagctttgcaaaagtaggtgcttactcctctgaggagaa

SEQ ID NO: 113399 - DNA, 816 bp, Zea Mays
ctaccgcctccgggaatggagcagggtttcccctgagagctgaaagggaagccgatagagaggaaagtgaaacccacctccccgcacctccacaactacccttagatctagcccaagttctagccaatcaaacccgactcatcgaggtcctcactcgaagtctggaaaatcaacgtccgaatggtggaagaccgcaagatagaatgggggatttcctgaggctcaagcctcccacgtttgccggatctagcaaccccctcgatgcagacgattggctgcgcacgattaaaagaaagctggaagccatcggatgcccagaaaatcagcgtgttcaactggccgctcatcaactttccgggatggccttagcctggtgggataccttcaacgtcaccatcagaggtgctacttgggccgaatttgaaacggctttccgggagcacatgtgccccaggggctcgttcagcttaaggaagatgaattccgggaactgactcaagacggaagatctgtcagtgaatatgtgcacaagttcacggagttagcccgctacgcgccagatgacgtcagtaccgaggtcaagaagatggcctatttcctgaagggactcaggccagaactcaagacaattctggctagccaagacttcctcagtttctctcacctctccaacaaggccatgcaagttgaaagggcaaaggaggaagaaaaagggcatctcaaaaggaaattccaagtcctccgggctcagcagcaagaccggcatcagaaaactcgatcctttggatttccacccaagggaccaagcttcagtag

SEQ ID NO: 113400 - DNA, 673 bp, Zea Mays
tccgtcgcagtcgaatagtacacaaggtggttagaggcgaaggcagtttctgttataacattaaacatggcacaaaaattttcaggcagaacatcatatgtagatttggggtcgcctctggaatcaccgtagacaacgacaagcattttgacagtcagcagtttcgggaattctgtgcatcagttggcaccatggtaaactttgcctctagataccaccccttgtctaatggtgtagtagaaagagaaaatggaaaaatctcacaattgtcaagaaatggctacatgatgacacgaagggtaaatgccccgaccaactgctcgaaatcatatgggacctaaatataacagaaactaggtgcacaggattcacatccttcaagctaatgtacagtgttgaagcaatgacgccacaagagttaaaattcaaatctctaagagtataaaacaactcaatgtcggggacagacgagcctgcgaccaaatatttgctcaaggactataggaccgaagctggaccacaactggagtgtgaaaaatctacacaagttttatgtttaaaaggacttcgatcgtaagggccttaactgcccatgcagtatttaaaacactaaacatttgggtctatacacttttcctcataaagggggtgaggtttttaatgaggcggagcc

SEQ ID NO: 113401 - DNA, 343 bp, Zea Mays
cctggggtttaccatcaccaaccctctttcgagcttcctgcaataaacgatcctgctgctgagccacacgcactctctccatgagggtagattgaataagcatgcgagtctcctcactagcggtgccgacatagcacaaggtgatccctaaatgatccagatcagcaatcaactgcaaggccacttttggaaccccggacctgctaagggcatcagcgaccacatttgccttccctgggtgataatgaatagacaaatcataatctttaatcaattcgagccaccgacgctgcctcaaattcagctccttctgagtaaaaatatacttgagacttttatgatc

SEQ ID NO: 113402 - DNA, 320 bp, Zea Mays
taagaacttcggatgctacaacttcgcataccgaaaggacacaaaggcccccatgatagctactgcaccaaatggccaaccactggacgaacgagtggttttacgtaaaagctgacgagaagaaaagagagaaaataatgagcatggtgatgagcccgttgagattgaagttcggcatgactcggtccctgtgcaatatgcagttggggtctccttgccagttggccaaagtggagttcagggtcgtggctaagcaaatcagcactagagacttagtacaagaatacttggcaaaccaaacatttccgacctctggcggt

SEQ ID NO: 113403 - DNA, 331 bp, Zea Mays
tcaggagtagcatctgcgctgacttgattaaccctggcaatagaatatcccttgccaggagtcttttgcttgttctgagctggtgtaccagaattccccactggacaagcattagcatagtgcccaatctgactgcacttgaagcatgtagggccggtcttctgtcctataggtctcgccggggtgccagtgggggtagcctgatgagtggaaggggtccgtggagacccctgtggcgtgtactgagctgggcgtggtcctcctccggaacgagttggtgatgatggccttatgctgggctaaccagttcaagcccagaattacatcaaag

SEQ ID NO: 113404 - DNA, 590 bp, Zea Mays
cgcatatacacagcacagggtaccatctggagggctatggacacacggaaatttccacaccctttcttgcaaaggtggtataactcaggggcaagtaaagaataaacgggtgcatgtggagagtaaaatgcccagcacaccacagcatatgtactcggtggcacaccctataagcaaagtgaacagatagatggtgtgggggagagagtgcaggtgcagcgctcctttctttaaagcatgcatgcatgagaccggccaaccaagggtagcagcatacgatagaactgagaggcatcttctatctttgacagctggtcaagagaggttgaataggcgcaggaacagctagtggcacagcagccagcattgcacatgaccactaaatatgccatggcccaacatgacccttcccctcacatgcatctgatcaaccaagattgttgcatgttcctccaccactcttattgaaaggggtctgcttgctggatggatggggcggcaaggaatgttaaacttttttttcccggacctttagtttccagctgggatcaaaaagatgaaaaaaaaggccatagctttgcttcctagca

SEQ ID NO: 113405 - DNA, 472 bp, Zea Mays
gcgttcctcagtctgatactattcttcacggaatgtcgtggattctgactatttctttgaggtatatccgagcgagggtggctcctccgaaggtagtctttactggtatgaagtgagctaccttggtaagacggtcaattatgacccagatagaatcgttccccttttgggtccggggcagtccaatcacgaaatccatgcctatttcttcccacttccatttgggcaccggaaggggttgcggtaacccagcgggcctttgatgttctgccttagttcgttgacaagtatcacattgggctacatgttgagctatcccctttttcatccttctccactagcatctagtcttgaggtgtaggtacatcttagtaaaccctggatggatagagtaggctgagttgtgggcttcatctagcaggatttctcgtgcctctccctttggtacacacagacggttcctgaaccaaag

SEQ ID NO: 113406 - DNA, 549 bp, Zea Mays
cgaaacgcggtgctagttttccttttatttggaaccttttgacaccacacatcggggagaccctgagataaatgaaatctccttcctcaaatctgagttctctacgtctgttgtctgcataacttttctgtcgactctgagcttcaagtaacctcttgcggatcagggcaactttctcttcggcttctttaacaaagtcgggtccttctagtgtcatttcccttacattggaccacattaggggggtctggcattttcttccatacaatgcttcgaacggtgacattttgatgctggcctgatggctgttgttgtatgagaattcggcgtacggcaaactggactcccaatccctgtcgaatgttaacacacaggctcttagtaaatcttcaaggatcttgttgactctttccgtttgaccatctgactgtgggtgataagcggtgctgaatctaacttggtgcccatcgcttgctgaaggcctttccaaaattttcaggtgaactgcgtccctctatctgacactatcttccgcggaatgccatggaa

SEQ ID NO: 113407 - DNA, 547 bp, Zea Mays
tggctcttgactggtcttcatttcgctttgtgcttcaatgcttctgttgattagacttgtactttagtagctatatttggctttcctctgatctccatcgatatctttcttctatcttgatacattcattgtgtatactgtatggatgtgactgcttgggaaaatctattgaaatttcttggacgtcccctccccaatgggtataactgagggacggcttcgtacgccgagcgtttagcaaactgtccttgagtagtaacttgatgtgaccgtggggtgtaatcatatcgtccaagcagttgacctcagtccaaatggtgtcgtgttacgcgaaacggcgtctgctgcctgacttgcttccacacgatttgaattgcttattgaatacttgcgactgttcggtgaccgtggtaggagatgagcggttgcttccggcctctataaatagactgcctgcctcgctggtgtcttcacacatcttctggtcgtttgttgcttattttcccacttttctcttctcttccaaccaaccatgggcaagaacaag

SEQ ID NO: 113408 - DNA, 330 bp, Zea Mays
gcattgtatcttgcaaattctagggtttttgccctaggtcaccacatcaaacttgtagcctaatcataggagaacaaccttgcttaaggttgtgagctcggttgttaagaaaaatccagagataattaagcccaaagttggactgtcaggtcactgagtctgaatttttagagaaacagtgcaaccactgagactttgagcaaagattcctctatggtccagcatgaatctgcccatggcatctatgacaaacttgtagctggttagtagatctataactttgctgcagagtttggtttgtgttgccacagaaatttggaagaaatctgg

SEQ ID NO: 113409 - DNA, 920 bp, Zea Mays
aggagagtcgtgagtgaatgccgctggaggcaaagaatgtggtgagggcattattaacaaactcagtgccattatcagcctgtatagtcttgatagggaggctgaactgtgtgtggacataagcgcaaaaattaatgatgtgagtggctacctcggacttgcagactagagggaaagtccagcaaaagtgagtgaagtcatcgaggatgactaggtagtactgcgcaccagagacactggcaacgggagaggtccaaacatcacagtgaataagctcaaatggtagagatgaaactgaactggaatttccgaagggcagccgcacgtgcttgccaagttgacatgaatgacatagagtatgagcggacttattacatgagatggaattattttgtctaagcaaatttagggcagcagctcctggatgaccaagacgatggtgctagaggttggtggaggtggcgaggttggcttggggcgtggcagggacggtgtagaggccgtcggagctattagagcggagaatcacgcgtctggtctgcagatccttgacagaaaaaccaaacgcgtcaaattcgatagtgcaattgttgccacgagtaaattggcgaaatgaaagtaagttgcgcactagagatgggacaactagaacattgcaaagcgaaaaggatgaagtgctaccaggcaatgtggaggtgccggagcaagacacaggaaggtgatgaccgttgccaacagtgatggatgggacagaggagggttgatgggagagaagtataccatccgtgttgtgcatgtgggaggtggcaccagagtccatgacccagccggagttctggagcgccatctggttcagggcggcgatgaggctggcctgatcccacaccgggtaaggaggtggcggtgcggcgaagtgggcc

SEQ ID NO: 113410 - DNA, 292 bp, Zea Mays
catgctttgaagtgacgattcaaatgtccagttccaccagcagaatctgcactcaactcagttttacaataatgacatatagcaataaaactctttataccattctcaataatttcccgcttatccatatgattccaacactctgccctggaaacagcggctttagattttcggggtagtggcactggcacatgatcaccatcaacatctgctggggaggaggcacttgccacaaaggattcagcttcaacatgaaccctattagcagattcggtaccaggactatccaaag

SEQ ID NO: 113411 - DNA, 473 bp, Zea Mays
gcagtttcttctcatccctctagtcttgactcttgagacaactatgtgataattttatcctaatctctaaccttaaactaaacaataactttattgaggatcgtctcatcttgtcttatttcggctgattggttccttgcacctgtgcagacacgctcgtgcgaagctgtctgatcggatatagtcgtttcgaccgtacaaacggatgtagataataaatatcaaactgacttattttacattcactcaaactgcgcacatctttaaggtacatacgtttaagtcaacgcatccagtgattcatgacttggacaagacgacagttgccagcaaaggctgcagtccgcaaccatcccgctgctctccgttccatcaccttgcgtcttgcgctcggcagcctcgtctcccccctctttcggcgaatgccacgccgcctcgaatcgcgcgctcatggcccgagcgatcagcctctt

SEQ ID NO: 113412 - DNA, 945 bp, Zea Mays
tggaattaatacaagatataatattcaggtttgggataccaaataacatcataaccgacctgagatccaacttcaccagctctgaattcttcgacttctgcgaggaacggagcatccagattaagtatgcatcagtagcgcatccaagagccaatggccaagtagaaagagccaacgggatgataatagaagcactcaggaagaaagtgtttaacaagagtgaaaagcttgcaggaaagtggatcagagaacaaccatatgtagtttggagtttgagaactcaacccagtaaagctctgcatggaaacatcccgttcttcatggtttatgggtcagaggcagtgctgcccgccgacctaatattcagggcgccgaggttggctttcgaaagcatagctgaagcagaagctaccaggctagaggatattgatgtgctggaggaagaatgattgaacacagtaattcagtcggctaggtaccagcagaccttgaggcgctatcatgataaagccgtgtgacaccggtcctttgcagtgggagacttggtccttcgccgaattctaaagggggaaggacgacacaagttgtcaccactatgggaagggccatttattgtatcagaggtcactcagccaggatcataccggctcactcaaatggatggcatggaagtggggaactcatggaacatagagcatcttagaaagttttatccctagcgagacctcaaaaattctcgaagcaacattgtactctataatcgggggacttcatcatcaataaagttttcattttcaaaggcattcagactcttgactttcagctgactttgatttgattggagtcaaaatcagcacgcttactcgacttagggtgaccactataccctattaacggagcaatcgacttaagtcggtgacgacttaagatggtgcgacatgctca

SEQ ID NO: 113413 - DNA, 627 bp, Zea Mays
ttcattagattgtaggagtgatacagaaaaaggtatggccgaagtaacgaaatcatgcaatggtggtaccaaattcaacagacaataacctacaaacagaacaataagtacaggatttgcatgcacacctgatgcaaaccagtgatttctagtttctacaccctctattattttccactagacatctttaacttcagaatccaaatgaacttcgattattaatttcaacatctgtagttatgtctactagtacaaaatgttgagcatgtgtcactttatcctcaaaagagaattacgcataagcagatggaagatgtcaggaaagtacgaaaacctgctgttattttgatttacaggagatggtccatggtaaacgatgcagggagctgtgtcatactgtcatttcattaagagtaagtaccatgtgtgtaaaacccacacaacaccacagataacatagacaaaaatccatggagccactactttacaacagaaatcatgccccaaaatataaagaacacaactaccaagcgaccattaagccagaaaaaactgaaactatatgaggacctagaggccccaagcggccgagccatggctgaacaccaaatggctctctcctcttca

SEQ ID NO: 113414 - DNA, 604 bp, Zea Mays
cccttctccattcttatctcctactttgatacactcgcttatctactctgattctcatgcaacgtgtcagtgatcagtgtgcagtttctgcagtcaggatggtgaggaccaagaatgtcactccagcagaagggggtgatgatttaggatcctccttgcctgtttagataggacaagggaaaggaggtctaccttaagcagcagggagggaaaaggaaaggaagttggacagagctactagagcagcagctgagagaacagagcagggagagcatattactattggattagatcagatagccttctatgtacgttgcctcttgtctcaggcatgctccactccagctaggttcgacccctctgctccagccaccactaccactccaccttacactaccacgctagcgtccaccactatagtgcctaccaccacactcgctacacctacaacctccaccatgcctccttccaccactctcgctacctctgccactccaccagtacctcccgcctgattctaagagcgtgaagagactgaggtttggccccttgctacagatccaagattgttcgaccttcacagagccactgctgcaagggatcg

SEQ ID NO: 113415 - DNA, 567 bp, Zea Mays
tcgatcgcagcaacattatctgcctgcagtcagtctagtctgcacatgcatgcatggtgctgacacagcgcgcgggaaacaaaaaactgtcaatcggcatgcacgcacgcacagccagctttacgattcatcaactgccggcttgagagctttctgtatggatgtgtctccctgtcctagctctgaaagctagagtgactctccaacctagttgagctagaagcgatccattccatggaagtagttgagttttagttgatgcatctgcatctcccggatgcctttgcgatggtacgtggaaacgtctatgtttctaaaagaaagtacatcgaaatgtcatctgggctcatcccttttcctttactctgatgtggcgaacgctagcagatataatgctaagcaaactttcccaccaggaaagctccgagatccgtttcgtttcgcagagatcgcgctgagtgagatttgccatcagctgaatttcgggatcgaccgatgcgtccctcctcctttctgacaacatttaacagatcaacaaaagcgcggaaaagaaaggggaaccgaccg

SEQ ID NO: 113416 - DNA, 869 bp, Zea Mays
gtgcgcatccaatcgtctacatcgagggggttgcttgatccggcgaacgtgggaggcttgagtctcaggaaatcccccattctgtcttgtggtcttccaccattcggccgttgattttccagatttcgagtgaggacctcgatgagttgggtttgattggctagaacttgggctaggtctaagggtagtggtggaggtgcggggaggtgggtttcactctcttctctaacgtcttccccttcagctctcaggggaaaccttgctccaatcccagaggcggtaggcgtggttttatccgaagccatctgccagggaagagagtcactattatgcacatgcaaattgttttcaaccaagttattttattcattacaccatcacattacaagcataagactactacaggtggaactacacgagagcgttccccgaggtactaacgaactccttatctaaggtgtccccaaatgccttgagaagatcatcgaggcttgctagggatatatcctcgtcgtcggaccaatcatctattctggggggaggtagggctagaggggccttcttcttcttcttcttctctgtttggcatccttggttggtggtcttcttctggattttctttttgggggcgagtttctttagcttcttgtcatagtccatcttcatggttcgataggcctcacgggtgttggcttcctcgccttctgctatgtcgagactctcctggagggatgccttctcttgcttaagctctttgacttgctgctctaggctttccactcggaagtttaggtgggtgcagtgggaggagagctcatcgtagtggttgtcgagggtgtggaggtatccggccatgtagacgatagtgg

SEQ ID NO: 113417 - DNA, 424 bp, Zea Mays
cgtgcatgcttctactgtggagaacaaaaccactgggcgaagaactgtccaaagaaagcagctcagcagccgccagcagtcaatgccccaacaagacaaggagcaccacagcaagcaccaggagtccatggtcaggcctacaaccgtggaaaggtgaaccacctagaggccgaggcaatccaggatacgtggcagtaggtatgtttccagtcgaatcctacccagcaaaagtactatttgatactggtgccacgcattcttttgtttctgcatcttgggtagaatcacataacatccccatagaaccaatgatcctgcctttaagagttaattcagttggggggaaagttcagaccgataggatttttccgattctaaggattgaaataagggggatagacttccccgctagcctagtagtaat

SEQ ID NO: 113418 - DNA, 994 bp, Zea Mays
atagtcccatgcatattcactggcaacataagtggttgacattccagagtaatggtaaggaagtggtgctacagggattgcgttcagacaattccaatctgacacatatctcagttcctcaactgtttcatctacagcaacaagaacaattatggtgtgttctccacttgcaaactgtcaatcaacttgatcgaacaccaccccaggatgagctcccagttgaaattcagagtttaattcaggaatttgcctctttgtttgataaaccatgtggacttcctcctcccagatctcattgccattccattcctcttattcaaggagcaacaccgttccggttacgtccctaccgctataatcctgcccaaaaggatgaaattgagcgacaggttgcagaccttctcaagtcggggatgattcaaccgagtagcagtccctttgcttctcctatcatcctagctcgcaaaaagacaggggattggagactctgtgtcgattaccgacgtctcaatgccctcacggtgaaaaacaagtacccgttgccaataattgatgaacttttggatgagcttcagggtgctttgtggtttacaagtttggacttgagttcgggatatcatcaaattcaaatggatcctcaggatgttcacaaaacagcttttcaaactcacaatggtcactatgagtataaagtgatgccttatggtgtcaccgggggtccagcaactttccaactagccatgaattcagtattgtctccatttctcagaaaatgtgtggtcgtgttcatagacgacatcttgatttacagctcaaattggactacacacttacatcaactccgagcagtgtttgctacattggaccaacatcattttaaagtgaacctctcaaagtgttcttttgctaaaacacaacttcattacctaggtcatgtgattagccaaaatggggtggctacagatcctggaaaagtgtcggtcatcaaatcatg

SEQ ID NO: 113419 - DNA, 543 bp, Zea Mays
ctgtcatacactgagaagagggagagggtgaaagattgagtgaaacgttggatcgagccccaatggcggtagtagagtcaagatagcaaaccgttggagggagagaggggctgtcatacactgagaagagggagagggtgaaggattgagtgaaacgttggattgagccccaatggcggtagtagagtcaagatagcaaaccgttggagggagagagggggctgtcatacactgagaagagggagagggtgaaggattgagtgaaacgttggattgagccccaatggcggtagtagagatagcaaaggaggggaatcatgttttaatttgtattaacatatagctcgtgctaacgtcatgctcacgaggactgcaaataaagggatggcaacaatagtggtgcgaagaaagggggcgacaggtcacagggaagggaagaaataatttaaatagtattgtctattgaatttaagtaaggaaagatgatatttaaccatctaaaccgttaattttaatagtgtgttaagtttgagtgtaatttgt

SEQ ID NO: 113420 - DNA, 430 bp, Zea Mays
tctttatgtggtaggttacagggggaattatctattatggagaatgctagagaactaagttgatggctgatgaatgacctgtctttgatggggtgcccctaggccttatatccgaccgtggggcacttacatgcgtgtatgataacgatgtatgcctaagtaatagtgaaccgaccgaacttatcttcctacaatgttgccgacttattctcacttggttccgatgtccaaggtggtcacgcgggagaatcggatcagagctgtggataacgctcaaacctcacgagccgccttggtccgcgttcgctcattccctacgtcggcccattctgccagcagttcttccctggcgcacgaagggatggccttgcaaaacaataggcccaattgcccaaagcctttcgcgaggccttctagccttctagttgac

SEQ ID NO: 113421 - DNA, 699 bp, Zea Mays
agcggttccactaaacatctgtcgacatcgtctgtcttgggaataacaaaaaagcaagaagaagaagaaggagaagaagaaaaacaaagcaaaccggacacaagagtggtgacctcgcactcaggctgtattcaaataattgtgccatatattctccaaaactcatgtggtgtctgctacacatatgataacctcagtagagtgctaaaagcaggatgacaaagcactgataataagggccgtatgccaggtaataatcttgtttagattccttgctccaaaaaaccagaaacgatgcggcatgggcattagcaggatttttcatgtcgtcatgcagccggcaatatatgcccaagtgccaaaacatgttgctgaacgcatccccatattgcattcccgattcctgtaaatccaaaccgccctttttttagttgtagatagaggagttcgggagattgaccatggttgttgacacccgggacaagtgtatatagaggagtaaatcttattaaccaagtcaagcggagatacttcagcacttggtgatcgggtcattgggaactagaggtgacatgtgttgtgttgacatcatggagggagcatagaggatatgctactctagagtgatttcgtggtttggaccttaaaatcactatggacggttttttactttgggccttaaaacttgattggagtcat

SEQ ID NO: 113422 - DNA, 281 bp, Zea Mays
atgagacgaaggctatcggaaaggagcagtatcacaacaactttggttgttacagtttcgtgccttgtcctgaagcgagctacccggttcccacatttcggaggaggtgtccgggctcctagatgcaagaatggttttacgtgaagaatgacctaagtgaaagggagggtgtgagagggattattcaacgtcctatatggtctcgcttcggcattaggaggccagccactgcccttgggaatgatatacaaacatgccaggcggctttcaatacagtgtgt

SEQ ID NO: 113423 - DNA, 604 bp, Zea Mays
ctttgctcaaaggcagttagcttacttgggtcacatcatcagtggtaaaggtgtgtccacagacccagacaagattgcagcagttcgcgcttggccagttccagcaacagtaaaggagctgcgtagtttcttggggctgtcggggtattaccgtaaatttgtaccccattatggtgtcatttgcaagccactcaatgaccttcttcgtaaaggggaattgtttgtttggactcagcatcatgatcaggcattccaagccctcaaacaggcgctgtgtgcagcaccagttgttgccttgcccgacttccgtcgcccatttgtggtggaaaccgatgcatcagcaacccgtattggagtagttctcatacaaaatggccatcctctcgcttatcttagtaaggcattgggtccccgctctcaaggtctctcaacatatgaaaaagaatatctagcaattcttgctgcagtggaccactggaaacattacctccaacatgctgaattccacattctcaccgatcatcagagcctcgctcagttaaatgaacagagattgcatacagtgtggtagcaaaaagtgttcaccaggctgttgggtctcaac

SEQ ID NO: 113424 - DNA, 850 bp, Zea Mays
gaaaagaccacaatatagagcattaagtgtacggaaagaaacacaaacattgagtcgtaactcagagccaagagagggtcaaggatcatttaatatggctactaccatggataatgaaacacggctaaataacattgtaaagcgccccttgaaatctctttctaaggtaaagtttggtataaggatgcatctatggtaattcattgctttccaaattattgggttcatctgcggttaattttatgcagagcagtgattatatgcttggacccaaggaatgtgtacttattgttggttggcggccaaaagttaccgaaatgatacgggagtacgataattaccttggacctggtagtacagtggtatgtaggcacagtgacaaaaataaacaaattgtgctactcacattttaatcatggttcatatggttatacctgtactcccatacaaaagttagggtataattttactaatgaagttagttaaatgtgcaggaaatcttgtcggaaacccctattaaagagaggagcagtatcatcaacccccttttgcagagccagcttaaaaatgttaaagttactcaccgggtatctctcagtctctaactttgttagtgttcatggacagacaaaaagtttcaattttatctcaaaacataccaatacaggtggggtgtcctttgaactacgatactctgaaggaaacaataattaacgtacgagaatctgccaagtcagataaagaggttccactgtcaatagttgtgatatctgacagagactggtttgttggaggtaccagtaaattaacgaggatgtttatctgttatcatcatcggtgatggtatttt

SEQ ID NO: 113425 - DNA, 483 bp, Zea Mays
tgatgagactgtctattgtgtacatcctgttggtttcgttgatagctcttggcttgatcatgtctgttatttgaatgggttgaaacaagctctatgtgcctcgtacagtcgttttgctactcacattctctctcttggctttatgagtgccaaatctgacacttccctatttatatatcaacatggccatgacacaatttgtttacttctctatgtggatgatattgtgctgacatcatcttccacctctcttctacagtgggtaattaaaactcttcagcaagaattctctatgatagatctcgaccatttgcatcattttctcggtctcacggtgactcgccagcctgatggatttcatatttctcagcgacaatatattcttgaggttcttgaacgtacgggtatgacagactgcaagccatgttctactcctgttgacacgagtggcaagctttctggtactgaggggccaccagttgc

SEQ ID NO: 113426 - DNA, 594 bp, Zea Mays
tttgaaatgagggtttggaatttcaccacgtggaaagggatcacaatgcagcagtagacgtgttgtcaaaattggggtccagtcgagcccaggttccacctgggattttcgttcaagaggtacaacaaccgagcatcaccgcagagcaggctgaggagtgcaatgttttaaaccaagtagaagcatatcccaacgattggagggaaccaattatcaagtacataaaaaacgaggaagaaccatatgacaaggccacggctgagcgcattacaagacagtcagcccactatgccatcatagggagtctgctgtatagaagaggtgcaggaggaatcctcatgaagtgcgttcattcagctactggaaggcactttctggatgaaatcaatgcggggcaatgtggcgtacatgcagcatcaagaacattggtagggaaagctttcaggtccgagttctactggccaacagcgaagaatgatgcagcggagttggtttcgaagtgcgaagcatgccaattcctatcaaagcagcaacacttgcccgcccaacatttgcaaactattcctattacctggccctttgcatgctggggct

SEQ ID NO: 113427 - DNA, 297 bp, Zea Mays
ccggtttgaacaaactcgttttttgacggctcgttttgttggttttctgagttcggtgagtggtatgatgtgccaggtttaaggaccactaccgattacaaattacgcacattgcattctgagttcagggagtggcacgtctatacatattgttcttcattgtcattcacacattgcatacataaataaccgttattattacccatgttggtttcataaggaggacatagcttgatgtagaccaacataagcaatgcctttgtcaggtttgagaactatcagatgtttgctttccaa

SEQ ID NO: 113428 - DNA, 295 bp, Zea Mays
cgggatcataccggcttactcagatggacggcacagaagtggggaactcatggaacatagaacacctcagaaaattctatccttagcgagacctcaaaattcttgaaggaacattgtactctgttatctgaggacttcatcatcaataaagttttcattttccaaaggcattcagactcctgacttacagctggcttcgattgggttgggcttgaaatcagcacgcttacttgactaagggtgaccactataccatgctaacagagcaatcggcttaagtcggcgacgacttaag

SEQ ID NO: 113429 - DNA, 946 bp, Zea Mays
atttagtggtatatacttttattaattgtttttaaagatggtgttcacatgtgatgacaaataggttcaacccacacatataaataaagaaaataaaattttcttttccttttatattctctcttacaaattgggtattataaatcctacccccccttaaaaagaatctcgtcctcgagatttaagaaggtctagggaaaagatggggaaaatctatgcgaagctcttcttctctttcccatgttgcttcatattctccatggtgactccattgcactttacacatctttatcaccttatttcttgtaacccgagtcaatgtatcaagaatcttgataggatactctgtgtaagtcaaatcatcctgaacactgagctcttccattggtaactgttcctcagggacacagagacacttcttaagttgagacacatggaacacattatgcacatcagatagattatcaggtagctcgagttggtatgccatctccccaactcgcccaaagattctgaatggtccaataaagcgaggggacaatttgcccatgactttgaatctcctcattccacaaagtggggacaccttgaggtacacatgatctccttcctcaaactccagtggtcttcttctattatcagcatagctcttttgcctggtttgagctaccctcaagttcccccgaattatacagacttgtttttctacctcttgaattagttcaggcccaaagaactgtctttctccagtctgatcccagtatagaggagtcctgcacttcttgccatataaagcttcaaagggtgacttcttcagactggtcttctaactattattatatgagaactcagcatagggtagacttctatcctaacttcctccatgctgaagtgcacaagccctcaacatatcctcaagtacttgattagtcctttcagtctgtcc

SEQ ID NO: 113430 - DNA, 380 bp, Zea Mays
gagggcctagatatagacgctgagtctaacaatagcgttgggagttagctgatgaagatatatttcaaatttctttaaaactacccctatcatttcattcaggtggaatcgcagccctgctctgaagaagctcttgaaaacgacaacttcatccttcttcggctctaggataatctcttctccagcaaatcgaataagtttgctcttagcttctccaaaatagcccaatttcatcatcataggcatgtcatcttccgtcacagtagatttctcaaaatctagatgactaggcttcgttgggatcaaaatgttgtagtcttcttcactctcaccaatattttcaccctcaaccatagtttattcagcttcgacattagaag

SEQ ID NO: 113431 - DNA, 416 bp, Zea Mays
ggccgtcttcctataaattgagcccgagcgctgcttctttaccacatcacacacacgagtgcttgcgaaatcgacccaattccaccgaagaactcagataggccataaatctcctcctcactgttcttagcgccgccgtgaaggacctcttcgtgggcagcccttctagggttagtactcgcccaattgtctcttgttctagcgtgtctttagcttcctattgctctcggtgccgtccaattgaattttaccagagccccaccaccggaacatcccgttgttccatagaacgccaccatatacaccctctctgtcgacccgcttccctaccctcgttcggcctaaattcaatcgtgtgcctagtccctggtgaacccgtgaagcttccccaagcttcaattttagcgtcaatcccg

SEQ ID NO: 113432 - DNA, 722 bp, Zea Mays
tttcccctcaacaaatttcatgaacagcgctctaacctgctctgtccacggtgactgtatgatcaacggacattctaaagcgttcccggaaatctaaggtagcttagctcaatcgagttggtcgaggaggatcaagggcaggtatgggtgctgaaacaagagggcagggagcatgaacggacctggaatacgctgaccacggtgagccagcaccgctcagtgttcttgggtgatttgggggaaatcccaaattggggagttctagtggatgattcgaggcacgggttgcttcactggttgcacaactacttagcagagcaggcggggtcggcaatttataggctcccacagtggtggccggtgaatttgagggagacgcacgacgaccgaagatgaaaggggttagtggcgctcgggatcagtggcatttatcgtggcaacctcaccggcaatgaccagacgtgctagagcgagtcactacgacgaagtactgcgtctaggcacgtgtcatccgagtggcagacggctaactccggtgaacttatccacagcggccgtggcatgctcgtgtacggtggccggagtagaatagtggccggagtttatctcccgcgcgatatttcttacctaggagcgcttatctgagttcggtcgggtgtgaatcgcgacgccgacgcggatctgagcgcaagatcaccggcggcgaggtctctaagctggcg

SEQ ID NO: 113433 - DNA, 294 bp, Zea Mays
gcctttacaagctcgttatgcgcgtcaagcatctccatcaaggactgtgtaatagcagagtctgggcaagcagcaccggcatcatcgctctcaaaaacatggagcctactttgtagctcagcatcaggatcatgtatgtaaagctgagcaaacttgggctgtgaacctggacgaggtagcaacgttccaattcgatgatgaaccacaccgttaattcggaaaacatacggtgcagtaccgttgtttatagccttgtcgacggaagcacccaaggaggtgaaagcgaaaagcgag

SEQ ID NO: 113434 - DNA, 659 bp, Zea Mays
gcccatctatctgttgacgaatttcggcaccagtcatcgttgcaggtgggcggtctgtcactacgacacctttcataaagttcttgatgtctaggcggaatggatggtcaggagggagaaattgtcgatgtttatcgaaggacgaatatttgccaccctttttcaaccaaatgaacctgagagcttccttgcaaactgggcatgggaacttaccgtgaacacaccaggcgcagaatagcccatacgccggtaattcatgcatggagtactggtaccaaacatgcattctaaagttcgtctttgtagctcggtcatacgtccataccccttcctcccagggacgtaccaattcatcgatcaaaggctccatgtacacgtccattttattccccaggtgtccgggaattatcaacgacacgaatatattcttcctttgaaagcacacactaggggggagattgattgggataacaaacacatgccaacatgtgtacagggctgcgctcattccatagggattgaacccatctatggccagcgcaacacgtacattatgagcctcttcggctttctcacggtgaatagcatcaaagtgtttccatgcttcaccatcagatgcgtgcaccatcttgtcaggattgtatcgttttccatttttg

SEQ ID NO: 113435 - DNA, 446 bp, Zea Mays
gtgggaatggacctgtaacgcgctggccacggcgaggtcacttcgcgcggtgctttggaccgatttgggggaagtgagcaattcgggggctctggtgaacaattgaaggcacgagttgatggattgggtgcttgactaccttgcggaaccgacgacatgctcaatttatagaatccccgagcggtggcccgtgaatttgacatggcacggtggtggtcggagaaagaaaagagcactgtcgcaagagattggtggctttcaccgtggcggctcaccggcgatcaccggatatgtgtaatatgagctactgcgacgtggtaagacaccaaggcacgtggcgcacaatcgttgagcggcgaactctggtgagctcatccgaatcggtcgtgagttaggcggacacgacggccggagtgaacagtggctcaagttcatccacacggcga

SEQ ID NO: 113436 - DNA, 537 bp, Zea Mays
gaggagtcaagaggaagaggattgtcagtattctaagtaggcaggttatccggtcggttaaagaagaccaagaggctttgaagaagagagaaactgtaccggaggcgaaattatcggctcccaaaaaacggaagcttgccgagatatcctctgagaagtcgaagatgcaagatgtaccaaagcagactgcaagcccttcttcgtcttctactgctgaggtctcggagatattgaaggtaatgactgagtctttcccatttgcactgctaagtcctttgaggttggaactgactagcctcttacatacaagggaaatctcttcggctggcaaggggaaaatgggggctagaagaaacgacgtatgatgaatatactggaagccattgaacagaccccgccctcagcttcggcagacaaagctactaaatctaatgatgccaaagctaccgtcgcagccgaagacgaaaatctcacaaccacgctgttagaaattgacagacttatatcagacgtggttgcggagaaagaggtagccgc

SEQ ID NO: 113437 - DNA, 627 bp, Zea Mays
cgccatcattggctggctcgttcattggatactgggaatgggcttctgttaaactggatcatcgaccaatgagagagagcgagaccgtcgtcagctggatggagaacagaacacagcctgtcctgtcgtgtgtcgtctcattcagctccgatgttctttctgatctggacccttctagttcacactttctgctcttttgaagaaattattagtctcgggttcctgccgacttgagcaggggggcggcggtggtttgatcaattttttgatacgtaccaagatgtgatgtgaaatgaatcccctttcggatttattattagtgggtgcttcaggtgtttagtttcttgaggcggtaggtagttccggtactctgaatccgtgtcattattagcagcagaaatacctgtcctgaacccctatgagcatgcatgaactatcatcgtccttgtttgtattcatgagaaaagcggggctgtatatttgtgtccatccaaagcttgcatcgtcccatggaaattaactgcacttttgcctacggcggatcgagcatccagagctggcatgtccatgcgctgttggcaacaacggaaatctcggtggtggcccagctcctcgagcaagttttct

SEQ ID NO: 113438 - DNA, 570 bp, Zea Mays
aagaaaggctgaccatggcgaagctcaactcggcggtgacgttgactgtttccagggaattccagtgaactcacgctctggtggacgaattagagtagtgagcggtgggctgaacacgtaacaaggaggcgaagccaagggaacatccaatttaaaggggtcagcctggttactcgcgaattttggacgagagtgtggacgccggtgacgggatatttcaccgggacacgatcactgtggtgcgtgatggtatactggatcaggggcggtaaaccatggcttgccatggtcacgacgacgtggtaaaacgacccatcatgtggcacaaccacaggtaccgtggatcacgacgacggtatctcggccacgacaccggccaatgatgcgatggccatgccagtgccaaacccaaatgcaacccccagcgacgatcttttccttcattgtgtgttactcgtccttacctatgcatgaatcaccgcgccgggcacggatcacagtgcaaggacaccggcggcgggtgcactgaacctagaatcttgttcagttactgttcatgttgaataccaa

SEQ ID NO: 113439 - DNA, 781 bp, Zea Mays
acttcttaagttgagacacatggaatacattatgcacatcagatagattatcaggtagctcaagttagtatgccatctccccaacccgcctaaagattcttaatggtccaataaagcgaggggataatttgcccttaactttaaatctcctcattccacaaagtggtgacaccttgaggtacacatgatcaccttcctcaaactccagttgtcttcttctattatcagcgtagctcttttgcctggtttgagctaccctcaagttctcccggattatacgtacttgttcttctgcctcttgaataagctcgggcccaaagaactgtctttctccagtctgatcccaatatagaggagtcctgcatttcctgccatataaagcttgaaagggtgacatctttagactggcctggtaactattattatatgagaactccgcatacggtagactctagtcccaactttctccatgctgaagggcacaagctctcaacatcttccaatactttatcagtcctttcagtctgtccatcagtctgagggtgataggctgtactaaagttcaacttcgtattcatattctcatgaaagcttctctagaatcttgaggtaaactatgaacctcgatcagacacgatgttcattggtactccatgtaaacacacaatccgagccatgtataactctacaagttgagaacctttataagtagtcttgaccggaatgaagtgtgccactttggtcagtctatcaacaatcacccatatagaattgtatcctt

SEQ ID NO: 113440 - DNA, 565 bp, Zea Mays
tggagatcgattggttgttcccaaggaccctgagctcagaaagaagatactggatgaagctcacctttccaagttctccatgcaccctggtagcaacaagatgtaccatgatctcagatctttatattggtggactagaatgaaaagagaaattgccaagtacatatccgagtgtgatacttgccagaggataaaggctagtcacttgaaggcagcaggccctttgcaaccccttcccataccatcttggaaatgggaggacatttgcatggacttcatcgtgggattacccaatacttccaggcaccatgattctatttgggttatcgtggacaggttgaccaagactgctcatttcttgccagtgcataccacccacagggcagagaagtacgctgaaatttatgtttatcagatagtaaggttgcatggtattcccaaaaccattatatctgacagaggagcaccttttgtggcacgattttgggagcaattgcaagagtcacttgggacccaagtaatccgaagttcagcgtatcaccctcaaacggatggccagacagaa

SEQ ID NO: 113441 - DNA, 809 bp, Zea Mays
cttttttctataacccatatggaccatgctgcgcggattaaagaaacccaaatagcatagacacaagcggtaaagtccatgtgaggaagtttcatctcaccgtggtatgtatctcttcggtttcgggtccggaacactgcatattttattttattttattttatttttctgtggctttctattgggcttttctttctccctccccccgaaccgaatggactggaccacattgtggtagtagctgtttccggcaacaaaacggtgcatttgcactgtgtcctgcagatgggaccggctcacagtctatgctactgccgctcgtatttcgagagcgatgaaacccccatcttgagcctagtgctcgtgtgtgccagcactagtagcggattattctgcacttgttgtcacgatccacgccttaataacattcctgacaccacggagcgagctatcggccaaccacacgaacatgcgcctacgccttttcaatagaaaaatccccatccacccccatggaaagcaccatccgaagccactgtctcgtgcgtgccccgagctcgttttgctcggcttttttttttaccggccgcgccccatcaccatgccatggcggctgccactagtggagctccagcacaatccccgcttctccgacgcctgccacctttggtaaaaacaggaggattcaatttcaatggctgtcgctgccatgtgttttcacaggccctgacctaggctctgagagaggagagagagagagaggaatttaccactcggccgcccccgttcctgtgtcgcccgcgccggac

SEQ ID NO: 113442 - DNA, 304 bp, Zea Mays
gccggagttatccacgacgatgatatttgtgtgaccctgagcactatccaaacaatccgagcacgaattgcggcgccgacggcacgaatcacgcacggctcgtcggcggcgagctgagctattgatctgatcctattcagagtactgtaccatggtgagctgggttcagacagctgacagagcgatttgcagggagatttactcccaatttcatgtagtaacatgatcatcactctttagcaaagttatatcccaatgatccagctacaaccctatcatagcaaccatggccaaagtctcatta

SEQ ID NO: 113443 - DNA, 593 bp, Zea Mays
attgatgacatatttccactttacagagtacatcatcatcccagcagttttgagatacagctagggataaaactttctgaggtgttctatgttccaggagttcccaacttttgtgccatccatctgagtgaggcgatacgatccgggccgagtgacttctgctaccacgaagggtccttcccataagggtgataacttgtgtcgtccctcccccgttagaattcggcggaggacgagatctcctactgagaagaatcgttgtcgcacagccttgtcgtgatagcgccttagagtctgctggtaccttgctgattggattactgcgtttagccgttcttcctcaagtacatctatgtcctccagcctggtggcctcagcttctgctatgcttttgaagatcaaccttggcgccccaaacttgagatcagcaggtagcactgcctccgacccatagaccatgaagaaaggagtgtttccatgcaaggctcgacttggttgggttcttaggctccaaacgacatagggcaattcccttatccactttcctgcgaatttttcattcttgtcgaagacctttttcctgagtgcctcca

SEQ ID NO: 113444 - DNA, 402 bp, Zea Mays
ccctgagacatttcttcagctgagatacatgaaagacatcatgaacatccgcgagatgatccggtaactccaattgatatgcgacctctcccacttgctttaagattaaggagggtccaataaagcgaggggacaactttcctttgactttgaatcttctcataccccggagtggtgacaccttcaaatagacataatctccctctttaaactcaagcagtcttctccaggtatcagcataacttttctgcctggactatgcagttctaaaattctcccttatttgttgaacttgttcttctgcttcctgtataatctcaggcccaaacaactgcctttcaccagtttgatcccaatataatggagtcctgcactttctgccatataaagcctcaaacggtg

SEQ ID NO: 113445 - DNA, 291 bp, Zea Mays
ctagttttgcttgggaaccaagtcctctagagactataaatataggagtaatataaccgttttaaggatggtaaacatcttgtctggcctcaagggctttccctacacgttctctctccctcgttcgatgtcgtgccgctgctctgcagtctgcacccacgccaccttcccgaaggcggaaatcctgactcagacccctaatctcatattcctatgcacttcgcaaccgttaatccgttataggatcaaggatcctaccaccagatgctattgtcgatgagcgcctggtac

SEQ ID NO: 113446 - DNA, 512 bp, Zea Mays
aaacattttgaagaaactagaagggtttagccatttgaaagttgttggctaactgttgatatttagtatatgaaagaactatgcttcataaggatgaaagctcctatggcacaaacaaaatgtttcagttgcacgcaacgacttattctctatgttgaaatatatttgcagtagacttggcttcatggcacttagctgatgatatgtacaatggtgatgatgatatgccatattgctctgtaacaccaacagtttggtttgtaattgttccctttcccctggttggttcagactactttgatgaccttatcaatgttgtcaagtttgtcgtccagggaattattttagtgctctaatgatggtctaaatgttcgtttgcttattgggactatgtgttggcgccgatatgtgtgccaaatactggaacgaaccacctgagggtgctctctgcggcagcgcagacggtccgtggctctgggccagactatctgcgatggcacatggtcttcttc

SEQ ID NO: 113447 - DNA, 520 bp, Zea Mays
cgctccatcacctgtcttattgagaaagcttccatggttgaccttatgggcatgaaaccaaattggtttatacttcatagagattctcgttattcctctcggacgatgctcgattatctcccatagcttcatagtgaaaggatcaagttgcccaagaggagggtgaattgggccaatctaaaatttcttgtgacaattaaatcctattggatggtccaccctgccccttgtgcctaagagtgttgtctattttacacaagttttacaccctaggtttcaatcctattgtagcatgacattctagtaatgtaaaggcaagtgttgaattgaccaaatgtaaatgcccaaagtaaaataagggttagaaatatggagatgttttgttgaggtatcgaagagttggcattctccgctagttctcgttgggagcacccgcataagggtgctgctctccttgatccacataaggacaaaatgttgtctacggtttgattctttatcactctggcacggtgaatca

SEQ ID NO: 113448 - DNA, 276 bp, Zea Mays
gagctggtgcggtaagaggaggcagccagaaggagttagtgtggctgtagtgctgctggttggtgtggctgcagtgctgctgttattggaagttgtgtttgccggtgcttgttgtatagctgcttgattcggtgcttctgtgaagatgagtacagaagagatgaatcccaagagaatggaagaagaggctgcaacgaagggaacaattggtggtggttcaggtgggattacaaagagtgagatgatgagtgagacgaggattatgatccaggagct

SEQ ID NO: 113449 - DNA, 418 bp, Zea Mays
acttgcgatgggatgcgggccgatggtggtcctgtgcgctggatggcgacgaggggattgggttgcgattccttccatggcggcgaggcgtggattgcgtttggggcgtggaggatatgggcggggcatccgcggtgcatgggaagaacgattgggcggggtggtcctgcgcgtgtgggtcgtcggcgatgggattcctgcgtgctggatagcggcaaggcgtggatagcggcgaggggatgtgtttccttagcagtgacgggatttttccttccatggccgatgcattgatcggtgaggggattgcagtgaggaccatgcggatgcaggggtagaggggagagggcgcgcacgaggaagaagggagacactaacatgtgggtcgtatgcgtcgtgaggaggcagaaccgtgcatcac

SEQ ID NO: 113450 - DNA, 661 bp, Zea Mays
gcgttgccgaggacagaagcactagtagaaaagagctataagcctgcagtgggttcaactttttacagacggtttcggttatcttgcgccagtgatctagtggacctgactagacaaccgtcaggaaacctattttcactggtggttctaaaataatcgatagtgataatcgcatttccaccagcccctagcattggcttttacaatcacatcatatgtgtgttgcgataaatgcttcacaattgagtaggtgaatactttacacgatcatcacattttgctacaaaaagaagatatatagtgtatatatatagggtcagtatattaggaacccagtgcttccaatagttataagaagccccaaccaccctctggttcgcgtccaacgactaggtgcgtgcggccgggcgcgaccccttgccatgcaccaggtcaaaccttcccacgcgcgtcagtcaaacctctggtcaaacattgaatcccccgtgtaggttgcaagccataaattgcggttctgtttttttgcgtaaatagtgtaaatcgttcatagaaataacgtaaatagtttatagcgatagcataaaaacctcgtctagacactggaccacgtccacacgtgcaagcgaatgcatgtatatcctattattatggtagatccgat

SEQ ID NO: 113451 - DNA, 552 bp, Zea Mays
gaacggtgaagttagtatccctattaggagaagaagtgttagtagagttggtcttgtcaggaccaaggaaagggagttgtcaccaagtcaccgctcatattgaggagattaaaccatcagaggctatcaatgtagtgtcagaattcccagatgtgtttctcgaggagttaccaggtatgccacctgaaaggaaggttgaatttgccatagagcttataccaggcacaacccttatttccaagagagcctatcgagtgtccggaccaaagttggtggaactcaagaagcagattgatgagttgtcagagaaaggctacatcagaccgagtacctcaccttgggcagccccagtgttatttgtggagagaaagatggaacaaagatgatgtgcattgactacagatccttgaatgaggttactatcatgaacaagtaccccctgcctagaattgaagatttattcgatcagttgagaggagctagtgtgttctcgaagatagatctgaggttaggataccatcagctcagaatccaaccttcggatataccgaa

SEQ ID NO: 113452 - DNA, 504 bp, Zea Mays
cattggcacactagccgtctgcaacctagagggattacaagtaaccaacgacgccgaaggccatcgcatcgacaacctcattatgactaaagattggcgggccccaataacactgtttcttcaaggatactaccacccgagtgatgtcaatgaggccaagcgcctcaagcaccaaagctgggacttcgtactagtcggggactagctatacaagaaggggatcagtcaacccatgctaaattacgtcaccgaaaccgaaggcattcagatcctacgcgaagtccacagcggaacttgcggctcccactcagggcccagggccctcgctgccaaggtgatccgtcaaggatattactggccctctatagtctgcactgcgaatcaagtcacaaggtcgtgcgaagcttgctagaagttttctccctgctcgggcaacccttcgcaattcaccaagctgattgcccacacatgcccacttcaacgctgggggctggatattatcgg

SEQ ID NO: 113453 - DNA, 934 bp, Zea Mays
attggactgcgggttcatataacaaaagggcaggggctcttatgtaattatgctcggccgaaggggtacggggtgatatcggccgtttgatccaaaatctgcgcgccagattagacttcatgctagttattcatccgcgctcaaccatggccgtcggatccgggatttgcggttctggtttaatgactcgaaggggtacgcccagattcggtctaggccattcctttcatgatcaacggtctagggccaactcaccctagatctaatcctagctctacagcgattgatcaacggtcttggggcttcttcctccccatgaccccggacggctgcgtcacgaactggggaaacgtctagctcgcgtgtaggttgactaaccgcccaggagtatggatcggagcgtggatagaacctatgcagtaaggatgaaatgttgaattacatggatgtcttcttaccaagttcgaagcacaagtacagttgcccacggaggcttgcggcgtgatggcgattcctcaacaccgcccgcgaagctcccgatttctgacttggcgaatacgtgaatgagtcttcgcgcggtacggggtgatatcgcagcttgacaacgcccgcaagtcgttggagaacccggctcccaccgcacgacagagacgacgctcacaccctcactcacgacggcggtgaaacacggtggcacatgcacgaatggcttatctgctggcaaccgggacggcgatttctagggacgagggttttgtagggtgagggaaggcggggtttgcggcaagcggttgaagcccgcttccatctccagagagaaatacaagcgcaattacggaatgggacccacatgttattggtggaggcaccgtagagatgagatcatccgtgacctcagcgtgacgtcaccgcccaggatatattaaagaattcc

SEQ ID NO: 113454 - DNA, 414 bp, Zea Mays
ataagtcagaattgctaaaaggaattggcccatcaagaaccaagccctttgaagggctcgaatgtctgagacacgctccctccctagcgtaggccaaataggcctcgacagtagaccctatcacgactagagtccacgtctcacctatggtgccaataagcctagaagatgatccgaaggaatgccgacggagaccctgaagtgaaggtctttgacatggaaggtcgaggagttacgcctaagtagcatgcccatggtgggccttctaccaatcgtgatagacccactcgtcggttccaagcacactgttatcctagctgagggtacaataatgtgtataattataacttgggccgcattgttctctatttacgtcgttgtacagtatatttcgagaatgtgacgggtatttta

SEQ ID NO: 113455 - DNA, 675 bp, Zea Mays
gattccatctctgaattatgctggagttctgggggcgtcatccgcagacacgcttgcttaggcagtggcacttttgagtcaggcgttgggacattcatcagagaatttggcagtacctggtgcctccatgacagtccctgatgctggaggtaaaactgatgataattcaatcatcaataatggtgaaggcacaagttctgcacatgtgggtgctgggaaacatgtccaaaaagagacctccggtaagcaaccatactgttatcgatgtctgacgaaagggcacacgatgcaaggctgcactgcaaaattattttgtgacatttgccgcactgaagctcataactctggaaggtgtccggtgtttagaggagataaacccggagctttaacctgtgggtatgcgtttgacggtcttggcttttattatattcctcatgctccacggcagaaaaacaaagatgattctcattctgcgcttgttcgggtcactagttgttttttatctcaggaacaaatagcttcagagcttgggaggttggtttctactaaatgcaattgggagatagtcaagacaggaccgttcttgtttaaaactctctttccatcaagagaacagttggtccagatgatagaatggggagtggttcaaaccaaatttaacgcctctatgaaaat

SEQ ID NO: 113456 - DNA, 461 bp, Zea Mays
gtgatttggctttcagttctaaaaatacacacaaaatttattgagttattttaggtatgactgcaagcagagttgatcaagaagttgttttgttgacaggaagttgctgtatagaatactatcacatattagaatccatattagaatactatcacatatgcagagttgttttgttttgttgatcaacttgaaaatttgataaaaattagtttgctggttctgctttcaggtaatttaggagtcatttacagatttcgattgatcaagaatctcctaacaattcctatcaggaattcagaatgttgacatttcagataagacggctgcgataaagtggagcagaatgatggtctgtgggtaagtgtaaaagcgtcgagacaaggaacatcaagtaattcccctcccagactacctcatatgatcaaattaaaagagaaagcaagaagtttatactttattcc

SEQ ID NO: 113457 - DNA, 624 bp, Zea Mays
cccgagtagtgtctcgcgcatcgtcgactttggagggcagtcttcaatgccaagatgctggtccgagtcgcccgactcccatggaggtgatagaggagccctcagccttagaggtggctactgcagaagacccagcccccgagggtggtgctggcagttacccagcccccgagggtgttgccggtagtgatccagctctagtgggtagcgcaagctgcaacccagccccgagggtgttcaggtgggctctccttcccacacctccatggacgtccacgttgggtcgtcttcacatcggtctgatggggcgacggcggtgcatgcttctacagctttgaacgaacaagtcgccttagaggtcggcgagctagatgcgagaagtctattatctgctggtggggctgagatcacccctgacaatgcccttcaaattgttcctactgatcttccccgatcaagccatgacataggtccccctgccttgggtctgccatcattcctctccaatcttcaggtgagtcaactacttgccttttattgttcatattggtaaattatatttcttatgcttatctgtctttgatcacaggatttggttgatggaatgtctacccagctgaggtc

SEQ ID NO: 113458 - DNA, 2496 bp, Zea Mays
ccgacgccggctgcgtggctcgcctcagagccccagccgtatcctgccacccttgtccatgagcgcccgctatcagcgcagctagtccctccctccgcccgctatcttgagcggtggtgatggagtttactttcgaggatgcagcggaactgtgcgcgctcgtttcgaatcagcaatcccacgtcgacgagaagcggaggtcggtgtggtttcttctaccggcgcacctccgatcagaatgcatttctgtttttgcaccctgcatcacaaaagattcggggccctcttaatttgcaggtggctggagtcaatgatcctcagaccggatggctgcatcaggcgcgcgaagcgacccaagtttttgcatgaagtgtaagcgtgcgccaagttctgggatgcgagtagtgttctaattcaggctttttcttggtctctttaataagttgtccgaagtttagtgttttattgagtcaaccgggctgaattttttttccatatgacattggaattgatttttacagattcagtgctaaacccattttgggtggtaattttctcatgtgtgttattgtatctgatgaatcgttgtgtttcttaagcactcctcgcattctagatgccataacattcatatcaatgcttattcattctgaaaagctgataattgttttgataaggggtaccattatggcattatgtgtaatgacacccctcttcctctgaaatgtttccacatcgaactctgttttcctaatttatattctctctccctccctccctacccctctctctctctctccccaatccacctatccacaaaaaagaacaatcaggatgtatgtagtgagtagtgactatactaagtctaattgttagttctctgcttatgcaggtacttgcctgagtcatatatcaggagtgatgacgtaagtgttagtactttggaaagaactacatatagcttagtgtttattttgcattcttactaacatcagttcatggcttatgtactatgtgcacatatggtttctcccacttattcaaatccctccacctatgtgtttaggtctttaaggtattagcgaaatatgtgaagtaataaatactctattttcactgtataagttttattcaagaataagttaggtgtgtactcaaaggactttatttcaataatcagttaaatacataatgcttaaaacttatggaagacatgttctagcgccaagttaggaactattgcacatggtactctagtgctatgtctgatgttgttttgaacatggttcaatttaattgtatttcttcaaaaatggttttgtcatggctatataaattttccttaccctgcaatgatcttatgatcgttttggaaccatttatcagtttcctggcttatactagttaatataacagcaatttcggttgcattatgtcacttcaaaatataaaatgtgaatttagtggggaccattttttcagagatcttgtgataaagtgagaggtaacattaaaaggatttggagttcagagtgcaatggctatacccatcacttagttctggagggcctccagctttttgacttccagaagaaggaaaatgaaccacttggaccagaatatcttggtgtcatgcaggacacaatcagcaaattgacctatgaaacacttcagtcagtggcttgtgttgtcagtcatgacaaggttacttttgataagactaggtctgtaatggaaaaaattgtaaattctcaccttccaagttacttggccagcttggatcagaatgatattgcatgccagctattcaatatttttagaaatccatgcagctatcgatctggttctgtgaggcttgtcacacctgtgtcaccacaacttttgtcttctattaagcatgcgttggatgagcttgatggaatgccaatgcagggtcttgttgcaatgaataggaagattaaaggaaaatcatgtgccccaaaatttggattaactgctagcttttccaaaagaatgcatataatcaaaatgataagaaaaaggtgcaacaagattttaacagaacttgaggaaggtaattacctgccaaaggaattagcaaaggcaatgtcagtggtgaacttatatcagaagcagaagctgaaaaatgtgagtatttcacaatcagagtttttcccctttgcaaaagaaactatttctttgcagaatgatatcctgaatgccctttggtcacttccaaatctcaagcatgcgaagctgaaattgctgcacaccatactggatcatgattctaaatttgaaaggaagcacttagcaactttgaggaactacttgacagaatgtttgtttggatgtgatgatggtctaccagatgtggccctccaagccatagcctctataaatcagatttctagatgtcagcatgttgtgttaacggaagagagggaggatgctgaggtagatgctgtactgaacttgagcagtcatctcaaagct

SEQ ID NO: 113459 - DNA, 464 bp, Zea Mays
gtttttcactcattttgaaagggtggttgcaagcaagcgagataaagagttggatgctgaatacaactcaagaaagaaattgccaagaatacatgtgagaacacctatgttgatacaagcaagcaacatgtacactccatgtatttttgaagcctttcaagttgagtatgaaagatcattggcagcatatgctagaccaatggaaaaacctaatgagttcactgtggggattgttaaggttgtggatggaaaaaccataatggaaagggaatacaaagttgaactacattctaaagagatggactcgtgaaacaagatgtggttctatacaagatattcgtggagacaatgttatagaaaacccaaaaattgatgcaacaagacgctaccaaaatcttgcccgcaagttcctatcacttgcttctcgtgcagctgactatgaagaaatctattcatatattgat

SEQ ID NO: 113460 - DNA, 803 bp, Zea Mays
cgccggtgaggtcgccacgacggtagacacgagttcatgcgcgccagtaactccctgcccttccgaccgccgcgcgtcccattgaaattcccggccaccgtcgttgagccctataaattgaagcccccgccagccccgcaaggtcatcacccacccagccaccgagaatcgctagcaatcgtgcatcagtgagcttgaatttcagttttctcacaattcgggtttccgccaccgtgaaaccaacctcaccgcggccagccccgttccggtcagttcatcctcccctctccctcgtttgagccttctcataactctgtgatgctcgccgacccacgcaattgagctagaaaccctctggtcgccgggaacacggttgtctcgccggaacactctcggtcaccatggccagagccaaccaggcacccatttgcgaaattaggttagggggattgatcggggaagatccaatttggcattagctgctcggggacgccagtacttgccccaatcggccggcctacgagctcaccggagctcggccgcgttcaccgtcgtcgtggacctccccctgcgaagaaatagaacatggagggtttttgcgcaaactgtcagtgacacagaaaaatagtaactgaacctatccccagttagtcaaaaccccgagggcccttctgcaagattgccaacgcgggcgtgggcgcgccccctttttctgtgtttgtgggccggttgggctataatcggcccagtactattgaagcttttcctttttctttttcagtaaagctttaggaaattataga

SEQ ID NO: 113461 - DNA, 305 bp, Zea Mays
aacaatcttcttctcgtcagccattaagtctatggtcgttgaaataccgaagcttgaaatccaattaaacttgagaaagcaagaaagtttaaaatgacaagcacaatgtaagcaactggaatggcacaagaaatgaattcaatgccagcacctatttatatgtccagcgccccacggtttggtgggtcccgcatgtcagtgtcattcgctattctagcgaatggaaggtgttttttggacctttggctaaaggcattcgttcgcatcgcagtctaaatttgttgcaaagaaacaaatcaatactg

SEQ ID NO: 113462 - DNA, 437 bp, Zea Mays
ctgggttggatgaagcgggctcttggatccacagggctctacattggttatgggttaccaagtaggcctccatcaacttctggacgtgctcatccttggcttgcttcagggcttcaacaacaatggcttcacgactttccaaggcagctacacgggcttgagctgaggtgagatccacatggagcttacggttgagcttctctgcatcttctgctcgggcaatcatctgatggtggtgccgagccaagaaatcatactgtgcatccagggtgagcaagtatgcagtgaggtacgcgactctggggtcgtcctcaagcagctgcttcccttccaatgcatgcatcctggccatccaaactggacggtctctctgaaagggcggaaagaatctgagcggtgtgtcgaccacttcttcttcttctccatagatctgacac

SEQ ID NO: 113463 - DNA, 620 bp, Zea Mays
atggcatgacttgtgtcaatgacgtgagccatgtggtcattattatgggttttgtccatatgctcccctatgccgaccttccttcttcatagcttgctcgtaggtcctttccctacttcttgtgcgtgggttgtagggcttctggtaggttgcggcctaggggtttaggtcatgagtgggaaggggatgggtactgcccacgccataccttttcggctgtcgtgatggtggggagcacacaaagctggtggttcagtcaggctgaattctttagatccactcgagtggatttcgatcggcttatccgaccttcttgccaatttccacctcgtcctacccccatgtttcgacccgtgtgggcgtctcatgggtgaggtggaggctaagggctcgtaagtggttggcttggaacgtccctctcccttgatgcctaatgggcccaaaagtctagggttttataccccggcactttgttgcttgctaccaactcatcctccttgttttttgaaaacccattttgtaccaatggggtgccatcttatggagatggtatcaaaatccaaaccttgtttctctcaaaaatttctagctcctcatgcataacatcatgttgatttgat

SEQ ID NO: 113464 - DNA, 333 bp, Zea Mays
gtgggccactatgccaagaattgcccaagaaaccagcaaaggcaggtgccagcaccaaatcaagacaagggaagaaagcataaggtacaagtcaggcaagggaagctcaacttcactactctggaggaagtacctgagggagcccccatcatgactggtatcttttcagtttataatcaacctgctttaattctgtttgattctggtgcatctcatagtttcatcagccaaaagttcagtgctaaatgtcaactgcctttctatcactcaaaagggtcatttatgatagcaacacctgggggtaaaattgcagctaatcaattaaaccaaagt

SEQ ID NO: 113465 - DNA, 612 bp, Zea Mays
tttacatatggttgtccatgtgtccttattgaactagcgaattctctgtatgtgtctttttttcaggcgttggaatattatctattccatatgcattgtctcaaggaggatggctgagcttacttatcttcttaaccatagcaatcatctgtttctacactggtattctcctacagagatgtatagactcgagttcgcttgttaagacctatcctgatatcggtgagctagcttttgggcggaaaggaaaaatcatagtagcaatattcttgtacctagagctgtatcttgtggctattgatttcttgatattagaaggtgacaacttggagaaattatttccaaatgctaacttccatgctgccgggctgaaggttggaagcaagcaagggtttgtgttgatgttcagtctacttgttttaccaacaacatggcttcagagcttgaacatgcttgcatatgtcgcccttggtggagtcatggcttctgtcattttaatcgcctctgttctgtgggttgggacatttgatggggttggttttcataagaaaggtgtgcctgtggactggtctggtatgccaactgccatgagcttatatgcgttctgcttca

SEQ ID NO: 113466 - DNA, 338 bp, Zea Mays
atcatctgaacatacagacaaacaaacataatctttcatcaaactgttctagctggtccagcccaaccaaacaagataccctacattaggctgaatggctttgtcttgccttggcctagcccagccggtgcaagcaccctgatctacaaaaaacgaagattaggctggatggcccaatgttcttggcctagctggcccagcccccagcataaccaaccaagataccttgttgccttggtacagcccagccgatgtagacacccttgtctatgaaaacaaacatgtttacactttttcatggtggcaggtgtcatactcatactcttcaagttactccc

SEQ ID NO: 113467 - DNA, 453 bp, Zea Mays
gtcgtggctcgttctgtggtcgcggtcgatctgaccgtggccgtggtactcctcagtctaggggccggagccgtggctcgccttttcgtggatggggtcgtggctctagaccttcgatctgtcaaatttgtgaagttgccggccacactgctcgtcgatgctggtaccggatggatgcctcccttaatgatgaagaaccatccgctaatgttgccgccaaatcctcgtacaaggtggatacagattggtttctggatacaggcgccactgatcacatcacgagtgatttagatcgcctggccattcgggaacactatcatggtaatggtcaagtccaagtttggaacgacacaggtttgaaaattctccatactggtcattccttaattaatacttgtgatcggcctcttgcattgcgtaacattctgcatgttcctgagattaccaaacatt

SEQ ID NO: 113468 - DNA, 818 bp, Zea Mays
ttgcctatggttgcattggatgatatgccacccgctgtagcacgaatgcatgcatgatggagcttctctaaccagcagagtttttggccgggggctgagcaggtatggagctaggatagtagtaacgtgcagtgctccagcgctttccgaaagctatacatttcattgatctgttggcacgcgcacacacacgtacgtacgtacgtacgtagaaatgcatgacaagctagccaacagtcttggcaactccattagccaccacgaggttctcggttgttgtgcctaggcagtacatagagttatctctactctcacaatcaaccttacaaatattttagaaaatcaggaaaaagtaggcaatgtgctcaaaccttgaatcaacaattaatatatttcagtttgaatgcacccgcttttaacttggatctgatgctgttgtttcggccagggtaaggaccaacaaaagtgattcattccctattgccgggcccacacactaatccccgtcgatatttattcttgtgggtatttgaagaggccaatgagagttatttaatccccatcgactgcatgacttcttggcccgacgatggaaattaacttatgtcggcttcgccactaaaaaatagcactgacggttgataaaggaatccgtctgtaaaaaaatgcaccccactgtgtaggttttggtgtaaagcaatccccgtgcatcgttgtcatcaacacactagggaaaactatatatagaatccataaatgagaggggaaagaacccgtgcagaaatctttttaatttactgaatctttctgggaaactt

SEQ ID NO: 113469 - DNA, 663 bp, Zea Mays
caaatagtgagatttggacttaattgcaaaaagtacctcatacactccatatgcctaagtctaaattcagttgcataaggctgactttggagctctctacttctaaatctacaaggaatttgtccagggtcaatacatcaaatttgtagagctactaaaggagtataacttagtttaagtcctaagacatgagtgttgtacaaaatttggagttaaatggaccaaaagactggctgtcaatcgagacaggagtctgaattgtgaccaccagtgagcactgaagaactttggagtggaattgtgcttaatccagtaagtaaatgagtcaggtatctatagcctatttgtagccggtttatagagctacaattttgatacagatggatgaccacgttgccacatagaaatcggagatttgagccctaaaacttgcttggtcaggcgccttaatcaagttcccatggtacagtgacctgatgaagatcgctagattcagtgtatcgctgccggtgatccagcgccacgatcgtcatcgctgttatgattcgttctcagcaaagtgcggataacgactcctggtgaaaagatcttcgctggggatgaacttgggccactgtttcgccttgttgccgtgaccacttgcgccggtgacgtggccgagcg

SEQ ID NO: 113470 - DNA, 481 bp, Zea Mays
ttcccaagtgcaatagatggccttccaatgccgaagcgagaccatacaggatgttgtataattcctttcacatcttccctacggctcaggtcatttttcacgtaaaaccactccttgatccatgaatctagccacttcttccgaaacatgggcacagggtgattggcctaagatcgaggcatgaagctgtaacaaccaaaattgttgtgatactgttccttcccggttgccttcgtctgataagataactcatgaatattgcaaaagcatcatatggttctagtccttggctcctgatggaggtggaaaacttgttggagaacgacgttggctgcccgactaccacaaccaagatggtgtggcgccttgagcgacaggtacaccgtctcctgataactacgatttggggtggaggtcgacattatgctatccgactacaacaaccacaagggtgctgcgccttagcgatagttataccggc

SEQ ID NO: 113471 - DNA, 595 bp, Zea Mays
gactttcctacctaaaggattatttgagcaggtattaatacattattttttattgtcacacatgttatcaatcaagcaatttatttagattcagtatcttttatagcattttattttgtagcattttctcttcatttttaatggaaaagctttatttgtgtctgtcaaatttcatatgttcaatcgattaaatttgctttgctccccttttctgttccccaaatactattttgttttgacaagaaatgtggacttatacttaactgaatgaaatacctatgttcatttttcttttgtgcaaactgatctcctagaattgttcttttttctgattgctttatctcttaattggcttaataatggattgatgatatgtcttcagggtcttcaaatgtgacagtgtatttaaaatgtgattctgttgtctttgcatattgtgcactgtcaaattgtactatcttggtttatgttagtgcacattgtgctttcagtagtttaagctgcattttttgcgacttctcatatatggtagcttccttttttcccacactggcaaaactgaatttcattgcgatagtaacaaaattagagttta

SEQ ID NO: 113472 - DNA, 389 bp, Zea Mays
gttgccaagaccgatgaatttattgactgtgattttggtatgtaagatactggtaccgacgttaggtgcccttgtagcaagtgttgaaacatttatttccatatgacaggaggactatgtcaatagatctttataagaatagctttatgcctagctatgaggtgtgggtacaccacagtgaagacctagcttgttagaatgtattagaagtttagttacatgaagagagaggactatgatagaatggaagagatgcttgaggatgtatgacatgagcttatacccaatgattctgagaatccacctcgaccccaagcccgaggatccacctatgtcggaggttgaggttcttcaagctccttaaggcttccgaagagccattgcataag

SEQ ID NO: 113473 - DNA, 373 bp, Zea Mays
gttgtattctctgatgtggtgtgatgggatctgatctatccctagggtcccctggagggggtaattacatggtagacatcaagttggttacctacttcatgacaataccaagtcgactacctaattgtacatgaatccaactctatgattacaagtgtgttcggtatccgttaggatctttgccttatctgttaagatctttgccttatccattagtatattgatcatatttcttaatttgataagatctttaccatgtttatgcttctacagtccttctagtggtaggcttataataaggtctagattgttagatatgcatatttctcctatactacatggcaggttgattaaatgcttgatgtgattcaag

SEQ ID NO: 113474 - DNA, 1000 bp, Zea Mays
cttcttcttcgtttctttcatcttcggcattccccagtcgcttgacgtcggatatgttcggttggctagatattcctgcacctggtccatggtactgatttgctcagctaccactatgaactccacttcagccagctgacatggctaccccagttgcatgtttcataggggcctggtcatttcaaagtttaaagacagcggactcatgaccaaggtcatcagcttctctctgtttttctcatcagccttcatataaaaccattcatttttccagccggttggccactttgtgcagtagctgaggactagtgccttcgtatccttacgcgatacgcaaaattgtaacaaccaaaattttcgtgaagaccatctgccctggcctttgtctaatagtgcaactcgtgcacgcgacagaaagctttggcatcagggctcattccttggcttcgaagggcctagataaaggcgctgagcctacaacagcgttaggggtcagctgatgaagatatatttcaaaaaaatttaggacttccccaatcatctcgttcagaggaaatcgcagtcctgctctgaagaagctcttaaaaaccactacttcatcattctttggtgccggagtagtttcttctccagcaaattgaacaagtttactttcagcttctccaaaataccccagtttcatcatcatgggcatgtcatcttcagacatagtagatttctcaaaatctagatgactgggctttgttgggatcaaaatactataatcttcttcactttcatcaaaattttcttcttcaacaacagtctgttcagcttcggcatcaggagcaccttcgtcaatagctccctctgtcacaactatacctgatcgttccatgacttctgaaattggtgctgtctcagtgacctcagtctcttctccctcacgagacacccttgtagttgatcacactctggccattttgatggtttttacaatttcacgaagctaactcgtccg

SEQ ID NO: 113475 - DNA, 1777 bp, Zea Mays
ccaggtctgacatagtgaagcggtggctcctctccaagatggctaagttattactggcatcatggtataacctatccagattgtcatgagaggtcgcgagtgctcgtttctcctcctatgagcaagaagcaactttcagtatccagtaaacagtaagcacgatgaagtcaaccaaggaagcttacctcatgtgtcgtcctttcagagtcaagttgagaagtgagggaagaattcaaagatcgcgcgacgaccaatgaagcagaagttgggactagatcggcttggctctgagagtatttctccttgaagtcggagcactattgggtcaacttggcccaactttgtgaatacttttcttcaagatcagagcaccgctgggccatatctgacaatgtagctgaaaagggacgcatgattaagaacaaggatgatcgataaaaacagctaagaaaactgcaaggtcgctaaccagcgtttgatgccttcgagttagcaatctgtttctgaagtagcaaggggttccattgcattagagacagagcttcttccggaacagcggcaccgcacaacctcagctggacagacattccatcaaccaaagcctacgattgcagacagatgagcaaaaggaagataattcactaatatgggcaatataaggcaacaggacgactcgcctgaagattggagaggaacgatggcagacccaaggcagaagaagctacatcatggcttgacgagggaagatcagcaggaacaatttgaagggcattatcagggcaatctcagccccgccagcagatagcaggtttctcgcatctggatcatcgacctctaaggcaacttgttcgttcaaagctgtggaagcatgcgccgttgtcgcccatcgaaccaaggtggggacgacccgacgtggacatccatggaagtatgggaaggagagcccacctgaacacccttggggctgggttgcagctcgcgctacccaccagagccggatcactaccaacaacactcttaggggctgggttgtagctcgcgctacccaccagagctggatcactaccgacaacacccccgggggctaggtaaccgccagcaccaccctcgggggttgggtcttccgcagtagccacctctaaggctgagagctcttttgtaacctccatgggagtcaggtgactcaaaccagcatcttgacattgaagactgccttccaaagtcgacgatgcgcgagataccacttgggatacctccaatccatcgcctggaacctctaagcaaatagccatcacatcatcggcagtcggctctgtcagcatgtcctcggggatgacgtcctcaagtgcttgatcaaaaattcgatattgacagtccctgaagggctgacaagggttgacagggctggagaaaggaatatcacttcccccctcactacctctacagtgcctgctattcttacggatcagcaggacttcttcttcttcctcctcatcttcataaaatatgaaagcagcggctggtgcacaatcacgatccttggtgtcaactttaggaagggcctccgccggtgtctcatctggaaccggagcaaaaggacccacaccctggtccaagctcgacagtcgccgaagctgccttttcttccttttttcttcaacgggtgcaatcgatcggctcactcggcgcgaacgttttggtcgggcaccttcgggtttctgggctttcaccacttcaccaagttcttgcccatctgtgatagccattggctcgacga

SEQ ID NO: 113476 - DNA, 666 bp, Zea Mays
gcaagaaatgagcggtcttggtcaacctgtccacaataacccaaatagaatcatggtgcctggaggtattgggcaatcccatgataaagtccatgcaaatgtcctcccatttccaagatggtatgggaaggggttgcaaagggcctgctgccttcaaatgactggctttgatcctctagcaggtgtcacactcggatatgtacttggcaatctccctcttcattctggtccaccagaataaggatctgagatcatgatacatcttgttgctgcccgggtgcatggagaattttgaaaggtgagcttcatccagtatcttctttctgagctcagggtccttgggaacaaccaatcgatctccaaaccataaaattcccttgttgtcctgacggaagcacgtgtatttctctgccttctgctcaatcatttccctgataacctgaacacccttgtcttcaatctgggccctgactatttgctcttgtaatgtgggctccatcgagatataatttaaatcacctaaagaaacaacttccaggttcagcttgcacaattcatcacacagggtggtaactctcgcatccatgctcatacaattgcactgggcctttctgctcaaggcatctgccacaacattggccttgccgggatggtaatgcacctcca

SEQ ID NO: 113477 - DNA, 846 bp, Zea Mays
gcctcacaatgccctccttcctgcagaaagagttaaaatcaccagaacaaaactccataccattgtcagttctcagaactttcagcttcctctcagtctgcttctcaaccatagtcttccaaaccttgaaagactcaaaaacatctgatttttgcttaagaaaataaggccaaactctgcatgaattatcatcaatgatagttaacatgtaacgagcaccaccatgagaaggtatacgtgatggcccccacaaatcagcaagaacataatcaagaatattttcggtattatgaacagcagaactgaactttacccttttatgcttactaaaaacacagtgctcacataaatcaagggtatcagcatggcaaccatcaagaaggcctctcttgctcaattctgcaaaccaggtgcactcatatggccaaggcgcatatgccaaattttagtagtctcagaatcagaagcaataacagcattagcagaaccaggactacctcgaagcacatataagttttcagctttcaaatcacctttaataaccacaagagagccttttgttacctttatgacaccgtcaccggcagtatacttgtaaccttttgtgtccagagtacttagagagatgaggttcctggacatggatggaacatgtcgcacttcagtcaatgtgcgtacaatcccatcgaacatcttgatctgcacggtgcccatgccaacaacagtgcaaggggaattatcacccatctaaagagtacctccgttctgcacagcttcataggtactgaacagagattttttagtgcaaacatgatacgagcaagcagaatcgaggatccattgggc

SEQ ID NO: 113478 - DNA, 597 bp, Zea Mays
gccgacagtgctcgtgtcccttttttcctctgtcgtaactgaagggaggaagaacacaaagggtagaaatggctattccaccaaaaatcatctccactagatctgaagtgagagttagccacacaattttagcagtgaatctcagatctattgaatatgtcctcggactaggaccaagcaaatctctcacacgcgccttgattggggacgtaaacctccaatggttatggccccccccagttcacatgcgctatataaattgaggcagtgtcggcacggaatcaaacgttttcgctaaccctagctgccacactagaaatgatgtgagctcctactagcgccctagtgatcaaaaatcgcccaacctctccatggcatccgtagaccctaatggttctatgccactggccaccgacgctcctcccaacggacaagaggggaaacaaatccagagggagggactcaactcctatagtcgtctatgaccccacctactactgcggcgagtctccacctagccccgaagatatggtttccctatctatcttctcccttcgctctcactagcgctcaagttgtttacctcttactctatat

SEQ ID NO: 113479 - DNA, 284 bp, Zea Mays
ccccagcacccaaccagaatggccaagcagccccaacacaagtaggaggtcgtgcatgcttctactgtggagaacaaaatcactgggcgaagaactatcccaagaaagcagctaagcaaccgccagcagtcaacgccccagcaagacaaggagtaccacaacaagcaccagaagtttgtggtcaggcctacaaccgtggaaaggtgaatcacctagaggccgaagcaatccaggatgctcaggacatggcagtaggtatgtttctagtcgaatcctacccagca

SEQ ID NO: 113480 - DNA, 697 bp, Zea Mays
tacagggagacaaaggcagaagtggaacaaggccggaagaaggtgttcacaagattctgtagccaagacaataaaggcagaagacaatactacccttgtgtcatttgtaaatcacatatacaagttttgtggatgtacatgtaatttcatacgaagttgaacctctgcactaaaatatatgaacagtgccctgcataaagtacctttagccagatataacatctttgcatagtttaatctccgaagcaccttcacgctacctcgcatcaagaagccaaaggtacaattgcaatttattttgtacgaagaaaggaataaaataccaaggcactcaagatggcttatcatatttaactttgttacaatcttatgtgtaatcattattgtatccttatgtaatccactcgattatataataaccttcattctttagggagctgcccaaaggaaaaaacaccctaaggacgaaggatattactttttttaacattgtgttgtcgtattttttattgtatacaccaattgaaaacaagtgaccaacaactgccactcatctcctcaaacgcctcccctctaagacagttagtcaccctactcccacttcactttgtacggcacaacccacttatgcccatcttcgggtctttggctatgccttctatcccaacacctctaccatcacacctcacaagctcac

SEQ ID NO: 113481 - DNA, 413 bp, Zea Mays
tgcagataagcttagttcaagcttcggatatcctacattttcttccatttcccgacagacatgaatctctttattgtcaggcagacaataaaggaagtcatcttcatcatacccaccatacaccaaggaccctcgagggtattgcagatccctcgcgtaatgttgcgcttcggcagtttgctcctttgataattttttccctgaagcatgatgcactttgaattccaattcctcggtaggtgctacaggagcaggggactcagattctacggtagcaccctcttttcctagcattaatggtccttcagcaacctctgaaagtcttgcttcagcaccctccttagcagcctctaaaggtcttgctttggtagggactgagggcccagcctcaaccgcagcctgcgttgtgccag

SEQ ID NO: 113482 - DNA, 434 bp, Zea Mays
gtttcgtgcttgccggagacaggaaaggggaaagtggggtcgcggcggctctgggcgaaattgggagatgagatcggggctatagggccgtaagaggttgtgctttcaccgtgcgcaatcgatttgggaggaggtggagaaggcagtgcgaatcttgggttcttctcaagcttgcggttgaggcagtgagtgcctcgccgtggttcatgccgctatttaaagccacagcggaccgacaagcgatcagtggccgcagataaccttgctagcgcatgtataccacgtagaagagaagtacagtgaggtagaattgaggtgagagtgacacggcggcggaaatgactggtgcggtggccgctggtgaatcactccggccgagctcaggagatggcgccacgtatgaatcaccctctccccggcgttatccaatccct

SEQ ID NO: 113483 - DNA, 588 bp, Zea Mays
cctctgtctatgtctagctataatccatcaacattgttgagttttaacacggactgctattttaaaattcaggcacttcaatagctcacttgtatccccaactcgccagaaaacaatacagatcacgcttaatctagatgattcttcattaagtgaacaggtagctaaaccagatctaatgacttgactgctacaaaacttggatccaaccaacaaacaaataagtgccacaagctgctcttgaataatcctagtgtggctagaagtagtgtttctcagttaagtagtaccttattttgttgtgcaagtacaatgaagctggaaataattcaagaccagctgtctatataaacagccgtggtccgataatggacttctttaaactggaccaccattacgaagacatattaatccacatgtggtggataatggacttacaattaactcccattactttctgtttctttcataggaaaagaataagctggctcaaagataatggcatctcttactccaggaatactattaaaggttctgaaaaatattaactcagatgtgaaagtatgtggagaataccggtccatactt

SEQ ID NO: 113484 - DNA, 409 bp, Zea Mays
ggggcatactccgaggtcgaagataatgctttgtctgcagctttcgggggtcggggcaagaaaagattgaacagggtatttgatgcgattggcttcgtataccttgattaccaatacccgctacgagggcaagggaaaaagagaaagactgccacttcggccaccccagctgagctgaagagtaaaaaggtgaaggttctgacccaccgaccgcgttatattgaaccggtcgtggtgcctaaatttggcgaaggagcctcttcaactgccgaagcaaggtaagcatctctgattgtgcagagtgctgaatagccgattgtagtgccgaaggtacctacagttgggccagccgaagctagagatgataaggctgaagagccacatgtggaagaagtgatgaaaatgccag

SEQ ID NO: 113485 - DNA, 979 bp, Zea Mays
gttgctgtcaaggggaggggcctttgaccatcaaggttgttgcgagggcattgttcctagcactcactttgccttctcactggtcgatcgctctgtgtcgagcactttggtagttgattagtaaacaaatgagggtgattgaggggtaggtctgtcctcgctccaacacaagccccctgagggatgggttcaacttgttgagatgatcttgaaatcttttctgacaggtggacaaacactgccctcgatcacaagttgaaccgatactttgaagtgtgatcgttggagtgtgacattgcagatgtgacatagggggcaccttttgatgacgggtggttgcagcatttttgaggagccgaccagtcactataaaatggttagggtaggctagggtttactttctttcggcttggcttttactcacaatttgatgccgcatttcttcacgctcactttgggtttccaccaccattctcatcgttgttgtcaccatcgctatcatcgcatgctctggcggatcaagcagacttcacatccccgccaatagtatgtgtcacttccctattcctcatcgtcgttggccaatatcgagcccctcgtagcaatgtctccagtggtgaccagatctggtgcccaacgcgctgctatccaggagaccgtggagttcaggcgaattctagaaactggggttttttggatggggaatggtcgagttcctaggatggagaggacaccgaacccccaagggatgttgtggtcttcaaagcattttttggtgtaggactttgatttccatgccactgtttcctggtcgaagtcttgaggcattttcgtgtgcaactgcatcaactgactccgaacactatagtcgcgttgtcaaagtttatttgggcgaccactacttatagagggggcatttgattaaggttttcatgaaagattattgtatgcagtggcaaaaaagacagcgggtaacaag

SEQ ID NO: 113486 - DNA, 383 bp, Zea Mays
taatcgtgtttcctaataggcgcccgagattgcggagacgagaacggatacgatggagggtacctcaacggcgaaggaagcagtgacgttgatagcctaggaatcaattgaaccggtcgccgttcttgactccgagagtgatttcgcaaccacacctccccgtctccccttgctaggctccgattccgccccgcggactttgcgaaacgccacggccaatgccgacacactagacgacagtgtagaggatgtaccgcggcggtggcgattttcagcacaccgcacggtgctcacgacgacgtgggtctcgaaaaggatagggccacgattagatgggttaggttcgtcctttatacgtgcgtaaggttccgcgccctcggtca

SEQ ID NO: 113487 - DNA, 347 bp, Zea Mays
gtcgcgataggcactgagggcctagctacggtttcagcttgaatttgtgcagcttcggcttgcctagtttcggtttcggcctgcgatttagtttcggttggaacgactttctttacaaaagcaggactcaagaccttcgtcgtttccagcacaacatccagcacattcgccatccttctcctcttaggagttgcggcagaccccttttgtaccttggacactgttgcctctgttggagggctcaaaatctctagcattttcgttatttcttcaatttttggcccttcagccttatcagccttcgtctcaactagcttgactgaaagtaacttcgacattacagctgg

SEQ ID NO: 113488 - DNA, 421 bp, Zea Mays
gtacaagaggaggtactaagctagaaccaccagcctctacatcgtgtggacgaggggtaacaataggaggtggtggttggtcatcatggtcatcgttcgaagattgtgaggagtcaattgtagcttcgtgtaactcaagcaatctaaactttgtatcctcctcacactctaaagtaatgctccctacaagaggtgtactatctttgtgagtcccagggtgcatgacatcctccatcggaggcttgtaaactccaaaagataagtttgtagctcttaaagcctcctggaactgagggggacaaattagctaagcaagtgtatggcaaagaatgtgagcatatggtagctgatgctgggctctcagggcatcaaatacaccatcgaatactgagcgaccaaggctcccagtagccacaactga

SEQ ID NO: 113489 - DNA, 678 bp, Zea Mays
cttggctccggcgagtgcgccaccgtgctctgtgggttgcgccgccgtctcgggttaaggtgagagagaggtgcgatggccgtcggatgtggagcggacggtcccgattagatcaggcttacctcttcgtcccagtgaaccctggccgtccatccgcgaacgagcggatacagttcaatgtcagttatttaaaatccgagccgttgatgcgagatcctgcggctgtgtgagcgtaccgattcggtattaagtagatctaatcctggccactgaagtctaatccaacggccagaacggcccgataccccttcgcgggtactctttacaaaagaaaccttatgtttttaggatttagaacccgccgtccctagcgactgtgctctgtgtcttggtgttcttacgcccgagacccctgcacttctcatattttagcgcccagtccagaggagtttaaaaacgaagaaataatatcagaaattcatttttaatacaaaaacaaatctagaaacttgtgaaattcatagaaatcccattcttgatccaaatttaaccattccaatttctaaaattttgtaacaatattctctatcacttagtatctctgttttggcataaaaacagtaagaacattaatttaacatttaatcctattataatcaccttaaatcttaggaaatt

SEQ ID NO: 113490 - DNA, 864 bp, Zea Mays
gcggtagtaaaatgtttcagccctctctcattgcagaattcagtaaaccaaattgagttgaactcaccacctctgtcagagcgaaatgctcaaagtctgcacccactttctacttctaccaatttcttcactcgcttgaaacactcaaatgcctcagcttttgtcatcaggagctccaaccacatgtaccgactgaaatcatccacaacaagcagaaaataattcttacctccaagtgtacttggtctgatctgaccacacaaatcaatatgcagtaagtcaagtggcttatcagcatgatagtttgcaatctttggaaatgcatgacgatgttgttttcccaatgcacaaccatcacaaaattcctcaactcggtctatcactggcatgccctccaccatattcttggaaccaagatcacgcaaggttctgaaattcagatgaccataccttccatgccacagacgccttgtcttctttcattgccaccagacaaacaggagtggccagctgcatcttcaacagatagagacggttcttgaccctaggtgctctagctagtagacaccgatcaacatcatacaaattgcagaaatcactctctatcacaattttatagcctccctcctcaagttgaccaaggctaactatgttactttttaacttgggtatgaaataaactaatgtgagtaccttgtgacctttattcctggtctagagcagcaccgatcccatgcctttgatctcgaccaaggaaccatcaccaaaacaaactgtgcctcccactgaagtgtccagcgacttgagcactgcacgacacccagtcatgtgattgcttgcacctatgtcgagcacccatgtttc

SEQ ID NO: 113491 - DNA, 526 bp, Zea Mays
aatttatcatggatacaaagaaatatagccatctctatgatcatctttaggtcatatttctaacataaattgcatgcattagaagtgcaggaactgcccccattgaatggtgagggtagtttgcaaggtggttgttttgtttgacatgtggatttagcatgctttttaaggtagcggggcaaacaatgacattagtgtacttaaccagttgttgttcactgatgtgctcaatgagaagcaccaaatatgaacttcacggtgaatggtcacgagtacaaaggatactatcttgctgatggcatctacctttggtgtccaatgtttgtgaagatcattcccctctcatatactctgaagcagtggatatttgttgcatgctagaagggtgtatggaatgacgtagagagagcatttagggtcctcaaggctcgcttctattttctcactaggtcatattcatgatgtttgcttagctgaaagctactgtagctgtggcatttccagaccaagctatattatatggaag

SEQ ID NO: 113492 - DNA, 284 bp, Zea Mays
aacaggaatagaaggaccggcaccctgatccaagctagacactcgacgaagacatctcttcttcttcttctgcccctcagcaggagaagtgggttgattggctcggcgagaatgtttcgggcgaacattgtcagacctctgagcgtccaaagctttgccggcctcagggatgggcaccaccaccagtgtttcaacaggagcggcatcagaagaatcctcagctaacatatccagcatgacacttatctctacgtcacttggattcaaaggcacctcaaaatgaa

SEQ ID NO: 113493 - DNA, 367 bp, Zea Mays
ttgcacttcatttgcagtgtcatagatatataactgtataaacttcggaggagaaccatccggaggtaatagagacccaacacgatgataaacttgaccacatattttgaatagcggtggtccatgtccatcgtttactgatttatctatttgagcacccattgatgtgaaggcaaataggcagttatactgtctgatattcttgatgaacttctttgatgtgtgatcgccatcaaaccttgcaagagtggatagaggttcgggtcttggtttgtacggaggaatatcaattttgccacctttgcaacagttgttgtaaacaattgttccatcacgttgtttggctctaactctctccccataccag

SEQ ID NO: 113494 - DNA, 666 bp, Zea Mays
gtacgcgcaagagcacgtcgaatcacacgaaggtttatataggttcaggccgctagaatgcgtaacaccctattttttgtcgaggctatgtattggagtttcactggtgtatacagattataggcgaactgtgggtggtggaggatgagttctcctgctggtctaatggtgcgtggttgctatgaaaatgttaatgagctacgggatagtgttgggatgtgatgagataagatgctttcgtaggggtacccctcggccttatatagatgactagagagttattcttttacaggttgtcactatctaactctacccgaattcctttacgggttgtcaatatctaactctactggaatcctcttttaacgcaagatgcattcatgcttattcgaagttcggtcactttttcagtcgagttaacgccgagtgtttagctcttcagatgtgtgcaacctcttcgcgcgagacatcaacgttccggtctgcgcataacccagacatccggtctctatttccttgggtcaagctcgtccgatctaggcctggttgtgattcgagggtttgtcttgctagacatgccattgggagctcatgaagcgtttatgtgttcataagaacacagagaatatttatctcctacacaaccaaacacccccttaatatcac

SEQ ID NO: 113495 - DNA, 449 bp, Zea Mays
gccttctgtaagtctctggtgccaccacttcatcttaccttgtttgatatgtcacccgagctactttgtatctgcctgccgcccaccgacggggatggttccagcgatgcactctctttcacagcttcagttccaggtcgatgttgtcagagacgtcagccttgatctcgctcaacacagatttaacacagattgactgtgtcctcgctctccttctctgccttttccttgtcggcgtccatagctttgtcgtcgtccgtcagtgaggagcggtgggactgctcgacgcattcgctagcgccaccatcgatcagattgcctatgcctatcatgaggctagaggggactccttcgtggtcgctggtatcatgtcctccacacaggacacgcaatcaccgcagcccccgcagtagcccccaccaccatcgtgcctgaaaggtaaaataaac

SEQ ID NO: 113496 - DNA, 530 bp, Zea Mays
cggccgtgtacgtcctcaatcgtaccatgaccaagggaaatggcggcaagactccatacgagctggtgaatggagtgacgccggcagtacaccatctgcgcaccttcggctgtgtcgcccacgtcaagcacgccgcgtcacacctcaagaaacttgacgatcgcagtcgtccgatgattttcgtcgggtacgaacctggctccaaggcgtatcgagcctacgaccctggaacgggtcaggtccaagtcagccgcgacttcgtcttcaacgaggacgcctgctaggattggaagggcgagcagaaggaggatctcctggacttcactatcgaccccgtcgtcaacacatttcctgaatttgcttctgtgtcaggttctcgtacacgggagctcactccgttgggagcgcagacaccggtccaggcccactcgccggcgggcacacctgtgccaccgtcgggatcaccgtttccagcaacctctaccgcgagcatggggccaacggtcgagctggtgtctcctcccagccgg

SEQ ID NO: 113497 - DNA, 679 bp, Zea Mays
ggcccccgggctgactgatgaggcagaatcccttgcgagggacctggccaatgtcagtgtcatgcctggagcaccaccagtggcatgcgcatcccccgcacaaactcttttggctcctgtggcgtgggaagtactagcactccatgccataggacaggatgaaccaaccacgccggacctctcacctgcaggttgggaggagccggtcactccttggcaggacatgtcaagggctgggggagaatcgtctatgttcaaccccatccctttctagccaagcttcaacaccagctctctcgccatcttttatgttggtctccccttcccctcagggtgtctcgactccgaggaagaagatggtccgggcattggcctagacttcttcgggctgcgcgaccccaagtccatgctgcagttcctgtttgcatgcaacgatttactctctgacagctcggatggctacaacaccgatgagggggttatgacccaactcgggagtgcttccacacaggtcacgaggaacatgacagagggaaccagctcgacatgcctcaggagaatgacgtgccacccccacctactggggaggcaggagaggggggtggggtccaaacccctcctaagagtcacatggcccacctcgagtagctctgtgagttgcatgccaagcttggggaag

SEQ ID NO: 113498 - DNA, 1101 bp, Zea Mays
cggaggtattcttggggccattcaccgagttggagtaagcaggtcctgatggcttcagctggggacagttgttcttgaagtgactgggatctccgcagtgccaacatgcatttgctggtggttggttgcttgcaactaagggggcataaaaggagctctgactctgctgactgaaccgtgatgaggtgggtccagctggtctactgaaacttggtcccttgggtggaaatccaaaggatcgagttttctggtgccggtcttgctactgagctcagaggacttggaatttcctcttgagatggcctttctcttcttcctttgccctttctacttgtatggctttgctggagaggtgcgagaaactgaggaagtcttggctggctaggatggtcttgagttctggtctgagccccttcaggaagcggggcatcttattgacttcggtgctgacgtcatccggcgcgtagcgggccaactctgtgaatttgtgcacgtactcactgacagatcttccgtcttgagtcagttcccggaattcatcttccttgagctgaacgatcccttggggcacatggtgctcccggaaagccgtttcaaactctgcccaggtagcatctctgatggtaacattgaaggtatcccaccaggctaaggccattccggaaagttgatgagcagccaattgaacacgctgattttctgggcatccgattgcttctagtttcctcttaatcatgtgcagccaatcgtcagcatcgaggggattgctagatccggcaaacatgggaagcttgagcctcaggaaatctcccatcctgtcttgtggtcttccaccattcgggcgttgattttccagacttcgagtgaggacctcgatgagtcgggtttggttggctagaacttgggctaaatctaggggtagttctggaggtgcggggaggtgggtctcacttccttctctaccggcttctcttttagctcttaggggaaaccctgctccaatcccggaggcggtaggcatggttttatccgaagccatctgccatgggaagagagtcactattatgcacatgccattttttcaaccaagttattttattc

SEQ ID NO: 113499 - DNA, 557 bp, Zea Mays
ggggacctgattagggacagagtagaggtatacgtcaatgacattgtggtcaagactaagagagggtcgaccctagcggaagacttaaccctggtcttcgacaagctgcgggcaacacgcacgaagctgaacccggacaagtgcgtctttggtgtctccgcgggaaagttgttggggttcctggtttcgtactggggcattgaagcaaacccagagaagatcaaagcgattgaagcgatgaggcctccggcccgtatcaaggacgtccagaagcttacggggtcattagccgcccttagccgcttcatttcaaggctggctgagagggggctacccttcttcaagctgttgtggaagtccggcccattctcttggaccgaagaggcgaaacaagcctttcaagagttgaagtagcacctggtgtccctaccaatactggtagctccagaacctggggagctgttgtatttatacatcgcggcagctgcagaagcggtgagcatggtgctggtcgtcgaaaggacggcacaagaaggccgggaacctgagggctcggg

SEQ ID NO: 113500 - DNA, 606 bp, Zea Mays
gaaatgttctatttgccaaatattattgcactaggtccctagtaccaatctcggtagctaccactctaaattcaacttcggccagctggcacggggagccaagttgcatgtggcacaagggccttgtcattccgaagcttaatttcatcgggatcatgaccatagtcatcaatttttccctcttcttctcatcagcttttatatagaaccattcactcgtccacccggtcggccacttggtgcggtagccgattaccgaggccttggtatcttttcgatacgcaaagttataatagccaaagttcttatgaaggccatccgctatagccttcgtatggtagtgcaactcatgcaatcgacagaaagcttcagcattagcactcataccctggcttcggagagcccatatgtaaacattgagtctaacgatggcatttggtgttaactgatgaagatatatctcgaaattctttaaaacttctcctatcatgtcatgtaaagggaactgaagccctgccctgaagaagctcttgaaaacaacaactttgtcctcttttggctccggaatcacctcctccccagtaaagtggacaatattactcttgg

SEQ ID NO: 113501 - DNA, 453 bp, Zea Mays
aaggattgactgtggtgccaaagatgcctatagacaggtcagccgaagccaaagatggtgtggccaaagagccaaagttggaaaaaacaacagtgttgccaaagagcccaccggtagaggcagaactgcgaaggtgacaaaggctcccgccacaactcccaagaggaggagaatggccagcgtgctagacgctgttatggaaaccacaaaggcattgactcctgcccctgcgaagaaagttgtcgaagctgctacggcccaaggccgaagccgaagctgggccttcagtgctcattgagacaaagcctgccacgactgaggataaggctgagcaagaatctccaaatgccggcatggcagcggggcaggacgtgacggaaaaagctaaatctcctgctcccgaagctccgtccgaagatcttgattatattattcgacatgcttcggggaaaa

SEQ ID NO: 113502 - DNA, 942 bp, Zea Mays
agttaaaatatagaatatatggattatctaagattatggaattctttttgtatttaaaatcatttttagaatttagttttataaatactagtgtttgttggacggtaggagcaatttggtagaagcttagggtcttggttgtaaataaaaggacctattggaaatattctttaaactaacctggattgcggattggttttaagaaacttgagggtcttttttgcattaatccctggccaaaggggtatcggcccacatcaaccgtccgattgggaatgtctggtctagattagatctcgaaacataaccgaaccggtacacaaggcctagttaaatccccatccaacgctcacactttattaggtttgatcaagttccatccgtcagattccgaatcaacgatccagacctgacctacgaaccggtatgcgatctcctaaccatacccgctgatgtatggttctatgactacaagtgctagaaaccaaatgcaagtgctataaacattgtaataggtctatacaacatgtctaagagtgcaaacctcacagatttaccattctactccaagttgcatttctagacccctatttcagctcttttggacttaaaaccttcaaattgcctttaaatggatatgtgctcatattcatattgaattgttagtccatgtttgtgcattggacacataatcaccaaaatacgtagaattagctatctaacacatttctcttttacaattacttttgagtactttactttgagcatttatatttaaactattgtcatggtaacatagggtttgttttactgggcctatcacttaacactttaggcactatggcgaagttgcgcatatggttaggcgttaattgttacatgaaattttagaaaagcccaattcacccctagttgtcggcgtttcgagaccggggggtccct

SEQ ID NO: 113503 - DNA, 1401 bp, Zea Mays
ttatgctctccactaaagacccaagattgtgatttctatccaacctatagtaaaatttaaccaaaaaagtagaaaaatctagaaatcaaaaacatttaggccgaaccatagtaggattgaagagatagtacaatttatgcagaccataatcttgggtctttagtagatcataatggtcaaaaagccataggagttatccttcgatacatagggtttagggtttggtgtttagagtttcgagttaagggtttggggttcagtgtttagttgttagggttaaggatttagggtttgggcaaatttttctgtctttatacattaattaatgtttggataaatagtactatctctacaattttactatggtttgcccttaattttttatgatctttcgattttactattacttggtttacattttaatatgggttggatacaaatcacattcttgggtttttagtggagaccatttaatggtaaaaaatccataggggtaagcattcggtacatagggtttagggtttgatgtttaggttttggggattacggtttagggttttgggtttggggtcctgtgtttagtgtttggggttgagggttatggttaagtgttttgggtttgggaaaattttatctttctctagacatttactatggcctagataaaattgtactatctcttcaatcctactacggttttgcctaaaattttcgttttctagattttgctactcttttggttaaattttgctataggttggacacaaatcacaatcttggttctttagtggagatcataatggtcaaacagccatatgagttatccttcgatacatagggtttagggtttagagtttcgagttaagaggtttgggtttcagtgtttagtgtttagggttcaggatttggggtttgggcaaactttttctgtctctagacatttattaaggtttggataaattgtactatctctataatttaccatggtttgcacttaattttttatgatctttgtattttactattacttggtttacattttaatattggatggacacaaatcgcattcttgggtttttggtggaaaccatttaatggtaaaaaatccataggtgtaagcattcgatacgcagggtttaggttatgatgattagggtttggtgttagggtttagggttaagtgtttggggtttggggtttattgtttagggttgagggttatggttaagtgtttagaggttgggcaaattttatctatctctagccatatgatatggcctggataaattgcaatatctcttcaattctacaatggttcagcctaaaaattttcgatttcttgattttgctactcttttggttaaattttactataggttggacataaatcacaatcttggg

SEQ ID NO: 113504 - DNA, 495 bp, Zea Mays
gctgcatggaatccctaaagttgagaaaagtaactgggttacatgtgcgtgtgcgagcttgcatcgatgcataccggtaaccaatcacaagcacgtatgctgccaacacatttggtgagcctgaacggctcgacaaccaaacacgccaatagaaaaacaagaatgaagaagaaagaaaacaagaatgaagaagaaacgtccctcacaaatgttcatagaattcctgtgatttttccgttccgttgacaaagagctccgttgccatccctacctcgctctccgtttcggtattgtccagttggagcagaagcaagctgacaccgaagttcatgatttggggcttatttggttgtgagagtggtatagttgcctgagccagacatcattacatgccatcgattctgagtatgtagcggctaaaatgttatgtttggaagagctccaaccaaacaagcctctgcttgaccagagtcccggcccgtgcacacccaaccc

SEQ ID NO: 113505 - DNA, 1592 bp, Zea Mays
ccaaaaggagggagaagagttaagagcaagagtaatgtatcacacatggatcctgtccatctagagaaattattacaaatccatagaaataaagaggacatctaaacacaggtgggcgggtcatcggcgagcgatgccaagctccaaggactagtcaggagggtcttcacatcaacccatttggcaagcagtcgagcatgagggtgaacctaatcttcaatggcatctagctcctcgtcactacggcctatggcaaaaaccttctacgatcatggaaacgttgatctcatcaaagtgagtgaccatcttccctagagccaagccgcacctgtggaacgcatacttggagacaacgcggtccatatggcctggtagcgccagtagccgatcgaataagggcaccttgattggaggtggatgagtaaggttggtgcacaccctaccgatgactaggcgaaactcttagaactaggcgctccgcttagagagagcagccgccgcctcaactgtcgcattgacggcatcatcacgagcaagcgaaagctcttgcatactagcctctgtcgttgcttttgcctcctcggctgttcccttggcctcctcagcttgataaacattttcttgagttctaaaaaggggagagagctaaggcggccacaaaagacatagagtaaaaggcataagaatgaggaaaggaacctacctctattggcgtcgcgctctctcgagagctccgcatccaccctctccaaatgaacattggtttcattaaggcatgactcgacctccttagctcgaatactcgcctcacagagggcctcctcctctcggaggtggtcagcttcgacccaggcaccctcgcccttaaagcatagctaggccgccttgctctcaagtcgcttgttcttggaatagagctgggtctacaatcctcctcatctaccctcggtgccttaggggagggagagggatgaccctcatggagatctcctggaagcaaaggaaccatgagcctacgaggggtagaggaagtgacgaccggtgggggttgagccagaaacttggcggcctctaggggtgacacagcctcggattggacgcccgccccaatggtgcttggtgttggcggtagcaacaacaggcccagagccacctcctccacctatgggtaggacagtgtcgtagatggtaactcgatggttcgtgccaggggcatgagaagagaaagagtcgagcgagtttcagcaggtttgggccgcttgaggagtgtaataccctacttcttgggatgactttgtatgtgggagatgtttacaagtggtgtctaccaagtggtgaagtgctaacgagatgaaaatgatggggaccccccttggccttatatacacgaccgtagggcacttcccacgtacatgttgatcacactcttccaacttatctcctagctaatagtgaacatacttcgcttatcctgaggaaaaaccgacgcctccatttcgagctatccccggcgttcaaggatgtcgggcgcgggaaaagcaaacaatttcaacgggatcatgcccaagccacgaataatccggacatgagcc

SEQ ID NO: 113506 - DNA, 333 bp, Zea Mays
attcggagttggaccatacaatttttcactaaagaaagcaataggtttacctccttgaatgagcactcctccaatcccaatgacgctcgcatcacactcgagctcgaatgtcttgtcaaaattaggaagttgcagcagtggtgcttgtgtgagcttcgacttgagggcatcaaaatcttgttgttgtgttggtccccaacgaaacgacactcctttctttgtctactcatggagaggtgctgcaatggtgctgaaatcccgcacaaatcgcctgtagaatcctgcaagaccaagaaaacttcgaacctgcgtgaccgtggtcggaagtggcca

SEQ ID NO: 113507 - DNA, 489 bp, Zea Mays
cgaaacttggcggacccttttacaaaaggattagcacgtgatgtaattgatagagcatcaagggagatgggattgaagcccacatgatgttatcatacagtggtaacccaatctatgtgatcggagatctcgtgaattagtaattgggaagaacagactgtttgtataacaagatagtacattattttacttgttttccgctagaagatgcgtactcttagtactacaagggaggttgacttttgtcttaatgtattctgaggtctttaataggcaaggtactgccctgcagggtacacttgtaagaatacacctatgtgagtttgactgtgaggtcacaatctatgagatgtgggtaatctcaaataaattcactaaaagacacaggagcatgatcgtaacgctccaatcagaggcatggctttaggcggcctagtatcagtgatgcctataggtgaaaccaacttacacaagactagcaattcaaag

SEQ ID NO: 113508 - DNA, 811 bp, Zea Mays
ctagttttatcaaggttttaaatcttccgctagaggtgctgctatctccggtcatagctgtttgtagagaatgaagtttttagctcatatgtataattgaactgctaatagcctgatttacttcactattagctgtttgaaaagagagacaactaaatgacttagtcctctattaaatactacattctatatacgatagataatatgcggggtacgacagttgatggagggcgttaataccatcaagtattgtctctttaatctcataaaaccagcaacttcgaactctgtgagaaataacgaggaaccattgttgaatgttggtgagagcctcaccctatcccatataagacactagtgtctaagtggagtaacctctgattgtggtgcctgagcaagaagtgcatctgagtcaatccatatacaactacctctcccacaaatggtggcatggaggatctatgcgactagggtgaaatcaactagagtgcggcataatccatccccaaatggtggcctaaagagccttgccacatgggttatatgtggtatgtctctgtcatgagggcacctgggtggattacctgccatagcatagattgagagttggtgtctaagaagttggaaacccaaacaactatttgatatcacgagtatatagcttgtagtctctgcccctaaatcgaaaccaaaaccactcgtgatcaagattgaaccatattgtggcatagaagaccctgacccactaatcacacatgtatacatatgtctattaacagtctctggagtctcataaggtatatcaagtgct

SEQ ID NO: 113509 - DNA, 340 bp, Zea Mays
cgaggcccccatgattggctaccgcactaaatgaccgactggctggactaatgaatggttttatatgaaagctgatgagaagaagagggagaagctcatggccatggtaatgagtcctttaaagctgagcttcagcatgactcgacctttgtgcaatatgtaggtagggtctccctgccaagtgaccgaggtggaatttagggtggtggatgagcacattagcactagggactcggtgcaggaatatttggcaaacagaactttctcaacctctagtggatggggaatgccgaagaagaaggaagagggaaaaaagtatgaacatgtatgccttccttat

SEQ ID NO: 113510 - DNA, 525 bp, Zea Mays
gactgatcaagtaaataatagcaagaaaactatcatcccaaaattctaattgcatataggcttgtgcaaggagggaaagaccaacttcaactgtatggtgatgctttccttcagctaacccattttgttggtgtttgtaaggacacaatacatgatgggcaacgccactacccatctcgctcgaccccaacctcttctaaaagggtccactcctgccttagcatgtaaaatgatggggagaggctcatgctcaagggacaacaaaccttgtaatcaaacactagaacacccattcacacttgtgcaccagatacttgggaactcatccctctctcgccctagtacagactcagacaaggtaacacgagcaacacaaactggacatagggacattctactcaaactagtataaatccttgtgttctattggcatatcattcgcttctaaacacacaaatcatgataatcactagatattggtatgaaacatcacatattgtgttgagcgtatggtgcgactcatcg

SEQ ID NO: 113511 - DNA, 562 bp, Zea Mays
gaagggccccttcgtcactatcatcctctgccacctcaaacggtgggaacgccacataacagtgggagcacatcacggccgccgagagtcctgggaggtcttcgacttcgcctcccgacacataaaaccaataatcataccagttgccccacttgttgcgggcgtagggaactagttccacaacttccaccgaagtcttcccggtcctcgacgtaaaggtgcacgatccaaactatggaatcttgcttccaatttttctcttctgccagtgcagacaataattcttggcgaagacctctacggagggctgaccgccatacgaagtcaccacccagacatacttcgccagggccaccacgacattaggtgtcaattggtggatctgcatgtcatacctctgcaagacctccgccacaaaacgatgcgcaggtaggcgaaggccggcgataaagaatgcctcgagcacaactatctcacgctctggctcaggaatctcttccgcccctggaactcgtccaactccattcccaaaataccccaactgctgcatgtcttgcacgtg

SEQ ID NO: 113512 - DNA, 398 bp, Zea Mays
caaccggagagatgattcgtgcggggtttggggtggtattagtctggccgaccatggcgctgccacgggaggagcttaactccggcgtcgcgagatagaagatgccaggatatccctagatcttagaattgacggcttaggttagttagcgctgccactcggcggaggttaaatcctgaccgtcgatcagtcatcctaggcgcaagattcaacctcggattggagagctcgggaccgtagattgtgaatcatgcgcccatcagcgcatctccgattcacgtagcaaggttttaatcttgaccgcgagatttggatccaacgaccagaattcatggataccctttcgctgtggcgattttgcagaagagaccctagaagacttaagaatcaacccgccg

SEQ ID NO: 113513 - DNA, 587 bp, Zea Mays
atagtggagtcctacactttttgccatacaaagcctcaaacggtgacatcttcaaactggcctgctagctattattgtaggagaactccgaatatggtaaactcttatccaaactacctccatgtttaagagcacaagctcttaacatatcttctagcacttggttagtcctctcggtctgcccatcagtttggggatggtaggccgaactaaaattcaatcttgtatccaaggactcgtgcaacttcttccaataccgagaagtaagctatgatcctcggtctgatacaatctttttaggcacaccatgtaggcagacaatccgtgccatgtacaactctgctagcttggctccaaaatacgtggtctttactggaataaagtgggctactttagttagcctgtccacaatcacccatatagagtcatacccagcagatgtgtggggtaatccaacaatgaagtccatgccaatctcttcctatttccattcaggtatcttaagcgggtgcggtaaaccagcaggtctttgatgtttcgctttcaccctctagcaaacatcacatagagccacatatgaagcaaca

SEQ ID NO: 113514 - DNA, 281 bp, Zea Mays
actgcgttagccaactcatgtaagtaggagtcgattgcgtaagtgattgtgatatatatgttgtgtcttggattgcgataataataggcaaaccgatgtgtatggtgcatagcggcctaggttgttgcttgggttaaccaacttgttagatgtctttagttaagctcgtggtcacgatgaattgcttgttgtagtcgcggataaaaagtattagtgctcatgtgatgtctaagttgaaatgcaaattattaggtgaaaagcgctttgatatacatatatgc

SEQ ID NO: 113515 - DNA, 456 bp, Zea Mays
gaagatcggccgtggaggccgagccatgttgtttttgggaagtcgactatcaagcaagggcaagtcgaagcgatgaagggcaaatattttcatgatgtttctatagtgagggtcgggggaaagcatcgttccccttctcgaagctgatgagctagtggtttttaagagcttcatgaaagttgggcttctcattccactccacaagatgttggtaaggttctaaagacattcgagatataccttcatcaacttacccccgaagctcttatcaaagtggggttttttatatgggccatgaggagttagggactggagctagatgctaggtgcttctgcaatattcacgatctatcttaccagacgaaggcaaccgggaaagagcaatatcataacaacttcggttgttacagcttcatgccccgctctgaggcaaattaccttgttcctacattttgg

SEQ ID NO: 113516 - DNA, 301 bp, Zea Mays
cgcttggattgaaggctaaacagtcacacattaatccttgaagtagtaagagccaaaggtctaagaatcattgcataaattatttacctatcggactcataatttgtattccaaaatacgcctatcaagctcgtaaatattgtgttcagggaatagcatgtaggcaaagataactgtgaattcttgcctcctacaactcttagtaccaggcttaggggcgacttgcagtagcaatggccctgcctctgcactctcatggtccaatgttttcattagacccttctatcaaataaaatcttat

SEQ ID NO: 113517 - DNA, 271 bp, Zea Mays
gggagtgacgatggtccgtgtctgacgacgatagctataggtgatctgatctgcctcttccttctcggggtatctcaacctagggttaggataaagggttgtgccgtgatctattttggaaggcgaggttcgtgatcccaagatgggaacaagagaaagtagcgtgtgattagtgttggtgttggattctgcgttttgttcgtgtattgacttgtttttatgtttattattttggtagattcagattcactaaaatgctgatcaactatgc

SEQ ID NO: 113518 - DNA, 1348 bp, Zea Mays
ctcattctctactctctatgtctagccatatgggttcagtgaggggcagttcgaatgggtgaagtggtgatttgtgtgcttttgtcaattccgagcttctatgcgtgaaattttgtaactcacaggtttctcgcagggcttggatggttatctctactgtaggggtgtgtacgacaacacttttagctccactgatcccgttgcttttagaatcttcaaggcaaatgaagctttgatgttctcgccatggagtattccatgtgccttctcaactttgatgttctcaccatggagtatttctaaaaataatgtgttcattcagggattggatgatagccacatagaggacaaaaaggaagagggactcagtttggagggctcatcagttaccaaggtgattatagttttctgcttgttttgttatgttgtgactgttgcataggagatttatgtgtggtttctgcatgatgtgttgttagggagggggcctattggatgccatgtttgatgttccaaaggtcaatttcctatcggtaagatgcatctcaatagtttcacctatacttttatgtagtttcctgccctatctcaaactctgttctggtgtttcaatgtatcaaaggttttgcagaagaaaattacatcgtttgatggtgatgaggtagatgcttgtgtcacctattcatttggtgtcctagacatgaaaatccatccagtattcttcaccattgcatctaagttttaatctatttactactatgtattccatattttgttggagttgcaatttagtgatgagagatgaatcaaaatgttgtgcttagatgcacaggctctttggcaagtcaccttttaatagggatcagtaatccacattaatgtctgcagctacagtttggctccaagagatagatgaaaatattgtgattagaaccacaagctattggcacatgacatgtctgggatcattgagatctactatcttttgatacaaattgatgtttgcttcttttatgctatatattgttgcacttacaatattaaaatgaacatacatcatgggcaatacatgcatgataacataacatagtgttttcttgtcccatggtttcatgagtaaacaccttatgattagcatgctcatttgtttaattcccttatcatttatgaagtatgaattgaaagcatcaaattcttagtatatggccaattgtttcaagtttatgtggaaatgtgtatttgtgcatctgtttccctgaactgctatttggagaatagagtccattattctaaaactcatgttcagtccttggggattttgtcttataattctcttacatgtttgttt

SEQ ID NO: 113519 - DNA, 709 bp, Zea Mays
ctttgctatttcacttgcctctctattcgattttttttttgtctttggtgtctcaggctctcagctcctttatttacttgtgtggctatggaatcctaggcatgaaaagacctcatgataattaattctgcgtttcttctgtcctaaaatatgcagcaaacttccagggacagggctcgatggttctctgggatacgagctctccaacctgttctctctgaaaacactgtgagctgcaacttgtctgtagcccttttcttttcttctagtcaccgtgttgatccacaatttcataacatgcagagatttgagcaataacaacttgcatggttcaatcccttaccagctgccacctaatctcactaatctgtatgcggcttttgtccctcgtagtatatttgttctgtagtatctggcgtttcactgtgattggtgatgcaggaatctgggtagcaacaatttcaatggcaaccttccatactctatatcaaatatggcttcgattgaatacctgtaagttgctaaccagtgcagccttgcctttttacgttttgtttgcacaatatactgttagatcatgctggaacagtataatctactgaaacttttgatgcagtaatctcagtcacaactcaatttctcagcaactgggtgatatatttggaagcctcaactcactttcagacttgtaagatttcttatcctttct

SEQ ID NO: 113520 - DNA, 370 bp, Zea Mays
tttgatcaaatatagtatcgtacaaactgcggcattcaaggcacaatgtgtttcttaaattagtgcacgagctttgatcaaatatatcacgcttcacgtgaatcctatggccgccatatgtgactttgagagcctccttcccttcggcagcgccccagtcgacgaagacggcggttgtactggagttggagcagtggctgcgtgcctatggcacaactacaagccttcttctttcccttggaagttcgaactggaggccataggcacgataggttgaaaattggattcattggacaccaccctccaatttgatccgtagaaaaatggatcggaggagcaaggaaaatcagcccgtgaagcagcatgtggg

SEQ ID NO: 113521 - DNA, 665 bp, Zea Mays
attctccaacaaaaatggtaatctaagtcagcccaagtgcatacgctctcgctctgaaattttatacgtatcagatataattagttccacctcgagaaaaaatttcagaacattcagctactctcatagaggacagtggaacatgcaacagctagcaagtgggaaccggcagtctagtgcgttcccagcgtcagtgtttcggtaagaacatgtcagtacaccataatttattgccatgggacagaggacactgctgatataatgatgcggtactgtgctaaacaaagcacccttgtttagaattctttgcgatggtacaaacagctaagcgcctcgaacatatgtgctgcatccgtacactcctccagcatgagtactgcatttttttcaagtagctaggacacttcttacatttgttatccatttctgaagggacctagcgaaacttaatggtactactcatcaagaagtaaatgaccaaaactgtattatgtgcctgtgcttcatcagagtagcccaccaaaagtcatatgctcacttgagctgtactcattattaaattggccaaatagtgtgtcctaaaaaaacccccgactcggacaataaactagagtgtaggccagtcagatataacctgctccgaagaattaaaaacgtctgatcca

SEQ ID NO: 113522 - DNA, 481 bp, Zea Mays
gtcttttctatgttggttaagccacacccgcactcataatacctaatagatggttttttacacccacacccgttgggtactcgctgggtgttggacactcgttgggtgacaacaattgtaaataattaaacaaaagcactacaaaaagcaagagaaacacatataattctttaaaatcacaccacatataattatttagaagcatataatatataatgcaatatcaattgacctgttaaagaagtgaagatgagtagatgacctagagttttattaggttggatcaaaattataggtaaataaggactcaaagttagtcttctaaagttcattggacactcatcggtgtaaattcacacctagccctaacccatcattttgccaatcgatcgatcgggtgtagacccatggttgaaatttgacacctaaacctacacccaataggtgtaaaacccatgggcaccgcccacatccatgggtg

SEQ ID NO: 113523 - DNA, 788 bp, Zea Mays
ccgtgtcgactacgccacgccctggcgatgatcgccgccctagtggcccatggccgtcccccacctctgatgacttagagtttgtagggatggccaacggcagtggggacctcatcttcgacgcgctctgcatggactcgaactcggatccgagttccccgcgagcagtgaggaagtaccccccccccaccgacgaggagaacgaagaccgcctgaccattgcaaccccatcgacgagacaagcaaagtggggcgctacgtgtggtaggacacggagggatcgtcgaacgtaatgcttccgttgagagcccatggtagatgcccgaccgaagtagatccgtgctctacttgtaaaaccctcgaacggttatgaataaagcatggttttcgaaatgctctcgacgtcaaacacggtaaacagggggagaacctcagctaaagccatggtcctttctctcctttttttccctttttttctctctccctttctcgttttccttaggtgactttcaagataggaagcgtaccagcagacgaacgagacacaatgaacaacgacgaacttgacaaagtaacgagctggaacccccatcgcaaaaccagctgtcacttttttctcttctgaaattgagtgcttcaagtttttcttacctttcgtcggaagggtctttggcgaaacatgacacagcatcgctctttctttttctagggcaccctcgacgggaaaggggcctcgggacaatgtaacctaagacccccgtgatcgaaccttgagggaaacattgaac

SEQ ID NO: 113524 - DNA, 404 bp, Zea Mays
agcagaagaagatccggtatccagtcgctcaagaataacagtttgctacagaacttgacaacagccaattggtcggggtagaatttaacagccaggtgatggttggtatactacttgtctgtctaaattgagtcatccggtctagtagcattatgactagaatagatttgatgcatcagaattcaggagcaataatttccagggcatatcaggggagtaaagtgcacaaatatagtcccatcagttctctttcccccacatattgctttcacgctaactgaaaccaagagaagttattatcaggccagaagtcagaacccacgtcttgttatcaacaatgatgtaggtctgtaggtgaagggagaattcccatcctgttgtacagttttttcatcagatgtaac

SEQ ID NO: 113525 - DNA, 479 bp, Zea Mays
ttcaatttgaaatgtgagtaaatacatatatagagagataatgcacaaaatttgagagattggcctgagatttggaaagatggaggtcaaacggcacgaaaaggagtttgaattttgaattgtcacagagtggttggaattgaaaatggagcatgagatgacatgaaactgagccgagacttcactgacaggtatgagaataagtgaacgaagtgcttggtttgaagtttggttgaagagaaataattttgacactcggctctaaatggttcaccaaaatagagaatttgatgcacatatgaagtctagaacatcggataggtgtgaaattgggcatgtgaggtattggtagtagctagagtgtgctggaaaaagttggggtcgatttgagctcgtttgattggtttgggcatttcaccgaacatttggtgcggcggggttgttttaaggtgtaaaacctcccaaggggagaggattac

SEQ ID NO: 113526 - DNA, 467 bp, Zea Mays
ggttcagtgcaccgccgccggtgatcccgcgccgtgatcctcgccagcgttgtgattcgtgcccgatggcgcacggatatctacgttaagtgaaagatctcgcgcaggggatgaagttggggcactgttactgcccagttcctgtacccacttgcgcagcaacgtggccggacggtcatcgccgtggagatcgccgttcaccgcgattgcgccacgccgtagtcctttcaccacatacccgaagccgtggcaagctaagagttaccgcccttgagtcatagtgtcgttgaacgccacgacgagctcaccagtgcaacatcctgtcaccaccgtgatccaaatctccttcaaattcgggacaaccgtggctagctgctataaattgagtgcactgccagctccgttagcttatcacgaactcagagcacccactcccgcctccgattagccactgtagcgccctaatt

SEQ ID NO: 113527 - DNA, 499 bp, Zea Mays
gtgttccatactagatgataaagcactggaaccgcgcatctgcgttctccggcgtgggctcgctacgttactgggcggcgccaccgactgaagctgggggaggaagacgggtgtctaagattagatcctagttagcctttcattccatcgaagcagagtcgtagatcttttatccgatgatgcggagcaaatcaagcaatcataaaatcttgatcatagatctcggatctgagggccagaatcgcgtatcggttcaatagattgtggatatagtctgatccattggatgggaatcagtcgactgtagtataagggtaccccttcagccgagcaaacttgttaaagtgttcctatgttattacgcattcaacccaccatccccatagtaaaaacgtcgcaaaagagtccttgtctttgaaaattgaaccctaagttattggagtttattacccgcagtccaggaattaggattaactctagaaaatgattttgatataaa

SEQ ID NO: 113528 - DNA, 436 bp, Zea Mays
ctgaaacaaggtttttagtaatgttgggtacatgaaggatattacgtaagacaagaggacgattgccagtattaagagaggaatgacaaatatgtgtaattcacaaacctgatccattgccaatgtggacttgttcattatcgtggtagcgttcacggacggcaagacgatccagatcactagtgatgtgttcggtggtgctggtgtcagcgtaccagtcggtatcaaccttcgaggatgcggtggcgacgtgtgcggaaggaggttcctcggagtaggagtcatccatgcggtactagtagcgtatggtcgtgtaaccttccttatcgcaaatatggcagatggggcgagaagtagagctaggcaggcgacggtcgttgggacgtgatggagcacccccaccaggccgcccacctcaatggccacgggagcggcc

SEQ ID NO: 113529 - DNA, 393 bp, Zea Mays
agaaaaaactttatttgttctttactttactttacattaagatactaacctgctcacaaattatttcctatattcgcatctacatcgatctattctaccctaattcaaacccaccattacttactacttaaatatatgtaggttcaagaaaggaagcttacatatccaaagcaatgatgacgatgtgcaggagaaataaacacagatgtttagagcgccaaattttcttgcttttgacacatgtcttctacaaactttggtgtaatccgatctaaaacgtatttgcctgacaaagtacctacgaactttcttttgatgtaaacaatatatccatgccgaaacaaatactacaactagaaaggcatgtagctatagttctgacatgccatcttt

SEQ ID NO: 113530 - DNA, 431 bp, Zea Mays
gcaagatggttgggaagttcttgttggtaggcaacttcccccactcgctttaggatcttaaagggtccaataaagcgaggggacaacttccctttaactttaatcctcctcataccccggatcggtgacaccttcagatacacgtgatcaccctacttaaactccaagtgcctttttcggatatctgcatagcttttctgcctagactgcgcagttctcaagttctccagtatcaaccggacttgttcttctgcatcttgtataatttctggcccaaagaactgcctttcaccagtttgatcccaatacgaaagagttctacattttctgccatataaagcttcaaacggggacattttcaaactggcctggtaatcgttattgtaagagaactccacatagggtaaactcttgtcccaactgccaccatg

SEQ ID NO: 113531 - DNA, 436 bp, Zea Mays
agaccaacacatgttcatccgaagtgaacttcacgacccttaactaatcgggatgaacgaacagaaacaaggagacatgatctttgagcaacatatgaccaacatgaactagtactaaactacaaaccaatcgcaaacgtaaataccactcaacctacacaacgaaggcacacatatcctgtagcagtttaggtttgaaacatcaccttagttcaactggatcagggccgatgaagaagaggaatgaggctttgttctagagatttgaaggtcctgtcaggaaggaacaatgaattaatttcacacgcggatcccagatcgacgaacctcatacaaacgatgatggaacgtgcaaaagattgagcagggagatcgaggattaattaccaaaagaacacatgtgaagaagtcgtcgggccagtgtgcaacaaatggt

SEQ ID NO: 113532 - DNA, 463 bp, Zea Mays
atcatttgtctctgccccacccattcattttcaggaattatgctaactcattaagcgatattggccttgtaccaaatgatttatgcactgcatcggagtgttttttttttgcttctccatatcctgcttagtctttgcttcagagaaaagggacaagcaccagcatcgcttgagcctttcttggccgaaatttgcttctccgggatcctggtgattcttacatcgtcatgctatagaacaggatatgaagtagtgagttatgacgataatatttgccaatccatcacttgtggttccccaggatcaaatttcgatggtttggggtggggacagtacgctctgttaagttttgagcaatcccctatcctggaggcttggccccaggaaaaggaatacaaccagctagccttttggttttcggatggctggatcttagtccctaagctgcttcggttattcccct

SEQ ID NO: 113533 - DNA, 538 bp, Zea Mays
gtctgaccttgccttcgtctggtaatgtaactcgtgaaccctacagaaaccctcgaaattcgcagtcataccctggcttcgaagggctcatatgtaaaagctaagcctaactattgcattcagtgttagctgatggagaaatatctcgaacttctttggtacctcaacaatcatttcgtatatcgggaaccaaagcccagcgcaaaagaagcttctaaacaccacaacttcatcatccgtcgtctccaaaatgatttcatcgccagcaaacctaattaaatcatcatctttcttgccaatatacccaagttttttcatcatgtacaaatcttcagccttcacagtagatttcccaaactcaatgtgactaggtttactcgggcaaaggatattgggatcttcttcgtcgtcttcaccttcagattcaccttcgacttcagaattactatttttgaagcacacatttcttccctcggctcagcaatgccagactccctcatcacttctaaaattggagctgtcttagccatgtctgtct

SEQ ID NO: 113534 - DNA, 438 bp, Zea Mays
gcgacggagacttctctgcgtgtgatgggtgatgaggatattccgggtgagagtgctgggcataggcggcgaagggcggtggcgaaacggagggtgagtgagttgtcgagaagtgataggcgtcatcatggtgaggtggagggcggtcgtcttcgtgtgaacgggactgccaaacgggaatagttgtccttgccggctggggcgagtgtaggtgagggtgagctgcgaaatctttttgagggtgaggaattgaggataatgctattcaactacagggagatgggtatcatcccgaaggttgagccattgtaatgtgtgatgccctcgctgtatgtatgtaactatgatttgtatgatgaggctgcgtgccttcgttgatcctgccgcgcccgtaggcggcttgtgttcgggtgcttttggggaagtcttcgtttttgc

SEQ ID NO: 113535 - DNA, 476 bp, Zea Mays
gcttatgagaatggaaaagctttatccttttcaactttatttgttttggcatcaatcaccaaaaagggggaaattgtaagtgcaatcaacctcaaattgagggttttagtgattacatgacaaaacgaataaagtttgtaacgagtttgctcctagtgtattttaagttattacaaatataggagtatcaactctaatactatgtgaaaacggaatgcatcgaaagcatcatatggcacttgatgtgattccatgcgatgatcatgtaaatttcatatttcttgtgtcataggattcttcgtcggcttaagagatttttcgccaaggtaaatgtgtttgcaaagctcaagtttcaaaaattcaaaagctatttcaaaaatcaaattctttggatgctctatgagttctactggagtgaggttttgggggttagagaacctctctgctcaaaagcagttgaacccgcccttaggggt

SEQ ID NO: 113536 - DNA, 413 bp, Zea Mays
tcagttcatatagcaggtatatgtgtaacatctaatccatttggttctttgtttgttatgacagggatgtttggaagatcctccagcgaattaatctcaaacgtcttcaaaacgtaaagtaggcatctgtatggaatttacacattctgcactttcatacattttagtacctactacttcagcttttagttatttttccatcagcgtgtatatgttgagccacaaaatcaagaattcaagatggataatgaaaaaacttactctcaggtacgattgcattacatcgaatcacatactatggccttgttcgcttcaaattgttgtggttgtgctgtggctttttctataacacaacatactattgtacattgtacagcagtagccacagctatagccccagcaaaaagtagcgc

SEQ ID NO: 113537 - DNA, 918 bp, Zea Mays
gaagtgactggggtctccgcagtgccaacaagaatttgttggcggttggttgcttgcaaccgagggggcctgaaaggagctctgactctgctagctgaaacgtgatagagtgggtacagctggtctattgaagcttggtcccttgggtggaaacccaaaggatccagttctctggtgtcggtcttgctgctgagctcggaggacttggaatttcctcttgaggtgacatttttcttcttcccttgccctttccacttgtatagctttgtttgagaggtgcgagaagctgaggaaatcttggctagctaggatggtcttgagttctggtctgagccccttcaaaaagtgggccatcttcttggcttctgtgctgacgtcatcaggcgcgtagcgagccaattctgtgaatttgtgcacgtattcactgacagatcttccaccttgagttagttccagaaattcatcttccttgagctgaacgttcccttggggcacatggtgctctcggaaagcagtttcaaactctgtccaggtagcatctttaacggcagtgctatgctagggccatcctggaaagttgatgagcagccaattgaacatgctgattctctgggcatccgacggcttctaccttttttaatcgtgcacagccagtcatcagcatcgaggggattgctggatccagcgaatgtgggaggcttcagcctcagaaaatctcccatcctgtcctgtggtcttccaccattcgggcgctgattctccagacttctagtgaggacctcaatgagtcaggtttggttggctagaacttgggctaaatctaatggcagctctagaggtgcggggaggtgggtctcactcccttctccaccggcttctccttcagctcttaggggaaaccctgctccaatcccggag

SEQ ID NO: 113538 - DNA, 707 bp, Zea Mays
cgtcacgatacaacctatcaaggttatcgcgagaagctgcaagggcacgtttttcttcctgcagacaagaatcagctctcaaatacccagcaggcagtaagaacacagcagagaaagtcagagcaaacttacctcgttagccaccctttcagagtcaagctgagcactgagagaggaatttgataagttgacgtcgtctaaagaagcagaaactcaagctaggtccatctgaccttgagagtacttctcctcgagcttagagtaccgcccgaccatatctagcaataaatggttgaagaaggacacttagtaaaaagcagactaatcaagtggccaaagaggaaacagaggcactaaccagcatttgtcatctccaactcagaaacccgccgctgaagtagcactggattccaatgcatcagagacagagctctttctgggacaaaagcaccctgtgatcttagccgatcagccatctcgtcaaccaaagcctggtattgaaaacaagtgagtgcagagacaatatttcgctcgaaatctagctatatcaggaaaaaccaagttacctgaagattggagaagaatgaaggaagccccaaatcatgagaaaccggttggtgactcgatgagggaatatcagccgaggcaatctgaagagcatcattagggattaactcaacatcaccggcagaaatcaaaactctagc

SEQ ID NO: 113539 - DNA, 649 bp, Zea Mays
gtttgaggacctttgacttgaaagaaatcagacaaggtacatgatcagagatatccctaggtagcattgttgcgtgggtgtcagggtaacacaccgaccattcttgcgacatgaaaaaccaatcgagtctctgaagaaggggctccctttgcctgttcgaccaagtaaaggagagaccatggaggggaatttccatcagatcaagctgactgattgcctcgttaaatttcaacatcaagttaatgtccccccagcgatatttctattttcaggcctacgcgtaaggttaaagtccccaacaatcaaccaaagcttttccgagggcatattaatattggagaaccagtgtaggatttcaatttttccgatgcggagaacagggcgcgtaaatgtttgtgatgatccaagattcatccgacgatatagcagaaaactcaaccgagagagcatactcattctgaaaaatagcactgccaaccaacttcgaactattccaaacagtaatgaaaccccccgaatttcctatcgatggaacaaaagcaaactcatcaaaggaattgggacagaaccttctgaggtcagccctgtcaaaaaattccttcttcgtctcctgcaagcagatgatgtcgcatttggattccctaatcgc

SEQ ID NO: 113540 - DNA, 1151 bp, Zea Mays
aaaaaagatggccaactcccctgaaattaaaaatgcaggcctcctgtaaaaacactgaccaggagctcttggaggtctttagctccagtttagcaccagagaacacactcatctgccactacctgtaggattgtcatgacatttagccttatgccattaaaaatacattcattctgatgcttccatgtatgccatgccatcaggatgatgagagaattgaggcctttcttgatttcctttggcaatttttttattgcttggcagcaccaacttgaaaatctacttgtgttagtctggggcgtccttaggatcaatcccaacttctgaagaaccacagtccagacatgttgggcacaaacacacgagacaaggaagtgttggttggattcttcagcttgatcacaaagggagcagacagccgcgtgaggaagaccactcttggcatgacgatcagcagtctagcactctagcatcgatttttcactgcaagtcaaatgaaaaatttgcaccataggaccacccaagttttccaaacccttttccacgagcgaacccttcctaaagataaggtattatatgcagatttcctgctgcattgctcagattttgtgagcttccagcgctactgatccgctactcctggttgcaagatcaaaccatcgaccagcttcatgctttactaggtgcttttggcacaatctgtatgattgtttgctaccaattacttttttcatattgtcacaaaaggcattctgactaaatcataatctcatagtttcatcctgtgccctcctactcatcgggccatgctcttcaaacaatgcacaaggaacttacatttgctatatacctctcattgactatatttgtgtgctactagtatgtattgacagtatactgatgaaacttgtacatacatacatgcataaatcttatgcagtgaaccacaagtgataagttcatttactacattttagaaatggtcctccatactagtcagttttgacttgttcagcatcagtttaggaagtcctggcttctgtagtctttttgcttctccatccactagacctaacaaagctcctgtgatgagccttgtatgaatctattttcaaataaccaataacaaaaattatgatacaatgcatcca

SEQ ID NO: 113541 - DNA, 555 bp, Zea Mays
gagtgtggctatgcacgatcctacaggcgacctcaatgataccacttcagcgcctagggcaaccgatttatctctctccctctctatatagtagaaagtggaccacctctgtaaggttcttcacttgaactataaaagggaaggtcctcctcctccttcaacacacacaaactgtaacagaattcttagtctatgctatgatcaacaatacattggactagggcacaagcctgaaccagtataactctccatttcacaccccttcttctggaatcctcgtgattcaccattctgagtgaatccgtgctagcatcccccaccgaccacaaattctattgtcactcgagggaggagggaggaatgttcttgtatatttgcaccataaaaaaatgccgatggtatgtacggcgggagatgcaagcaacacagattatatcatagatgcaagtagcaaccttctcacctgcatgcctggagaggtggtgctcctctagcacctcccatctatttaattgctcaccacacttgtgatagttgagccccctggaacccttg

SEQ ID NO: 113542 - DNA, 414 bp, Zea Mays
gggtagctcgtctaaacaaggggtggagaagggtggtttggtgaatttgaagtatatgtacctatacagaagttagttgggtgaaccagatgacgaatggttgaaggccattgaatcaatgtgcaatgaaattttgggaaactatatgaaaaagaagatgaagccttgaccgctgctttcgggctcgaggcaagagaagattgaaccaagtttttgatgatattcgttttgtttaccagattattccttcccggcttaaggtaaagggaagaagaggaaaagtgctttgaaatcaccgatgactgtgctgaagcaaaaaagagtgaagattttggcgaactgaccaaagtcatattatgaagtgagggcagtgatgttgcctgtggttagaacttttgttgaggaagcagttat

SEQ ID NO: 113543 - DNA, 825 bp, Zea Mays
ccctaaagggagaacgagaaaggatgcaccgccgctcccccctctttcttcccatatgtcctcttcattcaaggaagagtggagacagtgcccatctatgatgacgagcccaccgtgctagggggaggagccctccagcgtgaggcacaacgacgacaaaataggcgtcgtaacgtacgatgtcaccacaaagctagagagcatgatccagcccaacccgtctctcgagacaaagcttctgagatgggggaaaccccaacgaaaggacacactgagagtgccacaattcccaccatcatgatcaccgccactctaaggagcacgagtaggaataggctgagcaggatgcccggatccgacgcgaaaacctgctcctcgctcggaacctataccctgacttcgctaaggcactaaatacaccgagcgaggttggaggggtcttggcgcagatcgccaatggcctaccatgcacgccagacgtgtagggctatcgacaagtgctcacccatacagcaaatcacctcctacctctcgcccacccaccaaacgacctgtgtcacaccatcaacatccaatgagaagcgcgaagcaacatcaatgcttcacgtgatcgccaacacaaggacgagataaggcaacaagaggagtatgatcgggaccacggtgcaccagcgcgcagccgtgcgaccagaaccgagtcagtagcagcttccaccagcagcccgaccctgggatgatagagccgacatgatgcttgctcacctccccaggaccgacgacacgatcactaacgagaggacaggggggtatgcggagtctctgcac

SEQ ID NO: 113544 - DNA, 421 bp, Zea Mays
cagagaactacagggactgaaccagaagttttccccagactcagaataaccctaggacggactgtgggttggttttctaaaaccaggagggcttttctgcaaaacacgcacatcgaagggatattgcggtttactggttgttggattcgagatcgagcgcccagatcagactgcccactccgcgaatcggtatgtgatcccaactgttggatcccacatcggtggctctgatttaaaaacctatgacctaatctcccgcgttcatccgccgattgacggacgtgatggctccattgcccaaccggtacgcttggatgatctcggccgtgcagattagatccgaccactcccgatcgtcttcctgaccctgccgaactccgccgacccccagcttcacgccgcgatgaagccatggccagag

SEQ ID NO: 113545 - DNA, 460 bp, Zea Mays
cgtcggggcaagctcctgagagaaggggaaacttggaccccacaactctaagccacacatcagcatccaccagatccttagccttggtaaatagtggcgcctgagtgctaaggaactcctggtaagtggcagctgcctacgaacgttgctattgcccaccaccataatgctgaggctggtgctggcgctgcaccagctgtcgcaaaatttcattccgctgagccatcaactcctgcattgtataagcctatggcggtggaacttgctcattttgcccacggcgcgctcttcctgccatctgtaaagtaggaattttcctgttgttatactaaaaatccatgtttacagagtgacttaaccattataaagtaaatggaaatatcaattttcatttctgagcgaatttgagaaaaatccactcatatgatctcttctcctcacttcactccgccactttggt

SEQ ID NO: 113546 - DNA, 347 bp, Zea Mays
ctttttagcccattttttctgtcaaaacattcattcaaatgataatgaatataaaaaactcgacctagggaggatgagacaaccccaagtattgtattaagaagaagaccttctcagttctcagttctcacacaggtcgaacaacatatctttcagattgaataacacatatcttaacaaagtttggagtgtggatatatctacaagggttgaataataaaattgtgcatctccactgcaaggtcaatcccagtagccccaccactaattcacacaaagtaggatataccttcttttttttctcatcagcataagcaatcttttctgaagcagcatatcactctctt

SEQ ID NO: 113547 - DNA, 707 bp, Zea Mays
caccaagtggatcgaggccagggcagtatccacaataacgtcgaagaccgcccaaaagttcttctggcaaaacattgtttgccgattcagagtcccgtctgagctcacagtcgacaacgacaaacagtttgacaaccaggacttcagggatttctgcctctccatcggcaccaagcctgccttcgcctcggtatatcacccgcaatccaacgacatcgtcgagcgcgccaacagtaagattttcactgccatcaagaaaagacttatcgacaacagaaagggtaaatgggccgaccaactacctgaagtggtctgggacctaaacacaaccgaatggtgggcaaccagattcacaccttttcgtctattatatggatcggaggccatgacgccgcaggagataaagcatgggtcgccccgaacaagcgcatcagcggtccctgatgtcgacgaaccaacgtctaaagacctcattgatggagatcgcgtccttgccctgcaggccctcaacaaataccaagctcaaaccaaggcctggcgcgacaacacggtcgtcccaagagagttcaacaaaggagacctcgtactcgtccggaccacccggacagaatcacggggcaagctggagccgaaatgggagggtccattcatcgtcaagacgaaggtatcccccagcgcgtacaggctagaaccgccctccggcaaag

SEQ ID NO: 113548 - DNA, 316 bp, Zea Mays
aagaattagtgaatgaaggtgccagattgggcaaccttatgtaggaactacacagaaaaagaagagtgatttaagacattaaaatggaggcatgagggcagatagcaacagtaaaatggaggaactaagcagatgacctagatccacgtcttggtgtgtggcacgcggtgtgtagtcgatggacgaagcccgccgcctacttcacttcggctaggatgatagagggaggccggatccggcaatgaccactaaggggaggtgcgaggtggcacataggcggctggagcgagaatggagagcagggacagtactaggg

SEQ ID NO: 113549 - DNA, 517 bp, Zea Mays
cttctccagccttgtctgctcttgttggtctacaagaattgtctctggccaactttgatcagactcttgaggatatggtcccagaagacctgttgtccgagccagcagatggtggcatgatggacgtttgcgctgacgtgcctgatgctgggctggagttgtcccgagcggcgtcccgcgcctcatcgaccttggagcgcagtcttaagggtcaggaggctggcctagattgcactgttcctatggaagtggttgaaggtccttcagccttagaggtggctgcctcggagggcccgaccctcaaagatagcgctggtgcttgcccagcccccgagggtgttgccggggatgacccgactcagatgggtagcgcgagcgatgatccagcccccgagggtgtccgagttggttctccctctaacacttccatggatgttcacgtgggatcttctcctctgcactctgattatatggtagcagcacaggtctcttgtcaagaggtcgctttagaggccag

SEQ ID NO: 113550 - DNA, 424 bp, Zea Mays
ttaagatccagctcaaagtggagtcatggtcacaagaagtgcagaagtatcaaagtcaaaaccaagaagagcccaaagagctaattatactttgacttatattttgggtcattcctatgtttggagatgtccttgttgaccattgcagggtgttggagcttaaatatggctaatgagatcatgtttggtacacttaaagttttggagtccaaccccgagctcaaacaggcaaaaaggagcaaaatagtgaaaaaggttaagtatgagaggtttgatgactcaaacatgttgcaaacaccttttactatgtggctcacactttggtttgcacacgaacttggtttgtagcaaacgtgccactttggtctcaatttgagaagaaacaaagaaggagagaaggagatgagattaaggtaagtttctg

SEQ ID NO: 113551 - DNA, 885 bp, Zea Mays
ggaagcagtattatacatcagcatgtttcagtaactacataacatgtttgtttctcaaatatgttttggatgttttcccatgccattatgtattgctgtgttttttcttgagtccctgtaaagctctttgttttttcctgagatcctgtaaagctcattgttcccagggtgtatctgatattaattcccaccggagttcctgtctaaagtttttgctcccacaagattcggtagcataatcttccagagctggtatctaggttttttgcccagtgatttcttttgatttagttaattattctgcacggctctctcatgatgtattgttttcttattacggtgccttctcacgtgtatgtgtgctcttgcgtcgttaaatcttgcagcagtttcctatgtggttatccagtaggaaacgccttacgggcttcatttcaatatatgctctttaaaaaaaaattccgagtccaggactacaggtacgtgtttcgatctccagatctaatcttaaccattttatcaaaatagcttctgtaactgatatcatttacttaccattgctatctgaattcttgtgcaggagagatacgtgtactgaggtggatctagatcactcccaacgatcgtagcttggttgggacgtggctacagcgttgcttactctcattcttgtccttatgcaggcgtgctttgcacaattcttaaacggcaggttcctagcctagacggccgcctgcccagggctttggtccggcacttgcctgagtggtggggtgggcacggggaggattgatggaacacctaaaatggcgagtgcttgtattgaatgagcaggcttgagctcactgtagcacattatgaaacctttgcatgtctgccctgcat

SEQ ID NO: 113552 - DNA, 386 bp, Zea Mays
aacatttcaaccgaggtataagaggcatgtaacgaagctgcttatgtgcaatcttcgtcgtcatagtcaaaccatcgtcgttttcaacctctacgaatctacgctgaccacatacaatacacttattctcactcgcggtctccttccagaaaagcatacagttattgtcacagacattgatttttttggagtccataccgagaccagagagcaactttttggactgatacatgtcctttggcatcttgtgattctccggaagtacatcactaatcaagtttggaacctccttgtagtagttgtttgagaatgcaaacttagacttaatagccataagtcgagtcacaaatacaaggacggtcactttcgtgtgctcatgcaacggc

SEQ ID NO: 113553 - DNA, 380 bp, Zea Mays
cacagtcgggactcaacaccgagaggttgtccaaccagtcgtctgtcgctaggccaccagcaccatagttggtcggcttactagccctcctttgatccattcctgaatccaccacttgctagcactagagccctttcacacatcatgacccattgtagcctcacatggtcactcgccacaacttctgcatgtgcaagctcatgtcactgcctgccacatggctcaccctcacccatggttcgaccagactcctgctgctcagttccactcacccccaactccatatgtagaaacgtcgaatctatcttctagagtgatatagatctaagcacccatagtgtgccattcgttggctccgcccaccccatcttcgtctttgg

SEQ ID NO: 113554 - DNA, 693 bp, Zea Mays
gacaaaggaacgctcgcggatggacgcgacacgagaacgacaccgagctcgactcctcaagcctcatcgtctactggccttgcaacctcacccgcgctacagcggatgtcgactgagagcagacgggaagggcccgacggcatgcgatgacatgagcacggagcgagcgggcgtccagcgacagcgcctaggagcaaagctgtcggacataacttccatggagatgtagaggggaggggaggtgcgcgcaggggaggagatgtgcggtttttgtggagaggattgaatgaggagaacgtgtaatatgtgtgatgatgttgagcgatgatccaaataagttgggccgttggatctgagtgagtgaaagagagtgatttgaagtgatatcgtcctttggttttgaatatggattggttttggttataattggtttggtgcatttaggagaggtattgagtgtaggggataactgtttgggtatttgtaaaaaagtttgaagtgttggtttacataggggtatagatacatatccgacaaatctattgcttgtagtttttttcaaaatggataaacattgattaggtgctctatttatcaaagagttgctaacccatagttgtattttgtcccattgtagatacgaggccttatttagttacatgggattgaggaacatataaacccttactagtc

SEQ ID NO: 113555 - DNA, 1181 bp, Zea Mays
gccaaagatgatgccttatccacagccttcgggggtcggggcaagaaaagattgaacagggtatttgatgcaattggcttcgtatacccttattatcactacccgctacgaaggcaaggaaataagagaaatacttccgcttcggccaccacagctgtgccgaagagcaaaaaagtgaaggttctgacccaccggccgcgatatattgaaccgttgtagtgcctgaatttggggaagggaccccttcaactgccgaaacaaaacaagatgctccgattgcgcaaagcgccgaagagccgattatagtgccgaaggtgccttcaatcaggccaaccgaagctagggatgatacggccgaagagccaaaggtggaaaaacagtgaaaatgctagaaattatgagcccaccagcagaggcaaatttgtcgaagatgcaaaaaggtcctgccgcaactcctaagaggaggaggatggccagcgtgctagacgctgttatggagaccacaaaggccttgacccctgctcctataaagaaagtttccgaagttgccaagggctaggccaaagccgaagctgagcctacaatgcccattgagacgaaggctatcacgcctgaggacaaggctgatcagcagactttagataccgtcatggcaacagggcaaggtatggcaaaaaagcaaaatatcctgcccccgaagctccagtcgaagatgttgattacattttttggcatgcttcggggaaaacattatccgaagaagaaatcctggaagccagacactatgcccaaaaattaaaatatccgaagggggccttagtgtttaacgacactaatgaagatgatttcatgtactgtctctcgaataataaagaaatatccgtttgccgggagatagctaaaagtatgggatttccaaagcttgaagaaggcctttcggccatgtcgaaggatgatcttgctgatagccttgtgtataacagtataaaggtatagaagttaacttttaaagttgaaaaatgaataatttcattgctatacttaattatttctttttcttgcagggcttaattcttcgtaatgccttgagggcacaaaagagcgccgaagacgaaggtagcgcaatagctctcaacaaccttcgctcagaggtaattgagctaagaaatgaaggtttggaa

SEQ ID NO: 113556 - DNA, 512 bp, Zea Mays
gccgctcttagagaactgggaaaagccgaaagagactgttaccaagtctagcgaaggtgagctggttcggttgaaatacacctttaaatacggagataaatttgatgaaccgaatgattattggctaaaatgcattgaagctacaagtgatgaactgcttggaccgtattccaaagcggaagataatgccttatccacatccttcaggagccgaggaaaaaagagattgaatagagtttttgatgctattggttttgtttacccagactacagctacccgctgcggggacggggaaagaagaggaaagttgctgcttcagccaagattgctgctttggccactccagatgagcctgcgccgaagagttaaaagttgaaagtcctcacccaccggccacgttattttgagccggccgtggtgcccaagtttggcggggagacttcttcagctcttgatccaaaggagccaattcttcctacgcagaagactgaagaacctgcttctatgccga

SEQ ID NO: 113557 - DNA, 631 bp, Zea Mays
ccaaactaaacctgcacatggtgatgatgttcaagcaaaaatagtagaagaggtaaaccctaatgctcaatctaaaggagttgtgatatttttggtatgtgcaaccatgatactagagatttgcatgggattatatgtgaaataggaggactcaacaatcatatgtcatatagttgtaagaagtgtgtgtcgtggaactttgggcctaaattatgtgacacacaagtggaggatgaaagttttttcacatcgacaacttcattgatcctagagtaggaaaatgctagtactagtgtgataaatgtagtgaatggcaaagttcctgctaagaaaactaaacatgtgttcatgaatttggttggttctgatgtatggaggtggtctgctcggcttgtcaatgaaaaaacttttgtgatgaggttcgcaagtgccaagatcattaaacaatggagctatttcaaaactcactagaaggtccctttgcgggttttggtgttttggatgacaacacatttaaaggtctaatcaggatattaagtgttgagcaggtacttagtgaaaagcttataaggctcaacacatggagacaagagtgatattccatataagctgaattggatatggtttatgg

SEQ ID NO: 113558 - DNA, 422 bp, Zea Mays
gtcggggacggctgaagcgcttgtccgtggtgacccatgtttgatttcctatggggtcatggcctccgatccatatagtaggcgaaagggagtgaatccaatcgcctggcattcggtcgtgttcagcgcccagactgcttcaggtagcaggtcggcccatttacccttcttgtcgtcgagaagcattttcttgatggcagtgaaaatcttgccgttggtgcgctccacgacgccgttagattgtgggtgatatactaaggcgaaggcaagcttggtgctaatggagaagaaaaagtccctaaagtcctggctgtcaaactgtttgccattgtcgactgtgagctcagacgggactccgaatcggcagataatgttttgccagaaaaatttctgggcagtcttcgacgttattgtggatactg

SEQ ID NO: 113559 - DNA, 554 bp, Zea Mays
tctttgcggaatagcattatggaaaccaaatgtgacattctgtgtatttaggagacaaagaaagattcctttgaagactcctatattcgatatttctgcaacagatctctagataagtttgctttagaccttctattggtgcatctaggggttttataacaatttggaaaggttctcattttgatgttgaggtgatagaagaaaactcgtttgggcatacgatcttattccgcataaagttgacaaatcaggtttggtggctcaccaacatttacgccccatgttcctcctagggtcaagaggcctttctctcttggttctctaaccttgaggttgatgatgataagctttggatttttattggtgacttcaatatgattagatcacttgaaaaccgcaacaaatcaggggagacactcatagaatgttgaaatttaatttggcaatcagtcaactgggcattcaagaaattcccctcaaggggcaacctttcagttggtcaaatatgcaacgccatcctttactagaaaagcttgactggtgctttgtcttgc

SEQ ID NO: 113560 - DNA, 573 bp, Zea Mays
atgtttttctcagctttctcaattttttttagtaactccttgtttgtttcttgagcttcagaaagtgatttcttcgtttgatcatgcccttttctttctgctaagtaaagagcatctgtcgttgttgcaccctcttctaacctacgttcaggatcagattacaacagctacgattcataaatttgacgatcaaatagacaatcaaggcaggtgttatcatacgctaagtaattttcaagtacacccatttaacaagtgagcagttacttaacatatcctgtgtcaacacataaaattgggttctacagaattcgtgagcatggcttccttaatttactgttccacttaatctcaaccagtcctgagtcattgtacaaaagggtcaggtcatccattaggcacagaacaatgatatctgttagactattttattctatccaagtgttatgggccttgagaccagcccatgtagctctaatacatgtaacactcatcccactcaatgggttagggtttcaactcgaccaatatggtatccagtctctccttcccttagcagccaccgccgcctcc

SEQ ID NO: 113561 - DNA, 854 bp, Zea Mays
ctttcagtatgaatagtgtctatattcatccccttagtgggaatacaccattcatcacgataaacttacttctctatgatcttcttgtggactttggctgcattggaaaaggaaaggtaacagctctggccactctcctgcagggatagcatacttagctataatgctgacgacatttgcactagctcgccttacaggatgactgcataaaatagaaatagagattctaagcttaacagaagaacatgtaaagaaaaaagttgtaaggcaagtccaaaatagataaacagcacagagttttatctgcaacacttgcaccaatagatgagatgttttgtgttgtaatttgtaaccatgatctccatgaaaactatgatctgttattgacctcagcaggttatgattagtttcaagtttcaactgtactagagatgtgcatctcttgatttcaacctaccagatccagtcattggtggtaaattaatggttgactctgatcaatactcatgccatgcaaatttagaagtgtgatttaacaaattacatgcaaatgacaaaatgagtaacaaaaggcttaattttggagaagacatgctaccgtattttttagaagttttgggtgcaaacaaaagtgtaataagctcgttgatgtgggtttttctctgaattgcattctgtattgactcggcgggatatttaaatgtgtaggatgaaatagagaactacacaaggattcaatgccattgaatgacgtatgagtgcttagaatgcaaaagtattcacaacaaaagatcacaagacatttgtcgtttgcttccacatggcagttgttccatgttttagctatttacaaa

SEQ ID NO: 113562 - DNA, 387 bp, Zea Mays
cacgaatagtgtttttgaagtgacaaattaacaagcaacaatagatgaggtgaataggtgatacactacaagcgtagcagttcaacgagcagccatacaggttccaatacagcgaccacaaatttaaatttaaactaataatctctgagatgatacaaggtcccatcttcatttccttcctcaatgtgttcaaattgacctccatattatcttcatctatattgtcaatcaactttgggtgcgcataaaagattctaaaatttgtggtgtaagagggctacaatgttaacttagaatcctaccactaatgctaaaaagttgttttagaagctaccgtggtaattggaatagccaaaatatcacgaacaattaatctcaaagtacggt

SEQ ID NO: 113563 - DNA, 400 bp, Zea Mays
cttccaagtacaaaaatcaccatgattcaaaacgtccggcaatagccctgtaaccattgcatttagaaagtgcacacccaatttagcaagagttcggttagcatctggtcagcattttgccatttttattatatcaatcaaatgtgtatccatggtgtttatcaggatggttgacaattttgcttccgttctgcaattggccttactattggagagcgaatgaacagtagtcgctacagtaaaccctaaccctaacagatatatacccctagtgggctgtgggctaggcccatgtacacagatagctaacacccccccgcagtcgaaactctagccactgcagatgttgagactggatcggaaatccgtgaagaccaccgacggaagccccttggtgaag

SEQ ID NO: 113564 - DNA, 1759 bp, Zea Mays
ctcgttctgcactactttttgcggacgctgggtgtggggagggtgaagtcgtggtagcaccaggtgcccacattaggttcttaatagagtagaatatagatttgttcctgtcaccataagaaaatatcaacagaaaagagtacaaaggaggatttacaaacagatctcaaatgagttaaacctacagaacaatcaaatgcatcctttgtcaatccaacaaaaccaataagaaaaggaagaccttcaatgtaagtaaagattaaatagttttactgccattgtgtattatatcacaagatgaactttgtgactacaagaaacaatacaaaaatagacttgggattatatcaatcgttttcagtgccttgtactccctccaataaaacataaatgatgcttttgacattagcagttcagcacggtctctaaaaaacacacaaaaacactttcttacaaaatatttattaaacatggaaaaagtatttttatgaaactgcattttgattcaaatatctacttgtatcattaccaaatatctaaagttgacatatggaaagcaattaacaaaaatttagaatggttggtttcaggcaaccccaaaacaccccactatttttgtgtgcaacactgctgagatagtatgcaacaagaatgacacactgatctaaccattatgtaaacatcatcaagacgaatggtattataaggcattctgagtttttgagaccatgtgtttgatgctggtacacaattggcacactagtactcaagaacgaagatacttgcagacaaactcaagattattaagtttatgaacaacaaaaatcatgtaacagcaaaaaatgaaagacatgactgatcctgacactatgtattactattgtaatatgataacaacgaatccaacactatgaatcctgatacaagggaccatcaatgttagcttacagaaatttcaagggaatttatatttaagacattttgtgctcaagggagtatgagcaaatagaaaatatcaacatgccataaaataaaataaatataaaccaacccatatgtcacactgacatcctttacagataaaggtcaggggagaaatgcgaactctagggatagacaggccattaaaagtcatgagcaaaccatggaagttctaaagatcgggaaacaggcaggtacagaagttacaagtagtggcatccagtaatagcaatcaaatgaaagaacctaaccttctttagccttgcttcatccatgtatttccttctgagtggctggcttactccattagctttctgcttagtgggagcatcgccacttattgtattctggtaagcatgtacattcctaaatagtggtggtggcatgatagaagtctgcataattaaattaaataaaatgaaactcagctgacactaaaataatttcaaaactgaagaagttaaatcgccaagcacaactgactcaaaattgtgtaaaacaactcaacagttaagacacagttgtgattgaccaaatgaccaagcaacagtgccacacagctctgtatcatcagaatgttgttcactagacacagatgatagatacttcccaagggcatactcggtgttgaaagctcccacacaaggtgggatctagcgaagggaactctaggcagccattgttttgcttatttcgcatttcgcaaggaggccgatgggaatccagaacgtccaaaacaagtggagactctaccgctgcaccagacccacccttctat

SEQ ID NO: 113565 - DNA, 399 bp, Zea Mays
ggccaataggccaaataggaggtcatggccctttgtgatgagtccaatcaccttggcgccgctaaggaaaaaagtcggcttgaagcggcgcaggaaaaggagtgcgttgtagtggtggtgaaagaggcagttgagctaaagcagagtgctgagcaatcagaggcagcacttgacgaaaacattaggtggcacgtacccaattctatgaagactatcgtgccttaggcgcggaggctgagccattcgatgaagtcacggaagacgtgggcaaccgtttcttaagatggctcgacgcggagttcatcaatctctctatcgtcgttgagggattgatggcttactttgccctagtgtctcacgacggcgggttgaatgccctcgcatgtatagatgttcaaa

SEQ ID NO: 113566 - DNA, 380 bp, Zea Mays
gttggataggtagagggagactagtattgcagccaagaagcaagaaaataagaaaagagaggcaaaagtagccacctactgtttgtccctcaacaaatacaagcgtgaagtatggagaagtcgttgaatgtaacataaagagcagaacaaaaacatgcagaattatcatccatctactctttaccctttaaaagaagctatgtaaaataaaactgaatgtggctccattgtgctctccgcatgatgtttctttgtacgcatagcactccgcaatattcaccaaaaagtaccggatcgcatcacaagcggcgggcggcaagcccaaatcgttcacaaacacgggtatacatgccgcttggcgaagaaatcagctagaaaat

SEQ ID NO: 113567 - DNA, 392 bp, Zea Mays
ccattaccagaaagtccaggggcctaacacgtaaattttctaagacccagtgaacatcgcccatggacggcgggttcattttcaagttaacgaggggctcttatgcaaaagaaccagcacgaagaggtatcctcaacttctagccgttggatcacgatcgacggcccgaagagttacacgcccagatctaatctgcgccctccgcaatcgatccaacggtacagattccatcgcccgaagcggtatccgtcgtctaatcctagtggtccgcgaccagatcaacggccagaaatgatttccttgtgaacaaacatgtcagactaaatcatcacctcccatcagtgaatcaacggttattgagtcgtcttcacccctggctgtcaacacggcgg

SEQ ID NO: 113568 - DNA, 333 bp, Zea Mays
atttggttgcccagttttgtgcatcaagttcatatggtaggcaaaccatcgcactgcacgcgtgcgaggtgtgcgaatgaagctcacgcgcgtgcttcgttaggaaacttccatgcagagtcagctagcctaaacaatctagtagtattaaatatgcaccagtatttcaagatccaacttagatcagcagcaccaacaatgaaatcggtagggaatataatctcgctgaatttaaccacatactgaaggaagcagtaaaaatagaatgatgctcaactactgtgttttgtagaggaaacttaggttggatgaaaccaatacacaattttgttg

SEQ ID NO: 113569 - DNA, 617 bp, Zea Mays
ggagaagttggttgattggttcggcgaggacgcttcgggtgaacactatcagacctctgaatatccaaagctttgccagcctctgggatgggcactgcatccagtgtttcagcaggggctgcatcagaggaatcctcagccaacatatccagcatcacacttatcttagcatcacttggattcaaaggtacctcgaaatgaacctgcctctcgtcatcagggatttcaccaagtgaggcaaccaaagcactaacctcttcgggagagggtcgcactctaaggcccaaaccgctatcaccagcaggaggatttgacacaaaattggtaaaagccttggaaggaggcagattccaggccgaatatgcaacaggagcaccgatgttcgacaccttgcctctgagtatcatctcgagccagctgaccaaatccactgcaggaattcttctgttggtaacccgggtcgaatcagcgaggcctcgatacagataagccgggtatgctctgtcctttaatggctgaatgttcttgaaaacgaaatcggcgaccacagcttctgcagtcagacccctctctttcaacagtccaacctcagcaagcagagcccctgcctcagccac

SEQ ID NO: 113570 - DNA, 296 bp, Zea Mays
ctagagcaagcaacaatgtaataatgacttcactatcattgtggatttggtgattgtgatgcgcttctgtgctagttgtgttttgttggccattgtctttgttcggcgagaattagtgtgaaacgcttccctctccccctttgttgatttggggcaaatgccagaccttggatggttttactattattgtatgggtttctataccctctggtgttttatcgcattttaggtgtattcgcctagatttttatttcagtcttgcgtcacccttcgatgtttttggcacccgaagttgt

SEQ ID NO: 113571 - DNA, 482 bp, Zea Mays
gcaaagcaaatgttgtggcagatgccttgagcagaaaggcccagtgcaattgtatgagcatggatgcaagagttaccaccctgtgtgatgagctgtgcaagctgaacctggaagttgtttccccaggtgacttaagttatatctctgtggaacccacattgcaagagcaaatagtgagggcacagattgaggataagggtgttcaaatgattaaggaaatgatcaagcaaaaggcagagaaatacaagtgcttccgtcaggacagcaagggaattttatggtttggagaccgattagttgttcccaaggaccctgagctcagaaagaagatactagatgaagctcacctttccaaattctccatgcaccctggtagcaacaagatgtaccatgatctcagatctttatattggtggaccaggatgaagagggaaattgccaagtacatatcagaatgtgacacctgccagagaatcaaggcc

SEQ ID NO: 113572 - DNA, 652 bp, Zea Mays
ctgagacgcaggtgatttcagagttgcagaggttggtttctagtgagtggaattgggaggttgttaagatgggtttcaattgttttagtaccacttttacatctcgtgctgagcttgatcatatggtggagtggggagtggtacagacaaagtacaatggcaccatgaaagtggaagagtctgtgttgcataagaaagcaaaggcagagctcagaagggtttggattcaatttattggcctcccatctgagatgaaccaattccttcttatttgggcggtgggttccattctggggtgacaaaggcagttgatatgaaattcactaataggttgatgtatgtcggcttcaagtgttagtgctggatccgaacctcattcctcaattcgtagatgtggtgatcggggatcatttgtatgagttgcagtttcatctagaggaaaacatgaatgaggataaccttgaaccaatggatatggatgactctagttttggagacgatgatgagaacttaatggggggcaagaaactagagcatcaagataaagatctatctaagcgggataacggtgtggttgaagaatcttcaagagctaagcaggggaatgttggtagccatggcaagatggtgcctctggatcactttgagctag

SEQ ID NO: 113573 - DNA, 575 bp, Zea Mays
aaaatatttatataccttccggtggatgggggaacctgtccgcataagttattaaagtatcctgtagtactcttgtgtcatgtacggaacctggccatcctgtcacaacaaatgtgaacctcaatcgaagtcacaaacgaccattacattctgcgacgtgtaaccgtgccggccaatatatttcgcttgttccgaggccgggactgccgctggaaagtgactaccatctattgcgcctatgcaatccttgaagtgtgccaaaacctcgcctctcgcaaacgatgatgaatctcgatgaaatgtgggtctttcggcttgattatgtcagatgacatcttataaagtgcattaaggacatcactatacttgcggctaattgtttccaatgagtgacctgtagccctttcattaagagttttccactgggtaaacattctcttcaacgaatcccacctattcttcatttgatcccttatgtacgtgcgaccagtgcgttccttaaactttcttatcaggttagcatacccttcggcgtttaggaattgttgtggcctgttccgtgcattcacctcttc

SEQ ID NO: 113574 - DNA, 364 bp, Zea Mays
aatgtgacaacttctctatgaaacccaggcggtggcgggatggaagctgattcagcttgcttgatatcaaatccctgatgagcggggagttcgatgtgaattatgtgctggtccagaatggggtcaggacgagatacatcaaaagtgtttgtcctggtcttatgctgttgtaaattgaaaattattaagtaaatatatagcgtatcactgaatattatgttgaaattctatgacaaaaaatatataaatagaatcttgccttaaattgtgcttcaacaggtggtacagctgtgtagcaggtctctgtggtgcttcggaactaaaaaaaggcgtgaaagatggagtaaaacttatacacacatat

SEQ ID NO: 113575 - DNA, 1043 bp, Zea Mays
cgtgtaacctatacacttgctccatgaagacatgtgctaccgaggccacagtgaaaggatgtttcaaaggtacaaaatgactgaatttggagaatttatccacaatcactaacacacagttcttgcctgcagacataggcaatccttccacgaagtcaatgctaactgtttgccaagctccactgggaacaggtagtggttggagaaaccccatgtacttgaccctttcagactttgctttctgacacacctcacaagactgcacaaactgcaacactgtcttcttaaggccctgccaagcgaagagttgtttaacccgtcgataagtagctgggaaactagagtgagccccaataggagatgtatgcaaagccaccaggaccttgtgatgcatatcagtgttgctccccaaccaaatcctccctttgtaccgaagcaacccagccataaaagaaaaattcggcactgatgtactatcaactatcagcttttctatcacccctcaagcagctgcatcctataagtaaccttcactaatctcctgacaccatagaggctgcacaaccgacaggtgagagcacaacacctctgtatgatttttccttgaaagagcatctgccactcgattctgggcaccttgtttatacaccactttgtattgtaaacccaaaagcttagtaaagaccctctgttgccaatgagtatgcaatctttggtcattcagatggactagactcttttggtctgtaaatatgacaaactcagcatgtaagaggtaaggcctccattgctccacagccaccaagattgctaaatactccttctcataagtcgataatccttgtgtcttaggacccaaagccttactcatgaaagccaagggatgtccatcttgtagcaaaacagcccctactccagttttacatgcatcagtctcaatgcaaaaagtcttggtgaagtcaggcagtgcaagcacaggggcagaacacaatgcttgtttcagagctacaaaagactcttcatgttctgaagtccaaataaac

SEQ ID NO: 113576 - DNA, 392 bp, Zea Mays
tgtggagccatagtgaaaggtgcatcaagatgaagcaactttgtgaagggagcgtggccatcagatcatatcaagagttgatccatatctccgctggttaagtggataagttctatgtatctacaagtagtttaggaatgtgataaaacctctataaatgaggaggtagggtggcaccaaccaaccatctcttggactcatggttttcattccttttgcccttattttcttagagatctataggatcttttggtagttgcttctttgtactcttaatttgggaagtgtggacttcaccacatttttatctcagctcttatatttctattcaatctagttggtagggtttttgaatttgatttctccttttccactctttctataagattttg

SEQ ID NO: 113577 - DNA, 365 bp, Zea Mays
cagcaagagacgctaaagcgtcttgtaccttaaatatagtgtttctcgtcgttcgcaaggcatccaacaatggcctataaaggtttcgctaaaatagcggtcgtccttgtcgtccgttaaacctgacacacttttgtccgctcgctaaagcttcttgtccgttccctcccgcgctagttggaaacttcccgccgcactcgctgttaaggagatcgcctctgttgtatggctccggcaacgacaagcctgcacggaggaggcaaggccacatgacgtcgctccaccacgtcgtcacgctgctcgtgttgccgtatgacgacgctcatggtcccgttcgttctaccgcgagtctgtgacaggagtgc

SEQ ID NO: 113578 - DNA, 369 bp, Zea Mays
aatttcgagatcaattcaattttgcccagtttgcttctagtttttgttgaaaaagttttaacttgcctattcacgccccctctaggcaactttcagccccggtacgaaactaggaaccccagcaacttcccagcggagacaccaaagacgcatttgtccgggttcagcttcatgcgggttgcccgcagcttgtcgaagaccagggttaagtcttccactagggttgaccctctcttaatcttgaccacgatgtcatcgacatagacttcaactttgtccctaattaggtccccgaaattcttactcatcgcccgcacaaatgttggcaaggcattttttagaccgtagggcataacaacatagcagtaa

SEQ ID NO: 113579 - DNA, 598 bp, Zea Mays
ttcaaagccacattcgattgttggcacaaggacgaccctagacgaaggcctctcctccgaccacgccctctctcgttcttgagaacgctgaggtgacatgtgaagcacttcacaaagcgaaacctgtaggcgaggccccccattcccacatgatgacgccttcaggagcctctgatgccttggggcggctcgacggcggttcccaatctccgcttcaatactccaactcttctcttgcttctcgccacaatcggcgagaccctagatgaaggatcccccgtcctagactctgtcgcagacacatctaacggtacaacaaaatctaagtcctctttcgaggactcatcgtccatccttgcgaacgggcttagtaatccttcgctacccgatgaccatgaatcaaaatcagatcccctcgttgctaaaccctgttggactccgacaaagcaatgacgtaacactttccacaacactaaatatttttgtccccttgcccaacaggccaaaatctgcttgtgcaggcccagtcatcggaacctacgcaatagccgactttaagtattaacaaatagacaaagtattcttgcagcaatcctac

SEQ ID NO: 113580 - DNA, 412 bp, Zea Mays
ttttgatggtactccttttgaaacacgcctttgatttctactagtgctgaaaaatctgccctatttacagaactgccattcccactagatacttgtacctcctttcttgtgctttagtccaactgttctattacattttctaggccaacaactaggacgagtacttgtaacacttattcagcattgctatctgttactgacttgtgtgccacatatatatatttagtcagccttcccgtagctccaattttctctcgagcagaacaggtactcctttgcaatcacacccacactcattggacagtcacaccggtcaccgtttgccacatgcagtgctggtaagaacgttgtaagagcggggtaagacgcttcataatttgtattccaccacctccaccaccacccctgagag

SEQ ID NO: 113581 - DNA, 471 bp, Zea Mays
cataaggcagttctgagcgaaggcaagtgtctcaggatgttgtttctctagtggacataacatgtatcgccttaggctaatttagaaatgtccaccgcaagggacgatgtctgccagaggaacacataaggttccatgtgtgcagtttgctttctctgatgacactgtattatctgagtctgttgagcgagcagcaaatacgtgattttacccaaaaagaatcagatgcatcatcttgggtaaaccacacataaagaggtttaccaacaagtggttacggtaagctcatagcacaagtgatgagtgcggatgtcgaacaacaccacagttgacccgtggctagccagaaaatccaagtccaagagaaatgataaagactcataaaatatcaacgaagagatccgttgatgttggctttgcaaccaatccattttatcaagcactagtcacggctcgacctgatcactcatg

SEQ ID NO: 113582 - DNA, 426 bp, Zea Mays
cagtactccacaatgtgttgctctgtcacctcagcagaaaataggttgaggtccctaatccaagtatgattccacagcgcttcactcaaagatctgttctttcttcgggacacattgaaaatgagaggcgcaattgtccttcggtcttaacccttgcacccacgcatcattccaaaaggacacctttgtcccgtctcccaccaaaatcgatgtcgctgctgcgaagagttgtcgatcttttgtcgtgcaagggagttctaaggctgtccagaacctagttgatgaagcccaatcttgccacagccaacgcaaacgcaaggcccttgcaaatttggttaaatgaaggatacccaagcctccgcactcttttggccttgcggaacggatccaatttaccttgcatttacctcccgtaatttgtgcaca

SEQ ID NO: 113583 - DNA, 415 bp, Zea Mays
tttctcgacctacgtgaggtccttttcttaatgtaatactcgagggttgtcttactcccacaggtcgagttttttatatgggctaggatgtacaaggagatggattcgaggcccaagctacagctctagcccttggcccattacctttgagcttaccggagggaggagggtataggtcccaccactagcgctgctcacggggctccttcttgtcctcctatttccctacgtcatatcaggctccgcatgccgagggatcgagatccagcgagccccctttatgcgtagcctggagtagggaggcaggatgatggtgcacaaacatcgtcgctgtgaaggctgtcgtacactccattggcctcgactttgacatatttggtgaagagtgcacataaaatgtgtgtgttgggggggg

SEQ ID NO: 113584 - DNA, 432 bp, Zea Mays
gaaccttcatctttttgctcttcggctcagctgcaatggccgaagcggcagtctttctctttttatcttgacctcatagcgggtaatggtaatcagggtatacgaagccaatagcatcaaataccctgttcaatcttttcttgccccgacccccgaaagctgcgaacaaggcattatcttcggccttggagtatgccccaagtagctcatcgctggcagcttcaatacacttcagccaatcatcgtttggctcatcaaacttctccctaaatctgaaggtatacttcagtcggaccaaaccaccctcactggaatcggcggtggtctcctttggcatatcccagctctccacaagtggccataccctgaaggatatatgctcttgaatcaaatccctcgtgccaatgaaggcacacacacaatgctaaaggc

SEQ ID NO: 113585 - DNA, 560 bp, Zea Mays
tttccactgccctattctgtaccatgcgattcttgatcgtgtattctactctccattactagtatctagaaaccagcatgtcatatgactgaacctatttgcttagtgggttaattagttgtatacttgtattgtcaaaatctgggtgccacattagatcacttgtgcaaaaaattccatgcacacctgtgccatgcgtggatgattgtctacaatctagaattatctttgcttgaagctgattataattgaatgtgcagtggataagtctcatgttatttgtatcttgtacttataagggatcgacacctgtgtagtagctgatgagattccaatattgctggtaattctgaaaaatgttctattttgcttttagtgatttattcactgtagtggataatctgttggcctgtttcataagatacattattcctttggatcctgctagcttcaaaagctgtttgagtgggggtggtcattgtctgaataattctggtccagacatgtttgccttattttctcccctcttttgtctctggtttgttgataatggcataaag

SEQ ID NO: 113586 - DNA, 553 bp, Zea Mays
ccacattacaatacaagttgcagttacatacactcagcgagggcaccacatactacattggctcaaccttcgggatgatgcccgcctccctataattgaacaacattattttcaattcctcaccctcaaaaagattacgcagatccccctcaccaatgctcgtcccaatcggcgaagacaatagctctcgtttaccaaaccgatccactcaaagacggtctcgctccatccccatccgacggcgcctaccactttgcgaaacctcgcccacgctatgcttcgacaccacccttcgtcgccggcacttggtcctcgcactaggaagatcagccaccttgccaacctccacccgcggcgaggactccaccgcagccacatctaacacagcaaaataatccaagtcttcatctgaagactcttcggtccaggaaaacggactcccaaactcaccatcagacgaaaaagacccagatccagaaccagataaattgtcattggcaggcactacggttgcggccgccacaaaattagtatcgtcagcagcggttgcttg

SEQ ID NO: 113587 - DNA, 359 bp, Zea Mays
atcgggaggctgattcgaacattcctcggtttagctgcaaagtctggatcaaacgtgtcgagagccttccaagcatccccatctgaagggtgcacgattagctcatcgttctcacggacaccttctttgtgccatcgcatgtgcatagcgggttttttagatagaaacaaccgttgcactcgaggagttagtggcaagtagcgaagctgcttatgtgcaacatctatcatcaccttgtcaccctcatcattaacaacttccacaagtttagattgtccacattttagacattttttctctcccgcatgctccttcatgaaaaacaaacaattatttttgcacacatcaatcttttctaa

SEQ ID NO: 113588 - DNA, 555 bp, Zea Mays
cacctttagagaaacctacatctacttcctagaaatgcctagaggtctatgtgtccttgtggttcgggttatgatgagtgattgtcaataagaatagtgtcttaggtgagttgagtggactaacaagggcgtgattgtgtttgtgcaacatgtctcttggcttgtggtgtaggtgtggattatagagagggtggtcgatggcaaaggtgtaggtcatgcgagttcatgccaatggactgggagctatgaaggatgggcattgggtcttgactaagggactagagaagtcgagtaactagctatggtggctgacacctagggacaacaatggaaataaggacatgatgaagtatatcgtgttgcatatgcttgaggaccagtgggacacatgtccaggacaaggggacaaacatggattacgctacccatgtgtcacaccctgattttgaaaaaaaaatcgaattcataacatacatgtgccaagatccatttctacacacatgtggacatcattagtgtaatatatcataacattgctcaaaagcacaaataaat

SEQ ID NO: 113589 - DNA, 521 bp, Zea Mays
ttgccctcatgcaatctcttgagggtggaccagatctgctaagtcatagccaaatgtccaactcactcaaacttagcaagcgaacgagaacaaagcatttagtgctttgttgtttgaatcatggaactccatctgaataggagtgatccgagcactatgggcatcaaacacagcatcaaaacaaatttccaagacatgacacccaatactctaaagatatgtcgacatgcggatcttctagtatgggtagttcgtcccatcaaagaacggaggtttgcaattgccaacacctcgttccatgttgcctttgtggattttagattgatcagagtaaggaaaaccttaaccgactctgataccaattgaaggaccggtgaggcgaccaaagggggtgaatgggagccaataaaaattctctttcgtgtacaacaccatgactttgatcccaacttcaacgaaacctcacaggatgacaaaaacttcatagcatagtaatactcagtccagtgtcgactaaaaat

SEQ ID NO: 113590 - DNA, 752 bp, Zea Mays
actgaaccttacagagtctcacttcagagttgcgggtctttcggactgctgagtcgagaatctttattggcttttctcggtactggagatctttttgaatctgaattgtctctgcctcgatgtggttctctggtacttgcaggcatttgcggagctgggacacatgaaacacattgtgaatatctgacatggattctggtagctcaaggcggtatgctgcgggtcccactctgctaatgacggggtaggtgccgacgaaacgcggtgctagttttcctttcatttggaacctttgacaccacgcatcggggagaccttgaggtatacaaaatctccttcctcaaatctgagttctctccgtctgttgtctgcataacttttctgtcgactctgagcttctagtaacctcttgcgaatcagggaaactttctctttggcttctttaacaaagtcgggtccctctagtgtcctttcccctacattggaccacattaggggggtctggcacttccttccatacaatgcttcgaatggtgacattttgatactggcctgatggctgttgttgtatgagaattcggcgtacggcaaactggactcccaattcctgtcgaacgttaacacacatgctcttagtaaatcttcgaggaccttgttgactctttctgtttgaccatctgactgggggtgataagcggtgctgaaatctaacttggtgctcatagcttgctgaaggcctttccaaaattttg

SEQ ID NO: 113591 - DNA, 773 bp, Zea Mays
gtgaatgggcattcagaacttctgagaatagactcatcataccatggagattgcattgaagttgtttcaggcggaacaccacattctgcctcggacctccacagaagcctcaatatgtgcaactgccataaacaattcatgcagatttgttttcttctttcagcagggaataaaaggtgaggtgcactgcctactacattatgtacgttctgctctactttatactctaaaagccatcctctgccttatattccgctttgtcgtcaagtacaccgtgctttctcaggcttctttcacctttttttctgaatagcatataagactatatactggagtgtaagcaacaaatgtatgaaaatcaatacatgcttatgcatcagggttctcatttcgttccagcgatcataacaaccgcacagagacagactgcaaactagtttttgactattagataactactactttggacgtgtcctctgggaaagttgcttgaaggcatgcaagtttgcagtgagaacacaaaacccttttgaagggaatatactcaacgtctaacgatctcttggaataaaggcagtataggtactgtcctgcagatcagatgggcatctccaccaggacgtttgcaagcagaaaggtagaagatcacctttgaactttgaaagttctgacatcccgagggggcaaaaggcgccagggaatttctcccgcactgcaaacagcctacacccagatccagcttctgtggatgaactcttgccatgccagacgtt

SEQ ID NO: 113592 - DNA, 578 bp, Zea Mays
aagaaaatgaactagatctctcctaatcccactttggatcaagcgcaagtccagagatgaatgggaggttgtcgaggaaaagatcctcaggcccctacggtccgctggtcagcagaaaggtgagggaaaagtctaccctggaagcactcgccccggatagccccgaggcacttagcctggggtcaggcaaggcggaggcagagagtgaccgagcgagccgagaggaagccactcaagtggattccgcgcctcacctgagactgacccactataagtgaccgaccgcattaactccgcctcgcattgagccacagtgggagagtcggtcctccttccactcatgacctatgagcccctaggcttgtgacccactcatgacttatttagcctaggcctgagtgcactagacgtctataggacccacaatacgaagagccacacctagactaggggtcggtgtgacacaaagacagtaatgatagcgctagagctcctcatcgcccatactgcctgacataaacgacgcagccagagaagcccaaacgaccaaggcacaagccaacaagcatgacttacca

SEQ ID NO: 113593 - DNA, 383 bp, Zea Mays
agttaatcctggccgtgtgcaatcgatcggacggctcgcatggcgcaataccccttcgcgaagcccaatttgcatataagcccctcatcttcattataatgaacccgcagtctacccagttcaatagaaatagcacttgggcccttagatttgataaatatgtccctgctacttacaatcaagtccctgggagacattttaggcgtgaaagaaatagtagaaacacgtagaaacttggtaaattcataacttttgcattttatctcctttttatccattccaattgcattagattcataataatattgtccaaacagtatggtactattttacattatattccccacttttacaattggataataatctaacctatgtttaaa

SEQ ID NO: 113594 - DNA, 495 bp, Zea Mays
tgttacttcaattcgaggtaagctacctgtctcaacgttcgccttgttctatccagaaaatccatgaaaaccgagtatcggggcgcgttagctgggtgggccgtcaatggcgaccgtcgtgtgcacggtgtgccgtcgcggggatggttaggggagaaagacgataggatagccgtcgatctcctatgcggcggccatgatcagccaagcatgtcttttgggtgctggccgtcgaatagaaatcgagggagcagaatgagatcaaacttcgtaacaccaggtatgtccgatcaggatcccatggtggacagaacatagcccttcgcggtgatcgcgatctaatccttgccaccgatttctgatcgagcgaccagaaatcacgcataccccttcgtgggtacgcattttcatatgaacccctggcaaataactgaatcaacccgccacctagctcagattagtctgagtcttgagaattctcgcgcaaaggtccct

SEQ ID NO: 113595 - DNA, 401 bp, Zea Mays
acgcaatggaaaacacttaatcaaagggcaataggtcttggtcgagaccctcatactagatcaatcagtgcaccagatgagtggtgggctaagcaaaatgaagtaagtagccttttgttttttgtagtttaggaatactgatcggcatctgaaagtaggaaattccattttactgcaggcaatgccagtgtgtattatgttcaaaactgtcccgcttgaaaatgaggacaaccttaagataatgtttggacccattgtgtgcaccaacgagacaacccttgttcctagagttgaggatgctaattcatcatctgatggtcatgaagaagacatttttggtgcgggtgaaaacaacacacctaaccccagctctacaattaagggaaagcgtaaggttttgc

SEQ ID NO: 113596 - DNA, 281 bp, Zea Mays
cacaagggagtttcggtttggctagcggttaagcaatgggggtctacaagttgtgtaggtgcaacttcagggtaaaacacaccagggttagaaaacaccaacataagaatgaaaattttttaagaggtttcacttgctaaactcaaggttgtttgggtggggatctttttatgaacagaacaagcaacaaaatgttttgcaaaaagggttgaacaattgcaataccacctagatagcaagacaagaggaacacataacacaacctaacaagacttaccaat

SEQ ID NO: 113597 - DNA, 525 bp, Zea Mays
ccaatacttgtgagcaaggagacataccctgtgtaatagtacgacgctgaatgatcttgatgggcacactaaactgataactgtcagttggtaatacaggagatgccacacaatctgaaccgagagcacgcttcaactgagacacatgcaccacaggatggatctttgcagaatctggtaacttcaacttgcaagcaacctcacccaccttctgagtaatctaaaagggcccaaaaaacttgaatgataatttctgatgtgaacgcaatgcaactaaagcttgaacatatggttgtagcttcaaatagacccaatctcccaccacaaacatgcgctcagaacgtcccttgtcagcttgccttttcatgcacaacttggcgcgttctaaatgttgtcgaaccaactcagacatgagatgcttgctgctcagccaagaagcaagatcagaagaactaaccatagtggagtcggtaatgccaaagtcccgcagtcgggttccatataatgcttcaaaaggagaaatgc

SEQ ID NO: 113598 - DNA, 395 bp, Zea Mays
tattggttgctattgacaaattcactaagtggatagagtacaagcccattgcttctctaacttcagctaaggaagtggaattcatacaggacataatatttaggttcggaataccgaacaacatcataaccgacctgggatccaatttcactagttcggagttctttgatttctgcgaacaaaaaggcatccagatcaaatatgcatcagtggcacacccaagagccaacaggcaggtagaaagagccaacagaatgatattggaagcactcagaaagaaagtcttcgacaagaatgaaaagttcgcaggaaagtggatcagagagttgacgtatgtgatctggagcctaagaactcaacctagccgagctttgcatggaaacactcctttcttt

SEQ ID NO: 113599 - DNA, 315 bp, Zea Mays
gaaaactttagccttgctgggaacttgtatagcaagggacgcccatggccgtcctggattagtttttgctaaccaaagccaacgcatacgaagtacccaagcaagatcaatgagattggaaatccccagcccaccaagctcgagcggccgacaaacttttccccaagcaacaagacagtgtccccccctcacttctttgcgtcctcgccaaagaaagcctcgtcggatcttgtcaatagctttgagagcccaaggaggtaaatccacagccattgcgagatatatgactgtctagccttagtcatcaaatcagct

SEQ ID NO: 113600 - DNA, 629 bp, Zea Mays
tgcaatgtaactacgaggctttggatatctggggtgtgatcgatcccagcgacaatcgaaagcgggtacaagatcgtcaggcgatgagcgccttgctgcgttccgtgccgaaagagatgtggcaatctcttggtgggcggaagactgtgaaggaggcgtgggaggcgatgaagatgatgtgaatcggtaccgatcgggtaaaggaagttaatgcccaaagacttctccaagaatttgagaacatcaagtttaaagatggagaaacagtggaagatttcgggatgcgcctaaccaatctcgttaggaatcttcgcgttctcggagagcaagtagaagactcccgagtggtgaagaaattcctccgtgtggtgccctctcgttttactcaggtagtagtctccatcgagatgttttgtgatatgaaacagcgcatcgtggatgaactcatggggcgactacgtgcagtagaggatcagctagaagacaaggtcgaacagattgttgacaaagctggccgacttctacttgccgaggaggaatggctggagagaaacaaacatcgtatccgctccaacaacagcaaggagggaggtggtcatccagactgtgtcttcaagaacaaggcgaca

SEQ ID NO: 113601 - DNA, 549 bp, Zea Mays
ctcacgcatcctaagcgtaggaatcttgctctaactaatgaaagcaactattgtattatctacctcaacagcaagttcatcgatgaaaagtgataccttagaaatagaaccatcactgttgtccttaccatggtcactcactatgttctcaccaagcatcatggtacataggcctctagtggtgtcggcgaagaagcatatctagtttaagatgtcctcggcccaccttttgaactcattgtcatttgaagagaaagaagcatggtctaagtcattgtcgaggttactgagggagaaaagtaagacacactacttgagcttacccttacggaggtacttatacttgagtgcctccttatctaacctccacatagacttgtgcttgtcagaggagtacttgtgcttgcccttgtcccggtcagaatagtactcacgcttgccagccttttgcttacccttcatcttaggacaattggagatgaagtggttagggtcttcatagttgaagctcccctccttgtccccaccacactaatgattgatgcaatg

SEQ ID NO: 113602 - DNA, 341 bp, Zea Mays
atggactctactcgtactccccatcctaggaaaagggggagaaaaccggatgattcagtatcagccaagcggggacgcctgcaccgacaagttactgaagagaatgcaacgtgctccctttcagatgttccagcagtaacacaccttgaaggtgaatgtcctagtgcaaatgtgcgcacaaataaaagcacaaggacttcggaacaaccattttcaaataacttgggaaatcacaaagaaccggatgattcagttgaagaaattgccataaactatgttgagacgggagagttatataaccgaaagactacaattgtcgacactgatttcgtctctatgat

SEQ ID NO: 113603 - DNA, 336 bp, Zea Mays
gttttggaggaggaggaggatgaagaggatgtgccctccttggttcatagaaatagtcgcaacaaggctagcaacgatgatacagaccaagctctctcggggctggttagcctccagggaatgacaatgtccgccattgacgacgtgctggaggaggttattctcgaggacctttcgcggtagctttctgaagctaggggtgccgacgtccttatagagatcctggacagcgcgccctctgctagttttctggctaggcgacaaataaccccaccagtttgccatacatctccagcccccaagggtgctccggttcatgaggatgctccagccctc

SEQ ID NO: 113604 - DNA, 704 bp, Zea Mays
cttttcttataatgttgtttttgttaatgaacctctattccaaacagagtttgtgacaccgaaagcaccaaaggtccctagatagctgctccaaatgatggcacatgatccttctttatattaacgcaaaatcccatgacttttgaaagccaggccatattcttgtgtacaggacaatatggtatggataagatgtctatttgcagcttaccaagttacaaatactaaacatcatgatatcaactactttgtgcatgtcaaatttcatttataccagttgagggttattgtatctgtagtttgaacatctgacaaccttaagtacttgtagtgtccaattgagcatatggaaaactagtttctgttaaggcttatgtggcccatattacatgtgcctatatattctaccaagtcctaaggactaaaggaatgttagtaacatggtaccaaagcaggttaaggttagggttaatctcccttcctattcgtttttttcaagcgccgccgtccctgcaccatccctccgttgttgtgccgcatcgccatcggggccaggcctgtctacgtcgtatctctcttccgtcctgatagccatagcggccaggcctccctttcgtccaagtcgccgtcacacaggtctccttcaaccgtcgagcctccgcctccatcctgcccgtcgtcaagggccgcccggtcgccttcgc

SEQ ID NO: 113605 - DNA, 450 bp, Zea Mays
ctctgccatcacaggcttcgtagaaccagtcttttcttcagccactatgatcgccgaaggtgttactgctagacacattagttgaaccttcgagctctttgtcttcgtcgcatctacaacaggcagtgcagctcccttcgttgccaaggctattgcggtggtatccttatcgttggcatcgtcgtcttcatcatcagaaaaaatgagctcatcaccggagctatgcgttcctcatcatcttcctcgctgtctgggagtgattctagagcaacagccccttgagccttcggagcagtggcctcttcgatctttgtctcctaggtctctaaaacagtagtttctcgggtctccaaagttgaaataatcaaggaagtttcctcgatagcaggcaacctcgtagcttcgagcacagtctacaaatgttataaataacaaagtcaacaaaatagt

SEQ ID NO: 113606 - DNA, 448 bp, Zea Mays
atcgtagtggttatcgagggtgtggaggtatccgaccatgtagacgatagtgggatcatcttctatgggatctcctcctgacagagcctggagtcttttcttccaggtgggggtgtttttgttgctgggtgggaaatatcggaggggggtctcaaagatctctcggctatagttttggcacagttgtttgagggattttcgagcaatgctctggcaagtgtctgggaagcggtgcccgatgaaagtaatttggaagggagggtggtttgggtagttccggctttctcccaagtagaccgccatagagcacttttccattccattttcacggtactccttccagacatattcgggcttcttgcggatccccaagcgcagcgcgcagctccgaagaaggtgaggaaagccttcctcctctgagcaataggaagtcctaatcacccagggg

SEQ ID NO: 113607 - DNA, 642 bp, Zea Mays
ttgagtaagccgatatgatcctggccgagtgacctccgataccatgaatggcccttcccatagtggtgacaatttgtgccatccttcccttgttagaattcggtgaaggaccaagtctcccactacaaaggatcaatgtcgtatagccttatcatgatagcgcctcaaggtctgctgatatctggctgactgaattactgtgttcaatcgctcttcctctagcacatcaatatcttctagcctagtagcttcggcttcagctatgctttaaataccagccttggtgccccaaacatgaggtcggcaggtagtactgcctctgaaccatagaccatgaagaagggggtgtttccatgcagagctcgactgggttgagttcttaatctccaaaccacataagctaactctctgatccactttcatgcgaacttttcattttgtcgaacactttcttcctcagtgcttctagtatcataccattagccctttccacctgcccattagctcttgagtgtgctactgatgcatacttgatctggatacttcgttgttcacagaaatcaaagacttaagagctagtgaagttggatcccaggtcagttatgatgctatttggtatcccaaacctgaatattatgtctt

SEQ ID NO: 113608 - DNA, 378 bp, Zea Mays
ttcagattatagcattgtgcgctgggttgttggtgagacgatccggtaatggcgctggccaggggcgtcgtcgcgtgcttgtggcgccacgcgccgactgtagaaacgttgggtgaggaagatcgctctgtgaccaggattagaagggtgcaggcatcgttggatctccagccgatggatgtgatttgattccagggtaccccttcgtcaaatgaatctgagccgcaggatggaaggtcgatgaccgagattagatcccattttcttaaaaccctgaccgtaggattttaatctgagggtccacgttgcatactcatgtgatctaatatgggccgccagattaggatatgatggttgggatatcacaataccccttcg

SEQ ID NO: 113609 - DNA, 451 bp, Zea Mays
aagactgattaccttgaaatcccactcaaggatagtatcaaaggatggcgcttggagtggtttattgttgagaaacatggaaattctctccccccacggtcagggagacagccggatgttcgtactccgagttggaccgagtcccccacggaccaggaggtggctgaggcaggggctttgctagctgaagctggactgctgaaggagaggggtctgactgcagaggctgtggttgctgattatgtcttcaagaacatttagccattgaaggacagggcatacccgacctatctgtaccgaggtctagctgactcaacccgggttaccaacagaagaattcctgctgtagacttggtgaaccggcttgaaatgatacttagaggcaaggtatcaaatgttggcgcccctgtcgcatactcggtctggaacctgcctccttccaaggccttta

SEQ ID NO: 113610 - DNA, 527 bp, Zea Mays
gggtcccattcatctatttcaaaacaattgcctaatgtagccatataaagctgcagaccaccaaataaagttgtgtagaaaataaacaaaatagcacttccaaatctacaatcattgacaaaagctccttatatgtatttccatatcgaccataacacagctgaggagacttgttaattataccaaacaacatggaagaatggagagtgtattagagaacttgtgctttttattggccacccagaaacacactatttattctagagactggttcccttaaaaaacatttgggaggaaccttaaactggcggtatggggtagaaataatgaagcaccaaaacgaccacatgtttggagtatatggaaaatatatgggcatgtcagctcaatgggactatattgagcttttgatcaaggacatcgatacaatgtcagaacgcagtacaaaccagacagagtaagagtagtatgactcatattgtccaaaagttcatccgactatgattatgcagtagtaaacaaaccgc

SEQ ID NO: 113611 - DNA, 315 bp, Zea Mays
ggacaatccttgcattgatgtcccttctttcggcatatgtagcaaaggcgatcttcaagttttgaggatttcttctttccttgtttcgtgcttgctacatggttagttaatattttcttttctaacactatgcatttttgtttcaaataaggacaagacttaattaagtgtcccttctttgagcatttaaaacaaagtttatcatccttgttaataatcaagtcatttttaatatagggacatgacctaatcgagtgtcccttttcaaagcattcactacacttcttacttctcttagtgtgaagtgtgacttga

SEQ ID NO: 113612 - DNA, 459 bp, Zea Mays
tgggcggcggttaggcaataaccatcaatcatggacattaaatgtttaattcgtgtttcaaatagatggataattttttgagcttatatcatggaagcattgtggaagaagatccctatggaaatgccaagttcattgacatgcgacacatgctcgtgctattcgttggtagaccctccttgagtgatgtgtttacaaaggctaaacaaaagctaggttaccatgaagatgatgacattgcgattgacggagtgcttaacattggtcatccaccaaatgtcataagatgactcatcccaattgattctcaactggttgggagaattatgttactttggctatgaagacccagttgcaactcatggagcttgtggtgcgacgggttgtagtagacctcccccctgaagactatgatcgtgttgtggatgacgtgccaaatgtgcctgatgctcaatctgg

SEQ ID NO: 113613 - DNA, 352 bp, Zea Mays
catcaagcgtccaagagacaaaggttgggaagttagttacaacaatagaggctatcgcctctcaagctgaagctggcaccgtgaatccgtctgaggatagtgaaacattgatatcaaagatgatagcaccaccattcgtcctacaaagccaagccatgtggatttcgataaatcaaagatcaaaggaggacacattgaggtacttaaccgctttggctatattgacaatgttgattaggtgcggctaggaggtgatgatttagtgccgaagccaagagagggcgaagttgttatgtttcgaagtttttttaaggctaggattagatttctttgcataagacagtagttgtag

SEQ ID NO: 113614 - DNA, 387 bp, Zea Mays
catgagcgaggccacctcgctgttcaagtgccgcatggagcaagtgctggtgcagtccgtttcggaggccggcgtagggcagcccctggcggttggacccgggcgtgagcggctgagcctgagcgatgctctgttacctcctgcgacccctttggttgttactggtgaggcgagaccgtcggcaaaggagctgctgagctcacggcttgctcaggtggatggagaagaagcgctggcgccggtgatgcctgctgctgctggtagcccagagtcggagctcatgtgtgctgttggttgcggtgtgctgggtcgtgacgcagaacctgcttcggaggacgacgccaacgaccctactactactactcatgtgccgtcaagcatcggcgg

SEQ ID NO: 113615 - DNA, 440 bp, Zea Mays
ttggaatagaacagacaaggccaagaattcattttatctaggaaaatcaccatataactagcttttgatgaatcaaatgacgataactgcttggcaagaacgaaacaagactggtatccgcctaggatccatcttcaacaacagatagtaccgctctcatatgaagaaatcatcaggagtagagaggatacaacaggtctctacaagatcttcatatttctatcacaaattatcatcactagtagtctaatgatcaagacatatgactcttctggctccaaggaccaagaacatgttaatgtataatttagcttcaagctctgtggtgatgtgggatttcatagttatttgcctactcttctcacttctggtagatcagaggtagataatggtaagcatgccaaagggtggaattcagtgtagttcggctacataaaccc

SEQ ID NO: 113616 - DNA, 511 bp, Zea Mays
ccaactctggtccagataccctgtaggctcttttagagatgggagcagtgccaggaagaagctatatggaaaactcaacttttcgctcgggtggcatgcctagtaagtctttcgggaacacatttgggaattcggacacaaccttgataatctcgagtgaatctggctccttgctatcgatagccatctgatgacaacctcctttccttggctcaggtgagattaactcggctaccacttcttctcctagtggggacaccaacttaattatcctcctatcacaactgataattgcttggtatttatctagccaattcatccctaggatgacatctattccctgagtactcattactatgagattagcgggaaacgctatcccccttgtttccactcttacattcaagcaaatgctatcggctcgaattctaccaccggctgagtcaatttggatggggattgacatggtagtgattggaagattatgtgcttctacccatgatgcagtgat

SEQ ID NO: 113617 - DNA, 386 bp, Zea Mays
accttatccacctcagtattgtcgtgtgccttggcagggaacggggaaatgcgttttcaacaatgagggtatcgagtcaaaggaagataggtaggctcagttgcaaatttcatgtttggttttttacttcactccctgactccttgtaaagatgtctacttttttataccaagcaatagtaacaattgattcatatgcatgtgcatcacttatatcagttaatcctaccattgtgccccttggatgcagcaatgtcgagagatgtctttactagataagcaatggcacgatacatgaagtctggaggtctgcaatgaccgagttgcaatctctcgtgacagaaagccgctcgacacagatgtcatttggagcaatggatatctctg

SEQ ID NO: 113618 - DNA, 279 bp, Zea Mays
aaaagacgacaaacattttggacatttacgcaacacaaatacgaccccataagtacgagcatctacttaacctgctacggcttttcattattcttctatttatcacacaagagcatcccaagcaccggttcaatagaggaggaattcctatccacaattaactactcaagcaaacacatcaaatcatggaacacatgttatcctaagtttagacattacaagtctatgtctgctaagtgctaactaagcatttttagccaacaggtgaacaaaacaatc

SEQ ID NO: 113619 - DNA, 538 bp, Zea Mays
ggttcagatacagattgcttctgtcttgctcatggtggaaagatcacttacttcgattgtcatcgatgttggttgccatggaaacacccctttaggagcgataataaaaactttataaagaacactctggtcacaaaaggaccgctaaaacatctaaacacaacagaagtttatgctcagctgaacaatatgctcagctgaacaaccttgtcccaaatgaaaaggggtacaagtaccaaagatttgaagtggaccacaactggacacatgtatgtgtcctgtggagctcccttatatgccatcattgattcttgtgcacaagattgatgtcatgcaccaaggaagtaattttgctgatgcccacacacacacctgcatgcattttgaaaaaacaaaggacaatctgaaagctcaaagagatctagcaatgctttgtgaccgaccaacccaagtgctcaatgaccacggcaagctgccacgtgccttgttctgtcttacctctaaggacaagatcgaggtgatgagatagatgaaaaaa

SEQ ID NO: 113620 - DNA, 492 bp, Zea Mays
ctcacaattcacgtaggagacagggtggtgctttcagatgcaatgcagtgcgaactaacccttgatggcagggaagggatggctggtaggaagcaggagctcgctctggtgcctcacaggcaggcactagcattttgtcctactcaccagtcaccacaaggggtcattagtttattgctcccctctgattctgttgttccttgaggcccctacaccatcacaaccctttgcagttctatatttggagggcagcacatctcgtgcctatccctaagttcaactgtggcagatcagaatataggtggatgatgctaatattccatgattccatttcagcagctcaccggtatcccagttgtatatatgtatgtatgtatgtatgtatgcttgaagatatatatgcacaatgcagtgctatgacatgacatatacaaacagaggcatgaatgatgcacaagtaaaatattcataattaagacaactccaatgaat

SEQ ID NO: 113621 - DNA, 323 bp, Zea Mays
agaaacatttggccaagttgtttactaaataaacattcaaatcaagtacataaaacatagagtacatcacttgaagaccatggctgttatagaaattcctcaaactactaagctaatgaggaaatccaagatgaaccaggatgaataaagaattccatatcccaaagtcattaactgtaatatgaattatatgtagcttcaagctaaaataaacagtatggtagcaactaaagaaaaatagaatcagccaaaactgaaatactaacatccaactaaagaaaaatagaatcagccaagttgtttaccaagatttaattgaaact

SEQ ID NO: 113622 - DNA, 372 bp, Zea Mays
gatttattcaaaatttcatatatgtttagtgatatgcattcatttatttattctagtagtttatagttaatacattactgtttacaacaagttttgttttattgaaacatattcagatttttatgattataaaacagttttgttttattcaagcatattcagatttttatgattataaaacaggacataacatgtatgcaagtgtttttggtaaaggagcagtcaattagttgtttttggtagagtatatgatttattcaaaattgcatatatgtttagtgatatgcatacatttatttattccagtagtttatagttaatacattactgtttacaacaagttttgttttattgaaacatattcagattttt

SEQ ID NO: 113623 - DNA, 324 bp, Zea Mays
gttgtacatttatgagcattaatggtatggtctataatgtgtgttctcacatactagtaatatagttcaatggtctctggattcatgggcactgggtggcgcaaactattaccattatcgctaagtgctaggattggttggactatgatgtgttgtacatttctgagcattgctagtatggtctatgatgtttgttcttagctattgaaaatatagtttaatgatctttagattcataggcactaggtgccgcaaactattccattgtcgataagtgctaggattggatgctcaatgacgtgtgaacatttcttagcatttcta

SEQ ID NO: 113624 - DNA, 728 bp, Zea Mays
aaactcctccctccaaattaggtggtctaatcttatagcaaacacgtttggctccatccttaaaacactaatcggcttggctccttggcttggttagcttagccaaaaccgagcgctccatccagctcatacaatatgccatgaagaaaatctgaagccagaaggtacggccttatcaaattgtcatcaatcatccaacaacaagagaacaagcttttccataaactaaactaccagtaacactttgccgagatcacttgtaactttgtaaggcgagtgaagaaactagtagctagcactagcagtcaaatgccagggctgctgaaaagccaagacggcgcaacaacaggtggaaatggaacaggagtgaagggcatgctgcacgcggctagtctgcttgtgcatacgcaaccagctatgctgcagaactcattgtaacttgtaagtaggcgctccaacaacccgcatgagctcacgggaaccaagcgccctatccagctcatacagcagggctaataaaaatcgttgcagaatgcaattaccaaataaaaaaccaagcgctccatccaacacatccaacacataatgtagtgacccaataaaaatcgtttcagaatcatattttgcagtaacaaggcacaatagtcacagtttacattaacaaggcacatatcacagttaatcattcattttccttattgagaacaacttttgtggcctaattctag

SEQ ID NO: 113625 - DNA, 512 bp, Zea Mays
caagttataaattttctaagttctctactcatttaaaaagaataaacagaaatggttaaaggaaaatgactttgcattggggtccctgggcttatttctatctaagtcgtttaaaccgtgcccctcaagcactattcacctgagtctctgacttagcacttaacccccctaggtttctatcccctctaacccgagctcctccctcgcctgaacagtgaccaaaggagaaaaagcggtggcgcggcttaccggcgacggtagaggtccggcgaagggtcggatgaggtccggcgaagtttgatttgcaaaactaaagtgttttgacttagaagtaagaaatgaatttgttttgtgaaaacaaagtggtggcaaaatgatctaaatatgccaaaccctattcttattctattggtgttcgatttgacttcaatttgcaaaagttggctcatatttggttaagctagtgagttttgagttgctattggtgtgttggcataaatcaccaaaaagag

SEQ ID NO: 113626 - DNA, 359 bp, Zea Mays
gaggtgcaacagcctcaagacatagaagaaggaccgtcggttccattaggcaccctgaaccgctccatttccatagcctcagcgtttcaagaagccagcaacttcaagggcgtgcactgcgttctctacgttcatgggtatgaaaccaggaggatcctgcagacgtggatggagagcatcgaggtcaaggtctggctggttccgcaagccgagttcatcggttccaccttggagaaggtgcagagcaatagcacggccaccgctaccgcggaatgcggcagcgccgaccggtgcttcagctccaaggagatggtgaacctgttgaggaacaactctagtcctaggagagccatcctcgg

SEQ ID NO: 113627 - DNA, 618 bp, Zea Mays
gagcaatcggcttaagtcggcgacgacttaagtcgatgcgacatgctcacgcttacctgacttagggtgaccactataccctgctaacggagcaatcggcttaagtcggcgatgacttaagttggtgcgacatgctcacacttacttaaccaagggtgactactataccctactaacggagcaatcggcttaagtcggcgacgacttaagtcggtgtgacatgctcacgcttacttaacttagggtgaccactataccctgctaacggtgcgattggcttaagtcggcaaggacttcacttacggtgaccactacgccctaccagcaagacgactagcttaagtcggaacatgcctcaagctagcgcggtgtactttcattcactgaccactataccctaacagcagaacgaccagctaacattgaaagcacttcaggaaaagagaacatcttacttgctaatgccaggggcattttccagtaccctgttcatagaatattccagttctaacacaactgtcgcgtccacatagaattcatattacatccatccttcaaggagatataaactcaataaataaagtgttttacaggacatcattatgtcgaagcatcttt

SEQ ID NO: 113628 - DNA, 305 bp, Zea Mays
atcgattactgatggggatatttgttcaagattttttcatgcacatgcaacggtaaagcataggcgaaacacaatcgcctcgctcactgatgataatgggacaagtttctcggagcatgatcaaaaggcaaatcttctgtggaatgctctcaaaactcgtctgggtacttctgatttcttggagaatgtctttgatctgtcaaatcttataaatatgcaggatggtttacaatggttggattcgccattcaccaagcaagaaatcgatagcattattgcagcactcccctcggataaatcctcgg

SEQ ID NO: 113629 - DNA, 409 bp, Zea Mays
ccctttatcaaatccgcacaaactgaaatgtaccagaaatggcacacatttgtcacttccataattcattgaaaataactctgcaacgatagtccaatactctggtgtagcttgcatcatagccaatgaacaaatgcagattaatcagcctaatgatagaaggtagtaagtatatacaaaaggagatgagtgcaaaacttcgattctcaattccttccttcaataccatccaacagaacaaacaaagcacttaggcactgcaccaccgcttctgcataggcaaatagcaaatcgaatcgcgcatagaaaattattgttctatgcttgtcctatgtccgaacaaaattgaccataccacattctttttctgaaatttgtaagtttacaaggtatgtcatgtggtcatcac

SEQ ID NO: 113630 - DNA, 318 bp, Zea Mays
acaatgaaagtgaccagtaagtttgttttgtggtttggttataccacgctgtataggtgatcccgatcacttgtcgggtttggttataaacaggtacaaagtgaacgaatgcaataaaagcaaactctactagaaaatgacgcatatgcatgtgaaatatacaaaactgatgtggccaacgtgatgttaaaagacttgttatcaaattttcaccgatgtgctacattttataactattccttttgcaaaattatgataaaccagatcttaactgtacaatttgctaagttttgtggcaaaactaggtagggatggcca

SEQ ID NO: 113631 - DNA, 622 bp, Zea Mays
cgcaagtgacctgttcgatcataaaggcagaaaggtgcctgatcctgctcagcattccaatcctgctgatggacgaacgagacgatatgacctactagtagcgtttgtctggcttgttgtgtggcacttagctgcgtgcctgcctttgttgacagcacagcaagccgatcagagagacccacggacgtaggactgtaggagtacgtacccatgggctgatgatgagcatggcggattctccatccaatcgttatggggatggctgagaaggccccatgccatggggtcagatgccacaccacctttccttcctccaaaaagtctccacgcatgcatggattcgttcgccaaaaggcggcagatcagcagcaggaaggcagtgtccttccctcctcgtgcgctggtgtgctgtgcatgtgccatggttgggtgaaaagcgaggacgacgatgcttgcagcaatagcaatggtgctggtgggagcggaatgggattcccatatgcatactaccaccatacgggtgtgtgtactatgcgttgagtattttcacgtttggttgcatggggccctgtctgtgaggttctttccttattctttgcgcatgcatgcatatatccacgag

SEQ ID NO: 113632 - DNA, 771 bp, Zea Mays
ccatcatctccgatatcaatgcctgaactatcttctatttcaaggcacactcgacataattttcatgaagtcttccatctgagacaaggaatttactctgacatgcctatttctaaagttttggagataatgaaatccaccaacttggatgtaagtggaatatagtgattctttctgaaatgtgcgtgagataatgtcagcccaaattctgatctttttattctttgcatcatgtggaaccaattttacagaatgcccctactcagtcacttttgagttttgtgaatgccatccttgatcggatcattgaaaatgagaatggagaaattccttatgtaggctactcaaaagcaatacagttagttgtttcttttcatacatgagaactttggtacatttttgttttatacttctttcatccccttggataaaaagatagcattctttgcacagaatatcgcttgcttgttgagaaaggtaataatggagattgaacgccgcatttctactcaagcagaacacataagaaatgtaaggaatgctattttatacttatttttcaaattattcttgttgtaactcttacttgtatggcagcaaaatagccttatcagagcacgtgaagagaaatataaatcaaggataagagtactagaggcacttgcaagtgggacaggtggacaaatgcaaataaattcaagtgcggcaaatggaaaaataaatgtaagttctagttttcatttgaaacctattatgatgagttttgttaga

SEQ ID NO: 113633 - DNA, 387 bp, Zea Mays
cggattctgagctgatggtaacctgacctcagatctatctttgagaacacactggctcctctcaactgatcgaataaatcttcaattctgggcagggggtacatgttcttgatagtaacttcattcaaggcttggtaatcgatacacatcctcttcgtgccatccttcttctccacaaacagcactagggctgcccaaggcgaggtactcggtctgatgtagcctttctctgacaactcatcaatctgcttcttgagttccaccaattctgggccggacactcgataggctctcttggaaataggggcggtgcctggtataagctctatggcaaattaaaccttcctttctagtggcatacctggtaactccccgggaaacacatct

SEQ ID NO: 113634 - DNA, 318 bp, Zea Mays
ctcatactcatagtcggcacgttagcttaaagtgatccaaaacacttagaaatggcacacatccctttcaaaagtccacccttgagctataaaagggcaagacaaccttctttatacacacaagcacaccggctataaggcgctccaagcaatactacgattagtactacactggagtagggcgcgggctcaaaccagtataaccaattatctcgaatccaacgtagagtccatgtgatttaccattcggagtgagtccatgctagcatctcctgttgaacacaaatctcattattccccggtttccaaaaccacgac

SEQ ID NO: 113635 - DNA, 614 bp, Zea Mays
cggaataatattgtttggtgggttacaagggcgcatgggccctgagggttaaacaaaaaatttgcagagattatcaatgttccagtagtgctctaagtcttcgtcggagggcgttgatagcctgtacgcgctgggggatgccttcatcttgacgatgaatggaccctcccatttcggctccagcttgccccgtgactctgtccgggttgtccggacgagtacgaggtcttcttcgttgaactctcttgggacgaccgtgttgtcgcgacaggccttgctttgagcttggtatttgttgagggcctgcagggcgaggacgcggtctccgtcgatgaggtctttagatgttggttcgtcgacgtcggggactgctgatgtgcttgttcggggcgagccatgttttatctcctgcggcgtcatggcctccgatccatataatagacgaaaaggtgtgaatccggttgcccgacattcggtcgtgtttagggcccagactacttcaggtagttggtcggcccatttgcccttcttgtcgtcgagaagtcttttcttgatggcagtgaaaatcttgccgttggcgtgctcgacgacgctgttggattgcgggtggtata

SEQ ID NO: 113636 - DNA, 321 bp, Zea Mays
ctcgcactattcttgccagtaatcttccatcaggttccctaatatgcatcaccccatcatcaacatgaatcttgtactttgcttcatcaagttgcccaatactgatgatatttgttgtcaggcgaggaataaaataaggcccaacaaacgaccgggtctcgccattcttgcacataaacttgatggttcctcgtccctcaatctgagccaccgagttgtcaccgaacctgacagtacccaacactctggtatccagatcggtgaaaacagccctggatccggacatatgatttgtggctccagtgtccaggatccaggttc

SEQ ID NO: 113637 - DNA, 298 bp, Zea Mays
gggcagcattgtattctgtaatcggaaatacatcatcaataaaaataattcattctcaaaggcactcgaactatttattatcaatctgcatatttactcgactcagggtgatcattataccctactaacgaagcaatcagcttaagtcggcagtgacttaagacggtgcaacatgctcacgcttacttaacttagggtgaccactataccctactaacggagcaatcgacttaagtcggcagtgacttaagacggtgcaacatgctcacgcttacttaacttagggtgaccactatac

SEQ ID NO: 113638 - DNA, 687 bp, Zea Mays
ggatctcaactctcaacagttgatatgatattgtttcccactatcggttgatgagaggcacttgcgatccggactcgcagagtctttatgagatgtgccatgctgtgcccctcttgtgatagtttaaattcagtttctagaaaatctcttattgtcagacactgaagcagcaaaccaggcttcctcgtacaacacaacaaggctagctgattacgggtaacaaactccgaacaacagaagctgaaaccacggtgttgcagcggatcgggtacgatgcaggtaggccaattacccgccggacatgatatcggtgcctctactccgtatctgtacccgcgagaggttgcaggtaaaattcccctctcgtgctcgtatcgtcggatatccgcggatatcgggcaacccgctacccaaataccatttaacacagtcacagatcaatataaataccacaattcacatgtccacacatcaactccacacacatacacactgtaacacatagttaccagcgtccgatggggtaacagggttggggtcttggggacatggggtcaactgcgctagggcctaggagtttacgggaggtagtctgtgtgtggatggacaccagttgccaaattaaatgggtagcgggtcttacccgcagttgaaaggttatgcccaaacaatacctgcgggcgagaa

SEQ ID NO: 113639 - DNA, 527 bp, Zea Mays
aaagaaagatggctacctgccttgatctctcctacagcagggctgtcagcacagcactggcagttgaagctaagcacacaggctcagggaagtcgaagggattcgtaggtgagaggtccagtcaggggcctgaaaaccgacaaaggttggtaatccgacctttcaatcaaaatcgttcttcacctcgtccaccctcctaccccttcaaacagcctatcttcatccgccctgccactgcccccgcttcaaccaatcagctgagtgcccctggtgctcgtttcattgccctccctagctcctcaactggctggttcaattacgggaagtctggacattgtatcaaagactgcccatatccgaggaagaacaaatccaataatcagcagaacccagggagttcaagccaaggcaagggaaacacgacaaataatgcaacgggcaagaatataaagaaaactgagcgaatatactatacacaagtggccactacaccggagggcgagccagttatgatgggtacgtttctt

SEQ ID NO: 113640 - DNA, 583 bp, Zea Mays
ggaataaccatggcaagtgactagtgagtactagctgcagtggtttcttttcactaaccccatgacatgtgtgcattagacacagttggttaaattctgctagctagttatcacagaatactggaagtctggaaccctactttgcgatgcacaccttattgaccatagggtctcagagaaaaatccaaactatcgaatgcatacatgtcttttgtgatatttgtcttacagatttggctgcttatttcttgtcaccctagccactcctgaaactgtcaaattcaactcataatgtggggtggagtgaaaacactcagttgcttatttcctctcacctcctatgttaactcatggcatccttgcaacacatggaagtgtcaaattcagctgtataaatatagatggtgtagtatccctgtttgtaggtcatttatgctctggtttggtagattactttgtacttagttaaggcatgtcaaatcagtataactgtttcctgcctgctggtctggggcctttcattatcagtaggttgcaacctttatctgtgcttttgactttgctgaagattccttgttcttga

SEQ ID NO: 113641 - DNA, 864 bp, Zea Mays
aaagaagagctgtgcgtttctaacaaagcggcaggatgggatgtttggtttgctgcccactttgaatgtttcataaagttaggcatgtgtttggtttaaaatcacagttatgacttccaatatagagcacttaattttagacatcttaagtaagtgtgatataaaattatgtggcaattttgtgtatcctaggtatagaacgaaacaacctatgagtgtttggtttggccgtttgggttaggctggctcgttaataaaactgaagtaaaaacctgaactcggatcggtttgttaacaactcaagctggcttgattagctcgaccatgcatgcatggtagtgagcagcgtcgacactcgacaaggatgtcattgggtgggtcgcctcgctcttgtttgccccgaatcacctgctggcactcaaattaggcctcggccggttctagaatcgaaccatgctagttttagtctaatctaaaggaaattatacggaacacctaaaaataaaaccgctttgatttttttaatgcgataagatcatctctactccatgtaaaatatcaagtacacgactgatcaatccattattaccaatttatccactctttcccccctatctcttccaaccacttttttcctgcatgtccttcgacgggatttgtagatgttatcaattctagaacacacttgttgtgtatctctctagtgggtcttttcaggattcttcatgggtttatcagacagagaacgagcgtctaactggcctcgtcaatctagtggtgtgcttcacctttgggacctctctttgtagcgtaattcggccatttgtggtcttaggcaatctagccactatcggtatggtaatt

SEQ ID NO: 113642 - DNA, 352 bp, Zea Mays
ttggcattactgttgcaagtgcctattacatgcatgaatggataatcaaaatcataatctgtctaggcataaaaacatatgaccaccctagacaatggtgcagaaactatcatacacacctcagatgcttgcttcttacataaggacctctttagttctttctcaacaataggaaattcatcaactgcataggataatagctcttgtgaaaatgatcaaaacaaccaaacatttaaaatacaacagtatccatgggaggaagtatttaaatagcatgccttttactcctagtaattctgcttccttcagaatgcctgtcaactcctcaacaacattgtgatagtcactcgta

SEQ ID NO: 113643 - DNA, 542 bp, Zea Mays
tgattatcctagttcgggcaacacaaggccctacttccaacagataggatgaggcttatattactcgtatcgtggtgccaagcacagcaggagaaggaaagtccccaagtccctagagatgattgaggcaaatgccaatatctaagacagagtggaggagtgagcgttcgtctacgtgtgttgatccatcgtccatggagggaccactgccctatttataaaccaagcggagcgtccgcagtgaagctgagtcttgtattcgaaggagagatgccctggcgtctgacatgacggcgaactgtgtagtagatttgtgcctgctgacttcccgtagagagccgaggccgagaccgagggatcgtctgtacgcccgagctccagagggagaggccgcccataccgtagtggttgtaacagcgtcggggtatgggccaaaggctacttacggggtgcgtcatcgtcctggcgcgtgatgatgtcgagattccctgctacactcatcgagatcaaagcccctggttgatgcggaagtcttcccgagg

SEQ ID NO: 113644 - DNA, 567 bp, Zea Mays
cttgctgtttgtcagcacctcctgtattgtgtggtgagaatttgtaagagcttgatttcttgctagtgaggcagtatttatccatccacatcctagcaactactaggctgcattacttgtttttgtttctcttttgcactaaccatggcagaggatgcaaatgtgtggcctccacattctccacgaatagcggacatcattcaacattttgaacgtcaagtaaggttgcacacagatgctctcaatgaagatgttcaagtaaccaatgagcgcattggtcaattagaaacagtaaaaattgttgccaacaacacattgaccacaatggaacaaacacttgctgctactaacacctctcttgcagcaattattacacgattagataggatggaacaatttgggcgtgaaggtaggcaacaaggtgataatgacggtaatggttccattgctagtacagcaagagatgatgatatggagtattcagcggacaccgagcatgatgaccgatctaataggcatcgacgacaccaacgacgtgatcatcatggcatgggtggtcgacctcca

SEQ ID NO: 113645 - DNA, 570 bp, Zea Mays
tcacatagtagcaaactagcaactaagataatcaggcaacatgaactctatgctctttaactatcctgaaatgaacgagtaaaatggccatcaaattttgtgcatgaaattatcaaaaacacaaagtataagaatattggacatggagcagccacatttccctggtaactaattatcatatttgtaatatgaatcgcatggcggttgtttatacgatttaaatcaagcagatacattcgatgctaaaaaacaatggtagaccataagtcatttcacatctagtacttgtcttgctccactacactcgtacggtcgtaccataatttatatatccaatttgcagggagtacttcttaaacgttacagttcaatagcagtcatatgctcaacaaatcgccgatttgcaggtcatgatacagaaatccatgtggcccgatagaactaggggcaaatataggaagcatccgttgaactatctaaacagcacatgcacattcgtacttaaaaaacatcaacggaaaccaactaacaactagcgaacctgggtacaagaaaagctcaacggctgac

SEQ ID NO: 113646 - DNA, 414 bp, Zea Mays
tccaatatcctctcaacaatcccatgaattttgagtcgtctaggtgatgacaattaccatgagtaacaagagtagaactagcccaatccaatcaactagtgctacgagatgctacaactatatgtgatgcactaggagctctccaatctcactcaaaagacgaactaaaagatgcaagtgggtgaagtgtgtttctctagctacaagaggtgttctcaaatgtaaggagtgaacggatgccaaccaaggccagccaaggggtctatttatacaactattgcggtattacctcttgatggatagaaatcaagggcaccaaacatgtctgatgcaccactgatccctgcaccgtacatgtctagtgcctttccaatgactataaactattcattacacttgttaggtatctggcgc

SEQ ID NO: 113647 - DNA, 316 bp, Zea Mays
ctacaaaaacctattcaaaccttggactacttgaaccagtctcatcggcagcaggctgtcttccgatggattcatagagctgacctcggcctgggaggcggtagctcccgctactaaagcaagttcttcagcccttgtccctggcacatctgatgaaggtgtcatcgacatcttagcagcacgctgagtgaaaagcgaatgatctctgagctagctaaggctggtacgaaagtagcaaagatattcaaagctagctttgaaggtggagcaggcactgacagcagtgaatgcaaacaacaaaagtcgtgcccataat

SEQ ID NO: 113648 - DNA, 296 bp, Zea Mays
tggggttgtggctgttgatggtgtgggacaatggcagtgcctagaaaggggctaggcgcgggcgaagggagagggagtgggatggtgtcagctagagagagggagacattaatatcgagattgagaaggtacaaggactcagagttttcactctatttctacttattgaaaaggttaaattggactctcaattgggaggcgtaccgttcaagttaggccctattggttagtttgggtccaacatggcaccttggctgaggccttacccgattaggacccttctttgggcttcattg

SEQ ID NO: 113649 - DNA, 662 bp, Zea Mays
ttgagtcgttgagatgggaggaatccatccactacaggaatccaggtaattcccgtctgctcagaaccgtataaacccccttcatctccctccacatacaagccccacgatttctatattctcatgacaactagattatccaggaatccagattcttagaaaagctcttaaacaagttgtcccaaacaggaccttagagatccatgcatcgaggtctatttgagcatgtttaggtagctctaagatcgtggggacctaggtgattgttgatagtgggcgatacatttgattccaacactattagggccaccaacactcgtgtgccggctgggccctcttcactttggacggtaggttgagcgttaggtttggggacccttagcttgaaggtccccataggctttaatgtctaagttaaattatgtgtggagagctcatcttctatcatattttatatcatatgaatatatctatagtgcacaacatcaaatgagatctgcaactaattggctttgatggcgtaggcctccaccggcatgtccccatgaaacagggctacgagagtaggggtttggcaatagtcaggccctttggtacttggtcaggacctttgggaggtattctggtagcattatacaatacaatcttctctaaattttgac

SEQ ID NO: 113650 - DNA, 546 bp, Zea Mays
gttttcgtggattgaggagtcttctgatgaagatttagattattttgttgcgttggatttggccgcagcgcagtccttgtcgcagcctgaagtgcgcgaagagtctgctcccccggttggggcgatagccgaagaccaccgccggcgaaaggtggtgtcgaagcatagtattggtgggatgtcacgaagtgggaggcgtcgtcggatgggtatggaacgatcctgtcttcgattagatcggggcggccaacacgatttactatcctcgacgttcgggacgtgtattggggagggggatttgcggaatctgtttgaaggcgaagagttgaagatgatgtttaattttcgggaggcgggtcttattccgaaggatgagccgatgtagcatgtttgctagcctcgctctcgtgttgcgatagtgagtgaaaacgctgccctcccccaattcgcaatagagagggagggcaacaagatgtgatttgtattattgtgcaatgtggccgacggacccttcgttttgtgtatgtaaactatgatgaaaccgtg

SEQ ID NO: 113651 - DNA, 811 bp, Zea Mays
attcttttagcttcgacatatcctcttcggagagttgtgggccgcccaagtaccgtaggtcgaaattcactccttcctaagaggtttcttcaatcttcttccccttgtcagaagctactgcggctacctccttctccgcaaccacgtctgatataagtctatcaatttcggacagagtggttgtaagattttcgtcttcggctgcagcggtagcttcgacatcagtcgatttagcagctttgtctgctgaggctgagggggggggtctattcaatggattctaatatatttatcatgcgatgtttcttctagccctcgtctctcccatcagcagccgcagagatttcctttttctgtaagaggctagtcagttccaaccccagaggacttagcggagcgaacgagaaagactcagtcattaccttcaatatttccgagacctccacaggagaagacgaagggctcgtagtttgcttcggcatatcttgcatgttcgtcttctcaaaggatttctcagcaagcttccattttttgggagccgatactttctgctctggcacattttttctcttctttgaagtctcttggtcttctttgacagaccggacaccttgcccactcagaatactgacaacccttttcctcttgactcctctggccccttcatcaagcctttcgtagtcagggtactcaaagttaagagcatccattacacggttcagcctttgttttggcagggtgccgaaggcagcagtcattagttgatcttattttcttgtatagttcccaagaatttcgttgcacatggttt

SEQ ID NO: 113652 - DNA, 284 bp, Zea Mays
ccaaaattctcatgaagaccatctcctctggctttagtctgatagtgtagttcatggactcggcagaaaccttcactgaacggttccactccctagctacgaagggcccaaatataaacacttaatctaacaatagtgttaggggtcagctgatgaaggtaaaccccaaacttcttcaacatatcagcaatcatcccattcaaaggaaaccttaaccctgctttaaagaagcttttgaacacaaccacctcattcttttccggcttcggagtaatctcctcccc

SEQ ID NO: 113653 - DNA, 502 bp, Zea Mays
agcatagccgaagctttttcactgcactctcaagcgaacacttcatcatttagagttaacttcgtcaatagggtgagctttgtcaaaactgcaaaaagaatcatcaacttcgtaaaaaccacaaaaaatccatcagaaggccaaagtgcgttcgactgcaagggtgactcatgaaggagaggagactgaggccaccgagacagctccaatttctgaagttatgagacagacaggtctagttatgacagagggaggtactaacgaaggtgctcctattgccgaagctaagcagaccgttgctgaagaaggagacactgaagaagatgaagaagattatagtattttgatcccatcaaaaccaagccatctagattttgagaaatctactgtgtctgcagccgatgtgcctatgatgatgaaactgggctactttggagaagctgaacggaaacttgttccatttgctggagaagaaactaccccagcgtcgaaggatgatgaa

SEQ ID NO: 113654 - DNA, 779 bp, Zea Mays
aagctagtctgctatgtttgctcagatacagtgcccatgttatgctactattggcacggagttgaggtgtgaagaatcaatcaatagtggaaacatatcgtgcttttgatcaataaatatcgagagctttaataccgaatcttgaatttcggttattccaaattgccaaatattgtgctcgtatgtatactcagtcgtgatcatggactatactgaattgcatacggtagaattgggtaagactaccctacattaaaattaaaattctgattgccatcaagtccctggtcgaagcttccatcactcttcctttcccctagtcctggccacacaaaaaaccctagattcaaatcctggttacgccatcaaatccctggtcaaagcttccattgctgttccttccgggttccttcatatccttattcttgcgtgacaaggatgtgtcggagcaggaacagttatggctggcagtgggtttttagtaattactattaattactcgattgcgaaaccctaaagttgattaattcacttttccccattgaacccaaaaccaattgcctgaattatttttgtttgtctatctccaaagggtccaagctgccaaggggaccacaataaatactcttagtcatgcaggtctctactgtacataaataggaggtggtctttaaactatgtaattaaaaaaagtatatcagaccagctctccatctttcattgcccaatattatttttctggcccggtgcactggtgagagctgtctcactgagttacc

SEQ ID NO: 113655 - DNA, 390 bp, Zea Mays
ggagaatttgagaactgcacaatccaggcagaaaagctatgctgatacccggagaagactacttgagtttaaggagggagattatgtttatttgaaggtgtcaccactccggggtatgagaaggtttaaagtcaaaggaaaattgtcccctcgctttattggacccttcttaatcttaaagcgagtgggtgaggttgcatatcaattagagttaccggatcatcttgcggatgttcatgatgtctttcatgtatctcagctgaagaaatgtctcagggtgcctgaagaacagttaccgatggaagaccttagtgttcaagaagacttgacttatgctgagtaccccatcaggattttggatactttgactcgagttacgaggaataaggt

SEQ ID NO: 113656 - DNA, 307 bp, Zea Mays
ttcaggagcatcccattcatttatagccactagttttgtggaaaagcatggcattccctctacacccctagaaatccctttggtcacatgaaccctggggtcagaccttctatgccagctcaaatgctcccaagtcagaattcttttaagtggggtagtgttcttggcagacttaaccgtcttgccatcccaagggattgatgtgatcctaggaatggattggctaactaagcacaagggcatcataagttgcgcaagcaagaccgtccttctcactgaccgccaaggaaaagtagtttcttgtcag

SEQ ID NO: 113657 - DNA, 349 bp, Zea Mays
gctagctagggacatatcctcgacgtcagacaagttctctatcttggggggaagtggtgctggaggggctttcttcttctgctcagtctggcatccttggctcttggtcttcttttggattttcttcatggggcgagcttctttagcttcttatcgtaatccatcttcaggtttcggtaggcttcacgagtgttggcctcctcgccttctgctatatcaagacactcttggagggatgccttctcctttttaagttccttgacctgctgctctaagctttccacccgggagtttaggtgggtgcagtgggaggagaggtcatcgtagtggttgtcgagagtgtggagat

SEQ ID NO: 113658 - DNA, 362 bp, Zea Mays
gtccaatcatatcgagtccccagcatgcaaagggccaagtcaccggtatggtctgcaattgctgtgctggtagatgttgttgctttgacaagtactggcaagcttcgcacctctgaactaactcggttgcgtcactcttcgctgttggccaatagaatcctgacctgaagacctcctcgattagtgtcttgtacgctgcgtgtattccacattgcccagcatggacctcgtccagaagtcgcttcccagtagatgagagaatgcacttcatgaggacgcctgatgcaccccttctgtataatgtctccccaatgagtgtgtagtgagccgactgtctggcgatacgctcggctgcatttttg

SEQ ID NO: 113659 - DNA, 325 bp, Zea Mays
cacgcttccgcttgtcaccggcacgatgaggcgatcctcgacctctcttgcctttgcccatgatcggatcggaagaggataaagggagaagaaagtagcagatgatcgaaggatgagtgaagaaaacaacggtgcaagcaggctatttatagaggctaggagtgaccgtccacttcctaccacgctcgtcgaacagtcacaggtattcaataagcaattcaagccgcctgaaaatgggtcaggcaacagacgccgcttcgtgtaacacgacaccatttggactgaggtcaactacttgggcggtatgattacaccccgcggtcac

SEQ ID NO: 113660 - DNA, 857 bp, Zea Mays
ggcccatgtaacgcacgttcggacgcctggctcgatggcccaactgctgctgagaactctcctgttttgccttgtcggtgtcttcgtcttgcatggcatgtgttgtgctgacattcccctccccttgagatgtcgcttgcccccaagcggctgcatgaggaaactgttgtcgaagagcttcatagtattcccaagtgtcgagggcctcatcgaacccggaccagcggacgaggacctggtcgactgaacgtccgccgcgcgagatagtacgccggtccaacacctgagctggtacctggttgtccacatcatcatcaggtaaggtagcactcaccggctgggacagagagatagcacgtttaagctgcgacacgtggaacaccggatgcaccatggatccctgtggaagcttgagtttgtaggccactgatcccacgcgctgcaacaccggaaagggaccaaagaatttgaacgacaacttgtgatttgccctgggagcaatggaagtctgaatatatggttgcagtttgaggtacacaaggtctccaacagcaaactgcctctcactcctacccttgtctgcttgttgcttcatacgaacttgggctcgcagcaggtgctgtttgaccactcggagcatcacttctctgttggacagccaggtggacaggtctggatcagttatagtgtcagcaggcgcaataccaaagtgtcgtggtggtcgaccatacagcacctcgaatggggagcggcccagagcagaatgaaatgttgtgttgtaccagaattctgccattggtagccaatgatgccacttgtgaggacaagagttaacaaagcagcgcaaagaagtctcg

SEQ ID NO: 113661 - DNA, 356 bp, Zea Mays
tttcattgagtcgaggaactaatcaagctatgaggagtcatattgtgttgaggatcaaatcattagttgaaaagactgtaagccatgaattgaactcatatgtggtgaaatggttcgagtcacatgctcaaggtatgtttgcctgaagagatgaggcaaagatgattgtaacctcttatgtagtttgtgcacacactatcgataaccaagtttgtgcccctagatgcaaaaacctagaaaacaagtttaggcccggggtttagatacccaatctgagttgggtcttgtcaggttagtcacataagtttttgatacctaaacgcaagtcttaccattcttgcatttaggtcccacat

SEQ ID NO: 113662 - DNA, 656 bp, Zea Mays
cttcttctgcgagtgtgtcgttgtcggtgacgttcggattctctacgtccccacaatgatgcagtttgctgacatcttcaccaaggagctaccatcgagtgtattcaccgattttcgatctaataccaacaactatacatgatagagttcatgatgcaggggtgttagagtacccgtttatgattttggggttagccccttataattaccgtcatatcctatgtaatgggctatacccaacaatcttggcctattaattcatctcctaaccctaagttagggttaggattttctatctttcaactattttgtatgtttatatgtgcaccatcacttcgtgtgcacatgatataatctcatctttgtgtcctgtgtcagccatctcactccttgaggagcggataaaaaggttgttttataggaatgccccgtgaaggttgtttggcggaaacaacttcgaagcatgtcctcaagatcacgtccaaccaaggcccatgcaagtgatattcgacgcacaactatagatggtcaaatgggctgcccggtacggcactggtactagcactattaagcacgatattattagacacgatactattagtaatcgtatcgtgtcatattgtgccggcactaataccgaaccagcggctcaggca

SEQ ID NO: 113663 - DNA, 320 bp, Zea Mays
gcttgatttgggtaaagtcatcgtgaaatatcaatgaataatatgaaggttaatatgagactagacgagatgcagataaggaaacacaaggcatgtaggtcttggttaatatgagactagttgtggtccctcgagtcatattgaacgcatgcctaatcacttagttggccggataactcgtttcgaccgcgaagccagagtattattccagttggattcgacctctcttggtgcacctattggtgtgggtgaggagccatagggacacgatgagatgacccatggttatggcggcgacatgaccctctagtagttgggcg

SEQ ID NO: 113664 - DNA, 763 bp, Zea Mays
cattcctcaagtgacttcgatctaaaagtcgatggatttgttcgatgtgtaaggcttttaatgtatgtaaaaattctgaacttttaaaaagatgctaacaagaacataaaatgagaattagtagttttgaatttcaatatatcttatcataacatgttcactccgtagcaacgtacgcctcacctagttgtagcttacgggtgcacatgcaccccctaaaaatccaaaaatacagttataatagttaattttcacaatatatgcatcacccacgttttatctttatatacccgtaagagaggtgtacccttctatatttactctagcttcgccactgttttaaacttctatttttgaatcgtgactaaatggtgctagagtttttgccctcgttggactaaatggtgtcagaggttttgcccttcaacaaatttaaacagttgcttgcatgttttcaccaatatgctacttgcatggcagtcgtcactcgtcacctatactcacatacggccgtgctatgattgcgtgggctcactccaaaacttcgacactttttcgcagtttcgctatagcgcgaaatggccgaattgaccctccaataagcgcatgtcgagcgaagaaagcaagcacaccgtgaaaactcccgcctccagccgaaaataacctgaacctcacccataaagccactgacaggatgggcccactgctcctaactcagccaaaccatcaaagcagctcccgtggccaaaggaagcgatcgccc

SEQ ID NO: 113665 - DNA, 561 bp, Zea Mays
taaaaaattgaaagtgctcacccaccggccccgttatattgagccagccgtggtgcccgagtttggcgggaagacttcttcagctgctgatccgaaggagccaattcctcctacacagaaggctgaagaaccgaccaccatgtcgaaggcaccctcagccgaacaagctgaggcaaagactagtaaagataaggccaaaaagccaaagactaaaggaacaaaaattttagaagttttaagcccttcggcggaagtaacaatgccgaagatacaaaaaggtcttgcggccactcccaaaagaagaaggatagcaagcatactagatgtgctagaaacggtaaaggcttcaagctctaatccagggaaaattgccaaggcttcaaaaatgcaaattgaaaccaaaacaaaactgaccgaagccgaagctgcaatgagccaggctagtgccgaagctgggccttcagagcctgctaaggaaaaacccttagaaattggagagaaagcagcggaggaagaggctatagaacagactttgcctgaaaaagatgtcgctcctactcc

SEQ ID NO: 113666 - DNA, 1021 bp, Zea Mays
ccggcacaggcactcaatggaggcggacagtgataccatccgaggcttggcggcgagggccgagggggactactactaggggagagagagagagtgagccgccgccaccgcctgggcctccactccatgggccatggcccagacggccccaaatctgctcctgtacgttcacaagtggatgaatgactcggggaccgacaagccaatgcattaccatcgagacattacaaaagtctggggggctagcttaagtagacatgtgaatcaggcttcaagttacaagccccatgggcagctaagctgcctgctaagctaccctattacacaatctagagtagataaactgaacaatgcacagaattagatagtaacataaacgagcaaccatttgggcttcggtccacatctccattgagcagccagtcccagggttgttgcattgcatctgtctccaaacttgttcttggcatgccaagttgcgccacccattccagactcatttggacagccaaggtttccagcttgcggagcacctgaaacccggcgcaaagttccctgcccccagcttcaagagattcaccatctgttatcatcaatcaatttcctcacatgattccttccttttcctgtctgaagcatacgcatggaagaacgtgttccggccctcttttggtcagccatgaggtacagactcacctgttcctgacatgttctctgggttcacctgttcctgatatatgcttcttctcctcctacaattttctagatccctctttacctcgcatatcctcttctctaaatcttccaagaacattgttgtccaatctccatagctctctgagcacctttttaatttttatggatttccatcatactcacctcacccattcactctcccttgaaggttgaaactcccatccatgcctactcagctcgggcagcacactcttcctcatctaaccaccttgcttcaaacttgcgcaccaccatccctggttgctcacaccatttggattccccc

SEQ ID NO: 113667 - DNA, 353 bp, Zea Mays
agatgccaaaggagactgtcaccaagtctggcgaaggtgagctggttcgactgaaatataccttcaaatatggagataaatttgatgaaccgaacgatgactggctgaaatgtatcgaagctacaagtgatgaactgcttggaccgtattcaaaagcggaagataatgccttatccacatccttcggggcccggggaaaaaagagattaaacagagtatttgatgctattggttttgtttaccccgactacaactacccgctgcggggacggggaaagaagaggaaagctactgcttcggccaagattgctgcttcggctgcccccgatgagtctgcgccgaagagcaaaaaa

SEQ ID NO: 113668 - DNA, 307 bp, Zea Mays
ggccgagttgaacccaagagaagatggtctgatggtatccaccaagcagtagaagcaaaagaaggcctaaaaatccaggttagtattaacttacacattgtcactttacattgatggaactaatatttttataattttctgaatgtttatgatagtttttggtgtgcaatgctaattgcaatttaatcaggcagactcggtaattgtggctcaaatcacatatcagtcattgtttaagctttatcctaaactttctgggatgacaggaactgctaagacagaggtatggtgtttattaggttgcttt

SEQ ID NO: 113669 - DNA, 538 bp, Zea Mays
gtcataccttttaggaaagacctactcgaaggtaggtctagccatatttcttagtttgtaggtgcttccatacttagccgagtgaggagtccgatttaaatcatttgagttgttctctaagtcagtttcatattcataaaagcaacaagtccaaaagaattttcctctccctcctaatacttcgatttgattgtccctcgctataacctctaacatggtatctagtttgttttaaaatttgaattttttatgtgttgcttactcactcccctctattcaactaccaacatgactatctctttgcttgattcacactttttgtggcacttgtgaggctttgatcacttgggagtgttgctctagtgtattggagttattgcttagattttatgtattgaatggactggttggaggtgtatttatagcccccaaccacccaaatatttgttcgggtcaaatcccaaaatttgcactacctgcgggtgcattagacctcctacagtacaggtctggtgcacaccatacctctgccacgcct

SEQ ID NO: 113670 - DNA, 521 bp, Zea Mays
cgaaggcttgtttcatatgaagtgtttatcaaaatgtcttgttacacatggttgagtctttcctttcctattgtgtgctctaaaccttattagtttgggaaggaggtaaatgctttgatgcatataattgagttagtgactagttaagctttgtgtgagtatggtgaacttagtgataagaagaagagctagtagacaagtatatttagtattattaatctgattcggtagtcttgtggttataagtgtgatgtaagtaccttgtgcttgattagtaaattttagagttaaagtgctttctatgcatataagtgttttaaatctttaggttgagaaaactaatttaaaaagttctatccttattccttattgtaaatcttagatatccggcactaatgagtctaagtttagtaattaaaatgctttgcggataagtgttgtcggggttgcggtgatgatctaattatatgactgaatatgtatgtgatgaatgatttacatgctagctgaaaattgtgatg

SEQ ID NO: 113671 - DNA, 337 bp, Zea Mays
ggcctagtcccgataggccatgagtgtgcagtaggccaggatgagcaagccataaatgcgccatagtccgaggggttcgtaggttatgagtgcgctgcagtcgagggtctcgtaggccttgagtgggagacggaccagcgcctctattgtggctcggtgtcagacatagttaatgcggtgggtcacttatggtgggtcggtcatgggacaggcgagggatccactcgagtggcttgcttcagttcatctggcccctgtctagttctgccatgctcgacctcgggttcggtgccgcagggttcgtccgaggaggggtgcttccagggctttcttttcc

SEQ ID NO: 113672 - DNA, 382 bp, Zea Mays
tgagggattagggtcgcctggggtggaattaggtgtcgaacataggagaggcctagccgttgcgttttcctgccagtacgagttcgccggagatgtgctcgtcgtcgttcaccgtcgtggacttggcacggtaaagaaatagaacttcgaggacctaactgtgaatgtcagagacacaagtaaatagtgaaaagggttcttaaccagttattcaaacaactagggtcctctatgcaaagccgacaacgcgggcgcgcgtggcgtgtttccctgttcatggcccggctcgggctggtttaagcccgttacaattcattctttttccttttctttttactgcagacttcgaagattgcaggaaattatagaaaaatgataaaat

SEQ ID NO: 113673 - DNA, 569 bp, Zea Mays
tggaaatgttgcacttaatgtttggaagttgggagaggtcttgtatcttcagtgtgctggttggagggtatttatagcccccgccaaccataagagccattggagaaaagctacaaaaactgaatagacgggtgatgcaccttaccgtgaacaatacctttccgatgcaccaccagacattgtatagtgtgttggcaggtaaccgttatgattttgcagttatctgttggtcccttgtcagactgtccggcgaaccaccggatagtctagtgctccctcctccaaaaaatcccaaagctagcatgttcactataattcacactggacagttcgatgacccattaggtgttgagctggttcttgattgagctaagtccttggactaaacagtctggcgtgccaccagacagtccagtgatcctccggtgcaattgtccagcaacacaattttccctcttttcttcaaatctttttggctatctttgagggtgttcctatgacttagacaaacttttgtagtgacaatccaactagcctaagtcatggtttttgaacctactgctctctcc

SEQ ID NO: 113674 - DNA, 325 bp, Zea Mays
gcgaatttggttctacgtggttgctggtgagaattatacactggcgcggcggattggaattctctggcgagctcgtcggagattgggcggagcttagccgcttgggcacttcgttaggaagacaattgtgggcggtcgatggatagatcgatgatccagagaacgacgcggtgtagaagtaatctggaacccttggatggtgatctcacggcccctagctgcgcatcggttcagtagtgaatctgtgctgttgatcttgatcctgcggctcagatctaatgccagcccaaccttcccttgatctgttgtggaccgtacagatcta

SEQ ID NO: 113675 - DNA, 472 bp, Zea Mays
cgacgggctatgtcgagccccagggtacgaaggccatgggttggagtaaccataatgatgatgcctgggaccatcgccgcccccacgccatccaccacgataaatacgagacaaccaggcagacctaggccccacgattgcacgtggctccacccgaggtaaaacactggttttacctttgccttgtggctccttccgaatgaagccaccgctggccgacccttctcttatcctataacagggggaggctggtctcatggcaagggacacgagagatcggacgggatcaaagggagagagctcttaggcaaccggacaccttcagatggacatgaacctacaaggacgaacacgaggaggaggagtgctgacgagcaccgggagaccgaagccccgctaaaccaagacttagctaggactccacccaacagcttctaagctccacttccaccctgataaagagacttgggag

SEQ ID NO: 113676 - DNA, 501 bp, Zea Mays
aaccgcaatacggacatgtcaatctaccatgtgcactccaaccggcaaaaatagcatatgccatgaagtcatgcaccgaccacaaatacgcgactcaaagtttgaatatctattttttaaacaccgtatgcttcgactcctttccaaagctccttcaactcttcaataaagggttttaacatgacattaagttttgttccaggatggtccgggccaggtatgatcaaggaaagaaatataaattcatatttcatacaaagacaaggtggaaggttgtatgtaataacaaagacgggccaacatgagtatgacgatgtcatttgaccaaaagctgtgaagccatcggtcacggggccgatttgaacatttctcggttcagcagcaaagtctggataaaacgtgtccagagccttccaagcatccccatctaaagggtgcaccattagctcattcttctcacggacaccttcgttatgtcgttgcatgtgcatggcagttttt

SEQ ID NO: 113677 - DNA, 675 bp, Zea Mays
taagtagtggaggcaccatttgcttcgaatcagatgccgaccatatgagctggaaaggcaagccttcggtttttagcagctgatccagtttgcctctagtggagatggtcttcaccggtgctgcggtgacgatgattttccaccccagaatatgttctacgctgactcaacctacgggctgtgcatgaccgtcatgaagacgactgatgtgggagtccaaatattggagaatcgggcgactaggtccttcggaactaccttcgacattcaagacatgatatttggctttcgatattcaccatgctgatcacgtgcgctttcacgtgggtactcaactctcatctattttgtttgaatggttcttctagttccttttcttggtaacagagaatatcactagtcttagtttgttttatcacccgcaggtgaacagacttgactcgatgcgctagttttatagatcacatgttgaccatttctttttgtggtggttgtaggaggaggaggatgcctgccgatgggaggtcaagtatgctggcatgcatgcttagttgacgaagactgctatattatctcagatagtgagtgagctagtacgacgagactggtgcttgttattgttggtgtgtttaacttgtccgctttaatttattttcagatcatcagtaggctttg

SEQ ID NO: 113678 - DNA, 454 bp, Zea Mays
ctactatattgtattgttcctgaagaatcaagatttagttttgctctagtagccttgaccccataggggagccacttccaagcgtatctggcatatgatcgtagcaggtcactttgtcgaggccattattggtcaacgattctgacctttgagacgaatttagaccataaactaaggtggtcgtcggaggtctgggggacctcacagactggcagcagaggaggccggagaccttaactcaagatcctcggtgtgtcattagcaaatttaatcaggctctagacaaatcttgcagacacaatactgccgtcccacatgctgtggctcggaggaacgaagaagcgcacacacgcatgcaacatgtaccgacggcttgtcgctccagcattgcatgtatgcttctactaaactatacccagtaattgcaactcgcgtcgtatagtcgctgctctgg

SEQ ID NO: 113679 - DNA, 537 bp, Zea Mays
tggggtcgtcgtcgggggacaacagtgtcgtcgtcgatgcctctgtttggtaaaaaaagacaggccgcgcagttaccgcgcgcgggcgcatacggtaaaatctaattcaaaggcccgaaccgattttttttcctttatcagtggcggggttcagtcggcaggacggggggcagggaaatgttgctatacttggcaaaacagtttggataaccaggcctattaatggacggggaagcaagcggaagcgcagcaggaggctggcgattaccgcagaggatcctaatcccaaggattggaattccaatgaagaggcagcggtaaaacctccccccgcagctttttttgccatttgggttcgagactccggctcccgcagcgccagcatatccggatggattagttgctgctgcatgaaagtaggggggaaatgcatggctgcagctacaagacaaagctacggagagaaagaagaagggtttgcatgccccgggtggggggatttgaattttcgaccctcctcctctttaactcccgaaa

SEQ ID NO: 113680 - DNA, 847 bp, Zea Mays
gtggagggtgccaccatttctaggcttgagattgggaaagaaaagaaggggcagtggcggcatgacaagagtcggcactgaataggagcatggaacagaaaagagaaggctaaatgaaatccaacgacccaaaaccattcagtttgatacaatcgcaccaatgtccaaataatgcatattagtagtcaaacggattcctttcaacaagttctacacagctatggtctttgatcgaccatacgattcaaaaggtaaaaaaatccttctctctttagtacaatcggtcaactcactaattatataaaaaataaaggtattacagtgtccttccgttaaatatgtagtggagcaggaaggagaattcaggtgcaacatgttctcacaggcacgacggtttatttagcaatggcaattcacattccccaatgggccttagatgccattgataagataagaaaatgttttctatggagaggtagaaaggaaccaaagggaggacattgtttggtggcctaggaaaaagtgtgtcgaccccttcaactaggaggcttgggaatctctagtctcccagagttttgttgggctctccgcatgagatggttgtggctacagaaaacatatttggggcggccttgggcagaccttcccatacaggtcccaaacaaagctagagctttttctctatggccctgatttctgaggttggggatggatcaaacactttgttctgggatgatagatggttgcatggcactagaatctctgacattgcccccagcctctacaactcaattccaagaagaattgctaagagaaggacggtgaaagaagcatttttaaataggag

SEQ ID NO: 113681 - DNA, 318 bp, Zea Mays
ctcatgaggcctgagtgctcttgacgcataagcaatgactcggttgtcttgcatcaaaaacacaacccagtctagtgctagaggcatcacagtacacgtcaaatggcttactgctgtcgggttgcgctaacaccagtgttgtggtcagatgttgccttaacgtgtggaaggcatcttcgcacttctgaccccaaacaaacttggctcctttcttcaacaattccgtcatgggtttcgcaattcgagagaaatccggaatgaatcttcgataatgaccagccaatcacagaaaacttcaaatctgacggacagttgttg

SEQ ID NO: 113682 - DNA, 340 bp, Zea Mays
cccgagcagtatccgttatctgtttcttacccgcccggattattacccggtcccgtcttgtatccgtcctgaaacttaactacccgtatccggtcccgtatccgagagaaatacattagggtaggatacgggatgaccctgtatccggctgtatccgtcccgttttcatccctactttcggggtgcgaggcaacccaacaataaagtccataccaatctcttcccacttccattcaggtatctttaatgggtgcaatagtccagctggtctttggtgttcggccttgactctttgacacacatcacacatagccatatgtgcagccacatctctcttcag

SEQ ID NO: 113683 - DNA, 300 bp, Zea Mays
tggatattgtgaattgtgaactttgagtctgtgaacttgtgatctttatgaacttgttatactgtgaacttgttatattgtgaacttgtgatctttacaaactttttatattataaatttgtgatccttatgaacttgttatattgtgaacttgttatatcatgaattgtgaacttgtgggctttgtgatcttttgtcaaatttgttgtattgtgaagtttgatatgtttaccgatcgtattttagatttcgaccgttatcggtgtattttccacaccaaactttcgtttttgatgtttc

SEQ ID NO: 113684 - DNA, 710 bp, Zea Mays
tttttaccgaacttggcaccttcgggtttctccggtctccaacgaccagacggtccgtgcctgaggtcggacggtccaagcttgatcccggacggtgttcttctctccttcggacagtccgcagtagaaatgtgagttttgcatagttcctgtccgagactcagtgatgtgtcgcggacggcccaccggaagggtccagactgtgcgcgcacaggtgaattctccaaagagattcttctgtctggaataatcttggtattccgcacaatcgacttagaattgagatggttggacttatgcacctgagaattaatcaactaggcaaactagttagtccattaggctatgatggtcatcaatcatcaaaatcaatttagagaaaatggtaaaggccatttccctttcactcttgttgttcgagtttgtgatgagtaattgtcaatggagtagcgtcttgggttgagtcttgtggactaattagggtgcgagtttgtgcaaactatcgtgtggactaattagggggcgagtttatgcaaactatctctttgcttgtggtgcacaggtttagagtttgaggcagcggtcaacgataaaggtggtaatgcgggtttatggtgatgaaccaagagtggtgaaggattgagtaagggactgaagaagctaggtgacaagctatggtggtttacatcttggacaccgacaagcgcgag

SEQ ID NO: 113685 - DNA, 456 bp, Zea Mays
aattaataaggtagagcttaatcttactactgaagatttttttgtggcatacttagtaaattagggtcaagtttgattactgaatggttagactatttttagagttccactgattactttttaatgtcttagtgagagtatattaagattcctagctaaatttattggagtgagatttattattccctctcttcttttctatttcttttatgcttttaaggtaggtttgaactacaagatagcttaataaatttccaaaaattcttcaaacattacagtggcttcttactggtgtataattctctgtctcaaaatttggggcttaaaaagtgaggggttctctctgtataaaattatcaaatattagggcagaggggggtgttttgaactacaaccttctttttacagggggttattttctaagacttattttttggcatttagatgtaataacat

SEQ ID NO: 113686 - DNA, 539 bp, Zea Mays
tatgaatctatccactttatttcgttcatcctcgtacattcttccactctgtcaacaaattgatggtcagccttttttctacctaattaattagcaaaagttatgcttaataagaccttgttttgggaggggaccaagcatcccatgtcatcaaaagtatctcccaatgatgagagccctgtacaataatacatgcctagaatacaataggtacatcaccaccaacccctctatcagctccccaatcctaagctcgcatcctcttaaatctcccccgactccacccctttattttgggtcctactgtatgaatgggccattaagtagatcccatcattatgcaatgattcttccattggtgggtaggattagatacatgcattttacaaatcctaaaagggaatgaccactgtgggctaccagtgacatctatctatctatctatatatttcagtttgatcaccaatgatttgttctaggaaagaagtgtgggcaggccttggctttagctagctgctccaccaaaatgtggagccagc

SEQ ID NO: 113687 - DNA, 433 bp, Zea Mays
caaaacttgcattatagagtaaatgttgctgcatatactaaaaataacaacctgtctgtacttgtgcataatggcattatcatatccataattgtttactacatataagcaagatgcattgatttaaataaaccataaaagtagtaattgttaattctgtttactgtgcatataaaaaaaccctatgcacatgtactctgtgtaatgatctgaatgtatgaaaaaagtgataattatatgactggcctactgaatcatccgaattccacgattgttgtggctcatctgtctcatttcctaaattatcagactcagcacgtagtacctcgtcgatcagctctataaagttgtctgctatatcatattgcttctcaacaattttgttaaggctgtcttttatggctaagcatgccttgtcaacctccaagtcata

SEQ ID NO: 113688 - DNA, 384 bp, Zea Mays
gaaaaacaacacgatcatgcatataaagcgcaatgtctaagcacatcataattaaaaaggttctttaggtacaccagaagaaacaacattttaaagtatggagcacctaggccaagatactaccaattcagaggcaacaccataactgtgatcacaatcaatggaacttcaagatattcactgaaattgcatagttccattctccatacctttgccttttcctgaattgccatgagagcaccagttgtcactaattgagggctccttttgctcatgcaccttagctcaaaagggtgcattagaggcacaacatggagtttgtattcacacaataccagactagagtaatcataagctaaacaatatgtcatatttgcacacagg

SEQ ID NO: 113689 - DNA, 404 bp, Zea Mays
tgaccgtagatcgggggatcaacggtgttcggtggaagcggatcgagtaactatcggttttgatctgggcccttggtttctaatccaacggctcagagagaaccgtaccccttcggctagcgcaatttgcaaaagagaccccacagtcttaggtaatcaacccgccatccatcgccagtgccctgagtcttgagaattctttcaccgtgaaccctgacttttctggaaatcgaggcccagtcctgagaagattaaaaacagggaaataattatagaaattcgtttttaataaaaaaaacaaatctagaaacttgtaaaatgaatagaaaactcattttagctccaaattgaacctttccaatttctaaaattttgtaataatattctttatcatttagtgtctc

SEQ ID NO: 113690 - DNA, 459 bp, Zea Mays
gatcatgtagctccaattggtaggccatctccccaactcgcctaaagattttgaagggtccaataaagcgaggggataacttgcctttaactttgaatcttctcattccacgaattggtgacaccttgaggtacacgtgatcaccctcttcgaattccagtggtcttcttcgattatcagcatagctcttctatcgagtctatgctaccctcaagttctctcggatcatacgaacctattctgctgtctcttgaataatctcaggcccaaagaactgtctttcaccagtctgatcccaatacaaaggagttctgcactttctgcaatataaagcttcaaatggtgacattttcagactggcctggtaactattattatacgagaactcagcatatggtagactcttgtcccaactgcctccatgcttaagggcacaagctctcaacatatcctcaagta

SEQ ID NO: 113691 - DNA, 413 bp, Zea Mays
atcaactctatactaactactatatattttatcatttctttctaactctgcaacagttgaactccgcagccgacagtctaactgatcaggctatccgtactctgcaacagttttccaatcggagttacactactctggaagtagcgtttccgatttcctcatagagtttacagtagatcagacagttgaccgctgcagcagtcttcaactgtatattcaactctatatgtatagcgtaccggttgaagttcttcagtgcggaaagcctaagtgcttttttttgagggggaagggctggacacttgggacggtgggacctgaacctgaaccatccttgctaaaacccatagtttgcttggtttagcaactttgcttcgcctgtaatgcgcccacttttgagcttcacggtgggt

SEQ ID NO: 113692 - DNA, 436 bp, Zea Mays
aacttaatccaagatcagagacaccccatctgtgaatggcacttagctttccccctgaatcacggtagagaaaactgtaatagctcttcagttggtatatattatgtttaactgtatcatgcttgactattactttcgatgatgacagctcctgaaaggttgccatgccacttcgaagtatctaaaaactaagtgcctccctgacatgatgttgaatggttaaataatttaaggtgaaatcggatctgtaggtgttgatttcccccatttttcactccaatattgcatattccattagcctgtgcaaccgattgaaacatgttttcaagaaatcctttttatgagtgcaggtgcagtacaatgtggcattcggcaattccttcccttcaatgctaccgaagtctatctgtttttgcttattaaacctactattggt

SEQ ID NO: 113693 - DNA, 486 bp, Zea Mays
cggctaaccgagtacccaaaccctaacttaaggctatttggctatttgatgcccactaacgtcaaaaaatcgaacttgttgcaaagattatcgggttgtacatgtgttttttccttcatgttcctttacttctggctactgaaaatcctgatttgttcagtctgtctatgaaattcagcgagagaattggttctctgacacctaaatgtctgaactccagcgagggaatttgttctttgacacctaaagaacccaggtttttagaaatatacaactgacgggtctcagttcacccaaataaccctctgttaaggaatctagcacgctgtcatattttccaggaactccacacacttttctcctctgcagcctctcttcactcttcttggaccttagtcctcggaaaatgacttaattctcagggtaacatcaccattggagagaggaggcaattaaactcagtgggcaaccaaacctgtgcttcgc

SEQ ID NO: 113694 - DNA, 915 bp, Zea Mays
gccgcgaagactggatgtcgggacgttctgcccaaaccagtataaacattgcgcccatcgggcacaccatttagagcccagaacatgcacatacaaatttacttgtcagagcaggtgttcgaaacactgacaaacgacagttggtgccacaagtaggggccttgcgcgttctcgacgaacttttctaggctctatatggcgggacaccgattgaacccccgaggtggcgatccatttcaagaacctcgagttcgtccttgatggtgaaggggatatggttagggcactggaagtccgaccccttttagtcaggagtctcaacattgttgtgagtgcccacggtggccctcgtatcacttacacccccagagcaactgcccgctttgagggccttgacttcatcatcaatgaagaaggcgagatggtttgggcaccgcccacccgaaaacccttatgccgttgcggaggcacttggcggacttagcctcaccccgcaagggcaaggtataggacatggatcatcctcactctctaaggtcgacgagataaggcgacagattgcagtccacatgggacccaaccccttgtataacaatctatgtgccttcttctcatcctacgcataacattccatgttgtatgacaaggaaaggtttccctgccatgcagctctagcggtagccctggtgtgttttcgtctcacccacgccacgccctggggtgattgctaccctcgtgtcctagggtcgcctccctactaacaatgacctagagttcgtagggatggtcgatagcgatggggaactcgtcttcgacacactttgcttggactcaaactcaaacccaggctccccaacgagcagagaggaaggcccccaacgataggagaaacaaaggacacttgaccatcgcgac

SEQ ID NO: 113695 - DNA, 344 bp, Zea Mays
tcagaacaaccaggcagctcgtcttcctgccccagcaaccaaccagaatggccaagcagccccagcacaagtagtaggtcgtgcatgcttctactgtggagaacaaaatcagtgggcgaagaattgccctaagaaagtagctcagtagccgccagcagtcaatgtcccagcaagacaaggagcgccatagcaagcaccaggagtccatggtcaggcttacaaccgtagaaaggtgaaccacctagaggccgaagtaatccaggatgctcaggacgtggcagtaggtatgtttccagtcgaatcctacctagcaaaagtactatttgatattggtgccacacatt

SEQ ID NO: 113696 - DNA, 478 bp, Zea Mays
attgcatcagagacatagcttgttcgggaacagtggcaccacaagatctcagttgagcagacattccatcgacaaaagcctgtgatcaacgacagatgagcagaagaaagataactcactaatatgaacaatgtaagagcaagaggccgactcacctgaagattggagaagaactgtggtagacccaaggcaggaagagctgtgtcatggctcgacgagggaagatcagcaggaacaatctgaagggcatcatcgggggtgatctcagccctaccagcagacatcaggctcctcgcatcaagctcgccgacctctaaggcgactagtccatttaaaaccgtggaagcatgtacagccgtcgccccatcggaccgaggtggggacgacccaacgtggacatccatggaggcgtgggaaagagagcccacctgaacaccctcgggggctgggtcgtagcttgcactacccaccagagttg

SEQ ID NO: 113697 - DNA, 500 bp, Zea Mays
gtcagtttgtgtattgacctttacctctaatgatattgctagagatgtctgtgaatggtttgcgaccgacattatgtcccatctaatctataacaagaacagtacccgagaaaacatgagcataaaaataatactgcaagaaccaagggtgaaatgatctgactgcaacaaaccaagcgaatagaaaccaaaaagatgcccttggtaatagaggttatagaaacaagcatcataaccgagagtaaagagataagacctagagagaggtgataggagaacgattttggtgtccgtataagatatgttattatattccaagtttgaaaagcatagatggatatgggtgacacgctaagtaattattttcataactctggtgatgtggaatatcttcctggagcacgcctagctcctatagatgggcttcggtatacggaatgtacattaaatttgttccagatttgatatgcatatttgacgtaatttcacgagcgaagtta

SEQ ID NO: 113698 - DNA, 585 bp, Zea Mays
gaagtaaaaaagaaaaagcaagatgggatcattttgaaaattgattttgaaaaggcgtatgacaaagttaattggcatttcttatataaaatgcttgagataaaaggatttggcgagaaatggggagactgggtgatgaaaacagttagtgggggcaaggttgccattaggactaacaatctaactggccccttcttctctacgcataagggggtaagacagggagatcccttatctccgttgctcttcaacattgttgcggatggtctttcttgcatgattaaaagggcccaggaggttggtcttttggtgggccttgttcctcacatcattgaaaatggttgtgcttgtttacaatatgcagatgacactatcttccttcttcaggataacccgatgtatgcaaggaatctgaaatttgttttggtcctttttgagcagatgtcaggcctcaaaattaactttcacaagagtgagattctgtgctttggcaaagccgtagatatgaagaatttgtacgctgaaatcttcacttgtcctatcagaaatttacccatgaactacttgggcatccccgtagattac

SEQ ID NO: 113699 - DNA, 378 bp, Zea Mays
attctgatttccatagcccggtccgtgttcattagaggagaatggtttttcacaggatttcttattctcactcaaagtctcgtgcgtatttctcgtagatcaagcattagtttcccagtttttaggattcttcttcgcggaaattcaatggtaatcattatggcagatcattgcataaaaattcaaatctggtgggctattctgtttctccgggcccttttcatcctttaaagcaccctatgttgttgggccggcaaaagagacgtgtctggaggcccaaattatcctctcttggtaacattcacgggttcatacctgaaggttatcatctacatgtaatgagatcaacagccatgattttggaatccccctaagaag

SEQ ID NO: 113700 - DNA, 493 bp, Zea Mays
ttagtagggcatagtggtcaccccgagttaagtatgcgtgccaattgacagtgaacaatctgagtgcctttgaaacctttttattgatgatatctttcacgatttacagaatacatcgtcgttccgagagcctctatgatgtagctacgggtagaacttcctgagatgttctatgttccatgagttcccaatttctgttccgtccatctgagtgaggcgatatgatcccggccgagtgacttctgctactatgaaaggtccttcccatagaggtgacaatttatgtcgtccctcccccgttagaattcggcggagaacgagatctcccactgcgaaggatcgacgtcgtatggccttatcatgatagcgcgttagagtttgctgataccgtgcagattgaatcaccatattcagtcaatcttcttcgagtacatcaacatcctccagcctagtagcttcaccttctgctatgttttcaaagattaacctcggt

SEQ ID NO: 113701 - DNA, 404 bp, Zea Mays
gcttttagagcggggttctactggccaacaacaaagaaggatgcaacagacctagtctagagatgtgaagtctatcagttccacaccaaacaacaacatttgcgagtgcaaccgttgcaggccatccttgtttcctaacccttcgcatgatggggactagacatgatcggggtatccaagaaagcttagggaggatacacacacgtgttggtggccatcaacaagttcacaaaatggatagagtacaagccgatcatgtcactgacagagctaagaaagtcgacttcatccaggagattatattccggcttggggtactaaatagcatcatcaccgacctaggatccaaattcataggggtagactttttttacttctgtgagcaaaagtgcattataatcacg

SEQ ID NO: 113702 - DNA, 500 bp, Zea Mays
gatcatattatacccaaattgtgggacgttattctcaagtaaatgtgatttccaacttgtttgctgtttgtagtggtgatttgtgattctcatcattccttctcgttctgttctgtttttttgttctttgttttgtttgctgtgttgctttgcttttgcctaggtgcataattgtctacttcattccatgctacggtttccattaaagtttcattggaaattttcttattgtgaatgcttcatttgcaggtcataattatggttcctcctcaatggctactaggtgcagtagggattcatatgatgacagtgttaacaactgcacacaagttactgcttcgaaggtacagaaatgttttgctatgccatctagcatttcttatgtcttggaagcaccattgaatcatcgataattcaccttctctaatgcattttctattacgcctgttcaggatgtttcttctagggaagcttcaaatgtcttcacatggttaggagca

SEQ ID NO: 113703 - DNA, 627 bp, Zea Mays
attgggttggtctatacacatccaaggtggaaaattgtatggaaccactatcactggccaaatgctatatgaattggtcatctgaccaaatgggttaaatccatcagtagcaatggctaacctcaaactgcggggatcatctgcaaaagacttgaaactatcatcaaattctttccaagcttctccatcagcaggatgtctcatttcattctcaatcggtaccctcttttccttgtgccatcttgcatactgtgcccgctgctttgagataaagagcctttggaggcgtggaattattggaaagtaacggaggaccttgtgaggcactttatttctgccctccttgttcactttccatcttgtgtacccacaaattgggcaatggtcatcctcttcatgatctttccaaaatagagcacaatcatacttgcacacatgaatagattcataaccaaaaccaagcttccgaagtagagattttagttcattataggacttagggaggccggtcacattcttcaaagatgacgaaagcaactcaaggattgcatcgaacccataatttggtatccgattgtacacttttatatgcagtagtttaataatgaaacttagcctagactcctc

SEQ ID NO: 113704 - DNA, 428 bp, Zea Mays
cttcttaagggggtacttaggtatgttgtgtttttccacaaatgactcggttataaaggaatgcgatgctccagagtcaaataaaactaatgcaggtatggagttaacaagaaacataccatacactatgtcggcatcctcaggcactgattctgcagtgacgtgattgacccttcctctactctggttctgcggagtcttgttctaagcagatccgcgagcgggggtgttctggtcattcctctggttattgcttttctgaggtgtctgctggttgcgctttgggcagttgctagcatagtggcctagctcaccgcacttgaaacagccattgggttggactggtgcgttgcttctggcctgcgtgttactggcgccaccttgacggttctatgaactcccaccagacctctggttggtctgagagt

SEQ ID NO: 113705 - DNA, 348 bp, Zea Mays
atacaaaagaaatgactggaagagcaagacagcaatcgctttggagaagcaagctgacccttcatgcaacattttgtatctccatgatgggattcttatctcaagcaggtatgtgctacaattgtctaatcgagggtgtcttttgtgaggttagatcactatcaaagggttggtgtttatgaaagttgacaaaagaagttacagtgcttccattttcataagcttctcgcagcccgttaatcacaattctaggagagcttctaaaggcaaaagaaaaacaatagcaagtgttctattctttttcctacatacattcttttcaacatagacttagttctgatgcatgat

SEQ ID NO: 113706 - DNA, 686 bp, Zea Mays
tgggagtggttgagcaagagggagaggcggtgataatgggagtgcacgacgttagggtcgtgggaggccaagacagtggagtcgaggccaagaactttgtaggggtcgaggggctcgaatgggaggcatcgacgctggccagcgaggagagcatcaatggcagtgaggaggtcttcagcacacgagatgttgtggtcgaaagaaatggtttaggtgacgaaaggatccaagagggcatgtgggggagtcaaatacccgcagtcagatcgaggccttggggtgcttagttgtagctagccaatatttttgttgttcttatataattgcatgtatgaaagcttatctattaggcgagaagcgggggagtaatagatatatgtgctacacgcgtgatgcacaacggtggaaattagtgttctgtaggagtagagaagtgtttcttccttatatgttatgaccttgtcatatcttctattctgataagctatttgacacagttgttcttttagaatcctcctagcgaaaggcctcctcctagtattgattgttgagtctctcggctcttggcctcataagtcaacatgcatttaatctgattcaagtattcatgagttcacacattgccttttagcagtagtggtgtgagttagtcaaacaatagatttgttatcataatgtttttatag

SEQ ID NO: 113707 - DNA, 801 bp, Zea Mays
cgaccgactaggtccacgctgagcaagtccgcgaggcagggcgatcacccaaggttatactaagtaagaccgcaaggcgaagcgaccgactaggtccccgccgagcaagtctgtgaggtggagcgactgaccaggtccctaccaagcaagcctgtggggcaaggcgaccacccagttccatgccgagaaagtctacaaggcggagcgatagaccaggtccgtgtaaatcaagtccgtgagatagagcagccgaccaggcccctgccgagcaagtccgtgaggtaggacgaccacctaggtccatgcaaagaaagtgagcaaggcagaaacccaagtaaaatgtcacgaagtacagtccgacgaagataagatatgacatccaggtcgtggcctgccacacgaacggtaggccaagggcacgccaagtggtcgttatcgacatgatcacacctccctaagtacgaccctagatgctctcccactggcttgagaggccaaacaaccatgttcataaaggacctcagcatcggagcttctacattgacctaaatactgggtagtacgcagcagatacaccatatcaggtgtacgcctacgcatgccaatgagtgtcacagtctcgtgacggcgggcaataccacacgatgcaaggctgctccatatgattgacgtgtggtaccctccgcgcactaccacgaggatgtttgcgggagactagctacagggactcgtatgacgagcgaacgggacaatacgccatcatggaagtacggatatgcacgactctatgaatggcgtcag

SEQ ID NO: 113708 - DNA, 438 bp, Zea Mays
aattacaaaagttcggatttgggtaacttggattcaacccaaaataattgaatttacctgtttctagagccctgtaacttttaatccgtggacttttggtaaaagatttctataacaagtttgtagagtaattattggagaacaatttttgttaagtataatagacctaaaactatgttctactgggagaaaaagtggtccaaaaaggtgatgttagaattttggatttcagacttaacctaatggctgagatctgaatttcagcacaacatagccatgtttgtacctctgtagtggccaacctgtggagaactaagttatggttgttatagcaaagaggtagagtgatagtaggagagtgagttttattaaaggtcacagccctaaatctatatgcaacttggagaaaaggtttcccaaagaagggttggcagattt

SEQ ID NO: 113709 - DNA, 301 bp, Zea Mays
tggcgatagttttggccgttggatcaggattgcgcgatcgcgattagctatagggcgacgtctcggccatagttcatccttgccgtggatcagtcagtggacggcttcgattaaatcgcctggtacccctttgactcattaaatcatagacatagattgcgagataaatggtggatccggtttcattaactcggggccaacagatcttgatccaatgctcctagttacctaccgattcaacttctaatctgggcgcttgatgagtgatcttgcggctcagatcgtccaataccccttcgcc

SEQ ID NO: 113710 - DNA, 561 bp, Zea Mays
aaggatacaagtgttgggaccctattggtaagagactgttcgtgagtatggatgtaacatttcgagaggaagacccatactatagaaacaaagttgatctagatcaaatcctagaggacttctctccggttgatggaggtgaccgtagagagggggaggatgacaatggtcgaggtagtgattatgatgaggctagtggtgatgaggctagtggagcttcaggaggggtgattgttggaggtatgattccactagaagtggagatagggataactacataggcattgagtaatgatgaaagtagtgggggttatggtgatccaactattaatattcaggaggagacagaggatgatgatgcagtgattattggatcaatcccatgtcctactgcagggaagttgaatgagaaacaggggagcaacatgattgttccattggggtaaaggtgaatgacaaatagggggagcaacctatagtatactatcgaaagcggacgaagaagcaggggagcaaccacaacctgaacgtgttgaagctccagtcccgtatctctcttca

SEQ ID NO: 113711 - DNA, 651 bp, Zea Mays
ggaccttgtagcccataaggtgttgtttgctgagtcatgcttctaggcctcgtagcccctatggagtcgtatgctgggtcgtgcggcgccgtacctcttgtatggcgtcgtgtctcatccgctttccaatgagttcctatagctactctgatttagacgtggcagtgcttggtgggtcctttcattacgcataggtgtatgcgtggtacggtgtattgtcatgtcccttccggcatatgggtcactgtagagaccctgatgataaggtccctgtggctagagttgtctggtcccactggtcagcggggatacgtacccgagatcgtgtttgatagagacccttaggtaccgcttccacggtctgggcatgactcggtgatggtctgtcgcattgtgacgacgtggcttgatagtacttggtcggctcttcctttcagtacagatgatcgcttgagagctggttgtcgccttgttgggttgatcggcgggcaggttggttggcagccctatctcgctgggttgctcggcagccctgcctcacagggttgctcgacagtatttgttcggcgggcgggccggtcggcttggcagccatcactaggaggccttttgtaccttcacgccgagctgcttggcaggtgggccgaccgg

SEQ ID NO: 113712 - DNA, 302 bp, Zea Mays
aatttttggagcctgctaaaacttttatcctcgacacgaatgcaatctcgatattcaatctcgatttataaatctcgtctaaagctcatattaatcaaacgctcgacagttgctggtcgcgctgtgtccgaatccaatttctcgatgttcgatcgatgtccaactattttaatccgagtccatactcacaaacgaaacaatcaatatgtcgccctctgatcaaatcttactcgactcagcttagcatctctgtatccaattcgatttcaaaatcaacatcggcaacgatttttatatatcac

SEQ ID NO: 113713 - DNA, 313 bp, Zea Mays
aggagcttcaccggtgctctttagtctctcaccttcactaggcttgacatcgtatatgtcgttcaacaagtttgccattatatgcatgatccccgtgaggtgcacttgggtgcagtcaagcggatcccggtatcttcgaggcactatcgactatgatttccaccttccgcttctctacccatgagctgatagtctacaccaacaccaattgggccggatgcccgaacactcgcaggtcgactttcgactatgtggtctttcttggggccaatccgatctcttggtcctccaagcgacagcctgtggtctcccg

SEQ ID NO: 113714 - DNA, 404 bp, Zea Mays
gcgtgatagaaggccgaagcagcgtgtgtctggagctgagtgggtccagtaagaaatagcagtgggctgtggccatgggccgtattgtaatagagacataaatactggtgttgttgacagagaaaggggagaagaaatttaccagaatcataattccccaattcttgttcctctgttcttcttccgctcccttcttcctgtccgacagtggtcaccggacgtcgagttcgctgacacagtggcggggatccatgccgccgcgcgcgcggcctccctactacgagtctccaccgccgatgcgtggtaccagctgaacaaaccctgtagaggagagggcggtccttcactcctggtgtcctagcgcgcaatctgagagcctgtttgacaactttgtttcataaaac

SEQ ID NO: 113715 - DNA, 580 bp, Zea Mays
gcttctgcttcggctatgcttttgaaggtcaaccttggtgccccgaatattaggtcggcgggtagcactgcttttgaaccataaaccatgaagaacggggtatttccatgcagggcttgactaggttgagttctcaagctccaaaccacatatgacagctctttgatccactttcccgcaagcttttcattcttgtcaaacactttattcctgagcgcttccagtatcattacgttggccctttccacttagccattggctcttggatgcgctactgatgcgtattaattctggatgctccattgtttgcagaaatcgaagaattcagagttggtgaagttggatcctaggtcagttatgatgctatttggtatcccaaacctgaatattatgtcttgtatgaactccactgccttggctggtgttaaagaggcaataggcttatactctatccattttgtgaatttgtcaatggcaaccagcacatgagtatagcctccctgagctttcttgaagggcccaatcatgtccagcccccagcatgcaaatggccatgttatagggatggtctgcagttgct

SEQ ID NO: 113716 - DNA, 365 bp, Zea Mays
tgaccggtgaactagcgatgcattgatgctggatctagagctccccaccacttttaccagatttggagatggtgtccccactcagcaactctttggatgcaatgtaagttaaccctaaaccgacaactatcgatttgagttctacgatttagacctcgagcagtatgtagtgcctactattatgatagttttgattgattttctcatctttgtgttttggtttgcatttgtagaccatagtttataattcctgttcacaaggctttgccatggtagatagcaatggtagctaggaagtgctatacgaaagggctgacccatgaatgggttgttgttgatagctttacagtggagttcctgttgtc

SEQ ID NO: 113717 - DNA, 537 bp, Zea Mays
taaaatgcttgctcaacttcagaatgattgtattgttaatgaccttggagcgcctagctatttccttcgtactgaggttcatcacacatctagtggtcttatattaacacaatgaaattatactcatgatctattgagctgctctcttcaaagggtgtgccagcgtcactcctatgttttgtagtgacaagttattggccttatttgatttcgcttctccccaccgccgttagattataggaaacacaaatattttctcacgattattcgattctcgcttattagttcaacaagtgaactatgaatcatgtgagaagcaaaaagtaatctagccatttggtgagattctcgtttattttcatccataagcagactataaggaaaccaaacacacccatcattaaatggctaattaacactaacacggtgggatgatgtagtcacggcacgaaaaaaaaagcctatgcatgactcggactggctagcatagtgccagtacctggcacgacatgactatattatcgtgcctcagctgcc

SEQ ID NO: 113718 - DNA, 611 bp, Zea Mays
ggtttatatacctcttattccttgatgcttgtgtgcataattttagttgtgctcggatggattcgcagtctttcaagatcacacgaactataaatgttgtatggctctaccatatactatatgaaatgagcatcgcaacatttcagctggaaaactcgatagtgaagatggaagagagtggtctgagagaggatattttggacacatttgcgtgtgggctctaagaatgattaggtatgttcccttttaatcttccatatttacattatgtaccttagttgtgtgctttatcttcgtagcttagttgatatgtttggaacctatattgcataactctttacgatagagatatcaacacacagtcaaaatcatagttgcacatagataatttatttattgtacatgtttttgactaggcggaagttggaagcttcaagtttgtagaaatagattttctaattcaccccctcttagatatcatgatctctacaatatcataaagctactatatactaattagtgtgctaagataaacatgtaggttccacctcaaattaacatactgagtacaatacactcaatgactaaagtcattatatatacaatgtatc

SEQ ID NO: 113719 - DNA, 359 bp, Zea Mays
ccatgttttatctcctacggtgtcatggccttggatccatataatagacgaaaaggtgtgaatccagttgctcggcattctgtcgtgtttagggccgagaccacttcgggtagttggtcggcccatttgcccttcttgtcgtcgaggagtcttttcttgatggctgtgaaaatcttgtcgttggcacgttcgatgatgtcgttggactgtgggtggtatactgaggcgaagataggcttggtgccgatggagaagtagaaatccctgaagtcctggctgtcaaactgtttgccgttgtcgattgtgagttcgggcgggactccgaatcggtagataatgttttgccagaagaacttttg

SEQ ID NO: 113720 - DNA, 537 bp, Zea Mays
aaccgaagcaccgccggtgagctcgccgtagctcgacgatttggcgtgcccgtgccccccccccccaaatccaacatgaatacagaaataggtggaggagatattggcgaacgcaatagaaggatgcctactggcggtggtgccgtggggggggacttgcccaccacgcagcacagatccacgacggcgaaacgggttcggccataagtccacgatgacccagtgcatgaatcccaactcaatacggccctaaacgcatctgggggacatgaggaaggcaaggagcttaccagagtttgaagttgctaaatcgctcgccatgcagtgcagcggcaatgcgtccacgctcaaattccggtaagaaattgcccagttgtgagaccatcgcgtcactcgtaatccatgcacggcggctatgaatatggaggcacacgtccgctgcttttctctagagcgaccgagacggcaacggtgctaatcctccacggtccgaggctcttctctcccatgactacgccgggcaccaccatcggtcga

SEQ ID NO: 113721 - DNA, 763 bp, Zea Mays
gatgaactgccttgtgtggttccaaaatataaattaggggcacatgggatgaggttctagcagcatcactaattaaactaaatattgtagtatattttgatctcaaccacaaccacaatggtcggaattcccatttgatacaagtaatttatgtatacacttctcatagatcagccactatgcctcacaattaacatataaactcgtgaaatctacctaattaacatatattctctgaagattacagcaggaacacccttttgcttggacgaactgccttgtgtagttctaaaatataaattacgggcacatgggatgaggttctagcagcatcattaattaaactaaataatgtagtatattttgatctcaaccacaaccacaatggtctgaattcccatttgatacaagtaatttatgtatacacttctcacagatcaggcactatgcctcacaattagcatataaacttgtggaatctaactaattaacatatattctctgaagattaaagcaggaacacccttttgcttggatgaactgccttgtgtggttccaaaatataaattaggggcacatgggatgaggttctagcagcatcactaattaaactaaatattgtagtatattttgatctcaaccacaaccacaattgtcggaattcccatttgatacaagtaatttctgtatacacttctcacagatcagccactatgcctcacaattaacatataaacttgtggaatctaactaattaacatat

SEQ ID NO: 113722 - DNA, 550 bp, Zea Mays
cggaatggtttggaagatattagcaaccaccacattttttcgtcgaaccaatgcatatagttgcgggtatatttcttttaggatccctatcctcaaccatttgtcctcccaaaaccaaatatgtgtgccattgtcaagttgaaaggatccaaagtttaggaagttgtctctaactttcataagccccttccagaaatgcgaatgagagggtctacgtttagcttgtgataatgtatgttgttgcaagtatttcctccgcgacatggtttgtcgtaaaccctcctcatttaggagtttaaacaaccatttgcttaagaggcatttgttttgtgcatcaatgttttcacccctaaacccccacctcccttggttgacaaatgatactccactcggtgagtctatactttttcttattatcatccccttgtcaaaaaaactgcgatatgtaatagtctattttttccaaaacacctcttgggatctaaaaaaaagacatcataaacatcgcaaggcttgtaaggacagagttaataagaactagccttccacc

SEQ ID NO: 113723 - DNA, 310 bp, Zea Mays
cttttgtaaacgctgtcggacgaaaggggtaccgatgcgtttgggccgccagatcaaatacggatggccccgattagatcctgaaatttaagagctccagtacgcccacagccgtccgatgacatctcaacggtctcgatccaattgagtgaaagaggtaccttttaacaaatctgggccttcaaactgacgatcgacggttcacattggattaaccccggatccatccccatccgcacgatccggatcgaacgttcacgaggtcgtcttctttcctaggctctgagaacagcggcacccggcagccgcc

SEQ ID NO: 113724 - DNA, 435 bp, Zea Mays
taacacccccttcagatatttcaatttttgggcatagtggtgcgcttctaacatttcttcttgggatagtacctttcccgaagcatgacgaataatgtagtcaatacttttgttcgacgcttcgagaccaggagcttcgattttttcagttgcaatcctctctgttgatttttccttagggtcagcgtgctccatctcgatgggcactgaaggcccagctttggtttcagcctgaattgttgtagctttgactttagcctgcttagtatcagcttcgggttgcgacttggaagcttcggcaactttccttgtaggagcaggactcaaggtttttgttgtttctagcacaacatccagcacattttccatccttctcctcttaggagttacggcagaacccatttgtaccttcgatactgttgcctctattgaagg

SEQ ID NO: 113725 - DNA, 327 bp, Zea Mays
cataactactttaatcacaccaaacatacaagtctatcaatgcaattgtcacataattagcaatcttaaacttcaacacccattgtgactactacacaatcatgaacataatcaaatcacattagacagaagtatccactgaggaactcatcgcctaatttgtatcttaacctaaactttaccctacacatgagatacatccatttcgtaattacaaacgtaactacatcaccacatgaaacgaagcatttcaacagtcacctaatacaatcacaacatcgcgactaatacctctagccaatccattcttcaaaccaactaacaaat

SEQ ID NO: 113726 - DNA, 483 bp, Zea Mays
aaaaaacctaagcacgtgaattttaagaattatatagctagacaatgggaaaataagataatgccatatgaattatgatcagctgtggaatgaccatttcagacataattttatctagtaagctacaactaataaataacacaaggcattcagatttgccacaagataaataattgtagcacaaatttgacacttcgctagcataagaagatagattaaggtattgaccatgaagcctgtggataaaatggtatcagaaatattagatataatggaaaatacaggaagagtgctatgagcaaaatgagaccatgaatattgttcttcctctcccatgcatctgcatctggccttgttcatgaagcccaacacagtcgttataaaacacagtgatgcctacaaaacaaaaactagttagattcaagagtacttcaacatcacgaatcctctcccttgcttcgaccataaacacggcagcatacg

SEQ ID NO: 113727 - DNA, 367 bp, Zea Mays
tcagatcgctgttacttcgattgggctatgtctgacattgatcgggaatcctagggtggggatcgtatactgttttcagtggggcgtgatctaatccgggctgcatgccgttgatccaacgaccatgatcgactcgtaccgcttcggtcaggagattatgcaaaagagaccttgtagatttatcaaatcaacccaaagtccagaactataggaaaatcatcactgacaggtcctaaaacttgcaaaatagaccctggatttcaatgaaatagtggccgcagtccaatcgccgtgtatggttataaatttaatctgaaaattgcttatttgtataaaaataaatctaagaacctaagaaactcataac

SEQ ID NO: 113728 - DNA, 365 bp, Zea Mays
gtggagaagacaggacgacgttgccagagcatccctacacacggtagcgctttggcctatgccacaacctactcctgcgctctgcccgattagatgaggcaagggtacaatgggcagcagtacttcagcctacgccacaacctattcctgcgctttgcatcgattagacgaggcaagggcacgacgagccaggaaatcttcatgaagaccaaaagaagatctattcccccgcgcgtctggccgatgcgatcacgcacgcctgagagactgatggacttgcgctcggtgcgtgacgaaccatcgtaggaaaggatccaccccttatactgcttaaccccccaagcaatccatgaggatcactcgag

SEQ ID NO: 113729 - DNA, 478 bp, Zea Mays
gcagcgctggctgaggggtatgtggcaaggacccatggctagtcctgatcacaagaggtccaccatagggagtgacatcacctccgtggccgcccttatggggtcgacgaccacctttcgagcttggagacgactgagaagctttaggaggagtggaggcatgagggcatgaaggagcccccttagcgatagagggcgagggggttggttggtggaggacgtgccatagagagtcgaggtagacgtgctggacttagtgtctaaggtgagctccttaagaagtagcttgttgcggaagtcatggaagtacggaaagggcatggagcacttgatgaaggccttcagatggtcataacaccaactcagaccacacaggaggttgaggataagcatgcgatcggagacatgcttgccaagatctcggagagagtcagacatgtccttcattttgcgatagtactcgatgacagagaggtct

SEQ ID NO: 113730 - DNA, 393 bp, Zea Mays
gcaggtagacagtgaggtacatgactgaggggtcgtcctcaagtagctgcttcccttccaatgtacgcatcctggccatccaaacgggacggtttctctgaaagggcggaaagaatctgagcggggtgtcgaccacttcttcttcataaatctgacacagggccctcaatgccttgcgggcgacgacttggcaggtgtctttgaatctgtgccccacagcagtgacactccattctacatggtgcggactggatccaatgtatacagtcacaacacatttctccgtgccatgcttgacgaattcacgaccatcatactctggctggctcctgattccgaggcgaactgtgcaagctctcagcaacttggggaaaccatcttcattctagcaaa

SEQ ID NO: 113731 - DNA, 685 bp, Zea Mays
cggtggagaagggagtgaaacccacctccccgcaccttcggagctgccattagatttagcccaagttctggccaaccaaacccgactcattgaggtcctcaccagaagccttgaaaactagcgcccaaatggtggaaggcctaaggataggatgggagattttctaaggctcaagcctcccacattcgctggatccagcaacccgctcgacgctgatgactggttgcgcataataaaaaggaagttagaggccattggatgccctgaaaaccaatgtgttcatcttgctgctcatcaactctctgggatggccctatcctggtgggatactttcagcgctgccgtcagagatgctacctgggcaaaatttgaagccgccttccgagagcatcatgtgcccctagggatcgtccagctcaaggaagaataatttcgggaattaacccaaggagggagacctgttagtgagtacgtccacaagttcacggaattggctcgctatgcgcctgatgatgtcagcacagaagctaagaagatggtccatttcttgaaggaactaagaccataactcaagactatcctcgccagccaagattttctcagcttctcgcacctctcaaacaaggccatacaagtggaaagggctagagaagaagaaaagggtcacctcaagagcaagtttcaa

SEQ ID NO: 113732 - DNA, 821 bp, Zea Mays
catatattttgaggcaagatttgaattctgtcaaatgggaaacttagaatttgggagtaaatagagtaaaaaattagaaactaaaacaaaacattaccgtctacatttgttttctactaatctcgaggacgagattatttttaggggggaatttgtaacacccaaaatgctattttcaatttataaaagtttttgagttaaaaagatatatataagtaaaatatatatatacctcatgttgtttgagcatccggtgtctttttgaagcatagtagttggatcaccgaagatcagcaggcatccggtttcgttgggggatacggggccccttctctcttgctcgctgtccctctttgggttagacccttttcttggggtgcctctttgcttaagaacttactaagaaacctgtgatccttgtaggcatgtcgaaccgggtagcgatggtttgggcacgaggcttcgagcagtttttcaaagtggttagtgccctcttcggttggaggcttccttcccttctaacccactgcgactactagtacttcatcgtgttgctgcctgtccttcttctttctcttctcaggctacccgtcgaagcctttgtcgagctctttgtcgtgtttggccttcttcttacggtggtcgaagatcgctcccaccgcatcttcccctgatgcgtgcctagtcatcatgtcgaggagctcttcatagttcatgaactctttcaccccaacttgtgcactagagtctcacttgtgatcactaagatgaaagtgttgataatgttggcgtcggtgaggtttgtcagcttgttacattgt

SEQ ID NO: 113733 - DNA, 470 bp, Zea Mays
ctagcatgagtttgcaatgacagacatgggtcagcttcaccatttcttgggcatctctgtcacacgctcaacacatggcctgtttctttctcagcggtagtacactcaggatattttggagcgcaccgggatgagtgtgtgcaaaccttgtagcacgcctgttgatctcaactccaaactatctgcagatggacctcctgttggtgatgctactcagtaccgcagtctggtaggagctcttcagtacctgacctttacacgtcctcacattgcttttgcagttcagcagatttgcctctatatgcatgatcccagggagcctcaccttgctgctcttaagcgcattctgagatatcttcaaggcaccacagactttggtttgactatgcgtcgttctcccccgttggagctggttgtctacacggatgccgactgggctggatgtcccgacactcgacggtcaacttctg

SEQ ID NO: 113734 - DNA, 274 bp, Zea Mays
gaaagggtcagatcactgatgagaacaaaactgccatttaaaagtcctggatccacttggtttgaggatcgacagagagagcatgctaagatgtctatcatggactgaggatgagcagaaacaccactttctggagatggtggaagctaggaaggctgaaaacatagctatttgacagtcagcaaagcagaggagcttcgtatcagtttgccactaaggtcctatgtataggcactggtcaaggtgatttcctatagtaagtgtacaatgtctc

SEQ ID NO: 113735 - DNA, 486 bp, Zea Mays
tgaaacaaacaccacctaaatttagtggaatgacccttatttcttatattagtattaactaattaactaagagaaataaatagtgatggattaacttattctatcacataaatcaaataaaaaagtgagtagtaagaaaataatagactagctcattcttcgaaccaaatatcctattagagcaggagcacctttgcatctctacacgaaactcgctcgcaattcgcatatacgtgcagtgtgcagcccaaagggcgacacgtgcctccatcggttgcacacgaatttcactactaaacaatgggcaatttttaaggtgcgtgtgcacgggcggcaaaaccgcaaagggctttccttttgcaaaggcccactgtaggttttttaattaaagggtaaaccacctttgctgtgctatcataacacgagtactaattatagcgaaccgacttgtagatttgaatcgtagatgcccgtacagcgcacaac

SEQ ID NO: 113736 - DNA, 555 bp, Zea Mays
ggcgtggttaatgcgaccagtcatttatggcgggccagtctggggacaggcataggatccactcgagtggtaccctttcgacatgtctgtcctcctttgttaggctctgccatgcccgaccctgggctcgatgtcacggggttcaaccgggaaaggtccttccagggttggcgcacctgcctcttccgactgactaacagaccctaatgattaggggctctttcaccagcgcgctcactaacctgtaggtcccatggattgggggtcattccctcgacactatgcatgtaatcggatctagaatcacatgtatagagatgtcatacaatgaattatatcaaaacacaatgctttattaataacaaatccgagtatttattacaacatcgatatggtgtatcaatccaccggtagaccctccgtagccgactggttggcagcacgctttaaactcgccatagtccttgagctcttaggtcctcctccatctggacaaacaaatacatatatagggtgtggtggaaaaggcaagagtgagtactttcgcactcaaca

SEQ ID NO: 113737 - DNA, 461 bp, Zea Mays
gtgagtgcacatgtgtagtgtgcaaggtgtgtgtttcctctccagatgcaacctgaaaacaatgcaggtagagaatatactagtttatgaccgagttatgtgaagttatgtggtcataaatgtatatttggagtacttacatgaccactaggtgtctgatcaaaaagggggcccgtgtcagtttgagtgtcatgagatgcatcaatgtcacctccctgccccaaaaatcaatgatactatgtttaaaccctcagtcaggtgtcaattacatttaatcgataattgagattacaaaggataaaacaaagatgaaacatatacatgtttttgtggtgtggcgtcaaacatcggcaagtgggaagacgtatatgagctcataatgttgcagtctggtatatgttgaggtgggatgttttcgccaacattaaaatggtaatcctgttgacattattatggttttg

SEQ ID NO: 113738 - DNA, 818 bp, Zea Mays
agataatctttttcccgaagcgtgtcgaataatataatcaaggacttcggaagacgcttcgggagcaggagtggcggctttttcaggcaaaatctgttctataccctcttcttccgctgccttttctccagtttccgaggatttctccttggcgggcactgaaggcccagcttcggcgtcagcctggctcaatatagcttcgacttcggtcaactttgtctcggtttcaatctgtgttttcgaagccttggcaatttttcctggagtagagcttgaagtttttatcgtctccagcacacccaatacactagccatcctttttctgttgggggttgctgctagatctttttgagtctttagcgcctccactcctgccgaagggcttagaacttctgatgttttcgtcccttcggttctcggttcttcaattttgtaagccttcggcattgcagccggctcttcaatcctctacgtaagagcaggtcctttggcttcaataccaaagaggtctcaccgccaaattcaggcactatggccggttcaatgtagcgcggtcggtgagtaagaaccttcacctttttcctcttcggcgcgggctcgcttgaagcggctgaagcagcagccttcccagaagttgcaccctttcttttttgcccccgcggcgggtagcgataatcagggtacacaaatccaatagcatcaaaaactctatttagccttttcttttttcggctcccgaaggccgcggatagtgtgttatcttcagacttggactatgctccaagtagttcatcactagtattttcaacacactttag

SEQ ID NO: 113739 - DNA, 569 bp, Zea Mays
ctttttttgtgctttcaaaagtgactgcagacttaatagaaattttagaataatatgtaggtttcagaagttcagaagttcataagttcagactttgtgctttctttttttatttttctttttctttgttgttccatgctctttcaaaacaacacttcatatctgttaaacacataccttctatagcagtaatttaagaatcctcgagagtgactaagaaaatggacagaaaattgtgtattcatgtggtgtgttctgggactaataacagtaattacagaagaatgcagggcgtgagggaaattcccataccatattagtagcgccgaccagtgccttgttgcgccgaccacaatcctggcttggaaggagaggaactccagtctgggcgtcacttgttgcgccgaccagtgccttgttgcgtcgtccagtacccaccagcagctcgcaatccttgttgcgcttgattcactcccagaacttacaaacgcgtggaggatttgccgcaaggagaggaactccagtttggtggccttgatatatatggtttatggtggcgtgtatggagg

SEQ ID NO: 113740 - DNA, 311 bp, Zea Mays
ctccgatggcgactagacgaaccaccggcaggaccccatgtcccccggcctacggagctaaagcctgccttcctccggaaaccattctgggccccccacgggtccagacttctgacaggtttatccatgagtgaccaaggccaaggacgggggctccttcgtcaaacgcagatggaaacccggggtcgggacctaatcttacggaagtaccaaaccaaatcagggctctgcaacactccccagctgggaaggacccttcaaggtaacgggaatactccgacccgagggcgactgtctagctacgactgaag

SEQ ID NO: 113741 - DNA, 407 bp, Zea Mays
ctgggggaagctttcgtcttgacaatgaaggggccctcccacttgggctctagcttgcccctggactctatccgggctgtccagacgagtacgaggtccccttcgctgaattccctcgggatgactgcgtggtcgcgccatgcttttgtctggtcttggtatttgtttagagcctgtaaggcgaagactcggtctccatcgatgagatccttcgaagtgggctcgtccacgtcggggacggctgacggaactgttcacggggacccatgctttatttcttgtggggtcatggcctccgatccatatagaaggcggaaaggagtgaacccggtcgccctgcattcagtcgtgtttagcgcccagaccgcctcgggtaataaatcggtccacctgcccttttttcgtcg

SEQ ID NO: 113742 - DNA, 337 bp, Zea Mays
ttgaaataagggggataaacttccccactaacctagtagtaatgggaaatcaagggttagatgtcatcctagggatgaattggctacacaggaaccaagccactgtcagttgtgacaagagaacagtcaagttggtgtccccatctagaaaggaagtagtaactaagctgtacttgcctgaactagaagaaggagcctgtcaccatttatcagtagatgacaaggagtccaatccgattaaggcaattagaattgtgtcagaattccccgacgtgttccctaaagagttaccaggtatgccacctgaaagaaaggttgaatttgccatagagcttat

SEQ ID NO: 113743 - DNA, 843 bp, Zea Mays
ctatactcaaaatcatgtatctgctcagttgagtcaaacaaatcagccaaagttctaaacttcttaggtggattatgtcctgaactactcgagctctgactagagggagtcacccaacctggatctggtgcaacactagatgcaggggtgaatgaggcaccaccagatgagggtgcaagtggagtattgggttctgcaggctgaccacctccacttccctgtccaactggagtctgttcccctgctgtttgggctgaaggttcacccatttcagtatcttcatctactatcggctctctgtcagagatttcatgatcaaccacaaaagtgtctgttgtttgcatgtcagtttcacacaagaagttgtcccagtcccaatgcttactctcctcaaaaatgacatccctgctgaccacaagccttctggagattggatcaaacagtctgtacccttttgtacccgattcatatccaatcaagaccattttacttgacctgtcagataatttattcatgcctggaccaagttgcttcacatgtgctacacacccaaacactttcagatgactgaccttgggctttctaccatgccaaacttcaaaaggagttctactgtccagggccttggtaggtgacctgttcagtaaatacactgcagtcctgattgcctcaccccaaaatattgttggaaccaccattgcttttaacaaacacctggccatttcaaccactgtttgatttcttctttccaccactccattctgctgaggggaatatggagtggtagtgtagtgtttgatgccatcttgactgcagaaagtttcaaacagaatagaggtaaat

SEQ ID NO: 113744 - DNA, 677 bp, Zea Mays
ctataataattgcctatttcgcgtagagacggagagattccttgggctgtgttttgttgtgctcatttcatttttgatctagcaacctgtaccgggcgaacgccatccttccatccctgtctccctgtctgctgtgctctatctctctcttccgaggacgcgttccagccgggacggggaccatgcacggcgcgtcggcacgggtgagcacggtcgtagtagtaatggacggaaatgactgaacacatgtacgactaggtggtgccaaatggccagcagggcgatgtttttgtcgacaacaagttgaggtgactgccgttaatctcggctcgtacagtcagtcaggtactagccattataacccccctcccttgtgctctggaaagaaagaaagaaagaaagaaaggaattattacgcagtttctttgatctgaagcaatggctggcttgtcaggcgatctgtgtgtgtgcgtgtgtgtgtctgcgctaatgataagacagatccgtctgccattggttgcgtgtgctctcgacgcgacacacatgacagacagacacatcacacatgcgtctgtccatctgatccaatctaatccctggcgcagcaccagtgcaacttgctgctatatattcctactgcttccctgaaagctaccgcctaccgctgctagctaaag

SEQ ID NO: 113745 - DNA, 510 bp, Zea Mays
cgtcggtgtctggaaatttctgtggccgaggacgcgggcgcggaagaaacagtgggagacgtggtggccgcaacggcggtcgtggaggaaagacggtcgcgaacgacgaatgtcgttattgcggaaatactggtcactgggcgcgggactgtaggaagaagaagcgcgatgagcaatcccacgctgtgcatactgaagaggtggacgaagccttgttactggcgagaaccagcgtcatcgacatacaagagaacctcgacgacgccccggcttcactggggccgcaccaagtcgttcatctcagggaggacaagctgtacgttcagcttggtgacaaagtgaaggaagaggcgcggtggatcctagatacgggagccacaaatcacatgacaggtgagcgctctgcgttctcctcgctgaatgagaaggtgcaaggtacagtgcgattcggtgatggttcagtcacggccatttgtggtcgcggatccattcttctccactgccggaatg

SEQ ID NO: 113746 - DNA, 430 bp, Zea Mays
ggcaaacatgtatcttgatgcacaagaggtcagttctgtttctggtagtgatggagatgaaaatgcagtgaaccattagatcagaatcactaaaagatctaggttgtactccttttcctttaaggtttcgtccctatatagttgaaatgaagttttatttaaaggttttaacgaggcacctatgtaacatctctttttaaagcttggtgatccaaacggttgtgaaatttagtccatcacttgttgttactgatctaaactatccttgttgtcttgctgatttgttgttatccagctgttatgaactatgattcctttagtcctgctatggaactgttcttgctgctgtttttctgaaatctgaactatgcaactgttgaatgtattatgggatttcaatctgaatttgattcctgtaattatgttgttt

SEQ ID NO: 113747 - DNA, 779 bp, Zea Mays
aggatttgataaactatcttcatatgcccagttctaggatcatgcatatacctactcaccacacttactgcataagcaatgtccggtcttgtatggcaaagatatatcaaacgaccaactaccctctgatatatttcccgatctatagggtcacctgacttagcacaattttggtgattcctatcaatgggtgagccacatgggcgacacccaaacattcctgtctctaacaaaaggtcgaggacatactttctttgggagagaagaataccctgagatgatctagttatctcaatcccaaggaagtatcatagtggtccaagctcctttacctcaaaggctctacttagcctttccttcagtttcttgatctccttcgcatcatctccagtgatcactatatcatcaacataaaccactagaatagtgatacacgagccctgatgtttgtagaagactgtgtgatctccattgcattgatgataacccatatcacacacaaatcgcttgaatctatcaaaccacacacgtggtgactgctttaggccatagagcgacttcttaagtctacacacttttccaatagtctgtttatttgcatatccaggtgggatttccatataaacctcttccttcagatcaccatgaagaaatgcattcttcacatccagctgatgaagaggccaaccaaagttggccgcacatgagattaaggtcctcattgtgcccatttttgccacaggtgcaaaggtctcatcatagtcgatcccatatgtctg

SEQ ID NO: 113748 - DNA, 442 bp, Zea Mays
gacgcggtggcgagttctaggaaggctgaaatagaatgggagaaggagtatgggcctccgtcgttcacgtacaaagatctgtcggccgccacgagaggattcgaggacaagatgctccttggaagaggaggcttcgggagtgtcttcagaggagtgctccaccactccgagcagatgatggttgctattaagcgggtgtcgccagagtcgaagaagcaggggatgaaggagttcatcgccgagatcgttatcatcctcgggcaccttcgccaccgcaatcttgttccactgattggctactgccgccacaagggagaactccctcttggtgtacgactacatgcccaacggaagccttgactaccacttgcatactacccctcctcggcacaagaataaccggatcgatctgcagtgggctcaaaggagatgcacatcgtca

SEQ ID NO: 113749 - DNA, 652 bp, Zea Mays
aaaaatttcaaagtatttatcgtgtccttaagagttagtggtaatcagtttatcttcattagaactttaatcatcgccaaagaagaattctggctaacatctactacccgagcttggatgtatcgttactctaatccatcgagttgtggtcatagagggcgatgaggttgacatgtcttaccctcaccagcgacgcatagatggtgtcataaggtcatggtccacaatattgtcatggagacaaatgccgacaggactaagttcctcatgctcatgcgtatcaactaccaagagaggacgatgttgacgcatgtgaacttggaggtgggcaatgctgtggtacaccatcgaactagagagaggcgatgacatcgtatactgccacgaccacctggcgtccgctgcaatcatatgcttcgtgacgctcgacatgttggtggtccgtctttgagactggcgagcaatgtcaaggcctcaagggcatgggtgacgaataaacagatccgcgtcagagtccagttagcgcgcgagcccaagcgcacaacatctccaccgtgagttcagcatcttggcgtggaaggaggcggatatcgcccgcgtcaacgagcttaccatttactactgaactcgctttctttgccgactgtcttat

SEQ ID NO: 113750 - DNA, 335 bp, Zea Mays
tgtgtggcatcaatgtcttgtgatgttccattgggagcaacagatttctcaaatacatgtgtcattcttttaaaatcattttgcataacctcaactatttgttgaaattgctctcgttgttcatctacgtaaaccataagagcatgaacatcgttggatttacttacaatgggtgtgagtgcagtggatcgaagatttgtcaggtaacactccctcagtcagacgagcttttggtgtcagacgacattgaaatcagtcaagaacttcgcgttgatttctgccagcagctttttcctaacgtcctccagcttctaaaatttcttagctgataggcc

SEQ ID NO: 113751 - DNA, 285 bp, Zea Mays
ccctcgcgtgtatatatgtaaaggtttgtacgatgaagttgtgtgccctcgcttgcctgtgcctgcgggggcgttgtgtactttgtctggtatgttttgttatgctgtgctggtgtggttatagtcggtcttaacgcggacggtttgatgctgtcgtttctgcttttgttgtactggttcggctgcgccttttaggcggctactgcgtggatggtctttgcggtagacttcggggtttttcgcacttgttgtgctagtccggctgcacccttaggcgacttctgc

SEQ ID NO: 113752 - DNA, 1192 bp, Zea Mays
gtccggaagtgtagtccgcggaggcggtggcgcagctgacgaaggaaatgtcgtagaggcgagctcctggaggacggggccgcgcatgaggatagcagggtcttcctcatgcacgacaggcgacggccgtggtcgctcgacgtcacgcggtgacggagctgccacgggaacaactgctgcagggttagaggcaatcaaaaaatccatatccgtcatagggaggggtgtggcgtagaagggaaaggctgtctcgttgaacacgacgtgacgagagataatgacgcgcctggtggtgaggttgaggcaacgatagcctttatgggaagaaggatatcccaagaagacacaggctgccgagcgcggagctagcttatgtggtgttgtggcagagaggtttggatagcagagacacccgaaaacacgaaggtgactgtagtcgggggtcttgttatatagtatggtgtagggaacgacgttgttcacagaggaacagggccgacgattgaggaggtaggtggcggtgacgagcgcctcagcccagtaaggtggcggcatgtgggcatgtatgaggagagtgcggctgatgttattcagcgtgcgaaggatccgctatgccttgccgttttgctgggatgtgtaagggcaggaaaatcggaaaagaatgccacgagatgaaaatagagaggtgagggtgtggttagcaaattcagtgccattgtcagtctggaaagtttttattgtaaagccaaattgggtttgcacacaaaggcgcaaaaatcagtgatgtgagaggctacttcagatttgcgaataagtggaaaagtccagcaaaaatgagagtaatcgtctaacaaaaccaaatagtactggcaccctgatatgctggccacgggagatgtccaaacatcacaatgaatcaaatcaaagggtgcagaactgcgtgtttgagaatgagtaaaaggtagtctcacatgtttgccaagctgacaagaatgacatagagatggttctactttattacaaggaatggcaaaagtatttctaagagtattgattgcagtagaagacggatgaccgagccgagagtgccacagggaggtggtgatggcaatggaggcgtgcggcaaggtgtgggtggcagctggaatggtgtagaggtccccatcactatcgcagcgaagcatcacgcgac

SEQ ID NO: 113753 - DNA, 330 bp, Zea Mays
gcgcgtctagtggtaatctcgtgacctataataacattagatgttgattttatggggtcgaaaattttgttttgtgctagtgtagcctccctgtattcctatagtggtatcagagtcatagttgttaagtattaggttcgggacatgtgcatatggtgatatgcgaggttttaggatgatacgtgaacaggtattggtgtttttgccgaaatggtcatgcaacgaactactcctaccagttggtactctaccatcggagttaagtgatgcacgtaataccagttgtagcaagattagatcaatttaattggttagatcaaaacccagttt

SEQ ID NO: 113754 - DNA, 657 bp, Zea Mays
tcgaccaacgaccggagcgaattgtcgagaccaacatctcctcgtttaacatcaactacaccactcacatggctactacagcggtggtggccttgaaggcgaagtcacacaaagcgatcaaattcgagtgtcccatctgttttagagtgtttggctcgggtcaggcgctcggtggacacaagcggtcacactccattgccggtgagctctatgaacgcgcacatgctgacggagacgaagacattgatgactacgatgaccaacctctcatctctaatagatttcttgatctcaatctgccagcaccaggagttgacgaatgaagtatggttggttcgaatgttaatcttcaaagaaaagatgtggtatatatagaattatagtttcaggttcaattcattctttaaagatttaacttacaaataatcttttattgggtgagatgtaccatgattaggttcatcaataattcacctacattttctaaattctttttactagtttttgttcagcgtatttacatagagtaataagcatatcatgatcttagtgttcaaccctcagatgattcagtgaacaatttccaatttcacttagcattacatcttctcaaatctcaagtttatagagtgactagtcactagtgaggtgtccgta

SEQ ID NO: 113755 - DNA, 313 bp, Zea Mays
gtgtgtttaatacttagaactcttagtcgatagtagaaattgttttggcttatatagagaggtggtgacatgccaaatagtcgtcgctttctctataattataagttgagtcgtgacgatgcgtacatagttcgtcaaatggagtttcgcagatagtgtatgattgtgcttacgatttcgagtagatacttcaaataagtcaagtaggtttgtaatgcaagatgcgtgatgaagttagtttgttttaggatatttgttgaaatgctccattcatgtgatagacatgtgtggttaattcaaatcgagttgatgt

SEQ ID NO: 113756 - DNA, 360 bp, Zea Mays
cggtgctgtctgtaacaccctaggtgttacttagagttttcactcaaggctacacaagcaaagcccatcatcacatgtggtttagtttgagcaaaggactccaaacttgaaaatcaagacactaagtaagtgcaacccatcttaaatgtcatgccttggcttatcatgcacatataatggggagaattgcccaaaccctaatgcaaacccctttggacaattggagcactataagagagtgtgaccaaaaggctataaaaaccacatgatcatgacttgggccaattataacaattgtagtacacataataccctactaaaaattgtaagaaagtgaccccaaaaaggtttcagaaaaac

SEQ ID NO: 113757 - DNA, 594 bp, Zea Mays
ttgacaataccctcaattacctcgtaaggacagacaaccccagtcagaggagacctcaacataggagtcttaacagtgacccgtgtatcggaaaggacgaaacaatataccacgtatgatgggagctgacaaaggtcatacaacggacggatccatgccacatacgaccgcgcctcggggcaggctcgcgggacgcgccatacactgccacctggacgtcagcaacggactcactacagagaccagtgtgatgggcagcgtcatgtcaggggtacgtccacacataggaaaggagacccagtttgttgacctaggcggataggactctctctctccctccctccctctctctttctctctctagtaaggaagggattccaatttaaggattatctcttaagatataaaagaaagaagtttccttcgaacgacacacaagcacaccagttgtaacacgtccttagcaatactacgatcaacactagactaagcacaagcctaaacaagtataacacatcgtttcaaacctatcagttgagtctcagcggctcatcattcagattgagtccacactagctcacctccaaaaccacg

SEQ ID NO: 113758 - DNA, 357 bp, Zea Mays
aaggtggatattagggtggaggcgaccatgtcggtgcttgcggtgtcaattggacgacatctagggagatttatttggctttttggtggaagggtccaattgtttttgcttgcttttctgggtcaagtgagcaagattgctttcctggccaatcatggtgactagccttcttgttgacctacttggacaacagctggtcaaaagttgggccgaccttaatcagccaaccaattaccttagccatgttttgcttcctcgtagctatttcgggtcgtcgagtcttgaagggtgtggtcgctgctgcttctagtcggaccgtctgccctgactggccagaccgtctgcgatgcgcagaat

SEQ ID NO: 113759 - DNA, 728 bp, Zea Mays
ctcgacagaaggagcaattatcattgggtcttagacaagcagtcaaggtattgcttcggggcctcgagccagttgttctaaaaaataacttgagtattcataacccggattgggtccatgggccattaaaaggtctgagtgacccagacaggtgattttgttggctatctgatgaactcagacctagagacaacgcaggcgagcctggaactctgtctcgtgggttcaccgatggactcagacatagagacggtaccgtcttggaccctagggaatcaatgttctggcgatctttctccgatacggtcgacatggagccctgcatcgcaagatagtcggaacggttgcacggacatgcaggaagggtgctagtggacagtcctgatctcgtctctaggataggcttgtggggaaacccctatagaggcatcgagaagacaatagtcgagacattcattcattgttctattcctcatacactctgtaatctcaaaccaagagaaaaatcattcacataacatacatgacatagggtgttacgcctctcggccgcccgaacctgtctaaatccctatgttccatcatgttgaccatgaaccatcgagctattactgatcttcccatcaccaaaagcactacatgatacaccctgtagtgcgttgccgataccaaataccgacaactctatcttactaagtatagaggcaatgttagagattaaataaaat

SEQ ID NO: 113760 - DNA, 366 bp, Zea Mays
ggaatggcgtggacaagttgcacaagtgtatgagattgttgctcagctctagaggtgtttggtaactcgagtagactggttggaggtatttatagccctaaaaccctccaaatagtcgttgctagaaatttgctaaatctgctctttcctcgggggcaccatcgggattgcctctaatcctgccttccatagactcactggaccggtctgctgcaccctggaccctaccacgtgtcctaccacatcagctaggcattggagccaaccattgagagctaaaacttcctgtaggacacgactggtctggtgcgccaaggtacttcaagcgtcatttgcatacctctcagttaaagaggtatggcgtgc

SEQ ID NO: 113761 - DNA, 633 bp, Zea Mays
gttttgattttttttgtggggcatagagatcaccctagatgaatagtcacgaacgcgccgaatgtgccgtgccaatttaagtcgttgccaacttaaatcgatcgttctgctatcaggggtatagtaatcgccgacttaaaccgattgctccgttagcagggtatagtggtcacccttagttaagtaagcgtgagcatgtcgcaccgtcttaagtcatcgccgacttaagccgattgctccgttagtagggtatagtggtcaccatgagttaagtaagcgcgagcatgtcgcaccgtcttaagtcatcgccgacttaagccgattgctctgttagtagggtatagtggtcaccctgagttaagtaagcgcgagcatgtcgcaccgtcctaagtcatcgccgacttaagccgattgctccgttagtagggtatagtggtcaccccgagttaagtaagcgtgagcatgtcgcaccgtcttaagtcatcgccgacttaagccgattgctccattagtagggtatagtggtcaccctgagttaagtaagcgtgggcatgtcgcaccgtcttaagtcatcgccgacttaagtcgattgccccgttagtagggtatagtggtcaccccgagttgagcaag

SEQ ID NO: 113762 - DNA, 345 bp, Zea Mays
gggtttttagtatctcaggggtataaatgtgattccacttagtgtttggggatgttttatgacttttctcaaaaagccctaaggtttttctcaacttgggttcagttttgccccctctaaccactatttagggttaagtccttaaaccagggtcctatttgtaaaacagtaaaacaatacaacttggaattctccaaataataaacttattcacttttccaagctctaccattttggtatatggacctttaactaaatccttctagatcttgaattccccttttgggctagttttatggttccgaatgagttctatttgtatttcagcttcttccagggattcat

SEQ ID NO: 113763 - DNA, 639 bp, Zea Mays
tacgggatgacctgcatctggttgtatccgttcggttttcattcctacccggctgatttgtacctagtacctatcaaatcaaagttattaaaacctaacaaggtttactcgcacgcccgcgtttggcggatgtgttttgcaaaaaagccctcgaactcttaggaaattaacctgccattcacacctcttctcttccgcctccgccgtctcggccttgcctcgcgcatctgcttttaggaccttctcttcgtgctccgcctcctcgccctcctccatgtcgccgagatttgccagcgtggcagcctctctgagtccaagccctagcgtccgcgacttgctcttgttcgtgccactcactcacctcgtattgcctcactagggtttgtcgttcccatcgcaggcaaagacggagcaaggtgaccccggtcgtggcaccgcacctcccgaggctaggcccctcttgtcacattcccctgtgtggcgtagtccgctgccgccatggatgagacgcctctgccacagcgacctctccttgctcggttctaggagtgacacacacccgtcatcaccgacacggtaatgttgccattaggcctgcggccctccccgtcccaacccatttcttttccacccgtcacc

SEQ ID NO: 113764 - DNA, 356 bp, Zea Mays
aaaaagttcaatgaattatacatgatttgaaagaagcacaagctcgacaaaagagttatgcaaacaaacgacgccaacccttgtactttcaagtcggagatcatgtgtatctgaaagtatcaccaatgaagggtgtaactcgtttcggtgtaaaaggaaagcttggaccttgatacattggtccattcctcattcttgaacaatgtggaccagtggcgtaccgactccaactacccgaaacattgtctgcagtgcacaatgtgttccatgtgtcccaattgaagaagtgtcttcgggttccagatcgaaccattgaagtaatggatgttaccttggaaccagacttcacatatcca

SEQ ID NO: 113765 - DNA, 497 bp, Zea Mays
ggagtctcctaaaatgcaagcagatctcaccgatttttcttgaggtatttcatgttattgtagtcagtcatattcttcatccctgctgttgcacgctgtgggggagcttgggaccagcatcagctggcggaagaagaggatgtcgacccgcttccagaggtatgtgatgaattttggattataggaatttgttggtccattccatctgatatacagtgaactccatcattctagaattcatttgcatattaaatggtctgtatccaagtgtgattgtgaccctcctcaagtgggtatgattttctggtatgatttcatcattagcatcagctggcggaagaagaggatgtcgacccgcttccagagatatgtgatgaattttggattataggaatttgttggtccattccatctgatatctagtgaactccatcactctataattcatttgcatattaaatggtatgtatccaagtgtgattgtgaccctcctcaag

SEQ ID NO: 113766 - DNA, 293 bp, Zea Mays
gtcgtcttgctagtcccattttcgatcttgttttgatccgttatcgatgtagtcccatttttgatcttgatgtagtcccattttcaatcttgtttctgatgtttcatttttgatcagttatccatgttctgatggttcgtcgtcttgatagtcccatgtcttatgttctgtttctgatttcttatgctctgtttccgatttgtacgttctgtttccgatttgtaccatttgttttggtggttcgctagtctcctttttgttttgttcgtatttattcctaaatttgtactgtt

SEQ ID NO: 113767 - DNA, 536 bp, Zea Mays
ggccttggtatcctcttggtatgcaaagttatagcacccgaagttcttgtgcagaccatcggctcttgccttcgtccgataatgaagcccgtgcactcgacagaacccttcggcattggtactctttccttggcttcgaagagcccaaatatacacactgagcctaataatggcattgggggtcagctggtgtaggtagatttcgaacttcttcaaaacctcactgatcatctcataaagagggaaccaaagtccaaccctgaagaagcttttgaagactacaacttcatcctctttcagctcgggaatcgtctcctctccagcaaaacgaaccagttcatcatcattttcctcaaagtatcctagtttcttcattaaaactagatccttttcctttactgtggattttccgaactcgacatggctgggtttgctcgggcttaggatactgtcatcatcctcactttcattttcacttttagattcggcaacggtctgttgagcttcggcatcagcaacaccttcgccaatagttt

SEQ ID NO: 113768 - DNA, 462 bp, Zea Mays
gctgaattctcatataataatagttaccagaccagtctgaagatgtcatcgttcgaggctatatatgacaggaaatgcaggactcctctatttttggactagactagaggaagacagttctttggacctaaacttattcaagaggcagaagaacaagtacgtataattcgggagaatttgagggtagctcagaccaggcagaagagctacgctggtaatagaagaaaaccacgggagttaaggaaggtggtcatgtgtaccccaaggtgtccccacttcgtggaatgaggagatttaaagtcacgggtagattgtcccctcactttattggaccattctgagtttttaggcaagttggagagatggcctatcaactcgagttacctgctagtctatcggatgtgcataatgtaatttacgtgtctcaacttaagaagtgtctctgtgtccctgaggaacggt

SEQ ID NO: 113769 - DNA, 344 bp, Zea Mays
gttacactagatcagccaacattctgggaaataagctatatggtcagagtaagaggttcaagagttgatagttcaacaactttaactgagagcaaatctacaagaaaaaggaaacaagcaacctggaacctacaactgcaggagcttgcttgaaagtgaacaatcaaggttgtgtgtatatattatgcccgacatttttgaaggatattgcgagggccattgtatctgctggaaaaatcatttcaacttgtcgaacatggtattaggatacgaattggagtggtcaacagaaattctggacagatatgtcaaatttcagaatccacgatggtcctccaagaaat

SEQ ID NO: 113770 - DNA, 588 bp, Zea Mays
ggtgtggctgagagaccacaaagttcgcctagcagcatcgctgaccgaagcattgtaggtgaatagcggcgtcagagactcatgtgctgacagattcctgaaccctctatcacctgcatcaattaccctgacatgaatgcgagtgatgtagtagcaagcccgaggaggctcgtacactcgccttgtctcgtacaggggtcggaggtaggttcccaacgtgtgcaaaacatcctacaacaggttagggaagttccatgtctcgaacattgaggtgtaatgttcagtgacaggccataaccccacatagtggtcctgctgttcttcattggcttcatcgttgaggttttccccatcttcttcttcttcctcgtcgtcttcatcatcatcaccagagtcgtctgggtcgtcgcctccgagagcaagggcttggactgctggtgctggcggtgctgaagctgacgatccagctacgaaggctagtgattctgccaacggggtgggcgtaggcagaaactcctccaagctgtcctccagaatgactccgttctccacccgaatgcgagggagatccacatgtatttcctcgac

SEQ ID NO: 113771 - DNA, 323 bp, Zea Mays
ctggggtgtcggttaaagtggccaatgggggtgttatgaagtgttctacaacatggcctcaagcggaatggtgcattcagggtttatggtttcaacatgaactgaaagtgttgcccattcacacttatgatctgatcttgggcatggattggttagagattcatagtcctatgaaggtgcactggcgttataagtggctttccattacttatcaggagtcttcagtcatgttgtatggatcgggttctagccactgggatgatttattgattcatgttgcttcggttgaccataatgaaagggaaactccagtttcagcattg

SEQ ID NO: 113772 - DNA, 728 bp, Zea Mays
gtcaagagcagtgctttctctagcctttttgaagtcttcagatttatctttgcaaatttttgtagcagaaggcgttgccactttcgaaggtttcaaaacagcctcaagcacattagccattcttcttacactcttaggtgtccccgttggaacggtgggaatttgcaatttcgctggcgccttcggcaactcttggactttcgcctgatctgccagttccaagcgaataggttccgaagcatccactgcagttgccagaggaacttcttcgatcttttggacaatacctgtttcaggtagttgaacagccctctcctagaagtacaattttgcacgatgggttaaaaccttcaccttcttctgcttcggtgcgaaagaagaagcttctgacacacttttcctttttagctcccttttccgagcagggaagcggtaatcgggataaacaaatctgattgcatcaaagaccctatttagtcttcgcttccctcgagtaccgaagacagtatacatagcttcatcctcagccttcgtatagccccctagcaattcatcactcgttgctttgatgacatctaaccaaccatcatctggttcaccaaattgattcctgaatcggtaggtgtacttcaagcgaaccatactgccctttccgacttctatatcatcttcaacacccttcggcatttcccattctacagccaggggccataccttgatggctatgt

SEQ ID NO: 113773 - DNA, 937 bp, Zea Mays
ctcaagaggaaattccaagttctccgagctcagcagcaagatcgtcaccagagagctcgaccctttgggctccccccaggggaccaagcttcaatagaccatctggacccactccatcgcgctacagtcagcagagtcagagctcccttcaggccccctccgttgcaagcaaccaaccaccagcaaatgtctgttggcactgcggagaccccagtcacttcaagaataactgcccccagttaaaggcacccggacctacctactccaactcggtgaatggccccaagattcccttggcacctacctccaaggcacctccttccaacagtcagcagagcaggactcagtatcagggcagagcacgagtcaaccacgtcgacgctcaagaagcccagcaagctccgagagtagtgctcggtgagttccttgttgaatttactcccgctactgtgtttttttattcaggagcaccccattcatttaaagccactaagtttgtggaaaagcatggcatcccctctacacccctagctatccctttggtcacccgaaccccgggatcagacctcctatgccaactcaggtgctcccaagtcagaattctcttaagtggggtagtgttcctggcagacttaaccgtcttgccatcccaagggattgatgtgatcctaggaatggattggctaactaagcacaagggtatcataagctgcgcaagtaagaccgtccttctcaccgacaaccaaggaaaagcagtttcctgtcaagcccaaccgcccgccaatgacccaatgatgtttaatctggcagcagaaaacatgtccgtaatagaggagttcgtggatgtattcccggaagagttgccgggaatgccaccagaaaaagaggagtggagttctatatagatctcattcctggcactgtgcccatcgcaaag

SEQ ID NO: 113774 - DNA, 383 bp, Zea Mays
aaacttctagagtggatgctaaagctactagctgcataacaaccctgttcctcgaaccatttcgtaactggaaagagggaatttcaacagcaatttaagatgaagcaacttggacagatcaatatccccacgccctagccagttggggagcaccgccacagcaccaactgccgccgcccagagctatcctctctccctcccatcccctgcactgggattaaaagaacagttgaagctgcgggagagaaacagaactttagccgaagctagcagtaagaggctagcgagccgaagctagcaagaagatagtgggctatggatgagaacggctgggtgtcttgtttatttgagatttgtgagggatcaaacacgtgtcatcaatc

SEQ ID NO: 113775 - DNA, 582 bp, Zea Mays
tgctgagcgcgcaacgcgccactatcaggatggtggttctcccgctcctgtcaggattcaacacccttaccgctcgccgccccgtggtcgatttgattacggcaccccctgactgcaggacccagatagatttggagccatagatcgacagagtcggagtctataataatgcttaattcagtgtctcagtcttagttagagttagcttgcttatcatatgttttgatgcttgtcatgatgaactcgtaatgaagttagatctttgtaatgattgccactaaggtgtgggcatcccctgcaacttggtgtagttattaataaagttagttatttagttgggcaatccctttatttccactttcctctttatctgagaagctgtgtttgagagtcagtgaagatgaccaattgttcagtgctatgaagatttccatatatcttttcttatgctgaaagactgtagagtcagatctgatgtgtgtgtgctttctacagatgtttgagaacaggtgcagaggtggaaggcgtgttcaacaggagcagcaggcaccccaggaggaggtagctcagcagcagttgcca

SEQ ID NO: 113776 - DNA, 509 bp, Zea Mays
ctgggataagagtttggcttatgcagaattctcatacaacaatagttaccaggcaagtctaataatggcaccggttgaagcactttatggatgaaagtgtagaacaccgctttattggaatcagaccagataaagtcaagtatttggtctagaaattctccaagaagcagaaaagcaagtatagattatcagagagaatttgaaaacagcacagtcgagacagaaaagctatgttgacaatagaagaagagagttgatctttgaagtaggagacttcatataccttaaagtttcaccaatgagaggaatgaaaagatttaaggttaagggtaaactatctcctcgctacattggcccgttcaaaattttggaaagaaaaggtgaagtagcgtaccagttagagttgcccgatagtttgtcagacgtgcatgacgtatttcatgtgtcacaacttaagaaatgcttaagagtacctgaagaacaattacctatggaagaactcaatgtta

SEQ ID NO: 113777 - DNA, 448 bp, Zea Mays
aaacaggtctacaagtagccgaggacttaagggaggctagaacatcaagcagagaagcttgaactaacctgcagagagctggccacggtgaagcattcacggtggcgcgaaaaacagatttggggggaaaagaaaattgggatgctatggtggacaatcaggggcgagagctggtgcactgggtgcgtaataacctagcggacctagttgatcactcaatttatagaagccaacagtggtggcgtccaatttggagaaggtgtgctggcggccggagagagggggagtttacttacgcgaactatcgtggcggtcactggctgaggagctacgacagtcatatcttagttattgcggctagaaacgacgtggtggaagggtcatggcgtggtgcaatcactacgaccggcgtacatctcggcgatggccgctcggccacgtcgccggc

SEQ ID NO: 113778 - DNA, 590 bp, Zea Mays
gggggctctgggcctctggcctgcaactgcaggagcaggacggcgacgcacggcctggccgctagctgttcaggccaggcttcatcagatcagagaggacgaccaccggactgctgtttgtttgtgtttgattccctgtcccttctccggttctccctctctctctctgtctgtcactcagcaaacggccagcaggcatcttgcatgcgtgctcctcctagctcacatgagaataggacaaaaataagattagggttctttggctgctcaagttcgcagccgatgtgatcttgatatgcagggagtagtacacatctgtttcgcaacggggagttgctgttcctgttctgcggcagaacttgtgcctatttcttctcgactggactggacatcctagaacagaatggtcatgggccgggagagttgcgtgcaatgccacaccaagtccaagtgcctgttttcttgaacggagcgacgacggcgaaccttacctgatcatcagtggcaggcagcccatctcctctcgcaagtgttgtgactttgtgagagcgaaccctgcctagccttgcatgagctacagcagctacgac

SEQ ID NO: 113779 - DNA, 497 bp, Zea Mays
ctgctttatagcactagaagaccaaaactgaccaaaaaaatatgattaaggataaaaatgaggacaccagcaaaactgaggccaccagcttaatacaacctttagtttgcttgaatttcatacattttcgagtgtgtgtccaaaagtagagctagagaccgtaatcgagctgccaatgacttggcacagctagctagctaggccatatatatgagtgtacatgttgaaggggaagagatcatcatctcaacctccatccagagtcatgttggtgatggtttggtagcagctatagctgagcaatgcaaattataggttagtaaagaagaagaaaaacaatgagcaacgttcgtaactacttgaaggcagtgagattagatgccttcccttcttcccaaatcccaacagggagagatataagaaactcttacgaactggtcagccgcaataatagctaggtagtaggtgcatcttccagtcaggctagctgtttcttt

SEQ ID NO: 113780 - DNA, 413 bp, Zea Mays
aatcctaggctgacaacctggccgccgtgctcaacacagagctggaccacgcccttgacgagttgggcaaggttcgggcggaggttgcggaattgcgtggtaagtgcgcagcacgccactatctggatggtggttctcctgcccttgtcgagattcaacaaccttaccattcaccgccccgtggtcgcttggagtatggtacccctaactgcaggacccagatagatttggatccatagatcgatagagtcgaagtctgtaataatgattaattcagtaccttagtcttagtcagtcttagttagagttagtttgcttgtcatatgtcaggatgtctgttatgattaacacgtaatgaagttggatctttgtaatgattgtcatcaaggtgtgggtatcccctgcaacttggt

SEQ ID NO: 113781 - DNA, 428 bp, Zea Mays
cccggcacagcacgctacgtgacgagcctccctctcgtcactattcgcagctactgctgccctcccctgtgctacattctgtagctgctgcagagactactactatacacacccgctgtttgcatttcttaactgcattatatacaagcgtttactagcttcctaccaaaaacggctccatttcctaacagtgtgttaactgacacgcgctacacattatgcagctgcaatcccatgcatcgttttattgtgcgtacgtactcccgcaactcattttcctaaccgaagcgttacttttctgctaaaataagggtttcattttcctaaccgtatgttaacaagcaagcgacgactggtgtagttatgtgatcaaacttaggggttgttcggttattacgggatagagccctggaacgattactgtccga

SEQ ID NO: 113782 - DNA, 535 bp, Zea Mays
ctacaagatgatcaagctaggattgcggaacttgaagcgaaatttgccagaagaaaccctttcgaagctatcgacgatgccctattctttgtcttatccccactccgcaagaagttttgttatggatcccctggatctattatttgacttcttgattaggttgataggatagttttatgttattaagtttttcgactagattggtaaggacgatgttatattatattatagtggttttctaatccataatatcgctataaaacccttgacttcttatacttttgttttcttgccattgtcatccttggacaatatctaccttgatatattaaacttttgtctctctacttttctccttgataatgctttctccctattgaattcttatacttttgctttcgtgccattgtattgccgccattgcgcaatatctaccttgatatattaaaactttgcctcactacttctccttgataatgattacctattttgtctccttgataaatctttctccctaactcactttatatccttg

SEQ ID NO: 113783 - DNA, 501 bp, Zea Mays
gaaggggctcccaaacgactcgacgtcgccttcgtcttcccaaactacatttagcgtagctttcgcctgggatccccaaatcccgatcttctagggacgagggaggaggcccaggtcgtgttcctctcaggtgcaagatctctggcaatgaacgggtcggggggtccggttgagtttgaaaaggtctggcccctaaggtacgcacaccagataatagagatagcagttcactttccgaactgaatactttaaacttcagtcaggcatgcatgctttccgtacctcagagaattccaaactagttttgaacttggacactttagcatggaacgatcaaatagtcgtcagtccagtctcttgaaacgttgaaacgtttaaacgtggatacgttacaggaatcccatgcatgcatgcaagcttgcattgcatattccaggttgcgtcatcatcagatgaatatatccgtcaaaaacgttttcttcgtcggtccgcgcgcgcggc

SEQ ID NO: 113784 - DNA, 585 bp, Zea Mays
tgatgatggatcaacagacagagacgagcccataaggacgaacatgagaaagagcgtcgacgaggacgaggaggccaaaaccccgtcaagccaagacttagctaggactccacctctcagcttctaagctccacttccaccccgataagatatctaggagcctctcctccctctctcgactgcttgtaacccctactacaagtttgatcatcaatggtgccggtagtgcaagtcactgatgactagatgcagggacgttctactcaaactagtataaatctcgcaccctccaagcacaccctccggagccagaacacgcaaaataaatttacttgtcggagtgagatacaaaaataccgacacatggccattagagtgtgatgcatctatactttcttgtgacactgagctatgatcgatgttcaagttaagacatgatcttttgctctcgtcattagagtcattgtcaccttgcttcacgcatcacttggactgatggcgaagagtgtgtcatatgtgctctaaacttggtttttgggctcattacgaaagctctccttagccgcttcaatcaacatagaatca

SEQ ID NO: 113785 - DNA, 336 bp, Zea Mays
tctgcgcccccttaggaacgacttttgtagcttcggaacttactatgcgctcccttaggaacgacttctatagcttcggaacttactctgcgccccttaggaacgacttttgtagcttcggaacttactctgcgctcccttaggaacgacttttatagcttcggaacttactctgcgccccttaggaatgacttttgtagcttcggaacttactctgtgctcccttaggaatgacttttatagctttggaacttactctgcgccccttaggaacgacttttatagcttcagaatcttgttaagaggaagcattccactcgatgatatgaatacaat

SEQ ID NO: 113786 - DNA, 498 bp, Zea Mays
tggcaaatataacattcccgacctccagtagttggggaatgcctaagaaaaaggaaggggaaaaagtacgaacttgtttggctcccgtatcaattcaaatttgagaaacagttcaagaagccatgcaaagagtggctagaaatgatcaaaaccatgtgtaacaaaattcttgtcaactataccaagaagaaagaccaattaatgactgatgcctttggcacccggctgaaacgaaggctgaaccaggtaatggatgcattaaacttcaaataccaggattatgagaagcttgacaaaggggccgaaggggtgaaaagaaaaaggattgtcagtatcctaaataggcaagcttctcggttagtaaaagaagatggaattttttttgaagaaaacaaaaacagtactagaaccaaaggcaacaatttctaaaaagtgaaagattgacacagtgccctcttctgagccgaaggtaggtaagacaggagaagaagcttcttc

SEQ ID NO: 113787 - DNA, 1068 bp, Zea Mays
ggttgtaacatgttgcttaatggcgtggtcatatcaccactgttcctctgtctcgctcacatttgcacagaggtccctcgacttctgtttcttctctaactcgaccccttggccacgacgcgctcaccgccgaccatcctgttgcttggaccagccaagaacaacggcgactgcccaaattaactactgggcaagcatcactgaaccgaaataagtctagaacaagctctaattggattaatccggccctggatttgccttcccacgatgaccgcaatcaccgagaccaaatctaggcattcccgacgagtggatgccgtcaagctcagttagttgagtcaataagcatcacaagtatgcgagggtgctaaaacatgaacacagagggtgggtgcggacctgggagcagctagccgcgatgaggtgattcacggcgacgcagtcgaccaatttgggggaaaacccaaattcagcggctgtagtggctaatcgagggcagtgatggatgctttggcttggtgataacttagcgaagcagaccgtgtcgtcaatttataagggcgctaagcggtggtgtccaatttttaaagggggagaccggcggccgaggggagaggtgagtcaccggcgtgaactatcgtggcgtcacccggggtaatgtctccggcgacgaacagacctgctacggatatctactgcgacgtggtagttcttctaagcacgtggcatggctacgatcgacagcaaactccgacgaggacacctctgtccaatgcgcgacaagtgtcacaatgaatagtccggcgataagtctgtactcctttcctgagttgagatctttcattgtccacagttatctgcaagccacggtgcacgaatcgcgacgatcgacgtcaatcgcggtgaagggtcaccggcagcgagattcacggaatctatagatttttttgccactgtaccatcagaggcttcatcagttgggctaacagagcttgtttgtgcgaattctctctagattttgtgtggtgactagatcaatactctgcatcaacgttgtagcttatcaat

SEQ ID NO: 113788 - DNA, 715 bp, Zea Mays
ttacgaatgaaacgcttgtagctaatagcagccattagctaatagcagccattttttctcttcagccatttcacattctccctcacccgctctcttacatatagggcccacttgtaagtaacatttgttgcttcttcctcaaccgtctcctacaaacagaaacgggtgtgtgccgcctctgcttggtctacactgtcatctatcacctccccgtcccctcgcctccccagatcagtggagcacccgccgacgcctcctcttcctactcaaccattgttgcatgtctgtttctctcgccttcactcgaccacgccattaactgagccggtcatcacctactcgctcccctacagttgttcagctcccttgtaagcccaatttaaaacaccccacccagtctgagcctttctcctcctccacactttgctgttgtcgtgcccctgctcgcagtgccaccacctcgatagagttacctgcttgctagagctccttagtgccatgttgtccatgccatgctgcgtcgcttcctcaactctacatgccgagcgccctgctgctcagcttggtgccgccgtcgacgtgccgctctatgccaccactcaatgttgttgacattactgcacgttgaagcttaccgtcgtcgccgcacctcatcgtcagttgccgccacaattgattttttctccagcggaacccatgttgagctcgccagtga

SEQ ID NO: 113789 - DNA, 424 bp, Zea Mays
aaaatgtttcagttgacaaggtaagctgatgtttttttttgctcctttacattcaaaaagtaatcaaatgtttgtttcattatggcaagtaatcggtgatggttgaacaagaccattctaatttgaaagcatgcagctgattctattgattgcagttttatattgtgatgttgtgcgaggcatatgagtaccattttttcttcttaatatagcactagtgttctgataggcgcaggaaatcaacagctcgtgcagatgggtttcttcgagcaccctctcttgtcgacaaccttgttatatttcagaggttatttgtttgacatccatccatccatcttctctccaaatttaggtcggatgtacgagctctatcgacgttatagttgtgcctccgcgagtccgagctgacccagcagcgagtcag

SEQ ID NO: 113790 - DNA, 458 bp, Zea Mays
aaattcttctggcaaaacattgtttgccgcttcggagtaccgtccgaactcacagttgacaacagcaagtagtttgacagccaagacttcaaggatttctgcttctccattggcaccaagcttaccttcgcctcagtatatcacccgcagtccaacagagttgtggaacgcaccaatggaaaaattttcacagctgtcaagaagatgctcctcgacgaaaaaagggcaggtgggccaatttgttacctgaagcggtctgggcgctaaacacgactgaatgcagggcgactgggttcacccctttccgccttctatatggatcggaggccatgaccccacaagaaataaagcatgggtccccgcgaacagtttcgtcagctgtccccgacgtggacgaacccacttcgaaggatcttatcgatggagaccgcgtcttcgctctacaggctctaaataaa

SEQ ID NO: 113791 - DNA, 456 bp, Zea Mays
gagccggacttcgattccccctggacaaaatgttggtcaaagttctaaaaacttttgaaatttatcttcatcaacatacccccaaagctattgtcaaagtaggggttttttatgggccatgaggagccaagggttagagccagatgccaggtgtttctgcaatatgcacgagttaacatatcagatgaaggtgactgggaaagagcaatatcacaacaattttggctgctacagcttcgtgcatcgtgctgaggccagctatcatgtgctgacatttcagaaaaaatggccaggctcttggatgcaagagtggttttatgtgaaggttgatctgagtcagagggaggatatatgaggggttattcagcgaactatatggtctcgcttcggcattagaaggccacccactgcccttggaaatgatgtgcaggcgtgccaggcagccttcaatacagt

SEQ ID NO: 113792 - DNA, 476 bp, Zea Mays
gtttcaaccagggaagtgggcacacaaccatgcagcacgagggattgaaccctggttgagagctccgcccctttggtttctcaactactacgctatcagcgtgtctgctggttttttgtatgccttcagtccttcaccataatgcgtgaatcctagacatgtggacatagaacatgtgaagtgttagttcttaccatagtggtaggtggtgaatctttctgttctttttcctggatggacttgttggcctaatgacctgcaatgattctccacagtgcacatttgtaaatctaaagtttaagtaacacatacttttgtctttagttaagtttaggtaacacatactgttgtctgtagaacaagctaagtcttgcatatagaatatgtagatcattacaacccccttgattattcttcaagtacgaagaaaaaaggtttcttcatccttgtgacatgtattaccctttttattttcc

SEQ ID NO: 113793 - DNA, 1268 bp, Zea Mays
cctattgaatcagggtcgttggatgcgtagccaacggctgggatcggtggcggaataccgtttcgtggcattggatcgtgaccgtccgattggaaactggcggatggatccggccccgcgttgcatgttgtaacttaattgttttcagaaataaagtttgttcattgcatgttgtgtttcaggttataggtagggaacaagatccctgattgagccttcacatctagcatttcccatcgcttcagaatggcccaaacaacattagatcaggaagtcaattctctctaaactgtcacagaacaagaaatctctcgtacaaattaatgcctaaggaacaaaggaaataaattgagattgaggtggtgctgttcatcggcacttagtccacgaaaagtgggggagtgcgatcttcgtagctgcacgttctcggagcatagctgagcgagaagggtggtcggtgtgcgacgaattgtgggccggagttggagaccgccgctcgatccctaattgacgtggtcaggtcgcggtgagcacaggttctgtatggtgtatcacctttcgggcgaccccccgggaactgaaatctcggaccccagctggaaaacccacaccctgaacccgccaacatatatccgcatctgaaaagagtccaaaacaaagaacaatatctcacccactgaacggcccaaagcaagcaggcaggcctttgcgccagtaggataaataaataaataaagccaattaaagataaataatatacaacagttgaatcagagaaccgactagaacgacaaaatgaatgaagagggaggggggtaagccatggctgttaagccttccttcgctgagatttttctatccctccaactcagatgctgctctggtcatttgtcaaatttagatgggaaaggaggaataatcttgaccattgaagaaaaattggactaggatagcgccatcagtggttgaagctcagatatcagatgcatactaaggatgaagggatatacatttattcagcacaaccatcaccatcagtagattattcagcacaccaagaaaagcattggcttatggattatttagcattgcgatagatcgtgcagtaggcttagcaccacatcaatctacaaagatacttccggctacctggaaatgcgcgaaaatcaaataatcaggaaactctggagttgcatggcaccacgaaaatgtggattgacatttgataccgaactgcaataatcatcactgctgctggtgtgcgcaag

SEQ ID NO: 113794 - DNA, 529 bp, Zea Mays
tgtgacttcaggggcttgaacaacccaccgcaatccacgcgagtacaagctctagcgtctagtgtcaatgcgtgtgcggccatcagggccacgacaacacaacaaagccttcgtaataagcgcaacagacacaattatggctcggtaatcggggtacacgataagtccacgcaacgtgcgcaacaggcgcaattgtggctcgatgataacgacaaacgaacagtgcctacagggcatgcgaaaagtatgtgactcggcgatggaggtccaactgaacaggagtggtccgattaagtgagagcgcgacatagcaatcacatgacgcagccaagttcgtacgacacaaatactgcgtcgtgttgccagggcgcagccagtgctcagccaatgccataactcggtcgattaccaacgcagcctgatcggcgtgtccgagtacccactatacaatttaattgctcgacgtgagtccaaaagctcaacataatataaatatttagagcgatttaagtatgcacaataaagcctt

SEQ ID NO: 113795 - DNA, 396 bp, Zea Mays
gggccatagagtgcgaccctcataagatgacatcgaggctttcatcgctccattctggggtctttccgaggctgagagataaacccactttgagatgcaaaccagtactgacgaggctgagatgaatgctgttctcatcatggtggcaggggaatcgtctgactctactcgcactgagtcaacgactgctacgattgggcagaaccttggtgaagacaaagaaattcagaaacctaaaggtgctcgtcacaagcgatcattgcgggtgaactatccagctgggcccgatggggagaaaaagtggaagaaacgactctggcggttatcatgcttagagcaagatgctggcccctcaacattactcctcagtgatggctcggtgagcaccaccctcga

SEQ ID NO: 113796 - DNA, 317 bp, Zea Mays
ccgcatccacgtttacagggtctccccattatttccgaaaccgtcccgatattatggcgatgtcaatgtcaaactaatatccataatacactatttacgcacaatgacttaacgttttacgccaaacgatatatactatttatgcaacttttgtgccgtttcggttttatgccatatctttcaacatcttattctacgttatatttacctgccgccattacaccccatgcaagatccataaatttcgcgcccacgtaacatagtaagcacgtttgcatgtggaaactattccctataattccgcgcatttaccatat

SEQ ID NO: 113797 - DNA, 469 bp, Zea Mays
ataaattatgcatcttgttaccatatctttttcttaccaccttaggtccttagctttatgttgacacaaaaaatgtcacgtcaaagttggtgcccgtcataattcagagccggagaatgtgaaagatgagccaatgatattcagtttgctcttggagtgatcactgacaaggacaggcagaatgacctccactgcacacaaacatgatcatatcatccttgtacaataccttagcccctgcatgcatgaagccaatttgctacatgttcttgtgactgttaccagttctgtactgacatgtaaagatctatcaatcatcgttctccttggtttgtcatctctccctgataaagactgctcactagcatgtaatggtacacctgcagcagaccaacctggctgcagaggtcaggagatgtaacagtgtgggtttgcttgctgaatgatcaggcctatcgttttcagcgag

SEQ ID NO: 113798 - DNA, 309 bp, Zea Mays
atacaacatactggtcggctagcctcttactatcgaaatccgagacatacactcattacagcatttttgtaaacatacatattcacaagtattttcgcacaccgaccaactcatacgaatcgtaaaccactaatctctaactcgaaaccatcatgcgcttacttcccaaatcatgaacacataacgcgtattgacccgactcaagatatagaggaagcgatgactactttggcatgtcaccacctctctatataagccaaaacaatttctactatcgactaagagttctaagtattaaacacattatta

SEQ ID NO: 113799 - DNA, 545 bp, Zea Mays
atataatcaagatcttcggagagtgcttcaggggtaagggattcggcctctttggccgcactcttctcaaaatctatattagtatctggagttattcctttagccttctactcggtggtggcaagctttgcctcagtaggcactgtgggttctgcctcagtttcagcctgagtcattgtagtctcgacttctatttgcttagtatcagctttgggttccgttttatcagcttcggcaaccttccctataggagcgggacttatggagtcggttgtttctaaaatatccaatacatttaccatccttcttctcttaggggttatggcagagctcttttctaccttcagcgctgttgcttctgctgaaggacttaaaatccctggcatctttgttacttcttcagtctttgacttttcagccttatctttgtcaaccttcatttcaactagctcaactgaaggtgccttcggcattgtagccgactcttcagccttctgcgcaggaggagcaggttctcttgatttagcagctaaagaagcctcccc

SEQ ID NO: 113800 - DNA, 407 bp, Zea Mays
aggaattgagtaatttgatcttatataatttttggtctatcatttggttatgaattattcttctatttcagcttccttgtgtatcctatctacatggacaataaacaatatttgtaccttaattactggttgtggaggcagaaggcacttgttctcataattatgttggtcgtgtggaggactagaggtggtaggaagtgtcgacacaggggtgtcaagtatggccccctactttctagggatgtatggatgaacaatgaactaataggtttgagacctcagatagggcgtgcattagtcagttgaggatgtgtcgagctttgttctacaatctatgtgctcgccttagggaaagagggcttctaggggacacctttcttgtttccatagaggagaaaattggaatg

SEQ ID NO: 113801 - DNA, 654 bp, Zea Mays
ggaatttggctattgctgctatggcaaaattgtagctggtttgtagctctccaattttgctgcagagcctcggattagttcccatatgagtttgagagaaaatcgagctcaaagattgactgtcatgttcatctgaatgaaatttgccatggtatagtgacctgatgaggatcagaccgccagcgcagaatgttcaccgccggtgaccacttcgccgggattcgtgccacgggcgtatggatttcgttcaccgggtaaagatctcatcgcggatgtgtatgagctactttggcctcgctgtcccctgccccttttcaccggcgacgtggcctcatggccgtcaccggagttgccgtgctttactgcggttgtgccacgctccaagccatccaccacgtcgtccctagccgcaccagctcaccggtaaccgccgtagctcctcaactggtgatcaccgaaggaagcgccacggtgaaagccacccatccccggctccagtatacctgtttccctccggccgccagcataaccttgcaaaattggacatcaccgtcgatgggatctataaattgagccccccctcggcttcgccatgtattccagcagctactgcacccacctgcatcccaaaccccccaccagagagcactaatt

SEQ ID NO: 113802 - DNA, 477 bp, Zea Mays
cgcacacgctaagctttgggctaggcccgagcaaaaaggtggggcgacggagagggtgtcatggcggtttttgacagcgcacgggtgcgttccggtgatgggcttcggccaaactccaaattgccgcatccaggagcaataagagatcaaagactaactaaaacagggagtaatttggtaattactgcccagaggagcgctggccacggatgtttcttctcggcggagctaagaacagaagagagagggaattggggctacgtgggttttccggtgagctcgagtcaagtgcttagtcgctgatgtgcgaaatgtggtgacgaaacagcgcccgcactcaatttataggccgtcggccgtagtcggatgaggatcggggatctctggatcgcgctggcaagcataccgcgcggcggattccggtgacagcgcggtgatcaccgtttaaccggagcctgccaccttagtgactcgctg

SEQ ID NO: 113803 - DNA, 326 bp, Zea Mays
attacatccaatgggtcatatggactgggctatagatatatgctcatagacacaatatagtctaatagagtctaacatctccgcggtcgaaactctagctaagatagatattgaaactagatcgaaactccaaaataccaaagaaggcagcctcttggtgaagatattggtgaaccgttaggtcatcaaacaagaaaaattcgaacatctttgatggagattgttggaacttgctaacacgtgaacatattagctcaaacagtggcagaacagaaaacaactttatgccggttaacacaatgtattagggcaattgtgtttttttc

SEQ ID NO: 113804 - DNA, 457 bp, Zea Mays
aattgattgacctatcggttggtcgatatctacctgctccctagagaagctgtcgatactgactgtttgttgttgtatgtcatctcttaattggttcgcaccattttgattgtttgaagttcaaaaaatcaaaaaaaaacttggatctatcctataaataaaggtcccatccctcactctctaatttacttttattccttcgtgcagtagcctctcactctctattttaatatggatcttatgtggagtccaaattttggaatcttcactgacttgctcaacgagcaatctccaaaatgtattgtgacccatgtcgatgtgggatatgtcttctttgatggtctttctctcatacatcgtcatcgggagaatgtttctgcatgttcccattccctgaatctgcaaattatatttccatactcgtatcctcctcatttgtatccctaccaatcatctg

SEQ ID NO: 113805 - DNA, 297 bp, Zea Mays
ttaattataaacatgatcacgcactctattatgtcttgactagcaaaacgaaatgctctagctttacctttgcctcgagcccttgtagtttgcttttccttcttttcatttaagcacttgattgatacttgtagctatcaccatcatctccatggttgccatctaaaagtcgagagggtgaatagacgaaacttgaaatctctactactattaagaacctaagaggtagcatgcctcctcttggttctgtttctccctagttctgcccccatgtcatccattgtcttcacctgactc

SEQ ID NO: 113806 - DNA, 923 bp, Zea Mays
ggacaaggcaccataccgaatggatgaatccatatgagcggaagcacaacttgggcccatgatgacgggaggaaaccatgtcatgtccgtcgagccacggggctgaaccatgggacccgccgcgcattaccacaaggacgttagccatgaacccaccgcagagatgggagtaaatgggcggcaccatactagaagcactacttcgtacgaccaggagaagggggcccaccacaacagtcgaaggactctttctctctttactctctctctctctctaaaagggacaacaatgcaaagtctgtcccttaagatataaaagggaaggctttccttttacacacatacacacaagttgtaacacattccattgcaataatatgatcaacactacattggactagagcttcttcttggaccagtataaaccccatgtcccaagttcttcgttcaagtcctagcgattcaccatttggagtgagtccatgctagtatccccaccaaacacaaatcttattgtcccctggtttccgaaaccacaacagttatcgcgctaggtaggggatcgtgaaagttgcctagatggggggtgaataggcaaacagaaaattttccaacaaaaactagaaacgaactgggtaaaatcggttcaaccggtgtcaaaaccggttcaaccgatttgcacgagctcaactaaagaatgagatataaaactgaattgatctcgaaattcacctagttaactttgtaaatgggacgtcctagatgattcacatggttcaatgtagtagatctaagaagggtacttctcaaaatccatataccgaaaagatatgaacaattcttccacggaatggtgagggaatgaagaacatgaacaaacacaatgagtaagaacacaagagacacaagatttatcccgaggt

SEQ ID NO: 113807 - DNA, 540 bp, Zea Mays
gcttcattcagtagcctgtcaacaacttcgtcaacgattgtattggcgaccttcatcacatccaaagcctcttttatgacggggtcggcatcaggattgtatggctccggaggtggtgaaaggccggctgtagaaaagtatgataatttgagttcgaagccaaaaacgaataataaagtaaaagggcatgaaatagaagtacctataatcaatgcacgtttggcggcttcttcagcttcctttgcctctactcgggcatcatgggattctttttcatttttctttattgcttcgtcggctatctcgcggccgcccttcatccaaacatcggaataaaatttcccacccatcagggtagcttcggctgaaggctcctttgtatcgtctatggagaagatgacttatgcctgggctgcagctttaacatgttcacaaccagttttctccaaaactgctgcaacccctcgggcaccggtgaaggcacaaaaatccccacggtcactaagtatttcttcaaaagctttaacttctttgtcgatc

SEQ ID NO: 113808 - DNA, 688 bp, Zea Mays
tcactcatccgaagcagacgacgcatctcctccttgaatgcatcgacatccactagccttgctccaatgatgattaggtcgtcgacatagacccagaccagcacacgcaatgttgtggcgcccttagtgtacatcccatgctcgctaaagcacttgatgaagccgagtttgcgtaggttgttgtccagctttgcgtttcacgcccgtggtgcttagggaagtttgtacaacgccttatttagccatagaaccttcgctttgtgcctagtagtgacaaagtcgggcgtccgccagacgtacacctcctccttgagctcgccattcaagaacgttgtcttggcatacatgtgtgcacaagccaacccattgccacaacatcaagcagtatccacacatattacatctgtgcgaccagatcaaacacctcatcatagtctatccccggacctcggttgtaccccttggcgagaatctaggccttgtgcctgacgacgatgccctgctcattgcgctccagtttgtacacccacttcagaccaattgggcgatggcctagatgaaggtcgacaagagcccatgtctcgttctcctcaatggatgtcatctcctctatcgtcgccttgcaccagtgggaatcgtctcgagcctccttgaacgtagtcgattcataatcaccgatgataatgag

SEQ ID NO: 113809 - DNA, 492 bp, Zea Mays
gcgccgagtgcttgaataccttgtggagctgagggtacgttcaatttataggaccccctagcggtggcccatgaatttgagatgtcgcggtggcggtcgaagagaaggggggcattggcgcaagcaattggtggctttcaccgtggcgaactcaccggcgatcactagatatgcgtaacccgagctatggcgacgtggtaagacaccgaagcacgtggcacatgatctttgagcggctaacgtcggcgatgatgattccgaccagtcgcggttcaagtgggtacggcggcacgacggtgagcaagtccgagctaatccgagcgccaatatttttacccttcttcgttatccatctgtgctgggcatgaatcaccacggtgggcgcgaatccgagcacacggtcaccggcggtgaggcatctgaacctagcattctgatccggacactgtaccatcacactgcctattcagtcagcctaccagagcaacttgc

SEQ ID NO: 113810 - DNA, 299 bp, Zea Mays
aacatcactactcatttgatgtcacaagaattgtgttgggaaatggaacaactcaaccttggattactcaataatgtagaagcaacagttatggaagttgaatctactttggaagaagagattcgtaaaggacaagagtctgatgagaaaattaaggaaattaaagctttgattggtttgggtaaagccccagatttcacggaagatgaacaaggcacagtatggtttaagaagagaatcagtgtacccgaaatcgagcacttgcgccaacttattttgagagaagctcatgattcaac

SEQ ID NO: 113811 - DNA, 460 bp, Zea Mays
atttcaatggatcgggtagaagaatgtaacactctgggccaaccagagtcaaattttgatgactggagggagccgatcatcagatatataaagaatgaggaggaaccagatgacaaaaatacagctgagcgcattgcaaggcagtcggctcactatacactcgttggtgaaacgctatacagaaggggtgcatcaggagtcctcatgaaatgtattatctcagctactggaaaacaacttctggatgaggtccatgttgggcaatgtggagtacacgcagcatccaggaccctggttgggaaggtcttcaggttgggcttctactggccaacaacaaagagtgatgcagccgagttagtccagaggtgcgaatcctgccagtacttatcaaaacagcagcatctaccagcacagcaactgcaaaccatacctgtaacttggtcgttcacgtgctggggat

SEQ ID NO: 113812 - DNA, 667 bp, Zea Mays
cgggaatggtgtccaccaggccatcactaaggaacaacgcagaaggaccagcatcttgattcaggcacgacagtcaccgaagtcgcttcttcttcttctcctcctcgacaggtgcagctgggcggttcactcggtgtgaacgcttctggcggacaccttcgggtttctagatttccacatcctcgccaaactcttgtcctgtcgtaatggccatcggctcgctacgggtagagtcagacgattccccagccagtaggataagcatgacgtccatctcagcatcaccgatgctagttggcatctcgaaatgagtttgcctctcagcctcgggaagattccgaagtgaggcaatcaaagcttcaatatcctcaggggagggccacactctatggcttgggctaccatcacgagcaggaggattggagacaaattcagaaaagggcctatttggaggcaggttccacacagagtaagctaagggagcaccaacatttgagaccctacccctcagtaccatatccagtcgactcatcaagtcctcattgggaatctgtctgtttgtgactcgggtggaatcattgatgccggtatacaagtaagcagggtaaactctatccttcaaaggttgaatattcttgaagacaaagtcagcaaccacggcttcagc

SEQ ID NO: 113813 - DNA, 330 bp, Zea Mays
cagaacggggcacatccttagatctcgccttctcctcaacatcaagagtagcaattagactttcaacagtcattgcctccttcttgtgtttcagaaggtaatttggcaatgatgccaccaaccaagaacttgttaggcaagacacagtcaaagtgtgcaagttcccccaccagaagctagctttcatgagcctgttccacgacagaacggtcatcgaccatcctgtattcatggtactgctcattaacataaagttcacgtccagcatctggttcagtatacatccggtctggggtctcctataaatcacgagccacttcgtggtgcatg

SEQ ID NO: 113814 - DNA, 821 bp, Zea Mays
tccgcctcgctcgaagatgtctttagccttgggaggaaattttgcctcgcgcgagctcggtctcggtcaactgccctggcagtagtgacgccaccaactccccacaaatcccacaggaggccactccagctactgttctaaccctccctacacgattgtgtgcccaggcgcaggcctgaccatggctttgggagaaatctccgcttcgactgagcatggcctcgacctaaataactttgacaaaaggaccccgacaccaccaactcttccacaaagacagctgacaatgagatggctacaaaaacggcagggctagtgtcaagtctactttacgccatacaggacgaattaccatgcactttttttaccatacttatcactatttcaacaattacgactcgaacaacacatccacaagattggctcgggtacacgttcgagcccctgaccatggcctcggctctttgcttggtcaagatatgagatacaggggctggacatccttcccctgatcaaagacaaccgcaaggaggagtccagggctcacctcctcaaggctataaaaggagtccagggccatactgctacaggggctcgggctcacctcctctccacattacgacaaccctggtattcctggattccctccttgaggctataaaaggaggagtccagggcttccaggggaagggggacaacacacttcactgattgctctccacgaccgatattgacacttgcctcaatcatccgcagagacttaggattcactccatctctcgaccagcttgtaccccctactacaagcacttaggtgcaag

SEQ ID NO: 113815 - DNA, 547 bp, Zea Mays
gtcgacaagcaacgctatgcagaagagtatgcagcctaccgtggtgcagccgctcaacagtgattactaagcaatactcaacaagttacatgttagagtgctccaaagttggctacagaacactgaaagaaagttttagtttgctgcataagcgccattgagcagtacctaggcaaaaagaatgtaggtagtgactaagaaatcatgcaaatttcatctagaaaccatggtttggtgagaccccacacagatgtcgcgctctctgtgcatggctgttgcaaatgatcacgtttacttatgaaaccgagcagtccatgaaaaataaaaaaagataaatacaccatttatacaggtggccacgtactacgacaagcctcttaggcgaccgatgaccaggagcaaagggttgcagctagtatcgagatcagactccgtgtggcctccctcctggaactattccattcatgtacatacgatcatcatacaaacaaagaagattttgttcatctcttattcaatctgactgttccaacacaattaggcaaaa

SEQ ID NO: 113816 - DNA, 299 bp, Zea Mays
gctttggaagcattggaatgtccttgtttttcaaggagctaggccttatgttcaaagtgtagtgtttacaatggttgctgaagggcatatatggtgtttcgctagggtttgggccctccaggacctggtcctaaaagctggagcactttgagtccaatctgggtccaatttctatatattaaagttgtgcgcaaagttggcaccatgtgcgtccacatcaactcttttttaacggtcgttagatcgtcatcgaatgacatcgagcggtcggtttttgacgtctcccggcaacgtaacga

SEQ ID NO: 113817 - DNA, 300 bp, Zea Mays
aaggtgaaggcacatctggtcagaaaatccgcacaacgacagagagggaagatatccatctaccacaacatttaaggctccatgatgtacattacttaacactagttcgttgggcccatctgtcggggctcagcacctatgtatgtgcccccttggactataaaagggagggcacatgggatgcaaaagggacatttggactcttacgcagacttctccatactcaagcaatacaactcgcaatggagtagggtattacgctctggcagctcaaaccactctaaaacccttatgttcttg

SEQ ID NO: 113818 - DNA, 323 bp, Zea Mays
ctccaacacaccatgttcaggcgtgtgcttggagagcagcagggttatgctgccgaaatttcgcggcaatcgtaggctacacgtcacaaatcacaagcatcggtctacactcttgggtgggtttagggcctttacctaatagggagttcacctaagccacagacgatcgttgatgttctttgtctttcgtttagcctttaaaatgaacggtgatcggagggtgatgtatgacttgtggagaaaggatggggcacattcgaatgaatggatggttgtaacaaaggcttttcttgggcacgctttcaaagatgcaactggtcgtc

SEQ ID NO: 113819 - DNA, 547 bp, Zea Mays
tatttgagcagatcagtagtacaaaggtctatacagatgatatgtttaaactgtatgaaacatgtattttcaaactttacatagtcacgatcagcaccaaagatctgaggctcctgtttgtgtaatggcagcatgattcagtttacgatttagttactggattgttgacagcacttgtctctgctgccttcctgcagccaaaaccatgtgagtattgtttctctatttttgaagatctgaaacatctgaataatgcactctccttaggattgagcaacaaacttacaacaagaaatgttgaccatgtaaacaactgtattgaactaaaaaattacagacatgttgagaaagggaaaaataacaatactgttttactaatgatttattcatcaaatagtattgtctgcctaaactaatgttgctcatttcggtgcccgcgccactcccatcggtgttgaactagatcttgctgaagttgacgatgcatgtgagaatcttgaatttcttgacgtccaacaaatggcgaaaaattacaagtccctacacg

SEQ ID NO: 113820 - DNA, 516 bp, Zea Mays
gacagagtgaagaaagacgaggcaaaatttaatgctcaatccgaagcccgtaaagccgaagttgagaaccttcagaaaaacttgccgaagctaacgaaaattttgcagttgcaaaagtaaagcaagaaataagtgaatggtcgaatgctaggctggaaaagaatgttgaggagcttcgtcaatccaaggagagattctttgagaaatccttgaactccgtaagaaaactgaaaaccaggtttgccaaggtgggtgtgtattcttcagaagaaatgttcattcgaggtgaccccgagggagtcattgattggataagtgaagaagccaaagcctttgaagagatcgttagtgatcgaggggatatttgtgccttcgctggcgctcgaggggttgcagcaattctggagaaggctggttgtgaccatgttaaagctgcagcctagaccgaagccatcttctctacagacgacacgaaggacccctcggccgaagccactttggtgggcgggaaatttt

SEQ ID NO: 113821 - DNA, 566 bp, Zea Mays
agttgcaccaatgttgagaagattagttcgaaacaatatgcaaagactacataattgtaacttcttcagcacccctaccctttatcatgtaatttcaccaaaatatgtaattgaaatagctgcattttttggcggttggggtgttaaatagatacagatggaatgagctgggctgggttacttgcccccaaaaaatggcacctgcagggcgagggggatgggtgattgaacgaatacaaatggggcggtcggcttggacaaaaagaaacgaaggggagtggtgggagacctaaatgtcggagtacattgccgttacctcttgtcgctttgcctccaatgcagccaacccgccactctttgcccctctccctctgtgcacgtggacgggtggagcagaggcatcgaggaggtcaggagtgctcgttggcggcatgcagatgatggcttggcagtgacatgccgacgtgagaggctgatatggcttacacactccgacaaagtcctcactaattgcagcatgcgagtgatagggggctgggggttgtaattgtaaaggcgtggaacgg

SEQ ID NO: 113822 - DNA, 984 bp, Zea Mays
cttgagagtgctggcgcccttctggctgctggctgtaatacccaaaatactaactttaagaatatggggaattctcctatgttttagacaaacctattatctaacaatagattagaaacaagattcccttttagaaaaaaaaacaactctttggttgaagttcatatttaataaaaaatataataataacatttaaagttatgtttcacatgaatagaaaacattagatttttaaatatgatatgattggatttttaactatttggatgtgtgaatcattctcttactctttataattatgagcacttgtttatgtaagtaaagaaataaataataaagaataaaacttaaattttgcatccatgctggattgtgtattgtgcattttaaataaatttgaagaattcaaattcgaaatggtaatttcaaatgaatttggaaaatagaaagcagaaaaaaagaaagaaaacaaatctgtgttgggcccaatcctcgcgccggcccatttacttctcatctgcgcaagcccactccctccccttttcttttctttcgcgctagctgacaggtgggaccccagcttagtctcttcaacgcgacgcgaactcatctctggtcgcctgaaccgtggggtcagctggtcagggtgttcttcctcctctgtgacgaattccgccccgctccaccattgccatcgccgtgtggacccatgccgcatgcacctctgctcaatccaccgcaccctcaccaaccactgttgggtgggaccagagcgtcagctctttcccctccactgaaaccaaacaaagccgaagcagccaccaaaacggaatccgcagaatcaccggtaaatcgagcaggatccggaaatgatttgggggaaatcggccgggcggatttctcgtgcaaatccaaacaacttgcgcctggattctctctgtcgcggtctataattgcgagccctcgcaacctcctccctcctcg

SEQ ID NO: 113823 - DNA, 460 bp, Zea Mays
cttttatagtgttgcaaacctacccctcttaaaagaatctcgtcctcgagattaagaaacttccgagaataactgggggaattctgctctgagttcatcttctctttcccaagtggcctcatcttccgaatgatgactccactgaaccttgcacatgttaatgactttacttcatgtaattctgcgagatgtttctagaattctgacacggtactccgaataaatcaaatcctcattgacattcagttcctccattggtaactgttcctccggtactcttaagcacttcttgagttgtgatacgtgaaatacgtcatgcacatccgagaaactatcgggtagctctaactggtaggctacttcaccttttctttccaaaatcttgaatgggccaatatagcaaggggatagttttcctttaaccttaaatcttttcattcctctcatcggtgaaacttta

SEQ ID NO: 113824 - DNA, 271 bp, Zea Mays
ggtttgcgacatctcgggtggccaacttctctagcatatttttatcaaacaccccctatctgaaggcaacaatggcaaaagtaggggtaatgcatgggatgttgttgcgtatttggctaaattgctagatgaaggtgctctatgagttgttaggatactgttggatggtgcagaggtcatccttgacgccaggtcgatggtaggaaccatcaaagttggaaataaattgccgacagagaccttcccacaaactgatggagttcaagggaag

SEQ ID NO: 113825 - DNA, 1099 bp, Zea Mays
tagatgccccctgaccataaccttcttgtattttgggattctttactcttccatcattaaatagctaccatttgaccatctctgttttcttagtattgacatgatcatatccctagattcctcaatattcttgtctcaaatacttacctctgaaaactctgttgcctatttaaacattccagtttatatgttcacatccttcttgtcttttgagacctcttcctattctgttgttaagtcattctatttcagcaatttctattcctttggtcttagaatgctcgtatccttggagtcttgtatactcctacatccttatatatacttatattcataccctaatgtctatttaagacatttcagttaacatgcccttgaccgcccttgtttcttaacgatccatgagcaatcattttatgttgcacatccttggtgatctcgttgcttccttataacttccctcgataaggaatcttttctttaacccttctgttggaaccttacctatcttacccttgattgttttctccacttttgcgagtcttgccttaactctatcctttgttttgctttttattattatcatatgtacccttaatacctctatatcctacattgatgtttgtctcatacttgccctttaaaatcgcctctcttctatctcattctgagagttgtactttacctatctttcccttggtcgtatcctattctttggcttgtgaatttgtaacttcgtcctttgttgtgcttttgtttgttattgcctttacctttcttatctctcgatcttaccttggtgattaccctatgcccgttatctaaaatctccgatctcccatctcagttcaagagtggtgtattacttatctcactcatggttatatcatattctttaccacttgcaagacttatcttaactctattcttggttgtacttagatccttggttcttatgcacattaacctcttcccttacatccttgtatgttatcacctttaacccttgacatatctcgttatttaccatgacacttacccacattttaaagcctcacctcctccatttcagttcaagagtgttgttttattatctcgc

SEQ ID NO: 113826 - DNA, 611 bp, Zea Mays
acaagtatggcactatattacatttgtcataaaataagaaatcatctactccccactagatgaatcattgtctgtgacaccaccgcgatgtttttttgaagtgcatgtctcattccaatttggagcattagatgaacccttgttcctagaacctatgggccgccctctctttcgaccagtaaggctggccaaccgaagcctattctcctccacagatatacaagtgcgactattgtgaccatcagcaatgccacacctttgacactttctgttcattttattgtctccttttgcccccaacttaataactcttttttcgttatcattgattgttctgccctttggcttcgcgctatctggtcttctcaagcttactccactcacattaaaatctagcttctacaattaagaaaacaatatgatatcatttaaatattagtatataaatccacttatttgtacgtaattttaaataatacccatgcacatgtgtttgtaataattccattacctttttaatcatcatatctgttgcacactcatctctcagtggtatgccagtgtccaattgtccagcatcgtgctgcatacatataccattgatgttaaat

SEQ ID NO: 113827 - DNA, 428 bp, Zea Mays
cgactgccgacacaagtttgctgctgaaggccccgacaccacctgctgaaggaaggctagtccatatgggggagaacttaaacagactactgcagcgatgaccccctttggcagccatagaagccaaagacaaggttcctccaagtcggttctagcgaaggagaaagggaaagggcatactgaaattgaggaagataacaaatctatcgaagatgacacaccactcagcgaagggcccttcgaccaagtcctgtgtggctgaaggtaccgagttcaccacgctgtggggaaggtgatgggggcgaagcaactggtcgaggttgttgccttcgccaaacaattggggtaagcttcggggtccatgatttttggggcgggcatgatgattatctatactgctgcccggacaacatggaaacagatgtgtg

SEQ ID NO: 113828 - DNA, 409 bp, Zea Mays
tatcgcctaagacactgccctggtaaaagccacgatagcgctcgtgccagtgacttcccctctctccggccgccagcacacttccttcaaattggacgccaccgccgtaggactctataaattgctgcccccatgagctccgctaggtaattatgcatccaaagcaccagctcttgcctccgatcgtccaccagagtctcccaatttcccatttcccccaaatcggtcagaacgccgccgcgagacatctcgccgtggccagatgtctacgggttagttcatgcccttccgtgtgatgttctagcttccctcatgtcccctgttgctcatagacccgttcgattggactagaccgccttgaatcgtctagaacacgttggtttgactccggttttcatcgccgttgtgg

SEQ ID NO: 113829 - DNA, 1030 bp, Zea Mays
cctccctcaccgtagtgctccgtgccctctgtactagtatcaccaatatccagcacaatgccttctgttaaagcagcgttgataacatcgtcaacattgctggcttgcatcaactcgctttcagcaggtagggcaatggcaatggaatctacttgatcaccagccacctcccctgtacaaggatccgtgtaaatggtcacttctttcacggccatccccactgttacatcaccttctatcttcctctcctccagcactgtatcatccagcaccgacgattctgaaacattagcgtcgtgcagtggtatctcttcttcggttttgtggccctccatttcatccccaatctctgttgaatgagaatcttggcctgattttcggacagaaattgtttcaccatttcccctctgaaccacaataccttcattgcccggcaccgggaagtcacttgattcagtgatgtcgacgctcagtgacagaatctccttggaagactccgcatctttgcacttgtcgtcctgtgttctatcctcactgtctgatacagataattcttggactgattccttggctgtaagaggagcttctaccgctctctgaaccatatcgtcttcaccacgcaacacaggcactgctgatccgaaaacatcggagcctctcggcggtgcctccatggtaatgtactcggtgtcctccatgattgtgccttccttattgtccaacactagtgactcgtggcccaatcctcgggaaagagactcaccttcagccatcttatcctccacgtctgtcgacgatgatgttatcggctcttcggagaatcgaggttgtcgtgacagcggcaacggcacaaagctctcgttttcctccatgatggcgtcgtcctccgtgtcgcgccagtggtcgagtgcagtggcctcggcgcccggcgcttcagatggatccaagaattcatcgtcttcgaggtcgcagccgcagtacggctgggtagtacgaggcgccggcaggagcgcgcccataagacggtcgg

SEQ ID NO: 113830 - DNA, 1151 bp, Zea Mays
ttcgttttgctacttgcgaacatgcatcctagttaagcaaaaatgttgtagaacagcaaagcatatgaaagaaataccggctgctgactggtttcttgaaatttcggttcagatacaggtgttgagtccacaactctatgatttttttcttttcttgttgagccagttaagttgaccagtggaatgtcatcccttcgttttgctacttgcgaacatgcatcctagttgttataagaaaaaatgttgtagaacagcaaagcatatgccagaaataccatgtttacctgaaacatcaatcaccagttattatttactgattcgtcgcaagccttgttcttacatatgcagtgaatgccctcaatgtgttctacacaaccatgaattcgccgccgcagctgacgaactgggtgtcccaaaatggggatccctgtgggcagtcgtggctgggggtcacctgctcgggttccagagtgacagcaatgtgagctagctgaaaccttcagacgggttggttgttttcgcgtaacggcgaccgatccttctcggctgattttccttttttcttgtcctgaataacgctcgacagaaagttatctgggatgaggcttaacggcaccttgggctacaacatgaaccagctcactgcactagttcagctgtaagtgagacctcacatgctcttaaatctcgatgctcggatgtttgcagacaacatgccattgttcggttttaatttaagtttggtgttctgcagggatatgagcaataataatcttggaggcagtgacattccttataatcttcctccgaatctccagagcttgtgagtcatgtagtcatgtttgtatgtgtacctaatcattcgtatttacgttttaaaaaatatttttgaggtcttacttacctggtatgcagaaatcttgcagtaaataacttcactgggactgtaccttactccatctcccagatggttgcacttagggatttgtaagttgcctatttgggattacctttctttgagcactttgacaagatttggacaaattatatctttcactctccttgctgtagaaatcttgatcataatcagctctcgaacatcaacgatatgtttagtcagctcacaaatttaacaacgttgtgagtgattt

SEQ ID NO: 113831 - DNA, 352 bp, Zea Mays
cttttaaaggaatctctcattgcatttccgtgtagttcgaagcctagatttactctagcagttggactgatttatagtggttcgactcgcctctatagcagttgaacgagcctgcaccatttgaactattgatttgacaatatctcaaagcttgtggtgataattttcaggtttagcctattcaccccccctctgggctattttaaggcgcaataagtcggacgagttaagttggacgagttaaaccggacgagttaagccggacgagctaaatcaaacagaaaacacgtttctatgcggaatcagccgagagagatcagtcgagacacaagaaattgaacagaacaaggaa

SEQ ID NO: 113832 - DNA, 455 bp, Zea Mays
cacaattggaacaccttgaggaagcatcgttaaagcatggagatcaaccccggtgcaaagctaggcaacggttagggcaaggcgaccccacgatgaatgttgaggtccacgacattccaaacgcggctcgaatgtcgaggaggcattgcaggcgagttgctccgtgtgtgcggatgctccgggtcaccgagtcaacttcttggcgcagctccgctccaccaactcatcctcctgccctactcagaaacaaaaggtaataggaaccttaacttcccagggggcagggaggaacaagaagtgtgacgggtggcgtactcacctcacgggcctccatgatggctaatcgcatttgaaggtctgcaatatgagcgtcggacgtccgcacagccaacatagatgcttccatccgaccctgtaactcagccattgccaacaacaggagagccgaggatccg

SEQ ID NO: 113833 - DNA, 576 bp, Zea Mays
gtcaaagttcagtctcattttttctaattgaggtttcattcctgcaataaaagggaaagctggtgtagaggaattttgtctattttatcaaacattcagaccatgaatctgagctgtagtttccttcaagcaacagttataaatgtattttatcatataaatgtattttgtctacttgcatatagaattcaaattgaaacagttatgatgttctcaagatcaaccttactgttctccacctgtcttaaattaccattcaacctctcgagttccagtgccagccctcacacttcattttgtgacttggaatgaagacttgtcatcataagaagagatgcttcaccttcaacccgtttttgagtttcacattgtaggctaatttggaggttatccttccattctttcgtatatatgagttcttactctatcatgtgaactttcctttcaacattctcttgttctattttcaaggtcatgagttcagattcatggtccgatattctcgctaaggattgctggttctcatgaagggtagcattttcaatgtttacaagtttgagttctttcagtgtgctt

SEQ ID NO: 113834 - DNA, 533 bp, Zea Mays
ctcttggggtgcctgctgttctggctgagcacgcctcgcacctctgcgcctattctcagacatctatagaaatcacacacatatatcaaatctgactctgcagtctttcagcataagaaaagatgtatagaaaacctcatagcactgaacaaatgatcatcttcactgacagcttctcagataaagaggaaagtggaaattaatggattacccaactaaataactgactttattaataactacaccaagttgcaggggatacccacaccttggtgacaatcattacaaagatccaacttcagtacatgtccatcataacaagcatccaacataagataagcaaactaactctaactaagactgactagactaagacactgaactaagcattattactgactctgactctgtcgatctagggatccaaatctatccgggtcctgcagtctggggtaccatagttgaagcgaccacaggccgatgaacggtaagggtgctgaatctcgacaggggcaggagaaccaccatctaga

SEQ ID NO: 113835 - DNA, 420 bp, Zea Mays
gtagccgtgtccctacctgctagtttcttttttctttttttaatctcctagccggagattacatcaccacaacgtcatggatgacttcatcaatgctgcaatggaccacaattccataatcttctaccagtccgaacgcgaggatgctggtccgttttgtcgcggccgggtccgctcggagttggctaatgatccctaggcttctgtgtagaagattaccgcgtgagccacgactggcgccatcgcaaaacctcccatcatctcacccatcgcaagccaacaaacaaagagagggttaccgcgtgagccacgactaaccgggagaaaagcacagagcgtcgccgctattcaagccacagtagctcgctgccagctaagcttacagccataatcgctgccagctaagcttacaaccataag

SEQ ID NO: 113836 - DNA, 539 bp, Zea Mays
tgtgtgagtacgacgaggtctaggatgaaatacgggtcgggctaggacccgagtggagtttccacgtcactacccatagcaccctagttcgtctttgtgtgggtcctatagcgacaatatgctcacgcttcccgtaggcattcatgccctctttgagagcaatggggtgtacgggcgagcagcaacaacaatgcctgagtgcaatacaagtggcctcgtggccccaacaagaaggatcttgttcaatggttgttgaagacgtggaggacaaggccgagacactaaccgagggtaggtggcccctggtgtgacgtgcacctgcgagagtaagtggcccttgaagtcgacgcacccctacgaggccaggaggccccaactaggagatatcccagaaggggaagaggtagcacgaacgaggccgattcaagtcgttctcgtaagagggtgacatagcttggggacccctcccccacaagcatcaaaggcaagatccagagatccttttctcgggtacctggcacctattcaagtaagtaggc

SEQ ID NO: 113837 - DNA, 819 bp, Zea Mays
ttcgcctgcatatgatgttgattgagctattaaaacataatatactcgttcaagtttcactaggtttggctgccattgtgcaaactctcggtattaacgacgtgctatgaggtgggtaggtgaacttgatgtgggattgctgcttcctgccttgttgcccactctgtaagactcggtaagaaaaagaaagaaaccaggcaacaaaagctagaaaaacattaataactacaaagacaccaaacaaacggccacagaagagatggcaaaggaaaacaacaactaatgggaaaattcacagcgaatctgctttgcccataggtaatgaacgaatgccatcgatggaacaccacttagatatggaaactgccagccgaccagctgggctggttctttctaacttcgcgtaatgtctttatgcttagtttatgtatgatgtcgaatctctagatgcccctagcggaatattggtacctttcaatcatcgtattatgcttgacttttgatcatttaggactaaattatgttggaacaagtaccacccacaccaatttatttgtgttaattcatcaatggctgacaactaccgtcaaaacatgaacatacccctgctgcaactaatgggagcattcacagctaatgtgctttggcccatagataatgaacaaataccaccaatggtacacagcttagatatggacaccaccagcctaagttgggctgattcttcctaacttcgataatgtatttatgcctactttatgtatgctgtcgaaagtctagatggccctagcggaatcttggttcctcccaatcagcata

SEQ ID NO: 113838 - DNA, 308 bp, Zea Mays
agaggagggaggtcagatgaggattagctcagatcagttacctttccatgtcagatgcctctcatctcgagtatgctccaccccaaccaaatttgacccctctgctccagtctcctctaccacttcaactaccgctacttcagtccctagtaccctcgctacaccaatagcctccaccatgcctgcttccactactcccactcccttggccactccaccagctccttcatcccgcttccgagagcgtgatgagactgaggttcagctagttgttgcagatccgagactatttgatcttcacaaagcca

SEQ ID NO: 113839 - DNA, 340 bp, Zea Mays
tcgagagatgtctaaagactattcgaaagaaatgtagaaataaatgcaaaattgaggcttccattgcagaggcatacattctagaggaggtctcaaacttcacaacaacttattatggtgacaaactgtcgagcgtgcataatccaccccctcgttacaatgatggcgacaatgaattgaaccttgcatatttcgaggccaactcggaagcgcaagtggctcgaccaccaagaccctgacacatgaagagtgtcggcatatcatgttatatgtattgaccaaccttgaagaggtgatgccatacatggaacaatttcttcatgaattctggcgttgatca

SEQ ID NO: 113840 - DNA, 272 bp, Zea Mays
tgaggctctaaggatgtaatacctcaaaagaagacattatgaagaccataagtgaagatcaacaattatcaagcaaagtccaagacatgaagaatgtgttcccactagcggactgtccggctgagagcaccggactgtccggtgcaccacgaaacaatatcccaatggctagttctaggtggcactgtggaggagagccatcggactgtctggtgcaaggctgcacacggcaacagtcacctgcaaccgttagatccaacggctagtggcgc

SEQ ID NO: 113841 - DNA, 363 bp, Zea Mays
ccagattactagcatgaagccaagccatgaactaagatgtagatgttccatggatggtgttgcttcctgttcctatacctgttgttgttgttgcttcttgttttccttttcctttaccaccaaattcttcttttagttctgcaatgagataaaacactgtctagttaatatgtgttgatatgcaatgaaccattgaataataatgaaaaaataaggaatgctagacctttttctagcatggttaattcttcaaggttttcttcaatatcaataggtattgaccacctcaaccaatcttgtgcacatactagagcttcaagcatgaatggagtaagggaactacggaagtcatctaaaatgccc

SEQ ID NO: 113842 - DNA, 323 bp, Zea Mays
ccgaaaattagaggacaaattcgaagggttggagttccatcacgtggaaagagaccgcaacgcagcagcagacgcattgtcgaagctgggatctagttgggctcaggtcccacccgggatcttcgtccaagaaatatcacacccaagtattctctcatatcagatagaagaatgcaacaccttgaaccaaccggagtcggaccccaatgactggagagagagcctattatcaggtacataaaaatgaagaagaaccggatgataaggcagcagcggaacgcattgcaaggcagtcagcccactacaccctcatagggggcggc

SEQ ID NO: 113843 - DNA, 392 bp, Zea Mays
gttgcattgatccgcagaaggttacttgaagctcagagtcggcagaagagttatgcagacaacaggcggagggaactcagatttgaggaaggagacttcgtctacctcaaggtttctccaatgcatggtgtcaggaggttccaagtaaaaggaaagctagccccgcgattcataggtccctatcccatcattggcagggtaggacccgcagcataccgtctagaattaccggaatccatgtccgacatccacaatgtgtttcacgtatcccagctccgcaaatgcctgcaagcactagaaagtcacctcgaagaagagacagtgcagattcagaaagaccttcagtaccgtgagaagccagtgaagattcttgattccacagtcagaaagac

SEQ ID NO: 113844 - DNA, 469 bp, Zea Mays
aatatggatgcaaaaatcaccaccctgtgtgatgagttgtgcaagctgaaaatagaagttgtttcctccggtgccttaagttatattttagttgagcccactttacatgagtagatagtcatggcagagattggtgacaagggtgttcaagtcattaaggaaatgatcgaacaaaaggtggataaatacaaatgtttccatcaggacaacaaaggaattctatggtttggagaccgattggttgttcccaagaaccctgagctcagaaagaaaatattggatgaagctcacctttccaaattttccatgcaccccggcagtaacaagatgtatcatgatctcagatccttgtactggtggaccagaatgaagagggaaattgctaagtatatagttgaatgcgacacttgccagagagtcaaggccagtcatttgaaggtggcaggcaccttacagccccttcccatac

SEQ ID NO: 113845 - DNA, 364 bp, Zea Mays
aggagatctaggaggtggtcggaccgcccaacagccaacgagtttatatcggactcatcaacttttgttggggtataatgagttgaatatgggtttgtatcttgacgaaagcctcgatcttcttcaactagaggaagctgggtggggcgaggagaagcaggaggatcatatgagaaggaaaggtggaggaatcactgttgtaggagggaagagatgctattgtttgcaatgggtctgtatcatttggggggaattcatgtgcatactaatactacttcgaggaagtgaatggctcgaagtggaagtgtcagggccaaaacccgaggcaatgctatttaataaatgctgagttggctaaaacaac

SEQ ID NO: 113846 - DNA, 501 bp, Zea Mays
atagaagctataaataaataaataattaccatactatgttcaaattgaacatttaatgtgaagaggaatttgtcacacacttggaattcaaaatggaattgaaattggatttggaaagaaaattgaagaggaaagggagcagaaaataagaaggaaaaaacaataggaaattggggaatggcgccttggcctaatcttcttccggcatagccaaacctaacttcgcgcatggcccattacctcccgctactcccgctcactggtgggggggaccaacacgtcagcctctccctgccgtggcacacggtcttctacaacactactcatggggccggtggtcagactcatccctaaccatgcagaccgtttcaaccgcccgcgtatggcagcatgggagctggggactggggtcaccctacgcccgaggataaaaaggcatggactggtggcttcactgcgaaccctaggaccaaggaccccctgggtttccgccgccaccat

SEQ ID NO: 113847 - DNA, 355 bp, Zea Mays
gcgcgagtatgtggctccattccaagcatccacgccggtcgcatgaacaaagcaaggcaggaatagggtagattttattgttgttacccccatcgagcacaacagataaagttgccagaataaatgtctttcagttcacctgggatatttcagtactggttaaagtctggaccgcccctgcaattcacctcatccatatctcttcctttacacaaaagtgaaacacggcagtgaccaaaaagtcttctgtagatttttcttctaataacgtgaacttcattacttgacagaaccttctctgttcagccccctttatttcttgacacaacaacaggtcaaccaaggctaaccaaat

SEQ ID NO: 113848 - DNA, 442 bp, Zea Mays
atgcacatgagctcattgcaactgttaacactacattttctatattggtgaaaagacctgtgactgtgaactgctctaggtgaccattctgttcattacacggatgacggccaacatccttgataaagcaatacattgtaccgaccgtttgaccgagtaacatccctgaatgttgcatatcatgcaaaactgtcgtcttcaattctgaccttgatccttggtttgtttaacaaccaactgccctagtcatatctcttgttgcaaccactgtgtgccattcaaattttttatttgccaaataatccttacttagctatggtctatgggtattaggtcagttcaccatgtggacattaatagagttcttatgcagacaacagcttaccatgttgggaaacaaatagagagcctataccctgcaagatggtcatattaatagcag

SEQ ID NO: 113849 - DNA, 556 bp, Zea Mays
gtcgaactggaaaactccggtttgtgccgcaagcagtatgcggacggcattgatgaacggggcgccgccactggtctctagcgggaggtaggtggtggggggaatctggccgttaattccgatcgtgggtgggcgcggatctactgttggatcgtggtgaacagcagggattgctggtcattgggatccagccggtgtcgatctgaaccgctgatcgaaaaatgagcgatcgaggttagctccgggcactttaaaaatctggtgcgttgattgcttgttgggcggtcacgattaaactagaagcgcattcgctcgcctgtataatctgagccggtgatccgatggacggtcaaaaccgtgtctctggttatttaaaacgctgggcgtcggatctcgatctgatggctacctttgaaaaccgatttgcattaggggcaattctaatctggccgttggatatgatctggtccgccagcatcatccaataccctttcagcccgtgaatcttgcaaacgagcccctgatctttatacgaatcaacccaccatccactggc

SEQ ID NO: 113850 - DNA, 353 bp, Zea Mays
aattatttacggaggtttatttctaacctagccgggaagattgatgccttcactcctatccttcggcttaaaatgatgctgaattcacctgggggcagaacagtaggaagcgtttgatctcatcagaaagtatttgtcttcggctcccgtgttaaaagcgccacaggtaggagtaccatttagattatacattgcagctgaagataaggttattggagctattctgacgcaagagaccggaggaaaggagcatgtggtaacctacctaagtcgaaggctggtggatgctgaaacgaggtacacttttatcgagaagttatgcttatgcctgttttatgcatgcaccaagtgta

SEQ ID NO: 113851 - DNA, 523 bp, Zea Mays
tggcagttgcttggagccaaggccaagaagagttccttagcatcattgccagggacatacactagtgggctagtggcctattagtgaggggatcggttcaaaatcttccaccacacgatttcttctcgacgacgaggacgaagacttcatcgtcatttgcacatgagatacctgtaattgttcctttacaaaacataaaaagatagctgtgcttgtttatttattacagaatcggagacctttgcttgttgactttgagagtgaataaattttggttattttgtacgagtcgaattgctgtgctttgtctcttaaaacagaaagaaggttttttttccttgccggcttcaacaagaaatttagctatatggcttctcttttcctcctcttccttctttacggtcaccatgcatgcattgaaatggaaacgaataaaagaaatacacgtgttgttggtatctggcacctacatttttagctgcagtacaatgataaacggacaattgcgattttaaactccaag

SEQ ID NO: 113852 - DNA, 412 bp, Zea Mays
ccctggtcacggacagttcggctttcaaggccggatggtctggtctttcacaaaagggttcggactttaagaccgaacatatatcacatccaaaggatagtattatggatgatccggtccccgagaccggaaagtccaccgtcatacaaagatcatctaattcctctgtggggaacatgatagaggaattcagagatcttgataaactaggacaggggtttacatcggccgatcctttggaggagattgacatatgagatggtaaactccaaggccgacttttgtaaaaaagaccctggagaccgatcctagagatgagatgatcggtctattgaaggaatattcagattgctttgcttggaattacactgagatgtctggattaagccgagagatcgtagagcatcggctg

SEQ ID NO: 113853 - DNA, 514 bp, Zea Mays
aaactaagcctgactatggcatttggtgtcagctgatgaagatatatctcaaatctttttaatacttcaccaatcatctcgtacaatgggaatcgaagcctggcacggaataagctcttgaaaaccaccacctcatcatcctttggctatggaattatctcttcacctgcgaaccttatcgagtcatcatcgtccttccgaaataaccaagcttcttcattaaaactaagtcctcaggtttcacagtggatctaccaaactcgatatggttggccttgcttggactcagtatgccatcatcttctttgtcatcacttccagcttcggcaataacattttcagcttcagctttagcattatccttctcgggaaaagttcttcttcctcttgaataaccaacccagagcgcctcataacttctgaaaatggagctgttttagtagcctcagtctccccacccttgtttgtcagccttgaagtggatctaaatctagccatttcagttcttgagacg

SEQ ID NO: 113854 - DNA, 1196 bp, Zea Mays
atgatgaccttaccatcagatgtttcttccttatcttattcaaccgtctgttgtttccaactgctagttgtggcataacaaaccatgaagtgcttctgacagaagaaatgcaccgtttccacgagaccgattggtggcagcgtatatttaatgacctttgtgaagcggcgaagaagtggcataaccgaagcaccacaaacgtctccacgatgatatacgaatgctcaattgttgtccttgtaagtatagagtttgtcttatgtacatatattgcaatttttttgctcattgttttttgtggggcatgatatatcatattttatgatgtttgttatgtttacttacacaaccctcgcacattgaaattttttctgtagttgtattacctggatcacctgcatgcagccgctgcccctcaaaataaacatggtacatctcgcataaaattctttgataagaatatcataaaagcattgactaaagctgacaagaggaaggcacgccatggggccgaacctttcggatattgtgaagtaagttattcatatttaaacaagtgtattttatgacaaattttatgtcaaatatatgtgcttagttttgagtaccattgtttgcaatacaaactcatggtctagttcaactttcagttacatttttttagtttcgaagctcgaccgagacatgctattcagttgtacctcagctcgatcgccaatccaaggcaagtttttgctgtattatatacatcttttttaagatttatgaaacaaatggattaggagtgtggtgatggattcttactattttttctgaataaccagccgaagtgcaggaccaacatttttgatgcaccgcgccccgtccctactcctcggcccaccattaacatccaacttccatcgatcaaggatatgatgtcaagtaagatcaaccagctcccaccctgtcagcatactaaattcacagagaaacttgctggatatgacttggaggttgacaaggcatgcttagccataaaagacagccttaacaaaattgttgagaagcaatatgatatagcagacaactttatagagctgatcgacgaggtactacgtgctgagtctaataatttaggaaatgagacagatgagccacatcaatcgcgaaattcggatgattcagtaggtcagtcatataattatcactttttt

SEQ ID NO: 113855 - DNA, 327 bp, Zea Mays
gatggcttaattgttgagtgactaacgctaacccaccggtgatcctcacaaagggacacctcgaacaagaactggctaccacatgctaccagtgatgcagcagccacaacccctattgtgtcatctgctactcccaaaatagctgctggaactgctgtcatgccatgcgctagtgtcggtaattcctcaatgtctgatgccatggctccccgtcatccaccacaaccacgtgtgaaaaagaccatcgccaagaaaagaagtcgccttgctaccgaaggatcaccttctgctccgactactcaagaacaagacgcgtcaaccgtggct

SEQ ID NO: 113856 - DNA, 958 bp, Zea Mays
cagaggcacacatccataagggtacccaaaatactccggacctgattatgccatcttcgcaaccgactacggagttgacaggcacccagtttgaggaaatacatgaaaagcaacaacaaatgtgtcgtgcatttgagggctgccctgacgatttggacgttactgcgcccatggagacaaacacaaactcaaacgcggaaaagcaggtattatatacaatctcatcatggttacattatatgttaatttccaatttgcatccaaatattagacaaaaccataataatgtcaacaggattaccattttaatgttggcattaatatgccgagggacataaacatcccacatcaacatataccagactgcaacattatgagctcatatccgtctccccacttgccgatgtttgacgtcacaccgcaaaaacatgtatatgtttcatctttgttttgtccattgtaatctcaattatcgattaaatttaattgacacatgactgagggtttaaacatagtatcattgattttttggggcagggaggtgacattgatgcatctcatgacactccaacttacacgggccccctttttgatcagacacctagtggtcatgtaagtactccaattatacatttatgaccttcatgcttcacataactcattcataaattactatactctctacctgcattgtgtttcaggttgcatctggtgaggaaacacatagcttgcacactacacatgtgcactcactgccacgtttaacagtgtttgactgtgctcggtcgctccgtgattttttgtgctcctcaaaaatcgacccaaacaggttttagtctttaactattaagagcaaataacatgtatgatgttgcagacatatataatgactaacatatctgtttttacattattatataggaaggtcatagaatttggtgaatgtattggaaattgt

SEQ ID NO: 113857 - DNA, 505 bp, Zea Mays
gagaaattcataaaactatgttctacctgaggacctttcaggcatactagctgggcagcctttggttcaaaaatttgtaggatgcataacggcagtgcatacattcgccaatttccaacggtttagctgcctaatcaattccgattagtaaaattgtttgctctggtactcgtatgacatctctttgatatagcatgtactgaagctattagggagtagatcccatattcccaccatgactgtgagactgtttgaaattgtgaatctgtttgaaattatggttccattatgtgagtccagcagtacgcaatttggttacgatattctctgtccctcagcagtcacttatgctttattcatgatcagtgaccaatgtgacaatgccctttctgcttacgtttcacttagagcacctgtgcttcgctagtttccaaagatgtatgattgtggtttattgcacaattatgacctccattttcttttgcttggtggtcagagattcggg

SEQ ID NO: 113858 - DNA, 319 bp, Zea Mays
tcccgaaattcatcttccttgagctgaacgatcccttgaggcacatgatgttctcagaaagcagtctcaaattctgcccaggtagcatctttgacggcagcgctgaaggtatcccaccaggatagggccatcccggaaagttgatgagcagccaaatgaacacgctggttctcaagacatccgatggcttctaacttcctttttatcgtgcacagccagtcatcagtatcgaggggattgctagatccagcaaatgtgggaggcttgagccttagaaaatctcccatcctgtcctgtggtcttccaccattcgggcgct

SEQ ID NO: 113859 - DNA, 387 bp, Zea Mays
ctttctatgagcacgggttgggcttcccctgcatccctttgtctggggttggggctgctattcttctacgagatggagattcagaacctccatcccaactatgtcttgcaagtggcgtgcttttatcagactgtgcgagacatccgtagggattgacccccactagaagttgtggcactacttcttcagtggtagggttgtctgcaacaaccaactgtatgtcggttcggtcaacttccaactccgatctggctggaaggcgggttacttcaagatcatgttccccacctccatgaggtatgagggcaaatggttctacatcaagaatctagccggcagcgccctgtgctttattagtcgggagccgatgtcgacagacgattggaa

SEQ ID NO: 113860 - DNA, 319 bp, Zea Mays
gtggagacatgtaatgtctaccctggaagaacctgccctcggatgaacctcgcggcaccgagctcggggtcgggcatggcgagacctaacagggggttgggcgtgctgaaggaaaaccactcaagtggatcccacacctgggctaagaccgacatgatataaatgatcgattgcatgaactgcgctggcgccgagccacaatgtaggcacgagtcagcctcccactcatgaactacgaaccccttgggtcacaaagcactcatgacctgtgatcccctcaaactgtggtgcatttatggcccacgcatccctcggccag

SEQ ID NO: 113861 - DNA, 843 bp, Zea Mays
agctagctagctaggggtggtgatgcatgcatgactgcttattagctttctgtaacagcggcgtcgtcgcgtcgcgccaatgggactcttgctttgcttgcacagacatgcatgccagacttgtttaacagcggagcacgtgattttctccggggatcacgactccgctgcgtggaagtcttggagaagataacggtgtgcggaggaaatgtgcgaattggaaacatttcagcgtgcaatcgtgtaatcttttcctagtatcagtttattccaaaccggcacatgcacgtacgaacgctagatcttagggcaagcagagcagaagcagacccgcggaaatttttggagctgcatattggatagtcgtcaggtccatagaaaattttgcccatcggacacggacagtagtgattcgttggagctgctcaaacggataaataacctggaagcggtctgccggtctgagtgcctgaccattccattcccttttttgaactctacttgttttcatatagcatccctggctaattaattaaagagataaacagtatccagatcaggaaagttattgctataaccaatttcatggtttcatgtcatcgctcgacactgaatcgaatctaatctgctccggatccgaccacaggctgctagtttgcggttccaaccaccatcccatccgtcactggctgactggctcactgcccaccacaaggccacaggtttcgtttcgtataaaatactcatcagtactccgttaagaaaaagagggttgactagtcaagcgtcaagacggatgttgaccgtggaccagccgaagccacaggccccactcaggcactc

SEQ ID NO: 113862 - DNA, 1195 bp, Zea Mays
aagacaatcagattagaaccaacaattcgacttgcaaattttattcaaatcattagtgcactaaaattactacaaccaattaacaatgcattctccacgataatcacccaacacttgcgttttaaattagacatcacatgagcactactactttttacccgcgaccgtaaccatacacatttagaccacaacaagcaatccaccgtgattacgagcttaaccaagtcatctaacaattcggctaactagagcaacaatataggccgctatacatcacacgcgtcggctagtctattattatcgaaatccgagacacaacatgtatatgacaatcacttaacgaaatcgactcctacttaacatgagttggttaatcgcagtattggacttagcaaaccattttagacatcacaacccaaaaacatgggttggagcagattaatcagcttttcctaatcattgctcaacttaaagttgttactacacaggtcacttaaaatggcacatttttgggatctaacatagaggcaattacacatggcgtaaaactccataagactacatttgctactgaaggacctaaagcacttatgtgcatatcttagcggattgttcttcaattttaacaaggaccgacttatgaacgctactcgcctccaataattatcgggttgcgataacgctcatacaagatttctaattgatcaacaagacatgtatttatcccatgggcatggaatgtgatgattgacaaagtgaagcatcgcattgccatacaacaaaaatcatgacaacaccgatggatactatccactaaccgtttgaaaaaaactgaacttactcctcgcttgccactacatcactcctcaatcacacgaccatcatgcgcatacttcacacgactatataatagcgacctaagcgttgtgttacacaagacatacatcttccttcgttgcgagtataaccatattacggcatatacccgcacacctcaatcaattatcttacgccaccagtattataatacaccacgacacacacgcatacgtgtccccactgcattctcatgaccaattttagcacaattatttatgacaatgtttattgactacacaagtgaaacactaaccgatcattcacacatctcatcttaaaaacactaatcacatgtcacataaattatatcttcgat

SEQ ID NO: 113863 - DNA, 300 bp, Zea Mays
gtcacactatctctgagggaggaatagctattgatccagataaagtgcaagaagtgatgaactggaagccaccaacaactgtccgtcagattcgaagttttcagggattggccggttattatcgaagattcattccagacttctctcgaattgcgaagcccatgactgaattgttgaagaagggagccaaatttgattagggttagaagtgcgaagatgccttccacgcattgaggcaacatctgaccacaacaccggtgttagcgcaacccaacaacaacaagccatttgatgtgtatt

SEQ ID NO: 113864 - DNA, 546 bp, Zea Mays
ctcaaattgagagttgtatttacccattttcccttggatgtatcatattccttaccgcttgaacttccaaccccgtcgtttaatgtgttttgtttgacatcgcctttacccttgtgaccctaccttgctgcttgtcgtatgtctgccacttaaaacctcccttctcccctctcaatttgggagtggtgttttacttaccctacgcttggtcataacctcatctctgccacgtgcaaatcttgctttaacgtcattctttgttgtactcatacccttggttcttctatacctttacctcttctcttacacccttttctgttatcgccttcaacccttgaaatacctatatttttaccacgacgcttactttgaacctagcttttggagccttctcctttccctcctagtttaggagcggtgttttacttatctcacccttggcaatatcctcttcttcactgcgtgtaagccttgacataactccattctttgttgtaatcatgccactggctctccaatgccctcatcttttgtctcatacccttg

SEQ ID NO: 113865 - DNA, 794 bp, Zea Mays
gctcaaccggatattgagaagccttttgatgtatactgtgacgcatcaggcagtggtctaggttgtgtcttaatgcaagagggccgagttatagcatatgcttcaagacagttgtgccggcatgaggaacattatccaactcatgacttagaattagctgctgtggttcatgcccttaaaatatggcgtcattatctgctgggaaatatctgccatatatatacatatcataaaagttttaagtacatttttacccagtaagaactaaatatgaggcaaaggagatggctggagctgattaaggattatgaattataaattcactatcgcccagacaaggccaatgtggtggcagatgcactaagtcgtaaggcttcctgccattgtcttacagtaaagacttctgacatcacattatgccaagaaatggagaaattaaacctgggaatgattcaacatggaaccttaaaccaattaaagcttgagtcggttcttctgcaaaagattattgatgcacaaagaagtgatgagggtatgaaacacattcatgagaaaatgaaagccggtaaagcaaactgtttcaaaaaggatgatcaagacatagtatggtttaataaccgcatagttgtgcccaagaatgatgatgtccgccagcaaattttggatgaagctcatcttagacgctattccattcatcccggaagcactaagatgtatcaagatttaaagcaacattattggtggacaaagatgaagattgaaattgcacgctatgtggtgaaatgtgacacctg

SEQ ID NO: 113866 - DNA, 542 bp, Zea Mays
cctaaatgagatacaggatgcatatgtatgaatgttggggcgaaggcgcaacgaccccttgctcgattaactacacactgaaaggtagaacatgtcgatgatgattcaagcgaagactaaagagcgtgaaggctgaagagtgggctctgctatggagggagtgcacagagcgggcgaaggcctgggtactccctccgtctagacgggtcagaacgaagaccaccgagaattctgaaggctgagcgcgaggaacgtgaagaccacgtgttgtgacctgctctttattgtaataaggggcccacatataaccggcccatgttgcagggtcccacctataagacgctatgagggtagggttgttagtgcatctatccatgcttgtaattaattacgctataatgacccgctgtaaccccccaaggaagaatattccggaggataacgtagctaaccgagggaaaaatcatctttgacagggcagagctgaccctcggttacctataaatacccacttacagcaccattgcggaggacaaaaaaac

SEQ ID NO: 113867 - DNA, 976 bp, Zea Mays
tcattgtatgattcttggctccatgaaatataatcatgtagcacaattttgattgtcaaccttactcgtgatgttttattccagagtcattttagctatccttgtgtggcattttgtgcctgaatcacatagcaatcaatgttatcaagtcatcttactaatcacgattagtcggactgatcaatgtcacggtgatcagttatgtactacaataaatcacaattagtcaggctgatcggtgccatagcgactagggttaattagacgatttgataacattgatagcaatcactgcaagcttccatgtcaatccaaacttgctgtaaaatcctgcagttgacatgaggatgtttttctgcgttggagttatgctagttgaattttgtacacctacatacatgccttacttttaacattgctgttaaactgagtttgtttatctgggttctatcaggacaatacaatagatcccttggtattcttactgtcttataagcatggtctttgaggtgtcgcctaggtgtctaggtgtgcccccaacgccacagggcaccatggtaacactttgttgcctatatgtacaggcgtgcccccaatgcctcaaaggctaagcttataaaatacatagattatgctaatgttttggtggctaccccagtgtatgtcctgtgtgttatatgatgctatgtttcaggtttttgtatgtgtatatttttgtaattctgtgatttgggttttacatgtgtatgttgtttggaaaaattctatatgagcacttgttactctttttgataccctgttgagcacatactgattcagaatgttattctttcaatgtatatgctattcagcaatatgtgtatctgctttaggaagacctataaatctataatttaatcattcatgcacatactaacatttaatgactcatggtcaggttgatatctttatggatgtggcctttgatagtttgcac

SEQ ID NO: 113868 - DNA, 276 bp, Zea Mays
cctcccccttcctgctgctgaggttgtcgaggttctccgggtcctcctcgtggtgggggaggtggtagaggttggaagggtcggccattcccgacggattgcttgaagtctctgtagttctggagggtgtggcgcatatctttgtggtacaggcactgggcgtcgaggatgtcgtccaatgttcgttcgcctccgcggggtgcccctcgggcacgagagacgggtggtccagcggcatggacttcttcacgaggcctcttctcccagcgtttgtcg

SEQ ID NO: 113869 - DNA, 806 bp, Zea Mays
gctgaacgtccctacttccagtcttcggtggcgtgcgctattggtacctaattactcatagtaggggttataagtaggtgtgagagagaaggatcaaacagggggctgatcacatatgtctttggttagaagggatcgttgccttagcataaaatgaaatagttcttccttggtaaaagcctccccgcgtgttattatttgtcctcatataaatttctggtcatgcctcttcaagactactggtgaagcgtgccgacgatgggagtcccggcatcattattaccccttttgtgcacctctacctgcactgaccctaggtcttcatagcatgacctctggcttcccttcgacgtcttgcatgcttcgtagggcatcgaaggactcaggcctagggcctgtaggtcataagtgggtctcatgcctagaactcgtaggtcatgagtgggatatggaccaactcttacccataatgtggctcggtgctagacgtagttaatgcggcgtgcacgacattgatgatgagagcagtctttcggtcacacaccaattcactcaagttgttccctgacgatttgtctaacccccttgccaggcttctactcacctggccccaagtgtggtgcacatggatcaaccgggggcagattcacttgggcgggctcctccctatcttccgtctaactcgtggccatccccgacagtggcccccgagcccttgagaagagtgtgtctccctttcatggcttctttttacgatgggttggttgatatttggcaatcatctctatgtgccttgggtttcgaac

SEQ ID NO: 113870 - DNA, 588 bp, Zea Mays
aggacgctccccttggtgtataaatagggcaatggtccctccacgagggaaggatcgatcgatcgacgacatcgacatacacacgacactcgtagacgaacactccctctctcattctatcttagatattggcacttgcctcaatcctctctagggacttcccctctcctgccttgcttgtaaacccctactataggcaccacggtgcgagtaatataagcctcatcctctctactagaagtagggccttgagtagcccgaatcaggataatcgcttgtgtctcctcgcacaccatctagagtcggccacgcagcacatttactagttggttaaggacccacggtccaaacactgtcactcactataaaatttaatttcatctctacatttaccaccctcattgggactcctaaagtccatcacaaaagcctactccaaccactatttcgtgttgtcccaccgccccgcaaccacaaatccatcttcacctccccagataccttgatgccaccaccactagacaacctcttgtgtcgagacgtcgcagagcaccttctgttctgcctccatgacgtcgcagcgaggac

SEQ ID NO: 113871 - DNA, 393 bp, Zea Mays
caactaaaacctaatagaaaccacaacgaagttcggatctggacggcgtaccgagggctcgaagggccaatcgccgacgaggagcaagcactacccggagacgtcgaccgccgccgcttccctctccgctccagctcgtttgcaaagcgacggttgaagtgccagggagagagaggacgcgagaaaagggagcgagcaccggcgccgcgtgttctccgcgccctgacacggagtcccctggccgcgtattttacggaagcgtgcccgtatacggggcattgctggagttggtcttaccagatagcctggattagttcttgaaagactatcgtcgttttgattctggcattcgctttcttcgaaatgatcgagcttaggcgttcctgatctttt

SEQ ID NO: 113872 - DNA, 468 bp, Zea Mays
tcgggagcaggagtctcgatcttttcagctgcaatctgccctaccgttttttcctcaagcgcgacaggcttcgccgcgacgggcgctgaaggcccagtttcggcttcagcctgagctttcgtagcttcggctgctgcttgcccagtttcggcttcggcttgcgctttggcagctttagcaattttctttgtaggagcagggctcaaggcctttgtagtctccagcacagcatccaagcacgttggccatcctcctcctcttgggagtcgcgacagaagccttttgcaccttaggcagttttgcctctgttggagggctcagaatttctggcattttcattatttcttcaatctttggctcttcagccttatcaaccttagcttcgactggctcgactgtaggcgtcttcggcattacagttggttcttcaacgctctgtgtaattgaagcagcctgtcttgcttcagc

SEQ ID NO: 113873 - DNA, 544 bp, Zea Mays
gtaaaggaaaggaactatggaaatgcaaattataaaagaccagtgaatcctcaccagagcatcaaaccttggcttgtattgaggagtgagtgtcaacataattggggatccctatgcctgcactttttcccaatccagatcgcaataggcggttaaatagcctaaaagtgcaaagaaccataagaatatccgaaacctttaaaaccagcaaccgtgagcaaaacggtactaaatcatttagtaatccttagatctaggtccatcctagagttcaatgttgcaatgcgccatgtacacatcctattattagtacccctctaagaattgcttagtttcagcttgctgtagactcggaaaaaaatgggatatcaacatgcttggtgatgcatttgggtacaattgacagatgcgacccacaagaattgcccagtctatatcgcccatatatcccataacctggaaagggttagaaagcatttgttataaaatgtacataatttatgaatatatcatgttaagttgttaacactataaagcatactcc

SEQ ID NO: 113874 - DNA, 299 bp, Zea Mays
cggttggtcaaaaccggcccgaccttcgatcaattattgtctaagtacatgaaaaagaaggccggccccagagaccggccagcaaagcgaccccgctcacctgttcatgagcaacgtcaggtaaggccgattggaccacctcaccaatcggaagaaatgaaaggtcatactgtgcaattgagacctaacatacctgcatggacacctccacctccatattcacctatgccatatccatacacatacatgcctccaccatatgttccaaatcaaatgtggggcatgccaccatattcgtt

SEQ ID NO: 113875 - DNA, 443 bp, Zea Mays
atggtcatgtgactaaagggtgttgtagtggcaaagcgagaagtaggtttaatattgttaaacgattagtggataatatctatcggtattgtcatgatttttgttgtatggcaatgcgatgcttcgctttgtccatcatcacattccatgcccacgggataaagaaatgtcttgttgatcgattagaggtcttatatgagcgttatcgcagcccaagaattattggaagcaagtagcattcataagtcggtcctggttaaaattgaagaacaatccgataacatatgcacctaagtgctttaggtccctcagtagccaatgtaagtcttacggagctttacgctaggtgttaatgcctctattttagacctcctaaaatatggtgttttaagtgacttgtgtgttgtccagtttaagttgagaaaaggttaagaaacattaat

SEQ ID NO: 113876 - DNA, 590 bp, Zea Mays
ggaagcacgttcactttctcggccatcagagcaggggaagaagaccgggggagagcacgaaagcttttttgaggctaggagaaagggtggctagggcaggaaaacaggagcagaaggtaaggagccgaagtgtccatctcggacgaatttatagggcaggcggagtcaccgagtcttgggccaagccacctagagacaaaccaagaacgggccgggacgcttcgaattccttgcatgcgtacgacaacggtcggcctgcgggcatacgcgtctcgtcgcatttaatgcccgcccctcctgtcagctgacgtcaggcagcaagcgccgctttgtattacgcatcgaaaggtgtgtcgttccctcttcccaccttttccatctccttgcatgtaacgagaaaaagtgtctcccgcctcgggcatccttcctcaaggaaaagggtgagaagaataatactgttcgggggttcgaaggtcaggccctcataagggttcgggagatcgcctcaggacgactgggttccgggccctttactggttaggggttcgaaggttggcccctcggaagggtatcacgattgtcctagaacg

SEQ ID NO: 113877 - DNA, 477 bp, Zea Mays
gattggggctatacggccgtaagagactgtagtttgaccgtgcacaatcaatttgggaggagggggcagaggcagtgcgaattttggactttgatcaactcactgggtggaggtgtggataccccgccgtggattatagtgctatttatagtcacagcgacccggctggcgatttccggccacgaataacttcgttagcgcatgcttaccatgtagggaagagacacagtgagggagatcgaggcatgggtgacaccacggcaaaagttaactgagtcacggtggtcgccggtgactaactccggccacgctcgactgggttcgcggaattgcttcacgttcgaagttatccattcccggatcgattctcatcactggatcacgcgagcccatctgattcaacagtggccctgatcttatcatgttcatcagatatttgtcagggtttgatcttcagtgttcttctgaaccgaccac

SEQ ID NO: 113878 - DNA, 556 bp, Zea Mays
aggcgggaacggaaaaggtagctttagtatcagttgttgaaaacaaccggtacaaaagcttcctaggagtgaacgcaaaagggagatttagtaccgattatttaaaacaactggtacaaaagctacctagatgggaatgagatcataaatatgaaccgctccccctctgttattcgctctgttctcactagtgctcctccgtcgtcgccatccttgatcgtccagcacgtattctctccaccgccaccatcaccgaccacggtggcgtttttgtttctgctgccacctggttaccagtgagctcggcctcaatcttctccactgccactactgccatccccatcgtactgtgcacattctctagaactccgccatcaccgaccgcactattgtcttcgtctccattgctgactgttcaccagtgcgctcggcctcgatcttctccaccattgctaccaccatccctgattgtcctacacacattctctccactgccaccgtcactaattgcgccgatgtcttcgtctccgctaccgaccggtcaccagtgcgctcg

SEQ ID NO: 113879 - DNA, 1152 bp, Zea Mays
gccaggctatcgcattaggactcttctcctctatctttctcatgtggtagtcgaacttgtcacttgtacaagccttagcagctgcccacatattctgagaaaacaaagggccaaaatacttcttcttcatattcttccatagatgtctcatacactctctgtgttccactcctgggtacacaacatctatagcagcccctatccccttgcctgaaacatattaagtgttagcttcataaaacattgtagtaaactgaagttacaaatgaatgaactcaaatttacctgcatctgtactaataaccaatcccataggagtaccaattgattgcttcaagttttggacaaaccatgtccaactttcaatcgattccgtctcaatcactccaaaagccactggaaaaagccagttatggccgtccactgcaacagcagctgctagttgccctcttgatcttcctgtcaagtgagtggaatccatagcaatgtacggtctacatccttgtaaaaatccatcaatacatggtttcaaagcaacaaagaatcttttaaaacacatgtctcccttatgatcttctgtatctaactcaacaacactgccaggcattgctctacaaagctcatctctatatgtaggaagtaagtcatagctatcatcccatgctccatatatcatgtcaagagccttctctttacctctaaaaactctatcgtatgggatatccatcttgtacttctttagaagttcctgctgcaacattttaggcccaagtgtaggtgtctcccttaaccaatcaactattctttcggctacccatgtatgtgatgccattgtatcaccacatttattaactgaaccacaagtgtgttttggtccatttagcttcacctacaacacaacaatacaaggatcatcattagacaaaagtatgttatgctaatgaactcaaaaatatataagatgcataagaagagttaaattaccatgcacccaatgtattttttgctagttgatgcaaaaaactgccatttacaacccttatctgctctcttgcacttggctctaaaccttttcttgcacttcttaactgtctcataagcataatcatgtaaaataacatgatgagttactgcagacttgcatgcatccac

SEQ ID NO: 113880 - DNA, 348 bp, Zea Mays
gactcttgtttgttgggtggcatccaataccccggttcccaacatcatttcgaaggcccaaatttgatttgattggcttgttaagcaaaccaacattatgcatggagatgtgcgacatccaccctattagatctagataatcaataacactatgcttggtaggcataccaaaagatgattagaatctttataggtgcagtagttggaaggacatcaaattgaattattatttttttctgacggaagctattttatgacatttgcgataggaaaataaaacgccacaaatagtcatattaaatgtgagataatatgaccctttgtcatggtgatcttcatcaccacgtc

SEQ ID NO: 113881 - DNA, 519 bp, Zea Mays
ggaattaccgccaatactcacaaaagaagttggtccaaataaatccatgtgaagtaattccaaaggccgatgagtagacatttgattcttatttggatgagtatttgccacttgcttcccggcttgacaagagctacacaatttgttcttctcaaatttcacatctttcaagccacgaactaagtcatgtttggttaaacgattgagttgtttcattccaacatgaccaagtcttctatgccataaccaacctagtgaagcctttgagaataaacaagttgtgagctttgcctcactggatgagaaatcaacaagataaatattttcatatctaaagcctttaaacataagattgctaccatcaacactagagataataacatcatcaactgtaaaattgcaactaaatcctaaatcacataattgagctacggatagtaaattaaaattcaaagactcaaccaagagcacatttgatatggaatgatcattctaaatagcaattttacccaaaccttt

SEQ ID NO: 113882 - DNA, 1384 bp, Zea Mays
tttttgttgcttacagggaaaaaagtataaaaacattttttgttgttaatgtctgtgttctgcccgtgattgcctgctttactagctggcagcagtgtccgcttcgagctgtgcatatccatccaaccattcatgttgactcgtccacgtggaattactgcatagtttggcaagtaaggaatgctgtagtggaatcttcctggcatgttgacttttagaggatttgtcagagcaggatagagacttttgccttgcaccgacggctgcctggcaacgtcctgtttttaaatctgctgagatgtccctagagcgcattgttggaacagtttcattgttgttatgctgatgaaagttcagcgcgtccgctgtttgatgagtcgtactttgaggtttgcagacgggcttatttatatacgtggatgttcctccctccacacccgcctatgggctgtggtagatcttaaaaactggtccattatttgttgctattctgccgatcacttttaatgtgtacgagatgtctctttattagctggatttagttagagcatctggctgctataagcctataacatacaaccattagtcctagagttggagctatgtgatgatatttcttctagcatttgtcaataattgcgggcttgttccttgcaatttttttgggtgatggagatgattgcctttgcttaattacaatcacgtgatttgttatggccttatgggagacatatgtatgatggtgcattttttcctgctacagcaaacgtgtgccacctagagtcaaataaagaacatttcaaaatgccttgtggaattctaccatttctttaacaatggctgttaactgaagtatcgtcagtatattaatatttggtctttcttcgtgaggctgccttgttgaaaacctgcgcaatatcacttccagactctcctcttggagatgcaagttataccttacactttcttttctgaaaaggcatccggcaagaagttttccaggcatttattagtatagaagtttagcttaggctttatctgttgtaatgcacattgatgattttgacttttgacagactattttgatcagtataatgcctttctatctcatgtagaaccatctgttgaaccttttggcatattggttttatatgtaataactagcacttgtttgctatattggtcaggtttttgcatttggatcagttccactaaagacttaccttcctgatggggatattgatctaactgtccttggaaatacatcttatgatagtactttggttaatgatgttttctgcattcttgagtctgaggagcagaatagtgatgctgaatttgtagtgaaggacttggaacgaattgatgccgaggtttattctcc

SEQ ID NO: 113883 - DNA, 683 bp, Zea Mays
gagcaggggcgcgaagtggcaagccatagtgcacctgggcaagagcgcgaggtggcaggacatagtgcacctgggcaagagcgtgaggcgatacgctcaagtgaacctatgctagagcaggaccacaatgcatttgagcaagcgcgcgaggcggcagaccacaatgcacctaggtaggaggatgagctggcatgccaaggttcaccgatgcatgatgatgatgactatggggaggactacgatggagaggccaatgacgaggttgttacaacgacacaggcaacgaacttcaggtaattttattttgacgatgagttctattttttgttggattgatattattaccagtgcacaatttacaattttgtaggtttcggcggtcccttagagttccatcgacacaacccttggaccaacgtagggtcataaaccctacaggagagaggagctgggtggaggtggcatggagtggcaaaggtcaccggacactagttaacacagtgctgggatctatagctcgttttcactatccaggggtggtacaattcaacggggcagagataggggcgtatcactggactcactggggcctcaaaccatatggacccgaccgtactcaccaagacgcagtgtggtcatcgttttgggtgagtttattatgtcttttaaatttacttaccgtg

SEQ ID NO: 113884 - DNA, 396 bp, Zea Mays
ggccgctcaccgctgtgtgccacatgctaaagcgcttgaccacatcggagtgaaacacgtcatgcatgcccggtgatcgctggagaggtaccacggttaaagccactaaccccgagcgccagtaaccttcttcctgtccggccgccagcacatcatcatgaaattggacgccaccgcacaagcctgctataaattgccgaccccgctttctccgctaggtagttgtgcaaccagtgaagcaaaccgtgcctcgaatcatcccctagaactccccaatttggaattcccccaaatcactcaagaacaccgagcggtttgacctcgccgtggccagcgcatctcaggtcatttcatgtcctctgagcccttgtttcagtatccttggatgctcctgat

SEQ ID NO: 113885 - DNA, 460 bp, Zea Mays
tgggggacagatatcctccgggtccactaaaaggagaaaaccctacttggggccataggccagccaccccgcaaggtcgccgcatcgtgggctggcaaacacaatggtggaaatgggccgacccaggaagccgatgggctcacacccggattattcgcagcttgggcgcgatcctgctgaaactactcgcttttcccgtggccaacgtcctcaaacgtcggggacagctcagaatggaggtgctgagttttcctcaagataagcaaagtctgtttgctattagctaggagataagctagaagagtgtgatcaacatgtgtgcagggagtgtcctatggtcgtatatataaggcctagggtggtccccatcattttcatcccattagcatctctccattcaggagacgccacttgtaaacaccccacacatacgaagccaccccaggaagtagggtattac

SEQ ID NO: 113886 - DNA, 369 bp, Zea Mays
gtttattgcttgttgctgatggcgataaaaggaggcttcaaacaagcatacacgttatttcatgggtcattcctttaggcaaaggccatctggagttgaaatcaggcggtagcattcaattttggttgatttaatattcctactgtttctgaatgcatatttcttcttctttctttgttacatactagaggattgcacaattaactgacacaagtaccaaacaaaactttaactgacaatgggtgtaactgtgttttctcagaacatttgaagttttgtttccttttcaagtaggaaactatatatagaagaaatatttttctttaaataatagacattaatcctttgatggcaccaggattgttcatt

SEQ ID NO: 113887 - DNA, 391 bp, Zea Mays
gctgaagtcagagaagcaatgggtttgtactctatccatttagtgaatttgtcaatagcaaccagtacatgagtgtatcctccttgagctttcttgaagggtccaatcatatctagtccccagcacgcaaatggccatgttacaggtatggtttgtagttgctgtgctggtaagtgttgttgtttcgataagtattggcaagcttcacacctctgaactaactcgactgcgtcactctttgctgttggccagtagaaaccagacctgaagaccttcccaaccagagtcttggatgctgcgtgtatcccgcattgcccagtgtggatctcatcttgtacttgcttcccagtagccgaaagaatgcacttcatgaggactcctgttgcgcccc

SEQ ID NO: 113888 - DNA, 285 bp, Zea Mays
tatgtgcccgagtgtgtactctcctttggtcggcatgataccgaagaagggtgtatctgactcggtgaggtctttgagtgcaacccccaaggctaggagtgtccgggggaaggtaatgttaatgctacttcccccgtccactattactttctttaccctgctctctcgaatcaccggatcaacgaggagtaggtacttgctggggtggtcgaagttgagccactgattcgtccggctgaaggttatcacgtgctctgaccaccgataaggagctggggcaatggt

SEQ ID NO: 113889 - DNA, 486 bp, Zea Mays
aattctagaggcaatggctgcacccttacctttcccagtgctaagtcctccaagatcagatctaacgagcttattacagccacagaagaaaaatgttgacggaagtgccgaagcaaaggcagataagaaccctttggcacccagcggagggaacgctcagaagaagcatcagatgatgaatgtgatgagggctatccttgacacccctcctccagcgattcaaaaggaggttactcctgctgtagctgacgaaggtccccaacaagctgaaaacagtggtggtccccttggtacaaccatgtcagaaatcgatagacttattgccaacgttgcacctgggaaaatacagaggaggcaattgctgcagatacttcagcagcgaaggaaaagagaactgagcaagcttcttcggaagacagaagcttcgatctttggcacctgccaacagctttccaaagagtatatttcagaattgaaggaatttgc

SEQ ID NO: 113890 - DNA, 620 bp, Zea Mays
cagggttcaacggccgatttggttgacttagcgtgcagatcttagcaaaacccccatgtacggtctcttctctgcaccaaatcctacgttttttatgtgagttccaagcaaagatatggtcggggtagagagatatggggtgagaagtcagctctgtccgagctgtccacaccgagacaaaagccatgccaagtcgtgtcaaatggcttagggttgggttcaaacttttccagggtgttctaggggtctttgggcgccattttgtcaattgggccataaggttttgaggttgggaacaacgtgaacatgtttgatctttgaaagagggtcagttttgaacttgagaaaaacctgatttttcttttatgttcttctctttggtgacctttttggggtttttctgaaatctttttggggtcactctctttctagtttctgtagggtgttaagtgtactacaacttttataattagtttaggtcatgacaatgtgatttacatagcctttttgccataatcccctctagggctccaactgactataagggatttgaattagggtttgagtcattctcttctctttagtgcatgataaggccaaggcatgacttctaagatggg

SEQ ID NO: 113891 - DNA, 634 bp, Zea Mays
acagtgacctgaagaagatcgcgggttcaatatatctcgctgccgatgaccccgtgtcgtgatcctcgccggcacggagattcgtgcctggtggcgcacggataacgactcagggtaaaagatcttacgcaagggatgaagttggggctctgtggccgccctgacgtcgtacctacttgccggcgacgtggctgcgtggtcgtcgtcatggctgtcgccgttcactcggtcgcaccacaccttaggatgttttaccacgtcgccttgagccatggaggttaaccagtgatagccgtatgcctttgtccagtgaatgccacggtagatcgccacggtgactcatcccctctcctcggccgttagcttctctcctcaaattcagagccaacgttcatgaaaactataaattgagcattcagcgtgctccgctaggttgttacgcgcctagtgcatcgctcctcgcctccaatcattcatcatagctccttaattcgtgattccccccaaatcggttttccgcgccgttgtgagcttctctccgtggccagccatctacaggttggttcatgcctctctgcttggtgttctagcatcccatgagtctcctgttgctcgtagacccgattgattgaac

SEQ ID NO: 113892 - DNA, 840 bp, Zea Mays
gtccacggtgacatcgggcacaacagatagcacgacgtgttcccgacgatctaaggggtcctagtttaattggcggggtcggggagcatcagggacacacaagtacacttaaacgaaagagcagaggggatgaggggacctgagatgagctagccacggtgaggcctctttcacggtggcggaaaatagatttgggggaaatctgaaattggcgagctctggtgagaaattggagacacgacttggtggcttggtgcttgactaccgtacggacccgtcggtgtgcttaatttatagtgtgcttgagcggtggtgcttcatttggatgaattgcgctggcggccgagaggggaatgagtcacggcggcgatctaccgtggcaatcgcagagcgactaaactacgacggccattggatggtcactacggctcatatcgacgcaataaacttcctaaggcgtggcatcctcacggtgaacggcgaacacgtcggtgattgccgctcggccacgttgccggtgtgtactgatgaaccatcaagcacacagtactttccagcccatccgcggcaagatctttcaccccgtgatcattatccgcgtttaattcagcgtgaatcatggtgatagcacaaatccgcgcacgtggtcgccgtcggtgaggtctctgagtgggcgatcaattcggttactgtaccatcgtgaaccttcatcagctggcctgacagagcatgattgggatcgattttgctctatattttatgtgatgactcaaccaatactctgcatcaaagtcgaagcctgataaaccagctctaactttgttgcattgtgcacccaca

SEQ ID NO: 113893 - DNA, 457 bp, Zea Mays
gtaatcctactatgaagtccatgcaaatgtcctcccatttccaagatggtatgggaaggggttgcaaagggcctgctgccttcaagtgactagccttaattctctggcaggtgtcacattcggatatgtatttggcaatttcccttttcattctagtccaccaatatagagatctgagatcatgatacatcttgttgctaccagggtgcatggagaattttgaaaggtgagcttcgtccagtatcttctttctaagctcagggtctttaggaacaaccaatcgatctccaaaccatagaattcccttactgtcctgtcgaaaacacttgtatttctctgccttttgtttgatcatatccttgataacctgaacacccttatcctcaacctgagcccttatgatctgctcttgcaacgtgggctctaccgagatatagcttagtttacccgaagaaac

SEQ ID NO: 113894 - DNA, 431 bp, Zea Mays
tacttttggaagagaactctagccgattcaaccgtgaaactgaagctttgaatacgacaatcaaggttgaggcttaaaagaacccgaagctaagtgaagcactcaaaacccttaaggataaatgttttaactttgcaacccgatgcacttctcgattaaagagtatattcaattcagttggagctgcatccgaagaagctaatctctctgccgaagatatccccggagcatttgaatgcgtcgagaaagaggttgacgtcctcgacgaagtcataactggccacagtgacttctgtgcgctagtggcttctcgtggtacggtcaccgctttcataaaagccgggtgcaaccatgcaagggctgttaacaggccaaattctagcctttcatcatcggacctagttgatattccagccaaaacttgaagcata

SEQ ID NO: 113895 - DNA, 1333 bp, Zea Mays
agtgaataatttgagtgcctttgaagtctttttattgatgatatatttcccagtttacagcgtacattgtcgtcccaatagcttttgagatgtagctaggggtaaaacttcctgagatgttctatgttccatgagttcccaatttctgtgccgtccatttgagtgagacgatatgatccaggccgagtgacttctgctactatgaatggtccttcccatagtggcgacagtttatgtcgtccctcccccgttagaattcggcggaggacgaggtctcccactgcaaaggatcgatgccgtatggccttgttatgatagcgcctcagagtttgctgatatcgggccgactgaatcaccgtattcaatcgttcttcttctagtacatcctccaacctagtagcctcagcttctgctatgttttcaaagattaaccttggtgccccaaacttgagatcagcaggtagcactgcttccgaaccatagaccataaagaaaggtgtgtttccatgcagagctcgactaggttgagttctcaggctccaaacaacatacggcagctctccgatccactttcctgcgaacttttcattcttgtcaaagactttctttctgagcgcctccaatatcatcctgttggctctttctacctgcctgttggctcttgggtgcgccaccgaggcatatttgatctgaatgctcttttgctcgcagaaatcgaagaactctgagcttgtgaaattggatcccaggttagttatgatgctattcggtattccgaacctgaatattatgtcttgtatgaattctactgccttagctgaagttagagaggcaatgggtttgaactctatccatttagtgaatttgtcgatagcaaccagtacatgagtgtatcctccttgagctttcttgaaaggtccaatcatgtccagtccccagcacgcgaatggccaagttacaggtatggtttgcagttgatgtgctggtagatgctgctgttttgacaagtactggcaggcttcgcacctttggactaactcagctgcatcattctttgttgttggccagtagaatcccgatcgaaagaccttcccaactagggtcctggatgctgcatgtatcccgcattgcccagcatgaacctcttctagcagttgctttcatgaggactcctgatgcgccccttctgtatagcgtttccccaatgagagtataatgagatgactgccttgcaattcgttctgctgcattttttcatctggttcctcctcatttttatgtacttgatgatcggctccctctagtcatcagaatttgactctggttggcttag

SEQ ID NO: 113896 - DNA, 502 bp, Zea Mays
ttccaggatgaatagaataccgactaagatgggctacatccaagatttgttgatggagtttaacatccttaggcaccactatgcggtctttaaaccataacactccttggtcatccttcttaaaacaagtagctttgtcggcttccattttctcttggatatgcttcatacccttatcaaccttttgagcatctataatcctttattgaataaccgactcaagcttcaaatgcatcaaagctccttgttgcactattcctagatttagtctttccatttcctgacataaggtagtgtcaggcagtcccacagtgaggcaatgacaaaatgctttacgacttaaagcatcagccagcacattagccttttctggatgatagtgaatctctaggtcatagtccttgattagctcgagccatcttcgttgtctcatatttaactctaactgggtaaagatgtactttaaactcttatgatcagtatacatatgacatacatttcc

SEQ ID NO: 113897 - DNA, 312 bp, Zea Mays
ccgagcgtcttcattgtcgctagcctttccgcgctgtttttcgctgctgctcctccagtttctcgggatccgtgtgggttgttgttgctccgtccgtccggtgggattccctatgtgcggcggcttcaggtgtacgggtgtcgagttgttgccttggtggtgagcatcgtcaggagtgcacgacagaggccgggtcggggattaaggttaacctcggccgccatattagtttagtggtggttagccttgtgctttcttttcgtttgctttgttcttgacaacctgtgtcagttcacagttgtgggcctggtg

SEQ ID NO: 113898 - DNA, 563 bp, Zea Mays
cgcacggcggagatccgagcgccggcgagtctagactggtcggatcacgcaaagaccggcgttctcgagcggcagacaccaaatcggatccctcctaaccatttcccctcaatcaatttcaccagcggggctttgaatcaaccagttcacggcgacagtgcggatgatcggatggataaacgcgttctgaacaaccgacgacatggatgaccaaattaaagcttggggaagcttcacgggttcaccagaggttatgtacacactagaatttggactaggcaagagtagaaaagtgggtcgacagggagggtgtcatggtggcgttctacggagcagaggagtgttccagtgatggggctctggcaatcttcaattggtcggctccgagagcaatagaaggttgaagacaagctaaaacagaacgcaatttggtaggtactaacccaacgagccctggccacggaggagtccttcatggtagcgcgaagaacagggaggaatggatttgtggattgtgtaagctcttctggtgaaattgagttgattgctcaagtgcttgtgtg

SEQ ID NO: 113899 - DNA, 552 bp, Zea Mays
catcaaggctatatgctggtccaccataagctaacatatgaatggcagcagttaccttttgtatggggtgaaatccgggttgatgtgctgcattgtatgattgcctgaagtaggggttcgccacttgtagagcttctgttatgtgttcgaacatggatgtcgtcatccggaatctgaaaaaagaacacttcattacatatcatattgccacgaaaataaaacaatggtaaccagggtactaccgtcaattgaaaatgtcgtcattgtacacagggatgtctgcaaagtagtcttccacaagcctagcataacctgaagacctatcccgatgaataatacgtctacctggaaccgatcctctatgcacatgtggctttacttcctcgtctgtaatggtagatgcatgaagcatgtgtagcacttgttcatcctcgtacatgcgtttcaaacgtcggtgccacggattagatgaagaagccatcttgtcagtaggatagctgcaacctaaaaacctcacctctgcaaaccgcttgtgttcaattaccaaatccg

SEQ ID NO: 113900 - DNA, 859 bp, Zea Mays
aagattgttgaacagcaaagcaaaacttcatctccaatctctgaaccaccgtacaaatcctacctccaagttgtcaagggtggtcaccaggacatggccacataccccggcgacccgcgcgcacggccagggcgtgtggactgtgcggtgtcggcaaatggagagattaagcgtgagagggacaacctggttggtaaatcggtggtgtgttctcatgatggcaacaaccatgcctcagagcccaggcatgtcattgaagcactatccgagcaactagggatcagaggaaacaagatgaaggttttgaagcatcacccggagcagtacctcatcatctttgaggagcagcaagatcagagaagggtgctgcaccaaagtcgcctccatcaccgtggctgggttttctgctttgctaagtggaatgaacaacgctacagctccgtggtgcgctgggacttccatgttcggctgcggctggagggtgtcccggtgcacgcctggacaaaggacgttgctgcccagatcataggaagccattgtgccatccatgtgttggacgagaagaccatgccacgcaagcgaactcgcacttttgatctgtgggcatggagtgaagatcctagcaagatcccccgcgaggtgagactaaccatcactgatcctgacagggagatggaggagccaaggggcatcaagcacgacctttcttacagagtgcttattcacttggaggtggtggatgatctctctttcttccttggtgggggagctgaacctggccggatgcgtcgctgcatgtttgagtggcactacggtgttcctgaccatctgggagctcgcagagagcgtggtcgtgctg

SEQ ID NO: 113901 - DNA, 916 bp, Zea Mays
cccaccatcatctaatgaaaggatatctgaccttttagtgtagatgaatgtaggtcaatagaagatggtagtggagggcaaagcagtaaaggcttctagtatagtaggaacactatgatgaagaggtcaaggtagagcagagacattaggccaacctctaagaacactagattaagaggacgtttaacatgtttgagtagatttcaccttgataagactagatctagcaatagatagggccttcaattttacatatttctagcatatccttcaacatacatgagttctttccttagtaccaccagtctagattgcagtccttgcccctctttagaaatactaggctagatatatagtttgaaggactttagtttagggcctttatcattaagtgtcctgccccacccatgatggtagttttcactccaccaagacagggagtggcactagaggccatgggtgtatctcaacaactcaccaattcaccaagatagggagtggcactagaggccatgggtgtatctcaacaactcaccattaagtgtcctgccccaccctatgatgctctaactccttagggcgcttaagccacatgagttaggtcaaaagagagtcttcaccatttctaactcctacaacccctatgactagtaccatcaagacattaccttcctcgatcacgtcatcagacccatagtagcagataaccatgagtaagtcttctccgtcctctattactagaaaggcgacaattatagtattagccattgagagacattgagaccagttcaacagctcgacataccttagttcctaacatgattgctaccatccatccacaagactcttaggtttaagtgcttggcatgaaaggggagaggagagagccgagaaggatttgatatctttatagttg

SEQ ID NO: 113902 - DNA, 537 bp, Zea Mays
aaagtggaagcctgtatatcaaagaacaactttgcaaaagggaggtaggtatgttactgcttggaacaggaagtaatagtgacctaaacttgctctgtcagacggtttttgggtgggattcagaatgaacagtaaactgcataagatctcggttcagggaaccttgacgttggtgatctctatgccggtgatctcctcatcgtgattcacgccagtgttaagatacgcgcctggataagagtggatagctgtccacggtgaaaatatcaggggagggggatggatgtggtctctggcgcgagctcatccatttcagccagttgatcccgtggtcggccgggacgccatcaccggagtttgatgttccttgtggccacgccacgtaacagagggtgttaccacgtagctgggagtcgtggcgtgaagccagttactacctgaagccattgctccactacgcgccatggtgaacacgctccagtgaagatcttttctgtcaccaccgtgagcacttccgtcccaaattcgcgaagcaag

SEQ ID NO: 113903 - DNA, 405 bp, Zea Mays
tctggctctggtgggtagcgcaagctgcaacccagcccccgagggtgttgctggtagtgatctggctccgatgggtagtgcgagctgcaacccagcccctgagggtgtccgagcgagctctccttcccacacctccatggacgtccacgtcgggtcgtctccaccatgatttgatggagtgatagcgatgcatgcttctttagcttcgagtgagggagtcgccttggaggttggcgagctggatgccagaattctaatatctgctagtggagctgaatcaaccccagacgatgctcttcagattgttctagttgatcttccttcgtcgagctacaacacagcttctcatgacttgggattgccctcattcttttctaatcttcaggtaacttagctcttttcgtt

SEQ ID NO: 113904 - DNA, 366 bp, Zea Mays
gcagagtcggacccgagattcctggcggctccaccggattcagttgcaacaaaccgagtaagaagacggagtcagagacgctggggggtaaatatggactttgctgcaacgattcgcggagttaggtagttggtccgagcggaagccatggaggtgaatcttatcagccagagtgccgcacacggcacgggtcacttaccccggtcccggtgcctgcgcgctgattgagagatggacggactcagttgcgcgaagatggggaagaagataagcgcgatagagggggcccacacggtggtgtctagctgagatggtgcataacagggaggaggcagctgacgtattgggcccatgtgtcattcacag

SEQ ID NO: 113905 - DNA, 449 bp, Zea Mays
cagctttcatgaagcttcgggataccaccacctcatctttgttagggagaggaatagtgttttcacctttgatcctcactatagatacatcatgaaaatacttgcccttcatggcctcaacatggcctttattcacatttgatttcttgaagaccacgtgacttggcctccacggccggtctttggcatcatctgcgccgctatcaacatcaaaatcctctctgtattccaaatcctgaggcagcccagccaagatctcattggtcattttttgaacattggtcttctccatggcttcgtagaatctagccagtatagcgtcttcactcctcttatctttggccatctcaaattaggtaaagcaatgagtcgaagcttgacaacaaatgcaattgcaatagctcaaaaaaaacaattgtaagtggccccctcggttcaaaaggtttgcc

SEQ ID NO: 113906 - DNA, 341 bp, Zea Mays
cgcagatggcaaatattctcgaatcgctcccatgacgtcatgtcctcatcttgctctagggcatagtaccatgtcgggctgtgctcgcgaggtggtatgaggcgaggcacacccgattcgaggcaagcgtacgctgcacacggaagaattgctcgcaatggtcgagccagttctaggggcccttgtcgtcgtaggtgaagtcgagcttgctgaagcggggaacgcccaaaccaccgagcacaccagcaatgccgatagtggagaacaatggctcccacggaaacgttggcagtggggatatcgaggagggaaaattgatccggtggatgggaagaggggtg

SEQ ID NO: 113907 - DNA, 393 bp, Zea Mays
atagttcctagcagcacaacgacataagtctgagggggagaagccaatcatcagccgataagtttcttgatttcctctccttgttgcctccgatcgacgaacactagggatgcgcttccaacctatatccgggtctcagtttcttagggactgcatgaaaggttgaactagtaccattatttatcgactttctaagaatcaggagaagagtaaggtatggaaaaatttctgaacatatctaaaacatgatatttgtttatgtatagactagctgggtaaatataattttgagctattattgtgttacttgtagacatctagaaatcaatatactaatacaattgagaaataagttttagattttttatagtagaattaacatcagtatttttt

SEQ ID NO: 113908 - DNA, 730 bp, Zea Mays
ggaggtttgagtcttaggaagtcccccattctgtcttgcggtcttccaccattcggttgttgattttccagatttcgagtgaggacctcgatgagtcgggtttgattggctagaacttgggctaggtctaagggtagtggtggaggtgcggggaggtgagtttcactttcttctctaacgacttccccttcagctctttggggaaaccatactccaatcccagaggcggtaggcgtggttttatccgaagccatctgccagggaagagagtcactattatgcacatgcaaattgttttcaaccaagttattttattcattacaccatcacattacaagcataagactactacaggtgggactacacgagagcgttcttcgaggtactagcgagttccttgtctaaggtgtccccaaatgccttgagaagatcatcgaggctgtctagggatacatcttcttcgttggaccagtcatctattctgggggaggtagggctagaggggccttcttcttcttcttctctgtctggcatccctggttagtggtcttcttctggatcttctttttgggggcgagtttctttagcttcttgtcaaagtccatcttcaaggtccgataggcctcacgggtgttggcttcctcgccttctgctatgttgagactctcctggagggatgccttctcttgcttaagctctttgacttgctgctctaggctttccactcggg

SEQ ID NO: 113909 - DNA, 341 bp, Zea Mays
gcttcatgtaaaagtctgtcgatgacttcgtcgacaactttgttagcaatcttcattacatctaaagcctctttcataattggatccgcctcaggattgtatggctccggtggtggcaagaggccggctgtaataaagagcatattggtgaatttcgaagctataaacaaacaacgagacaaaaagttttaaaggatacctataattaatgcgcgttcaacagcttcttcagcttcctttgcctccacttgtgcatcgtgagattctttttcactcttctttatagcttcatcggccttctcacggtcgcccttcatccaaatatcggaatagaatttccc

SEQ ID NO: 113910 - DNA, 354 bp, Zea Mays
cttttgtcttgactatgtatggcccttcccactttggctctagcttgccccgggactctgttatgatggtccttgtgagtactaagtccccttcattgaattatcttgggacgacattgttgtcatgccatgccttagcctgagcttgatacttgttcagggcctgcaaggcgacgacacagtttccatcgataagatctttggaggttgattcgtcaacgtcagggatggctaattggtttgttcagggggatccgtgctttaactcttgcggtgtcattgcctcggatccgtacatcaggcggaagggtgtgaacccggttgctcggcattctgttgtgttcagcgcccata

SEQ ID NO: 113911 - DNA, 390 bp, Zea Mays
atcatagcccacaggtctacaacaacctgcagctccaccgcggcgtgttctccgtcgatcagaacctctacagggacggctctacgcgctggatggtcgaccagctggccaaggttctcgttaagctcagcgaggtcaacgtgctcaccagcgtgcagggggagattcgaaaggtacttatgcagcaggtttaactaaccagaacacccgtacctccattgtcggctctcctctactacatttattaatttcctcttgctataattttggtttagtcaaatttgaatttcaattcattcccttttatatatatcatttgaatgaccaagctctttgagtagtaatgaacaaactgttgttttcctcatcattcccgatcagatgtccaag

SEQ ID NO: 113912 - DNA, 369 bp, Zea Mays
gcagtttctagctcctgtgcggcgagtttcttcgaagcacaaagatctttaatggacgaatccttggccgataactgctgcccaagccgctgaacttcatcctgagatacttgcagctcgtgacaatgatggtccaagtccgacatagtgaagcggtgattcctttccaaaatagtcaaggagttgctagcgtcacgatataacctctccagattatcacgagaggccacaagtgctcgtctttcctcctatgaacaagaatcaacactcagcacccaatcagtaataagcgtggcaaagtcaaccaagggagcttacctcatatgccatcctttccgagtcaagctgagcattgagagaagagttcaa

SEQ ID NO: 113913 - DNA, 477 bp, Zea Mays
ctccccttggctttctggttggtgatttcttttggacgatgcattttcaagcttgacacggattctgttggcttccttctccaagcctccctgggtagatttgcagttggcttcgatgtaactcagctttctgatcgggttttccgattttcagtattttccaaggccgtgggttttcatatctacaattcaaagtgtattgatcgcgcggagttcagagcctttttcaatctctggaatcatggtggcccaaattggattcatgagtacaagaactttattaacgaagaaaatgctaattggtggactatttggggcaagaagagtatttcttacgctgatattgttaggctccctctgtgtagtgctaatgcgatttcgattctcaacaagaaggagtcatatcttgttgggaattctgatcaggcaagaatttctgtcttcagacgcttggggtcttctgctcgtaattcagga

SEQ ID NO: 113914 - DNA, 322 bp, Zea Mays
cccgattggagactaggaagcccgggtagagcaacttcggtcagagttatgccacaggaataggccgaagtcattcatcgtatagcggaattgtcagcccaagtcagtcacctgcagtacaaaatctccgaacgggatacagccattgattgggccgtcaactcgcgttctttcgctttgggactgcgaagcgaaagctctagctcgtgtggcagagcttagtgcatccctcgaaagcctgcaagtgtactgtaatactttacatgaagaagtgcatgtattgtatgctcgactgcactcgaacatgactccagatgttgct

SEQ ID NO: 113915 - DNA, 462 bp, Zea Mays
cgaggctatgtccctgagcatgtctggctagcgctttcagagttgagctatttcttccatcagctttgtgcaaaagagttatctcgaaccgtggttgcagacttggaaagattggcactcgtgttactgtgtaagcttgagaagatatttccacccgacttcttcaatccaatgcagcatttgattcttcatctcccctatgagtcacgaatggggggcccgtgtagggacgttggtgctatccaatcgagagatatctaaagactattcaaaagaaatgtagaaataaatgcaaaatcgaggcttccattgcagaggcatatattctagaggaggtgtcaaacttcacaacaacttattatggtgacaaactgccgagcgtgcataatccacccctcgttacaatgatggcgacaatgaatcgaaccttagcatatttcgaggccaactcggaagcgcaag

SEQ ID NO: 113916 - DNA, 335 bp, Zea Mays
caggtgagtcactctggcacgttgtttagtggtcgcctggtataaactacggtcaaaagctatgacgagtaacgacttttttcacgcctatggttaagtatatggctgctctattacttcatcatgcatgctgtgtatatggctatttttatggctgttatagatttagagtacatggttcttacaccaaatgagggaatatcaacactgttaaccaacgaatggtgcttccaaatagatagataagtggtccataccaacagatgtgatgttatttttactgaaggtctcatgttcttcccttcaaagtatatgaggttgcatgcatattgtca

SEQ ID NO: 113917 - DNA, 480 bp, Zea Mays
aggcagttgtagaggaaccaagctcaacacccttgggggctgtgtcatccttaggaccaccctcaggggctgggttatccttaatagcgccttcagaagctgaagcaccctcgatcatatccacaggagctgggtgaccctggccagcaacgtcaagagctggtgtgtccccgtgatctagatcgccctccaaggtcgaagaagtgtgagaaactgtccaggttatctcttgcccaacaggattgctagccaaaggcatgtcattcgggacctctgtacggatgacagaactttcaacctcaagagtgtaacaccccaggtgttactaagggtttctcctcagtatccacattgtgaccattatcacatgcactttagttggagcaaaaggcacaaatcttgatgagctaaaacttaatcaagtcttttcaccctaagaatcataccctgaccatatgaagcctaaggaagaaaggaaat

SEQ ID NO: 113918 - DNA, 640 bp, Zea Mays
ctaaaaattagtccctaaaacaaacatgcatcttgcggaaacatttctgctacatgaccacgcagaattcaacagtacacataaccaaatgacgcaaagcttggatggatttccagattgccctcctttcttaacactaatttgcaccatttacagaatcagctttagcttacagggactaaccaaggctgaaaaaatatcagcgaatgatgcaaagccagcatcgatgcatcataaacgatgactgaatgagccatgcgtgtgtgtttttataagctgagacgtagtaaaatgtagaagatcccatatagcgctgcctgatcagggttgggagcttgcatctgaagcggcagcaggaggcggcgaaggcttgcttctttggcggctgaacaagttgtgcttgtgccaagcggcagcgacgatcgacaagccactgaacctaagccatttggtcccccctttaggttgagagacctgcatatcaattaaggtatcagaaattagcagatgtagtatattctgtataccacagctgcaatgcaagtgcataagcataagcaacgtttaatgttcagatgtcaataggagagctcatgcacgatgccatgaaggatatggatcatgtacctcgttggagtcc

SEQ ID NO: 113919 - DNA, 336 bp, Zea Mays
attccctctctcttcggttcttagctccgccgcgaagaacttccccgtggccagaggtcctcgggtgagtacctatccaattgtttcatgtttttgcttgctgttagcctcctattgcccccagtatcaactaatcgaattgcggccgaagcctttcaccagaacgcgcgcctgctctgtagaacgccgccgtaaccccttcaccgtcgacccgctcttcgggtcttgtattgcccaaaccaaagcgtatccaggaaccctggtgaacccaggaacctttccctagcttcaatttagccagcctagccttcggtgatccggaacacgataatccac

SEQ ID NO: 113920 - DNA, 363 bp, Zea Mays
aagcatgacagtcgccaaagtcgcctcttcttcttttcgtcaacaggtgcagtcgggcggctaactcagcggggacgctttgggcgagcaccttcaggctttcgagtctccactgctttgccaagttcttgtccaaccgtgatagccatcagctcagcatgggtcgagtcagaagattccccagccagcatactaagcacaacatatatctctgcatcgtctgcgctagctggcatctcaaaatgagtttgcttctcatcattgggaagattccgaagaggggcaatcagagcctcaatgtcctcgggagagggtcacactctaagacccagaccaccatcactagcaggagggttggacaca

SEQ ID NO: 113921 - DNA, 749 bp, Zea Mays
gactcacatttttttaccaatccatagcagttattcatttagtattgaaatgagagagagtgagttctaaagtgtacctctgtcctgtagggactatctgtctggaggtgaaagcttcagctgggccttacagtcttgtgaactgcaaaaatgataaaatttgaaccatgatatgtatttatagcacaggtgattaccaaaatagtcgctgcacacatacataaacgatgctcagtatagcagacaaactcgacacaagaaggaaaaagtaagacatgagcaaaagtgaaaagacgtagcctcaaaactaacaagttcaattatacagctaattattttgcaattgctctatatctagtacttaatatttgttattcataaattgattgcagctgatctataacgacttacaagttttatatattgagcctgcatgtactgttaatagtagaaacatacctttgagaccgaaatccatattatctaatactaatttatgtctatccgagtacttgtaaatgtggatgagccaatctaccccaccacatggaggtttgtaatgactgctacctcttacaattcgtatgtgctgaaaaggtcttatacatgtgaatctaggttcttaatagagtatctaaccagctgaccatatttaggtttttaatagagttgtatagataatagagtagtatagatttaaacacaccatttcttttcatgtttattttgcatgtaacacataattgctg

SEQ ID NO: 113922 - DNA, 378 bp, Zea Mays
cgaagatgctaggattcaattgtcttgcaagcaaagagtacaagatcatagtaaagccatgcattactttgttgtccttctagacaacaattgtcctgtatagaaaacaaatatataaaagtggagagatccgagttatgaaatttcacatattaatggaagaaccattacctccaagtgtacaaagtaggaacacaaaaaacattctagcattagtcatcacacttggaccaattgtatgtcgtaccagacctgtgtttcattgcgcaatgagagccttattttctcaaatcctccaactaagtgcaaggcattctagatgggtctctaaacaggttcactaactttaaagtccatagcatagaatcatgaaaaaat

SEQ ID NO: 113923 - DNA, 430 bp, Zea Mays
ggccgtgaagcggctgtcaccggcgagctcatccgaagcgaccgtggcaaactcggtacggtggccggagtaaactattggtcggaagatatccacggcgatgatatttactcaatcccaagcgttatccaaccgatccgagcacgaatcaagacggcgaaggcacgaatctacgcgcggctcgtcggcggcaaggttctctgaacttgatccgccacgttcattgtaccatggtgattaccatgcagtcagtctgtcatagcaaaatcagagccacttttctcctcatttcatgtgacaaccccatcatcccactgcatcaaagttatatcccaattaaccaactgcaatcttgctatggggaccatgcccaaacttgcgctggatcatgttcaaatctgggttcaaagattgcctcattacactgtca

SEQ ID NO: 113924 - DNA, 380 bp, Zea Mays
actaatgcacctccctatttcatggggaccatgaataacatgcttcatagtttggagcaatttgtggtgatatttatttatgacatattaattgtcttgaagactaaggaaaatcattgaggaggttctatgctaaattgaggaggtgacttttggctttctccagccaggtttttggtccatgttatcaataagaagggcatctatgtggatccaagtaaggtttctatggtagtggagtggcaaagatcatttaatgttaaagaggtgagaaaatttctagtcatggcttaatattatcggagatttctaaaggatttttctattattgctagtcccttatccaagcttacccacaagaatgtgaagtttaaatggat

SEQ ID NO: 113925 - DNA, 472 bp, Zea Mays
ttgtcgcagcggtgcataaacatcgtcgtcatcgtcgtcgtcgtccacaggagagtgagctggggctagagttggtggtgggggatgagcctccagtacatccatgcgtgtaccaagtttagcaactcatcgatcaagccgctcataggatgttgccgcagagtcctggtattttttaaaagcttcggtcatcacgcgcatcatctccttcaattccagctgagagacacactcatcgtcgttaagcttaagccccttgtccttgtccatttgattctttggtcctgtcattgttagcacaaaacagagacaaaaaggcaacaaacaatgtgaaccctacaactatctgtcatggtggtggtggtggtgaaatacaaattatgaagcgtcttaccccgctcttacaacgttcttaccagcactgcaggtggcaaacggtgaccggtgtgactgtccaacgagcgtgggtgtg

SEQ ID NO: 113926 - DNA, 1555 bp, Zea Mays
attttggggttcagggtttattgtgtggggtttgggtttaggatttagagttcgtcgtttactgtttagtgttgtgtttttgggttttgagttttaagtttgaggtttgtgttttggagttcggggtcttgttttagggttcagggtatagggttcacaagttagtcaccggaggctaaaaaccgcgcttcctgtttcagtggccaaaacatagagtgtggacgagaggcatgaaattgttgttcgacgatgaaaacatgtgtcgcgggaggccaaaaatagccttaccggcctccaaggccaaaaatgtgtacaatggttcggacactagtgtactatggtttggacactaaattggttgttcggccatgaaaacttgtgttgtagctcacgcgaggcccaaaacagccttactttactttttagggttgtgttttagggtttggagtttggggtttggagtttagggtttacagtgacactagtgtactatggtttggacactaaattggttgttcggccatgaaaacgtgtgttgtagctcaagcgaggccaaaaacagccttactttactgtttagtgttgtgtttttgggtttggagttgtgttttggtgttcgggttttcgttttagggtttggggtatagggttcacaatttagggttcagggttcagggttcgggctttagggtttggggctctgtgtttagagtttgggcgggaggcatgaaatcgttgttcgacgacgaaaacatgtgtcgcgggaggccaaaaatagccttaccggcctccggggccaaatgcgtgtacaatggttcggacactagtgtactatggtttggacactaaattggttgttcggccatgaaaacgtgtgttgtagctcacgcgaggccaaaaacagccttacattactttttagggttgtgttttagggtttgaagtttggggtttggagttttgtgttttggtggtcgggtctttgatttagggttcgaggtatagggttcacaaattagggtttggggttcaatgttcaggccttagcgtttggggctcgaggtttagagcttaggcttttgggattcgagatttcgggtttcgatttgagggttagcgtttggggtttaatgtttagggtttggagtttgggatttgtgattttgtgttttgggggtcgggttttagtctaagggttcgcggttacgggttcatggtttagggtttggggctcggggtttaggatttaagtgttttgtgtgatgtagctcaatagatgctaaaaacaacctttcccatgccagtagccaaaacatgtttggcgggcgggaggcatgaaattgttgttcgacgaagaaaacatgtgtcgcgggacgccaaaaatagccttacaggcctccggggacaaaaatgtgtactatggttttaacactagtgtactatggttggacactaaattggttgttcggccatgaaaacatgtgttgtagctcacgcgaggccaaaaacagccttacctgtcttagtggccaaaacaagggtggcgaacgggtgg

SEQ ID NO: 113927 - DNA, 877 bp, Zea Mays
agatttcccaagacagcagtaaaaggaaaagaataaaacatgaataggatcgagcgtattcagcccaactggcccaaatgcatgtagaactccacgcgtccgtgtccacgctgggggatttgcaccgaggccccaaggcatttgaataaccagtaaagaatcctttaacactattcgtatgtctcactgacaattacacaaaagtcatcctatttctacttcttcacggctctaggtccccgacggcgcttcggtcgaacacttagccggagtcgtgggttcccatcacaggcgacccctacctgaggtagcaacaactcggacttcatgctcaagtctacccgagcatatgccctcaccaaatttgactggtccgaccataattcatgtttcctcatgaccacggcggcgctagagccccgacaagcccgttccgagaaacaaaacgcggtagcgtttaaattgaagctagggcaagtatcaatgactcactagaggtatggtacacgcgcgaatttgaacggagggagcacgggaggtccggtcgacgtgagggggcctcgagggtgttctacggcggcgatgcgatgttcttgatgccttgctgcagtagtgttcaatccgtcgagctggtgagcttcacttgcactagaggacactaaaacatggctcagagggatacgatattacctgagaatggctgaccccggcgaggtgtctcacggcgacatttcagccgattctggggaaatccggaattgacgagctatggttgatgatcgagtgtgaggggtggtgcgcttggtgcgtaacgagagggcagattaaggagatacatcaatttatagggatcaatcaccggtgccatgaatttgat

SEQ ID NO: 113928 - DNA, 508 bp, Zea Mays
ttcttataccttcaggctattatatgcaaggctatctgcaagatcgtccttcgtcatagcacagagtccagcttcaagtttcggaaaccccatacttctagccatctcccgacagacgaataattctttgttgtctgggaggcagtatagaaagtcatcttcgtttgtcccattgaacactagtgccccctttggatatttcaattctttggcatagtgattagcttcaaaaacttcttcttcggataattttttccccgaagcgtgtcgcacaatatagtcgtatattttggaaggtgcttcgggggcagcagaatcaatttcttcaaccaaaactggctctgacattttcattttttcggttgcctctgtaattttcgtttcttctgtttccaaaggttttaccttggttggctctgaaggaccggcttcagttccagtctgttgcttcgaagcttcagcaacagatgcctcagcagacgcttcagaagtttcagcagtcttcttt

SEQ ID NO: 113929 - DNA, 489 bp, Zea Mays
aatttgccagagaggaaaccaccccagtgccgaaggatgatgaagtagttgttttcaagagtttttttagagcaggactgtggttcccgctgaacgagatgataggagaggtcttgaaaatttttgaaatttatcttcatcagctgacccctaacaccatttttaggcttagcgtcttcatctgggtcctccgaagccaagggatgagcccagatgccaaagcattctgctgagtgcacgagttgcactaccagacgaaggctagggcagacagtctgcataaaaactttggctgctacaatttcgcgtatcgcaaggatacaaaggctccagttcttagctaccgcaccaaatggccaactgtctggaaaggtgaatggttttatatcaaggccgatgagaagaagagagggaaactgatgatgatggttatgtgcccgttggcattaagcttcggaatgaccagacctctatgcaacatgcaactag

SEQ ID NO: 113930 - DNA, 677 bp, Zea Mays
cgaaaacatctcccattttgtctaatctctgttgacgattctgaagatgtccaataggaagaacactctaaataagtcccagaggtcatctacctaaaatagtctgttaatttggatggactattacaaatacaaaatgatgtattctctgctaccattttctctatctgattgtgtaaccttatagcctagagcagaccatagacccatacatgttttatgactgtgcagataaacattgtctgttatttcaaggtgtttattagttggaagactgtagagtgtaattctgaatcagacattcttcaaatgtccaatgtattgccaactcagtctccttaacaaatctaattgtatctattaattcgttcaatactttgggtaccttagcgaactttatcatgtatagctatttgtcagagtccatactatggttaacttgggttggctactatctgtgaataagggagtggagagtatagagttttggatggttactccacttggcctgttatacaagctaaaccagccttttgtgttaagacatgtatgcagatttggtgccactctctcattttcccctcaattattttactcttcatagcatccatttatacatgaccacctacttgatctcatatatttcaaaagcacacaatagatggtgtccgtgtcat

SEQ ID NO: 113931 - DNA, 1288 bp, Zea Mays
cattcttctccttagccatgggatttgttgaaggtggaggcagcaagtccctcatcgctggagtcggatgtagagcagtttgagtcccatttctgctaatatgcgcctcgcccttcgccttcctgtagttcttcttattttccttattctctttcttttcttgttcctagtcattgtcatgcaataaaatgactagacttaccacatttaaagtattaacgctttccctgtgaagttgtgtatcggagggatcgacaaactgcatagcccctgagcccccaagtttggcagagggtatgagaaggtcgttgatgaagacacttggaggggtgtcttcatgtgaggccgtcagcttggccatagtgtcgatggcctgattgtcgcgtcttagtcttaggacgtgacagagctcaagaccatggaacttttcctcgagcttgcatatcttgttacagtaggcctccatcatctcgttatgataggatgccaccttcatgacttagtcttccataagctttgagttccccaagacgtagagcctgcgcacacctaggtcggcgacgatgcggagcccgtttatcaagcctttgtactccgccacattgttagttgccttgaagcggaggcgaatggcgtactgaagcattgacacctcaggggagatcaatacgaccctagatccccctctcgattccatgaacgaaccatcaaaatacattgtccagtatttctatttggtcagagccagtacggattgcacttctgtccactccgccatgaagtcggcgagtacctgggacttgatggccatccgtggcacatagtcaatctcaaaacccaagagctctatcgtccacttggttatccttccataaacatccttgttgtgaaccacctcctcgagcggtgtggaggtaaccaccgagatgtggtggccctgaaagtaatggagtagcttcctcttagcgacgaggatggcgtagaggagtttttggatttgtggtaccacaccttggtgtcggatagtacctcattgatgaagttgacgggcctttatttgcaccttgatggcgtggctaggctcttcatgctccgcgacgattactgtgctgaccacttgagtggttgcgacgatgtggagcggcaagggttcgccaagggtcgaaggtacaagaaccgaagcagtcgttagggaggccttgagttggtcaaatgccccatgcgcctcgtccgtccactggaagcagtcaatttccttgaggagcttgtaaagtggcatgccccgctc

SEQ ID NO: 113932 - DNA, 627 bp, Zea Mays
ctaattttggcggtatttgggtttggggttgcggaattgctgccttcggttcgggtgtatctggtgggatcgggattgaatcgggcaagcattgttaggatctgaaattggatatgagttcatacggtggtgtagaagctttcaacgaattggcgttggatggtttggtgcgcaggttgagccgtgttcttggttgattagccatgctagtacaaacaattatttgcacttcgtccttccaatggtgacaaaatgagatgtactctgaggaaaacataaggggaaaatccctgtttactttaagctacggtggaaaatttattcatgccaccgtatgttgtcttgcctttctagtttcaatggtaacactaccatccttttgctctgatttgaacatgatgtccgcattagtcatatatctcatatagttttcactatccgtgaagcagcatatggaggttgcaacctttggactttgtgtagatttcaaagaatgaaaatggacttcaattatcaagtctagctgacaagcaaaagtgctctattttcagctttcctaaaatgccgccaaaagtagatgctatgcgatcaaacgcaaaaataccgtttttcgttatgtaactgtcc

SEQ ID NO: 113933 - DNA, 1554 bp, Zea Mays
cccgaatggtggaagacctcaggacaggatgggagattttctaagactcaagcctcccacattcgctggatccagcaatccactcgacgctaatgactggctactcatgataaaaaggaagttagaagccatcggattccctaagaaccaacatgttcatctggctgctcatcaactttctgggatggccctatcctggtgggataccttcagcgttgccgtcagggatgctacctaggtagaatttgaagccgcttcccgagaacatcatgtgccccaagggatcattcagctcacggaagatgaatttcgggaactaacctaaggtggaagatctgtcggcgagtacgtgcacaaattcacagaactagctcgctacacgcttgacgatgttagcacagaagccaagaagatggcccatttcttgaagggaccaagaccagaactcaagactatccttgttagccaagatttcctcagcttcttgcacctctcaaacaaggccatacaagtggaaagggcaagggaataagaaaagggtcacctcaagaggaaattccaagtcctatgagctcaatagtaggacaggcaccagagaattcgatcctttgggtttccacccaagggaccaagcttcaacaagccagctagacccactccatcacgtttcagtcagcagggtcaaagctcctttcaggccccctccgttgcaagcaaccaacctccagccaatgcctgttggcactgcggggaccccagtcactacaagaataattgtcctcagttgaaggcatccatgcctacttactccaactcgatgaatggccccaaaaatgccccagcacccgcctccaaggcaccctcctccaatagctagcagagcaagacccagtatcatggcagagcatgagtaaaccatgtcgatgctcaagaggctcagcaagctccgggagtagtgcttggtgagttcctagttgaatttactcccgctactgtacttttcgattcaggagcatctcattctttcatagccactagttttgtggaaaagcatggcattcccactacacacctaaaaattcccttggtcacccaaaccccaggctcagaccttttatgccagcttaaatgctcccaagtcaggatccttttaagtggggtagtgttcttggaagacttagctgtcttgccatcccaagggatcgatgtgatcttaggaatggattggttaaccaagcacaagggcatcataagttgcgcaaataagatcgttcttctcactgaccaccaaggaaagtcagtttcatgtcaggctcagccacccgcccaagacccaatggtatttaatctagcagcaggaagcatatctgtagtagaagcattcatggatgtattccagaagaattgccaggaatgccgccagagagagaagtggagttctacattgatctaattcccgacactgcacccattgcaaagagaccataccgcatggctcccatcgaattagcagaactaaaactccagatcgtagagctccaacagaaagggtac

SEQ ID NO: 113934 - DNA, 318 bp, Zea Mays
ggagaggtgctgcaatggtgctgaaatcccgcataaatcgcctgtagaatcctgcaagaccaagaaaacttcaaacctgcgtgaccgtggtcggaagtggccagctcatgatggcaacaatctttccctcatccatctcaatgccctatgatgtcacaacatatccaagaaaagacatatgatcgatgcttaagatgcacttctcaaggttaccaaagaaacgtgcattacacaagacattttgcataacaaagtccaacagaggcatgtaacccatcaagatcagatttagtagctaacaaagaaggagattttaac

SEQ ID NO: 113935 - DNA, 368 bp, Zea Mays
ttgttatctaaaatctccaatctctcgtctcagttcgagagtggtgttttacttctctcgcctttggtcataacctcatctttgccacgtgcaagtcttgtcttagctctattctttattgtactcatgcccttggttctcctgaacctttatctcttctcttgcactcctgcctattatcgcctttaacccttgtaatatctatatttttaccttgatgcttactttgaaccttccctttaaagcttcctcttttccatctcagttagagagtggtgcttcacctatctcatatttgattgttttccttctttgccggcttgcaagctttttcctaattccatcctatgatgtgtttttggttgcta

SEQ ID NO: 113936 - DNA, 447 bp, Zea Mays
acccttttatttatagcgcagtgtgacaggggcccaccaaccatatagggttgggcgcccccgatcagggcgcgatcaaaggcccaagatgtccgttgggcccatcttggtggagatcaatccaacacggttcacataaaatagctctaagtccactagtgttggggtagtaaccccagtaccaaggcccatggatcaagggaaggaagaagtctgttcgaactaagctcatgcgaaactcggcctggataggcaggccacaaacacatgcccccacctccgcttcgatatgaagcaggggtccaatgaaccgcaaagagatcgggcgcacctaaagctacttcctccagtcaagctaaaatacgccaagctcaaggatcgaccggacctcgtcagtgtcaaaaccaacatcccgcggatgaagccaaccctccaccgtagaagttc

SEQ ID NO: 113937 - DNA, 338 bp, Zea Mays
ccggggctgccacaagctggtgtgcctagaggtgtagcataatggggacgtgtactacttccagcatgtccttggttagtagcctttcttttcatctcaccgagctcgactcgcttgtgctctagagctatagccttgtccagcagtttctgggaaggacgtgaatgagtgagacaccagatggtattggagtggcccgatcaatccttccaagaatagttcttgctttttctcatcatcatcaacttacccaggagcatagagggacaactggatgaatttgtctctgtattcgcttactgacatgcctctttgtttgagggatagaaactccttct

SEQ ID NO: 113938 - DNA, 711 bp, Zea Mays
gggcatagtgcttagcttcaaaattttcttcttcagataatctttttcccgaagcgtgtcaaataatataatcaaggacttcggaaggcgcttcgggagtaggagcgacagctttttcaggcagaatttgttctatagcttcttcttccgctgccttttctccagtttccaaggatttctctttggcgggctctgaaggcccagcttcggcgtcggcctggctcattgtagcttcggcttcggtcagctttgtctcggtttcaatttgcattttcaaagccttgacaattttccctggagtagagcttgaagcttttatcgtctccagcacatctagtacactagccatcctttttctcttgggggtcgctgctagacctttttgtgtcttcggcacctccactcctgccgaagggcttagaacttctaatgttttttacccttcgattctcggttctttaattttgtcagtcttcggtattgcagccggctcttcaatcctctgtgtaagagaaagtcctttggcttcaatagctgaagaagtctcaccgccaaagtcaggcactatggtcggttcaatgtagcacggtcggtgagtaaggaccttcaactttttcctcttcggtgtgggctcgcttggagcagccgaagcagcagccttcccagaagttgcaccctttctttttttgcccccgcgacgggtagcgataa

SEQ ID NO: 113939 - DNA, 934 bp, Zea Mays
ggaagctttaccctaaatagggattaaaggggtaaaacctaacccaaattgagaaaacctaaatactttagggaaatagttataaaatacctccaaaaataaagttgaatcacatttatacccctgggataccagaaaccctaattggaaccctggaaaacccaaaaactaaaccctaggggcctatgtgcaaaattagtccacttttgggactaaagtgcaaaaaccaagttaaataagtatcttaaatcatttggttcacaaatatgtggacttgaaagccaaaccctaagttttggacttaaatgcaaaatggacctcatttgagttctatactaagtctgaaattcagtgttgaaggctcaactttggggctttgaaactttcagaatatagggatttttaccctaggtcaccacatcaaagttgtagcccaatcatagaaggacaattttgcttaagagtgcaagccatgttcttgtaagaaaatgggagataatcatgcccaaactttggctgtcaggcggattaagtctgaaaatcagactgacagtgacattggatcatctttggagacagtttatgactaatctagtaagaatttgcccatggctgctgtaacaaagatgaagatggtataatggacaacaactttgctgcagaacctcggataggttgccatggaaatttgagagaaaatcaagctccaacttgctctgtcagtcgactgaataccctttcccatggtacagtgtctgcaccggatcagaccgccagcgcggctgtcctcaccgcccacgaccgatcttcgccgtgattcgcgccaccgtcgttgtgattcacgtcaccgatgacccgataaggccgccaagtaaaagccatgcacctagggataactccggtgactcaccgccgtacccctcgtgctctgcgg

SEQ ID NO: 113940 - DNA, 783 bp, Zea Mays
ctagtttgttccttttatcttgttgtgcttcgataggacacgttttagccagcaattgtgacttgtgctttggacacttattgaacttcgctaatctgcactcgattttgttccacattcacatacatattgtgcctgtcctacagctccacatactatatcttctgatcaatacatatttgaccttgcaatcgcggtttcactacctcttggtaagtatcacgaaccagcctccgattgtaccattctttgcttgtatttcatcagacaattgtaagaccttggtaagatacattagagcgtgttcctgtgttccacccaagaggagcgtgtagtgagattattagggataaccttcaccgtttgttcctatttttgtgtttcgatggcaggcgacgacgaagaagcaaggatccctacagactttgatgaatgtgttagccgccaagatcttgaggcaaacaacaagctcctaaaggagcaaatggaggagacggtccacaagtcagtgcatgatgccttcattaacatggaccttggcaggacttacgagaggctagatcgacgattgtcccagatcatcgacagacttgctgtgttggagacacaacaacaagcaccaccaccacctcctcgtccacgtcttccgatgatgcggtgattgatgaagaaggtaattatgatgaagcggccaccagagatttgcgcctctgtcgtcgtcttcatcaaaacacagaaggtatgccacaccggcagcaaggaaataacaatcgtgctcctgac

SEQ ID NO: 113941 - DNA, 534 bp, Zea Mays
attgtctcgctagttggtgagggcaatcccaggctgaacagcatggtcagccaagctgtcgtgctcaacaccgagctggaccacgcccttgatgagttgggcaaggttcgggtggaggttgcggaattgcgtgctgagtgtgcagcacgccactatctggatggtggttctcccgcccctgttgggattcagcacccttactgctcaccgccccgtggtcgcttcgagtatggtacccctgactgcatgactcagatagatttggatccatagatcgacagagtcggagtctgtaataataattaattcagtatcttagtcttagtcggtcctagttagagttagtctgcttatcatatgttgtatgcttgtcgtgatgaacatgtaatgaagttggctctttgtaatgattgtcatcaaggtgtgggtatcccgtgcaacttggtgtagttattaataaagtcagttatttagttgggtaatccctttatttccactttcctctttatctgagaggctgtcagtgaagatgat

SEQ ID NO: 113942 - DNA, 500 bp, Zea Mays
ccgggattgttgacggatcgccacgatttgtgcaccgtgggcagcagataagctcgggctggtaaatatctggcgcccggattgagttgagcctcgtggcggctaagctcgtcgtacttcctccccagctcatcggtcgaacggataacctcgccgccatcgagctgttgtcgttgcgcgccacgtgcttaagcactagtcctcatcgtggtgactcacggtgtgcatgttcagtgatcgtcggaccagtgcggctataaatagcccatgatccgcggcaaggtatgaacatcacgcacaccgtaagttgatccgaagcaaaaattcgtgctgcctctgccccctcctcccaaattggttgtgcacagtaaaaatagaaccccttatggccgtatagccccaagccccgccctcaattccactcgtgaacgccgctgcgccattttcccccaattcagtccgccgcgccgccatgaacaactcgtccgtggccagaccac

SEQ ID NO: 113943 - DNA, 469 bp, Zea Mays
agatcttcccccgtcgtgggcttttatctatagaacttgttatatgtccccgccttttgggtgtgtggcctgttcgagtaacccgaatcaagttatcttgtcctgacatgttttctctatttctatggttgcacatgtgcgccaggaaatctggttagaaaattgtatccctgaactcgtgtatttctattatgataataatagaaatggagccagcctcgcatcaaagagaagttcttgctgaccgaaatgatgtcgtatgtatctatcgaatgtctatccttgaacagtagaggcacttagaaggggtggtgttaggcgtcgtgatgatgacaagtggggtgagtgtcgcgagggtttggggtcgggtggcatcgcacattaggaatgaggtagtggcaagcggcatcgaccggactggctcagatgacatcaaacagaatgtgaccaaacagatagatgcagggac

SEQ ID NO: 113944 - DNA, 892 bp, Zea Mays
agcagcagctcgacgacgaatttgggtttggaggaggtcgggatatggcaggacgggtagtaccagtcaggcagtaaccgacgcggacgcgcaggaggaaggggcggaggtagaagatgtggaacccatggtcgtcgagctgctgcttcgtcctgcgccccaaatcagcagtacgtcgtcggtctccttgatccaccattctacaacagaaattgtaggggaatggatgtgctgattcaactggtcatagaatttttgtgcagatctcagcatataagtgcatgatctatggcaacgctactgctattctgctacctgaacctgtcgtactgctactcttctactctcttgtgagcgacaaccaaaggaagctcgttgctactactctactacctaaaccagtcgtgagcatcacattacgcaaatgaagtcacctctgctctcgatgtcaatgccgtcaatattgtccagatcgatgtcttagcatggtttacttcatactgttccagcagaactcggttaatcccacaaaggaaaaatgacatagtttcctagagatatcaattgcagtgctaacaacaagcagagaggggaaaacaccaaccaatcattgaggtggttgccctgtatgtgtgattgcacatagtagttcacatgatttgttagctccacgatccccgcttctgggtttactcttttgactgctaaatcaccaacatttgctagtcttccctgagcaaatgacaaagatgacaaattcttcgattaattcagtaccttgtagatggtattagactgggtattagactgggtaagtaaaaaggcaattaaaatagtaaataaaaatctatgactctttttagcaaaaactatcaacgtcaaaagcttgatg

SEQ ID NO: 113945 - DNA, 565 bp, Zea Mays
tctaccttgtgctgagttctcatataataatagttaccaggccagtctgaagatgtcactgttcgaggctctatatggtaggaagtgcaggactcctctatattgggatcagactggagaaagacaattctttgggcctgaattgattcaagaagcagaggaacaagtccatataattcgagagaatttgagggtggctcaaaccaggcaaaagagctacactgataatagaagaagaccactggaatttgaggaaggagactatgtgtatctcaaggtgtcaccacttcgtggaatgaggagatttaaagtcaagggaaaattgtcctctcgctacattggaccattcttgatctttagaagagttggagagatggcataccaactcgagttaccggatagtttatcggatgtgcataatgtgttccacgtatctcaacttaagaagtgtctccgtgtccctgaggaacagttaccaatggaagagctctgtgttcagggtgatttgacttacatggagtatcctatcaagattcttgactccttgactcgagttacaagaaac

SEQ ID NO: 113946 - DNA, 312 bp, Zea Mays
ccggaatcccgccaagttcaacatccataagcacaggcagggcacctccaccagaggccaacgcctaacgtgaccacctcctaagatgcagtcggaggggggtatggaaatggaatgtccaccacccaaggcacgaacagtgtgttccacagaggggaagaaagctaggtacgagttggacgcaacacgtcagatttggagcgcatcagcctcaaagctatacttcgaggcgagcgcctctagaatcatagtggtgcagtcagaaccctcctagccaaggacattgacaatcaatgcatgatgaagatcctc

SEQ ID NO: 113947 - DNA, 392 bp, Zea Mays
tgttaacttcgtctttaattcttcaaatgccttctgttgtgattctccccatttgaaaggtacttcttttttggtcaattcattgatgggagcagcaacagtactgaagtctttttcaaaccgctggtagaacccagcgagcccaaggaaacttctcacttggctcacattctgtggaggcatccagtcgcgtacaactttgatattttcttcatctacctccacaccttgtcctgatacaacaaatccaagaaacactaccttgtcggtgcaaaaggtgcacttctcaaggttagcatacaagttttgttctcgaaggacaacaagtacatatcagatatgttcaacatgttcatcaaggcatttactataaattagtatgtcatcaaaat

SEQ ID NO: 113948 - DNA, 756 bp, Zea Mays
ttctctatcctggcgggagctggtgctgggggagctttcttcttcctctccgtctggcatccttggctcgtggttttcttccgaattttctttgtgggggcgagcttcttaagcttcttatcatagtccatctttaaggttcgataggcttcacgggtgttggcctccttgccttccgctatgtcgagacactcttggagagatgccttctccttcttaagctctttgacttgctactctaggctttccacccgggagtttaggtgggtgcagtgggaggagagatcatcgtagtgggtatcgagggtgtggaggtatccggccatgtagacaatggtggggtcatcctcggtggggtctctccctgacagagcctgaagtcttttcctccaggtgggggtatttttgttgctgggtgggaaataacaaaggggggtttcaaagatctctctgctgtagttttggcatagctgtttaagggcctttcgggcaacactttggcaagtgtctgggaagcggtgtccgatgaaggtgacttggaagggggtggtttgggtagcttcggctttctcccaggtagactgccatagagcacttccctattccattttcgcggtattccttctagacgtattcgtgcttcttgcggatccccatgcgcagtccgcaactccgtagaaggtgaggaaagccttcctcctctgagcagtatgatgtcctaatgacccaagggccttccatctggtagaaggaaag

SEQ ID NO: 113949 - DNA, 369 bp, Zea Mays
cacctcgccgtggccagcgcgatacaggttagttcatccctgctactcttgtgtttgagtgaccttaggtgctcgtgatgctcgtcgacccatttgattgaactaaattgccaccaatcaccgggaacacgttcatctgtccgcaacaccctcggtcaccgcggccagagcgaattggatcaccatttctgaaattaagttaggggaagtgatcgggaatagttcaatcctatgtctgctactcgggagcgccggtcttggcttcctccggccagtctagctcgccgaagcacaaccctgcactgctcgccatcgtggacttcagtcggtaaaggaatagaacttcaagggccttagtgcaaactgtca

SEQ ID NO: 113950 - DNA, 872 bp, Zea Mays
ggagatgagactgaagtaaccgagacatcacccatatcagaagtgatgaggtggtcaggtctagttgtgcaagagggagctactgccgaaggtacctccaacgccgaagctgaacaagctgtggccaaagtcgaaagtgataatgaaagtgaagaggacgatagtattatgagcccaaccaaacctagtcatgttgaatttggaaagtccacagtaaaaggagatgatctagttgtgatgaagaaactaggttattttggagagaattaagatgaattgattcactttgctagagaagaagtaattccagagccgaaggaagatgaggttgttgtgttcaagagcttctttagggcggggcttcggtttcccctttacgatatgataggggaagttttgaagaaatttgagatatatctccatcagctgaccccgaacgctatcgtcaggcttagcgtttacatctgggctcttcgaagtcagggaaagagtgctaatgccgaagggttttaccgggttcatgaacttcattatcaagcaaaggcaagggctgatggtctccataaattttttggatgctacaactttgcataccgaaaggatacgaaggcccccgtgatcggctaccggaccaagtggcccactggctggacaagtgaatggttttacatgaaggctgatgagaagaagagggagaagctcatgagcatggtaatgagtcccttgaagttgaacttcgacatgactcgacccttgtgcaatatgcagctagagtctccttgccaactggctgaagtggaatttagggtcgaggctgagcacattagcactagggacttagtgcaagaatatttagcaaacagaacattccc

SEQ ID NO: 113951 - DNA, 431 bp, Zea Mays
ggagcactaataatgtgtcgacgacgatatatggctgttccatcgttgttcttgtaagtttcatacttaatttggcaaatcttttattagattaatcaattgctatctgaaaatacatacatatattatgggtgggaatcattaacatatgattctcatgatatatatatagttgtattatttggaccacttgcaccatgccgcagctcccaacaacaaaagtggcacaccgcgcataaagtattttaataagaatatcataagggcgctatcaatggctgataagcataagcctcgccagggtggcgaaccatttggtgtttgctctatgagttttcatttcttctatcaaaattttagcttaatgcacattttttcgattctatattgttgtttgtagtgtttacattttgcacaatacaaggcgtcat

SEQ ID NO: 113952 - DNA, 408 bp, Zea Mays
gcaaacttggggcgacagcagaccgagggggcagaggcgggagctgagagatgacgcgatagccgccgcggggaggagggagcgaggacgggacaaaggcagtagtggccggagggagaggaacacggacacagcacgctcagagctggattgcagaaaatattttcggatccgaggccccggcacgatgtgtgtctgcaagagagagaggattggacggttacaagatgcgactgaaccagcacagacggacactatttttttgccgacgtgggcagctccatagctggatatttcccgtggcttttaagactttagaagagtcggcaggtatcttgttcatggtcagttgcttgtgtgccatcgtatcgtgggacggcttcacattatctgcaactgtaccaacca

SEQ ID NO: 113953 - DNA, 715 bp, Zea Mays
gtcccgcgaaggatgtaggcattttgaagtcttcgaccgggcgatcgaggacttcgactgtgaaattttccaggtcgaagatgatgtgttgaagcggtccactaggcgctttataacaggatgtggggtcctcatggtcgaggcactgtcctggagagggccgatcgagcactggcacagtttttttgactgactgaattgttttgttgccttcacagatgatgaatgaagaagttgatgacctcgccggtcttgagagctcgatgactcggatgggtggcatggaagaggtgggagttgaagggcactcagcacctaaggctggttccggtgaagacccggcagcgtctacttcggcgcaggttgaagaaatgcgctagggattttaggttttaggtgatttactttttgtgatactgaaggtcggttgctgcacaggttccgatgtctaggcctacgcaagaaaaccctgatgaagttgatactaatgttttgacggctgcaaatgcaacgtctcttaatggaaatgtgtctgaggggtctgagcttgggtcatagtcttaggacggggaggaatttgggagtcctttctcgtgggttgaggaatcttctgaggaggacttagattattttgttgcattagatttggccacgtcggggagtcctttcttgtggattgaggaatcttctgaggaggacttagattattttgttg

SEQ ID NO: 113954 - DNA, 405 bp, Zea Mays
aggagaggagacagggacttgcgcgacaaatacgaatgggagcgcaaaggcggaagacaacgtagtcccgcgcgagaaatacgaatgggagcgcaaaggcggaagacaacgttcatgggtcgtgtgggatgatgcccagaaagagccaacggatgtcatgtcccaacacctatttcactggcgactaggtgcaattgtaagaattgggcccaaatggcagtgtaatagggattgtaataaagctttgtcatagagcaggggaaaggcaggttagaacctatgaaggacagaacaaaatattggagttgttgttcagggtgatcggcgatcatcggccataacatgatcatgtttctcgagtatcgcttgtgtcacatttggcattagagctaggctagagcccac

SEQ ID NO: 113955 - DNA, 546 bp, Zea Mays
tgaaggatagaggtatgactgctgaggctgtggttgctgatttcattttcaagaacattcaacccttcaaggatagggcgtaccctgcttatttgtatagtggtgtcaacgattctacccgggtcacgaacaggaaaattcccactgaagatctgatgagccgactggacatgatcctgaggggtagagtttcaaatgctagtgctcctgtggcctattctgcctggaacctgccaccacttaggccattttccgagtttgtgtccaaccctcctgctcgtgatggtagcctgggtcctagagtgcgaccctcttctgaggacattgaggctctgattgccccacttcagagtcatccagaggatgagaagcagactcattttgacatgctagctagcactgatgacgtagagatagatgttgtgcttagtttgctggctggggaatcatctgactcgacccacgccgagccaatggctatcacaattgggcaagaacttggtgaatatgtggggactcggaaacccgaaggtgctcgcccaaaat

SEQ ID NO: 113956 - DNA, 636 bp, Zea Mays
aatgccttgacgcctttgcatatgaatcaaattacctgtcaaggcaatatgtgcttgtagtgatgtggtgaatcaaattacctaaccggccactgccaattcttgtcactttgtcttctctgtttttgaagttcttgttttagtaggctctatggtttgacgtatctcagaattttcatgtaattttctccttttttaatcatttcttttgggcataaatttccatggtcctcaacgcagcagaaccatccctgccaaatcatatcattctttttctcctgtgaatgaatcgacacctctatgggttctctctccaacactagtgataagcaatcttcagcaggtatatagcaatgtgtttctgcacaactgcagagttcgaagggccattttcaattgggtgcttggcattctcatgaaacatatgattttgcacagcattgactccatcctgaacgacactgtcctaaggttgtgtctgaacagcatcttgcaatccactgcggcctaaaacttcaactttgactgaaaaataattgtgataaaatggagaagactgatggatgacgtaaacaagaaagtgcttcgcgtattttgaattgctacaccagaaccgatggaattaatactcccaac

SEQ ID NO: 113957 - DNA, 328 bp, Zea Mays
ccgtcttcctctatcgatgtttcagaaatactgaaggtaatgactgaacccttcctggttgcaatgctaagtcccctggggtcatatttgactagcctattgcaatcaaaggagaagggatttgaacaaagctcgggaggaaagaagactgcttcggctaccgagggaaatgtcgggggtcagaagaaacgacgaatgatggacgtaatgcaagccatccaaaagaccccgccctcgacttcggcggaaaaaattgttgtgcgtgctaatgccgaatatactaccgaagctaaagctaatgaagccacacgtgaagctcagaacctcg

SEQ ID NO: 113958 - DNA, 558 bp, Zea Mays
gctggtttcggtgagttcattttctatttttccgtatgtctttataagttgagaaatcgagaagagttcaatgaacactcgatgctctgcaatataaatcctactagaacatggagcgcccatacgggcgccctatcgggataacagggtgttgtagaggaatttaattaactctttatcacataagttccttattcagaaaaccactaagaaaaaaaactcagaaaatgaaacaagcataaaccaggaggcagtgttcttaaggcagtaaggcgtggcgaggcgttagattacttgcttggttccatataatgaaggatttggcgaaggcgcccacccagaggatgagctgacccactggcaacaggtttgatttctaataactgccttttccgcgatgaaagaaattattttggtttcttgctcttatgaagtataacaataatgatgatccaaaatgtcaatgcatcaatctggcaattttgctaactgtcctgtgctttataggacgcttttccaccacgaaagaaattattttggtttcttgctcttatgaag

SEQ ID NO: 113959 - DNA, 446 bp, Zea Mays
aacagattttgatcaggcccttgaggatgtcgttcctgaagatatgctgtcggagccgactgctggtgacatgatggatgtttgctctgaaattccagacgtgggattagaggtatcccgagcagtatctcgcgcatcgtcgactttggagggcagttttcgatgtcaagaagttggtcaagattgctcgactcccgaggtgattgaggatccttcagccttagaggtggctgttgcagaaaacccaacccccgagggtggtgctggcagttacccagcccccgagggtgtcgccggtagtgatccggctctggtgggtaatgcgagctgcaacccagcccccgagggtgttgccggtaatgatccagctctgatgggtggcgcgagctacaacccagcccccgagggtgtccaagtaagctctccttcccacacctccatggatg

SEQ ID NO: 113960 - DNA, 356 bp, Zea Mays
ggcagccctgaccgtgaccacaacgcgatgtgcgacgagtgagggctgtggcgggggttgcgaccaacgacggagagccacacaaagaagcttgtcggcgatgttttcctcaaggttcgctcgctcattccttccttccttgtgttattggcgtgtgatcctagctagcgctctcttgatttcatccttatccacgtgaatcctagatcacactgcatgcagatcggattactgtaaggccagaccagctgctcgcattcactggtgcacggtgtgggagctgagagctccattcctatggtcgggccccacctctcttgggcccttgtgcagatacgtagaggtagtgtccccta

SEQ ID NO: 113961 - DNA, 543 bp, Zea Mays
aataaaagtagcacaagatattcaaatacacggtagcgaactaaacattaaaatgtaagacaccataaacaaccacacgcactagcgctaactatctacacgtcatcgagcacacgtaatcactaccactcgaaagatgacgacacttaccatactcaaccaacgcaaacacaacatcacccgtataagcatttacaacattcactttaatcatttattagttactttattattaaactacttaagtacacataagttctctatgacgtgtatatttagacagacttagatagaaagggatagtcatttaatcggggttttacaattattcacaatattttactgcaagcatacaccctagagaacacacatgatgacatagtttaatcacaattacaaattatactactttaatgacgttggttacttagtagtattagtagaaagccaaagacaggacattattcattttgtttccctaatatataactgcacttgctaattgttgattaagctaagctacttattagaacttaaccaatt

SEQ ID NO: 113962 - DNA, 1435 bp, Zea Mays
ccatccgacgaggagacgatgagggtccgcatggacattctcctcctgctaatccttgtcgtccccttcctcgccgcatcgacgtcggcggacgggaaggccggagacatgcagcggcggcggcggcgacaggtcctgctgcgggacaaggcgactctgctggacctgaagcaggggctcaggctgtcatcttcagcggccctggcggactggaacgagtccaacggcgacgtctgcggcttcaccggcgtcacctgcgactggcggcgggagcacgttgttgggctctctctcgccaacttgggcatcagtgttgctattccacgggtcattggcaatctctcgcacctccggggcctcgacgtgtccaacaacacaatctctggccagataccgacgtccgtcggcaacctcacgcgactggagcgcctcttcatgaacaacaacgacatctcgggcaccatctcttcaatcttcagcaacctcttaccactccagaggctccggaaactagacctctcctacaatagcatctccggtgccattccgctggacatcggcagatttgggcaactccaaagctttaacatcacctacaacaacatctccggcgccgtccctccgtccatcggcaacctgactctccttgagtacctctacgtgcaaaccaacttcatctctggagaaatatctctggccatctgcaacctaacaagcctcgtggagcttgaaatgtccggcaaccacctcacggggcagattccagccgagctctccaacctccgcaacattcaggcgattcatctcggcaccaacaatttccacggggggataccaccttccctgtccgagctgacgggcttgttctatctcggactcgagcaaaacaacctgtccgggaccatcccaccagctatcttcctgaacctcacagggttgcatctcttcgacgtcggcagtaacgatgtttctggcgagatccccggcgccatctcgagcaccggctgcgcgttcttcgtcatcaacctctactccaacaagctccatgggacgcttccacggtggatcgccaactgcaccgatcttatgacgctagatgtagagagcaacttgctggacgacgagctgcctacgagtatcatctcgggcaagaaggggttcaagttcctgcatttgtctaacaaccgtttccagagccatgacggcaacagcaacctggagccattcttcgtcgcgctgtccagctgcacgagcttgcaggaggtggaggccgccgccgtcggcatgggagggcagctgccaagtcggctgggctcgctgctcccgagcaacatgtggcacctcaacctggagctgaacgccatcgagggcccaatcccggagtctatcggggaagttatcaacatgacgtggatgaacctgtcgagcaacttcc

SEQ ID NO: 113963 - DNA, 561 bp, Zea Mays
cttgcagcatgtggaccgggccaagaatgaggaggccgacgcattggccaaggctgccgccagaggcgagtccctgcccttcgacttgttctaccatgttatcggcacgccagccgtccggagccccgaagggctccaaataaccaatgacagcgagggccaccgcatagtcaaccttattatgaccgaaaactggcgggcaccaataaccctgtttctttaggggtactaccacccaaacgacatcaacaagaccaagcgcctcaaacatcgaagccaggacttcgcactgattgaaggccagctttacaagaagggggtcagtcagccaatgcttaaatgtgtcaccgagactgaaggcgtccaaatcctgcgcgaagtccacagcgggacttgcggctctcacgcagggccaagggccctagccacaaaggtgatccgtcaaggcttctactggcccacaataatctgcgccacaaatcgggtcacaaggtcatgcgaagcctgctagaagttctctcctcgatcaggaagcccttcgcaattcacgaaactaatcgc

SEQ ID NO: 113964 - DNA, 488 bp, Zea Mays
attccttacgccaactggcagtggaattggacggtttgcactggcgattttatgaaatgaaccaccagtgcaaatatgtttccactggcgattcttgaattgggcccaccatttttctgtcactggtgcgtgataacttaaaccgcctgtaaaactttgtgcgcagagctattttgcaccagtgaaaattaatctagcttaatcaactattactcttgccaaagctaaatgaagcgggtagtaatcggacacagccacacagggtgtgtaggagacaacacgccggccacagtagcacagtttacgttcgtggactggtgcaagacatacagatcaggatcactttgatcccaaggaatacaacaccttttccagacttattggtgcaatagcgaattctgaagcactggcacctctatcaccctttgaagcaggacttcatattagtgtgggcagcctcttcaacgcaagctgcatatccaaaaatt

SEQ ID NO: 113965 - DNA, 406 bp, Zea Mays
aaatatttctagacacagagaacagtccagtggaccgcgggttgattttaggaaactataggggctcttttgcgaagcatacaagccgaagggagtatcgctgtactggggccactagatcaattctggacggcccggattaggccgtggcttttatgaaaggggtatgttgaacccaccgtgggatcaagatcggatgctcacaattaactcgaagctcatccgaatcagtatgcaatcacgatcgtacgatctaagatctatggttaacaatgcacccagcaagattcaatctgaaccgcccatagccgatcgaatggccaggcggtttcttctacctacgcaccagcgcacgacggttgcgccgctggccacgaatcccgagcgccaccctccctcagggagc

SEQ ID NO: 113966 - DNA, 337 bp, Zea Mays
cagcaagtcaaagagcttaagaaggagaaagcatctctccaagagtgtctcgacatagcggaaggcgaggaggccaacacccgtgaagcctatcgaaccttaaagatggactatgacaagaagcttaagaagctcgcccccacaaagaaaatccggaagaaaaccacgagccaaggatgccagacggaaaagaggaagaaagctcccccagcaccagctcccgccaggatagagaatttatccgatatcgaggatatgtccctcgctagccttgatgatcttctcaaggaatttggggacactctagaaaaggaattcggtagtacctcagggaacg

SEQ ID NO: 113967 - DNA, 421 bp, Zea Mays
aaagaattagataacgtacataaattgtaagtgacggtacttgttgttcatttgctctatacataagtattcaaattatcgttgacgataatcgttgtttgttacgtacaacgcttaccgcaagtacgtggatgatcttgaatgcatcgatctaagatccaataaggagaagaagtggtttgccgaaacactgcaagtcaggcacaactttccgaatgttccgaagtgctttatgcgatgtgtattctcgcgacatgttgcaactagtgatatgataccgtatatcatgcaatgctctaaacgacctcatgggtcagtactttgcggatactacatctgcgagtatctcagagcatgcggcaaattcagcaccctctatagacaattgaagaagtccctaaactagtgggaaaaagaaaat

SEQ ID NO: 113968 - DNA, 901 bp, Zea Mays
actagtaggtaccacattactaagtcaggaattcttctatgctttgcatcattgcctaatggagtgtcctcttggggttaagaatcttgtaccacctttttacacccttctttctcttgttccatgtggaggctccatcctagttgtaaaggtcattgttcttgtaccgactagtgccacacttggggcatttatctagtgacttaaatgtatcacaacagtaaaggatatagtggttcggtcatgcatggactttttcaacccccattatcagtggacttataatcttctttgcttggtatatgggggcaggaactgagtttggctatggcaggaaccatgaaaagagatgcaatagatcattgtaactacaatctgaccaaccatacttagcttttaggatgagcaactcaagcacaaagcatagcacagtccattgtgctcgacaacccttttcaacagcatacaaagtcatgttcgatgctttttcaccctttctaaaatttctagaccttttgtgctctttagtataatctctggtccaagggcctgaagcatttcctccaaataatcgacatcacctttgtccccaacacgtcctccgccatcattgccactagcgttgtcgataccatcccaaccaccagcatcaccaccttgttcaaccatccatttgtgcatcaagcccagctacatattggtccaggtgttggcagtccttattgcctaaatttaaccaccaacactcgcataaaatccattcatacaaatgtcgcacccggatttaaggacaaatccaaatgcacaaatatagtcacatatagtcacaaatatgataatatcaaaagacaatgctttataataacatacgtagtatagtcagagtataaccttatatagc

SEQ ID NO: 113969 - DNA, 775 bp, Zea Mays
ccctaatttgatcaaggagagacgtacatttgactgtattaagatagggacccaccaaaccacggaaagcaggcaagaacctcatgtacacttgcttaattggtggtcacagaaccatctgcaccgccaccagccatgaggtgggtgcaccaccggtgcaatgccaaggctcaaacccaggacaggagcgccacaccagggccctctaacttaactacattacaggaagaagcgacaaatccacatagttatcttttaactagtacgtgattggaattgatacgattgggggttttatatgaattttgatgagtatatgacaaatggcaggtgtgcagcatggttggagaacagaacaagggagacatggttcgataaggtgaggtggtgtcatgcatcacccagtctttttttacagtcaatagggaggaagatgctcatagcgcttgttttcgaatccgtatgtgggctaaaaatgcacatatacacgtttttgtttaaagaaatttggttgggtttagggaagatttgagaaagcaacaaagaacagaaaggaagcaaaatgggatgaagaaatgtcctggttcaaggtggagatcagtaagtgccagactcaaaagtttaataccagcaatgatgccaaagatccataaacacagcggcgggttgaacaagttcaaaatgaaagtttatgtgctgccaggctgcttcgttaaaggtaggagcagtggagggagctcataattctataaatagaaaataaggataataaaac

SEQ ID NO: 113970 - DNA, 1046 bp, Zea Mays
tggccttcgcgcagacggcacgagcaagacaacactccaggctcacttggatgcggttgggcgatgctaacactaagttctttcacatgacagccaataatagaagacggaaaaatttaatcagatcattaatgagtgatggcaaactgctaacgagtcaggaagacaaaatgaatgaggtccaacatcactttagccaggtgctaggcacgacaggtaggaggagcagggctgtccgttgggaccatctggggtacacccctttcgagttatctgagttggacaacttgattgatgacagtgaaatcaagaatgttgtgatggggcttcaatctgaaaaggcccccgggccggacgggttcattgggctgttctacaaaagttgcttcgagttgatcaaaaatgacctctccatggcaataaatgattttttccatcacagatccaaaagcctgcttcgggtcaatgaagcaaacatcatcctcataccaaagggggaaaacacggacataattgatagatttaggccgatcagcctgatcaatagcttcatgaaaattataacaaaaatcatggcaaataggctagctccaagaatgaacgaaattatctccagtgctcagaacgctttcatccagaaccgttcaattcacgacaattttctatacgtgcaaagggtgattatgaatttgcataagaaaggtaatccagctctcttcgtcaagctagacatctctaaagccttcgacaccctaaattgggcatatctcctagatgtgttaagagcctgtgggttctccctgaaatggcgcaattgggtagcggatattctgagatcttcatcctcaagaataattatcaatggacagcggtcaaacgcgatcaaacacaggcgtggggtgcgacaaggaaacccgctatccccctttcttttcattttagcaatggacccgctacatcggatgattgagaaagctgctgacgtgggactgctgggacaggtactacctagaggggctaagcttcgctgctccctctacgcggat

SEQ ID NO: 113971 - DNA, 442 bp, Zea Mays
gtttgattgccaccaaccatgtagctcgcaaaaaatgtcgggacctgcgactttgactcaattttttatgtacacacatgcatgcattttcgttgttatgaagacgtgtgatgcatatccacaaggtactcaatgcacaaatgtactactactctataagaccataaggagggcatccacagtagtacaacatgcccacgcctctgcagatctcgcctttgtcccgctcgatggaaggcgctgatcctccccgcccgtaatcccctccggcaaccctgcgtgatgtcaatccccacacaatcgacgatcccatcccttccaaaaccagcgcctactcacctcgccttgcctaacaaacgcgtcgcctgcatcaaagctgtagccatcgagccctctttctcccactcccctcccttcctctttctgcccgactcgcacgcac

SEQ ID NO: 113972 - DNA, 713 bp, Zea Mays
gacaaggagcaaggtcgcgggggaggacagggcttggggcctaggaggaccgcttctagaggcactaggtggggagcagccgagcgtgggaggggcaccggggcggggagcgaccgagctagggagggatgacggggcgacgactggggcaaaattgcagatgagggtggttgcccgacacagagaagatgcttcctcttattttgttctcgttgggccagaccatcaaacacacagacatggtccatgaagtttaaggagggtaaaaacatgttgtgccatgcctcaagccatggcccgggtggccatgggctgaaatatgcccttgggtataagccattgggacctctcgcctcccagagcatctaacaatatacgccctcgaggcccctcgtgtcccgagacacctaacgatataagcttctacggcctctcgtatttcaaggcacctgacgatataagcccctagggcccatcacaccccggggcatctattggtataagccaccgaagacactcatgccctaggtataagcccctagggcacctgatgatatatacccctagggctagtggaccccctagaggaaacaaggaatttgagtgatggcctaggcctatcttgtggctaaaagatgtgataagcccaccaatggtagtacaacactgagacgtgggcctcacacctaaatgtcctgaagactatctcgtgg

SEQ ID NO: 113973 - DNA, 380 bp, Zea Mays
ttgcccaatacctcccggcaccatgattccatttgggttattgtggacaggttgaccaagaccgctcatttcttgcagtacacaccacccaccggacagagaagtatgcagagatctacattgaccagatagttcgtttgcatgggataccaaggactatagtatcagacagaggagcaccatttgtggcacgattttgggagcaattgcaagaatcagttgggacccatgtagtacgaagctcagcataccatccccaaacagatggccagacagaaagggtgaatcagattttggaatacatgttaagggcatgtgtgctacactacggaaaagattgggacaagtgtctttccttggcagagttttcttataataac

SEQ ID NO: 113974 - DNA, 412 bp, Zea Mays
attagggtcaagcttagttaaattaaggggtaagtctattttggtgttccactgatttcctcttaatgtcttagtgagaatttaataagatttctagttgaactcattgaagtggggtttattatttttccttcttcttacttcctttatgctttttaaggtggtttgaactacaagttatcttaataaatttccaaaaattctgcaaacatttcagtggcttcttactggtgtataattctctgtctcaaaatttggggtttaaaaagtaagtagttctttctggataaaattattaactattagggcaggaggggtgttttgaactacaaccttctttttacagtgagttattctctaaaacttatttttgctggcatttagaatttctagccattaatacttattagat

SEQ ID NO: 113975 - DNA, 514 bp, Zea Mays
ggagtctttagacgaggacttggattattttgcagcgttagatgtggctgcagcggagccttcaccacgcccggagggttctgaggagctcccgggcgcgagtactgggtataggcgccgaagggcgatggcgaaacggagagtgagtggattgtcgcgaagcagtaggcgtcatcgtagtgagatggagagtggtcgtcttcgcgtgggtgggactggtaagcgagaattgttgtcctcgtcgattggggtgagtgtaggtgaggaggagctgcaaaatctttttgagggtgaggaattgaggataatccttttcaactatagggagatgggtatcaccccgaaggctgagccaatgtaatatatgatgccctcgctgtgtgtatgtaacagtaatttatatgataaggctgcgcgccttcgttgatccgcccgtgcccgtaggcgacttctgcacggagtcttttgggaacgacttcgatcttcgtgtacttgttgtgttgttcaggccgcg

SEQ ID NO: 113976 - DNA, 284 bp, Zea Mays
cttgaaggtaatattggatcattaccactctgtacgtgcctatccttaagtgataacatagaaggtgctcttttgtgttgcaattgtgaaatgtaggtacaattccatcctgtatagttctggtaccaatatgactaactacagtgatgatctggttcattattttgcactatgagatgtataggaataaggctcacctgcgtggatcaaactggctgatgtcaaatctggttcgttattttgcactatgagctgtataggaataaggctcacctgcgtggatc

SEQ ID NO: 113977 - DNA, 391 bp, Zea Mays
aaatttcatctctaggaccatcatgcacattggacaatttccctgctcatgccttgacatttatgaatcattctccgaaacaatgtgcttggacaattacttcatgtaggggttcaacaactgtgttcggtcagagcatgcttagcacactcttgatcctatcacggacgttgtaattctcgatatcaatgttgggatatgtttttttattaaatcttatggttagttgttttttatacagccaaatcaaaaatatgcttatgtttctttttcaaattatacaattgactacacaatagttctaccttttttcatgcaacattcgtttaatatttacgcaactatattggctttttatccattacagcaacaaggttgtacattaatatta

SEQ ID NO: 113978 - DNA, 400 bp, Zea Mays
ggaaaacaggatcgaacaattgaacagaatcaatactacctctgcagctctgctccttcctccgaattcctgttcctattatggatgaactgctcgacgagttatatggggctgcctggttttcaacgttggacctccgtgctggtttctaccaaattcgcatggcgcccgaggatcaacataagacggcatttcagacccaccacggccactttgagttccgagtcatggcatttggccttaccggtgcacctgctacatttcaaggagctatgaataagacacttgcgccacttcttcgcaaatgtgccttggtctttttcgacgacctcttggtttatagtccgacatgggaaactcacttgcaacacattgagctcgtcttgcagctgctttccac

SEQ ID NO: 113979 - DNA, 374 bp, Zea Mays
tgctggtttgcttgagttcctattagttgtctttgtgcccgtgcttgatttgcttctgtgtaatgattgttggtgtattgtgtgactttagtccacaatggcatcagtttgctaggtaaaaccttagtcgggttttctttgctctatgtactctatctttgctcaatcatttcccctctttccttcccatacccaaacaggagaatcaaactaagctcaactgtttaagatacatacacccaatcagtcatcacatgttgatagtcaaacaaaatttactcgcaaagaactcaaagcaagaggtgcttgctactactacaaggatgaaggacattattcgttaatgccccaagaagcgtctagaccaactaaag

SEQ ID NO: 113980 - DNA, 556 bp, Zea Mays
gtggatttgggggaaaaacgaaattagggcgctacggtggacgatcggaggcgagggctagtgttctggcttcgtaactacctagcggagctaacggtgcactcaatttatagcctctgagagcgatgggctccgaattttgaaggggaaagctggcggccaaagagaggggtgagtcaccaccgaacgctaccgtggctttcaccgaggcaatgttccaagcaatgagcaggctatcaacaacgacctactgtgacgtggtaacacgtctaagtacgtggcacggctacgaagggcggcgaactccagcgaggacacctcggttaatcacgcggcaagtgggtacggtgaacagtccggtgataaggctccaatcccttccctgcgacgagatctttcaccgccatccgttatcagcacaccagggcgcacgaatcgcgacgccggtaaggatcgcggagcagagtttaccggtgacggtgcactgaacctggtgatctttgttaggctactgtaccatcaggaccttcatcagtctatctgacagagcatcttc

SEQ ID NO: 113981 - DNA, 381 bp, Zea Mays
gtggagagctggccatggtgagctcactcacggtggagttttgactgatttgggggaatttcaaaattggagcgctctggtggacaatctgaggcacgggatggtccgttgggtgtgtgattacttagcgaagctcactagggcggcaatttataagttctaagagcgggggcgtccaattttgcagtggcgtgttggcggccggagagagggaccgagtcacagaggtgttctatcgtggcattcactggttgaggagctacgactatcacaagtgagttactatggttagcagcgatgtggtagaagggtcatggcgtggtgcgatcacggcgaactacgtatacctcgacgacggtcgttcggccacgtcgccggcgc

SEQ ID NO: 113982 - DNA, 389 bp, Zea Mays
tttcgccaagacagtaaggggatactatggttcgaaaaccgactggtagttcctaaaaatagggacctcaagaagagactcttggatgaggctcatctttccaaattctccatgcacctgggaagcaccaagatgtaccatgatctgaaatgcctgtattggtggaccaggatgaaaagggagatagccaaatatgtattggaatgtgacacctgtcagaggataaaggcaagccacttaaagtcagctagtgccttgcaacccctatcaataccttcatggaaatgggatgacatcagcatggatttcattgtgggtctgcccaacacctctcgacatcatgattcaatctgggtcattgtggaccgattaacgaaagtggctcattt

SEQ ID NO: 113983 - DNA, 373 bp, Zea Mays
atctgggcatgatttgtctatcaacgattctcaagtcgagtagactctctcttaccgcgatgctcattatcttccggttcagggaatcaggacctacatctcgtgtgggctagaaccagccaatagcttgactccgttcaccgctgcttccttcatccgatattgctagtccaacggaaagctttgcttagcttactggacttaagagctttctgacttgtctcgaaaaggccgtctcactgtgtacggaaggctcagtttactcgcggtccattccaccacgaaagggagaaaggtactgctatcatggggaacacctatctttgaaatcctatctttcagctaacgctagtctagtctccattggaataaa

SEQ ID NO: 113984 - DNA, 365 bp, Zea Mays
tgtgggaataaggagtggagaactctagccgaatgctcctgcactttggctatttgaccctccccttttatagttcaagtgggtttttacataaagacttattgtccgaagaagagtatgccctattgtctacggcggtcttgctgatgcagctcccctgacatcgccttctggttagtgcgcggttgtatgcccggtatggtgggttgcttcatctgcccggcatacgggtcactgtagcggtttcggtactgagttttcctttagtggcgcccggtgggacccatgggtcagagtcggacggtgccgagggttgtacgcggtgatgcctcatctctccgatgtgttgtggcatcatccaagac

SEQ ID NO: 113985 - DNA, 516 bp, Zea Mays
attaatttaatactaaaaatcattttctaatttatttttcttagttttctatttctctgaactgggcgtcaaaaacagagaaacacaggggcctcggtgtaattcttcgtaagacaggctaaccacgcagtggaccgcgggttactttccaataagtgcagggtctctttagtaaatgttcccgatcgaagggggtatgcagcgctctcggccgttggattagaagtctacggcttagatcttacatacccgagctcgaaccggtatgcactgactacccttggatctgggatctgcggtgagggtttaatgaaggtgagtttcaatcacagccctcggttcagatcgcacggttcagaatggctaaccccgaaacgttttctacctctaatctgagccatcaatcatttgattaacgatccgcggttaactcccaacccaggctatcccgacagcggcggtgccctcggttcacggtggcgccatcaccggcgcacgcaatccacgccatcgttc

SEQ ID NO: 113986 - DNA, 481 bp, Zea Mays
caattgtccaaggctggttcaaaagtggtagaaatgttcgaagctagcttcaaagatggagcaggctctagcaacgaaaaacataaagagcaaaaagttgtgccaatgacgttaggtgtcgccccctttaatatgcgtgactttttagttctaacccttacactcactaaccgttgggtcccactattcagagctgctacttcataacgagcttcgggaagatgttttcagaccttcgacgcaaggcctccgtgttacgatttttgcgatctaagctcattatgatgaaatgaactcatcctgcaaggggctactgttggggggcatacattgccaaaggtcctcaaaatatttgtattgcataattaagtgtgtttcaggtgtataatgaaagctagacaaagcagatcttcgacaatttcaggtatgagatacagactgaacaaagttgtctgtcagtcgaagctacgtaaagaggagc

SEQ ID NO: 113987 - DNA, 844 bp, Zea Mays
tcaacaagtgtgtggttgagtccaccgcgatcccctcatcccctgtgcgcacacatatgagacaagtctatgccagaccgaccaattttgacaaaatcttataccttctgcccacttttaatcgttagacaaaacatgcatgcttgtggccagcccgctactggtctccatcgagtagattaaaaccaccctcatgcatgggtgagtgatgaagctcacattcccatccattatagatgagaagtgctccattggtcgaatcaactcctctgtgccatacttgggcctatgctgatttagggaataaagaagaggaaggatatggctatctagaaatgcatatcgcaacatcttcctagtgtgccccctataattgtattgtatgtttcgtgccactaggcctccattgcgtgataccgtctcctacgcttgtgtcacttgtcgacgcttgctctcaccatcttgcacgcttagggcatgtacaaccccatttaatatgggcggacttgagcatgtgtcgtctgacccaaccaactcaatctggcccgcctaaaaaaacctgacccgaccgaccaatacaacgggcgagtacgagccattttttgacattcaataatttacgacctgacacatgccatgatgtttttacccaaaacgcgaaaaaacttgtcctaaagccaaaaaaactcgacccgaccaatacaacgagagagtatgagccataggttttgacctgcaataatttatggcaggacacgggccatgagtttttacccaaaacccaaaaaatctgtcctaaagccaaaaaaaccctgatatgaccaatacaatgggcgagtacgag

SEQ ID NO: 113988 - DNA, 439 bp, Zea Mays
gcagtagctgatagcttcggcaacgctgtcaccaacacctttggctgctctgttgccttctctgactccggctctttgaccgggtcggcactagcttcaattggcatcacaagagtcgtctctgtggttaggggagtagcttcttctctttcaattagcttcggcacatcggctgttccaatgggtttcggtctacgtgttaagaccttgacttccttcgccttcggcgcactagaagatgttgaagcagcgactttcctctttccccttgccttcgaatgggaaaacagtaatctaggtaaacaaacccaataacatcaaacaccctattcagcctctttttcccacgagcgccaaaggcaactgtcatagcctcatcttctgcccttgaatacgctccaagaagctcatcacttgtggcctctagtcaaattggctc

SEQ ID NO: 113989 - DNA, 558 bp, Zea Mays
ttgtcatcttcattgtttcttcaatttttggatttttagccttatcaaccattgtttcaaccagcttgactgtaagcaccttcgacattacaggtggctcttctgtgctctgcgcagtcgagatagtttcttttatttcggtagcagaagaggtccaagcgccaaactcatgcaccacggccggttcaatgtaacacagccggtgcgtaagaaccttaaccttttttcccttcggcacaagttcaattggggtggccgaagcagcagttttcctctttttcccctgtccccgcagcgggtagcggtaatcggggtaaacgaagccaatggcgtcaaaaactctgttcagtctcttctttccctaacctccaaaggctgtggacagtgcattatctttcgccttggaatatgctccaagcagttcatcacttgtagcttcgatacacttcagccagtcgtcgtttggctcatcaaacttctccctgaatctgaaggtatacttcagtcggaccagaccaccttcgctagagtcggtggtggtctcctttggcatttccc

SEQ ID NO: 113990 - DNA, 376 bp, Zea Mays
atagtcgggtcccgaggacaaactgtgccaaaatcatgccaaacggtttttgtttgagttcaaatttttccagagcatgttcaaggaaatttggcaccactttgatatttggactttttggtttcgagttttggaaaacagggaacacgtttgatcttgtaagagggttctgaaattcagaattctgaatttcctatagggcattggttcaaagggctgatttgaggattttggaaaatctaaatggcaaaaccttcttactatattttgttggttatttagtgcactacaactttgttatttggttcttaccaaaattttgtattcttcccaagtcttttcccaaattccctttatgtgcttaaatggtccactt

SEQ ID NO: 113991 - DNA, 560 bp, Zea Mays
cccgcctccaccagcgccacggtgagtggccgcccctcccgatcggttccttcgatcgggccgcatcttccctacccttccctcactctctccattcatcctggaatccgttagtgatgcattcgggttcagagctgctgcggtcgcagagattatatggtgctaggatacactgattacgctgtagggtttgtttcgtgagtagctctgatctcacggaatggtttgaccggaaatgaatgcagcgaaatcagttgctaggcctcgtagggtatctgaaatctgaacatgatggttttagatgtcaggctttcatatacacttatatgaacacttacatgacgagttctatttagaattggtgatgtagatgaattgtcccgcaaccttgttgaatcttctaaagcatctactatgtatttttctatacagacacgtttgaagtgttgttgatgagacagaatgcatattctagatgcagtttgttttttatagttggcgtttttagatgaaatgttaatttactttacatacttgaaataggtctttttactgtatta

SEQ ID NO: 113992 - DNA, 394 bp, Zea Mays
gtttgcacttcttctgctgctacttgttacttcttgttgtaatgttgtggacttattcacttgttgttttgactggagcggaagcttgctgccagtttggttgttggaaccatattttgttgtttgcactttttaacttgtgatgttctggatcagacatgatcaaataactctatctattgtgatttgtgtcgttttattttgtgatgtgaaagcgtcgaacacttgaacatgttaattaatgtcaactatatgttatatgcttatggacttacgaattatgcctaaaagaggatatgttgctgatttttttaaattgcgttgttggttctataaggttattagtaactttgaactatatgatgtcaatttcattggtttactttcctatatt

SEQ ID NO: 113993 - DNA, 300 bp, Zea Mays
ctcatctttaggagttgctctatttaaattgcgaaaatcaatgcatactctaagcttacctgactccttcttctccactggcacaatattggagacccattctacgtatctgcaaggtctaataaaattagcttctagcagccggtggatttcgtcctttattcgtgggagaaggtctggacgaaatgttctagctttctgcttgaaaggtctgaaaccagacttaataggcagccgatgttctacgatctctcagcttaatataggcatctcagtgtaattccaagcaaagcaatctga

SEQ ID NO: 113994 - DNA, 529 bp, Zea Mays
aaagcgcgaggcaaactgtgttcctcgatctgatacgatcttctttggtactccatgcagacaaacaatccttgacatgtataactctactaactgggctcttgagtaggttgtcttcacaagtatgaagtgtgccactttagtcaacatgtccactataacccatattgaatcatagccattctgagtacggggtagtccaactatgaaatccatacctatttcttcgcatttccatttaggtacgttgagaggttgtagcaatcctgatggtctttggtgttcggctttaactcgttgacacacatcacatagtgcaacatgagtagccacatctcttttcaaaccgtaccaccaatacttttcttttacgtcctggtacatctttgtacttccagggtggatagaataagctgaatcatgagcttctcttagaataagttggcgtaggtgctcgatttctagtacatagattctctttttaaaaccatactatgccttgttcatcttccgtgaaatctggggtttt

SEQ ID NO: 113995 - DNA, 478 bp, Zea Mays
gttccctctctatatataagaggatcgtgcccgattaagatatccagcatacatggatcagaatacatcacatatcccatttttcttcactatcttgctctttatcacgtctctcgtgagttttggcatcgttctaggtggtcttgtcgatactatgacatcctccacacgctcctccccgacagggctttccgagaggtgctcgggagtctacctgcgaataatagaatcaacattgtcttgattgatctctagtttggttttgcctatccgcaatgttcccgttgtgtccaaggtcgcgtgacaactgcacgtgtgctagcccttcctagcgtatgatccagatcccttcctacatcaacaaaccttttgcaactccccgaaggaagaaaactttcaagcttcaatctactagcaacatatcgcctaatgatagatctaaagacagagaggatcacatcgattccttcaattctaa

SEQ ID NO: 113996 - DNA, 603 bp, Zea Mays
cacatcctcatacttccatcctttttggtgacgaataggactggtgctccccaaggagatgagttgggacgaatataccctttttgttgaagttctgcgatctggagttttagttctgccaattcggtgggagccatgcggtatggtctttttgtgattggtgcggtgccgggaattagatcaatgtagaactctacttctctttctggtggcattcctggcaattcttctggaaacacatccatgaattcttctactacagatatgctttctgctgctaggttaaacaccattggatcttgggcgggtggctgagcctgacatgaaactgactttccttggtggtcagtgagaagaactgtcttatctgcgcaacttatgatgccattgtgcttggttaaccaatccattcctaagatcacatcaattccatgggatggcaagatggctaagtctgccaaaaacactaccccacttaaaagaatcctgacttgggagcatttgagatggcatagaaggtctgaccctggggttcgggtgaccaagggaatttctaggtgtgcagtgggaatgtcgtgcctttccacaaaactagtggctatg

SEQ ID NO: 113997 - DNA, 915 bp, Zea Mays
gagcttcggcatgtcccattctttcaaagttgggaatactctataagctaagaattcttgcaccaaatccctagtaccaatatgctccgaaacaactcgaaattcgcccaaaacaatttggcatggtccccccggtgtcatgtcacactggggcctagtttctccgaagattaagtccaatgggctctgaaccagcttctcctttttctcatcaaccttaacataaaatcacttagccttccagccggttggccatttggtacggtagctaataaccggagactttgcatctttgcgataagcaaaattgtagcacccgaagttttcgtgcagcccatcttctctagcttttgtctgatagtgaagttcatgtacccggcagaagctttggcaagcggttccgccccctggcttcaaagagcccaaatatagacgctaagcctaacgatggtgttaggagtcagctaatgaagataaatcccaaagttctccaaaacatttgcaatcatttcatgcaaaggaaatctcaatcctgctttaaagaagcttttaaaaactaccacatcatccttttctggcttcggggtgatctcctctccgccaaaacgaatcagcttcttcttggcttcactaaaatagcctagctttaacaactttggcatatcatcctcggtaacagtagactttccaaactccaggtggctgggtttagatggtagggcactgtattcttcttcagtttcaccttcttcaacaacaacctgctcagcttcggcagcaggtgcaccttcgtcagaaacgtcccccggcactaccagccctaactgtctcattactttggaaatcggagcagtttcagcggcttcagcttcttctccgtcatgcgtaaccctggcagtggagcgcacccttgcc

SEQ ID NO: 113998 - DNA, 691 bp, Zea Mays
atctttctgaatctgtattgcttcttcttcgatgtgactttctggtacttgcaggcatttgcggagctgggacacgtgaaacacattgtggatatcagacatggattctggtaattcaagacaatatgctacgggtcccactctgccaatgatgggataggggccgacgaatcgcagtgctagctttcctttcacttggaaccttctgacaccacgcatcggggagaccttgagggtaaacaaaagtctccttcctcaaatccgagttctctccgcctgttgtccgcataacttttttgccaactctgagcttcaagtaaccttttgtggatcagggcaactttctcttcagcctctttaacaaaggtaggcccttccagtgtattttcccctacgttggaccacatgagaggggtctggcactttcatccatatagtgcttcgaacagtgacatcttgatactggcctgatggctgttgttatacgagaactctgcataaggcaaactagattcccagtttctatcgaatgttaacacacaggctcttaataaatcttcgaggaccttgttgaccctttctgtctgaccatctgtatgaggatgataggcggtgctgaagtctagcttggtgcccatagctttctgaaggctcgtccaaaatttggaggtgaactgggttcccctgtctg

SEQ ID NO: 113999 - DNA, 321 bp, Zea Mays
aaattatagagcacttaataggattgcttgctacagaagtatcaagtgtcagctttgtctcagcacctaatcagtaattgcccagtccaataaatagttgtaatattttgtgtttcacttctctgaccattgtttaaaattgttgggggcgcaagggatgacatatcaccctggaacaccgatacacgattttcttgcagaaacccatacaatactttcataacagatggttaaactccttgcatcttttttcccttttaggttggagggatccgttggacatggcatggcctgatgtattggacacacttttcgtggatg

SEQ ID NO: 114000 - DNA, 433 bp, Zea Mays
ggcgaacgacacgaacatcatggggcccgagcaccatcatttgggctaagtcgaccccaagccttcgtagcctcggattcgatatagtttgtcgtgttgtgccctgccagcgatctgtgcactcaggtagtccgataggtcatgagtgcgtcgtaggctgcggggtgtgtgggccataaatgcgctgcggtccgaggggtttgtaggtcatgagactacaacctgaggggttcataggtcatgagtgggaggtagactggtgcctccgctgtggctcgtcgctaggtgtagttaatgcgtccgatcacttatgatgggtcaatctcaggccaggcgcaggatccattggagtagtttcccttcggcgcgcctaagccccttgtcaggttcagccgtgcctgatcccgggctcgttgtcgtggggtccatccag

SEQ ID NO: 114001 - DNA, 372 bp, Zea Mays
gagggggagtgagaatgccgccaggggcgattcgagcatgcgacgccggcaggacatcactatgaggcttgggaagtttgccgagccctcaggaatgtgttcgtgaaattctcgaaggaggaacgccaccaggctcaccgaaatttctcactgtgtctgctacgtcgttgtggatccgccctacgccgaggacgagacataagcaccactgaattcacgatagggatcttctcaactgtttcgtcttggtccatacgtcgtgtagcgtgtgtcggatgggagtttgctctcttgggttgagtgttacctgcttcagccatggcaccgccgcaggatttgtgcgttaccgcctctgcaatggttgggccgccg

SEQ ID NO: 114002 - DNA, 797 bp, Zea Mays
ggttctctggtacttgcaggcatttacggagctgggacacatggaacacattgtgaatatctgacatggattctggtagctcaagacggtatgatgcgggtcccactctgctaatgacgggataagggtcgatgaaacgcgatgctagctttcctttcttttggaaccttttgacaccacgcatcggggagaccttgaggtatacgaaatctccttcctcaaatctgagttctctccgtctgttgtctacataacttttctgtcgactctgagcttcaagtaacatcttgcggatcaaggcaactttctcttcggcttctttaacaaagtcgggtccttctagtatcctttcccctacattggaccacattaggggggtctggcactttcgtccatacaatgctgcgaacggtgacattttgatgctggcctgatggctgttgttatatgagaattcggcatacggcaaactagactcccaatttctgtcgaacgtcaacacacaagctcttaataaatcttcgaggaccttgttgactctttccgtttgaccatctgactgggggtgataagcggtgctgaaatctaacttggtgcccatagcttgctgaaggctcttccaaaattttgaggtgaactgcgttcctctatctgacactattttccgaggaataccatggagcctgactatctccttaagatatatccgggcaagggtggctcctccaaaagtggtttttactggaatgaagtgggccaccttggtgagacggtctattattacccagatagagtca

SEQ ID NO: 114003 - DNA, 573 bp, Zea Mays
gcttagcaccggggccttcatatccttgcggtaagcgaagttgtaagagccaaaattctcatgaagcccatcttctctggccttcgtctgataatgtagctcatgcactcggcagaaagcttcagcatttgggtccattccctggcttcgaagggcccaaatgaagatgctgagcctaacgatagcattaggagtcagctgacaaagataaatttcataattatccaaaacttccccaatcatttcatgaagcggaaaccgcaatccagctttgaaaaagcttttgaaaactactacttcgtcattttttgctctggggtggtttcttcgccggcaaaacgaagaagcttcttctctgtctccccgaagtagccgagcttcatcatcatgggcacatcggcctcagagacagtagatttttcaaaatctaagtggctgggctttgctgggattagagtgttgtagtcttcctcttcatcagcattttcttcctcaatatcagcttcttcagcctcagcagtatgtgcatcttcgtcaatagccccctctgtcacaaccaatcccgattgcttc

SEQ ID NO: 114004 - DNA, 354 bp, Zea Mays
catgctagaagctattttgaggccttcaaaggtagcgatgcctgcacccacaaaaaattcaaaagacaaagttgagggactaaaatgattgttgatgaagttgcttcttttgatttaggtaaggctagaccttcggaatccaatccatcagaacaaaaatttgaaagcctgctggagagaaaagcactgccaatacccgaagcgacgcctcttggagatcttgaatacattgttcaccatgctccgtggaaacaactaacggaagaataaattgtcgaagtgcaacattatacaagagacatgttggtcacttgttctcaaacgctgaagatcaaaaacaaggcaacacaattg

SEQ ID NO: 114005 - DNA, 486 bp, Zea Mays
agcggcagttttcctcttttttccttgcgttcgcgaggggtagaagtaatcagggtatatgaagccaatcgcatcaaaaaccctgttcaatcttttcttgccccggcccccgaaggctgaggataaagcgtcatctttggctctggtatatgctccaagtaactcgtcgctagtagcttcaatacattttagccagtcgtcatctggttcaacaaaccggtccctatatctgaaggtatatttcaaacgaattaatccacctttgctggacccggcagcggtctccttcggcatctcccagttatccacaattggccataccctgtaggctatgtgctcttggatcaagtctcttgtgccaatgaaggcacatacattgctgaaagcctttttggcatgctttgacatcattttcaatcgccacagtcggccttcgaaggccgaaacgagaccagatgcagcgttggataatcccattgatgtctt

SEQ ID NO: 114006 - DNA, 434 bp, Zea Mays
ggaaattgttaagtatatatccgaatgtgacacctgtcagagagtcaaggccagccatctgaaggtagcaggcaccttgcagccccttcccataccatcttagaaatgggaggatgtttgtatggattttatcgtgggattgcccaatacctcccggcaccatgattctatttgggtcattgtggataggttgaccaagaccgctcatttcttgccagtgcataccacccacaagacagagaaatatgcagaaatctatgttgatcaaatagtgtgtttgcatggcattccgaagaccattgtatctgacagaggagcactatttgtggcacgcttttgggagtagctccaagaatcacttgggacccgtgcaataagaagctcagcataccatccgcagacagatggtcagacagaaagagtgaatcaaatcc

SEQ ID NO: 114007 - DNA, 851 bp, Zea Mays
cagaactcatctggatttggtgcagtacctgtgtagctgcctgcctggtcgttgttcgcttgatggtcgctgttcgcttgctattgttgttcgcttgctggtggctcagtggttgtggttgtgctatgcctattcacttgctgtacgtcggtgtcagtgtgattcactgatgggtgatggttcactgtcgtgtcctcctcaccgtcgcttgtttggacatctatattgataactcatcatcctcccgagtcctgacctcctcactcaccctcctaattcctattcccatctggctgtctcccagtcccagactcctcacaagctagcacagtagcacctagaatccagcctctttgttgtcatctctggtgctctggctttcaaaggtatgtctttagtgtttactcatctctagttaatgtagcctatttgtagaatttagtttaatttcagttttggtacattgcagtcgttgaggaaccggaggcgacagttcacaggtctagctggtttagctcctcgggctcgtggtcgaagtcggggtcatggaccttgacgcggctgtagaggaggaggagcgccggcttgaggatcacaatgaggtgcaggatgctaggtactttctggggttcggtgacacccatggggatcctattgaagttgatactgttgtcagctctcaaattggtactggcactagatcaacaagcccaccagtccctgatcctagtcaggctgatcctgatgctagtggtaccaagatgaagaaaaggtccaagtggtggaatgacttcgatgaattgactaagactgtcgatggtaagaaagtcaggtatgctgcttgttgcaag

SEQ ID NO: 114008 - DNA, 352 bp, Zea Mays
cagatggtcgggtacaggatgctcattccgtttctaaggatgtgtatgatttcagtaagatttccactcttcccgatgctatcatttctaaccttctgtcagccgcaaaaggtggattgggactttgggagactttagtcagatgccatgggttagtggattaatcacgggaaatgcatgatatccatgtggaatatcaataatcagaatgaagcttccgttgaatctgttacagtcattcactggtacaaactgttattgatttgttatgtgtcatttatttgtaggtccagaagatgagcaggcggaacgtgtgggcaacagattctgttcgaggttaactcccattcag

SEQ ID NO: 114009 - DNA, 481 bp, Zea Mays
gttcgtttggatcagtttcgcaattgaaagctgaatttcgagctgctaaaaacaacactagaaagcgatacagttttgccccgatttggacttttcagtgtccattttgcgatccgtttgtttgttagtctcatgtgagttttagaaacatttttccaaaacatgagatcactgattgattgatgtgtatttggtttgagtgatttctttatctccgttaaagttaagtgctcaagtttcaattttaagaaacaaaattgtattggctcacattcacccactttggtcgcctattcgatccttcaatagttctaattgctagggtttgacctttacatgacttttgtcctctatttttgtagtctagaatacaacaaaatagtagcataactgaaatcaggcgaaggtgaatgaaggaatggaattctgtctctgatagatatatgttctccttaggatcgggtctactgtttcaacctcc

SEQ ID NO: 114010 - DNA, 810 bp, Zea Mays
cgtatgttactccggctcctatagcgagtccatcgcaacgtctttgtagtggtgcgcagcgggtcccactgatcagtctcattcactcttcgtcacctgtcagcgtgcgtaggtatacactcggtatggtgtgttgtttcgtccttccgatgtatgggttactataaagaccccagtgcccatttggtgtgttgtgcgtatgtacagacgtggctggatggtgacgcgtctcatcgtagctgacgtagattagtagcgttggactcagatctttgcctcgccgggttgctcgacggtgagttagtcgtccggagctgattggcggagagtttgtcatcaaagatggtcatcggagttggtcatcagaaagctagtcagtcggtcttcctcgcagagttggtcggcggagttagtcatcggagggttggtcagtcggcccgtctcgcagagttggtcgatggagttggtcggtggagttagtcatcggagttggtcatcgaagagttggtcaaccagtccgtctcgcatagttggtcagtggagttgtttggtggagttggtcatttttgaaggggctattttgggtacccggttcccgagtactcgatagcatccctcgagcctttgtgtaacaccttggagttgcatagaggctttcgttgaggcccaaattcttgggtgcgcacaagcgcatctactagatgtagcccccaagcaatgtatgtggattgcttagggttttttcagtactcaaacaatttaggggtggaccctttctgcgatggtcgtcacgcgcagagcgtgagtccc

SEQ ID NO: 114011 - DNA, 306 bp, Zea Mays
ccgcgagtagccgaagactggatgtacggacattatgtccgtactagtataaatctcatgcccactgggaacaccatccgaaaacatggaacacacacaaacaaatttacttttcggagctggtttgaaacactgacagttagcacgctaggtaggggccttgcacattctcgacgacttctccaagccccggatggcctattgccacgtcatctagaccccaggaatgaccatccattttaggagcctcgaattcatcatcaacgacgcaggggaaatggtcaaggccccagaaacccggcctcg

SEQ ID NO: 114012 - DNA, 363 bp, Zea Mays
tagtgttgcgtagaattcaagtttcatattaatacacgaagcaagtttaaagaagaaaacaatatgaacagaagaagcaaacataccgctaagtttttactgaccgaatcgaagccgtgagtatcttgtcgaatgtcgatcttctcgaagggcgggggcactgggaaagttggggggttaggtgacgtcttcggctaagagctagggcttgctagttcgttaagctcatcggttgccgggggcaggtcatcgccgcgatgagtgagatcaggtcgacgtcacaacgacaactaggacgagagcatcgggaagggactagggcaggcagtgtcgcaagccaggaagggcaggcgacatcgggaa

SEQ ID NO: 114013 - DNA, 539 bp, Zea Mays
atgtctgggagacaacggtggcctggaagtcaagccaaatctagaagatctcatatgcaaggcccaacgcctggacgcagaaacaaccaagcttatggaaagaacacgcaaggagcaactcccggaccttaggacagataagcaaggagtcctctggttcaaggaccgcctgtgcgtgctagtgggagaggcacgagaaaccctgctcgatgaagcccacaactcagcttactctatccacccagggaccaccaagatgtacctagaccttaaggccagatattggtggaaagggatgaagaaggaaatagcacagtatgtggcccgatgtgacacctgtcagcgaacaaaggccgaacatcagaagcctgcaggcctacttcaacccctcccaatacccgaatggaagtgggaagaaataggcatggatttcgtaaccggactgcccagctcacagagaggaaatgattccatatgggtgataatcgatcgtctcaccaaggtggcccacttcattccagtaaagaccacttttggag

SEQ ID NO: 114014 - DNA, 331 bp, Zea Mays
cggagagcgaaactaacaatagtgcaagcaaccatcattagcaaaaagataatcgatatcctattcatgaacaagaatggttttgtcggccaaaaacaggataccaacaattttagagctacaaccaggatgtaaatatcaaatcatattatatcatcaaataatttggccatatcaacaggtagataatatataccaaaaagatacaggaaggaggacccctgaattatggaatttttggtcgaactactaaattgtagtttaagaatgaacacttctagcactctaaatgttactttgtaacccttagtgggtaaatagcccattttgc

SEQ ID NO: 114015 - DNA, 315 bp, Zea Mays
tgcggctagcaggatagtccctggtgcacgttcccttttccaagagagttcttctagccagagcaaacaggaagcgttgctgagacacgcccggtcagaactgtgtgatagacctatcactctacaaaggagtaccgatgtaactgtttatgtaattgatctttatataaatgtgtcttacatgtctctattttatgtccataggaagaggaggacaaggatgaggaggtgcagcaccacgaggaagaggttgcagccacagatgctggggtgcaaggccatgaggaggaggaggtcgcgtgcatagatgttgag

SEQ ID NO: 114016 - DNA, 552 bp, Zea Mays
ccttggagtgtcgtccggtgcgtatcttggaatcctcagaacgtgttttgaggaagagatcaattaagtatgtcaaggtctgatggactaatcagtctgagcgcgaggctacgtgggaacttgaggagctgatgcggcagaaatatctggaactttttgttgtgagtaagtgttgttgattcattaattttttcccttttgtcgttccgatagaagcgtcagaattcgaggtcgaattctttttaagggaggtagagtgtgatacccagtttgcaaagaggagaagtggaggttattctttttgttctttttcctcattcgggtgatgcgctttgggaatttggaatttgtggaaaatattcacctgtaagacagtagaatttctttggttagttgtttgcgacggggtcgggagctgtcatataggcgagttgggtcttgaaccttgatccggcccattagtctcccctaaccctagccgcccccctttccccttgggatttttgcagccgcccccttcccctccccttcctcttggacgtcacccctccc

SEQ ID NO: 114017 - DNA, 280 bp, Zea Mays
ttcgattccttcctctagcggctagctactcgacctgctcgtggctcgatcgctccttcgatcatgactggatcgatagtgggtgaccagacccgtccgctaccagtgtcaccttgtcttctcgtcactcgttagttcatcgcgttgtcgagatcccacacgcagcgccactactttgcctcctattccacatcgactggtgggcaagctattggtgggatcctgccttggcaccatggtgccaccaccatctgccctcactatgtcaccaggatcccac

SEQ ID NO: 114018 - DNA, 589 bp, Zea Mays
ctctcgtgttcgcttatgcattaaatatgaatagatgtagcgaattagaacttgcatcaccaaaagcgcgttgaatcgctcgccggcgttggcagcgcctggctgagctgcgccgccgtgttgcggtagggtgggaggacgatgagtccgcggccgtcggatccatagcgacggcttagattagaatcaaggcaacggttcgtgtaagggtgatctgagccgttgatgtcaaaatggacgagtgaggctaggactcggttatgaggagcgcgggcggtagatctccgatccaacggtgggaatcgcttaccggttcgttttatgattagatccgatctggaccgttgagatgggatcggaccgcccatatcgcatacccgttcggattatagaaaatctaatcacagccgtagattgatgatcggacgactctgatcctagcatacccctttcgtctgcacctgttcttgtaaaagagccctcgggtttccgtaaaatagaacccgccgtcctgtgggtattattcactgagtctggtttaaattacccgctagcccctgcagtttttagtatttgacgcccagtccag

SEQ ID NO: 114019 - DNA, 527 bp, Zea Mays
ggcgaggcgaagaacgattttgattaagaggtcggatcaccaacctggttctcttctcaggtccttgatttgacctttcacctccaaatccctttgattttccatgcccagcatttttggcttccactgccagtgatgtattgacagccttactgtaggtgaggtctaagcatgttgccattttctgctgaagcctatcattgagccccctcataaaacaattctttttcttcaagtcggtatccacctggtcaatggcatactgagagaggtggttgaacttgttgagatactgcataaccgtatctcctccttgcctcaaccagataaactcttctagtttcatctgaagcactccctccagaacataatgctcccggaatgctaacttgaactcctcctaggtaatctgatgtccaacaggctgaattgctgaaaaatttgcccaccaggtactggcaggccctcttagctactgagctacgaataggggcttttgcgtctccgtgcatcgaattaacccaaac

SEQ ID NO: 114020 - DNA, 349 bp, Zea Mays
ctcgccccatcagctctctccaatatttaaggacactgtgatagggatgctgggcctgaataatttctcttcgccccctcatgacaaacctgaggcgacgctggagaggattatttctggctcgccccataaaattacaatggacagtgaagcctcgccaagtgtttcttactcctccatgacctttgggatgaagcagactaccacttccatgaaggtatataccagaaaaatgccaagagacagggtgtgccaggatactgaggttgttcaggtgattgttgatggaagaggagatgttgagcaggtcctggataacttggctgaaaaggaggacattagctcggat

SEQ ID NO: 114021 - DNA, 491 bp, Zea Mays
ctttatcattgatgtcactctccaaccagtatcttatactcttcatccaatcgagccaaagcaactcagccgcaaacaagtgcagctttaaacaaccgcatgatgtcctgtcacaagaaaacagactaactagctcagaaggaacaccagattaaaggtaaacccgtaaaagaccaggcttccatgctagattaaaccagaatggcagcatcttcaaactaaactgtagcctgtaaagtactaaccttcatgtgcgatttacccatgccattctttccccctgaaaacactgtcaaaatactagaaggaaactaaaattttgaaagttaatactcctatataaaaaggaaggattctattacaccaccactactactactaggcctgtactatcctggcttgttgcatcacaaagaggcatcaagattcctgtacatgtcacagaataatgaatcacaacactattttatcgtgttcctccctgatcgggg

SEQ ID NO: 114022 - DNA, 491 bp, Zea Mays
cacgttgctgggaattggttgatgggtttcagtaaacatgacaaatccctaattatgacgggggtggcggcaatgctttgggctttatggcttagcaggaatgaggtggtttttgatcgtgataacccgaaaacttacatgcaggtaatctacaggggaacctactggtgtcgttcctgggcgctgcttcaaaggcatgaagttgcaaatgagaagctagtccatgcttgcagacatctggagaaagtggcgatgatggtgtttgcgcattatggatggcgtttctccaatcgcattactctgtagttttttgatgtctttgaagccctgcgtggttttctctttttacagtttcctgtgtgtttgactctgtggtcgcgtggatgctgtttatgtagatgttggctcggaccctctacggaggagaaggccggaactcgttttccattatctaaaaaagtatctcgatccttttaaacggctaggtaagt

SEQ ID NO: 114023 - DNA, 543 bp, Zea Mays
gcgagccccacagccaatcctgacgtggacgagtcaacctccaaggaccttatcgacggagatcgtgttatttccctagagacactgaacaaataccaaacgtagacgaaggcatggtgcgacaacactatcatccctaaagaattccaagaaggagacttagtcctcaccagaactaccagaacagaatcccggggcaagctcgaacccaaatgggaagggcccttcatcgtcaagaccaaaacatcccccaacgcctacaggctcacttcaccatccggcaaagacttagagcacttgtggaatgtggataacttatgcaaattcttcgtctagtcccaaggccttcgcgcctttgtaatttttgcaaacaatatctcagtcaggcctgcactcttttcctcacagggggtgaggtttttaacgaggcgaagccatgtaataaattgccgcaaaaatccccccaagaaaaacaaaagtccaaaacggcattgcggccgccgatgtccaaaaatatcgcagaaccggtcttcggcattcgac

SEQ ID NO: 114024 - DNA, 357 bp, Zea Mays
cctgaatgtcacgctgtttcagtggttgttccccagtggttgttggatgtccagagcagttatagtcaagacactgaggctcagtcgttgctgtccaagttggcaatagctcctagtgctgtgcctcattttactctggtccatggactcctgaaatacaaaggacgcatctgggtgggcgctgatgaccaacttaaaactcggatcctgacagcccttcattgctcccctgttggtggtcactctggggcacctgttacatatcgtcgagttaagagtatgtttgcttgggccaaactgcgacaatcagtccatgaatttgtgaaacagtgccagatttgtttgcaagcaaaaccg

SEQ ID NO: 114025 - DNA, 502 bp, Zea Mays
tagaaacgtatcatctgtatttttggagctgtgtctccttccttccctgcgtgccatgagccgcatgtaacctgccatgtattcatcctctataaatatgagaggacctgcaccatagagagtaggtagcgccattcatcttaacatggtaacagagccataattttctaccaatatcgaccagctcttcttcctcctcctccaccatccctatccaccatgccgttaccattcgccttagcaagacaaactacatgctctcgcgcgcgcaactcctcccgtatctgaggagtgccaaactcatcagatttatcgatgggtctattccccagcctccccagttcgttgcgtcttccgctgcaggcgccgacctcgtccctaatccggcgtacgaccggtggtatgatcaggaccagcaactccttagcggtcttctctcctccatgaccgaggagatacttcttgatgtggtgactgcctccaccgcaaaagaagcctggga

SEQ ID NO: 114026 - DNA, 322 bp, Zea Mays
agccgtccgatctagcgccaacgtgccagattagattgacgtggttatgaatcggtacgtgtctgcagccgttggattaaaattcgatggccccgagacatccctacaccgatccaacctaggccatcagattggcatccagcggtcacagatcaatacaacaaaacattacgcgttgtttgatctcagccattcatcacatttcctacagcgctggtaccgtccccaatcccccacaacggaacatgacggtgcaaagttgtggcatggcggtgccattgccgtgcaccccgtccacgcgatactctaccctatacatcaa

SEQ ID NO: 114027 - DNA, 530 bp, Zea Mays
gttctggcatgcaacagatatggagagattgtgttgaaagggggaagtgcatgacatgagtttatcaccacatggatgagtttgaggaggtgtaaaacctatctatttgatgactcagttgctggttgtttgccttgctgtcacacatacagcaagggtgaacttggcttttcccctatgcttggtctaacgtggtgaccatgtagagaagttgggggacatattattgccagtttggctctatgttaagttccagtgaaactacaacaatccttttagcttgtatgccttgccatggttggttgcagcacaaattgagtttctctgtgctcctgtcgacctcctgccctgctcaccgcgccacctcattcacctacatctagataaagtcctcaaatcttctccacccctctggttcactgtgaaaactagaactcgtggtgagccatagcagtggtgaccacaccagcttctctcctcggttcacaatggacaaggtttctcggcatcgtttcatgcctcggtcttgg

SEQ ID NO: 114028 - DNA, 540 bp, Zea Mays
aggtggctatttatataggccataaaggctactactactattaataaggatgttgtagaagcacccgaaaaattagttaggtatgagaagacgactagaatgagcatgcatcatgattgtagcattataattgtctcttgtgcatcaacatgcttctctcacctttattcccataataagaacttgtgaataatgtgatgtattgccaccttgcgaactctaataaataccttacctcgtgtcagattggtaagtcttgttaggtcgtgttatgtgtttctcttgtcttgctagttaggtggtattgtaattgttcaacccccttttttaaaaaaagtgttgtctgtcatgctcataaaaagacccccacccaaacaaccttgagtttagcaagtgaaacctcaaaaaaaatatatgcttgtgttggtattttctagcccttgtgtgttttacccttgaagttgcacctgcacaacttatagagccccatagcttgaccgctagaccaacccaagtctccttgtgcacttgttgtgtcaa

SEQ ID NO: 114029 - DNA, 506 bp, Zea Mays
catcatggtaggccttgcctagcccatcatgcttgggcctaggcttggttgggcccaccgcatggtagtattgattgtcccaatttctcatctataatcattattcataaaaacaccaagaaactttaggaaaaggagcaagacttttggttgaacaacatctgcgtctaatgatggtttgttcaacgatccactcaccaagtcaccatgggtacaatttagccagcccttaccatctgctaaataagttatcaaccatactagtgatcatgctatcgaccatcataatcccttatctatcgtaagggttgatgatggttttcagcttttactgtctatgcattaagcacttgctgcaccacaaggctctcatagaactcatcttgcttggccctgatgtattccacacccttatcttgtgcatcatctcctcctatatgctagatgcaagcaaggtatatgtatcttcatctaaatcactttgtggagtatccactatcttgtca

SEQ ID NO: 114030 - DNA, 1600 bp, Zea Mays
gagaagcaaccgatggacgcgcaaagcaacgatgcattgaaggaagatggtgtaccggctcctacccaactgggagcaccttctggcgaggtggtacatgggcaagttcaccaccgcactattgatccataccagagatcgggtactgggtcggaaatgacccgaacaccccctccggtcggaggtacgatccaatccatgaaccatggtcctatgcaatttgaatttgggtcgtttggtaaacagtcagtgggtggatccatgggagggtggtctcagggatcgggatctggaatgcctgggatgaactttccagtattcgacggatccaatcctaaattgtggaaacatcattgtgagacctattttgagttttattttgtgcccatggaaaggtggatcagagtagcaaccatgcattttgagggctcagcattgttttggctgcagtctgttgagtctagaatcagagaaatgaactgggatgatttatgcctagccttgaccactcggtttgggagggaccaacacagtatacttatcaggctattctatcacatccaacagaactcttcagtgggggagtacattgagttgttcgatcagttggtccaccagttgctcgcccatgaaaaccagctaaccccgaccatgatcaccactagatttatagacgggcttagagatgaaattaaatctgttgttgtgattcaacgtccttccgacctcgatactgcttgcttgctcgccttgttacaggaggacgtgctgctgcacatgggaaggcgcgatggaagaaagatggagcatggtgcaaccctaaagccaaatatgaagccccattactcctccgttgtgccctcggctgtgaccgctaccaaggtctataactcttctgaagaaaggcgaggtttagttaacagtggcaaccgagctgaggataacaagctgacagccttgaaagcatacaggcgggcgaaggggctgtgcttcaaatgtggggagcgttggggtcacactcataagtgctccaacagtgtaccactacacctggtcgaagaaatgtgggcaatggcagtggccgatgaggaggagaacctgggtacagaggagggagagtcagcagagcaaggggtcgatgaaagcatcctggctatttcagtggcagcagtcagtggtagtgagggtaaccgaaccattcgcttgtgggcatcgatccattgccaacaggtgctgatattggttgattcgagaagtccagctagcttcatcggcagtcatctcatgggcatcataccaagagtgaagttactagataggccgatgaaagtaaaggtggccgatggaggtatcatgtggagcaaatattcagtccaaaactgtttatggctgtgtgtaggaactacgttccgtacagacttcaaggtgttgccgctgggtgggtacgatctgatcctaggcatggactggctagaggggcatagtccaatggcagtccactgggctgaaaagtggatggaatttgaacaccagggagcatgggtacatctgcaagggatttcacccaatttacagcagtgcagcgccctgtccatctcac

SEQ ID NO: 114031 - DNA, 468 bp, Zea Mays
ctgagtgagcctcccttgtaacgccgtgtgccctcccttttatagctcaaggggggcacgtacaaggacactgagccccgacatgcgggcccagggacatagcggatgtaatacttggagccactaatgctagtcgccagtgcaatctccttgtgtccttatatccgttgtctgcgtagcattagcgtgcagcggaagcttccctagcaacgtacgagtgatgatgatcacatcgtatgccacagcacgggtgtactgcctgccaccggaatggacgggcacgccgcctgcaagatggcctggtcgccgcccgtcagcagagtggacagggcacatttaatgctaaggcggcacatcgcttgtcagtggagtagatagggtgcatttaatgctgaggcggcacatcacctgccagtttgataggcagcgcgcctcatccacaataaatgcgaaggacgcgcggctcag

SEQ ID NO: 114032 - DNA, 499 bp, Zea Mays
aacggggttatccggtggattggtggtgaagccgaagcttttgatgaaatttttagtgatagaggagatttttgcgctttcaccagtgcccgaagagccgtctcgctccttgagaaagctggctgcgagcatgcaaaggctgtaattcagccagaattctcggtctcagctagtgacattaagaacccttcagtcgaagccattgcgctgagcaaaattttttattccaaagtctggttgaaaggtggccgagacatagcagacgaagctattagaaaaaatgagaaagagtctcatactgctttggaagaggcaaggaaagctgaagaagctgcggagcgtgaaaggcttataggtatatttgtcgtgacttagcttcgtaaattggtttagcttcgtaactaacaaacacttatactgtggtgcagccgaactttctccccctctggagtcgtatgaccctgaggctgatccagctctaaaggggctcttgatgtaa

SEQ ID NO: 114033 - DNA, 276 bp, Zea Mays
gcaggtcagaaagtggcagagtgaacagtgcaaaaaccggttgagccggttttgagtccggttgaaccggtttttcaaactggctaacagatttttaaaaaactgaagagaaccctggggaaatcttagtggaaagtaaaagtgatttttccaagagcattcatgatctagtaaaatgttttcttagaggatttgaaaaggtttggactgagctcattgcacttacttactcaactattacgtatccctcttaattgaacgacgattcctatgact

SEQ ID NO: 114034 - DNA, 494 bp, Zea Mays
gcggagttgagcacctcccacaagatggaagggaaaccctcgtgagaaaggaaatcagaactgaaacgagtgtctcctccattagcgggggtgggtgaagtcatctgtggaggaggatcagacgtaaaggttatggtagaagaaggaaaaacatgtgagcccgggttgttaaaaggaagtgggttaaatcaaatttttactcctttaatttctaatcctttcatattttaaaatgcatgcatgctgaaaagaacgtctcctcaccgaatcagaatggtgcctttagggcatccttgaaatctaagactggcccatagggcctacttatttagccacatgttttccccactattcctaaggcctttcgtcctaggtctagcgttttagtcctgacgattctaatactggtttctaagcaagttttatttttgaaaagttggtattcatgatttattgctttctctgtggtggtatttgctccgataccagctgtg

SEQ ID NO: 114035 - DNA, 282 bp, Zea Mays
agaaattctaagcccttcggtaggagtggaggcgtcgaagatacaaaaagatctggcatcaaccccaaagagaaaaaggatggctagtgtgttagatgtgctggagacgattaaaacttcaagttccactccagaaaaaattgccaagacttcgaaggcacaggttgaaactgaaacaaagctgaccgaagctgaagctacaatgagccaggccgatgctgaaactgggcctttagagcccatcaaagagaaatcctcggaaattggagaaaaggcagcgga

SEQ ID NO: 114036 - DNA, 591 bp, Zea Mays
gtctaaaattctaattcctgaatacaccaggggtcacggtgtaaaccatcccaagacacagagtataagctaggtggacggcgggttatttgtggcaaaggaaaggggcttaagtgcaaagtagcatggccgaaggggtatccccggatcctagccgtccgatccacagcagacgcaccagattagatttaagcaagttactcatctgcgctcacccccgaccgtcggatcctagatccacggatgaaggacgctcctgccccgatctgacctagaccgttcattactgaatcgacgccacagatctattctcgcgaatcggtacacagtcgtctaatctccaccgtaggagacgatccaacggccaggaggccaccttctttcctctatcctttcttctaccctgggcaccccctctcctcactgcgacccgagcccgtcggagcaacagcccctcccccatggcggcgcagtgcacaacccggcaggagacttcaccgtcgtaggcctcaccaatcccccgacgcaccgaacccgacccgagtcgattgcagtgagttccaccctggatcgtggtatttgtggcgcaga

SEQ ID NO: 114037 - DNA, 342 bp, Zea Mays
cagaggtgtagataatctacaatggcaccaactgtaagagcccctttgatgtctgcaatccatcgtctgttcaatagggcctgctgcacagttcttctgttaataattctttttggaataatgctgaataatcttggagcaatatcagatacccttttgccatggatccatttatctatccagaacatggtgttggtcccattccccacctcagagatcaacaccttggagaaggaatgggccgtgctaggaatttgaatggacaggctagaccatgggcgtcttgggtcagttttttgcaaccaaagccatcgcatgtggagggcccaacagagcttagga

SEQ ID NO: 114038 - DNA, 437 bp, Zea Mays
cgaaaattttgaagttgcaaaagcaaggcaagaaataagtgaatggactagttcaagattgcaaaagaatgtggaggagcttcgtgaatccaaggagagatgctatgagagatccttggattgcgcaaagaaactaaaagacagttttgcgaaggtgggtgcatactcattggagcaaaagtttattcgaggcgatcccgaaggagtcgttgaatggatcggcgaagaagttgaagcttttgaagaaatacttagcgaccgtggagatttttgtgccttcacaggtgctcgaggggttgcagcgattttggagaaaactggttgtgaacacgttaaagccgtagcccaggcagaagtcatcttctccatagacgatacaaaggaaccttcagccgaagctactgtaatgggtgggaaattttattccaatgtttgga

SEQ ID NO: 114039 - DNA, 432 bp, Zea Mays
ctgctgagcggcaaacaggggcttctgtatctcggtacatcggattagcccgaatttttgttccatcagccacacccattcattagccttgaggggttcctccgccttaacaaagagcggtggacgggtctcggagaactccatataggtggtgtcgtgtggtccttatggttgacctcttcctccgtgttgttgaaattggtttcccgccatttcacgcagaaagcgcgtgttgtcggcggtggtgttgaccaaggcagcgatagcctcgaccagggtaggaggtacaggtggcggattgggagtgtcctccctgccgcgggatgtacccgccccatcatgagcacgagtctaggatggcatcagaggcaaagaaacatttggaaatataacatgccaaacatcaccatctttattacattgctgaactgt

SEQ ID NO: 114040 - DNA, 338 bp, Zea Mays
cgcgggtcccatggtggtggcgagctcgcagaggtggaaggcgatatggatggtgcttgtgcaatgtgcactactccacgtctccactgatgaatgacgaggggagctaggagggagcgaagaagaagagctgagggcgcaggctccaggtgtctactattgatggagattctgaattaaataaaatacaggaaaggatggcagttaaaataaaataatattatatcagtggtgggatacagagcaaatgagataggaacaaccacactgcagagagtagttaatattatagttaggatatacaaggataaatttagaaaaacagtcgtggatagact

SEQ ID NO: 114041 - DNA, 599 bp, Zea Mays
aaactcagagaatggcttaagtggtggcaggttccatgcagaataggccacaagagcaccaacatttgaaactctaccccttaggatcatgtccagtcgactcatcagaccttcagtgggaatttttctgttcgtgacctgggtagaattgttgacaccgctgtacaaataagcagggtaggccctatcctttgaaggctgaatgttcttgaaaatgaagtcagcaactacaactttagcagtcagacctctatccttcagcaagcagacctcgtcaagcggtactttagcttctgttatctccgaaggggtcggagattctatctagcttggtgtgcggacatctggctgcctccctgatcgagggggagggacttgcagtggttctccataatgaaccactcaaggcaccaccccttaatgttgtccatgagaggaatgtctaggtactctgctttcctcccatgacgaagctccagacttgcgccgccaacaaactggtgttgtcccccagccatcccgggccgacaatgataaagatctttccagagactgaaatgggggagaatcccaagaaaggcctcgcacagatatacaaa

SEQ ID NO: 114042 - DNA, 342 bp, Zea Mays
acataatacaagggggcatgtgccacaattcagttgaattaccaacacaaccgtcaaacagtgcaaaatacctatgggcacaatacattacatacacacattcatctaactactacaaagctagtccgtactagagagtactcagtaccacaatacattataacacaaatcagattcatctaactacttcattacatccactgaggaacatcacacttacccacacttgttgaatcacaaaatccaaaatagctccatttcggattcctttgttaataatctatgtacagttaaaaaattgttagtaatttgtgcaaacccaaatacgaaaatgaaacaaac

SEQ ID NO: 114043 - DNA, 413 bp, Zea Mays
ccattacgccagaatcttcctcccatattctcttccactgtgattttgccagatccctctaggccgccgctggcatcgctatccccaccaatatgcattgctctagtctccacaagctcgcctgcccctgcgcttcaagatcggggcttcgacggctttattttgctttgctgctagcatatgtggaaacaccagaatgctaaagtcttcaagggcaaacttaactccctatgccaggttgtttgcgcatgtaagtcagactctcgtttgtgggcgcatcgcctccgcccacacaaacaccagcagatggaggcatggtgcaattccttctgtgtataatctccccgcaatccccatgtattcctcttcccccattttgcttgctggaaaaacaaccccttgtaacacaattt

SEQ ID NO: 114044 - DNA, 431 bp, Zea Mays
cgcccgcaatcatgacccaacaccttcaagccacaacgaatcaaaataggtacgtggaaacaagacatagattaggtacatggttagctggttaaagccaaccttacttttgatcaacttatttctatgtatgtcaacaataaggctactctgagggattcgccaatgaaaagacctctttcaccaacattggatagacaaacaaaaggaacatgaccgactaaaaccgcccaagaggttgtccagctagttccacacatgccactaacaccatggagaataccacttgtttatccacctcatccatatccaccgcctacaaatccactatacacattcacaccaccatcatatccacctatatacctctccacatatacacccgcttactcaccttcttatccatccgtgtgggaagaagccacaatatc

SEQ ID NO: 114045 - DNA, 726 bp, Zea Mays
aggtgtcccattggctggtgtgggctatgtcgcgcttacggatcatctctacatggagacttggccaccaaagttctggccgcacctactagaaaaatacgatggtacatcaaacccatcagaattcttgcaggtctacgtcaccgccattacggcagcacgcagaaacgccatcttgatggcaagttacgtccatatagccttgaccgagccagcccaagcttggctcatgaacctcaccccagggtcgatctactcttgcaaagagcactgtgcttagttcaccgccaacatcgccagcgcttaccagcagcatggcatggaggcctatgcagtgaggcaggaacctagggaaacactttgagccttcatctcccgcttcaccaaggtacgaggaaccatatctcatatctctaatgcttccattatcactactttctaatagggggtacgtgacgagaagatgttgtagaaactagcgacacacgatgtggaaagtgtcaccacgctcttcgctctggccgataaatgtgtcaggggcaccgagggccaagcaaggcactcagcaccacaagccagggttacctagacaagcggctcgagtgctactgctcagggcagcggcaagaaaaagaagaagaatcgtagtggcgagaagctgttgtcctgtgctccggttgccgcagttgtgccttggggccaggacgcctgtggcaagcacccatg

SEQ ID NO: 114046 - DNA, 504 bp, Zea Mays
gcaaaaagtagcctaagggtgcagccggaacagcacaacaagagcgctaatcgtagtcttttattcaaaagacgcagcgcaacagctacttaagggcgtagccggaataacgttaagcgaagtctatcattacaaaaatacttcgcacaaagtcgccacatcaccatacaaattacaattgcacacacggcgaaggcattgcccattacatacacatgacgagggcaccgcctatcacatcggctcaaccttcggaataatacccatcttcctataattaaacaacattatcctcaattcctcaccctcaaaaagctcccaaagatccccctcgcctatgcccgccccaatcggtgaggacaacaattctcgcttaccaatcccgcctactcgaagtcggccacgctccatccccatgcgacggcgcctgccgctccgcgaaaattcacccacacactgttttcccaacacccttcgccgcctacacccagtactcataccagg

SEQ ID NO: 114047 - DNA, 546 bp, Zea Mays
tctgcaaatgtagagaggccgcttcacaacccgcgacctggtgagtccgtgagacaactttcaccattgcacccggcctgcccttttgacttaactatataaagattcttataaaaggatagtcatgcccgcttatctgacataatgatttggcagctgttggctttccccctttttctagtttattgttatgggacatggtaatttctgatatttatatctgaaaatgattcttgtgaatattcattcaggatataaacatgtctctattcagccaattttgctaatgcctttacctgctacattgtgatcaactggcttttgtctgattgtcttacttcacaattctctttcagaaaatgtaactaattatgacagaaaaacttcaaaaatcttcattacgtttcattactaagtaatcactgctatctctttgaaaatttaagttttcattatttctgaagttcaacaaattatattttttttgtaagctgtagcacatgtacaattgtaagaagtggaacccaagaaaaccttctttgttga

SEQ ID NO: 114048 - DNA, 526 bp, Zea Mays
ggcactttcgtgataacattaggttttttaatggccatttctctttcacttccctatattgttgcctcgatagtatgacaactaatgtaagggattctggtatatacacgttctgagcacagggcatgatgtaccacaatatcaagtcatttggtagggatggtgggcagagcataaacaccttgagctttacatttatgatgatgatcccactctcgagcatcggtaccgtaagtatcgcgaagagcatcaacagaaagacaaagaggttattcgacagatagtcgacatactacgtggaaacccgtactccgagcaccttaggaccatgggccacgttgagaacctttatgactatcgtatcacgttgaacctagaccagacgttgaaccagaagacatataacacacctctcacttcggaggtggccgctgtctcgatcgaagggagcgaagggcgaggccagttcagcaagagtgttatgctccatgggaaggacagttcaagccactgcatccgctcatac

SEQ ID NO: 114049 - DNA, 367 bp, Zea Mays
agagatgttgctacacatgtggctaagtgtgatgtgtgtcaaagagtcaaggccaaacatcaaagaccagctggactattgcacccgcttaagattcccgagtggaaattggaagaaattggtatggatttcattgttggactaccccgcactccagcaggatatgactctatttgggtaattgtggacaaattgacaaaagtggctcatttcataccggtgaggacaaattacacgggagccaagctagcagaattgtatatgacttggatagtttgtctacatggagtgcctaagaagatcgtgtctgaccgaggttcacagtttacctctcggttttggaagaagttgcatgagagcttggata

SEQ ID NO: 114050 - DNA, 384 bp, Zea Mays
ttttcattgatgatattctggtctattccaagaatgaagacgagcatactgagcatctgcacattgtgcttcagcgactgcgtgaccatcgtctatatgccaagttgtctaaatgtgatttctggctaagggaaattaaatttctgggtcacacaatttctcaggatgggatatcagttgaccctgagaaagtacaagaagtaatggattggaaacctcctaccacagtgcggcagattaggagttttctgggattggcagggtattaccgacgatttattccagatttctctaggattgccaagccaatgactgaattgttgaagaaaggagtcaaatatgaatggagccagaaatgtgaggatgcttttcatacactaaggc

SEQ ID NO: 114051 - DNA, 473 bp, Zea Mays
ataatttctaatttagtattctcttacaaattgggtattacacttccctaacaaatggcgagattggttggcttctttgatggctacatccacttctcaagtgctactaaatggaatccatggtcaatcaatcactcattgtaggggcctaaggcaaggagacacccactctactcttgttcattctcgccattgatcacctgcatcgcctcctctacttggccaccgaggcaagcattctgtctagagttgttaaggctacaacatgtctccggacctctatgtatgtgaatgatgccatcatctttgtcaagcttgaaaatagagagtttgatttctttgcagccctgctcaatcttttggggtgaagcgactggtttgcgtaccaatattcagaaatcctcactcgtgcatatcaactatgctagcctcaacctcgatgaaattatttttggcttccctccttcaagaac

SEQ ID NO: 114052 - DNA, 304 bp, Zea Mays
cagactgaacagacacacatgcttgaaaagcgtcgtagccttctcttcttattcttccttagaacctctaccttcacaataggcttgctgcaacatcaacattttgggttcactcagctttatattttccccagcaacactcggcttcttatgggcttcacaacccacaacaacatattcaaagtcgagggcttccctgcgagcatatttagaacaacttctacctcaaaacttccatcagattgtctgatcagcatgtggctcaccttctctccattagtcaagcactagttggcagcaatag

SEQ ID NO: 114053 - DNA, 294 bp, Zea Mays
aaagtatggaacaaattattgtgttgctacttctctgatgattcaggctgagaactaagaacacgctgcaccatgatgcttcgaaggttcaccgtagcatcagcaccaagcatggcatcatcattagcagcaacatcactggagtcatcatcgtcaccctcaccgtcagaagcactaatgtagccatcatccgtagcaatgtatgttcgctctcgggcaatccttcttcatgtgaccaatcccatgacagcggtggcaaacaatacccgaagaacgaccactggaaggtgttgt

SEQ ID NO: 114054 - DNA, 864 bp, Zea Mays
atatgggccattaggagtcagggacttgagctggatgctaggtgcttctacaacattcacgagttatcagacgaaggcgaccagaaaagaacaataccataacaactttggttgttacatcttcgtgccctactctgaggcaaattaccctgtgcctacatttcagaagaagtggccgggctcttagatgaagcaatggttttactgaagaatgacttgaatcagagggaagatgtgaggggcgtcattcaacatcccgtatggtcatgtttcggcattaggaggccatcaatcgcaatttggaatgaagtgtaggcatgcctaatggccttcaacaccatatgtacctacattggtaccagagatttagttcaagagtacatcgctttcaaagcatggcttcttgcaaatgaatgggaaatgtcgaaggaagctgccgctggctccagttagggtggcttggtttatctcaaacacaccttccggtacagaagtcaatttgacgagccaaatgatgattggctagatgctatagaggcaacgagtgacgagctacttggagccaactcgaggacagaatacgaagctatgacagttgccttcggcactcaagggaaaaggaggctgaacagggttttcgatgttattgggtttgtctaccctgattattgttttctggtccaaaggcaaggggaaagaggaaagttgctgctttaacctcttccagcgtgccgaaggcaaagacggccaaggtactaacacgttggccgaagcctattgggacggtcgaagtgtcgaagcttattgaaagtacagaggctgtcccattagccatagaaacagctcctgcgatgccgatcgaag

SEQ ID NO: 114055 - DNA, 391 bp, Zea Mays
gggattcaggactctgtctgctcatgagtccttgacaccactgtccacctacgctgcctcggtcagcgatgctgcccgtcgaaccatgtggtcgctcagccacacctaccggcagcagctgcagaacacgaggttcaggcatcttcctcagcgtctatgtggaggaagtcagaccagcatcgtcccaggtgaagctggtgaggatcgcctcaacaccctagctggtgtagtggccggtctcaacaccgacctagacagtgccaccctggatctctttagggtgcatttggagctggagaatgcccatgccaggattgcagccctggaagcccaactgcaaggactggatccacccgaagctcaggtccccgccatggcgttgtctcctccc

SEQ ID NO: 114056 - DNA, 666 bp, Zea Mays
agagcttcactgacctctgaagatcacgggacgagaactatacgggcgtgcaattctctggaacgttctggccacggcgaggtaggggtctcggtgggtgtagtcaccaactcgagagctggcgtgcaaggctttggggcagacccagcttggtgattggaaggggaactacccaaacttgaacaccagcacttcttcactcactcgatgattacaagctagagctcgagagcagggattccctcactggaccgtgccctaaagcaatgaacaagaatttgttcagcacatggtggagataactctcaagttgccagcgctgcatggctgatacacatggcaaacaagcatcctcaccacaccagctcacaactcaacacaaatatctacccttgtccatttctgcagctaataagcacaataaataagtacttcactgcccaaaactcccaagccagtccaagccttgatatttttgcagtatagagagaccccagatcttcagggatgtatcccaactcgagcacatgggtggagtacagcagagagaggatcttgttcagtttctcaaaccaaactctgaagttgactgaaacagcactactgctccattcccctcccctttgttcagtccctgttatctcataattccccatggcaatagac

SEQ ID NO: 114057 - DNA, 1135 bp, Zea Mays
gccaaacactacgactgtaccgcctgacgttgccctttgcggcggtgtggacaatccgcgactctgggccgaacggtctgcaacctcgttgcaggagcgacacctatctgcattgctctagacggtaagcgctttgggccgaacggtctacgatggcgtggagccttcttcttcctcgcaggaacctagatcttatggtgctctaggttcaacagaccacccggggtgtcacaagacggcgtagagtcatatagggattaagaaattaggtcgaggaagagacctgaagacattgaccctcctagcagataactagagagggagggacctcgttagggtaagatcctagagttatcttggagttgacaggccacccaaaatggagctagacgacgtagagtcgaatagaggtggagatgactatgtggaaagatataactagggttatgctacatctacttctaagtcatgaatgataaagaaagtaatagattggttcaattggaatgtgtttaggagttctcaatcgaccgtactttttatatttataggggaggatatctggacctgtttctaggcgagatctaaatgttaggataaccacacattggactagtactctcgctcgtgttaatctggtcgcgggagcgcggaccgtctaggccataggactgaaccgtctgaccgtgcctagatgccaaatatggtgctcaacaactccagctaaatatttgtgataactgataagaaatgctaaagaacgtgtgatataggacgaggatcatatttgatgctgccatactgatataggagtattatttagcaaccaaataaacgcacctagagacatgatgcattggttagcagagagtaaatgcaatcctatagctgaaaactgtgtgccgtaatgtttcggtctcaagatggtaggaattgactgacaatgattatttgcttgcggctgccatctatataaacaacaaggaccccgcaccatgaaagtgcatcaagaaagcatccatctctcggtagagaaccatagccagcttccttcatccatggcgctactcaagataagcatcaagagtacactggttgttttcaccgtcacatggctgctgatgacactccttgc

SEQ ID NO: 114058 - DNA, 543 bp, Zea Mays
cacgggtcatgacaatttggcattagaggaaggtcaactctagagctgtcaagacgacaccggtggtgaaaccgtctgtccagacgcatctcgtgctggaggctatggcgactgtggagcagaagggagaggagaagtgggaacagatgatgaagatgatggatcgagtggtgaagaagttggatacggtggaagctggacagcatcggctcgaaggacaagccgagctctcagctacagtggcaaggaaggcagaagaagagtgtactatattggcaaggcagatggaggagacgggcaaggtggtggcgcagttgtgtttggagatgatggcaaaggacttggagggcgatggtgttggatcatcaagggagggtgctaatcaaggtgatccaaaccaaagaagaagagaaccacaacaggagagagttagagaagaagaagatcgggtgatgggagggcaaggacatccatctctgcccaaatatttgtttcccagatttcaagggaaggaacctggaatatggttagccaagtgccaag

SEQ ID NO: 114059 - DNA, 437 bp, Zea Mays
gtttgatgggaaagaagtggttctagaaccaagaaatgacgaagtcgttgtttttaagagcttcttcagagcaggacttcggttccctatatatgagatgattggtgaagttttaaagaagttcgaaatctaccttcatgaactaaccctgaatgctatagtcatacagtgtatatataggctttacgaagtcaaggaaaaactgctaatggcgaaggattttgcagagtacacgaactccattaccagactatggctagggctgatggaatgcataagaacttcgtgtgttacaattttgcacaccaaaaggatattaaggctcctatgattggatatcgtaccaagtggctgcctggctggacaagtgaatggttttatgtgaaagctgacatatagaaaagggagaaacttatgactatggtgatgagtcccct

SEQ ID NO: 114060 - DNA, 809 bp, Zea Mays
aatttctggaacaaagaactgtcattcaccagtttgatcccaatatagaggagtcctgcattttctgccatatagagcctcaaacggggacatcttcaaactggcccggtagctgttattgtaagagaattctgcatagggaagactcttatcccaactgccaccatgtttaagagcacaagctcttaacatatcctctagtacttggttggtacttttggtctgcccgtcggtttgaggatgatagtccgagctgaaattcagtcttgtatccaagcactcatgcaacttctaccaaaaccgagaagttaactgtgatcgccggtccgacacgatcttcttggacacaccatgtagacatactattcgtgccatgtacaactctgctagcctggctcctgaatacgtggtctttactaggataaagtgggctactttagttagcctgtccacaatcacccatataggcactgattggtttggtgcacagactgaagctggctcacgcaagtctggcccgttaaatacagcaaacctgagcttctccacgcatgcagctaaagggtcttttttaagcctgttctgcacccgcggatgcaatccacgccctccgtattcacgctaccaaacacaagctggtgcttggtcaaatgcgcatagacaacctagctaagcacccgcggacaaccaaacatgccaagatgtgtggggtagacccacaatgaagtctatgccaatctcttcccacttccactcaggtatcttaagcgggtgcagcaaaccagtaggtctctgatgttcagctttta

SEQ ID NO: 114061 - DNA, 584 bp, Zea Mays
tcctgaccaacttcttgacatcgaagactgccttccaaagtcgacgatgcgtgagacactgctcgagatacctctaatcccacgtctggaatttcagagaaaacatccatcatgtcgccagcagtcggctccgacagcatatcttcaggaacgacatcctcaagggcctgatcaaaatctgttatggacaattcttgaaggctgacaagagcagacagagctggagaaggaatatcactatcccccctactacctctgtaacaccggctattcttacgaattagcagaacttcttcttcctcttcttcgtcctcataaaaaatacggacaatagtcggtgcacggtcacacccattgggatcggcttctgcacggtcacacccattggggtcagcttctgcacggtcacacccattggggtcagcttctgcacgattacacccattgggatcagctttagcatggtcacacccattgggatcaacctcaggaaggacctctgctggtacttcttcacaaacaggagcagaagggccagcatcctggtccaagcatgacagtcgccgaagccgcctcttcttctt

SEQ ID NO: 114062 - DNA, 404 bp, Zea Mays
gctttatccaccaactcaaatatgacctcacttgtgtgtgacacatttgacatctcctttgacttgataaaacttgtccctgcagtggtatgtgcacaaatgttcatgatgcttctcatcttcatatatgtccaagcatcagtcataacagagcaaccatacttgttcttctcgtcttcatggtcttgcagcaagcttttagttctagcatgctcctcttctagtagcgtctctctataatgatgttgagatggtggctgaaaaccagggccaaatcgactaatagcctcaaccatttccttgaactcatcactgtcacaagcatggaatggaataccatgtgtgtacacccatctagcaacatattgctgcacctggtgtgttctctctttccaaagagcctc

SEQ ID NO: 114063 - DNA, 304 bp, Zea Mays
tattgtaactccttgtttacccagtcagcggtgtgcaggcgggaatctggtcattgtgggagcatgcgtgttgcaataagcatggcgacacatgcatgcagttatattgtgtggcatgcaagctggcaactgcttgaaactgaagcgtttttgcggctgtgaggtcctggtgaaaattgtttaagcgcctgtgaacacaagatgtagggaatatgtcacagctatgtgtccttgcaaagttgtgtttatctgttctgtgtttctctattcttgtttttatgtagagaatcaatgatgtcctcat

SEQ ID NO: 114064 - DNA, 583 bp, Zea Mays
ggagaatgtcaacaaagaggccaacaatgttcagcaggactacttcatggggtttgggcctgtaaccaaacattacacatcaatgtttgagatagtgcacttccccaacctgctgcaagatgtgctgcatgcgttgggaacctacgtccgacccttgtacgagacaaggcgagtgtgcgagcctcctcgggcttgctattacatcactcgcattcacatcaaggtgatggatgcaggggatagagggttcaggactctatcagctcatgagtccctgacaccgctatccacctacgctgcttcggtcagtgatgctgccaggcggactctgtggtctctcagccacacctaccggcagcagcagcatgacatgaagtttaggcatcttcctctgcatctgagtggaggtagccagaccagcatcattccaggtggagctggtgaagatcggctcaacaccctagctggtgtagtggcaggtcttaacacagacctggacagtgccaccctggatctctctagggtgcacttggagctagaggatgcccatgccaggattacagccctggaagctcaacttcaa

SEQ ID NO: 114065 - DNA, 354 bp, Zea Mays
ccgagtttgtccctgaacaccccagctacttcgtctttgatcctctccgccatgtctggcgaccatccattgagtttgtgggtggaaatctcaggttgcctgacatcactctgtcggctttcctcccagggatgtttgaggtgtgtgttaggtgtcctattaatgtcaccagctcatgccctatacctctcatgctctcttgtggccgaacagtattcagccctatgtccatgaggtggtatggtatgattataatgtgttgctggtggggcaccataatgttgctgcgatgaatgtggaaactgtgcatattgcgcagctctcggctctgcgtacgcatatccggacggcccg

SEQ ID NO: 114066 - DNA, 402 bp, Zea Mays
attcaggcttcaacatggggtagtggtttttccaaagtgagaggaagctatccgtggtgtcggggaggtgggtgattggttgagtcaacagcgactgctcgccagatttgtcttacgtcgttgccgatccatggctcgtcgtgggtagcttgactgatgcccagggtcgtggtaatatttctatctcgggttcgctttgccctcctgttcaagtagtgatggtcggatcgaagttcttgccttggggtcgccgatttgtttgcgccagttagggcgtcgctgcggctcaaaccgcgccgccacggtggggtcgggagatggaagcagggctggtagccgttggatagggagtggatgggcaggattataggtagtctgccatttgggaggatttgatttgaa

SEQ ID NO: 114067 - DNA, 863 bp, Zea Mays
gagatattgaggatgttgttggagatgaacgagatatagagagaatcttttagaaaagactttaaaggatggatatacaggatggatataaaggacgctataggaatgcttccaacacgccatgtcgccattagagttccttagcgtagatttttaaattcgcttttggcaagcgcacatttcctaggcttctacttgactcctctagtccttatgagatcttcctcttgcacgacttgccaaataaatccatcagaatactgtcgaatgcaataaaaacttcctaccataacaattggtccctttcacactgatcaacgcagtaaccaaacatctcaatgcgcatacaatcgccacaagtgtgccactgggttcggagtcgcagaggtagaaggcacccttggagcgcagggtgcaccacagttgcagaaggctggatgtggctgcaataggtgaggtagagggagcacggggagcttcatgtccggccattcgagatcaacgcctgagcacgctgtgtggcctcactcgcactctccaaccgcaaggagttgaccaccccccaacacgatgctatcaactcgctccaggtcccgcttctttctcctatccccttgccgctattaggtttttaaccacagtaaccactgcctcaaatcaattggtttgtctgctaatcttatcgagaagcacaccaatttagcattgaatcacgggtccttgttatgcaatgtgagagttgtgttcgctggtgtttatgatctgaccatatggtcaggttgatttgagagagcggaggtacctgctctctggggcatcggatgttttagccgttgtgttcaatgcgtgaaacacgatcgaat

SEQ ID NO: 114068 - DNA, 378 bp, Zea Mays
gcaaagcttggtccccaatgactcaacacgactaaacaagaaaggctagccctcaagaagaggcaaaaatcatgctcaacaccattagccatatatcaaaaacagatcagtgcacaaaatcaacaatattgctgaaatcaaagctaggtcctgtagaaagaggcaagcgactcaacacaactagcaaaggctcacacaagaagaatcaagaaaaaaaccagaatttcttcccaagctccaagaatctagagtctctcccccttaagatctctctgttagaaaggtccaaaaattgtcccccttgttaagagtccgccttattaggagcccgaaaaactcaaagtatctccccttgttgacaaatgaactcatcaaaca

SEQ ID NO: 114069 - DNA, 341 bp, Zea Mays
gttacactattttgtgtgctaaagagagatattacaacctgcagtcagaattatatgacattatgatcatcaaattgacttgaatgtaattcttacgtcatatataatgactggagtctggagatagtattattacataaatacgcatctgcaacctggtcgtgccttgctctatttttcatgcctttattttatagttatttgtagcctgataaacttaaaatttaggttggtaaagaatgccttttttatattcaataaattagttcagttgttttggtggaatgcatatccataacattatttacttgaacgcacatgctactttagatgatatgatt

SEQ ID NO: 114070 - DNA, 512 bp, Zea Mays
attaaaactaattgttctaaaaaagctagctcatagattattttattgaacgaaaaagagagaataatatgttagttctttatgacgaggtaagctcacacgttttcctgtgattatttatctatctatgcgtattttttatactgctagtgtgttaggttacttgattttcatttttatgttagtccatatgagttagcaaatggactctgctgttaaggatgtaaattaggaaggcggagaaagcacttattatttgtgcattaattcatgttttttatggtgcatgagaagtagacgtaattatggagtgtgggcgcacatcacataggagaattgaaaagacaggtttgtttacgttttcaccaaaagcaaaaacgaacggcccgctccgttgcgcatttgtatggtcccatgagcaatcatggctaggcgccattcacccacttctcttttctattatactatagtatccttcatctgtagagtgctgttttgcccatgcaggcatg

SEQ ID NO: 114071 - DNA, 508 bp, Zea Mays
taaacctgacccatctgaatcccaattccatcttgcaaatttctatctttgtacatctgtgtgaggcctacctcggaattcttcctcatttcggattatggaagtatttgtatcactgtcggcctgggatggctgggggcagcactagctcgttggtggtgtaagtctggagatgcgccgtgggaggaagacagaataccttgacattcctctcaaggacagcattaaagggtggcgccttgagtggtttatcatggaaaaccactgcaagtccctcctcctcggtcggggagacagccagatgtacacacttcgagttgggttgagtcccccactgctttggaggtgacggaggctagggttctgcttgctgagatttgtctgctcaaggagagaggtctgactgccgaagctgtggttgctgacttcgttttcaagaatattcagcctttgaaagacagggcatatccagcttacttgtacagtggtattactaactcaactcggg

SEQ ID NO: 114072 - DNA, 449 bp, Zea Mays
ggccactgcgcgatttctcacggtggcattccggtccgatttgggggaaatctgaaattcgcgagctatggtggacgatttgaggcgaggagtggtgcgctggggtcgtaacagagagacggagcaagggcaacgctcaatttatagaagtcggctttggttgctccgaattttggtcgaaggggagctcacggtgacgaaagggcgagtcaccagagtttgtctaacatggcattcactggggtagagtctcggggtggtaactagctatctcgcatgactaactacgacgtggtaacacggtcgatggcatggcgcaactgggataacggcggccaccacggcgacgaccgcacgaccacgtcaccggcgagtgggtacgacaggcttgcttcaggccaagttcacctcctcgacgatcttttcaatctccctgcagatattttcac

SEQ ID NO: 114073 - DNA, 419 bp, Zea Mays
ggtgtctagcgggtcctctgccttggtaaacaaaggcggttgcgtgtgatctttgtagtctgagcgagatcagtgaggtgtgccatggcgtcgctctgcaggacctgtaggcggtacagtgcgctcatacactgaacagtgatcctcccaacctagtcgggatgcatggcccacacgtccttcacgtggctcactctgttgcaccacacttctcggcggggaagagtcccagtggatgcatcatcatctccaggggatgatattcgcagaagattgttaggacttttagcgctacggcctcagtggtgttgtccgccctgaacccgatagtctcggaatcgagggaacgccacctaggctgcagaggatgagactccagggtcagccaaaccctgcaatgtggcacccgatgctcctcg

SEQ ID NO: 114074 - DNA, 809 bp, Zea Mays
ccgaaactggaggtctgagatgaatacaaagtttgcaaagaaagacctagacccgacgaaaaatataaaatctcagcaggtcagtgggcagtatttctagagcagaggagcagccctgatttcatatcgctaagtgaggcaaattcggaactatctaagaagaacaaataccaccaccaccttgtcacaagtggttacaagcgtcaggttcctaaatggagacaagaagacgccgagaagaaggctgcagggttgctgacgctgtccgaacaacttggtgaaagaacagctaattggatccgtgctagaaaaccaagggaaactgggtctggtgtatcttttgatgatcccactgtcgaagaagcggcaaaaaacatatatgcaattgcagctaagcagagccaaggaacatttaagccgcaaagggagagagacattctaacagctggtctcggtaaccctgagcatcctggtcgtgtacgaggaatctcatctaaggaaggatggaaggaaggattcagaccataatgggaaggtctatacaagaaacgtgatcgatacaaggaagagatgacgaattattttaaggaggaggccaagaaagagttcaaaggcctgatgtctgaaatgctatcgaatcctcctctagaattgatgcagcaactggcgatcgcgagtgcgatgtctgttcaacagatgaccactccacatatgcaaataattccagcagctcaaacgccggcttccaccgagggtacgaccatcccaagctctgtcgcgtcaacgggaaataaggtccgctatccagt

SEQ ID NO: 114075 - DNA, 337 bp, Zea Mays
gtttaatctagtcataccaatctaatctagatcccatctaatctcatatgatctaatctaatgtggctacttaaacatattagttaatactggtgaaatagattagacactactagctatgttttaacctaaattgatgtcttttaacaacttggccatacacaactacttaacatacatgatgggttgtctaaaccatccattccaacctaaacatcaaaccagatcttgacctacctcatgtggcttatcctacccacatatatacctacatgaccctaaaacctagttggagacaccaagatcgaagatgatcaacctcgtcaagggaggataa

SEQ ID NO: 114076 - DNA, 471 bp, Zea Mays
atataatgaaagtagcacaaaaatagcacaagatataccaagacacagtggcgaactaaactaaacattagttagtaagacactgcaacaactatacgcaaacactagttatttatgtgtcattgggcacacgtaaacattaccactggaaagacgacgatcacgacttttaattaaccaacacaacaggacatcacacgtatgaacatttatttaacttgctacgacttttccttagttctcctattgaccacacaagagcaaccaagacaacgtacgtttaaataggacataggcatcaataacaacaaaacttatatccacaaccaactacagcaagcaagcacattaatcacggaacacatgttaacctaagtttagccatcacaagtctatatcggttaagcgctaactaagcatttttagccaaaatggtgaactaaacattcatttgagcacgtgcagattttt

SEQ ID NO: 114077 - DNA, 361 bp, Zea Mays
tttgcgatagattgtgaactgaacctcatcaatcaatcaccatgcttcccttgctcgagtttattttacctttcaggcacgatggtggtgggggctactgcgggggctgcggtgattgcgtgtcctgtgtggaggacaggacaccagcgaccacgaaggagtcccctctcgcctcatgataggcataggcaatctgatcgatggtggcgctagcgaatgcgtcgagcagtcccaccgctcctcactgacggacgacgacaaagctatggacgccgacaaggaaaaggcagagaaggagagcgaggacacagtcaatctgtgttaaatctgtgttgagcgagatcaaggctgacgtctctga

SEQ ID NO: 114078 - DNA, 475 bp, Zea Mays
caaaaatttatctgtggtgatcccgaaggggttatccagtggatcggcgaagaggtcgaagcttttgaagaaatactcagcgatcgtggggacttttgtgccttcgtcggtgcacgaggggttgcagcaattttggagaaaaccggttgtgatcatgttaagactgcagcccaggcagaagccatcttctcagcagacgacacgaaggagcctatggccgatgcttctttgattggcgggaaattctattctgatgtttggatgaagagtggtcgtgagatggccgatgaagccataaaaacgagtgaaaaagaatctcatgacgtccgagaagaggcaaagcaagctaaagaagctgttgaacgcgcaatgattataggtatcctttttaaagcctttttgtctcgttgtttgtttctagcttcgaaattcaccattatgttctttattatagccggcctttcgccaccaccgg

SEQ ID NO: 114079 - DNA, 566 bp, Zea Mays
ccgccccaccgacagacagtagtttcctcgcatctaggtcgccgacctctaaggcgactggttcgttcaaagtcggggaagcatgcaccgtcatcaccccctcagactggggcggggatgacccgatgtgaacatccatggaggtatgggagagagagtccacctgaacaccctcgggggctgggttgcagctcgcactacccaccagagccggatcactaccggcaacaccctcgggggctgggtgactaccagcaccaccctcgaaggctgggtcttccgtggtggccgtctctaaggctgagggctcctccgtaacctccataggaatcgggtaactcgaaccagcattctagcattgaagactaccctccaaagtcgacgatgcgcgagacaccgctcgggatacctccagtccaccatctagaacctctggacgaacatccatcacaccatcggcggttagctctgacagcatatcctcggggacgacgtcctcaagtgcttggtcgaagtctgatattgatagtccctgaagactgacaagagttgatagagctggagaa

SEQ ID NO: 114080 - DNA, 1312 bp, Zea Mays
tgaacatccatggaagtacaagagggagaccccgctcgaacaccctcgggggctgggccatagtttgcgctacccacttgagccggatcatccccggtaataccctcgggggctgggtcgtggcttgcgcttcccacccgagccgaatcatccccggcaacaccctcgggggctgggtaagcgtcaacaccgtccttgaggaccaagttctctgcagtagccgcctctaaggctgaaggtccctcagttacttccatgggaacaagacgatccaagtcagtttcctgaccctcaagaccgcgctccaaggtcgatgaggcgcgggatgctacccgggatgaccccaacccggcgtcgagcacatcagcacaaacatccgtcgcaccaccatccgctggctctgataacagatcctctggaaccatatcttcaagagtctgatcaaagttcgccagagacaattcttgtagaccaatgagggcagacagagcaggagaaggaattccactactttccccactggcgacatattgacgactgttcttccgagtcaaagggacctcatcttcttcctccccatcgttttcatcagcaacacagacaacacccccattagggtcagcagcagatggagcacacccattgggatcagcaacagatggatcacacccattggggtcagcgtcagtaaattcaggcacaggtacttcctcagcagtaggaaccgaaggaccaacgtcccgatccaaactagatactcgctgaagacgtctctttttctttttctgctcatcagcaggagaatcaagttgattggctcggcaagggcgtttcgggcgaacactgacaggtctctgaatatccaaggttgtaccagcttctgggagaggcgccaccaccaatgtcccagcaggagcagcatcagaagagtcctcggtcagcatatcaagcatagcacttatctctgcatcacttggatccaaaggcacctcaaagtggacctgccgttcatcatcaggaatttccccgagcgaggcaaccaaagcgctaacttcttcggcagagggtcgcactctaaggcccaaaccgccatcagcgacaggtggattcgacacaaaatgagtgaaggccttggaaggaggcaggttccaggccgagtatgcaactggggcaccaacatttgataccttgcctctaagaatcatttcaagtcggttcaccgagtctacaacgggaattcttctgttggtaacccgagttgagtcatctagacctcggtacagataagccgggtatgccctgtcctttaacg

SEQ ID NO: 114081 - DNA, 875 bp, Zea Mays
caattctgaagctggattggtggtcttcatgggaataaagtgcgcaaacttagtcaagtgatccactaccacccaaatagcatccctgccctgaggagaatgaggtaagcccaccacaaaatccatggtgatatgctcccacttccactccagaatttccattggctttagcaaacttacaggcctcttatgctcggccttcacgcactgacatacttcacaggcagccacgtacttagaaacgtcaaccttcatccgcttccaccagaagttttgcttcagatcttggtacattttggtttcgccagggtgaacggtgtaaggcgttttatgagcttctctcaagatatccatcttcacctctgatttctaaggcacacaaaggcaacccctgaaacgaaccaaatcattctcatcaatagagaactcccggggtttaccatcgccaaccctctttcgagcttcctgcaataaacgatcctactgctgagccgcacgcactctctccatgagggaagattgaataagcatacgagtctccttactagcggtgccgacatagcacaaagcgatccccaaacggtccagatcagcaatcaactgcaaggccacttttggaaccccggacctactaagggcatcagccaccacatttgccttcccgggtgataatgaatagacaaatcataatctttaatcaattcgagccaccgacgctgcctcaaactcagctccttctgagtgaaaatatacttgagacttttatgatcggtgtaaatgtcacaagcctcgccataaagataatgcctccacgactttagagcaaaaaccaccgtggccaattcgagatcatgagttggataattcccctcatg

SEQ ID NO: 114082 - DNA, 609 bp, Zea Mays
tggggttctgttgtgtgtccgagagaaaagaaccctcttcgtatcagggggccgatctcctccttttataggccaaagagggggttagtcagcggtggcttccataggaaggagcaaccggatggcggtacaactggacgttctaccagttctaccacggggtaaagccacgcatgctcacgatcccctggttgttttgcattctttatggcagacgatgcgggcagtgtggggcctaaacatcatcattcgggctatgccgactcatggcctattgtagcttggggctcgacatggttcgtcatgttgcgccctaatagcagcctgtgcactcaagcttagtcttgatagttcatgagtgcatcacaggtcggggatgcatgagccataaatgcatcgcagtctgaggggctcgtaggtcatgagtgacgtgcgacctaaagggttcgtaggtcatgagtagaaggcggaccggtgcctccactgtggctcggcaccatgcccagataatgcggccgatcatttatgacaggttggtctggggccaggcgcgagatccactcgagtggtttccctttgaaagttgactagagggggtgtgaataggcg

SEQ ID NO: 114083 - DNA, 457 bp, Zea Mays
cgagtggcagattgcacctgccctatacctcagatgaggagtagggttaggtttttgcctggccttcaagatggacataagaacacaagggtttagagtggttcaggatgttggagcataataccctacatccactgtgacttgtattgcttgagaacttgagagttgaaggtctgagcgtgaattgacctcccccactatgtagaaagtgctcttccttttatagtccaagggaggcacgatgcaaggaagctcaggccccgacaggtgggcctagaagagtttacaatgtggaacgggaaacgccggatagagctgacaacactagatcttcttgagtgcgtataccttcttggtcatcgtgtaggctcatgacatcctatcctcctacttcgtcttcatcggagtacgtgtgcagccatcacggtaggttgcggcgtagtctagtctgttgccg

SEQ ID NO: 114084 - DNA, 389 bp, Zea Mays
gtatctaaaacttgggttacctaaacccaccactaaacaccataattactaatttgggttagcctctgactaactctactagttagccagggcctcaatcatgggttatacctagtgggtgcgcgtgtgtgccaccaccagataccaaatgaagcaccttagttacatgtgaaaaacgacaagataggcaaactagcccctagttgctcgacaagtctgattgagcgatcataacttgaattagcatagccataagaagactgcttcgactatggcaaggcagactcatcagataaaacaaccttttggcatcggtctctcacccatacaaggagaaagccaaggatacaacatgggtgtcccatatagctagggacatcatggcatgt

SEQ ID NO: 114085 - DNA, 796 bp, Zea Mays
aagtcacctaagggtgcagccagaatagcacaacaagtgtgttaatcgaagtctcttatttaaaagacactccgcgcaaaagtcgcctaagggtgcagccggaatagcacaacaagtgcgttaatcgaagtctcttatttaaaagacactccacgcaaaagtcgcctaagggtgcagccggaatagcacaacaagtgcgttaatcgaagtcttttatttaaaaggcattccacgcaaaagtcgcctaagggtgcagccggaatagcacaacaagtgcgttaatcgaagtctcttatttaaaagacactccacgcaaaagtcgcccatgggtgcagccggatcaacacaggcgcgcgaatacggccaacaggccacatcatacaaattacagttacgtacactcggcgagggcatcatatattacatcgactcaaccttcgggatgatacccatctccctgtaattgaacagcattatcctcaattcctcaccctcaaaaagatttcgcagatccccttcacctatgctcgccccaatcgacgaggacaacaattctcgtttgccaacctggtctactcgaagacggccacgctccatccccatatgatggtgcctaagactttgcgaaaatgcacccacactgtgcttcgacaccacccttcgctgcctatacccagtactcgcactaggaagatccccggcaccctccacacgcgacgaagactccgcaacagccacatctagcgcagcaaaataatccaagccttcatctgaggactcctccgtccaagaaaac

SEQ ID NO: 114086 - DNA, 354 bp, Zea Mays
gtcatttggctttagagtcactagtacatagaacattagtactgacgattccaaatatattttcactggcatttctaccttccgctagtgtaaaaggacattgcaaatcacggagctcactagtgtctcctagagaactgacactgaggctataaatgagaagtaagtacttgctataaagtagatattaacatgtcggtgcctattcaacacatatatttacaatagctataaactagttagcactagtcagatattctctataagcatgttcggtgagttcaaagcctaagtgtatgaatttataaacactctgagtgtcatgtgcggtgtggaatcaggtgtcataccgat

SEQ ID NO: 114087 - DNA, 2329 bp, Zea Mays
ttttagaagtgttgagatgttgccataagatgaaggaattgtacttccagagaaattattattgtccagttgtctaaaaatcaatttaaaaagatgtagttagaaataaaatggacaatggatgcaatgcaattccaaagtgaaattgcaaatgcatattacaataattgaagaaaacaaaaagcttagtgcgcagtaatttttgtacactaaaccaacactactacaagtctacaaaatgccctatccatgccagtttgtaacccacaacagtaaaaaatgtcaaccaacaggtaccttttggccccaaaaacaattgtaaagaaaaaagtcactccaacaacccccatcccaggtcacctttttgcagcagggttacacattttctcacacttggtgttcgtgggagtcaaacccacgatgggtaacctccttgccattcaactaacattgatcatccatagcaatagaatcttttccccttcgacctagttctttaaatctttaataaattatttggccatctaaatggctagaaattaatatatattgtcagaacctaaaaaatcatataaagcttgcctccatcagagtctataaagaagttatgaatttctgaaacaggaaactatcggtgtgggattgtaatatcaaccaacagggacgctaaggttccatggcgattcataatacgaaaggcacagatagttatgaaggtatccatgccccttggtaacatgaactggcacgtatagtcatcaagccatccatgtccattgataacatttcaggtgtttctctagcttatgttatgatccagcaatggtgcactatctgtgacacttccatttttcctgcagggatgtcttttcatagtagtgtgatatgttcgactactcttgattcgttactgatcttgaaatagtagtaaaaagccccccccccccaaaaaaaatagagtgaaaaatatttaagcagcaggtcaacttgagctactggtcacataattagtgtttattgagaaaaaagtgcattactgataaggataaaaccagatctaaaccaagactacaactttatctacagcagactcattgagaaaataaaagacgttatcacaagtaagcagctattttacaaaaaaaaacacacacacacacactcctacagacgttaatatgttgtgttgttcactctagttatttaaaaaaactctacctgcgaggagagaaaccaccccacagcattgcattaagaagaaacttaggccgagaaacaccccaaaggcgaacgcccaagacacatgcatgtggccatgggcatctcgctgcaggtggttcacatgcatagctcagggacagagccgacgagggttgtttttgctcccacaaggagtcaaatctaggacctgaggtgctaccaaggcacatgtaaccactaggctacagacccgttcgccagttaaagttcaatgaagctatgagataacccatatagagttactactgcatgggagatgtgtgcttcatgccaagcaaaatttatacaatttctgaccaaagaatgataggcagccaagacaaccaaattaacaaaacagtatgtctcaaggtatcgcaatagaagcttacatacatgatgagcacatttggcaactttgatagttctggaggaatgtagcctgacaagttattgttatccaataatctgcaaattaattgtgttctcaataaagtataaagactaatgatgcaaatatgcaatgtcagaaacttacaggtgaacaagtgaaggtaatctggataactcaggtgggatttgaccgctcaatgagttgttgttcatgtgactggatgaagatagaaaattcattagggtacgtattccttgataacagagatacaaaccatattatactcacaagtgcttggttttattcaggttagcaaatgatttaggtataagtccagatatatggttctgatcaatctgaatccgattcagattaggaaggaagccaatctcctctggtaaagagccattcaattggtttccattcaggagcctgcaaatgcacaatgggggcaccttgttatagagcagaaacaattgcgtgaaagaaataaaaaaaaaaattgcaaaggtcatcccatgctacataggatgtacaacaatggcacacatgccaaaaacttgtaccagagaaacacctttaaattattatgaaggaaaatagaaataccatgtttttgggtgaatcttagattcagtctaatgaatactaaattaaattaatagctctgaagaaccaaacagtaatttggttggt

SEQ ID NO: 114088 - DNA, 447 bp, Zea Mays
caggggcaccgcaagacctcaactgagccgacacagagctcagaacattctgcaaatacaagaattagcaaaggaatatatttatcaacacaagtaaagcagggcaaaggttagctcacctgaaggttagagaggaacaaaggaaatcccaaagccggaggcattgacgcgccgtcgaacggcggggtactaacagaaacaatatagagagcagactcgagccccaaaagaggattagagctcgcgcccaaggcagtactcagtgaaacctcagctccgacagcgtgtagcaaattaccagcgcccgggtcactggcctctaaagtgatcggaccaacaagagcggcaggaagactcgtcaacactggctcctcaaactgagctggtagtgatccgacatgaacatccatagaagcagccaaagaggagccgagctcgcaccctcgg

SEQ ID NO: 114089 - DNA, 551 bp, Zea Mays
gatttgtctattcattatcacccggggaaggcaaatgtggtggctgatgcccttagcaggtccggggttccaaaagtggccttgcagttgattgctgatctggaccgtttggggatagctttgtgctatgtcagcaccgctagtgaggagactcgtatgcttattcaatcttccctcatggagagagttcgtgcggctcagaagtaggatcgtttattacaagaagctcgaaagagggttggcgatggtaaaccccaggagttctccatcgatgagaatgatttggttcatttcaggggtcgcctttgtgtgcctcagaaatcaaaggtgaagatggatatattgagagaagctcataaaacgccttacacagttcaccccggcgaaaccaagatgtaccgagatctgaagcaaaacttcctggtggaagcggatgaaggttgacgtttctaagtacgtggccgcctgtgaagtatgtcaacgcgtgaaggccgagcataagaggcctataggtttgctgaagccattggagatttcggagtggaagtggg

SEQ ID NO: 114090 - DNA, 406 bp, Zea Mays
actggccgcaacatgttatcagatacgcaggcatttgccctggcatagcattgcgtatcagcaaggtgcatgctgtgtaagtgatggtgtggaacagtcgccgttgatatgctgccgcgatggttcttctcattgtatgatgcaaaccccccaggacaagtagacggcaatggagaatatgtggatagacatgtatccttatcctcaagatctaccctggcagtgctgaccctctgtagagctttgcatcttgagattccttcctgagcctgatcagttcttggctcctcgtgtttgcaaagggttgcgtgctttgatctgcagaagcatatctgaaacaaaggtaaaggtgaggtgcaagtgcaatggagagagaaattctggaaatatatcgcgaagaatccca

SEQ ID NO: 114091 - DNA, 287 bp, Zea Mays
gaaaaaaatacatggattatcaggagagaatgataaatcagtcgccgcatccctgtaattaattagtggatgtggaatagccaacgacaagcaggcgcagtggaatccttgcccgtccaatcaaggtgccacactgctaccacgggaacgcgtgggccccgatctgaagttgcacgtatatatagggaaagccggaaaaggtactacaaaattcaggtggtgggtcgtagctgcatttacattattgctgagatgatgataagttaataattcggcgcggataagat

SEQ ID NO: 114092 - DNA, 738 bp, Zea Mays
ttgtgaagttgatttccttggagtttgtaagtaaataactctagcatcatttcaatgtttttagaggtagctgccgagtaacttgtagatgacgtcggagttttagaggtaactgccgagcgactgaagacaacatcagcgttttagaggtagcgccgaatgacttgaagacaacgtcagcgttttagaggcaacgccgagtgactgaacacgatgtcggagttttagagtcaactgccgagcgacttgagggagacgtcagcattttagaggtaacgtcgagcgacttaacactatgtcggagttttagagtcaactgccgagcgacttgagggcgacgtcagcgttttagaggtaacgccgagcgacttgaagacaaattcagcattttagaagtgacgccgagtgactgaacacgatgttggagttttagagtcaactgccgagcgacttgagggcgacgtcagcattttagaggtaacgccgagcgacttgagggcgacgtcagcattttagacgtaacgccgagcgacttgacattatgttggagttttagagtcaactgccgagcgacttgagggcgacgtcagtattttagaggtaacgccgagcgacttaacactatgtcggagttttagagtcaactgctgagcgacttgagggcgacgtcagagttttagaggtaacgccgagcgatagcgggatgcgtgggccactttgaggataatagccaagtga

SEQ ID NO: 114093 - DNA, 474 bp, Zea Mays
attttaaatctcgacggctgagaaagcaaattctggctgaacaacagccttggcatgttcgcaaccagcattctccaagatggacgtggccccccgtgcaccagcaaaggcgtagaaatctcctcggtcacttagaatttcgtcaaaagcgtcggcttccccggtgatccactagacaactccattagggttgccgcagatgaatctctgctcaaaggaatatgccccaaccctagcaaagttgtcctttaatttcctggcgcattccaaggatatttcataacacctttctttggaagcataaagctcatcgacggtcttttgtgctcttgacctctcgatttcgcaaatctcatgcttgaccacctcaacttcaaattttttagttgcttcagcaaccttcctttttagttcatccacttcggcttcatgagctttagattgtgcagcaagtttagcctcgttagatttcag

SEQ ID NO: 114094 - DNA, 339 bp, Zea Mays
ttctggagtatttggcttgtagcatatctgtttttttaatgaaagagaaggtatggtggtgtgtttgggacaattacctgcctttcatgggtgaggattagtttgatttgggaaatcgggtctcttacaaccctatgcaagtgattaaattggacaaaggtgagctgcaaaagtgaaattaaggttaagtaggtggattaatgcaggttaaattccgatgtcataaccttgtaaagcacacatcatggcaaccagacggcatcttgtgttcttagttcatcctgcattcctgcatcacacacagctgaccaaacagaacactgacttgtatcttctctt

SEQ ID NO: 114095 - DNA, 475 bp, Zea Mays
ttgtagggagtttatgtttaatggactggacccaatgggcaatagggttggaaaacttcgtagtagctaccagaatccccacgactaggtcaaccccatacatggtgaaataactttcacaacgagattgcgacaacttagggtgttcaccatcaaaggaagggaagctggggcaactgcccgagttggttggcaaaatacgaccaatggacaacatctagtactacaatggtgtgtatggaggtgctagattcttaggaggacgcacaccgaatgaaaattctatagccataggatgagggggttgaggaacataccattgcccgagacatgatgatgggtaaaaattgacccaaagccacgctcccgaaatggtttgtcaaagcggtgcccgtgggggtcgtcggcgtgcactgtggaggcagatgggtgccccacctccgaatgatgttgactgaggatgcgggcctagatg

SEQ ID NO: 114096 - DNA, 497 bp, Zea Mays
catcgaactacaagcatattttgattcctatcttcaatcatctcgtataagtaataaggtcattttcgaggaggtcaagtcatctgtgatttgtgaactaaaagctccatcagaaaatatcttttgtcaaaacaggcaaagaaacactcacgctactacaatgcaacgagcccacatgtccacagtctgcatctaaaaaagctagaactcctgcaatctccctgtttgcaagcacaccagatttacttactggtaaacaagagttgtccggggatcagattggagccaccaattttctagcaaacttttgtcacagaatcataactagcacggaacagatgttgtccagggatacacccctatcggtaaagtcatcgattgatctgctcggaggagctaagctaccatactaaaggggaaagaaatcaagaaccgggaggccatgggagatggggtggaggtggtgcagtgcggagtggagcactgacaggagggtg

SEQ ID NO: 114097 - DNA, 440 bp, Zea Mays
gaaagatttgggtgatctacatcactttctggggatgcaagttcaacgacgagatggaggactctttcttttgcaacgtcaatatatgctggatattttggatcgggctggtatggcagattgcaagccctgttctatacctgtcgacacaaacccaaaggtttctgcagctactggtactcctgtttctaatccatcggatttccgcagcttagttggagcactacagtacctcacttttacccgaccagacatgcctatgctgtgcaacagatttgtcttcacatgcatgatcctcgcgagcctcaccttgccgccttgaagcgcattctacgttatgttcgtggcactctgcatttgggtcttcagttgcgcccttcttctcaggctgagttaattgcatactctgatgccaccgactgggctggatgtcttgacac

SEQ ID NO: 114098 - DNA, 428 bp, Zea Mays
gggcgatcagcttggtgagctgcgaagggttgctcgagcggggagaaaacttctggcaagcttcgcaagacctcgttactcgattggcggtgcagattatcgcgggccagtaaaatccttgacaggtcaccttgcagtgagggccctaggccctgagtgggagccgcaaattccgctgtggacttcacgaaggatttgaatgccttcggtttcggtcacacatttagcatgggttgactgatcccctcttgtatagctggcccccgattagtacgaagtcccggcttcggtgcttgaggtgcttggcctcattgacgtcgcttgggtggtaatatccttgcagaaacatggttattggggctcgccaatcttcagtcatgatgaggttgatgattcgatggccttcgacgtcgttggttacttgtaag

SEQ ID NO: 114099 - DNA, 375 bp, Zea Mays
gtgattcagtgttttggcttatattggtgcatactcatatagtgcgaaagggtaacattgcacataaatggcacaaatacattgtcttcagtttaaaaacaccaagaacagtccaatgaacaccactggggaaatataattgctgccatgcctaatgttagggttacttttgttcgtgtatttgcatcacgtggaacataaagtttggtataccaggcgcctaaatcggaggatgaacaacttcctaagttcatacctcgaactgtagtgtggatctgctaaactcctatgggcttggcaacaaaaattacgaattttgaacacagcttcagtgctaatgtacatttatcctcactgaagttttcgtttgacggg

SEQ ID NO: 114100 - DNA, 562 bp, Zea Mays
caagggcgagctggccctgaggagtcaaacaaaaaatttgcggagattgtcaatgttctaagaatgctctaagtcttcgccggatggcgttgcgagcctgtacgcgctgggggacgccttcgtcttgacgatgaaagggccctcccactttggctctagcttgccccgggcctctttccgagctgtccggacgagtacgaggtctccttcgctgaattccctcggaatgactgtgtggtcgcgctatgcttttgtttgagcttggtatttgtttagagcctgtagggcgaagacgcggtctccgtcgatgaggtccttcgaagtaggctcgtctacgtcggggacgactgacgtgactgtccgtggtgacccatgttttatctcttgcggggtcatggcctccgatccatatagaaggcagaaaggggtgaacccagtcgccctgcactcagtcgtgttcagcgcccagaccgcttcaggtaacaggtcggcccacttgcctttcttgtcgtcgaggagcattttcttgacggctgtgaaaattttaccattggcgtgctcc

SEQ ID NO: 114101 - DNA, 513 bp, Zea Mays
tgcaaattatatataaggttcaaaactgtatgcaggcgtgatttctagaatagctaaaagcgtgtatcagcaagttttttgtgcgccttgtgatcgagttttcctttataatcacagacagtttcagaactgatcggtatcctaccacgctcacggctcatccggctcagatggaccaatgacgatcccattaaaattccattctggcaacccatcaggatacacaagcaacgatgtcaggacgattcgctatatggggagaagattgggttaatttaactacaagttcagggcaatttcaccatcccctgtggagaaaatgctgacaaacgtccttgctaacccaacaattacctccatgtgtcttgagtgtgaggagtacaagttcactggtagaactagaagtgtcaaagccgccctttgtctccctcaggagaggaggatgggttaaaggatgtaaacaaagagcaacgaaaatacaagagttagtagaaagagattcctccattgaag

SEQ ID NO: 114102 - DNA, 353 bp, Zea Mays
gtcaggttatgtcatagttgccaatgtctttttgcttgttattcacatgtgacgctccataaatttgactgctcagcataagaggttttgatctggttaaattgccaatggaaatgggagtactgatattcaactcgtgtattcactttttgcatatggttgtgaatgtgcttctgatattaattcttccttgacttaggagatgatgcttcttgtattgggcagttccttggattaatttagttatggttgattgatctattgctcatatagtcatatttcttggcacttgattgatcttgtcatgtttaacttggtcatccaacatgattctgggacaaaaataatttaaa

SEQ ID NO: 114103 - DNA, 1166 bp, Zea Mays
ccagccactaataacagtcatttatgttgttttgctgtttttggtgtttaagaacagatatgctacacttgatctggttttggtttttgagaactgatactcctatctatatcctttatcactatttagtagctggctacactgtcatgtaggatcaattttactgagctgaggctaatattaataactatttcatatttacaagtcctagtgtcctatcttgattcacttgatctggtttaaggactgacaagggttagtgccgcaatttctattttgctgtttggttttggtgtttcagattcacttgattgaagtcctaagtgccagacctcatgagctagtacttgttttggtgtttcagattcacttgtttcaagtcataagtcccaaaaactcacttgtcctatttagtgtctgctttctcttctgtttggttttggtgtttcagattcacttgtttgaagtcttgttgtcttgtgtgaccaaatgggtttatctgctatttgagttttttatctgctatttcagattcacttgcaatgtagctgctgtcaaagaacatttgtatgctgtgtaaatctggttaaatatctgttcttttgaggctaatctagttactgttgactgtttattacagcacctattcttgtataatctgttagctatgtattttctgtagcgatttaaggtgagctattttctgtaatttcgtgttgaacatattaaccaggatcagtagcgatttaattgtgtaaattttggccgttatcaggtgggaaattttggtatactttatcaggtgggaaattttggcccttatgaaatctgtagcgatgctatgggagttgtgtaacagatgtggaaatccttgaatagttaagcaatttttgcaaggtagaattgtgtaagatactatcttcaagcgtgtgaaccaggctttgagaataattgtgtaaatttataagtgtaatttataattgtgtaaatttacaagtgtaatttataactgtgtaaatttataagtgttttgaaaagcgttttagtctatggcattgtagttttagatatgtagttgagtcgtgcagccaaacagcaaaccaaacaggggctgtgttgatcctggttaattatggacaaacaaccaaacaaatggagttattttg

SEQ ID NO: 114104 - DNA, 421 bp, Zea Mays
gtcaaatttaggctgctactctaaccttaactcagatttgggcttagactcagacttgtgtgatctatttgaagatggcttcgtgttcatggttgactagccaaatggacaccagaatgatcatcattctgattagaaagaagacaacgcagctagaaactgaaggaaccatgaagacttgagcgagtggggtagatctgttcatgatcagatccaaatgcttgacttccatagtcagcaagtctacactacatcaacacaaaacatcatgttagcgaagctactgttcatcgaatcacactattgctacccaaggacaacgcgtaagcccatgtgtacctagattaataacatgttggcctatgaggtcatgtgagctaaggctccagttgcgccagcactaagtcatgggtgacccaaa

SEQ ID NO: 114105 - DNA, 488 bp, Zea Mays
ccgccaccgtgcaagaccaaattcactggccaccgcttagcgcccttataaattgacggcacggtctgctgcgctaagttatctccaagccaaagcacccatccctgccctcgattatccaccatagccgaagaatttccttcttcccccaaattggtcgactgcgccgccgtgaatcacctcatcgcggctagctgcttctaggtccgccctcgctctttttgtccgtgttttagcacccacacgtgcttgtgatcgtcgtctgctcaacccattgagcttgacctcacttaatcaaccggaacatcttgatcggtgtacggtgttcgccatcaccatggtcaggaaaatcctaggcccgattaatccaattagaacctgttctatggtcgcctcgggtcagtaatgcttgcccagtagctaatttgggcagccgccgttgttcttggccggtccgagccactgggtggtcggcggtgagcgcgtcg

SEQ ID NO: 114106 - DNA, 901 bp, Zea Mays
tgagaactgagaacgagggccgacgaagcttcccacgacgtgctgctgtttgccggcaaggtctccgccctccccatttcttctactcctctgttgctagcagccgtcgggctatccaggggagggggcggcgattttttttctctgctgctcgtgttgttcgtgttgctggcgatcggcgggctgtccggtaggagatgagagaaggcgatttctgtgacgcatagtggcggagtcggctccccggtggcgatttcctgatctcgcgctggtccatgatgagttgctgtggagggggaggtggctctgacgggatccatgtttgctgtcagcggaggagctgtggtgaagtgggtggctctactgctccagcccacggcgatggggctccagcgtgtgttgacatggttgatccggtgagggagtatcagtttttttgtttttgctcctcgtttttgttcttgtgcataagttttttttgacatgtgtgcttgcttttttcctttgaggccattggcgtggaagcgttgtagacttatgtttagttgtgtggccttgcttccagttaggttagttggaccaaatgaagttgtgtagaaaactagttggattgtgcagctaattttgtcccctgctccttaatgttcagattcaagtgaaatgtcccctactcctattgtttagattccagcgaagtgtaattatttattgtgtctgaactgcatttggcaactcgaggttttttagccaggataggtggaaatatttttaaatttgttgattgttttagaagaagctattttctggaggtggttttcaggttgtactagtttgaggacatgcaacactttaattatagatgataaagtgtctcttaatttaatcttgttttgaacatttg

SEQ ID NO: 114107 - DNA, 472 bp, Zea Mays
gaatatcactggagtaagaggtttggaagcatgaaaattgagttcatatatttcttcgattcatccaaaatactcgacctcgtcaaggccggacgtaaagactcctgaacacattgtttttcgattgggccgactttggtcatagcttgttgggagaaaacagtatccattgatgtcatacctagaatatttcctgaccctataagcaaagccaatagctacttgtctcaactcggcacacatagatagatctctttggccctacaagtattcacaagttaaaagacgctaaattgagttcataaacagatctctttgacaaactaagcacgtaccttatgtttgaaccaggaaatgaaatcaggcaatccatttcccgcaccctttctaagaagtctatcatattcctgtggagttgggtcccttgatcgacactagaatttatgaagaaattgttccatgtatggcgtca

SEQ ID NO: 114108 - DNA, 301 bp, Zea Mays
ggcaacttccctcactggatttaagatcaagaagggtccaataaagcgaggggacaacttccctttaactttaaacctcctcatagcccggattggtgacaccttcagatacacatgatcaccctccttaaactctaactgccttctctgtgtatctgtatagcttttctgcattgattgtgcagttctcaagttctcccttatcaactgtacttgttcttctgcctcttgtataaattctggcccaacgaactgcttttcaccagtttgatcccaatatagaggagtcctgcattttctg

SEQ ID NO: 114109 - DNA, 1371 bp, Zea Mays
gttatctaccacttttctatagcacatatctacagaaaacacaatttagttcatcaaacatacagcacaactaaaacagcgcgtgcagcccaaaacagaaattaataaatttcagctcctatacaattcaagaatcgccgcgttctagagacttgaattatcctaacacttcaccatttgttagagttaaatcaataaaggaggactaacaagtagactcactaatttttatataagttaattcacacgcgagaactaacatacacatttaattaacgcattcaccacacgaacacagtttatcgccgcacactagtttctaacatgcttttcacataactcgtaattcaactattcactaacaataaatcatgcacgacaacttccacagcaaccgatttatttatttggaacaccgcctgcctagcgtaccactagttcccacattttgatttaagctaaaaaatacagcctttattcgattatacaacaacgacctaagcgtcacgttacccaaggcatacatccttcctcattgcgagtataaccatatcacggcatatacccgcacatacgtgccccaggttacgcacaaggcatcaacaacatagtgactctaaccagattaatcatactcctcattcgcctcgactatcccaattatcgatcacatgcataaaacaagtacacttatctcttatttttgcgcaggcttaacacctttcgggataacgtgttactataaacaccttacacattgttgccttaggaacctatcagttcactcgaagacatctattcaagtcataaacacaatcatacacttatttgcgaagcacaacttaaggaacgcctaacgcgtatagactcgacttataattatagaggaagtgatgactacttacggcatgtcatcacatctctacataagcccaaacaatttctactaacgactaagagttctaagtattaaacacaatgttactttccatgcgcaaataaatctcaacttaacactagagacaccgatggatttttactaaactcatcatgtgcataaccttgtctcgcatacaaccatatggtggcgtgcactcgagacacttcaatcaatgtggcacgaccactaatataaatgaacttcgacactcatgtctcaacgatacatcctctacgcaaacgagcattttctaaactactcgtcacatcaacaattataactcctacataatcacgaatcccatcacattgcataggatttgcacttcaatctcgacttaattgcacgcctcacacttgtttattataaaactcttcgcctaaccaatacactacattctgcctacataggatctttttaacacactcgac

SEQ ID NO: 114110 - DNA, 418 bp, Zea Mays
cttggcctagaccccagaatgtgtctgagctaaggggttttctaggacttacaggatactataggaagtttgtgtgtgggtttggcattttggcatggcctcttacccagttgttgcaaaaacagcatggattcaaatgaaatgaagaagctcaagcagcatttgaggctctgaagaaagctatgtcatctactcctatattgtctttaccaagatttgatctccttttgtggtggagacagatgcatgtgagaatggtatgggtgcagtgctcattcaacacaggaagcccatagcttacatcagcaaggcattgggagaaaggaatagacacttgtctatatatgataaggaatttttagccttaattcttgttgtggagaaatggaggtcatatttgcaaagaagtccatttgtt

SEQ ID NO: 114111 - DNA, 561 bp, Zea Mays
gccttgcctttgaccgctgatctggaccgtttggggatcgctttgtgctatgttggcactgctagtgaggagactcagatgtttattcaatcctccctcatggagagagtgcgtgcggctcagcagcgggatcgattattgcaggaagctcgaaagagggttggtgatggtaaaccccgtgagttcactattgatgagaatgatttggttcattttaggggtcgtctttgtgtgcctcataaattagaggtgaagatggatatctggagagaagctcataaaacgccttacatcgttcaccctggcgaaaccaaaatgtaccgagatttgaagcaaaacttctggtggaagcggatgaaggttgacgtttctaagtatgtggctgcctgtgaagtatgtcagcgcgtgaaggccgagcataagtggcctgcaggtttgctgaagccattggaaattccggagtggaaatgggagcatatcaccatggattttgtggtgggcttacctcgttctcctcggggcagggatgctatatgggtggtagtggatcgcttgactaag

SEQ ID NO: 114112 - DNA, 301 bp, Zea Mays
cttgaatgttctcttgccacaactgacagtggcttggtttctgtgtagccaattcatccctaggatgatatctaacccttgagtacccattactattacgttagcggggaagtctaccccccttacttcaatccttagattcggacaaatcgtatcggactgaacttttcccccaactgaattaactcttaaaggtggaatcattggttctatggggatgttatgtgcttctacccaagacatagaaacaaaagaatgcgtggcaccagtgtcaaataatacttttgctggatgggattcg

SEQ ID NO: 114113 - DNA, 930 bp, Zea Mays
gacgagaccgaagctaccgaaacagcacccatatcagaagtaatgaagcgatcaggtctagtgctaggggaagttactgacgaaggtacttccaatgccgaagttgtacaaactgtggttgaggtgagagtgataatgaaagcgaagaggataacaacattctaaacccagcaaagccttgtcatattgaatttgtaaaatccactgtaacagaagatgacatgactatgacgaaaaaactgggctatttcggggagtctgagagcaagcttgtttgatttgctggggaggagataactccggagccgagggaggacgaagttatcgtctttaagagctcttcagagtagggcttcggtttcccctaaatgacatgataggggaggttctaaagaactttgaaatataccttcattagctgacccccaacgctattgttagacttaacgtcttcatatgggctcttcgaagccaaggaatggatgctaacgccgaagctttttatcgagtgcacgagctacactactagacgaaggctagaacaaatggccttcataagaactttggctgttataactttgcatatcggaaggatacgaaggccccgtttattggctatcgcaccaagtggccaaccgggtggactaatgaatggttttatatgaaagttgatgagaagaagagggaaaaactcatgagtatggtaatgagtcccttgaagctgaacttcggcatgactcgacccttgtgcaacatgcagttaggggccccttgccaatttggccgaagtagaatttagagtggtggctgggcacatcaatactagggacttagtgcaagagtacctatcaaacagaacatatccaacttctagtggttggggaataccgaagagaaaagaagtgggaaagaagcatgaacttgtacggc

SEQ ID NO: 114114 - DNA, 437 bp, Zea Mays
ctctgtttaatcgtttcttgctctgaccctcgaaggctgaggacaaagcatcatcttcggccctggtatatgccccaagcaactcgtcgctagtagcctcaatgcatttcaaccagtcgtcattcggttcgtcgaacctttctctgtatctgaaggtatatttcaatctaactaatccaccttcgctggacccaacatcagtctccttcggcatctcccaactatcaacaagtggccacactctgtaggctatgtgctcttggattatgtctcttgtgccaatgaaagcacatagattgctgaaagccttttgacacgtttcggcatcattttcaattgttaccctcagccttcgaaggccgaagcgagaccagatggaacgttggataatctccttaatgtcctccctctcaatcagatcattcttgacataaaat

SEQ ID NO: 114115 - DNA, 583 bp, Zea Mays
agcctccaaaatttcaggagtaagcctgctgcgatgctcactaagaatccgcccactagtgctaaaagctaactctgatgcaactgtgctgaccggaatagccaatatgtcacgtgctatctttctaagtgtaggataacgggttccagccaccttccaccagtctaggatctggaagttctcagttgaaaaatgaaccaaatcatcctccaagtatctatctagctcagttttaactcttgtcatcgctggccttcgactagcaacatgtgcactaattgttgacaacaaactagtgtcaagtagaggagttgatgactctgttgtatcttcaccctcttccatttcatagtacttcatcaaatcacataaagactctttcacttcatcaacttttagcacacactgatcactattttgacctatcaaagtctcaaagaacccaaggagataatcaaccttaaacctaggatctaaaatagttgctattcccattggtccttgaatatccttccaatatttttcaaatttttctatcatcttttttgacatctcttctatgataggatttccacattcagac

SEQ ID NO: 114116 - DNA, 372 bp, Zea Mays
gtggtggtggtggtggtaactagggccaaaagctcgggaatggcttgccgaagcaacaaaagccgtgggttgttgattgcccacgtattcttggatgtatgggagtaacatgaagcattgtggaggacttgcttcgactgactctgtcacgcctcagcttcggcaatttccttctacttctgaattgtgacctgacatgtccttgttgtgtggcccttgtactcaccgcaaaaaagacagtacagtttcctgggttggttgccaaatcttcctccactgaaacttcttcatcctctgcccctcgaagccggtggtctgaaagaagtcatgcttgaagactgagaattttgatgactatgttgagcattgctg

SEQ ID NO: 114117 - DNA, 521 bp, Zea Mays
ggaggcgaaggtgccccagtaggacgagcacgtgcaccagcaggtggatgatgtagcaaagtaggtcgctatcgatgcggcgcagcaggatgacgatgcgtaggtggacaatgaggaggaggcgcaacatgacacctctgattcgacatgagtctactttcgatgtcccgcgagtctcccttagtgactgatacttcatgacaggcacccgctaattcaacctgaggaggaaaggtatgtaactttagatgttgtcgttgcttcttcatgttctacattcaaattcaaaatagaaactaatactttttctttatcacttgggtaggttttggacagttgtggagattgcaggtgatcacaaacgaaaccccattggcatcctcagccttctgtgcagggaacacttctctgagattgttgagtatagcggagtgatgggcccgacctattccttcgaccactacgctatcgcccccaatgcaatagatcgggagggcaggatattcaacaacaaggtagag

SEQ ID NO: 114118 - DNA, 499 bp, Zea Mays
tgaagacaaaattcatcatttaccaccatggagcaccacgcaacatcctcaccaaccaccgacatacataccagagggatttgagtgcaagttacaatacatgctgctatgtaaggggcaacaaccacctcagcgaccgttacttgtcgtcatgataaaaataagattgatgatcatgagttacttgagtggcaatccaagtacaatagcagaccatcttttagtagccatgccacatttttgaggcatcagcatggacgacatgcatgagcatctagtagagctcctgaaagaccagtttgggatcctttaaacaacatctttgaacgatacgtgtccttggacatcttgtgtttcaatggaaggacatcactgatcaaatctataatctccttgtaacatttacaagagaatgcaaacttggacttgttgaatataagacaggtcaacaaaaacaagggtgtacattgttgtgtgttcatgtagtggctcttctgaa

SEQ ID NO: 114119 - DNA, 425 bp, Zea Mays
attagcccagtagactgttctgcctattctgtggggaagataaaggacacacgacaaggatgtgacaagtcacgatccagaagcagaaggaaattgctgaagcccaagcacgacagaattagccaaagcagatcttacatactgcttcatgctattccccatatatccttgagtatgtgggcaatcaacaacctacggcgttcgttgcttcggcaagtcactcccaagcctcctaggctcagttgccaccaccgccaccactggcgcctaccttggtccataaccaatagccagaagggcattgccaggctcaacaacagcgcgacacttgggaagagtccaaagctcgcatagtcaacagtaatgtgccagagtcaaggcatatctactgaaagtagcacaacgcttcgaccagagagtgttaa

SEQ ID NO: 114120 - DNA, 340 bp, Zea Mays
taattaatgacaatttgtgtggactaacaaattatttaagataataagagtgcaggttcatccatgaaaatatgagctacatcaagtgcttggacggctatggaagaaccatggggataaatagctcaaggcaaaggtatatgataggttcttcatttgttcagtgaatatgtgattagagatgagaattgacagggttaataagctagatagtcctactatcaagaggggtcaatgtcgttttcttaacatactttttagtgcctcattgctcatatagttggtgcatttgcatgagagctaacaatgctttgtattgctaaaggaaaaacttattcaa

SEQ ID NO: 114121 - DNA, 430 bp, Zea Mays
ccatgtccttgggatcagggtataccaattgtaggagtaaacccgttgactagtccgttccatttgcagcgtccaggcgttaagagtcaaagactccaaggtccagccgtgagccgtctaggggagatagccaccggctcaccgccgtttgtttataatgcacgcacggactatctaaatctttttgaaccattatttatgctattgtgctattggtgtctgttgtcagtggtgatgaagcgggccctggataagcacggcccgttagcacaacacggctcgactaagaacatattgtgttggacctttctcgggcccacatgtcaccatagtccagcccgacaattgatagtcccgtgcatcagcctgactaaacagacctggcccatgacagactcggaccgtgttggtccgacatagcccattgacc

SEQ ID NO: 114122 - DNA, 430 bp, Zea Mays
ttcacctggaacaacactggtctggatttctccacgaagacatagaggaagatgtatataccctgtgttgtgccgccgctgctgataggtgtggctgagggaccacagagctcttctagcagcattgctgactgaagtagcataggtagatagaagtgtcagagactcatgggctgatagtggcttgaaacctctatttcctgcatccatcactctgatatgcacgcgagtgatgtagtaacaagctcgaggaggctcagaaactcgccttgagtcatatagaggtcggacgtaggttcctagtgcatatagtacattctgtagcaggtttgggaaatgtcccgtcttgaacattgaagtgtaatgctcggtgacaggccatatcccaacaaagttgtcctcctgctcatcgttggcttcttcattgttg

SEQ ID NO: 114123 - DNA, 670 bp, Zea Mays
ttcaaacgttcaatctttttctagccttttcgctaggctttaatacgtaccggctttgctgtttctacattgtttttatctttatagattacagatacagcagtctcaactgttgactttaatctaaagcgaatagccccctaacacctccatcataatcaaggctgatagatcgtcttggaatcctcgatctcgaagactactattgtgttgtggccaagttagatgatactaaaatgcacaagtgttacaaagtagtagtatgttttgttgatttaactgatatgcataagagtacacacacttttatctccatccggccctccctcgcgttgaggtacttgtgcattgaccatgtcacatagaacccgcattcgttgctgatctaggctttgcacgtctatataatcaacatcaaatagtctgtcccgtctagttttttcttgatagtcttcgacgttataaagtgtgaaatacgatgatattagaaccttgaatgtgatatttgagtacaaaaatatgtgtcactggcttcacttaattgttatcaccacaagtagttacttgatctgagaatgtccccttcctttttcttgatagtgttcgacactataaagtgtgaaaggctacgatattacaacctcgaatataggcctaagtaacacacaag

SEQ ID NO: 114124 - DNA, 397 bp, Zea Mays
aaagaaatcaagattctttcaaaatccaaaggagaagagaagaaacaagtgcggagaaacaatcgaataaaaaacttcaacacatacacaattgagcacgtgatttgacaaaacctatggatggatgtggccacccttcctttgaataatgcgatgaagaatacaaaagcacagacgtcgagttcaaagcatctgtggatcccggactaaactagggaaatagaaactagggttttctaaataaaactcaaatgagctagccaaagagatggtagcacacaacatccctcccaccattttatagagggttattcactagtctaaactacccctagatacatagagctcatccacttaaccggggcaaatggacctactcctgaaatatgcatctgac

SEQ ID NO: 114125 - DNA, 389 bp, Zea Mays
aaaagaatgtcaagcatactcattatgttccttactgggttgattccaacaatccagcagctaggtccaagagggctccagctagtttaggaggtcctgcatcttctgatgagccaccacctcaacctccgcttcatgagacatcctctcgtgttgctgccgcttcttgttcgatggaccgtaacgatcaaggaaagggtcagggcaggggtcggagacgaggtatatttgtgcgtctacctaaggggatcacaggggtttctgccatgtgcagaagtcatgctgttgatgaggctgtgcaccactgtgagactcgggcacttcataatgacatgcatagctttgcagcctccatgggccatcccatgccacagtgccctcctccagtt

SEQ ID NO: 114126 - DNA, 643 bp, Zea Mays
tagatttcagcaccgcctatcacccccagtcagatggtcaaacggaaagggtcaacaaggtcctcgaagatttattaagagcatgtgtgttgacgttcgatagaaactgggagtccagtttgtcgtatgccgaattctcatataacaacagccatcaggccagtatcaatatgtcaccgttcgaagcattgtatggacgaaagtgccagacccccctaatgtggtccaatgtaggggaaaggacactggaaggacctgactttgttaaagaggccgaagagaaagttgccctgatccgcaagaggttacttgaagctcagagtcgacataaaagttatgcagacaacagacggagagaactcagatttgaggaaggagacttcgtatacctcaaggtctccccgatgcgtggggtcaaaaggttccaaatgaaaggaaagctagcaccgcgattcgtcggcccctatccagtcattggcagagtgggacccgcagcataccgccttgaattaacagaatccatgtcagatattcacaatgtgtttcatgtgtcccagctccgtaagtgcctgcaagtactagagaaccacatcgaggcagagacaattcagattcaaaaagatctccagtaccgagaaaagcc

SEQ ID NO: 114127 - DNA, 604 bp, Zea Mays
gtatgggccacgaccatggacgtccacttataatccgtggacgagcgtcgttcaggcctggccactgtcccagtggcgtcctacatcgccaggcgttctcggctcccggcctcctgcaccaacacaggctatgttggcgaccaatgcctccagttcgtcttcgccatcactgcctccagaactgcatcacgccatgaacaatttatctctgaacaacccttcgggtacaggcggtggtcattggttccttgacacgggtgccacctcccacatggcaaacaacactggtatatcctcctctcatttcatccctacgcagtcttctcaaattttggttggcaatggtgctcctctgcaggtggagtccatcggacagaccactgtacccaccatgttctcgcctcttcataacattcttattgctcctcatttgatcaaaaacctcatttcagttcgctctcctacgcatcccatgattacgagtgggtgtgctagcatcactcgccccaatccgcgatattctctagctacaactgctccgtcccctccgcctacctctgttcgcatggccctccgtgacacagtctggaatcaggccatgcag

SEQ ID NO: 114128 - DNA, 414 bp, Zea Mays
ggacttgcactagaggctggggcggtggtggctgctggtgcacctactgcatggctgctaaggtctaaccaattgcctggactgcttgggtttgcatcaagaacatctgctcaatggtcatcttgggtggcggtgacaaatgctgctgcgaggctgcttcctcttggggtgtctgctgttcagactgagcatgcctcgcacctctgcgcctgttctcagacatctgtagaaatcacacacatatatcaaatctgactctgcagtctttcagaataagaaaagatgtatagaagatcttcatagcactgaacaattaaccatcttcactgacagcttctcagataaagaggaaagtggaaataaatggattacccaactaaataaccgactttattaataactacaccaagttgc

SEQ ID NO: 114129 - DNA, 561 bp, Zea Mays
tcacgatttaagaagtaaatgcatggtgattgtgagttagagattggtggtttacggttcgtatgatttagtcgatgtgcggatatacgtgtgaatatgtatgtttacaaaaatgttgtagtgagtgtatgtctcggatttcgataataataggcaagccgacgtgtgtgttgtatagcgggctatgtcgttgctctagttaatcgacttgttagatggatgtggctaagctcgtaatcacggtgatctgctcgttgtggtctaaatgcgcatggttatggtcgcgagtaaaaattagtagtgttcatgtgatgtctaagttaaaatgcaaattattgggtgaaaacgcttcgatattgattatcgtggacaatgcgttgttaattgagtatggtaactctagtgcacggaatgacatggataaaaattagtaagtctactgttagtactcatttgattaatttaactctaacaaatggtaaagtgttagaataattcaagtctctagagcgcggcaattcttgaagtcaatagaagctgaaatttattagttgttgtttt

SEQ ID NO: 114130 - DNA, 359 bp, Zea Mays
agcagatcacctcccacaagatggagggaaaaccctcatgggaaaggtagtcaaaactgaagcgagtgtctcctccattgatgggggtgggtgaagtcatttgtgaaagatggttagatttaagtgtcatggtagtggaaaggagaaacgtgtgctcaggttgttaaaaggaggtgggttaatttagatttatctactccaagccatttcgttattcattattaacaatgcttgttaagttcataattagatgcattttaccttagcttctaatttcttcatgctttacaatgcatgcattctagaaagaacgtcttctcaccgatcagaggggtgcttctatggcatccctactattc

SEQ ID NO: 114131 - DNA, 602 bp, Zea Mays
gcaaatttatttcacgcaagcttgtgcagcgatgttatgacagagcccttgcgattggtctaaaaggatatgcgaaactgtatgtgcttgttaagccctttcccatacaatcttgtgaaccttacctttattttttctgctaactaatgtttagtaattattgaagaagtccttgccacattgattgattgtgatgatgcttctccttcctagataggcaccattttaaacttagcagatctttctttgtctaataataatagtgaacaatataatagattctacttttattcatactccttttcaactgtgttacttttacagacatcaatcagtcttggcacgacttgcaaactgggaagctattacatcggtaagatagcattgttggtctatttttaaatagtcatgcaatccctatcatgtttatgtgttactggtttgattaaaaaacaacagatgtagtccatttaataagcagtttgactatatttcaatgaattagccggttatatgacatattgtgcttacccccttttttctttcatcagtcacactctatccgggaattcgaccgccatgccacttgtgttgttgcaaaa

SEQ ID NO: 114132 - DNA, 364 bp, Zea Mays
tgatcatatccaacatacaaaggaagaaaaatgcaggaaggtaggatgcatccttctagtttgtccatgagctagcaggtaaaccatgttggaagtgaggataacatagatacatctaacttgaagtcactacaataaccaaaaaatatgaaacataagactaaatttgcaaattgtaaagtatctcatacatgggcaattaatgaaacttaatacaaggctacagtttgattctttagaatttgttttgaaaaatgaactggatactcattactcagcagactcttaaatatcacgtacacagacagaaccagttgcaaagtgttccaaattgcacctctcacgcactcaatctgcatactgc

SEQ ID NO: 114133 - DNA, 362 bp, Zea Mays
gattctatgggcaagtactgtgcagccatccaaaaattagaagacaaatttgaagggttggagttacatcacgtggaaagagattgcaacgcggcagcagacgcgttgtcaaagctgggatccagcagggcctaggtcccacccgggatctttgtccaagaagtatcacgcccgagtattccctcagataggatggaagagtgcaacaccttgagccaaccagagttggaccccaatgactggagagagcctatcatcaggtacataaaaatgaagaggaaacgatgacaaggcggcagcggaacgcattgcaagacaatcagcccactacaccctcataggggacacactgtacagaagag

SEQ ID NO: 114134 - DNA, 886 bp, Zea Mays
tagtggcacaccaacaccatcatcaagtactaatgctccacctgcagcagcacaaccacaatcaggtatagacaatgtcattgtggaagatgatgatactgttattgttgggacgaagaggaagctgaaatctgatgtttggctagagtttgaacaagtaactgttggtggtaaattaaaagctcaatgtaattggtgtaaaaagcaattagttggagatagtaaagccggtacaactcatttgcgtagtcatcttggaagttgtcaatcacggcaagttagaaaaggattaaagcaagcaaccttgaagttgagtaaggatgagcatggagcaataatagttgataagtatgtttttgatcaacaagttgctaggaaagaactcgcaataatgatatgtgtccacgagtatccactttcaatggttgatcatgttggttttaggagattttgtgcagctctacaaccacttttcaaaacaatgtctaggaacactattaaaaaggacattttagatatgtatgaggtgcagaggagttctatgatcaatttcttccaaaagtgtcaatctcggattgctgtaactactgatatgtggacagcaaatcatcaaaaaaaaggatatatgtcggttacggtacatttcatcgatgatgaatggaagctgaaatcatttcttttgaggtaactgttatttgtagttcatctttgtggttaaattctagtttctttggtgcttacatttattactattgttgtaggttcatatatgtgcccgctccacatacaggagaaattataagtgatgttctttacgaagtcttacaagattggcaaattgagaagaaagtctcgacagtgactcttgacaactgcaccactaatg

SEQ ID NO: 114135 - DNA, 680 bp, Zea Mays
gagctagctacccatgcgaccctactggtgtggaggtagttcatacctgtagagtagagatggagctaggactccgcttgaaggtggatgtaatacttttgctttttgtaaggtacttttgagtactatttatcaggcagtattagcacttatctgtgtaccacttgtccctgttgtgtgtggtgtaaccgattcctccttggtacctagcccccccgggatgtgggctcgacttgtcgaggctggatgacagtatatttaagaaagaattggtgacctggtccccaggaggtaattttgactgggacccggacctgcacacaaccttagctagggagttttaatagtgcactcataggacccattaactggtatcctttatcctttgacttacgcaacaggacctgtaggatttagactaggaagccgacccgtgtgtccggaccctctgggtcacgacttccaattactagagtactcatcgcagggtggtgaagtgcgtaggcttacggtacgggaccaggctaagcagccacgcagctccggacctccccatgagacgagtgtcctttcttcacagccggaccttgggtttccggacccacaggactatagttccggatactaggacacccgccacagagcggtgaagcgtgcgggcttagggtactagaccaagc

SEQ ID NO: 114136 - DNA, 359 bp, Zea Mays
gggggtagaaatgtttggaatatatggcccttttcatggggtagggggtaatgtgtgttaccttacatttttaattgagttttatatttttctctggtggtttacatcataagtacttgggtaaaaatttgtttgcccactgttgcacatttttacgctttctcctgatttatttaaagcatgggccaaattcaagttttaattgttcgactcacttattttgatgggttggggtgtttatcatttttgtagtggtgtcctagcagttaggagtctactgaatttttcttgccatttttgcaatggtctcttatatttttaatcatggcttttcttgatttcttagtgcctaataaaat

SEQ ID NO: 114137 - DNA, 432 bp, Zea Mays
atacacacacggatatcgcaaggatggggaaggatatctctgtatttacatttacatttattatttatcaagtcgcgtagggtactgcagctgcattaactccttgtgcttgtgttagctagctgtgcgagccacaatgggctcctcgaaatgtcaatgtgccgtgggctgcggccacagacaactcatcgatgacacgcatgcatggctgcgtcgtacgtgtacgcgtgcacgtgtacaccatcggccatatacgcaccggactagctgtaccgcacatccagtgtttccatccaaggctggagtacgcaatacacacataaacatccacacgttcatgacgcgtacgccagccaaaaaaagcaccatcatcgcaaagcaaagcactgcacgtactactgagcggtgacagcacagatcgatgcatggatc

SEQ ID NO: 114138 - DNA, 370 bp, Zea Mays
tccattcaccattagaaggcgaggcagacgattctacagtctaaatagagataaacctcaaggttgtaattcatgaacacatagtggaatgagaggtgttgagctcgtaaaggggaaagatgcaagacgacattgactttggttcacaactgtcaaaactaaaggagaacaggatgcagtgaagacctgaccgagatgcagtgaagacctggcaaaggccagcatatggtattttgaaactgagctatgacgtataagtgcacatccaacttatgtaaatatgagaatatgtctattctgaactcgtagtgttttaaaagttttttaccccaaatataaagtgttagatgacttcgaaatgctcaaaaac

SEQ ID NO: 114139 - DNA, 492 bp, Zea Mays
aacatgcttaacattgtattgccttacaaggatgttttcttaagagctagtcatgttgataaacaatatacttgcttgcctagtgaagaagaatggaattttgcagctgatgtagtagaaaggcttcgcatgtttaatgacataacagaattattctctggaactcaatatgtcactgcaaacatttatttcatgaagatctgtgagattagagtgaaaattatacaatggtcaacctgtggtaatccattagtacaaaccatgtcatctaatatgattgctaagtttgtcaagtactggtctgatattcaaggactaatgggtattgcaactgttcttgatccccgactcaaaactttaagcttgttgatgtgttttgaatggttacttggtatgactggacaagtgtgtgaggataaagttggtacagtcatggatttgctacgtgatctaatgcacgattaccatgtggatgtggaagaggttgaagat

SEQ ID NO: 114140 - DNA, 287 bp, Zea Mays
cagcgacagtatggtcacacaatagcaatggttcaggcctcagttcatcgtttatcagtcggttgccaaacacttcatcaccacaggccgataagattggcaggtcataatcagctatgttggcaccactgttagcaaacgtgtctgctagtttcctcgaaagcaacgtaaggagttgttcatgtggagttgtgtagtgtgggttgccaagggcttctctaagtccacggtgtatgtcatcggtgaagtagatccaatatttgtcaaacaaagcacgaacattgcaa

SEQ ID NO: 114141 - DNA, 1199 bp, Zea Mays
cttgtacttgcaagcacttacagagctgggacacatgacacacattgttaatatcggacatggattctggtagttcaaggcggtatgctgcgggtcccactctgctaatgacgggatagggaccgacgaaatgcggtgctaactttcctttcatttggaatcttctgacaccacgcatcggggagaccttgaggtatacgaaatctccttcctcaaatctgagttccctccgtctgttgtctacataacttttctggcgactctgagcttcaagtaacctcttgcggatcagggcaaccttctcttcggcctctttaacaaagtcgggtccttccagtttcctttcccctacattggaccacattaggggggtctggcactttcgtccatacaatgcttcgaacggtgacatcttgatactggcctgatggctgttgttatatgagaattcggcatacgacaaactggactcccaatttctgtcgaacgtcaacacacatgctcttagtaaatcttcgaggaccttgttgaccctctccgtttgaccatctgactgcgggtgataagcagtgctgaaatctaacttggtgcccatagcttgctgaaggctcttccaaaattttgaggtgaactgcgtccctctatctgacactatcttccaaggaataccatggagcctgactatctctttaagatatatccgggcaagagtggctcctccaaaagtgttttttactggaatgaagtgggccaccttggtgagacggtcgattattacccagatagagtcattccctttttgcgtcgggggcagtccggttacaaaatccatgcctatttcctcccactttcattcaggcactgggaggggttgtagtaggcctgcaggtttctggtgttcggcctttgttagttggcaggtgtcacaccgggccacatactgtgctatctctttcttcatccctctccaccagtatttggctttgaggtctaggtacatcttggtggttcctgggtggatggagtaggctgagttgtgggcttcattgagcaggactttctgtgcctctcctgttggtacacacagacggttcttgaaccaaagaactccttgttcatctgccctaaggtctggaagttgctccttgcgagctctttccataagtcttgctgtctccgcgtccaggcgttgagccttg

SEQ ID NO: 114142 - DNA, 439 bp, Zea Mays
tatcctaaccactttacttatgtcatcctaaagtaacaactaggatctaatccaaaataatgatatcagatctaagttatatcccaccatgatcatgagctaacccaaccaatagagtcttgatggattgcataatctattaacccccacctgaccaaccagattttgacctacatcatgtagcccatctcacccataactattctaaccatatttccccaactccgataatatacactaacctcgaatcaatgagctcaagaccggagaagaaaagatcaacctcgtcaaggaaggagagaagtcaaactcaaccttcggatgcattaccacccagcacggagttcttcctcaccataaactttcttacctctggctattcttgccctaacctatcttgcatcgtacacaataaggtggctatacatatacataccca

SEQ ID NO: 114143 - DNA, 537 bp, Zea Mays
ggagtttgcaagccacatggtctacctaaataagctttgagaaatttgaccaaacttaacaaatggttaaaatttattggacaagcaacacaaatctaaatcaagttagtacttcatactaatatgaggcactaacttgaaaaatcagaaaaacaaatggaagtaggaatcatttttgtagtgttgtcaccaattactaaaaaggatgggattgaaagctctatatgttgttttggtagttgagacaattaggtgattaactattttatgagtgaaatgaatgagataggtttggagtccacaaagacgagcaggtactgtacaaggatgttgattgatagagtaaatcaaatgaggtgcctatcattgctagatgtggggaggttattaatgttgtagaaacaaatacttgaatatgtggaagatgtaaggctaatgaggttcctgacattgttggatctagagaggttattgatgttgcagaagtgaagacttgttagaagacataaaagcaagatgcgatgcaaatgtataagt

SEQ ID NO: 114144 - DNA, 349 bp, Zea Mays
aaacgaatgaattagtcactaagaaaactatatattttcttattattagctacattttagtttagttatttggactgtgaccagtcaaagcattttcaatgcatatttttttcagctatgcattaacttaaacaatttaattggtggagacatcctatcaattaagggcttgatgtttgcaaattgaatggttagctgttgggatcgatgtaatatatagtagctttatattccaaagaacatcatattacttagacctatttcaaagcctatgcaaattaaacatcccgagataaattatgcatgctccaaagaactcaaccagttatgtgaaatagagatatatgca

SEQ ID NO: 114145 - DNA, 545 bp, Zea Mays
acccgatatacgtatgactcgctagcacaacaatcacgttcgttcggtttaaccgggctagctcaaacctcaagaaaacaataaccatagacacgacctataaacgcctaagccaggtagtcatcaacagactaacgaaacataggcttatcccttgtagacacctaatttcagaatgcgaatagcagtaacctaactagctcctttttcaggttaacccacataacatactaaccgaataaaacatcaagaaaatgctaaactatatgcacgctctaaactctactaagctagggcacatcacggggagatcacaacacctaggttcatcagcctaggacattaagaagaacaagacaattcaactaattttctaaactattttctcatactactacgcatcgcacaccaactaaataggacaacacattcctttattaagtaggcagagtgccgtcaaacattacatattcaaatagccatcaacatctatttatgaccgttatcccaccactagacatagcatataatgactactagcaaac

SEQ ID NO: 114146 - DNA, 509 bp, Zea Mays
gagaaagagaaattagagagctatggtggctaatcggaggcaggggcgggtgctctggcttcgtgattacctaacggagctagcagtgtgcttaatttatagtgttcaagagcggtggccttcaattttggaatggcgcgctggcggtcggagaggaagaagatcactggtggcgcaatcgtggagttcaccggttcagttgttcagagagggtaagcctaagtgtgccacggttactaccgtgtagtgaagagtcactgcgtggcataattgagatcgccggagtgtccacgacgacaccggcggtccggccacgtcgcaacggctacatgcacggtgataagcttcccctacgaccgcatctgcttccccacaagatcttttacctccccgtggatatccactgcgtgcccgacacgaatcacggcgaccggcgcaaatccagatgcgcggattacatgcggcgagggggactgaaccctgggatatttcagtgcactgtaccatcg

SEQ ID NO: 114147 - DNA, 596 bp, Zea Mays
aaataactcttgcttcttctcattatcgatgaccaatgcaggagcatatctagatagctggatgaacttgtctctgtattcgctcacagacatccctccctgcttgagggaaagaaactccttctttatgttcatcaaaccggcaggaatgtggaaatttctgaagcttgccaagaattcgccccaagtgatggtatcggcagcagcatgtgctgtagaataagcgtcccaccaatcaacagctgggccagtgaggtgaccctatgcataaaggactttctcccgattggtgcactatgtgatattaagcatcttttccaccaatttaagccagtcatcaacttgtagtggatttggggagctggagaatgtgggaggcttgtggctcataaattctttgtgcttgtctctaggaggtggctagtgtgggtgatgttgattattattgagtcgatcttgcatattggctattcgctgcagtaattgtgtctaggctacgaagaatgcttctgacccagcaggtggagggtttgaggtttcatctgtgactccgagttaatcattgtccttctttatcgtatgcgtgcaggttgatc

SEQ ID NO: 114148 - DNA, 434 bp, Zea Mays
aattcatacaagacataatattcaggtttggaataccgaacagtatcataactgacttggggtccaacttcacaagttcagagttcttcgatttctgcgagcaaaaaagcattcaggtcaagtatgcttcggtagcacacccgagagccaacgggcaggttgaacgagctaacgggatgatattggaggcactcagaaaaaaggtcttcgataaaaatgagaagttcgtaggaaagtggataagggaactgccttacgtcgtttggagcctaagaactcaacctagtcgagccctgcatggaaacactcctttcttcatggtctacgggtcagaggcagtactgcctgctgatctcaagtttggggcgccaaggttgatctttgaaagcataacagaggccaaagcaaccaggctggaagttgtcgatgtactc

SEQ ID NO: 114149 - DNA, 602 bp, Zea Mays
gtggaagattaatatatgaaaactttgcctatgcagccgagttgatccaaacttgccacaaaaggattacgcctgctcttattgttcagttggacttcgctaaggcatttgacacagttagttggcctactcttctgcgcataatggatgctcgaggtttccctgccaaatggtgcgcctgggttaactccctcctcacttcctcccggtcggcagtgctgccgcatggttgtccgggcccctggatccagtgcaagaccgatctcagacaaggagatcccctcttcccataccacttcttgattgtggccaacctccttcacttgatcatcaaaagctacccaaccgtgctgcaccccttgctgatggtgctcttgcccccgtggttcagtatgttgatgacacattgatcatcgccaaagcctccactgctggggtcgcccagctacgctctgcgcttgatgccttctctaactcgataggtatacacataaactaccacaaaagtaccattgtcccgatccatgtggcacccaccactattgaaacctttacctcgattcttcactgcaagctcagcagttttccattgtcgtaccttg

SEQ ID NO: 114150 - DNA, 1488 bp, Zea Mays
acaaatgagtgcaaagacagtatttcacccggagtatagtcagatcgggaaaagctaaattacctggagattggagaagaacgaaggaagccccaaatcatgagaagtcagttggtgacttgacggaggattatcaaccgaggcaatctgcagagcatcattggggaccaactcagcatcaccagcagaaatcaaaactctagcatcaggtgcgctggcctctaaggcgacttcctgacccaaggcacgtgctgctgccatacaatcagaatgtggaggagaagacccgacgtggacatccatggaagtatgagaaggggaacccgctcggacaccctcgggggctgggtcatagctcgcgcttcccacccgagccggatcattaccgacaacaccgtcgggggctgggtaaacgctggcgccatccttggggaccgggttctctgcagcagccacctctaaggctaaaggattttcagccacttccatgggaacggagcaatctagatcagcctcttgactcttaagatcgtgctccaaggtcgatgaggcacgagacgctgctcgggataattctaattcgacatcaggcatatcaatgcaaacgtccatcataccaccatatgtcggctcggacagcagatcttcagggaccacatcctcaagagcctggtcaaaatttgccagagacaattcttgcagaccaacgagagcagacaaagctggagaaggaatatcactgctctctccactgactatataacgccgactgtttttccgaattaaggggatttcctcctcttcttcctcatcctcatcaataatacgaacaacacacccattgggatcagctctggccggattgcacccattgggtttagcatcatcaaggtcacacccattggggtcagcatcagccgggtcacacccattgggatcagctccagtaaaaatctccactggcacttcctcggcagcaggagcagaagggtcggcatcctgattcaagcatgacactcgccgaagccgtctctttttctttttcttcccctcagcaggagaaattggatgactggcctggcgaggatgcttcgggcgagtgctatcagatctttgagtgtccaaggtttttccaggctctgggatagttgctacagctagtgtttcagtagggaccgaatcagaggaatcctcagccaacatgtccagcatagcacttatttctgcatcgctcgggtttataggcatctcaaaatgaacctgcctctcatcattggggatttcaccaagcgaaacaaccaaagcctcaacctcttcgagagagggtcgtactctaagacccaaaccattgtcaccagcaggaggatttgacacaaaactgatgaaagtcttgggaggaggcagattccaggcagaatacgcaacaggagcaccgatgtttgacaccttgcccctaagaatcatctcaagccggcttaccagatccaa

SEQ ID NO: 114151 - DNA, 706 bp, Zea Mays
atcaactcaagtcttccaagatcaagatggatcatcagatgaatcgaaaccttatgtgcatgatgaagtcttccctcgccaaaatctttctttcttgtacttatcttgatatttcttaccccaactttcttacaaatatctaaaacatgattataaacaacacgtgctatcccagtcacctaaaagcaattcaaaactagatacaaatcaatccttctgcatccctcttcttacaaatctcgaggacgagattatttttaagggggtaggatttgtaacacctcaaaatctcattttgagaatttggtaaaattttccaaagattttgagttagaatatttttttaaaagaaacttttgaagtcataccccttaaaaataaatatccttcctaataaatagatacttaaaacggacccacatgaaattagtcatcccactatgaggttaaaagtaactctctaaaaggtttacgctaaaaacataccttggcatagttatacataaaaaaaatattctcccaaactaaatattgttttatttgttttaccattatatctggaaacatatattttaaaggataaagtaatatatgaaaaaaatatgagttactatttattatttgatttgggacatgtcatcaaaggaaatatatgtgtgttgcatttgcccaaacaaatgaataactaatataaatggaataaata

SEQ ID NO: 114152 - DNA, 342 bp, Zea Mays
ccgagctccccgtgcccaacaaaccctcacaattaccagttccccatcgccgacgccgtacaccggagctcgaccgctccgcgtggtgtccgattctacttcgtcgaagactacaagcggcctcctagagttccacctcaactgcgcaggggaagggaggctcccaacgcatccccgccgacctcaacgccgacggtcctttcctaacccgcagccgccggccgcagtctctctcttctggtccagtgggggctgctatcttccaggtgagagctgttacttcccgtgctagcgattctggcttccctgcatgatggattccgtcattctaagaaagatcgg

SEQ ID NO: 114153 - DNA, 711 bp, Zea Mays
agggttgagaaaacgtccaggaagtaatttaagtgcagaagaacggtatgatacggtgaggagactatggggacagccgaaacttgagtgagttcaggtgttgaactttaatacactatgagagggcataggagttatcggcttggttgaggcttcctttaggctttcagggggaataaccggtgctaacatgatcataatactatgcatggcgaccacgtagaggtagatgtacagggaaactgcagaggtggtaaattctcccatggacagcaaaccagcacagtacaagcaggtgagtcactgctgtcaggctgcaggttagtctaatccaaaaccttccccctttgggctgtaaaaatcgtccatgtgaccccctctttttaccagaacgaaattcttgttgttttgcacttatccaaagtcatctggaaacagctagtggatgcagatctttttcctaagatattttcagactgcctgatctagttcagtcgacagcagcagccaccttgtcccctccatttctccaatttctttataatgacagagctaactctccacatcaaacttcttccctgaacattggtcttttaatttcttgtagacttccagagtcaatatcttacaggttttgagttatagagccccaaagtgaggcatatcacacagaaaccataatttcagtttattgaaactgaacccagaatt

SEQ ID NO: 114154 - DNA, 699 bp, Zea Mays
gagataaataggggggaattagggttccaaacctcgggttgaatttttttgggatgttacaaacctaccccacttaaaggaatcttgccctcgagatttagacggggttcgagaaaaggtaagagtattccctcctcaaagagtcctcgctttcccaggtagcttcctcttctccttctctgctccactgaactctacagagtcttacttttgagttgcgggtctttcggactgctgagtcaagaatcttcattggcttttcccggtactggagatctttttgaatctggattgtctctacctcgatgtggttctctggtacttgcaggcacttacggagctgggacacatgaaacaccttatggatatctgacatggattctggtaattcaaggcggtatgcggcaggtcccactcttccaatgatgggataggggccgacgaatcacgatgctagctttcctttcatttggaaccttttgacaccatgcatcggggagaccttgaggtatacgaagtctccttcctcaaatctaagttctctccgcctgttgtgtgcataacttttctgtcgactctgagcttcaagtaattttttgcggatcagggcaactttctcttcagcctctttaacgaaggcaggtccttccaatgtcttttcccctacgttggaccacattagggggtctagcactttcg

SEQ ID NO: 114155 - DNA, 717 bp, Zea Mays
cctgaagggagctctgactctgctgactgtagcgtgatggagtgggtccagattgtttattgaagcttggacccctgggtggaagcccaaagggtcgagctctctggtgacgttcttgctgttgcgctcggaggacttggaatttcctcttgatgtgccctttttcttcctcttttgccctttccacttggatagctttgttggagaggtgagagaagctgtggaagtcttggctggcgaggatggtcttaagctcgggtcttaaccctttcagaaaacgggccatttttctagcctcggtgctgacatcctcgggcgtgtagcgggccagctctgtgaacttgtgcacatactcactgactgtccttccaccttgagttaactcccggaattcatcctccttgagttgaactatcccctggggtacgtggtgttcacggaaagctacttcgaattctgcccaggtagcatctctgacggcttcactgaaagtgtcccaccatgctaaagccattcttgaaagctgatgagctgccagttgaacacgctgattcttgggacaagcgatggcttccaacttcctcttgatcgtgcaaagccagtcatctgcatcgaggggattgctggaccccgcgaacgtgggaggcttgagtctcaaaaattcccccatcctgtcatgtggccttccaccgcctgggcgctggttttccagacttc

SEQ ID NO: 114156 - DNA, 538 bp, Zea Mays
agtccaacactgatttagagcagctaaccaaatgaaaaacttgcattggaggtgcagtccaaaacttctagatttctttccatgggtcaaaatcaacagccccgagcccccgacaaagaaactacaataagcagatttggttgagaattctcctataatggatggtgatcaaatgtgccagtaggtcgtgtattcccgggtgaagatcaatttctgctataatatcccttagatcgatggaggtattccatcaaggttgtagctgacagccccctgatgtaccatactcaagcattactgtccaatgcatcctgcaccattcttcttttgattgctctctttgccacatgtgtgaacggtagattttctctgaaaccatttatcacaccaaaaaggttttcgaagcctcaagtaacaagtaagaaaacacgacaaaacttatatcttagtaaataaacagtgtacaaaactgcaatatatataagtgtagatcacttctgcttaaagccaaactaattactgctctgcacaatcatgc

SEQ ID NO: 114157 - DNA, 389 bp, Zea Mays
gccagtgatagaaaatatgcctttgaatcataccatagatactcctcaccacactttgtacggccaagggatttccttgccccaacatcccctttttttggcaaaaacagtattggaacaagatcatattcagacaaaaaaattacggtgtcttaggagtcaaaatagtttgtcgtacttaccttacatgcatggtttatataaaggtcgacctccacataatcagtattggccgtaggtcgttccactatcatgtactcaatggcagcatcaacatcaccagccatttctcccaaaacctgtatggtggtagcagatttcacactagaagaaaaatggctaataacaaggaatctaaattctctcctgtgcgttctagaaaaacaagg

SEQ ID NO: 114158 - DNA, 285 bp, Zea Mays
cagccatgtagacgatggtggggtcatcctcaatagggtctcctcctgacagggcctgaagtcttttcctccaggcaggtgtatttttgttgctgggtgggaagtagcgaaggggggtttcaaagatcaccttgttgtagctctggcatagttgtcggagggctttctgggcaacattttggcaagtatctgggaagcagtatccggtgaaagtgacttggaaagaaggatggttcggatagtttcagctttctcccaggtagactgccatagagcacttttcca

SEQ ID NO: 114159 - DNA, 455 bp, Zea Mays
atttatcccaacctaaaaccaatgccttagccttttgcacaattcagttttggagtccgtaattttgggtccgtgtcctaggtcagggtcttgttgttggtttagatttgttttgggtcaatttggtcattatcatccgttgtcgtccaacaaactcaatcttgataatagataccatccacaaaaccaaccctgtccataaaccaaaaacattcatccttcacttggcttgacaaaaaccctaatttggttattagtttagatttgttttgggtcagtttggtcattaccatccactgccatccataaactcaatcttgataaaccgatctcatccacaaaaccgaccctatacataaattgaacccattctcccatcatattttatctcatcatctcgtcattatcagattaatttatgtccagttctgtattttgagcatgttggggacttg

SEQ ID NO: 114160 - DNA, 358 bp, Zea Mays
cgggaacacacaatggtttttcacacaaacattgtgaaaaaattctcagaattacctttcgatgtactcgcaacttcgtgttgctaaggtactagccatttatctcaaagttcgcttcatgccgttcagcgataaatagcaatgtgccaacatctggttgagcaatgtatgactaagattctagcatttattcatctgataaggtcttattgcttactaataaaatcctaatttgtgatgttttctgtgccaaaaaggctttcatgcattatattatatatcttcgggttacttcgggtaaaactttatgcatgaggagagagcagaaaattaacttatctgtgtttaattgtatttc

SEQ ID NO: 114161 - DNA, 543 bp, Zea Mays
gctcaacaaacatggttgtacgcacgtgttccctgtagcacaggtattggctggttagaggtcctcggaaggtcagatgggtctacttcgtcttcaccatgcaaaatgcgatgggcatccgttgtcacaaagactgggcaatctaaagaggttgcgtattttttggcccgcaagagaagcattgcaaattaggacgggtaccagccatcgcatgcataaacaaagcagcgaatttgtgaggactaaccctgtgcaattgcactgtgcctcgggcgcttcgcttcgtggcatctcgcaacacgcacgcatggagaatcaggaatagctctatatatcgcatagtatggaagaacgtcacataacactggtgaaaaaattggcccgtaacaaacaacacattataaaacagatcaggcgtataagcacacaaactcaccacgatcgaaaacgcaaaatggcgagtggtctccatcaagctgcgacaaaattcccccaagcagcaagtacccagatcactggaaaaaatagcccataagaattagc

SEQ ID NO: 114162 - DNA, 430 bp, Zea Mays
acatgtgtcactaattctagtgataagtccatattctagcatgaaagctagattagtgagattcctttgtacatttatgaacctgagttgtatagtatatgtgaaaataaagatatcttggtaaaagaagctagataaatggattgacagttgcctttcaggagatggcttgaggggattatggaagaaaggtgggtcgagatatacaaaaaatgtgaaaactttgaattcaaaggctattctgattatgtgatatggaaatggggagagcataagatgttctcggttagatcgatgtataataacctttcaaatgacatattgggtcctgaatgacagcttacatggaaagacaaaatacacccagataaaaatcttcatgtggttattggggaacaatgtcatcttaactaaagataatttgatcaaa

SEQ ID NO: 114163 - DNA, 368 bp, Zea Mays
cttggcaacagaaagctctgacgaagttgttgggattgcaataccggatctgctacaaaagggggcagaaaatcgggtgaccgatgcattgtcgcgtcgaccagacatagatcaagatacaaccacgttaaatcagttggctagctcgtcggtggtgcctaaatggttggaagaggttatgcagggttatgagaatgatgcccaagcctagaaaatacttggagtgctagcaacaggggtgagttacctccgtatgagttgactgatggggtgatcagacataaggggcgagtgtggttgggccataacgaatcacttcaaacaaaggttatgcaggcactacatgatagtgctctgggggccactct

SEQ ID NO: 114164 - DNA, 342 bp, Zea Mays
ccgagggcgagggagaggtgggggcttcgggtacgaccacccggccaagcacgtgccacacgaggactttccggtaagtctctgctccactggctccgccccgacgctgcattgcgtggtgcggtataagtagaactgatgtgcttgcataatgagcaggacatcgctctgcctgagatgaagtgcgccaaggcgagcaacgaggagaaagcgctgattgtgtccaccttgaaactcgaggagttctggaggagttcctgctactacctggaggaggatgctcccaagaaaagtactagggctgaacttatcacggcttctctttttgttcatcatgctgat

SEQ ID NO: 114165 - DNA, 471 bp, Zea Mays
atttcctgctcatgcttcccaccctccagtcagttgaccagctaacagtgagatggaacactattcgtgcatgcgccttctccctgcactgtaaaagatggtccaggttctttgggtcttcaggtgcaagtttgactatccctgtggaattcgagctaaatggcattccaagtcatgcctgggaactgtccactgtccgacacattttgaacccttttgcctgggtgcagaaggtacatgaggagactcttgagctcaagaatttggaggtctttcactgttatggttggtgttatgacctggcctcaatccctcagtctagagacctctggattactgattcgctgggaaatggaccaggcgttggaaggctatctcttgcctatcatgttcagattaaagtgttggaaggacaacgtgttgtcctagatcccatccaggtcccaacagatatggatggttctgcacggc

SEQ ID NO: 114166 - DNA, 531 bp, Zea Mays
caagaacaagcaccaaattaagcacttatcaaagtcggagcaccagatcggtccctcacgacgactataatcagagaacaagatcacaagaatgtattagagtagattagggtttagggttggtacacagatcacaagcatagatcacaagaacaagcaccagattaagaacttactaaagtcggagcaccagatcggtccctcacgtcggctataataagagaacaagatcacaagaaggtattacagtagattagggtttatggttcgaacacatatcacaaacatagatcacaagaacaggttaagcacttaccaaagccggagcaccaaatcggtccctcataggtacaatcacagagcaagaaggcaatagagtagattagggttcgggattgagcacatatcacaagaacaagcaccagattaagaagtctcaaactcgtcggagacgtcgactagaggaagaagaagacgaacatcgaaagcttaccgtaacgacgtaaccaaatccgtgatcgaacaaccagc

SEQ ID NO: 114167 - DNA, 792 bp, Zea Mays
cagataccagcagaccctaaggcgctatcacgacaaagcagtgcggcatcgatccttcgcagtgggagatttggtcctccgccgagtgttggcgggagaaggatgacacaaattatcaccaccatgggaaggaccattcatcgttgaagaggctacctggccaggatcctaccggctcactaaaatggatggcaccgaagtgggaaattcatggaatattgagcacctcagaaaattctatccatagcgatgcctcaaagctctcgggaatgagttgtactttgtaagcagaaggtttcattatcaataaatcttccatgttccaaggcatacaagttcttgatcaacaactgacctaggtcgggctcaacttgaaattggcgcggcactcttacacaacttagggtgatcactataccctactaacagagcaatcggctaagtcagaaacgccttaagttagtgcaacatgctcacgcttacacgccatagggtgatcactatgccctactaacagagcaatcggcttaagtcgaaaacgccttaagtcggtgtgacatgctcacgcttacacgacttgaggtgatcactataccctactaaaggagcaatcggctaagtcagaaatgccttaagtcggtgcaacatgctcacgcttacacaacttagggtgatcactataccctactaacggagcaatcggctaagtcggaaacgccttaagtcggtgcaacatgctcatgcttacatgacttagggtgatcactataccctactaacggagcaatcggc

SEQ ID NO: 114168 - DNA, 836 bp, Zea Mays
gatggaaacagttcatcaatctagggctatgtggcatgcatcacaatgcctacgttttgtgcatttcctccttttttgcttaacccaaacagttcttccttttgtgcattactactattcaatgttatgaagctgtagtgttgtttttgctccataacaggcttaaggagaacatggcagcttctttggaagctgaaagacaagaaaatgaagcaatcaagaggtcccttgttgaagctcaggagagaaacgatgcattatttaagaaagttagggatagcgaatacagggcccaccagcttcaagatactgtccaaaagttggtatcttaaatatctttctctattgtcaactacaatgccttcattacagagtatttgtcatcatttcagagactaatgtttgtatcaattaggcttcaagtagatgccatatctagactgtctagctttgtaatggagagacaagatggtgatggtgtcaagaatgcacatactgaggttcatggaacaaatgaagatctaatgaggagaaatgaaaacctcctaaaaaggaatgatgacttggtgaagaagattgaagattctgctatacttgttactgagcttagagggaacttggaaaggtattttacctagacaaataactctctgttgcagtcattcatttaatttgtcttcatcttgtgcttatttgtggccaactttaaattgtttctgtccttccacaaatacaggttagaagggaaagctgctaatttagaggctgaaaatcaattgcttcgtcaacaagcaattgcaactcctccatcaacagcaaagtcttctcaagctgca

SEQ ID NO: 114169 - DNA, 456 bp, Zea Mays
caattcgaggtacaacatatatataataatcacttaacacaatcaactcctacctaacatgagttggctaatgccgtgactatttcccaattaccatcacacaccacctttcgccatttttggataaccggcacgacacacagctattgtaatacatctcaagttcattcaacccatcagtggagcactagcatatttcagaaaatttcctgagactacgacgacaaggcatcgagcttatcatgcacataaaagcatcacaagcatatttacggaacctatcgattaacctaatcgacacactagacatgttcttcgcccttcaaaatttatcgcacaaccaaaatcatcccacttgctaatgacaccaacaatacctactgatatgttattcacatcacgagcacagttacacgctgcatactagtttctaacataatcctcatataactcgta

SEQ ID NO: 114170 - DNA, 442 bp, Zea Mays
attaaggccaagtcttttctagccttagggttgtcttttgttttgtcagtgatattcatgcaagtgctgataatgctttcacccatatttcgttcctggtgcatcacatcaatgttatgcattagaatcaaggctttcatataagggagttcccatagaccacatttgtgagtccaattatgctcggttccataaccttcaaaacgatttccatgttcgtttagattcaaatcattaagtctcgcgagaatctctgcaccactaagacgcttgggtggtcccctcatcacaatcgtgtcctttttaaaagcgttcctatcgaacttgaacgggtgatcctctcgcaaaaaacatctatggcaatcgaagtaacatatctttccaccaaactttagtcgaaagcataaagtgtcttcaatgcatatcggacatgtcaaaatcc

SEQ ID NO: 114171 - DNA, 462 bp, Zea Mays
catagcaccgagcaaaggatcatcttcactgacaacttctcaaataaagaggaaagtggaaataaatggattacccaactacataactgactttattaataaatacaccaagttgtaggggatacccacagcttgatgacaatcattacaaagatccaacttcattacatgttcatcatgacaagcatttcaacctacgacaagcaaactaattcgaactaagactaactagactaagacactaatgtaagcattattacagactctgactttgtcgatctatggatctaaatctattcgggtcctgcagtttggggtaccatagtcgaaacgacagcgaggcggtgaacagtaagggtgatgaatcccgacaagggcgggagaaccaccatcaagatagtggcgtgccacgcattcagcacgtaattctgcaacctccgcccgaaccttgcctaacttgtc

SEQ ID NO: 114172 - DNA, 540 bp, Zea Mays
ttttcccaccgacaggcggtcatgctcaaacttctaaaaagagcgagagagcatagcgaagctcttcacgtgctagaatatattctcaccataaaaatgcaatgatttgaagagttgactaaagaacatgaggagctaaagtgctctcgtgttgatttggtccaaaggtatgaatctatttcaattgagaaagataactccttattttgtgtcgctcaattagtaaataggaatgccttgcttaaggaccaagtagaaaggctaaaaattgaaaatctagcctttcaagaaaaacatgatatgcttctatgctctcataaaaatcttatggatgatcatatcatgttaaacattgctcatgaggttgtgatagaaaacttaaaatcccaacaacctcactcatgcacatgtattcaaattgaaactatattaccatgtgctaattttctaaaatgtatgtgttaattttctaattgtttcttccaaccctccaatatgttgtttcatttcatcttgttgttgcttaatagattggatgtc

SEQ ID NO: 114173 - DNA, 353 bp, Zea Mays
tcaaatttcaagggctgattcagaatattccagtgtgtatcttgcttgattctggcagttctcactctttcattgcagctcgagttgcatcccaactatctgttgttacaaagctgctggcaccggtagtagttcaggtggctgatggtactcgtcttaagtgttctcatcaaatcaagagtgcttgttggtccctgcaagaatgtgtgtttattaccgatttatgtgtgctggacttacctgtctacgacattattgtgggcatggattggttatcttcttacagccccatgcacattcattggttacacaagtgggtatgcattccttatcaacagtcattagttacttta

SEQ ID NO: 114174 - DNA, 537 bp, Zea Mays
tcagtgtgctagtatgacacaagaggttatactgcttcagatagaacgtccctactagtctttggtggcttgcattatcaacatgtgattgctcgtagtaggggttataagttgtcgggagagggaggagctcccaagtctggtttttgtgtatgaagttgagtctgatcgagtctcctgagttaggaccctagctgccccttttatacgccaaggaaggggttgattacaattgcgaataagaagggttgatggtgtccacgagaagggtgattgggtctcactctgctgacattcctctttcatgtcatttgctttcatgtagcataaccttgctaacttcttgtgacaggaggggttgtgtgcggttcgtgggggcacagggatccctacaagtgtctgtcatcggctccgttggagtgcctttatcggagttagtagcatagtgtcaactgtggtggtgattcttacctttgagatgggctagcataccgatgagctcgttcgtacccatatatctgccgatttgtcattgtc

SEQ ID NO: 114175 - DNA, 937 bp, Zea Mays
ggagaggaccccgtgatcagcaggtgactcccctatggggaagaaatcggaatctgagctggcggctcagataacctctgggtaggggaggccccaaggttattctcccgaggtcgtcgacatcaggggaaatcgagagcgcatgtactcctaatcccattgccccatcatcgcttactgagattgattcgggaaggaaattgttctgtcagaaatgtggggatgaaggtcatcatgctagagactgtagcaaaaatttatggtgtgagatttgtaggaaagacacccatgttacggcgaagtgtgtttggcctaaacagaccaaaccgaccatgcctatagtcgggatggcagctgatggattaggcttctacatgatgcaatttgctaaatctcaactcaaaaaaccaaaacctaatgccttaggtttggtaaaagtactggagggaggagtctctgcagaagatttggtaaaggactttgacttccatttcctgtggggacgtgtttggaaagcaaccaagtgccaggttgggtacatcatgcaatttccttcacatgagagactggatgaaatggttcaattttcagagttaaaaatgaagatgtcaggagtgaagatctcagtggttccatggatctcttcagccactgccaaggcaagactgcatacgatatgggtggtggcagaaaatgttcctgaggagttacgtaatttccaggctatttgcgagctaggctcggcattgggtgctgttgaggaggtggatctaaaagctttagaaatgcaaaattgcgtgaggttcaaggtgcatgtcaaaagcatctctttgatcccctctgtgcttgaagttggggtaaaaccttacctgtttgacatttttttcaaaattgatggcgttgaagaggaaggttggaatgaagagagtggtaactt

SEQ ID NO: 114176 - DNA, 495 bp, Zea Mays
tggggacttcatcatcaataaagttttcgttttcaaaaagcatttagactcttgactttcagctgacctcgattggattggacttgaaatcagcacgcttactcgactaagggtgaccactataccctactaattgagcaatcggcttaagtcggtgatgacttaattcggtgcgacatgctcatgcttactcaacttagggtgaccactataccctactaacggagcaatcggcttaagtgggcgacgacttaagtcgatgcgacatgctcatgcttactcgacttagggtgaccactataccctactaacgaagcaatcagcttaagtcagcgacgacttaagtcggtgcgacatgctcacgcttactcgacttagggtgaccattataccctaccaacggagcaattgacttaagtcggcaatgccttaatacgatgcgacatgctcacgtctacttatcttagggcgaccactatgccctaccagccaggc

SEQ ID NO: 114177 - DNA, 306 bp, Zea Mays
aagaagcttcagaggaagatacaacactcagccaagaagactattctgcttattttgtggagaagataaagggcacacaacaagaacctaccaggttacgatccaaaagcagaaggaacttgctgaagctgaggcaagacagaatcagtcgaaggaggtccttcacactacttcatattaatctccatatatcccaaagtatgtacacaaccaacagccaatccagcagccttcggttttagttgcctcagcaagccattctccaactagatgggccttacctcaaccacccacatcagttccaac

SEQ ID NO: 114178 - DNA, 1737 bp, Zea Mays
gccaaaggctataacatctcatcacactcgtagcaacgttaagtcgcaatgcaaatgctatgaatagagtagaaaccaataaggagctaatgcggatgatagccctttgtgtcgatgtcggcgtaagggcgcaataataattgttgaagttgtgcggaagatagctaaggtcgatggtagttgtggttgggttgctgtgttgttggagctgcaagcacgcaagagacgccatggtgatgatggagacgtgttgagtcagttgtcgtgaaggcggggggcaatgttgaggtcgacgcagtcggagccattgtagagaaaaggcaacgatgcaatcgaggggggaggagggtcaatgccaaagttgatgcagtcaaatcgcctaaactgaggtgtgggttgggtttgccaaacccagcaacgcgtcggggatgaatgaacgcacctgtgttgccaataccgacgtatgtacgaggtagaggaccccaaccatatatcaatgtctaagggacctgcagggaaggtcttggcggcgattgcgatatgcagaaaggcgggatagaagtgccgaccacagcatgcaattgtcggagtagacaaagtaggtggggacgaggcaatgacgctaatgatgtggttgtgctggacgaagaagtagtgcgggagccgacacatcaaacacgaaggtgagcctcatgagtgagctatccagacacaggaagtcgtatcagaggtggatgatcaacggtaggtagccgctccaagttgacaacaaagacctgatcagctggacgaagaccttgtggggacggatggtgtagcaaagatagcgcaccacagtcatcgacgctcagagaacggtgatgtagatgcaatgaggaagcaggcatacgggcgacggtgttgtggcctaccaaggcgatgcaatagcagctctattgctcggctcaaatgcgtagcgtacttagagtagtgtgtgaggtcgctagacgatggacgattcaacttcaaccccaatccacgatagggcaaaccaaaaagacacaacagcaaaggatggggtgtacctagcaaggaagcacctagtcggtggtagtccgacacgatctggtggagcccccgacgatggtgtgacttgacacgactcgtcctaggcggcaacatgagctgccggagtcagacgaggagtctttgaattctatcagcaactcccaactggcatcagaactggaacgcgcagtccatttgactagaagctcccagttgctgctgttgagtcggactcgcaacacttttctagaactgacaataccctaccgtttttaatgggcggcaaggatgccacatatgtaggaggctcgcccacgaacttcttcaaggaaaccacatggaaaacattgtgaatgcgcgagttaggtggcagctccatacgatacaccacagttccaatgcgttccagcactctgaaaggcccatattactttggagctagcttccccttagctttatcagtgagggtggttgcgatgcgatgatgtaggcgcagccacacccaggcacccacctaaaactccacatggcaatggtgtgcatcatagtttcccttcataacttcctgggcgtgcagcaacctctcctttatctctgcacagaaggaatctcgttccaccagttgagtgtccatagcggctagactcggctcggctcgactcgctccttcgacgagctccaaaaacaggc

SEQ ID NO: 114179 - DNA, 442 bp, Zea Mays
tgcttatcttgtgtttttatgcttgtcatgatgaactatgttggatttggatctttgtaatgactgtcaccagagtgtgtgtaccccctgcattttggtttagctgctaatggtaataaaattagatagttaggtgggaaactgttttatctcttctttcctctttatctgagaagttgtgtttgcgtgtgttgggagtcagtgaagatgcttggttgttctgtgttgtaaagaactctatacccttttcttatgctacaagatttgtgagatcagttctaatgtgtgattgcattccacggatgttagacaacaggcgcagaggagagaggtgtgactagcaagagcagtaggcaccgcaggatgggacacctcagcagcagttgccaccaccgccccgatgataatagagcagatgtttctaatgcagactcatgcagtc

SEQ ID NO: 114180 - DNA, 773 bp, Zea Mays
ccgggggacaatagaatttgtgttcagtgggggatgctagcatggaactcacttcgaatggtgaatcgctgggacgtttgagacagagaattatactggttgaggcttgcgtcctagtccagtgtagcattgattgtagtattgcttgaggactgtgttgcagctggtgcgtgcgtgagaaggagggggtcctgcccttttatagctcaagagtagtaccttacagtggggacttgtattatattgatgagagcatggctcgttgtccttgggtggcatagttcttttgacgtcgtccgtagagtcgtgcgtagccatactctcggtatggtgtatcgcttcatccgtccagtatacgggtccctgtagtgagtttgatgttgacgtagtggcacttggcgggccccacagggtagacttgtggtgtgcttcagggtcgtgcgtggtgtagcatcgtcttccatcataagccttatgtcaccttgctacatgtgtaggcatacacccagtagtatatcgtcccgtccttactggtatatgggttactatagagactatggtgctaaggtccctcatgactggggttgactggccccatgaggcagcggaggtccacttgagaccgtatgcggggctgtaccgtcctgttgatagggatttctcagcgcccctctggtatgctgcacgtgcttttggacgtgggttggtgacgatacgtgtggctaacgtgggtccgtagtattggatcggggcctacgctttgctgagttgct

SEQ ID NO: 114181 - DNA, 755 bp, Zea Mays
ctcaactagtccactatatagccttcatatgcattgctttagtgtcacttgttgagtatgagaaatgatcacccttgctattttctgcaacaactttgttgcatcaaatgcaaccgctactcaaatggagttggaggagaccacggatacatggtggaattccaagagtttgatgattattagatgggcgtgccaccaattagatgcctatggggttactaggtttacagatataaacattattcgttaagattatttgcttttgatatgactatgctttgtaataatattatcatatgatttatttgaagtaatatgtgatgatactttcacttatgatgccactttgtatgtgaaattgatctagcacatgcatagtttgcattcggttgtctccttgaatccgtgtgtgccaccgtcgcaactacatctctctcacatacaccccatatccatcacacgtccaaagccatgctatagtttgcattcggttgtctccttgaatccgtgtgtgccaccatcgcaactacatctctcctacatctatctctcacacacccccatatccatcacgtgtccaaagccatgcctcccctttcttcctcattatggtcgtgtcttctcccctctccctctcccttctaaccataagaaactctagctgccctctatctcccaccattgatgcccttagcaccaccctctccctcatcctctcttgcaccatgtcacctatacctttgccctaggatgac

SEQ ID NO: 114182 - DNA, 633 bp, Zea Mays
gcggatcttctctcctgtttcttggaggatggagggagtggagaacctgctgcaacacctgaagctgtcgaaggaggagatgacgcatattgatgtgggggagttgaggagatcggagacgtcaacatgccaggcgatcgggaagctgctgtctgagagaccggctcatccggatgctttggaacgggcgcttggaaggggtggtgtccgctcaatggtacggagtgtaaaagtctaggtgagaacaaattcctcttcacctttaggcaggcgtcggggaagaaaagagctcttgaggaacggccatggatgttctcaaacgagctcttgattatggcggatctggatgaatcgaaggcaatagaggagattgaatttttttatattccaatttggatccgggtgctgatgatcccgattggactgattaacaaggagaccggggaggctattggtaactcggtgggagagtttctggaggttgaagaagatgatggggtggttgctgtggggaagtatcttcgtgttaaaattatgctggatgtgcgcaaaccgctcatgagaggtgttacaatgaaggttggcaaggtggagcaaaaaaatggtgcccgatcgtgtatgaatatctcccag

SEQ ID NO: 114183 - DNA, 446 bp, Zea Mays
aataattttagcttcatttgtgttctcattaatttgattttttaagttcatgatgaactcataactgatagaggtggtcaaacacacatgtaataagcgccaaaggacatttgacatacgccactgcacaaaaattcagaatatcacttcttatgacctgaaagacagtgatgaaagtaagtataccttatggacagtaattgttacagaacagtaaatatgtacatgaataagttagaaattgactacgccttctgaataaatgtcaggtggtgatagtagtggaaactgaaggagtcttatctcttatatattcctattctttaaagccggttcaaaacggcttttgtccggcgttaagtattgctaccacatatatcacaaatactttcaacaccggacataaatagtgtattatgcgcgtcttgcgcgcgtgagaatcatat

SEQ ID NO: 114184 - DNA, 340 bp, Zea Mays
cttctttaggcctgatatggtgagagagactgaagagaaagttcagcaaataattcataatttgaagaaagctctagctcgccaaaagagttacgcagacacacaccggatacccttatactttccagtgggagattatgtctacctgaaagtttcaccaatgaagggtatatcacgttttggggtaaaggggaagcttgcaccccggtatattggtccttttctcattcttgaaagatatgggccagtggcgtatcgacttcaactacccgaaaccttgtctgctatacataatgtgttccacgtgtctcaattaaagaagtgtcttcgggttccagat

SEQ ID NO: 114185 - DNA, 374 bp, Zea Mays
tgcagggtctccatcgccatatgcggaggagtgtgtcagtgtgacctgttcgctgagaacggccgccccgacgcgtcctacatggctacaccaagtggcgctggtagccgtcacgctgtcatgcaagttcgtttcccttgcttcgattggcttgtatcttcctcctcccatctccaggatctagacattggtttgctaatattgtcagagcgaaagaagcgtgcacggtcgtactaccatctttgtgcattgttttggggtttcaactctgtcatgttctcttattaactaatctgttgttcttttgtttcaagtgctcacacgcagagatttcacaagcgttttatgcggtttcagatgttgatgagtgtaat

SEQ ID NO: 114186 - DNA, 694 bp, Zea Mays
tggaccgccgacaccactctcagcagattcctgctgttgagagccagacccgtcggtgggcctggtatctagcggaggggcgtgaccttgggagcagaggggaagaagccctggcaaatagacgatgagttaagacttatcggcatgatgattaggctcaaagaaaaagggattacacttacttggggccttggaccttccagtagggtcccaaggtttcaggacagaacacacccgggccttaatcagggcccaagcgggggtacagtgctgacacgtgtccagacctggtctggtgggatccgaacctatccgcatgcactcctgctccccgctcaggcggagacccgatgctgccacgtggcatactacgcgtggcttaagccaatgggcggaacctagcatgacgcctatgggctacacacgccttcgcattcattacggataagacgtgtgcctgtccattccactgacagacggcgtgctcagtccacgatacatgggccgtgcagttactcacacgttaccatatcgagggcaatgactcaccattactcccacgttaccaggaaaaggttactacctatcaatgctgcatggactgccgccatcatgactcccactgattactcatgcgttactctgtcagcattagttattcacataatgtatttcttccattatgctcctaggc

SEQ ID NO: 114187 - DNA, 515 bp, Zea Mays
tgtttctccaatttgcttctctttaactctgagctcatattagtcaaaacaaaatgcgttgagcatctaatcaccaaaccactataggaatgacccaagggcacgtttccctttcagccccgaacctggcacgccaactatcatggtttcggaaaccgggggacaataaaatttgtgtttggtgaggatccaacgcggactcacttcgaatggtggatcatggagatccaagcaaagagccgataccatgggttatactcttttaggccggagccatagtccagtgtagtggtgatcgtagtattgtagtagagcgtgttacagctggtgtgcttgtgtggtaatgtgcctctctttgaaggaggagggggccctgcccttttatatctcaagggtaggaccttacagtgggtcttgtattttactagatagagaaagaggaggagagagagatctgctcctcgggttgtcatggtgagtcatccgtagggtcattgaaagtcgcctagagcggg

SEQ ID NO: 114188 - DNA, 349 bp, Zea Mays
taggagtcagctgatgaagatatatttcgaagttctttagaactacccctatcatctcattcaggggaaatcgcagccccgctctgaagaagctcttgaaaaccacaacttcatccttcttcggctctagggtagtctcttctccagcaaatcgaataagtttgctttcggcttctccaaaatagccaagtttcatcatcataggcatgtcgtctttagacatagtaaatttttcaaaatctaaatgactaggcttcgttgggatcagaatgttgtagtcttcttcactctcaacatcttcaccctcaatcacagtctgctcagcttcgacattagaagtaccttcgtc

SEQ ID NO: 114189 - DNA, 803 bp, Zea Mays
ggacgagtacttggaacacttattcagcattgctatctgttactgacttgtgtgccacatatatatttaatcagccttcccagggctccagctttctctcgagcagaacaggtactcctttgcaatcacacccacgctcgttggacagtcacactggtcaccgtttgccacctgcagtgctggtaagaaccttgtaagagcggggtaagatgcttcataatttatattccaccaccaccctgagagatagttgtagggttcacattatttgttgcctttttgtctctgttttgtggtaacaatgataggaccaaagaatcaaatggacaaggacaaggggcctaagtttaacgacgatgagtgtgtctctcagatggaattgaaggagatgatgcgcgcgatgactgaagcttttaaaaaataccaggactctgcggcgacatcctatgagcaacttgatcaacgagttgctgaacttgttacacgcatggacggactggaggctcgtcccccaccaccaactccagccccagctcactctccggtggacgacgacgacgatgacgacgatgtttatgcaccgctgcgacaacgcctcgcacgtaatcgacaaggtatgggaggtaatggtagacgttgtcatcataatcctgaaccagaccatgatccatttgctaagattaagttctctattccatcgttcatgggttcttatgatgttgaagcttacttagactgggagatgacggtagaacaaaaatttaattctcatcttgttcctgagcagcatagggttagacaag

SEQ ID NO: 114190 - DNA, 393 bp, Zea Mays
tgtggttgaacttttaaattaccactaggtatgtgcccgtgcgttgcaacggtgaacaaactactttctacaaaatattagtgcacaaagattaaaaacgaaagcacatatattatcaacctcaacatctcactgaaaaatattcaaatttaaaattccttgcaatttcgaaactccttatgtcactacaaaaaatgtttattcatccaagctgtataatttcatcatcagcttcaaacacctgttaacttagagtgctccaatacgcttaggcccaattacaaagttacatataccaaaataaaactcgacaaggaaaattatctactaccctagaataaattttgaatagttggcgcctagcaggtaacatagagtgctccaatactctta

SEQ ID NO: 114191 - DNA, 547 bp, Zea Mays
caaaggatggaatccgcagaatgtagttaatccatgcagagcgattgcctcgatcgtgtcctctgctcggtacccgaaagactcggagtccaacgagcgccagcctggctgcaggggatgaggctccaaagtcatcctcaccctacagcgaggcactcggtgcttctcgaactgctgcaccgcgtactgagggggtgtcgcgtatccggccccctgaagcacctcccacaaaatgcggggaaagccctctcgtgcaagtccgtccgtgtgggttagtgcatttccgtcatcggaggatccgtgggaagtcatctgtgtacggttaagcgtaagtaaaagaaaaagaattataaaaagaacaaggaaaaataaaactcagcctgtttctagttaagtagaaaggcactggggacctagttggttgttattttgtttttaagttctttacgcagttatccatttgcttgattatgaatgcatgcatgctcgtcctgaacgacctcacaacaagataaaaggaatagggagaaactcccatcctgtaaaa

SEQ ID NO: 114192 - DNA, 649 bp, Zea Mays
tttctaccataaagagcctcaaacggggacatctccaaactagcctggtagctattattgtaagagaactccacatacgacaagctcttatcccagctaccaccatgtttaagagcacaagctcttagcatatcctccagtacttggttggtcctctcggtctacccatcagtttgaggattgtaggccgagctgaaattcaactgtgtatccaagcactcgtgcaacttttgccaaaaccgagaagtaaactgtgatccccggtctgacacaatcttcttaggcactccatgtagacaaactatccgagccatatacaattctgctagcttggctcccatgtaattagtcctcactggaatgaagtgagccacttttgttagcctgtccacaatcacccaaatagagtcataccctgcagggatgcagggtagaccaacaatgaaatccatgccaatttcttcccatttccactcaggtatcttaagcgggtgaagtaatccagtaggtctctgatgctcggcttttaccctctagcaaacatcacattccgccacatgtgcagcaacatccctttttagtccataccaccaatacttctgcttcaagtcctggtacatcttggtactgcccggatggatggagtaag

SEQ ID NO: 114193 - DNA, 650 bp, Zea Mays
atttttcagacttcaaacgtttaaaaatggttaggtgatatggcacacatgtgcacgagtgagaatgcaccacaacaccaaaccagactactaccgacctattcatatcgatacccatccagccaaccaatcagaactaaacatgtgccaacatgactgtccaatgcacacaacagtatcatcgttcaattccaacagaaatatggtccaacgcggtcttgactgaccgatcactgatccgtcgatcgaccaaagttaggactgatacagttggtaccaattgatcgcccgtcgagccacatcaccgtctattatcaaccggtgttgaaatcagcctaattgggtatcacccaccaatatctccgtctcgaggaatcatttattcatttttgctatttgctatctatggttgaaagaactcgagtccttgtcgtgtcctgactatctccagcagactcactatttcactcactatcctactctttattttaaaattctctcttaaataatgtatctatagtgtaaactatagtgtaaaacagtgttatgcatgagaagttgcgggagttggcatgaatccctgctgtgaagtttggtaccggtgccctgcacggcggtggcaatttcttcagaaggcagatagggactgg

SEQ ID NO: 114194 - DNA, 284 bp, Zea Mays
ctttcggcctctttgtgcatgtcttccgtaagatattcatatgacttccagcagcattacgcttctttgtaggtgtcatgaagtcatcgtcgtcatcgccagatccagtttgttcattggcttcataaataacagatggtttctcgacaggtgcaggacgatgatcagaatgctttgtgtttggaggaactccaatagaggccggacgtggtatctcaacactaaagaattcttggcttgactcaatggttatgcgtttgggattagcgggaggacgatcaaca

SEQ ID NO: 114195 - DNA, 285 bp, Zea Mays
accacttagccatgagcataatggtccaactcccaaaccctagacctccacaatggctccacatgtcgccttcgattcctacgggaacaacacccaggttttaagaccaaactgcaaaatcatcgttggatggttttgagggtcaaccaccaaattaccattggtagcgtactccacatgcatccctcacatcatgaacatgtatgtgtcccactagtcctgtatcacgccagtgacacgaccgctctatcatgccctcgtgtatgacaatatcacaaatgtcga

SEQ ID NO: 114196 - DNA, 384 bp, Zea Mays
cgacgtcagagttataggggcgacgacatccagtgacctgtgtgcccgaggctaggcaaggctgcagctaaggggctccacctacctaatcgccaaggccaagacggtggcaaagaatggtgtgaccgaaggtgtccaacattagaaccccaggaaggaggttatggctgtgttgtggtgcaggatggtgagaccgagacttagaccctcgagcaaccagtcaatgggacgcgaccgtggcgaactacagcaatgagggcaagacacgacaacaatacttcatggcaaaaaatgcaaggaagtgcgagcgatggatgagtggcactacaacgatgggaaaacgcgacgcgtagcgagatacgccgagctagcccctgtttcttt

SEQ ID NO: 114197 - DNA, 705 bp, Zea Mays
gaaaatttagacattttttacctttggattgtggatagaaaatagatcgtcgcggcgtggcgtgacaatggcgagccactgtgtgcgcaacaacagcgagcagaacacgcgagcagcggagatggcacgagcaaagaaataaatatggtgccgcgatagcgttccacaagtagagcagtaaatcgtcgatggtggggttgctacgcgagctccacacggggttggggattcggcaaacggcggcacgcacaactcaacaacagatgcgcgatgcagacgtaggctagcagcagaggagcagggcgtggcgagactgagcagagggaggagaactcgtggctgtgcctcttataggcgagggagagagtgaatcgggttggaattacgtgccttgaaggctatttgcagctcgacgttggtggctcaagaaactgacgttgtaattctccattaataacgccatgaagctgtgcacagtaactgaagagaaaactgcggcagggtggacatggcccgaggcatgcggatgtggcccacaggttggcaggcaaacgcaaggtcagcgacgtggtctggtggaaagggagggctggccggcgccattgatggcagtccccaagtggggaagaagaagagttggaaaccattaatggaggtagaagaaactgccgaacggcatagagaagaggaagaggagaggtctcg

SEQ ID NO: 114198 - DNA, 326 bp, Zea Mays
tgaataccactactcttggatgttgaacccactgatgtagaagtggatgctgctgatttagaacccatgattagagcagcagcgttctttccactataattgctttgaatgtgggattgcaagtctccagttgaaccttttgacgctaagggtgcaacagtaaaccttgagcttcctccagtcatggttcgtgcaccatatgacaaagggtttgttgttcttagcatcttgctgcagctggcgttcagctttggtggcttgatgtaccaaatcaataagacatcggtacggctgaaactcaacaatgcgctgaatgctgcggtgta

SEQ ID NO: 114199 - DNA, 294 bp, Zea Mays
gggctttaacgagctattaaatatacttgttgaagcttttcctaagggtaacaaagtgcctatgaatacctatcgggaaaagaagttgatccacctagtggcaatgaaacttaaagaagtttgacacttgccctaaccactgcatgctgtatcggggtgagtacgagaaactagggagttatccacactgcagcactagtcgatggaagatgaatgttgaatatcccatggatgatgatccctctagtatgacgaagaagacgtatgtcggtgagataatcaggggtatccgaa

SEQ ID NO: 114200 - DNA, 311 bp, Zea Mays
tgcactatggctgccaattccaaatcgtgggtggggtaattctgctcatgcggattaagtaggcgtgatgcataagcaatgactttcttgttttgcatcagcacacaccctaagccttgcctcgaggcatcacagaagacgacaaaatcctgatgaatatttggtagtgtcaaaacgggtgcggtcgtgagcttctcctttatgatctggaagcttccttcacattttggggtccacacaaatttatggtctttcttgagaagctcggtcataggtcttgctatgctggagaatcctttgataaagcggcg

SEQ ID NO: 114201 - DNA, 865 bp, Zea Mays
ctgaagctgatcccaatgggtgtgacccgactgatgctaaacccaatgggtgtgaccttgatgatgttgatcccaatgggtgtaatccggccaaagttgaacccaatgggtgtaccgtccgcattattgatgaagatgaggaagaggaggaggaaatccctttaattcggaagaatagtcggcgctacatagccagcggggagagtagtggtgttccttctccagctttgtctgccctcgttggtctgcaagaattgtctctagaaaattttgatcagactctcgaagatatggtcccagaagatctgttgtcgaagccggcagatggtgggatgatggaaatttgtgctgatgtgcctgatgccgggttggagttatcccgagcggcgtatcgtgcctcatcgaccttggagcgtggtcttacgagtcaggaggctggtctggattgctctgttcccatggaagtggttgaaggaccttcagccttagaggtggctgttacagagggctcggtcctcaaggatggcgctagtgtttacctagcccccgagggtgtcgccggagatgatccggctcggatgggtagcgcgagctatgacccaacccccgagggtgtccgagttggttctccctctcatacttccatggatgttcacatagggtcttctcctccgcattttggttgcatggcagcagcacgagctttaggtcaggaagtcgccttagaggctggcactcctgatgacagagttttgatttctgctgatgacactgaattggtccccactgatgcattgcggattgctccggttggtgatccttcatcgagctatcaactgacttcccacgatttgggggttccttc

SEQ ID NO: 114202 - DNA, 450 bp, Zea Mays
atcggcaggagaagcaggttgattggctcggcaagggcgttttgggcgaacactgacagacctctgaatatccaaggccttactagcttctgggagaggcgccaccatcaatgttccagcaggagcggcatcagaagaatcctcggctaacatatcaagcatagcacttatctctgcatcactgggatccaaaggcacctcaaagtgaacctgccgttcatcatcaggaatttctccaagcaaagcaaccaaagcactaacttcttcggcagagggtcacactctaaggcccaaactgccatcaccagcaggaggatttgacacaaaatgggtaaaggccttggaaggaggcaagttccaagccgagtaggcaacaggggcaccaacatttgataccttgcctctgagtatcatttcgagccgactcaccaagtccacagcaggaattct

SEQ ID NO: 114203 - DNA, 465 bp, Zea Mays
aagaccatctttgtggaggagcacgccgacgccgactagggtgatcccaagccgactccactggctaccccatttgagtctgcatccaccacatcaaacgatagacccaacatgtctacttccaccacctggagtctgcttgagccggaggatgctgagcctagaggagttgaggctactttcgaggggaggccacttcttcgagggaggctccacgacatgtccagcatgatcaccctcctcaacaaatgactgatgagcttcatgagcgagtcactcactccatgtatcatgagatgtcccactttgatcactctgcttttgttgcctcttttgagccccatgatgttggacatgctttgtctgatcgtaactaggtcaatgttatgcatgaggatcttgaaaattttgatagaaaccaggtctggtttttggtgccacctccttcaaactagcatcccatcg

SEQ ID NO: 114204 - DNA, 378 bp, Zea Mays
ggacgccattgaccggtcgtcgtcctcgtccattgccagatttcaggtacaccacacgccagtacgcacatgcttacagcctgcatttgcgcagcaagcaacaaagccagcaagcaccccagcagaccagcacacctaggcacctagctggctagctcctctgtcttgtgtagttgtgcttgtgtaccgacggtccctaggacccatccgttttggcggacgcacggacggtgaaattgggggcggcaccgggtggttggggcagccgagatgctgctgattgacgagctacgttggtgccttgtgacgagtgcctacggtttgtttgaagcttttatgcattaatatagatatgctacacactactccctccgtttc

SEQ ID NO: 114205 - DNA, 362 bp, Zea Mays
ctagtttgcctagtctttgattcacaggttcataagattcaacagttcagtttctcagtcagaatcagctcagactcaaccaaataggggtaaaacatggaatagatgaactaccaataattatactctttggataagttcaaaataccccgaggaacgtattcaacacttctagaaaggttgggaagctcaaaatcaacatatcgctattttggagctggtttgagcaaaagaagaaatatgagtgaaagaatcaaaatgttcatgatccatgacttagactagatggaaaaccacttgagatatatttctaagtcataggatttctctcaagtttagccaaagaaacttggagaagattg

SEQ ID NO: 114206 - DNA, 343 bp, Zea Mays
gaatttctcatcgcccccaatctctgttttcgccaccgtagaaacgcctcgcgtggccagcttgctccaggttagttcaagctctctggtcatttgttctagcatccttaagtcctcctcaagctcctcgacccctctgattgaactagaccgccctgggtcaccgagaacgcacatgttcatccgttgtccatactgtcaccgtggtcagggcgttttagtgcgccattagtgaaatttatttaggggaaacttcggttaaggcttgaattaggtgccagtcgacggagagccggtctttgcatgatccggccagtctagactcaccggtgcacggacctcc

SEQ ID NO: 114207 - DNA, 313 bp, Zea Mays
gtgatcacaacttataaagggataactctctggtcatgtataaaaggtcgagggggacccctacaaaatcatctcatctcaccccgtctcacttgacaaccatcctcatcgacaacacctgggcattcacaaagctcacttgtaatctacatactccacaaaaaacccaatatacagccacaacaggaagttgggtgttatgcaattcaaagcggcctgaacccgtataaacctctatgcaatatcaacatgctcctgcacgtaccatccaatcgtagtcaacgatgtcgtcctacccaaaagcataacgtgg

SEQ ID NO: 114208 - DNA, 472 bp, Zea Mays
aaagtttaggggtctacttacaattttacagggcacacttgtgattattttgtataagcagtggaccacgagttcatttactaaaacccgaggggttcatacgcaaaaagccagcatcgaaggggtatcgacacaactgagctgtccgatcagtgtcctacgcttcagattagaatcacgctcgcgatgaagcgacacgcgaggagagccatcggattccagatctatggttcagatttaacaaagcgaacgaagaaacagtacctaatcgcagcccttggattacgcatcaatggttaggatccaactgaccatggcatatgcgcacgtgcccgatcttcatctatcagtgcgtatcaaatcaccgaattggtacgcgactaccaatctcaaccattgaacccaagatcaacggcagtcgtgcatcctcttcccctcgatagcccaggatggcggcatgcacctacacggc

SEQ ID NO: 114209 - DNA, 555 bp, Zea Mays
tttccacgaatgaccctttaataaatgaatgagatgctctagaatcgaacaaaattgaagcatgtatggagttaatgagatacgtaccaagtgctacgtctggtgcgtcctgagctgattctgcggtgatatggttaacccttcccttgttctggttttgataacttttaccttgagtgttgttacgaacatgtgttccttggtcaacccgttgactgttgtttttctgaggtgtccgagtgttgcgctttggacaattattggcatagtgcctagtttctccgcacttgaagcacacattgggctgaactgggtgatcggattattattcctggcctgtgtgttcatagagtttccttgctaataattagttctctgctgattgcttttctggccttgctatctagagcgttgcatttgataattgttattcccactctgatttccaaagcaaaattgagaaccttgggagttgttttgtcgggtattcctgctggtctgcccttgtgactgaaatttccttttatgatcaaacaatcccttccttttgctttc

SEQ ID NO: 114210 - DNA, 488 bp, Zea Mays
attgtaagaaccccctatccggacccgtcaccttctcaatttcgtttagcattcggtaccctagagaaccgtgtaccattgggggttgcggggtcgctggccatggagcaccgccgtatggccctgcttggccaccggagtttggcttgtgtaggggggctgggttatccaccgtctgtttgggaatgaatgagtaagattgagtctggcacatcacttgggcagtttgatctcgaccgtgggttaacgatccatcggttccctaggagatccgctttccgtcgtcgatctggggatcgatggtctcggttcaagcacggcagtcatcctagtgtgttaatcgggaccctagatttctaatcgggcggccaagagcccttcataccgtttcagccgagctatttgtgttaaagtcctcggagtttcgtggaaataacctgccgtccatcgccgctattcactgtgtcttaggaattttaccacggagc

SEQ ID NO: 114211 - DNA, 417 bp, Zea Mays
gataacttttcatctatagagccagaggcagacattgtcactatttgatcccatttgaagggttcagagcatcgtccccattgtatccttgaccggacatcaactcctcctcctgcaccaatgccaaggaacaagcagtatccaaagtagaaggtctttgcaccataattacagatttgatgtcctctgtaaccggtcaacaaagcgcatggtatagtatagggggtccgcattggattcatatgccgatagatgatcgactaaattggaaaaccgttcgacatactcgaacacggaactggttcgaattagcgacccatgttgctcacgaccgaaacaatcgtgtatttgagtgcaaaattcatgccaggaccagtatcgaacgcggtgcttgattgattgcagccaacacaccgc

SEQ ID NO: 114212 - DNA, 647 bp, Zea Mays
tgggaccatcacaactgttcgatcttgtgccgacgcatcggattagatctttctatcattcaagcagtacacaccgcagcacgtcagatcgcatatcaataatcgcgatttaaagaagcgcgatttaatcctagactccggttaatcgatcaacagctacggtgtgccctcctcaacttctaactacatccgacgatatatatccgaataggagattatggcgaaccagatggaagacatctcaccatggtttgatgcgctgacccgtctgcccacgacggggggtatccccgcgatgctgctcgcatctgttgagcaattagtggagctccaatataacctccgtccgagaagaccacgagcacgcccccgtgaactcgcacagcgcccagacccgttcgccggggatgaagcaatggtgtggcatgagatgaccgtggcggtgacccatctctcctcgccccgctctgtatctctctcttctcttgggtagcaggacggccatagaattaggagtagtatgagacttgggtgaggtggagggtcatgtgatagcttgatttatatacacccagaggctaaggagtttgccttggagtaaatactgacgatccgtggtggttacaacggagtctgcaactctggcg

SEQ ID NO: 114213 - DNA, 390 bp, Zea Mays
acattccgaatggatttaattcggtcagggtctatctctataccatgttcatgaatgataaatcctaagaacttaccagctgacactccaaaagcacatttatgtgggttcattttcagaccataccgacacattttatcaaaggatttgcgcaaatcagctatatgagaactaaactcagccgatttgactacaatatcatcaatgtagacttccacagtgtttcccaatagctcgtgaaaaatcaaattcatagccctctgataagtagcactagcatttttcagaccaaatgtcatgacaacccactcaaataaaccaatgaagcctggacatataaagatcgttttagacgcatcttcttcggccatgaaaatatgattatattca

SEQ ID NO: 114214 - DNA, 291 bp, Zea Mays
aagggacgaaaacattagaagttctaagcccttcggcaagagtggcggtgccgaaggcacaaaaaggtctagcagcgaccccaagagaaaaaggatggccagtgtactagatgtgctggagacgataaaagcttcaagctctactccagggaaaattgccaaggcttcgaaagtgcaaattgaaatcgaaacaaaactgaccgaagccgaagctacaatgagccaagctagcgccgaagctgggccttcagagcctatcaaggagaaaccctcggaaattggagaaaaggc

SEQ ID NO: 114215 - DNA, 1327 bp, Zea Mays
gctgatcaaggtgatccaaaccgaagaagaagagaaccacaacaggagagagtaagagaagaagaagatcaggtgatgggagggcgaggacatccatctctaccaaatatttgtttcccagatttcaagggaaggaacctggaatatggttagccaagtgccaagactacttcaccatttatcaggttcctgaagctttgtgggcaatattagcatccatgcacatggaggggaatgcagcgaggtggcttcaagtgtacaagatgaggcagggactgggaaactggatgcagtttggcagagctgttagggccaaatttggagtggaagaatatcccaaggccatgagacatcttctgaacctgtatcagaagaatggagttgaagagtacactcaagagtttgaagaagcaaagtatgccactgctgttcacaacccggggatggatgagatttttttgtcaatcagtttgtgaagggactgaagacagaattacaagggggtgtaatgtgtcatctgccacagtctgtggatagatcagttattttagctcacatgcagcaggagatattagagaagaataggttgaagatgcagaggagtattactgctaataaggctttgggcagtaatctgaagactgacaataagggaggatttattctgggtgatctaacaaaggagaggcaactcaaggagcttagaagagctaatggactttgtttcacttgtggtgaaaagtttgagccaggtcaccaagggaagtgtcccaagagggtggtgcctcagttgcatgccttaactgtggaagacatgggcatggtgttgactgatcctgtgttggaacatctggagtccaaagacaaggaggttgaagaattgtataaactgtctctaaatgctatcaatggaatggaaagtgatggatgtatgagggtgcaaggttttatgcataaccagatgttggtggttctgatagactctggcagttctatgagttttgtcagtcaaaacttagtggataaaataggcttgcctgtgcaaaagtgtgcagcagtggaggtgaaggtggctaatggagaaaagatgaggagtgacaagaaggtggttgatctggagtggtggtctgggggtcatacctatactactactctgagggtattggagttggatgtgtatgacctgattttgggttttgattggctgaaaaagcatagtcctatgcaatgtgattggctgcagaatgtgctcacatttgtggacaagggagtgactgttcagctaagaggaaatgcgggtcagcagaaggaggttccacaaatttcc

SEQ ID NO: 114216 - DNA, 761 bp, Zea Mays
gttaaggatgagcacaactagtcattcaagtgcatgtagaccacgtgtgttcagagacagggaaaacggtggcaaacaccccatggcatatcaacatgtgtccaacaagtgcttaagcaggcagcacagtcagcacacactagtttcaccctcccctttctcaaacttatcttaagtgacatgaattgtggcaagtgaaaccccccacaagtcttctttaacgtaccacgcccagaactccctagaagagctagtggatggggatacttctgctattttcagactacactaaactgctctgaacttcttcagtccactgcagagtcaaattcatccctctttttctccaatttctctataaggacagctacctctccacatcaaaattgctcacaaaacattggtcttacactttgctataaacttctagggtcaacactgcacagatctcaagttataatactccaaagcgaggcacatctcacttggaccaaagtttcagttaactgaaataaaacttggattcataggctgacagggtaactttgagggaactttactccttattttgcatggtaccaagtcaacctctattaagcaaacttgcacaccaatatctgctcttcaactttgctacataaacatggctccttaatcccccagaatagtcgcgagaaggtttcaaagttgaactaacagacgcctctctgacttggttaaactgaatgatgttcagtttacaacaaactgacagcccaact

SEQ ID NO: 114217 - DNA, 1007 bp, Zea Mays
acaggagcccagcctcctccatcgttgttaccccgaagtacactcggcgaagggcgtcatacaaggaaaccctgctcttgcccaagccttctcccatccaaggccaagtggaagataatggcctccgccctcccaaaccccctcctcttcctaagatagtgtcatctaacctcagggggaagtgtttcaattgcttctcctcaacccaccacgcgactgagtgtcatcggctagtgaggtgcttctgttgtcggctgctagagcatcatggttacgagtgcccccaccggcggtcaggcgcgccccaaccaagacgctccctggtgtggcgtccaatcacccaggttaccgggatggcgggctttgaggacaagataccggacaaggtagaggttggaggagatggaggcggcgggagggagaagaggcgcacacgccgcgaacaggggaggaggagaacgaaagtcggagtggcaacgatgatcatgaagcagcagtcgctgaactcccccagcggcaggcagaacagagccatgttcaagaggaaggcgggcctaggtggatcatcagacacaccaggaagatcatgcaagcagaggataatcttcgacgggccctgatcatctccgtcattagccaagtgaattttggttgcgccatggaagtgtctgacgcgctcaccgtgaggtttaacctcgaggcacagacgctcgacctccgccgtgctgcatcgaattcatacgtcgcattcctccccaacgaagtggtagcatgccaggtctacaatggaggccagcctttcgtctttcccaccatccgtcttcacatcagacatggtccagacaagccatggccgtcagcgggggagctctgtcagtgctagttgacatcgaattgagaggaatcccagcacgactttggtggttggaaacggcggagcagcttctcgatgatcactgcctcatccgagacgtacacccagagtctgaggaacgcatcaatctatc

SEQ ID NO: 114218 - DNA, 524 bp, Zea Mays
tctccatcagctcctagaggaagtcttgctccaatcccggaggcggtaggcgtggttttatccgaagccatctgccatgggaaaagagtcactattatgcacatgccatttttttaactagttattttattcattacatcaagccattacataacacagcacactgctaccacaagctcatcacacacgggtgctatctagggtactccccgaactccttctctaaagtgtccccaaattccttgagaaggtcatcaaggctggccagggacatctcttcggtgtcggacgggttccttggagggttttcttccttctgctcagtctgacatccttgacttttggtcttcttgcggattttccttgcgggggcgagcttctccagtttcttgtcatagtccatttttagggtgcggtaggctttccgggtattggtctcttcgcctttagctattgagaggctctcttgaagggacgccttttcttctgaaagttccctgactttttgctccaggctttccacc

SEQ ID NO: 114219 - DNA, 409 bp, Zea Mays
tgcttcactactcagcccactccccacccaagtcgtggtgctcgtcgccacacgtcgggatcctgcaccaatacagctactttgccttctaattcgcaccgacggatgggtaggctattagtgggattctaccttggcatcacagcaccatctgcccttgctatctcacaagggtcccgtcgcgccgtcgcaacgcgacaatggctgttgcttgctgccaccgccttttgccttgtcgtcgccatctaccgtcgcatcgtcgcctgccctcgctatcccacgcctattgtcgcctcactttcgtcattttgcggtggagtcactgactctccacactaacgtgttgatgcgcccgcttcgccctaacgtccagtccccgccagtccacccctttgttctctccaactct

SEQ ID NO: 114220 - DNA, 466 bp, Zea Mays
gtgcaattaagagatttgctagagtgctgctcactttctagatttctacaaaatccgttgtaacgtcacagatactgctgagatggagacgacggcaacaagagagtgctgaagaagatgattgggagagagatggcaacaaaaaaaaatatggtcaaaattagacattgtacttgtacatgtagtgtgttagagcatgtttgggtcctttagggccagttttggttcatttagtccatagactaaagtttagttaggagattaaaatttgagactaaaagtatattcaaaacacattaaatgagtttagttaggagaccaaaatatcctttagcatcctctcgacattaatgtaattgaaacaaaaaagggacaagatttagtctttttttagtcacggactagacactaaaacagtttagttccaccgtttagcaatttatggagtacaaatgcatagacaaac

SEQ ID NO: 114221 - DNA, 554 bp, Zea Mays
gggggatgaggcttatattactcacaccaaagtgctcacagtgcgggttacaagcaaagcgagagagggaggaacccaagtctctaggagtgattgaggcaagtgccaataccgtatgagggagaatactactcagtcttcactcacccctcgctgttccatggactgtcctacttataggcccggtagagctgccttgcggacgagagctaatgacatgttgtgaaggggtgtcttcatgtcctatagacaatatggctcgatactttgttgttgacttatgtttgcttgttttcctctgagagccgagggcgaggccgagggcttggtcacgtatccgagcccccctggcatgagaggtaaaatcataataaacttttatttagctagagaggtagtttgtacatacacagtcatagaccaagtgatatgaccactgctctgctcaccaaaagggttcatgccattggtgcttaaaccaaaccttacatttctagcatcctatgcaaactctagaaacgttctttcaactttatgccattacgaaccatcag

SEQ ID NO: 114222 - DNA, 902 bp, Zea Mays
ttggaagaatcagttttttggagccaaatccatctaacacgaagggccctatttaagcattgaagatcagagataccaagcccccctaactctttggggtgtgttaccttgccccaggccaccatacaatgaccaccattagcctctttacaccctcgccacaagaacccacggcagatcttatcaattgctttaatagcccacttaggcaaatccagagctatcatttgataaataacagtagcagtgagcacaaattgcacctgggtagctctgccagcacgagtcatcaggtcagctttccaaaccgataatagatcagccaccttgtcaataagaggctgaagctgagctttagataacttcttcagggagagagggagacccaagtatttaattggaaaagtctcaaatctgcagggaaggagctgctggaccaaattcaaatcagcattgtgcaacggatgggtacaatactgctctttgccatattagttctcaaccctaaagcatccccgaacagatccaaaatcctcacagtagtgtttaagtccctaggctctagttttaggaagagagccacgtcgtctgcatagagcgagatccggtgatgaaaggaattagaagaaatgggctgcagcaacccatgctcctcagccttgataaacagcatagtgaggacatccataacaattataaaaagtaacggaggtaaggggtcaccttgccgcaagccccttctatgagaaatgaaccttccaggcaccccattgagcaggatctgggtggaagaggtcataagaaaacaacttatcacatccctccacacaggaccaaagcctaatttttccagaaccttaagaaggaaaggccaagagatcgagtcgaaggccttggaaatg

SEQ ID NO: 114223 - DNA, 396 bp, Zea Mays
ctggtgctttgttgtgttccatcccaaaaactgcttctcaatgaaaggggcagttagaggcacattttcttctaggctaatctgaggttagtcatctgtccatgattcaaccaagctaaagtcattcacgagtaggggggcgaacaaatctttgtaaaacaaggttatgtattttgtgtggttctcttgaccctcaattttgctttgatcatgatccagtgagaagattcttttttcatgttcttaccgtttgcaatagtatatggttttactagtactgcgcccaagagaatgccctttgtcttagctcgttggtaaagtctaatttcttcctcccttagaagcttagctaattgatctcgtgactgtcccaaaagattttgctcggctcccgac

SEQ ID NO: 114224 - DNA, 411 bp, Zea Mays
ggcgaggtgagcgggctcagaaattcaggggaagcagaggagcggatgaagagagaaagtgaagctagggctcgaaaatcaaaaaaggcacgtcggcgcgagtataaatggggtttcttgggtctggcactatttctaaagtgccagatcactactcagaaaagcaaaagtatcaaacattacttggcggttacctctaaaatgctagaggtgtcggacatatggataaactttcaaacacgcaaacagaaaaacagcgaagcactgatcacttgaggcaactgatttatttattcatattggagggggttacacaaactcaaaaccaactcattatgagtcggccttttcccaccctgcttactacattacattacacaactctactacttacactacactactaactac

SEQ ID NO: 114225 - DNA, 357 bp, Zea Mays
tcccaatcagatgaaagaaggtgcagttatgtacgtaacaaaactcaatgcagaggggtttcctgaagaaccacttgacttggttacaaagtttcgaaattcctgcgggtctactgttagagatatagtgccaatcacacttcagaaatggaaggatttagatgaagacacccgcaataagctatgggctaagttgtctgagtcattcaaggtcccaaaaggcacagaggatgcagtaaggaagtcgatgctctctgctatggccaagatgtttcgtaggtggaagaccgagatgaatagggattttgttaagaagaataaggttcctccgcccaagaaaatggagaaaatcactca

SEQ ID NO: 114226 - DNA, 665 bp, Zea Mays
tcacgttttatgcttaaatccacctgagctagaacaagaacacgatcggagcgcgcgattttcacgccgtaatttaggccccattcgtcgttacgaaatagattgatgatgtacgccaaaatttgtacccatttacgctattttggttcacgttttatgctgaaatctgaccgagccagaattcgtgcacgattgaacgtgcgcaattttcacgtcataatttttgggccccattcgctgttacgaaacaggtctataacttacgtaaatttcgtattcatttacgctatttcggttcacgttttatgattaaatccacccaagccaggactctagcacgatcggagcgcgtgtttttcgcgccgtaatttgggcctcattcgtcgttttgaaaccgatcgaggatttacgcggtaacagtcccacatctatcgtgaatttacaacactactttcctaatctcaaaccaacccagatctacgcacacactgatcacgtatatacaatagcataaatggtctgacgtcgcgatattgcatggtttatgttgttacgtttcatgttcttatgcagtcgtaaacactgaacaaacttgtaaagtcatcccacgtgatttgcgcgtcagcagattttttgcatggtttatgcacattattcaatttatt

SEQ ID NO: 114227 - DNA, 755 bp, Zea Mays
ccatattatacattgtttggttctctttttttagcttggcccaattgggttgccaacagttttcacgtgtaaaatgaagctcccgccaaatttaaaaattttaaacgctattaaacaaattacaacagatttgaactaaaaatatgatttttacccataaaatgaactaattgcaatcatctaaatatgatttacaatcatttgaattacaatcatatgaactatagtatttgaacaccagctgatacatcttgacccataaacagaaacagacaaacgtgataaatatgaataaactgggagagcaccagaaacagccagaatcatttgaattacaatcatatgattttgacccataaacagattgaattacaatcatatggatgaaaacaccagactatgaaacagactatatggatgtttattcatatatgaaacaccagactatatgaaacagactatatagatcagtttattcatatttacaccagactatatggatgaaaacaccagactatgttattataaacagaacacctcctgaaactgggagagcacaactccatcccgccttaacataagaacagtcagaaccaccagaagaacaaacaggaactgaacataagaacagaaaccaacacactttgcacacagctccttgggcccaacagcaggtacaaaaacaaaacaaactccagtctaacactcatcttccagactacaagcacagacatctccttcaagatgaacagaag

SEQ ID NO: 114228 - DNA, 742 bp, Zea Mays
cgaggccgaacatgaacaacatctccgtctcgttctgggtgccctaaggaagaatcaattctatggcaagttgaagaagtgtgccttttggctatttgaagtggctttcctggggcacgtgattaatcagcagggtattgcggttgatcccaggaatgttgcggctgtggtggagtggaagagaccttatagtgtctctgaaatccgaagtttcttggggctcgctggatattatcggcgctttgtaccaaatttttccagcattgctaagcctttgactagactcttggagaagggtattcccttcgtctggtccggcgattgtgagggcagttatcagtcattgaagagcaagttggtggacgcccctatcctagcgttgcctgagagcggtaagcgtatcacaatttatacagatgcttcgcgtattggtcttggttgtgtgttgatgcaggaaggcagagtgattgcttatggctcaaggcagttgaggaggcatgaggggaattacccaactcatgatctttgaattggccgcggtggttttgctctaaagtcgtggaggcattacctttatggcgaggcttgtgacatttacaccgaccataaaagtctcaagtatatttttactcagaaggagctgaatttgaggcagcgtcggtggctggaattgattaaagattatgatttgtccattcattaccacccggggaaggctaatgtagtggttgatgcccttagc

SEQ ID NO: 114229 - DNA, 939 bp, Zea Mays
cttgtgtgttgacgtttgatagaaactgggagtccagcttgccgtatgcggaattctcatataacaacaaccatcaggccagtatcaagatgtcaccgttcgaagcattgtatggacgaaagtgccagacccccctaatgtggtccaatgtaggggagaggacactggaaggacctgcctttgttaaagatgccaaagagaaagttgccctgatccgcaaaagattacttgaagcttagagtcgacagaaaagttatgcagacaacaggcggagagaactcagatttgaggaaggagatttcgtatacctcaaggtctccccgatgcgtggtgtcaaaaggttccaaatgaaaggaaagctagcaccgcgattcgtcggcccctatcccatcattggcagagtgggacccgcaacataccgccttgaattaccagaatccatgtcagatatccacaatgtgtttcatgtgtcacagctccgtaagtgcctgcaagtaccagagaaccacatcgaggcagagacaatccagattcaaaaagatctccagtaccgagaaaagccaataaaggttcttgactcagcagtctgaaagactcgcaactcagaagtaagactctgtaaagttcagtggagcagagaaggagaagaggaagctacctgggaaagtgaggactctctaaggagggaatacccttaccttttctcgagccccgtctgaatctcgagggcgagattcccttaagtggggtaggtttgtaacatcccagattttcaacccgaggtttggaaccctaatccaacccccctatttatctctccctaatctcccccataggtcttctcatcatatgcatacactttgtttgattagaagcatctcacttagattatatttttagcacctaaggttatctaattaattaattgttcaaaagaaa

SEQ ID NO: 114230 - DNA, 1000 bp, Zea Mays
atgaaacgacaccttacctgaaaatttgaagccgacgatagtaaagtgcagatgtgggaggtgccattgctctgcgtttacaaaagaacagctaatttttaggaacctcatcataattagtaagccttaacatatgtatcgcacacgtcactacgaaattttcttgaaaaattatggtcataacatagtaacacatagcatgcagaggtgagatggcccagttttggatttagatcagattggcgccaatcattgggatttgccaggaatatctccgcaaaggacccaaggcgatggaaaatgccaggttgataatgccccgacagtcactgaaacattcttctaaccttagccctaacaaacagaacaagctagctagccactgtacgggaatcaggacaccttgaggcttcagataccgggttgacgacgacccgctacccaatccttggcacggttagtggaagaaaacagggacgtcacatgcaaaagaaacaaaacagcccgtcgtgtacgcacagaggggcatcgcattgggatcgtaaaggaaggaacaaaaggaatcaatgatgggagagcgcaacaaggacgggggcctgcaaaaaatatttccgggcagcagagcagtggccaaaggccaaggggggatcccaatagcgaccttgcacagccacacctcactcctatggcatcatgcagctgaccgcacactggtgagttgcagttaaaggctttacgagtgcaggtccaagagacatgtacaggtgcaagattggcttggagattgattgagcgagaccaggaacaaaggatctctgaaagtctgtatggggcaacaggagcaagtacagactcactttcggtccttgaaattagtgcccacagattatcctgcagtattatggactcgctgcgtatggggtagttttctagttatcatggtagtgctcataaaaagcactcgctcactcctccgttctagattataacatgtgttggc

SEQ ID NO: 114231 - DNA, 629 bp, Zea Mays
cccggcagaagccttcggcaagcggttctgccccttggcttcggagagcccagatgtagacgctaagtctaatgatggcgttgggagttagctgatgaagataaatcccaaacttcaccaaaacatctgcaatcatctcattcaaaggaaatcttaatcctgctttaaagaagcttttaaaaactaccacatcatccttttctgtcttcggagtaatttcctctccgccaaaccgaattagtccctttttggcctcactaaaatatcctaacttcatcaacttaggcatatcattttcggtaacagtggacctcccaaactccaggtggctgggtttagatggcacgacactataatcatcttcagattcaccttcctcagcaccaacccacttagcttcagcggcaggtgcaccttcgtcagaaacatcctccggcgctaccagccccgaccgtttcatcacttcggaaatcggagcagtttcagcagcttcggcttcttctccgtcacgtgtaaccctagcagtggaacgtacccttgccatttgatgatgaatttctcacagtttttgatgaagttgttgactttgttaattttttaattttcctgaagctcttccacttgtgacg

SEQ ID NO: 114232 - DNA, 348 bp, Zea Mays
aaacttggtcagcaggaacactagcctctaaagctactccctggcccaaagcttgggctagcaccatgcaaccggagcgcggagaagatcctgcgtgaacatccatggaggtacaagagggagaccccgctcggacaccctcgggggctgggctatagtttgcgctacccacttgagccggatcatcttcggcagtaccctcgggggctgggcagtggcttgcgtttcccacccgagccgagtcatccccggcaacatcctcgggggctgggcaagtgtcaacaccatccttgaagaccaagttctctgcagtagccgcctctaaggctgagggtccttcaattactt

SEQ ID NO: 114233 - DNA, 617 bp, Zea Mays
ggcctgagcagcttccaagttcttcttaatgactctgactttctcctcggcttcaagtactaggtcaggtccaaatacttccctttctctagcttgtgaccaatttagcggtgttctacaccttctcccatacagggcctcgaaaggtgccatctttaggctggactggtagctgttgttataagagaacttcgccaaagaaaggcacttatcccaattcttaccatagtgtagcacacatgccctcaacatgtcctctagaatctgattcactctttctgtctgaccttctgtttgaggatggtatgctgagcttctaatcacagtggttccaagtgacttttggagctgctcccaaaaatgtgccacaaacagtgctcctctatcagacataatagtcctcgaaattccatgcaaacacactatttggtcaatataaatctctgcatatttctctgccttgtgggtggtatgtactggaaagaaatgggctgtcttggttaacctatccataatgacccaaacagaatcgtggtgccgggaggtgttgggcaaacccacaataaaatccatgcaaatattctcccatttccaagatggtacgggaagaggctgca

SEQ ID NO: 114234 - DNA, 309 bp, Zea Mays
cccagtcacgttccaaaggcaaacgggaagcttcggatgtgcatcgactacaccagccttaataaggcttgtcccaaggacccgtatcctattccacgcatagatctgatcatggactctacttccgggtgcgaccttttgtccttcttagatgcttactctaggttccatcagatccagatggctaaggaagatagggagcatactgcttttgtaacagtggatgggctttactgctatgttgtaatgccctacggtctgagaaacgccttgtcgacatttgtacgggcgatgagtaagaccttcggg

SEQ ID NO: 114235 - DNA, 473 bp, Zea Mays
ccgcgatttttttgggcaggacttcttcgtgaattcacgcggaaacaagctcttcacttgcaggtggacatcgaggaaatcggagtgcaaagctttgatctttatctgccacggtagcgacatctccttacactcacttcctcccttggctatggtttgtttgagaactaacgagccgatctttcttctgtggctcaattttgctaggatatggagccgagtgcagcatatccatgggaggtaaaccttcaagtttcacttccatgttctttccatcagtgatgaactcatggcatcgattgcatactcacaaacttccataaaaaatacagacacggccgctcgattagtacaccatggatacgttgttcacggaatcgaccacgagggccacgacaaatcttcaggctcgaaaggctacctgtcgagcttcggcgacgtcgtcagagactgctcggaccatttcaagagtg

SEQ ID NO: 114236 - DNA, 355 bp, Zea Mays
cgggaacaactgtggcatgcactaaatcccttgaagaaaatatcaaggacttgaggattgccaagaggaggaagcaaaagaagaaaatcaacacctcttccaaaggcctcaaccatgcctccataaacagtaacatccaaggtaataatcaagtcacacttcatacaaatagaaataagaagtgtagtgaatgctttgaagaggggcacttgattagatcatgtccctatattaaaaatggcttgattattaacaaggatgataaactttgttttagatgttcaaagaagggacactttattaaatcttgtccccatttgaaacaaaaaggcatagggctagaaaagaaaatatt

SEQ ID NO: 114237 - DNA, 1848 bp, Zea Mays
ctggtttaagctctatagcgaactccacgtctctcttaggcgaaagtcccgacaaatcttcaggaaaaacatgaggaaactcataaactactgggatctcttcaattgaggttgcttggattgcaaaggatctattagtcagctcaaggtgaggtaaggctatctgaaacatttcagtgcctcgcagcacccttagcgacaaggttcgatttgcggtgtcaagaatgacatcccaagcccgcatccaattcattcccatgatcacaaccaaggacaatcctggcatcactatcaattggactcaaaattctcttccttcaattttgagtgttgcccctcggactatacgattggtgaaaacctcagccccagtcgagcttatccggtacttatgccccacttctactgaggattggttaaagcggtgagcaaaagtagtactcatgaaagaatgagaagatccaaaatcaaatagtatgactgcgaggtgatctttcacaagaaacgtaccagccatcacaagttattcgtccgtgatctcatccgcagtggtgagatgcactcgagcggggtagacgtcattcttcttcttagggcaaggacaaaacttggcaaagtgccccatctgcccacagttgtagcagggtcccttcacttgagctgtaccacccattgaatttcctggtccagcttttgcacgcggtagggccaccttaaatgctttttgacccctgaatccttgctgtcgattcttcttcggaggaggaggataaaatctttctccaggtataattggtctgaaattttgtcgagtcactatggtggttcggggctttgatattcccgattccaaaggccttttacatccctttgccgttgcatggagattgttgttattctcttgagtcaagcagtcgctgacgaaatcattgaaggaagtgcgggaggaaatccccatacttcgtcatattcgggctcaagcctctcttgaaactagcgatcttcttggcctcgatgtccacatagtcaggctcatagcgtgacagattgttgaaagcatgaagatactccgttgctgattgtgtgccttgagttaacttcatgaattctaacaccttcatttccattaagtcgggtggaatgtaattccctctgaaagctacggtgaattggtaccaagcaatgggagcattttcagggtaagtggtgcagtagtgagaccaccacatccctgcaggtccatgcaattggtgcgctgcatactctgtcttgagatcatctaaaagtctcaatagacagaacttttgttccatcgtgttgatccattcatctgcctccatgggttctgctgcttccttgaatatcggcggcctggtatccatgaaatccttgaagttgctatactggttgactccatgagccccctgaggctgcccatggcgggtcttgttagcaatgttgcgaagttctgcctccatgttcctctacaagttctccatgttcctctgagctccaagaaattaggcgaagaactactctggtgtgaatggcggaggtggaggaagtggtgcttcttggtcaccctcctagttaccactacccgaagctctagtggcccccgagttaatgcggcgagtagtcaccatctgcacatttttactacgagtaagcggcgagtcacgttgcacatatgtgaaataaggaaatcatgacgtacaacatatcatagaagaaaacttcatgtgaaaaattgtaaggcaagaatcacatcccaacatgcacaacaacaacaacacatacttcataatatataaatgcacatacaagcaaattgttcctctcacatcc

SEQ ID NO: 114238 - DNA, 1311 bp, Zea Mays
gttttgaggatatggtccatgctaggtcttttggtcctctcctcttccacgcatgacactgctatctctaacatcgtggctgcttgtaagtagttgaattctccattcagtctgcagtcaacaaattccatgagccatgatggatctttggctgccaatttctctttaagaatctcagcagagcatcgaatagacatttcctccaccccctcgccttcaattacccaactggaaacccgaacccctttcactaactcgaggagcactacaccatagctgtaaacatcagccttccctgttattggaagatttagagcccactctggtgcaatgtaccctctagtcccatgcacccttgacagcatctgtgctcctgttcctcgacttagtaatttaaccaatccaaaatctgcaatttttggttcaaattctttatctaacagtatgttctctggttcgacatcacagtgcacaatccattcatgatggagatatgccagtccttttgccactccaagtgcgatattgtacctttggctccattggagcacataagttaagtcctgataatcaaccagatatctgtctaatgaaccattttcaacaaactcggaaaccaatagcttgtgagtttgctcagcacaaaacccccaaattcttaccagattcatatgatatattcttccaatgatgctgagctcagatctgaactcttgttctccttgcatcatatcacttagcttcttcactgcgacctcccttccatcatcaaggactcccttgtaaactgctcctgatgtgccacttccgagctcttcttggaaactcttggttgccctctgtaactccttgtagctgaaccttcggaactgactggaaatgatcatgtaaccttcgtccataatttctggtcttctctcccatttgtaaacaatccaactaccaactatgattaagatcacttcaataacgagcaatgtcaatgcagaagatagaaagtatccaaacttgaaactggaattggcacccacgaacatttgtgataaggggtatgcttccttttcagtaactttgcaagcatgtcttaatccaggagccaattctggtgaagaccatactgcctcttgagttttcagatagatatcattgtaaggatctgggaagtccctgccattgaaaagaaaggcctttggataacattcgcctgttcccttccggtaaccaaaagcttggcagtccgtatcgttcaagcacatgttcctgcacatcaaccatggcaccagtttggaatagtttaagtcatagccccat

SEQ ID NO: 114239 - DNA, 650 bp, Zea Mays
atttaaaggaataaaacttaaaaggtttaaagaaaacaggtttgcaccgaggcccctggggtttcctctaactatttctttcaacggtgcccctgcagaactgtttctctgagtcactgacttcgcaaaaccccctggcttttctttctttcaacccagctccttccacattgcaacagtgaccgcggagaggaaaaatggtggcacagcttaccggcggcgagggaggtccgatgaagggctgggtgaggtccgggaggtcctggcggtcacgtcgaggtgcggatcgtcaatggtaatggccggaatagggctagccgcgtgcgcaggcggtcgggcttgtcggtggcgtgtgcctcggcctactcacagtggtaggttcaatcaaatggcacagggagcttcacgggatgtaaggatgctataggtacaaggaatcgatgaatggcttaccgtggggctcggtctatgtgctacggcgaccggttgaagtccgacgacgtcgatccggcgtcttcggtgaggtattgttcaatcctcggctcggggagcttcattgaggtctggagaagctatcccaagggtcggacggggtggaggatggctggcttggccagtctacggtggctgtggcttgtgcaagatctgaa

SEQ ID NO: 114240 - DNA, 463 bp, Zea Mays
ccgggattaatatcatatccacatttgacttattggcatttgatctattctgcggggacgcctgcgaatatgttccatcaaccttagtcaaagcatatgttctgattgcatattcacatggtctataataactctcctccgatgaactcgccctgctggtgatttgcctcacaaagaggttcatcttgatgatgaagttcctagcaatgcgcgcaatatcattgtgctgggaatacggaacaatgaatctttcattttgggaaatgacggagatcattattaaatgtgggagacaaatatgttgacacctatcttgcctctctagattgcaaacggatccaaaacaaagtcctaggaatgagttctttaagctctcttattgggtcattgataaatgcaatcgaggttgaaccaagaatcgcaaagtgaaagtcgcgagcttgaagttcgggcatttatgggc

SEQ ID NO: 114241 - DNA, 444 bp, Zea Mays
agacatgtttatggccgatatgttttctgtttttctgatgctgagctttacaacctatgtgcactatcgatgacgatactttgttatgcaccacaagctattccagatttagagatgaactgacaataggaatccaatatgctgatgtttgaaattaaagggcagtccggtgcatgtgctcccgcttgcgcggggtatggggaagggtcggacccattttgggtctataatacgcagcctttccctacatttgcaagaggttgtttccacgactcgaacccgtgacctagtcacaaggcagcagctttaccactgtgccaaggctcctttctctgatgtttgaaattagtaactcctaaataaattccaggccaaatacgattaggggtcatttggatcctttcatttggtggaattagaatatacttaatggagtaggctatt

SEQ ID NO: 114242 - DNA, 539 bp, Zea Mays
tcatttcattaagatagaaaaacaccaagtacaaagggaggagcgagacctccctgaactcataacagcacttacacaacctctacaaaatgaccctgcacagctaccttgcggctacaagacagacacactccattaaaggagatcttgcagtccagaggccccggctagacgcctagacaccacaagtgaccctccacaaccacttgggcaagaactatttgtgcctgaggtcgaatgccatcaaacatgcaggcatttctatgcttccacaattcctaggtgactaggatgaccaaggaatcaaaacctttccgcagacctttctcgatggaaacagttgcctttctccaccaagaacaaaaccggctcgaggagcggggcggcaaaacattcagctcgagttccctcaataaacacacccattcctccctggagagcacacatgcagaaagaatgtggttgatggattcctccacctggtcgcacgtcgcagaaagggcaggctggctggtggggtaagccccggtttgccaagc

SEQ ID NO: 114243 - DNA, 505 bp, Zea Mays
acaacttcggttgttatggatttattgctcgccccaatgcaagccacccagtgccaacattccagaaaagatggcccggagcttggatggaggagtggttttacgttaaaaatgatttaaagaaaagggaggatatcaaggaagttatccagcgccccatctggtcccacttcggcctccgaaggccgaaggtggatattgatggtgatgttgaggagtgtcagaaggcattcagtactgtgtgctccttcattagcatgagggatttgattcaagagcacatagcctttagggtatggccacttgtggagagctgggctatgccgaaggagatcactgccgaatccagtgaaggtggtctagttcgattgaagtatagcttcagatttagggagaagtttgatgagccagacgatgactggctgaagtgtattgaagctaccagtgatgagctactgggggcatactccaaggccaaagataatgctttgtccgcagcttttgg

SEQ ID NO: 114244 - DNA, 395 bp, Zea Mays
tgaaatttgagtacccagattacgagagacttgatgaagggtctggaggagctaaaaggaaaagagttcttagaattttgaacagacagtccatccggtcagtcaaggaagaccacaaggccatcaagaagcagaaaattgtagtggagccaaaagattcggctcccaagaaatgaaagttcgccaggatatctcctgtgaagacgaaggtacaagatgtgctagataaagctgcaggtgctatttcgccttcttgtgctgatgttttagaaatcctgaaggtaatgactgaacccatcctgtttgcagtcaaaggagaccgcttcggctgccgaggggaaagccgggggagcagaagaaacgacggatcatgaacgtgatgcaagctattgaac

SEQ ID NO: 114245 - DNA, 560 bp, Zea Mays
ggagacgtctgtccttccacgtttcaagccgttgtggtggctctcccttcgcgaggcatgccatctttgggtgtagtctgtttctacttaaggtggggatgggcacttcttccttctttcaaaaatttaagtgagcattctcctgtcattacctccaagctcttgacccttaggctctcaccttaaatgggatctgccgaagggttgtctattgtcttgttgtggctagagccgttgtcccctctccctctctcctaggcttctcggagagttatggagttttttcgtatggtgtaggaggctgctgaggccgaggccggtctgctctggtctcgacttgccgagttagatggttgtagagccggtaaggcattcaccccttgctttccaacttccttagtggtttcctcgccctcatcgttttctgttctaacagccctagagactgagctagaggagctacgctctcgcttgggtcgggctctagattttgtcggggctcatggctcctctctggtgggacgtttggacgatgtcccgcgttgtgttcggggcgtcgc

SEQ ID NO: 114246 - DNA, 573 bp, Zea Mays
gtggggtcaggcagcctttttgatagagagctaggactcgtcggttctccaaacttgtcagccatcagccactagggacggagcacgtcattacatggcgagtaagattagatctaccggacagactagcgtcgcgacaaagacgagagagccaggggcgtcaaaaaagagataggggtcggacagcgtcgcacggcgagaaggggttgtggcgggcagcattgggacaaacaaccgagggggtggggcatggatccgcccgtctgccacaaataatgcagctgactaatatagcttaactcgaaaggaaaacgacaggacaaataactgtaatgcagacaatgcaatagagcaatgtagtggcaatcaaacaataccgaaaagtcaaagaccagcagaattccggccaaccagcccggactgcactcacagattattgcatcgaacagcagaattctaggtgctggttgcaagaaaaaggtctgccatcccaaacaatgcatgctagtcacctctagtaaaaagtaacgcttcttcctcttcagtttctgatacaacaaaacaggaagtcaa

SEQ ID NO: 114247 - DNA, 1463 bp, Zea Mays
tgtgaatacaaagcataataagataaaaagttgaggtgaggattacagatgtgagagtggcacattaccgctgcagcaaaagtgcttgctgctgtcatcagaactgaaagagcaacatttgccctgcaattcgaacattagtttatctaagtctctttacttttcagcacaattggctgttgaatttttttaattattatttgcctccattgaatttgaaccagatgcgaatgcactaacttatttcaagttaattttcaacaccagtcagttatatccactgaagaattcaagaatattcaccaccttgacattcatttaatcacttcaaatatatcgttctgccaacatttcacgaattgtcaccaaccagataattattgttctaaagttttaacaaggcctgtgacggcatttatccttggcatgtcgctattttttttcattaccttgctaaataggtcacgatgttgctcgctgtgcctgcagatacgttttccttctcagttcaagtgccagtagccaatctatagagagaaaaaaaagggaagggaagtgcatacacacctccagggcaacaggccactaaaattagtccagcggcataatgggacggcaatttcaacagtttgctcacaaaaaatccagacagtggcatcacctgtacataaatcgctcactctgggattttgttgaacatggaggggaaaaacataaaatacgtatccatgtcatcaccgattaaatatgcttataaacagaagatgcgccaaattttacaagggacactctgcagctgtagtaagtctcagacaatgaagatgtaagcagtatggtttaatattttatatgtttttcatccacttaaaacaacaataaccatgttttttttggtgtttagataatttcttacaagtggttttcaggatgcacttatgactcaatcatgatgtgatatgtggggacttggggtcaggctccaactcgtcgaaactttcgcgtagttcattccacaaggttttttttttctttttttggttttcgctgtgcaattcactagaacttatttcaggtttcgaggattgttgccagtattgggaacaatgaagtaaccatgtttcttatgccagatgttgtggggtaggttttttgaaccgacaggtgtggaaactcgacatgtaggtaactctacagcgtgtttggtttgttcgattgactggtatggaacccaaccatgtagaacacctgtggacgtttttttggatgagttggtcccacaaaaagctcgttggttggattgttccatgatggacatagaactatggatgcaaaccaaacaagttactaggctcggatttaggattggatgattcgacggataacctggtgactcaaatccaaataagccactcgtgaagagctatgaaaataagcatagaaactctagagtgggtgggtgaggg

SEQ ID NO: 114248 - DNA, 519 bp, Zea Mays
gatgccacaaacaaaataagatagtccctctaggaaagatgccacaaagggtggtctagtgcatctggagtacaagaacagatataggaaacaatttagggagccatgtgacgattggctagaggccatcgagtcaaagtgcaatgagattttaggtaactacgtgaaaaaggaagacgaagccttaatgtctgcttttggagctcgaggcaagagaaaattaaaccgggttttcgacgctattcgcttcgtttacccgaacaattccctcatgtcctaaggcgggggaagaaaagaaaaggtgccttgaagtcgcctagagatgctccgaagcagaaaaaagtaaagatttgaacaaatcggccaaacgcttactatgaagaaagggtggccaaaattgaaccaaggttgcctatggtcactacttctgttgagaagattaccaccaggtctgcgtcacttactgagctaaaggttgtttctcctatttcgatgaaggtatggttttcttgatttctt

SEQ ID NO: 114249 - DNA, 566 bp, Zea Mays
taggaacaatctactaaacataggttaaatgaatatttatttttggaaacatgctatttgctaagataatgttacggaagcataggcacaattattatgaagctaacacaacttgaatggatcaaatcggaattaagacataaaagttatgggttaaacaagttttaggttatttttaatatttattttgcacttaaataagactccagggggtattattgcaattcccagggtcctatcgataacttgtttcaaactgtgcgagaacggcgggtttattttaagggaaggaggggtctctttagcaaaattgacacatcgaaggggtatccttacctctgggccgatggatttcgcttagacggtccagattacatcctcgcctgcttataaggcctgccgtggacaccgcatgatctaggatccatggtcccaaggatggccacaccagcactagtatcctgcccttgaatcggatcttgacggcgcaaaactacttgcgcaaagagtcatagagattctaatccacactattgatttcaatccaacagaccatagtgttcttc

SEQ ID NO: 114250 - DNA, 615 bp, Zea Mays
atcacacccacgctcattggacagtcacaccggtcatcgtttgccacctgcagtgctggtaagaaccttgtaagagtggggtaagacgcttcataatttgtattccaccaccaccaccaccctgagagatagttgtagagttcacattgtttgttgcctttttgtatctattttgtgctaacaatgacaggaccaaagaaccaaatggacaaggagaaggggcctaaggttaacgacgatgagtgtgtctctcagctggaattgaaggagatgatgcgctcgatgactgaagcttttaaaaaaataccaggactctgcagcgacatcctatgagcagcttgatcgacgagtcgctgaacttattacacgcatggacgtactggaggctcgtcccccaccaccaactccagccctagctcactctcctgtggacgacgacgacgatgacgacgatgtttatgcaccgctgtgacaacgcctcgcacgtaatcgacaaggtatgagaggtaatggtagacgtcgtcatcataatcctgaaccagaccatgatccatttgctaagattaagttctctattccaccgttcatgggttcttatgatgttgaagcttactt

SEQ ID NO: 114251 - DNA, 500 bp, Zea Mays
atggaattcagcgttagctgatgaatcaacacatcgaaccttcgcaacacttcaaccaagaacccgtgcgcaggcaaccaaagtccagcagtgaaaaacgcttcgaacacaaccaattcaccctccggctctaggacctctttgccccccggagcatgccccacaccattcacaaaataacctaaacgctgcatttcttgcatgcgtctagagtaaatccttgaagtcccaaactcgacagtatgacccggtagcaactccactgtcgcctttggatcgctaattgtcttctccaacgacggcgcatttgaagacgcggtcacagcagacggtgatgaagaagaagacgacgacatcacgtaccgtctatggcggcgggcgggctgcttcatgcgggccagttcaccggggcaagaaaaagtgagagacacgcaggaagtgctaaagcaaaggaaactagggttccctgtaaaccgagcgagtaaaaatttctccaccgc

SEQ ID NO: 114252 - DNA, 607 bp, Zea Mays
attgtcttttccatggcaaagactcgacacacccaaccagggattgctctaaaaccaaagccacaaaagattgaatggccagaaaccaaccggctgacaaccaaagagttgtcgcccacacctaccatccccatcagtacaaccaacaccaattccatgatgaacatttccatcctcaccagcagaaccacaatatataccagcaacaccaagaaatcctagctctaccgcctccaccacaaccacagcatccaaatcaaccgttaccaccacccccagcactgaagcaagaggacttcaccgatcaacccttttgaggggtcattcacatgattaccggaggatccagctccgaattcaacacataacgacagaagaaagaccactatcgaagggtcaatcatgtagccctcaccgggccagtcattcaaataaagtggtctcatataccactcacctttgacacaagtgacgtcgatctccgcagtgcatcccatgccgatgcaatggtgataaactaacgagtagcaggatgggatctgcataaggtactcgttgataacgtcagtcatgcagacatcattttcttatacgccttcgatcgaat

SEQ ID NO: 114253 - DNA, 354 bp, Zea Mays
gcttgtactccttcactgacatgaatccaaacaattaacgtatatattggttgtttcgttcccttttgtgctgcttgcctgactgagccacaaagcaacgaggcggcacacgagtgggccacagatgggcactacctaagacagagagcaatataataggttcaacgttgcatggactctaattatattgttacagattctatgcacaggccatcgagtgcggcatgtgtggtgtgttcatgcagcacacttgccatcctgtagtttcttcgtgacgtaatcggtcctcgacgaggataaagtcagtcagtcagccagtttagctgaccagctttcttgtgtagtctcgatgca

SEQ ID NO: 114254 - DNA, 575 bp, Zea Mays
gatctgggtcatgcaaattggtctgtcagacgctctgatagtacagtaaactgaataagatctcaggttcagcccccctcaccgccagtgatctcacacccggattcgcgccggcatcgcgattcacgcctagttaaacgcagataacaatccttgggtgaaaatctggcgctgaggatgagcttgggacactgtttcgccctggtcgccgtacccactcgccttatggccggtccagataacctcgccggagttggccgcctgccactcaggtgccacgtgcctaggtgctctaccacatcgcagtgaattgccttagcatgtccgttcatcgccggtggtcatgccacggtgaaagccacaaatcacttgcgccagtgacctcccttctctccggccgccagtgtgcctttccaaaattgggtgccaccgcccttggacactataaattggtgccccagcctgctccgctaagtaattgtgcacccagtgaaccagccctcacctccaatcgtccctcacagctccccaatttgggatttcccccaattctattctctgcgccgccgtgagtg

SEQ ID NO: 114255 - DNA, 507 bp, Zea Mays
ggcgattgtaccttgaaattagcatagagcaagctaccggcgatatgttgtcgctggtacctgcagaggtccgctttcaatcttcggcagaccaacgctctttgagaaggtcctaacaaccttggcctcggttcgattccgaaggcatcttagtttcccttcgttgactccgccgaacagcagagatcctagtttgtatccacaggatatagcatatttctttagctcttctttctcagcctctgataattcttgtccaagtatatcttgaaaattaaagttctcttcttccaaagtgtcttcaatttgctcttttcctttctcaattgccatgtccaccgcggccgcactagcttcttcttcagccattttcagaagtatattatcaatatcaccaagtgtggtttctagattaggatcttcggcggtctcggtttcggcccctatgcctttggcttcggtgcccgctccggtagcttcggctccggtggtttcggctccggtggc

SEQ ID NO: 114256 - DNA, 531 bp, Zea Mays
cattggtgagcccaaatggcatcaccctgaactgataatgaccatggtgtgtcttaaaggcagttttgaactcatcctcagcccccattcggatctggtgataacttgaggtcatgtaaagacttgtgaagaatttagttctagctaattcatctaatatctcctctaccagaggcattggaaatatgttcttaattgtcatgtcattcaattttctgtaatccacacagagcctccaacttccatccttttttgcaccagtaacacaggagaggcaaaaggattcacactagggactatcaaaccagcagccaatagttcagacacttgcttttcaatctcagttttatgatgtggtgaataccggtagggtctggaattcactggtatagaacctggcaaaagtgggatatgatggtcatatggtctagtgggaggcaactgggtgggcacagcaaacacatcctcaaactcttccagaattactgttagtgtctcatttccagccacatcttcctctcctttaacctc

SEQ ID NO: 114257 - DNA, 312 bp, Zea Mays
ggacgacacaaattatcgccgctatgggaagggccattcatggtgtcgaaggtcactcggccaggataataccggcttactcaaatggatggcacggaagtagggaattcatggaatatagagcacctcatgaagttttacccttagcgagagctatcgaagaaacgttgtactcagtaattggaaaatatgtcatcaataaaagatttcactctcaaaggcataactattggttatcaattggcttcgacttgattagacttggaatcaacggacttactcgacttaggtgaccactataccctactaacg

SEQ ID NO: 114258 - DNA, 593 bp, Zea Mays
cagagtacaacattgctccgatagctttttgagtcttgctaaggataaaacttcctgaggtgctctatatttcatgagttccccacttccgtgccatccatttgagtaagccgatatgatcctagccgagtgacctccgacaccatgaatggcccttcccataacggcgacaatttgtgtcgtccttctcccgttagaattcggcgaaagaccaagtctcccactatgaaggatcgatgtcgtatagccttatcatgatagcgtctcagggtctgctggtatctagctgactgaattactgtattcaatcgctcttcatccagtacgtcaatatcttctagcctggtagcttctgcttcagctatgctttcgaagaccagccttggtgccccaaacctgaggtcggcaggtagcactgcctccgaaccatagaccatgaagaagggggtgtttccatgcacagcttgattgtgttgagttcttagcctccaaaccacataaggtaactctctgatccacttccctgcgaacttttcattcttgtcgaagactttcttcctgagtgcttccaatatcattccattagccctttc

SEQ ID NO: 114259 - DNA, 436 bp, Zea Mays
gtttatatctactatttagtatagaaaatattgaagatttgaatgagctaaaacggtcttatcctaggtcctctccttagatcggtacagtcctctcgactcccatcctatttattagaccagccctcacatatgttcacaactacaacaacacaacggcctgaccacgtcatctaggctcatgtcgtccacgatctaactaacaggactgtgttgtagtgtattagtcgttgcttgtacgtgtataaatattagtacacttgagatcaatacaaagcattgttgacctaatcactcttacaacatctatctatccggacccattcttctcgatgtcacccgagccacgtcccattccaatcctccttgatgcccccttcccgatgccactcgcctccacttcccttcccaacacgcgacattgtcgcccccaccc

SEQ ID NO: 114260 - DNA, 525 bp, Zea Mays
aaagaattgatgatgaggaggaggatcggatggatgacttggtggctgatattagtagagagtatgcaacattggcctcggaacaggctacaatagaggaaatgcaggagttttataagcttcttcatgcattagaggaaaaagtgcatgacaacaccactgtgaccgtgttgcaggtggttacacgtcttatggtaatgaaggcaaagtataacttctcgaataattgctataacgatataatcaatctgattattgatctcatcccatcgaaccataagatgccaaaagacttataccagtctaaaaagattgtgtccggtcttggcatgaagtataataagattgatgtgtgcgaagataattgcatgttgttctggaaggaatatgaagcggccacctattgtcagaaatgcggtaaatcaagatatgtggaggtactaaaagaggatggagctacttttgctacaaaagtggcagttaaacaacttcgatatatgcccatcactccaaggcttaaacgtc

SEQ ID NO: 114261 - DNA, 504 bp, Zea Mays
gacgagtgctgtcgagagaaggacgacacaaattgtcgccttcatgggaaggaccattcatcatagcagaggtcacccggccaggatcctaccgacttacccagatagaagggaccggagtgggaaactcgtggaatattgaacacctcaggaaattctatctgtagcagtacatcagaactccagttgacaagccatactttgtaaacaaaaggtttccttatcaataaagcttctatgttctactgcatactcccagttagcaagcggtttaagttaggaacgatttaaatcaacacaacatgctcatgcttacataacttagggtgattactataccctactaacagaacaatcgtcttaagtcggaaacgtcttaagtcggtgcgacatgctcacgcttacataacttagggtaattactataccctaccaacggagcaatcggcttaagtcggaaacatcttaagtcggtgcgatatgctcacgcttacataacttagg

SEQ ID NO: 114262 - DNA, 477 bp, Zea Mays
gaagggtagtacgttgtgttctctgtgtggggacaaagagacagttgatcacatctttattcattgtgtccttccgaaatatgtttggagaagaatgaaaaatattgctggttgggaccatgtccccatgtctgtagctagtctgtttagcaattagggagtgggcacctcccatgttgtttgcacattccatctctttattgttaccaggctggtttggtccctttggtgtaacagaaataagatgacgattatgaaaaaatttcctaacaatacgacaaccatcatatatgaggtcgtgtctttcttgtagagttggagcgtgctactcaagacaagggaacatgcgatgttggaagatataatggactcagtgaagaagtggttacaggagcagcattcggttgaggaaaattgcagtgacattgaagtggtctgaagtggaagaagtcccttatttttgtttggagagatgcc

SEQ ID NO: 114263 - DNA, 295 bp, Zea Mays
tcataattcatgaacgagccaggggcgttagggtaatcggtagcttttgacgactggattaagagattttttatccttcttggccgatagttagtcttaattgtttggtggatcattaactacgatcaaatttccatgcttaaattcagcccagacctgctagcctgctctgttggctagattctcatcatcatttccttgtatacttttgcatattgcagttttgtaggctagcagctgcgactatcttctcctattactatctgaatctctgaacttggaagataactctatc

SEQ ID NO: 114264 - DNA, 286 bp, Zea Mays
cacttggatttatttttggacttaacctttaggccttaataacataaacagaattaggaatgtaattatggataatacctaaaaggtagtcaaattcctaaatgagagtagtttatatcataattctagcttttcttttgttttaatcattacttaacctttttgaactatgtcccaaacatttagagagtaatcaattccccaattaggattactccattttctttgtaaacttgatatcattcccctacacttaatactatacctttttgagttatgtgtcaat

SEQ ID NO: 114265 - DNA, 398 bp, Zea Mays
gcccagtgcaactgtctaaccatagactctaaggtcgccgctttgtgtgacgagttgcgcaagctgaacatggaagttgtttccccaggaaccttggattatatctcagttgagccaaccttacaagagcagataatcatgtcacagattggtgacaagggtgttcaagtcattaaggaaatgctcaatcaaaaggtggataagtataaatgctttcgtcaggacaacaagggtatttttggttcgaagatctactagttgttcccaagaatcccgaacttaggatgaaaattttggacgaggctcatctctctaaattttgcatgcacctcggaagtaacaaaatgtatcatgacctcacatccttgtattggtggaccaggatgaagagagaaatt

SEQ ID NO: 114266 - DNA, 554 bp, Zea Mays
gaagcatgtagtttttcctggaaaacaacaagctataggagttgatggtgtatctgatatggaggattttaaccaattcaacgacatgtctcttttcatagaccatccaaccaagataaggaacgttgagcgaagcatcccacgtaaaatgttgccctgggtacgccacgatggacaaggcagaataatagctgcctagattataaacatgtcttgtaattgattattgttaggaccatgtctactataagtatgagatcaatatatatatttcttcaatgtcctaatttactggcggttctcaacgaccaagttgcccattgtcgtaaaagatataaaagatacttatgtaataatggacaatggaaatccattgtaaatattttatactggcggttctctaacaaaaccgccagtggaaaactaactatactggcggttctctaacaaaaacgctagtggaaacaatctatactggcggatttctaagacaaccgccaatggaaaactatctatgctggcggttctctaagacaaccgccagtacaaaatga

SEQ ID NO: 114267 - DNA, 1338 bp, Zea Mays
ccttgcaggcgaaatttgcctgagagtatacttatcggttagggccaccctttgtgatgacgcacatcaagctccaccgcaacttatcgatgatatatcgtgcagctcacacaggtcaatcgaaactaatgaatcaccattatcagctactgttaacagtctggatatgtcagcctgtgccagcatggatcggacatccctcaaaagttcggatggcttcaaccaaagcatgacggaggtccgaggtcctagaagcacagggccactatcttgtgtcagcatagagcaatcaattcttctggagcctgaagaagatgatggcagtgccatcgttgatacatcctcagtagtggaggtcatgtctcggtacttccggaaaactgctgatgctacacattctgtagcatcagatcctgtgtccctagaccagtttcgaagcacacaaatgaattctgaatgtcgtgaaaatgaagagggttgcacactgcctgaggtcagccttgatgaactgctgaaaaatatggagtccaaagaccaagcttgtgaactgccaggaaacttgcctggtggtgtactaatggaccaatcttacattattgcaccagctgaactaaattctttgctgttttctggaacttcagatttctggccagaagtttctgaacttcaaggaacaagtggattcaacattgagccctggaagcatgacaataatgagaactgtttaaaaagaacaataacttatacaaaagctgctagcaaattagttaaatctgttaaagccactgaagagcagaaatacttgaaggcaacaggaagttcttttgcagttttgtctagtgttagcactcctgatgttccctgtggtaattgtttcaaggtggagatattgtaccgtataatatctggttcccagttgccattagaacagaccacacaaattactgtaagttggcgtctgaactttgttcagagtacgatgctgaaaggaatgatagagaatggagcgaaacaaggccttgcagagggttattcacatttctctgaagtactgtcccggaaagttaaagtagctgaacttgccgatgctaatacgaaagataagattttagcatcactgcagacacagaaagaatcgaactggaaactggttgctcgcttccttggaagctttgcattcatatgctctctcagtacagcactgtatatcactactcatcttcatctagccaagcctaatgtggtgcttggcggtcttgaatattttggcattgaccttccagattccattggagagattgtgttttgtattattttgatcatccaagggcataatat

SEQ ID NO: 114268 - DNA, 437 bp, Zea Mays
ggaagatgagaccgaagctactgagactgttcccatttccgaagcgatgaagcggtctgggctggtaacatcggaggatgcacctgccgctgaagtagagcaggctgatgttgaggagactgatttcgaagatgattacaatagtgcagtgccgagtaaacccagccacctggatttcggaaaatctaccatctctgaaggtgatttgcctaagatgatgaagttgggctattttagtgaagcaaagaaagagctgattcgctttggtggggaagaaactactccgaagccaggaaaagatgaagtagtggtcttcaaaagtttctttaaagctggtttaagattccctttgaacaagatgattgctgatgtgctgaagaagtttgggatctaccttcatcagctaactcctaacgctatcgttaggcttagcgttt

SEQ ID NO: 114269 - DNA, 2558 bp, Zea Mays
tcacaatagattgtcttgttgggatcagtggctacccctttatcagatatcacatgacccaagtagtcaatctgatttactgcaaacagacatttgcttctcttggcatatagttgttgctcttgcaagatttggaacaccggatttagatgagtggcatgatcctccaatgaaggactgtatacaagaatatcatccatgaatatgagtacacatttcctcatcagactctggaagaccacattcatcaaacactggaatgtggctggggcgttagtcaaaccaaatggcatcactctgaactggaaatgcccatggtgagttttaaaagctgttttcatttcatccttctctgtcattcttatctggtggaaacctgaggccatatctagtttggaaaaatactttgctccagccaactcatctagaaactcatcaatgattggcatagggaacttgttcttgaccgtgatgtcattcagttttctatagtccacacaaaatctccaactcccatctttcttctttaccaacaacactggagaagcgaatgggctaacacttctagaaataattccagattggagcatgtcttgaacttgtctctcaatctcattcttttgtaatggagaatatctatatggtctcaggttaactggtgaagcatcaggtaccaaggtgatagcatgatcatattctctagatggtggaagagagttgggtaccttaaacacatccttgaactgttccagaataccctgaatgcaatgagggatttggtctgtctttttcaactcctgattagacactctctgcaacattgcaaaagcccacacttcattccccttgtgtcacttgcttagttgttcacaagaggtctcttggagttcttgcaaatccctaggcaccagcccttgtaatcttactgtgactccctcataactgaactccacccatttactatcccaagcacaaagcatcgggctaaacttctctaaccagtccattccaatcaccatatcataagctgtctcagggaggacaaaagcatcggcaacaaaagtgtggccacaacaccaccactctaactgaacaaccttcctgttataggtgatgatctgcccattggccaccttcacattgacaggatcaatctctttagtaacgcactgaactcggacaaaagccagttcactaatgaaggtattagagccgccagaatcaagtaattgaagcatcacttggtctttaatcaaagctctcagcctaacacattttgagttctcaatgccactcatagcatgtacagacagcatcatctcctcttcagtacttccactgccagtttcaaggaaattcaacacctcatcagatagcatagggccaccatcaccacccttattaaggacaatacaatttaactgtggtgccactgctattttacacttgtgccctggcatatatttctccccacacttatagcacaacccatttactcttctatattctttgagttgtttagccttccataatccccagcagtttcatctagctcctttgttcccataggtatgtttgttctggctgcctgaaactttcttcctccactgttttgtctggtctgccacccttcatgctttaaggctaattgagcagccatagatactgtttgagggaacataacttccacccccatttttatctcttgtttgagtccaagcataaactgagtcaccaagaaaatttcactggtagccttatcatataacttgatatgataaaccaacttctcaaaatgggttttatactccaatacagttcctgtttgtttgagagtgagtaactccaacatcctgtccgaatgagtatttgcttcaaattctcccaacactgcctccttgaactgattccagttcaacaaatgcaaggtgtctcgcgaagcttgaaaccaatgtgctgcccttcccctcaaatgcattgatgcagcacaaacacagaaccccataggaatctgatacaattcgaaataagactcacagttgtccaaccaaactcgcacatcatctccttcaaaataagggaactccagcttgggtaaccacccctttcttccctgataatcattttccaaaccctctctgccctccgagcccgatacgaaatcaccaaataccggaatggaagaaacgggaccttgtggtacctgtgtctgtccaccctgtggttgtccattcttcggtggagggggaggtccaagaggtggtccaatcagcccatcgcccatagaagtcttgccaggctccctcattcctccaactgtgttggacacagtattggccaacctgctttgatcctgggaaacctgagccaatgatttcatcgataaatccatcttggtctgcaggtattgcatcagcttgtcgtgttccatctgcctcttctccatttcagacaacttgacggacaacagactcagcccgtcgatcttcttggacagctcaacaagcgtggtcgtagaggcgtcccaggcctgctgaaacttctcggacatgcgcttc

SEQ ID NO: 114270 - DNA, 599 bp, Zea Mays
gagaaccatgtgtttggaaactccatcaggagaaagaatggtagttgaagacaatcgacctccagctctgaagattggtgcatgtgacgaggaagaataatatatcatttagctagaaggatcagtatgtctcacaaaaaaatatcaaaaggttgctgtcttggaggatttgtaattgtgctaagtgatatatcaataaatttggagaatctttcgcacctattgtgttttgcctctttataaagagaataaagtgtggtgccatctgctatatgcaaacaatgtgatgctctattctagttggcctaatgtcccgctcaagtctttctctcaatttatgctcaagaaataccattggatctgaaagatgattcgaatatcatgctatgaagtctatagagttaaaaagatctttgttaaagaatataacacctgtaaactatcgaagtatgatgaagctaggagaaatctgaaaccatccttgctccttcactaatcttatcttggaaataaaaaatttgtgttcgccctttatcttcatatcatacaagcctcttatgtaatcttgtctcactatctcttttactctctaaccagat

SEQ ID NO: 114271 - DNA, 677 bp, Zea Mays
ctttgacccggctggctgaaacgtgacggagcggaccctgctggcttgttgaagctcgaccctttgggaggaaacccgaaagatcaaactctctggtgcctgtcctgttgctgagctcgaaggacttgaaacttcctcttgaggtgaccttttcttcttctctagccctttccacttgtatggccttgtttgagaggtgcgagaagctgagaaaatcttggctggcaaggatagtcttgagttctggtcttagccccttcaagaaacgggccatcttcttggcttctgtgctgacatcatcaggcgtatagcgagccaattctgtgaacttgtggacgtattcactaacatatctccctccttgggttaattcccgaaattcttcttctttgagttggtcgatccctaggggcacatgatgctctcggaaggcggcttcaaattctgcccaggtagcatctctgacggtagcgctgcaagtatcccaccaggatagggccatcccggagagttgatgagcagcaagatgaacacgctggttctcagggcatccaatggcctctaacttcctttttattgtgcgcagccagtcatcagcgtcgagcaggttgctagatccgacaaatgtgggaggcttgagccttagaaaccctcccatcctgtcctgaggccttcct

SEQ ID NO: 114272 - DNA, 705 bp, Zea Mays
tatcactgttctatattggaaacatctctttgtacagtcatgattcacagtctgaccagtttatgcaataaacaacgccatgttatgcatagttgctcatacatgtatgctacattcgacaacggtctatgctttataagtttcacaatttgaacagtttatggccagtgttatgtattttcgaacttacatgtatgctacatacgacaacgtcatatgctataaaacaagtagatgtacattcagattgctacataactgttaactgcttatgataacttccacatacgtttatgccagtttgtaagcatatttatgacgctttctgtgcattgttaattaaacataggaatcacatttatatccagaatataattttttcataaatcttatggtattctactctctaccagatgaatcatcatctccaacatacaccattcgttttttcgatgttgatgtctcattccactgtggcgctgcacctatgattttgttccttgaaccaggaggccgtcctcgcttacgtccagataggttagccaatcgaaccctattatcctccacagttaaacacgtacggctgttgtgaccatcagctatgccacatttctggcacttcctgctcatcttcttagctcctttcgcacccaatttaagaacttgttgctcactacttttgattgttcttcccttaggcttggc

SEQ ID NO: 114273 - DNA, 572 bp, Zea Mays
ctctttttgtgtccaatccacccgtgacagatagcaatttgggtcttagagtgcgaccctctgctgaagaggtccgttctttagttgcttcactcggggagatacctggtgatgaacggcagatttattttgaagtgcctctgaaccctagtgatgcagacataaatgacatgctcgatctgctagctgaggattcatctgatactgctcctgatggtacattggcagtggcgccccttccagaggttgatgcgaccttggacgcctcgaaacctgtcagtactcgccctagccgccctagccgaaccagtcagcccgagccttctgctgatgagcagaagaagaaaaggagacgcctccggcgagtgtccagttttgacgaggataccagcaccttagctcctgctatcgaagaaatgtctgcaactggcctagctgacattgatcccaatgggtgtgctccgcctgctgctgaccccaatgagggtgttgtttgtgctgttgctgtggaagacgaggaggaagaggatgaaactccattgactcggaaaaacagtcggcagttcgtcgct

SEQ ID NO: 114274 - DNA, 405 bp, Zea Mays
agcaaataaaaatcttaatacccaattaacatatctctaacaaaaattggcacttcaaacataattaataaaccaacctcataacaactaaacttaatacccaattaacatatctataaaaataatttgcaattcaaacataattataaaccaattacctcataacaactaataaattaaaaataacctgtaattaccaaacatttctccctctatcccaaacatggtgaaaccctagatacgaaacgtggctacactacatctctcacatggtaaaagcctagatccaaaatttgggtaaaatgagaaataatatgaacaaaaattgacaaagaaacataaaaccaacctttcttagcaaccttcctcaaaaaaatgaagatcaaacctccccccttgtatttt

SEQ ID NO: 114275 - DNA, 453 bp, Zea Mays
aatatataagtcatagagaacttatgtgtacttaattagtttaataataagtagccaatgaacgattaaagtgaacatggtaaatgcttgtactcgtgatgtcgtgtttgtgttggttaaatataggaaatgttcgtcgtctttccagtaatgttgacttgttgtgcccaatgacgtatagatagctagtgttaacgtatggatgtttatgtgccttactagttaatgttagttcgctaccgtgtacttggagtatcttgtgctacttgtcggggaccgtaattagggggttaccttaatccggctagaaaacatcttcagaacaaaccataaacaaccgataaagcgcgagcttcgtctatcaagggacgcgacctcatccgagcccagcctcgggcaagggcagtaatcccagacgaattcatgcctcgcccgagggtcccctcagtcggt

SEQ ID NO: 114276 - DNA, 322 bp, Zea Mays
cccaaacctactaaaaccagcgaactatagcattaggtggttttaaggctcaaccaccgaaacctccgcgggtagcataccccgtacacatccccccacgtcctagcacgtgtcccgccagtccacaaccacgtcggttacacgatctactcctccatgacctcccgtctgttagtgtccttaggtgtcagccatcacgactagacacacagtttctctagtcctaaggtcaagactcaatgctcgtccttcccgcactcggtccatcagcacgatcctgcatgaccttcaccttcttctctactgaccaccgtcttctgac

SEQ ID NO: 114277 - DNA, 1151 bp, Zea Mays
tactcttgattcccttctcttccttgtccttcgcctcttgtccgactcagatctccccgacctgccaccacccgcgagccctgcacaacatcactgctaccttctctgtcgatccctcgatctccagacaaccccgctcgcctctctccctgctccggtccccgcccgcctctcgctcgcgacaactccgccgcagcacgcggcggccgcggcgagatgctccgcctgcgggcgttccggccgacgagcgacaaagtcgtgaagatccagctccaccctactcacccctggctcgtcaccgccgacgccaacgaccgcgtctccgtctgggactgggagcaccgccaggtaccgcttgctaatttgatctcgcaatacagaggcggcttccaggctttgtttgtggctccatttagtctcacggtgctttgtaacccgttaggtgatctatgagctgaaggcaggtggcgttgatgagcgtcgcttggttggagcgaagcttgagaaacttgctgagggagatggtatgtggtgcagtacatctttcgttattattggtggtttgggcatgtcatgtggttgttgtgcatagtggtaatgctattcacactgttgaattgtgacatatgattgttcatttgttaaaattggcctttatttactagttggcacgagttgaatttatctgagtgctgaaatgtcatttctttgtccttgtaaagctatgctacgttgcttgatttcttgtagagatatgattgcgttcaatttgtacatcttagcgtattaagtatgggtttgatatcaccactaagtttatgttttaaacatctttcacagaacatacttatctgcaacatgcttaacaccctatcctaaatgtaaatcttgacccttgttgaagctagctgtactgttatttttgtcattcctggcttcacatttttgctgtccccttcacttccaatatccatgagatttatcgttatgtttattatcttttttaagccagaccagtggaagtaatatgcgcttctcgttctacccatttgcaaccttttgtgcagattcaaaaggaaagcccaccgaggctattcgagggggaaggtatcgatttgagtttttggccccttaattatgatgatcatatg

SEQ ID NO: 114278 - DNA, 611 bp, Zea Mays
attagcaagaagttggatatttctcaaagcaacaaccatgagagggtcctatatgcatctggaagactagaaggagccatctcggattggtgggatgcatacaccgcagcccaggtagatgccaacaacatcactttacaagaattccacgacagttttcgtgcacaccacattccctctgacatcatgaagctaaaaaaggagttcctgtcacttacctaaggcaatatgaccattagtgagtatagagataaatttacctaacaatcttgctatgctccagaagtagatactgatgagaagcgccaagaacgttttctagaaggcttgattggaccccataactaccaactgtagagtcatagtttccctagtttcaataccttgctcaataaggctattcgtctggagagcaagaggaaagagttgactgaccataagaggaagtcctagactccaggccagtctagcaggaatgtccactactagcaaggcaaccaagattcttattctcgctctgcgggacagagtgggaattaccaaaaccagaaccaatgctcaagacagcaagctcagaggtacaaccaacatgggcaaaggattgatggaag

SEQ ID NO: 114279 - DNA, 490 bp, Zea Mays
cagccacgctatccacgacagctgaaaaaactgtagccgtcagattcttgatttacggtctttaccatagtgagggcctgaggggaactggcagcttctaaaggctcctcgaatatgccagatcaaacatcgatgtggcattttatatatcccacgcacagtctgcctcgccggttccgccctctctccattgacccaccttggcctcatctcgaccgactaggcagccacacgacgctcggcctctccaccgtccgcccttgcttcatagtgccagcaacggctccatccaccccttagcagctgatgcatacgtctagatcccatgagtttcccaaatgcgcattaggttgccccacctccagagaagcggcgttgatccgctcgcccgcctgcggaacagcaggtgacggcccacacatcagcaacacatggctcacgccactgcggctttccggggccgccgcgtcgccgtcgctgggtgcagccg

SEQ ID NO: 114280 - DNA, 272 bp, Zea Mays
gtcctgcatgtatttccttcattaattcctgtccttcattcctggagaggcatttaagtaatggggaacaaactccatgcttgtatagctccccctcaattattacatacggtcttgttattgcctccattctcttattgtaagcttcgtcgtctgcgaggcggttgccttggaggaaggatattatttcagtcctccagtcttcactatgtacaggtgatattgtgagcactgctctctccatgagttcgactaagggtgcttttattgtt

SEQ ID NO: 114281 - DNA, 388 bp, Zea Mays
actaagactaggtagactaagacactgaattaagcattattacagactccgactctatcgacctatagatccaaatctatccgggtcctaaagtctggggtaccatagtcgaagcgaccatagggcggtgaatggtaagggtgctgaatcccgacaggggcgggagaaccaccatccagatagtggcgtgctgcacactcagcacacaattccgcaacctccgcccgaaccttgcccaactcctcaagggcgtggtctagccggtgttgagcacggtggccaggttgaccatgctgttcagcttgggattgccttccccagctggcgagacaatcaccctgctggtactgccggtcgaatggcgagggtagtacttcaggtcaaggcc

SEQ ID NO: 114282 - DNA, 330 bp, Zea Mays
aggagatgagacaacaacgggaatttatgcaaacttgcatgcaaatcaagcgatgtatcaaataagtatagatgatgcaaactctaaattcatatgtttcaatataacatcttcaatagtaacatggcatgacaccaacaaacattccaccgccgccacaacggagctagtttgcatccacagtagtttaggtatgttaatcttagcaaattctcttataacattctctaacctagcatttcatctagttaatgtagtaccaaaacatgaatcgtatccaaactttgtcaaatatccattaaactagaaccggtgactcaacagttcaac

SEQ ID NO: 114283 - DNA, 507 bp, Zea Mays
gccatcacacaaagatcatctgattcctctgtgggggacatgatagaggaattcagagatctcgataaactaggacaggggtttacatcggccgatcctttggaggagatcgacataggagatggtaaaactcaaaggccgacttttgtaaacaagaccctgaagaccgatcctagaaatgagatgatcggtctattgaaggaatattcggattgctttgcttggaattacactaagatgtcgagattaagccgagagatcgtagagcattggctgcccattaaatccggtttcagacctttcaagcagagagctagagcattttgtcccgatcttctcccacgaatcaaggacgaaatccaccggctgttagaagctaattttattagaccttgcagatacgcagagtgggtctccaatattgtgtcggtggagaagaaggagtcaggtaagcttagagtatgcattgattttcgcaatttaaatagagcaactcctaaagatgag

SEQ ID NO: 114284 - DNA, 293 bp, Zea Mays
gggcaatccatttctcgcaccctttctaagaagagtgtcatattcctgtggagttgggtcccttgatcgacaccagaattcatgaagaaattgtttcatgtatggtgtcacctcttcaaggttggtcaatacatatagcatgatatgccgccactcttcatgtgtcagggtcttagtggtcgagccacttgcgcttcggagttggcctcgaaatatgctgaggttcaattcattgccgccatcattgtaacgagggggtggattatgcacgctcggcagtttgtcaccatagt

SEQ ID NO: 114285 - DNA, 547 bp, Zea Mays
gtcccaagagaattcaatgaaggggacctcgtactcgtccggacaacccggacagagtcacggggcaagctggagccaaagtgggagggtccattcatcgtcaagacgaaggcgtcccccagcgcgtacaggctaacaacgtcatctggcgaggacctagagcattcctggaatatcgataatcttcgtaaattttttgtttgaatcctcagggacaacacgcccttgcaattcaccaaacagtatcattccgtcccgcactcttttcctcccggggggggtgaggtttttaatgaggcggagccatgtaatataccagcaaaaatcccccgcaaaaactaagacacaatatgtcgaaaaagaccgcatcaacggtcttcggcattcgaccacaccgaagtcaccgcaaggggcagcgctgactaccctcgcgtgcgacacttcgcgcaaaagtagcctaagggtgcagccggaatagcacaacaagtgcgcaaaatcagagtcttttccaaaagactctccgtgcaaaagtcacctaagggtgcag

SEQ ID NO: 114286 - DNA, 304 bp, Zea Mays
gaggttaggagtttagtgatcatctgatggagattgtcgatggtccaactcaaggtgtaaatagttgtggatgatacattgtaccagagtggtgaaggatcaacatgtagagagcacttgatccttgtatggatcaaatgggaacgatacccttacatgagtgttccaataaggactagtgggatgctcactctttgatacattggaaaaacattgtcttttattccgtctttactttgaacatttaatctgagtaattatattcttgtctttaaattactaaaattggcttgctagaataggg

SEQ ID NO: 114287 - DNA, 730 bp, Zea Mays
gcctaccattcaaaagatcatagagtcacctcaagccaagttgcctaaggaattagatccatagattttataagccccttcagctaaggttatgactattgacttagactagtgggctctttttatcaagtaccgccaggatagagtcctctcatcaaatagatccacgctgttcagatacaacacaaagcaaaaacttacatgttggttaatgccaatctatacataaaaatgcttcgggaattctgatgagatgtgtcccgatcgatgtggggaaggcattacttgaagatatccactcaagcgtctatggcaatcatgcaggggcgagggccctagtcggaaatgcctaccaatatgggttcttatagtctatcgccatacagatgtaaatgacattgtgtgaacatgtgaagtttattagttctttgtgcattaggctcatgtttgtgcaactcaactacatactattcccatcacatggtcattttccatatggtgcctcaatattattggacctttcaatatggctaagggaggggtcacatatctctatgtatctattaacaaattcacaaaatggtttgaagctaagctggtggcaaaaatcatgttaacaaaggaattcaaatttattcaagagatattcaattggttccacatgctaggatcaattattactgacaacatgagaattcacctcttgggtattcatgaactattgcactaa

SEQ ID NO: 114288 - DNA, 431 bp, Zea Mays
gccgttttagctctgcgtttttatgtctacgtttaaatggataacgatgaacccatactcatataaaacatatacattgtacgcaataattaactaaaacgaaatttaattttggacggagtgagtacttcaataaaagttcctgtgtggtacggacaagagcaagtggataagtgaaggtgtcaaaaatctacagctaatctggacgtttccaaaaccaattttcgtgttttctccttccaccaccggctgtccttcgcgtacattccaccgacacagtaacgcatcagaaggaagaaaaaatatgcgctgattatgtagtactccagttgacatattgcaccgtcgtcagatttggtagtttcacattgtcttaataagggcacaagtgctggcatttggtacgcaccactcaaattatttgatttatc

SEQ ID NO: 114289 - DNA, 543 bp, Zea Mays
gtgggcaccaatgttggatacttctttgaagtgttatcgcggaggacagaagttaaatatgcaaacctttgtccttgttttaacacttcttcgaagtgttatcgctaaggacgaagaacttttataaggagatgtgattagaacaatataaaatgaaatgacaatgagtgattgagtgtacaaaactcatctcatatgccttgacagttttattccatcttccttcatatcaaatgagtttacaaacatacctttgactccttaacacaagctggcacgaaggatcttcaaaggctaagtgatacgaagttatgccctcaaaaaggtgaatttaagtagagcattgttcatcaatttatacgcaagatgaacatcttcgtggaaaattataaacatacccataaagtttacacacatatttaacaaatgacacagggacattgataacttttttccttctttcttgttgcacaagtcttgaacttggtatcttgttgcaccttcgttgttcgcacacttggttgaaacttctctttacgccgc

SEQ ID NO: 114290 - DNA, 282 bp, Zea Mays
aaacttgtgtcactggaggtttcatggaataatcaagaagcaaagaagaaggctctaaagaagacacaaaagaagacagcaatggtctagttgagagatttcttggtcgtgtaaaagttgcaaatactacatcattgacacaaaaaggagtgatccagacctttcttcttaaatggcgaatgccattgtctaagatacatgagcaagggtatgatagagctagtaacataaagggtcgtgctaattgtttgaagaaaataatgatggaagagtcaccttttt

SEQ ID NO: 114291 - DNA, 395 bp, Zea Mays
ctccctatgaacagaatcctaatttacactatgacatgttctggtgcttctttagtccattataattctatgctttatacaatatactttcagtgtctttcttgcattatattttcataatccacatcttattttacacatgaagtgttgagtgggtatttgtgtttgtttgtaatctaatggatgaaatgttctcatactcaaagtcctccatgtgctacatgatgctttatttttttatacatctatttcacaattgcaacgccatttgagtttgctggtattatttttaggattttttcttgcaatgctggttcatatttggacctgatgtagtgatgtgagatccttgtttctcaccatattccctttccttgtacccatggttgtcttct

SEQ ID NO: 114292 - DNA, 314 bp, Zea Mays
gtgaggctaagcagccatatcagcagcttctgtgtgagttccccgttgtctcgcttctccgtaggccaccgctcgcccgctccaccctctgcaggaccgccactcacgtttgcgcccgctgcttgactctacgttgcgtgcctatgcctccgggactgcagggggaggagaaagatgtcgttggcagctaaaaagtatagggcacgacaacacagttatctactagcttatctttcccttccccggtttggtagtttctctgacccctcatctactactgcgtgagtccctcatctactactgcgtgaataaca

SEQ ID NO: 114293 - DNA, 617 bp, Zea Mays
ggcgccgatgaaggcgtataagtctcccctatcaccgagaatctcctcaaaaccttcggcttcgccgctaatccaccgaataactcaatcaggatagccacgaataaaattttgccccgtagagaacgcaccaattttggcaaagctatcttccaatttattacaacattccagggcaacattgtagcattcctcttttgcttgacgaagctcctcgacatttttttgaactctcagccgttgagtatcagatatttcgcgctttatttgctcgacattgaaattttcagtcacttcatcgagtttctttttcaatccttgcacttcagatctgtgcaattctacttgaacaaatagcgcatactccaagtcagcaatgcgcttcacattttttgttgcttcatttcaaacacctttaccctctgctctgcttcggaaaggctagaaagcctagcttcactagattttaatctttccaccaaagagagcaggatcttatccttctcgagagcttcgtttctcaaagttataacctccgaacgaaggtttctaattgccatctgattgctctcatcttctgcatctttctgagcctttaaagctttgctaagaattag

SEQ ID NO: 114294 - DNA, 981 bp, Zea Mays
tggacctataccggaaggcctcttcggtagactggaccagctgaactggtaccttgacctgtccaagaaccagctcgcaggctccatcccagacgaattcagcaacatgatcaacctcgaatccctcaacatctccagcaacagcatctctggtaaaatcccctccactctcggctcgtgcgtgctcttgcaggctcttcgcctggaagccaactccctggacggtcaaatcccgtcgtctcttgccaccttgaaaggaatcaaggagctcgacttctctcgcaacaacttgtctggtaaaattccagagtttctggaacagttcgatagcttgcagtacctgaatttatccttcaacaatcttgacggccctattcctacgcaaggcgtcgtctttggcaatgccacaagcaggcttttcctccaggggaacccgaaactgtgtgcagaaactatagcagtgctaggcctcccactctgcagggctcaaaacccgtctgcaaggaaccgattcctggttcggttcttggctgttctgttgccttgcgtagttgtggtttcccttctgtctgtcctgttcttgaagaggtggagcagaaagccgcgtcccttccacgaatcctccgaagagtcattcaagatggtaacctacagtgacctaagcatggcaaccaacggattttcacctggcagcctgattggttcggggcagtctagctcagtctacagaggttcgttaccgtcgaaaactgatgacgtccatacgatgattgccgtcaaggtattcaagctcggtcagtccagttcgtcgaaaagctttctagccgagtgcagagcgctaagaaacacccgccaccgcaatctagtgaaggtgatcaccgcgtgctcgacgtgcgatcctttcggtaacgagttcaaggctctggttctagaatatgtgccgaatggcacccttgctgaccacctccacgccaagtaccc

SEQ ID NO: 114295 - DNA, 313 bp, Zea Mays
gtggtaaagtgcaagcagatagaatatgctcaaatataatggtggaaataagggggataggattccccagtgacttaatagtaatagacacccctgggatagatgtcatcctagggatgaattggttaatgaagtatgaagcgaatgttagctgtgacaagaggaccgtaacattgaagtccccgtcaggagaggaggtagtggccgagctaaggatgcctaaatcagtggagggagattgtcaccagatttcagttgatagtaaggaggccaacccgctcgaggctatcaaggttgtgtcggactttccgga

SEQ ID NO: 114296 - DNA, 607 bp, Zea Mays
tgacgagtgggaggtgtccatggagacccatgtggagtgtactgagctgggcgtggtcctcctcctgaacgagtcggtgtaccctatggcggaatgtagcgaggaagaacactgctactaccctgcccctaggtaatggccttcctctacaagtctcccaattgaacacacgtgtgttcaatagcaagatccttatccaacagtctctgaaatgatggaaatgtgtgagcaaccaatgcatactgtaggggcccattgagtccttctgtaaagtgctcttgtttcctttcatcatctgccacctcatcaggagcatatcttgacaattggatgaacttgtcatggtactcgctgacagacatgttgccttgcttcaatgacaaaaactcccttcttcttgatcttcatcaatctagcaggaatgtggtagtttctgaactgagttgtgaattccgcccaagtaatagtgtcagcagcatcatgggcagcaacataagaatcccaccagtcagcagcaggacctgtcagacgaccagaagcataaagaaccttctcccggtcagagcattgggcaatgttgagcatcttctcaattgacttcaaccaa

SEQ ID NO: 114297 - DNA, 502 bp, Zea Mays
ttcttcatggggggcgagctcggacgcctccttgggcattaccgagggtttgaagatgtccttagcgaagacgttcgaggggaccgtggtccgccccgaggcgattttcgctagttcatcagctacctcgttgtactggcgtgcgacgtggttgagctccagtccgaaaaacttatcttagaggtgtctaacttcctcgcagtaagcctccatcctcgcgtcaagacagctcgagtttttcatcacctggtcattttaagtcgggaatcccatcggacgtctaggcgtctgactcctagatcgatggtgatgcgcaaaccattgaccaaggcttcatactcggtgacattgttggatgcagcgaagcggagacacacgacgtatcgcagatgtacgccgaggggtgagataaaaagcaatccagcacctaccccagttttcatcagcgatccgtcaaagtacatggtccataactcagcttggatcggagccgttggtaaat

SEQ ID NO: 114298 - DNA, 398 bp, Zea Mays
ccctacttgaatttgttctacacctaattctacccttggcgcttcactgggtatcaataattaagcacgaccgccatcctagagctcggtctacgggcacccgcggacttaaagccttcccgactcgttcataatgatctagtgtgatagcattcaaattctaagtacggggagcatcactatatcctaaggaagctagaacagatagtaattgggctagaactacctcaggcgaagctggccatagaagagctctcctcagcggcgatggcgaccaaattgggggaaaagctaaattcaggcgctatggtggctaatcggaggcgagggttgttgttctggtttcgtaataagcaagaggagcagaccgcacactcaatttatatcgttcatgagcg

SEQ ID NO: 114299 - DNA, 477 bp, Zea Mays
ctctggtaggaaaagctttcaggtccgggttttactggccaacagcgaagattgatccagtcgagttagtccagaagtgtgatgcatgccaattcttatcaaagcagcagcatctactcgcacaacagttgcagactattcttgtgacctggccgtttgcatgctgggggctagacatgattgggcccttcaagaaagctcaaggggctatacacacatactagttgccattgacaaattcacaaagtggatagaatacaagcccatcgcctctttgacctcggcaaaggcagtggagttcatctaggaaataatgttcaagtttggaatacctaacaacatcattacagaactgggatataatttcaccagctcagagttctttgacttctatgagcagaggagcatccagatcaagtatgcatcagtggcacacccaagagctaatgggcaggtggaaagagccaacgggatgat

SEQ ID NO: 114300 - DNA, 456 bp, Zea Mays
aaaagacacccatggtaggaaccaggaactaccctgacctaaagacctgggattggatgctctaagtgtaactgtgctggttgtcacatccaaatgatctttgtttttctgatgttttttgttacttgtctgttgatcttgctttcttgtttggaactcttcttctctggctgtgatgactgatgaccaaacaccctatgcattcctttattttctagatatttatttgtcgcttatctgttgatcttcctttcttgtttggaactactcttcggcggctgtgatgtcaaatgccccatccacttgaattgtttagggtttaggatttagggtttggtattgtgctcaatacaatgttaaacttggatggcttgtaccatatacaagcaaccagtttgcaactgattgtctcattgccgtggcggtggtgtaccatatacaagcaaccagtttatt

SEQ ID NO: 114301 - DNA, 480 bp, Zea Mays
attctggaaaaagttgagcccgcattcttgagactttgggcatacatgtgtagcatcaagtgccaaagggtgcaatgaagcttgtcttggccttgtcatcctctattatgtagatttaatggttgtttgagaaataattgaggagggtcatgacttcacaccatgaggcggagtcaacaatcttgtctattcttggcagtgacatgccatccttgggacatgccttgttgaggctagggaagtctatacacattttccacttgccatttttctttttgatcattacaacgttagcgagccatatgttagataatcgattggctcgataaaatttggcatcgaggagttgttgcactttggcccttactgcctcggttttcttgtcagacatcttgcaaagtatttgattcttaggtttgactgaagggctgacaatgaggttgtgttcgatgatgttgtggcttacaccaacaaggtccg

SEQ ID NO: 114302 - DNA, 525 bp, Zea Mays
gtgagttagaagatgggatttcgccgcctaatcggggctcgaatggcgagctcgaaaccgctcgctgccgcgtccatgcgttcggccgtgatggattagcggaggaaggaaatagaagagagacagagaaccgggggggagaagatacgcgccgccgcgcttggctatcggtaggtggatgacgggtgctcagcggttgattttcgtggcaacggtcggatttgatcctgagtctggtatcgcgacggccgtcgatcctccatcgtgcggttgggattagagtaaaggaagtgtttcgatgaatgtgatcctcgccgttggatggtaatccgagggatgcgatcgcgttgcagttcgcggggcttgggatttaaaatctggggcgttgacttttgatacaacggccgtggctagctcataacccttcgcggcgtcaattttacatacgaaccccttcccttttgttatataaacccgccgtcccttacggcagagtactgagtctagggatttattgcaccaagg

SEQ ID NO: 114303 - DNA, 691 bp, Zea Mays
agtgggttttaactctgaggtgtttgatgtcagagaatttgaagctggtgaatttttgactcgctctcttgtccttcacagagaaaaaaattttatctggaatttcgttaatgtttatggggctgctcaaaaggagcacaaatcccgtttcctcagtgaactgtctgcagtttgctcgagaagccaggtccctatgcttataggtggtgatttcaacatcctcagaaaactgaagaaaaaaataaaccgggtgccctcagtaagtggagttttctgtttaatagtatcatagaccatcatggtctagtggaatttgagttgaaaatagactatatacgtggtctaacaaccgcagcgatcctacttttgaaaaacttgacagatttttggccagtcctgactgggatcttgcttacaacaatatcagtgttcttgggttaaatagatccttctcggatcatgctcctctttgccttcaaactgatactctccccgtggtgcgtaaggactttagatatgagctgtgctggaaagttagaccggattttcacaacttagtgaaaagtatttggtctctccctgttggtgtgaccaatagtcttgatgtgtggaagttgaaattgaaacgtctgaggcaaaaacttaaaggttggaacagcaatattgtggggcactacaaaaaactgaagaa

SEQ ID NO: 114304 - DNA, 379 bp, Zea Mays
gcagtgactatggacttaagcacgaactatcgatgagaataataatctctatatctaaatcctagacatcctcgcctatcaggatttctatatagcatttgtctccaactatatagactgtccaaaatatttcgtgaagtttagactttatcgaccttcaaaaagccgagtccggtgctatttagattggttatgaacatgaatgcgacttcggaaaaacagctcgagtttggtgtcgtattcatttccataatctaaacagttaaaaaggtttcatgaacttttggattacctaatctcatttgctgtcgaatttggaaatgttcggatcacgcgcataagtgaatatgaaaatcagaaaatttctgattttatgtaa

SEQ ID NO: 114305 - DNA, 294 bp, Zea Mays
gcacaacaagtgcgaaaaaaaaaccgaagtctaccgcgaagactatccgcgcagaagtcgcctaagggtgcagccggactagcacaacaagtgcgaaaaaaccgaagtctaccgcgaagaccatccgcgcagaagtcgcctaagggcgcagccggaccagcacaacaaaagcagaaatgacaacatcaaaccgtccgcgccaagaccgactataatcgcaccagcacagcataacaaaacacaccagacaaagtacacaacgccttcgcaggcacagacaagcgacagcacacg

SEQ ID NO: 114306 - DNA, 585 bp, Zea Mays
cgatcggaataaaagcaaaggcggagggagtgtatatatgtgaatgaaatgtgatgtgagttggaggcttgaagtcggagcagctactagcagctagcgggggtgacctcatctcggtggaaattgaaagcacagtggagagagggagagagagagaggagggagaaaagtttatgggacgtgacacggtgacggagacagagttgcgagtagaactggacagtgatgagatgtgtgtggtggtcagccgcagcggcagggacgacgggagcagtgctgcaggaagcatagccctagatttagcccagctatcgtttgtgtttgtgtaaagcgcgggggtggagtagattcaccgggaatattcagcccgatatcaggcgccgcatatgcttccggagccgaaaaggagaacgtgcgtgtcgctgcatacgccgagcatgcatgacaacagcatgaacatgaacagctagctagcattgtttcattcgccaattcctttcttctagtcttttctgtattatttttggagctgatgaggaacgaagccggctagtaataatacgccacgccaaccgtgcagcagct

SEQ ID NO: 114307 - DNA, 368 bp, Zea Mays
aaagttcagtagaccaatttttttctccagatttccaaaccaattcgttttctcgtcgcttttttatgcggggaacttaaaaaacatgtttgagttatatactactagcccctctatatgttttagagagatcacgatcgatcgatatatccaacattcaacagatcaaaaatacatctgttagctttttttaatccttttctctctctatcttgctgttcgtcacgtctaccacatcaaaatttggcgtacggtgttctagatgatgttgtcgatcctataactacctccgtaccggtctctctatatcaatttgagctacggtctttattgtatttaggatcatgtgtcgaccaagagtgtattag

SEQ ID NO: 114308 - DNA, 623 bp, Zea Mays
ctcgatttttgggctgtatactggtgaatccatgcactttcagtcttagaatgttatagtgaccttagaaacctatgtatggtgagcatgtttgatgtggtaagatggactcgttctggtttaaaatgggagaaccatggtcccaaactttggactgcagcagaactgaagcagttcggtatggtttgatagatgagaaacaaatatccctcctcaccactctctctagatgtttctgctatattgtggataaaaggagctgagacttggagagctagaaaggggggatcacgttggatatttttactgcccaaagggtggacgatgtagagttgaaacctatctagaagggggtgactcagctgcttgtgaattgctatcaaaaccatgttaaaccaccacatcatgtccctctgttcatggatctagggtggaatgaggcagtgcaaccatgtgcccataaccatgtctcttttggtattccagagccctccttaaccagcttctagtgaacccagccgcacacaccttgccttgttagaagtatttagtttcaaatcatcagtgcttcactcccatttcttcgattcaggtcatcttgaactgaatgacttgtgtttcca

SEQ ID NO: 114309 - DNA, 506 bp, Zea Mays
cgaaggcctgctaccagacttctcccagccggagctcacagacgaggaaaaagtgcatcaatggctgtctagtcagcttgaagacggttcagagggtgcctattgctgttgtgcttgcatacttgcagaatgccgttgtgaccccctatggcgacctcaatgggcaactctgtcaacgccatgacaatgtttgtgctgcacacgacgtgttcgaggtattccctcttagcgcccctactgcttgagtcattattgggaggatcttacccactcggtgttggaaaattccatagccaccacccattttgttggagagtttgcgtgctggaataggggagctgcttctactctcggccacttcccagcaggaccattcccctgacagcatggtggcagcaatcaattctgaggaaccccaattggtaattttagaaccagaaatagtgtctacacgctcaagccatgtgaaaggttttctgacagatagaatgcattttgtggatggc

SEQ ID NO: 114310 - DNA, 373 bp, Zea Mays
gttagctagtcctgaggataatcagaaagatgaaaactccgaagaaatcattgaagattgatgcaaccgagcgaagtcgttaaattctagaagcgaagttgttgaattctgaaagtgtgcttggctggtgtctgctgggattcatctttattttcatgtttggtggatcgatggcccctgtgtgggtgtttttctgttgtctttagaccttttggttgcctccgtggctgaggtggtttcaagtaaaattgggtgctggttggttgaggatagtctctgaatcagggaggtactctcttttggttaaactttgaatgttggtgggtcatggacgaatagcctaggtagtagtttgttccttgggatttctgtt

SEQ ID NO: 114311 - DNA, 707 bp, Zea Mays
ggccatacaagtggaaagggctagggaagaagaaaagggtcacctcaagaggaagttccaagtcctccgagctcagcagcaggacagacaccagagaattcgatcttttgggtttccacccaagggaccaagcttcaacaagccaggtggatccactctgtcacgtttcagacagcagggtcaaagttccctctaggccccctccgttgcaagcaaccaacctccagccaatgcctgttggcattgcggagaccccagtcattacaagaataattgtcctcagttgaagacatccatgcctacctactccaactcggtgaatggccccaagagtgccccagcacccgcctccaaggcaccatcctccaacagccagctaagcaagacccagtgtcatggaagggcacaagtaaaccatgtcgacgctcaagaggctcagcaagcccagggagtagtgctcggtgagttcctagttgaatttactcccatcactgtactttttgattcaggagcatctcattcattcatagccactggttttgtggaaaagcatggcattcccactgcatatctagaaattcccttggtcacccgaaccctaggggcagaccttccatgccacctcaaatgctcccaagtcaggattcttttaagtggggtagtgttcttggcagacttagccgtcttgccatcccacgaagttgatg

SEQ ID NO: 114312 - DNA, 398 bp, Zea Mays
ttttgcatttatttctacatttctttcgaatagtctttagacatctctcgattggatagcaccaacgtccctgcatgggccccccattcgttcctcataggggagatgaagaatcaaatggtgtattggattgaagaagctgggtggaaatatcttctcaaacttacacagtaacacgggtgccaatctttccaagtctgcaaccacggtccgagataactcttttgcacaaagctgacagaagaaatagctcaactctgaaagcgctagccagacatgctcagggacagcctcgaaccatcgcaggaagaatccgttcaatccatatgtggaagtcatgactcttcatccctaagactcgcatagtagataagttcaccccctactcaggttagttg

SEQ ID NO: 114313 - DNA, 1045 bp, Zea Mays
caagttgagaaagtgtagacttggtgcctgtcatgtggttactagctccagtgtctaatacccagacttcatctgaacagactgcaggcactactttttcttcagacaggtgtatttcctgagaagttccaccaaatgagtcttgcacctcagcgaagagtagtgctgcattctccacatctccaactgcaaaatttgcctcctgttgtttgtgatccttcttatctctttttggtcttttacagtcttctgcccaatgaccatagatgccatagtttctacatctcccttttcttctaggtgttccttgtgatgtcaatttgaccttgtgaggagtattggagctagcacctttagatttgttagaaacctttgccttccactggtttgtccctccactattactgttcttgtttgaattggactgaaacctatgcttgtgcttctccaaccattcctcttcagctagcagcagtcttcctgctttatctgtgacttgctccagtttgtcttcaaaccgatcttcagctacccgaagccttccaactaggtcttcaactgaaagtgtcttgacatcacagaacatctcgattgagacaacaacttgattgaaccggggtggcacaactcttagaaacttcttgacaacaagagtatcttctaagggttcaccaagtgatttaatattggcaacaagatttgtgatcctcatcccaaaatcctcaacactttcaccctccttaaactctatgttttcaaattctttcagcagtttctgaatgtttacctctttaacccgatctactctaattctcattgtcttcactgtctcccaggcttctttcactgtctgcttagccccgagggttccccacatctcttttgggactgaccacattagtgctcccatggcttgtctgtcctgcgagcgcctcacgttggttccgagctctattacttcccagatctccattgcttcatagttgattttcatcaacatggaccactctgcataattggaccgggttaacatgggccataccag

SEQ ID NO: 114314 - DNA, 515 bp, Zea Mays
tggggaaattaattacaaatatttagaaagagtgcaaaaagcccaaccaaacatttagctaacgactgcgccttcttagaacccaccctacacgccctgaaacttcttggcttttccacatggagcatatagagctagtcactttgacttctctagtacctaatcataacttcagaacctagacagcctagatggttgtctcggtatgtagtggtccaaactctacagtcagatacaaggaacatcacattacattaataaatatgatagggcatatatggtagagaaaagtctattattcaaacagttaacttggacatctggaatctagatgacatcatatcgagaactctcaaaggtatacattatctttcattcattcttcaactgaatagatttgaagcccatgaatgcatattttttctaatctgtatcacccatcggaagtccatgtttttcctttaaaatccttgtccatagaaagtctatttttattgcctttttggtttgatcct

SEQ ID NO: 114315 - DNA, 324 bp, Zea Mays
cttaacaactgtatcaaaggctttgtaacattgtttaacagcctcgcttagttcgcacttcggccgtttcagatcgaagctaatccttaaatgactcataggcatgcctttgaagtcctcgtggtgtttagagtcaactttggcataaaaccacttttttgtctagtccccatgccacttggttcgatatgcgaggaccgtctgagttgtatccttacgatacacgaagttgtagcatctgaagttattgtgaagccatgtctgacccttggcctttgtttgatagtgtaaatatgcaccctacagaaagcatcaacattttta

SEQ ID NO: 114316 - DNA, 577 bp, Zea Mays
taataattttcccctcttatggagacatggcgcgtacaaggaaaacaacacacaaatcaactagaccttttggtgtgcctcgtcatcagctagcccccagacatgaaggaagtagtagtggcagcaatgaaccaattggacacctggaagccagggtggaacaacttcggttagagctacatcaccggaatagggcatgggcgcaggacagccagcgtgtagctgaattgttagctgacgtcagccgcttgcaatatgagatttcagaacgggactcggccattgtttgggccatcaactcgcgttcgatcgcttgggaccgcaaagcaaaagctcgagctcgtgtggcagagcttagtgcggccctcgacagcctgcaagtgtactgtaatactttacatgaagaagtacatgtactgtatgctcgattgcacccgaacgtgccttccgacgttgctgcaatgggagccggatcctcgggaaccacaaatgaaggacctgatggggagttggacctttttaggccccctccttctatgaaccttgctgacgaacggtctcctgcagcaggaaatga

SEQ ID NO: 114317 - DNA, 359 bp, Zea Mays
aactgcctaatacttatctaaccaattcatccctaggatgacatctattcgctgagtacccattactatgaggttagcgggaaacgctatctcccttatttccacacttacattcaagcaaatgttatcgactcgaattctaccaccggctaggtcaatttgaatgggtgttgacatggtagttattggaagattatgtgcttctaccaatgatgcagaaataaatgaatgcgttgctccagtatcaaataacacttctgcaatatgggagttgactagaaacatatctactgtcatgccgggggtttcctgaactgcttcagcttccaagtgattcagtctcccatggttatagcgtg

SEQ ID NO: 114318 - DNA, 434 bp, Zea Mays
ctcgggtggaattaggaggtcttgttggggctatacggtcgcaaagggctaccgattcaccgtgcacactcaattaggggagaggtggagaaggcagtgcgaattttggcttctaccaagttcactggtgaaattgtgagtgcctcgccgtggtctatggtgctatttatagccacagaggtctggctaacgaacaacggccgcggattgcattgtttcacgcatggttaccacgtagagaagaggcacagtaaggggaaaacgaggcatgggtgacaccgcgacagaagtgaccgagccacggcgaccgccggtgggatatctctggccacgcacggttgggttcgcgggatggtgccacgtccgaagttatctctccgcatcgactcccttcaccagatcactcgagcacatccggttcaacagtgcctcag

SEQ ID NO: 114319 - DNA, 397 bp, Zea Mays
cggccttcgggagccgaaaaaagaatagactaaatagggtttttgacactattggatttgtgtaccccgactatcggtacccgccacggggtcaaaaaagaaaaggtacaacttctgagaaggatgttgcttcagccgcctcaagcgagcctgcaccgaagaggaaaaaggtgaaggttcttactcaccgaccacgctacattgaaccggccatagtgcctgaatttggcggtgagacctcttcggctattgaagccaaaggacctgctcttacacagaagattgaagagccggctgcaatgccaaaggctgacaaaattgaagaaccgatagccgaagggacgaaaacatcagaagctctaagcctttcgacaggagcggaagcaccaaagacata

SEQ ID NO: 114320 - DNA, 579 bp, Zea Mays
cggtactcgttgcctacttctacttgtgcgagccccggtaaattccccattctcgaattcattccccggttctgcccgacctaaaaatctttgaatgatcaattaactaggtcgatttttgtagagctgcacgatgaagaggactaagacatttttttctcttgctcctccagttatacaaccagtggcacggaaccaactttctagacaagcacaatcagaagtagtagtagaaacgcaggttatagaagaaccagaagtagtagaaaaaccagctagcaatgcaaatggcttacaaaataggttcaggttcacttgctattgttgatgaagatatgagagactagggagaaccagaccactagtgaggtattttccaaccactttcatgcttccatcaattatgttggggatttaagcatgggattgagataccatctaagcttatgcatttataagctagttttgttattatatgtattacacccggtgcggatggtacgtgctttgatagtggccctaggcgtgaaaattgacgagctctcccactgtttttattcggatctgcatttattatgc

SEQ ID NO: 114321 - DNA, 479 bp, Zea Mays
agacatgtggttacctgcaaacgacaactggctgttagggtcgatgggaggaatgactaccgcagcagaactctggttcttccgcttgggtgccattgcaatctcgtcggcgggtcgaacaagggcgaaatcagaggaaaacagaatggttcaaggcggaaacgtgaagttagggctcagaactcaagagcgcacgacgacatgagtataaatggggttttcccgggttgggcaccgtttctaaaaagtgccaagtcatcactcgagaaaacgagatttcagacatggctcggtcattacctctaaaacgctgacaacatcaaacaccactcggccgttacctctaaaacaccgacagtatctgccatagctcggttgttatctctaaaacgtcgatagagtcaaataccactcggccgttacctctaaaacgtcgacattacttgccataactcagctgttatccccaaaacgcaaac

SEQ ID NO: 114322 - DNA, 768 bp, Zea Mays
gaaaatttgtgttactcaagtacataatgtgtatatgcatccatactaacccttggattggtcaaaatgtccatatttgagcgacaaacccaatttgaaattcaaaatcagaaagtggacaaactttggatatttgagtatcaggccgcggactgtccgggtaatgactgcggaccttccgacgtatcaggttctggacagtccgagtcagcagagcagactgtctgaattgacagggcgcggaccgttcgccgacttcacgtggaccatccgcggcaggcagataaatcgggcagaggcagtcagattgtcactttcaacacttgtctctttctctctcacactccacatgccaaaggtgattcttgtcgtttgtgagcggacggtgaactgaaattgcgcatggactgtccgggagattgtttggagttcatcaatcatgtcttcatctcggtatttcaaaatctcatggaatttgtctgatttattcaaatttgaggattcatagggttttctctctgttcttgaattgcacagtggaattacaactttgattggtggaattgctcgtgttactcattgtgaatatggtgcaaaaattgaatggatttggatgattattttatgtcaaatcgatgattagacggatggggcggctagggttctagaaatcgcccatggacggtcgcagaccgtccgccaggatggcacggacagtccggccccctagcgcggacagtccggtccctgacagaaacttacacttcc

SEQ ID NO: 114323 - DNA, 567 bp, Zea Mays
ctgttcttcatttgccttgctgctggatttgaacctgcgcccttggttaatgtttgtaggactgatatgctaagttagttccatgtcataagttcctacctaagtgccgctcaataacgatgaaataaaattccaatgtgaggcaatgatctgtatcatggttgacacaagcacctttgagcaatcaaggctgctatgttgttaaccttgctcttagaggacatggaaatggactcgaatatgtgaaatggactgctgacgaagggcgatgatgctcaaccttttcggagtcgcacgccattgagcaaccaaggcagctgcgtgtctggtagcctatttaataatccctttttgtttgtggttctgcctaggatggtcacctggatggatatatgacaaccaggacagttccactcacaataggatgagtagattgggcagaaagagaagggagggcctgatttctatgattgagcaaaggagatgctgagctgagcccctttcgtatggtttatgcagcggtgctttatggctctgttttttgtttcataccgcgcttgagtggct

SEQ ID NO: 114324 - DNA, 541 bp, Zea Mays
tcctccagtacttgattagtcctttcagtctgtccatcagtatgagggtgataggccgtactaaagttcaacattgtattcatattctcatgaaagcttctccagaatcttgaggtaaactatgaacctcgatcatacacaatcttctttggtacgccgtgtaaacacacaatccgtgccatatataactctgccagctgagagcctttataggtagtcttgaccggaatgaaatgagccactttggtcaatctatccacaattacccatatagaatcatatccttttggagtgcgaggcaatccagtaatgaaatccatgtcaatttcttcccacttccattcgggtaacttcaacggatgcagtagtccagctggtctttggtgttcggccttgactctttggcacacatcacacatagccacatgtgcagccacatctctcttcagcccataccaccagtacttttgcttcaaatcctgatacatcatagtgctactaggatgaatagaataatcagagtcatgggcttccttcaata

SEQ ID NO: 114325 - DNA, 468 bp, Zea Mays
ggtgttgaagggtgaatgatggtttttacttatgtgatcaaaggataaacaaagaagttgtaagaagtaataatcatgtcaataagtgttggaacatgaagcaggtggtaacaagataatcaaacattgtacatgtgatcaaaggatatagtcaatggcagtgggttacctgagattcagcacaccacccctaggcaacaaccttggtagaggacgcacccccaggcaacaaccttggtataggactctgctgcctatcgatgggatatttgcttttttaggtcactaccggtattcgttacgctcacctaattgcctcgtttaaatcgtgcttcctagatgaaatacaccactatagctaattgcatgcatctgttgatttaattactcctaaaaagtgttttgcatttatgtttagacataagcaatgtcatcatccagatttgtttggttccctcaagtatgagt

SEQ ID NO: 114326 - DNA, 299 bp, Zea Mays
ctcattttcctatccaattctgtgaatccatgtggtgagaaatgttgctctgtgtcccctgagtattcctgcaggtttctagctccttagggagggtttcacagcctaaattgactcaatctccaaaaccctagaactccgcaagtcacgtgttcggtgaaatgcccaaaccagccaaaaatgctctgattgaacccaaatttttcaggcaccttcacaacacctccagtaacatattcgcaaaatttcacgcccatccgatattccaggctttaatttcaccaaattccccgtttcga

SEQ ID NO: 114327 - DNA, 807 bp, Zea Mays
tagccttgcaggcgcgcacagcgcggcccctgccctgcctcgccccctgccctgagataaggattgaatagatagcagagtttatgtgagttgtgatttagttctagaactactagttttgtatttcttgattgctccaggtattgatgcccttgcagttgcttgtaggaggtggatgggatattctacacagtctggtggggagtaatgaatggttcatggcacagcctgctatctcagtttctgatagtagggccattctgctgctatgtctacatgttttttttatgtgtcttcatgtgctgggaagatgaattggtaggagactgacttgttttcatgaactaggaagttggacaagtagtaggccgacatgcctttatccaaagatcttttgtctttcatttgtgttagaaactagctacatggtcgttgcttgagatgttaatattactagcatgtcacacaatgttcataatggatatctcgatcaatcgtatgtttatcttttacagtttgtgtgcctcgatcagggactgacgacagttgtttgaagccataattgtctgtttatagtttctagcaaggtccaaaaatttacccctgttctatgattcagacttcagaggctggcgtagccatggcacacttaaattcctggactaccgtgtatacatgtttttttctcacttcctcctgtgctggttcgtagcatttttacttggaaacgttttctaggatccagattatcgtagctagttagctttagttgtttcaattattttcagttcaattgttcgactgcaa

SEQ ID NO: 114328 - DNA, 351 bp, Zea Mays
ccttccatgcatcactgtcagacgggtgtgtcatcacatgagtgtcccctcgttcacgttctttatgccatctcatgtgcctagttgtgttcctcgaaagaaacaaacgcttaacacgaggcacaagaggcatataacaaagttgcttttgggctacagttgatgtgaccatttcaccatcatcgtttttaacctctacatatctcgacttgccacactttagacacttactatcattctcatgatccttccagaacagcatacaattatctggacagacatcgattttctgatagtccatacctagactagagagcagtttcctgcactgatacacgtctttcggcatct

SEQ ID NO: 114329 - DNA, 669 bp, Zea Mays
atctcaaagtgaacttgcctctcatcattgggaagatcaccaagtgaagcaaccagaacctcaacttcttcgagagagggtcgcactctaagacccaaaccactgtcactagcaggaggattggacacaaaatcgaaaaaggacttggaaggtggcagattccaagcagaatacgcaacaggagcactaatatttgatactttgcctctaaggatcatttccagtcggctcaccaagtccacagcaggaatcctcttgttggtaacccgagctgagtcggtgataccactatacaaataagccgggtatgctctgtccttcagtggctgaatattcttaaaaacaaagtcggcaaccatagcttcagcagtcagacctctctccttcaataaacaaatttcagcaagcagaaccttggcttctgttatctctaagtctatgggggactcaatccaacttggagcacgaacatccggctgtctccctgaccgaggggggagggatttgccatggttttccacaatgaaccactctaagcgccatcgtttaatgccatccttaagtgggatgtcaaggtattccattttcctcccacgacgcatctccagactcgcaccacccacgagctagtgctgcccctagccatcccaggctaacaatgatacaaat

SEQ ID NO: 114330 - DNA, 503 bp, Zea Mays
taaatatttaatattctttgagcaaaatatatctgtttacatactatcaagaatgacaggataacatacaccattcacaatcatccaatagctttataaaacacctaataaattaagtccgtctcacttaatttggggctacacttaagcaagtcactacgaaatgttgtatgaattatccaatggcgccgatatcacagcctcacattcacagaagtagatcagcttgctggacacataaatataataaactgccaaaaatgcatcaggcttttccatacaaaaatgcagaaatgcattcatttctcaactgaatgtccacaagctgatactaacatgcaccagtcagtatatttcaagattaaaccatcaatataccaatcagaaacactaaataagtatagtaagcatgtcgacctaccattgtatctatcatataagggccacccaaaaagattgcaaaatgattttctgaaaaattgtgatatcctagcccctgggat

SEQ ID NO: 114331 - DNA, 315 bp, Zea Mays
gtcttcaggtctggtttctattggccgacgacaaaaagtgaagcagccgagttagtccagagatgtgaagcttgccaatttctatcaaagcagcaacatttgccagcacagcaactgcagaccatacccgtaacatggacatttgcgtgctggggactggacataattggaccgttcaagaaagctcagggaggctacactcatgtgttggtcgccattgacaaattcatcaaatggatagaatacaaacccattgcttctctaacttcagccaaggcagtgaaattcatacaagatataatattcaggtttggg

SEQ ID NO: 114332 - DNA, 368 bp, Zea Mays
catcacgtcaatgttgtgtggaaggagcaggtcgtcataatagggcaaccaagtcaagcccgacttatgtgtccacatatgctgctcaccatatcctacaaaaccaccttctgtattagccacgagcccatctatctattgatgaatttcagcaccagtcatcgttgcaggtgggcggtctgtcactacgacacctttcgtaaagttcttgatgtctagacggaatggatggtcaggagggaaaaattgtcgatgtttatcgaaggacgaatatttgccaccctttttcaaccaaatgaacctaagagcttccttgcaaactgggcatgggaacttaccgtgaacacaccaggcgcagaatagcccat

SEQ ID NO: 114333 - DNA, 610 bp, Zea Mays
gtctgaaagcgacaacgacaaatgccgaagttgcgattttcctcttcgctccttattttcaaacgggaaagcagtaatcaggataaatgaatccaatcacatcaaaaatctattcagtctccttttgcctcgagcgccgaaggcagtgttcatagcttcgtcctctaccatggtataagcctccagcaactcattactggtcacttcaacagcttcaagccagtcattatttggctcgtcaaattgacttctatagcgataggtgtacctcagataaaccaaaccacctttgctggagcgagcaacagtttcctttggtatctcccagtcattaacaagcggccataccttataagcaatatgctcttcaaccaaatctctggtgccgatgtaagtgcacactgtgttgaaggccatcaaacatgcttgtactttgtttccacttacgatcaaaggcctcctgatgccaaagtgtgagcggatggggcattggattatgcccttcacatcctctctctcactcaaatcatttttgacataaaaccattgattcatccatgagcccagccattttttccagaacgttggcataggacaccttacatcagac

SEQ ID NO: 114334 - DNA, 445 bp, Zea Mays
aaggtccaatgaagcgaggggataactttcctttaactttaaatcttctcataccccggatcggtgacaccttcagatacacgtgatcaccctccttaaactccagtagtcttctcctattatcagcatagctcttttgccttgattgtgcaattctcaaattctctattatcattcgcaattgttcttttgcctcttgaataagctcaggcccaaagaactgtctttctccagtctgatcccaatatagtggagtcctgcacttcctgccatatagagcctcaaatggtgacatcttcagactagcctagtacctattattatatgagaactctgcatatggtaagctcttatcccaacttccaccatgtttaagggcacatgctcttaacatatcctccaatacttggttagtcctctctgtctacccatcagtttggggatg

SEQ ID NO: 114335 - DNA, 602 bp, Zea Mays
cagctgctgctgaagagaatcctgcatgtcctgtattgtctgaaacatcgagagcatcctctcggacaactgctgatgggctgctgcctgacgggtctgctcggctgccaagtgagcctgctactgagtaagtgtctggaggatcgaagcaagagtagggtcaatagtaggaggggcagcaggggtagcacgagaactcccaacctcatgatcatgggagcgtggaggcataggaggcggaggcggaattccaaagtcatcatcatcatcatcaactgctgtgtcctgagctttgaactgatgaagagtagaatcctcggcctgagagtcaaaaactagagccggtgctggcacaggatcctcaggcgtcggacggtaggacccaaagacaaggtgtgaggcctcaagtgtgccctggaaccgcggaggccgaatcagctgagcaaaaatgtgacatagatagtgagcatatggcaactgacgatgtgcacgcagaccatccaaaacggtgtcctcgatctcacaaataaggaaatccacaacatcaaactccgagtgacagaccagggcaccaaggagccagagctggatatgagtggtgg

SEQ ID NO: 114336 - DNA, 466 bp, Zea Mays
gcaccacaccctgtggaactacagagatttcaaacactccgtcgggcatggctgaccattccagccactaccacctccctcgccccgaggagagcctggcgatcctaggtagcctcagtagtaggaaggtgggagggtggagctttcccgcgcgtagatagggaggtcaatgtcatatttggaggccatggagcacaagaaagcataaggcaacaaaagcttaatgatcggcaggtcctagtggccacgaacagtgctccagctccttaccgatggtcgaagcacgcgataactttcagccgagccgatcaatggctaaacttcgatcaccccgaaaaatatccgctactcgttgatcatgtgatccgagaaagctgggtgaagaaggtactggtggatggtggtagcatcatcaacgttaccttcccccggatgctccaggccctgggggtcgccatcgataacc

SEQ ID NO: 114337 - DNA, 697 bp, Zea Mays
agcaaatgtctcaccgaaattcaatccctctattttagtatacccttgtgacactaatcttgccttgtttcttactaataatccatcttcattgtgcttgttgcgaaacacccatttggtaccaataatattgtggttcatgggtctctcaacaagctcccaaacttcatttcgagtgaaattatttaattcttcatgcattgcattcacccaatcaacatcaagtagagcttcatctacacggttaggttccatacaagatacaaaagagaaatgttcacaaaatgaagctatacgagagcgagtttgaacacccttactaatgtcacccacaatttgatcaactgggtgatccttcacaatagaatgatggattcttgataccatttgagaattactagttgaagcatgaggagggaccaaatgacttgaagtatcttgatcatgagcatccatactttcatcattttgttggctttggtgattttcatcatttagggttgaagaggatggaatgacaaccacactattttcgtcatcatcttctcttggctttatttcaccaatagccattgttttcatagcatttctcaattgagctccaccaacatcatcaagattatcgttttcatcttgagacccatttgtttcatcaaactcaacatcatatgcttcttcaataataccatgagtcttg

SEQ ID NO: 114338 - DNA, 349 bp, Zea Mays
ccctgcgtcgtcgtctaagctaggccattctaatctatctactgctaatctacatgcagaccgaggatctcatctctggcgaccttggtagctagctgcttcccccggccggccctctgtacatcgtctcgtgtaaatttggcatgtgaaaatgcaacatatatgcatggggccagggcagcaggtcaagccctagctagacatctgaataggtgtgaggatggaggaggggcgcacggtcttcaactgaaggtaaacgaagaaaaggcagctctgggggcatgcatgcatgctacaatcgtctagggacaaggggccggggttccacttcaacgtagtgtgtgtcgtg

SEQ ID NO: 114339 - DNA, 379 bp, Zea Mays
atttattcattgcctttttgtttcttaaacaacccttttgcactccttttttctaataaatttagtaggggtgtttatccctcctgtttcctaaaaactagaaccatacgcaaagcatgcacatggaattggtccgaataataagatatgtaaatgttgtagccttaattttgtgagttctgagcaagaaccaaaaaattgagcttatactcggattttcaggctagcaatttacatctctatttctgactaggtactcacactatcatacattcggatcaaagtattaagttgcatgcaccgaccagttcaacccaaatgctaataagacttagaccatagacatggaataaaagcgagcaacaagtattttatttta

SEQ ID NO: 114340 - DNA, 440 bp, Zea Mays
ggaaattaaaaagaccagcgtacttcataaaactgaaatgcaattgcgcattttcaatggctcttgatgacacttaacttacttcatatatcctcgtgctgccagcctaaacatgacttgtgagatcagcgcttacttaccttttttctacctcgctccatcttttccttcttacctctacatcgtcttttataattactcttcttcctctccatccatctatggccggcaaaaacttatacaaaaactaggggctttatggccctggatccgcccccgtgtgagaatgtggcactgcaattctatgtgtgacacaacatgggcctagaggtcaactagagccaagaggatataatcttgggatgagaattccagtatggcgcatggcatgtcactaccggaatccggctctttatcgagtgtccactcggcaaaaaact

SEQ ID NO: 114341 - DNA, 670 bp, Zea Mays
agcaatagtaatctattctccaatgggcaagtttgtcactagatcactttgatggcatcattacagaattacagttgctaagggacccccatgggccatttggcctagaacccaaaacatagttctaccattgccatctctctatgtcttagaggcttggagcaataaacggtgtgtaaaattttaatagttggagctaattttcctgagaaacataacattcatcaacaaggaactataacatatatgatataacaacgagtatatgaagttctgtacgtcttctgctaatttgcaccaaagataaactgctaatctgtttaccctatcacactgattgctattgatttaataatatacacagtatcttcattttctggtaatagatcctgtgtgaccaatctaaaagttaatctaataataacaaactcaccaaatcttaactgccagtggccattaacatcaaagcattatggagcgaagatctggtttctataaaatcctaaagcacacactgtttccaatctaaaagtgaatctaataataagaagctcagcaaatcttaactgccagttgccagcaacatcaaagcaatatgaagcgaagatctggtttctataaaatcctaaagcgcacattgtttccagacgaagtgcaattgtaatatcat

SEQ ID NO: 114342 - DNA, 1235 bp, Zea Mays
ctcgcaataggcacaacataattacatagcgcaatcacaaataaacaacaagcgaagggctcaacggcaccatcgcacaatagggcacatcacagtattcaccctcgcaactctattgcgaagagggggagggcaacgttttcactcaatatcacaacagagcagcgagggcaacaaaaatgtcacataggctcctccttcggaataagacccacctcccgaaaattgaacaacatcatcctcaactcttccccctcaaacaggtcccgcaagtccccctctccaatgcacatcccagacgtcgatgaaagtaactcgcgctgagcaccccgatccaatcgcagaccaccccgaagacgagacctttccatacccattcagcgacgtcttctcccacttcgtgacgactcaacgatgctctgtttcaacacacccattcttcgcctccgtgagtcttcagctctcgcatcagccttggttgccagcgccttgcgagggacagatcgtgacggagactctgacgcagccaaatccaacgcagcaaaataatctaggtcatccttagaggattcctcaacccgcgagaaaggactcccaaattactcttcacctccgtgagtctttgtgaacttattatattgtgaactattaatttgtgatctttgatgtattgcacttttttattgagatatttttatattgatatgtgttggggcgaaggcgaacatgccccctcgctcgaagatacccattcgacgacatcttctcccacttcgtgatgactcaacgatgcaatgtttcaacacacccattcttcgcctccgtgagtctttagctctcacatcagctaaggtcgccagcgccttgcgagggacagatcgcgacgaagactctgacgcagccaaatatagcgcagcaaaataatctaggtcatccttagaggattcctcaacccacgagaaaagactcccaaattactcttcattcgaagaccacgacccaagctcagacgcctcagacacatttccaccaagaaacgttgcatttgcagccatcgaaacatcattaatatcaacatcatcagggtttgcttgcgcaggcccggacgtcgaaacctacgcagcaaccgaccttcagtatcgcaaaaagtaaaaccaccaaccctaagcccctagcgcatctcttcaacctgcgcaggagcagacaccgccgcatggtcttcgccggagccatcc

SEQ ID NO: 114343 - DNA, 469 bp, Zea Mays
atttggctttcctcttcacgtcaatagcttggaatacaagctctggtggaagtgctgctatatcctttttaacaagagcaacagagccttgagcagtagaagccactgaactagcaccaggagcaccacctgatgcggccgatgattccacattattcataataactttcacttgtgcacgaccaacatcaaactctatagagggaaaacataatgcactagcttaggattaaaaccttgagcagtggcaacatagagcactagttgaagagcagcaagccacaatagcaaccatccactagatgcagagcatcaagctagcaatagcaaccatccattacatgattacagagaagggggagaagtgggggaacaggaggaaccttgagatgacaagctcatctagtcaattgtgcatgtctgctggagcttggagatgcagatagtctaccacatgttcacagccgcc

SEQ ID NO: 114344 - DNA, 293 bp, Zea Mays
cgtgaatcttgtattctaattaatgtacagaatattcttagtggtatagaagggttttaattatttgtatacctttatttacttcattttgtgtagtatccttactatctttctccaaatctcaatttccaactttaggtttaatgcatgtttcgaccttactatatttctttatcattattaccactgtatacaaatgcacaaaccaaaagagaaaccagcatgatgcatgattttaatggcatatattctttttattaattatttgcttttgaatatggtgttcacatggg

SEQ ID NO: 114345 - DNA, 528 bp, Zea Mays
ggtagtaggaagaaatcatgaaacatttttcaccgtcagaattagatcgagcgaccaagaaaaaagaagacatggcattgcgaggtatcagctttgctttctcctttaatatatagaaatataaattggtgagttctatattgatgtactaccaaattttagaaatatatttctctttttcagtacaattattgttggatgtaaagaaaacattgagaaatctttatatgcgacacaattttttttcacagatttattgggttcaattgtgctctacatttcaaagctgagctgtgatgattggttgctaaacaaagtaggttgagatcttataaacagttataattaaattctttgctatgtgatatataaaagtcgtagcaacgtacgagcacttaactagtggacaataacgcttatgtagacatttgttttgcagccctcgcctttataaatcataaatggatctggaggaaaataacacttcgtgtacaccatttggagacctgataaacaccaccaatgaag

SEQ ID NO: 114346 - DNA, 614 bp, Zea Mays
ggcgaatttttctgcaatccaccctgttggacatcaggttacctgggaggaattcaagctcgcattccaggagcattaagttccggagggagtgctgcaaatgaaattagaagagtttatccggctgaaacaagggggagatacggtgatgcagtatctcattaaattcaaccacctctcccagtatgccattgaccaggtggatacagacctaaagaagaagaactgttttatgaggggacttaatgacaggctccagcgaaaaatggcaacatgtctggaccttacctacaacagggttgtcagtacagcactgtagttgaagctaaaaaagcaggacacggaaaatcaaagggatatgcgggtgagagatcaaatcaaggacatgaaaagagaacaaggttggtaatccgaccttttaatcaaaatcgttcttcgccttgcccaccttcatatccattcaagcagcctgtctttattcgtcccactactgcccccactcctaacaatcagcggagtgcccctggtactcgtttccctgcccttcctagttcttccaatgggtgcttcaactatggaaagtccgaacatttcatcatggactgcccatatct

SEQ ID NO: 114347 - DNA, 383 bp, Zea Mays
aaagaatcaaggctagtcatttgaaggtagcgggtaccttacatcctcttcccataccatcttggaaatgggaggacctcagcatggatttttattgtgggtttgcccaacacctcccggcaccacgactccatttgggtcattgtggataggctaaccaaaacatatcatttcttgccagtacataccacccacagggcagaaaagtatgcagaaaactatattgaccaaatagtgcgtttgcatggaataccaaggactatcgtgtcagacagaggagcaccgttcgtagcacgtttctgggagcagctgcaagagtcacttggaaccatgtgataagaagctcagcataccatcctcaaactaacggccagacggaaaga

SEQ ID NO: 114348 - DNA, 568 bp, Zea Mays
agcataggtgttttacaaagtgcttaatctacatagaccactgataatcatatttgctttaggcctagagttagtgaggtttgtatactcttgcttataaggtgcttgtgagcactattattgtactcaaaggggcttgttgtattgtgagaccacataaactatgtttttggtgtccgaccaccatttgcaaaagggaacgaggcctaccatggtttttgccagaagctcattaataaagatgatagggagcagtcaagtagagagtgggacatagtccctaagcacctcactaggaagtacgaatactttgtccaattaggattctccatatgtaatcctactaggactcctacattgtaccggactaaaagacttgcctcctagactatataaaggaaggctaaacatcctagatcggcaaccacaacaacccaaaccccaagcgtgaggtgcaatatactatccacccctaatagaatgttgggtactatgctactccggtggcccaaacatgtataaatttgtcttgtgtaacttgaattaactttcaagctctagactgatg

SEQ ID NO: 114349 - DNA, 1555 bp, Zea Mays
gacgaggctcgcaagttgtttgacgaaatgcccgcaaaggatgttgttgcgtggactgccatgctgtctgggtactgccaggttggccgggttgatgaggcgcgcactctatttgatgaaatgccaaagaggaatgttgtgtcgtggacagctatggtctctggctacgctcagaatgggcaggtgaaccttgcccggaagctgttcgaggtgatgcctgagcgaaatgaggtgtcgtggactgcaatgctatttgggtatatacaggctggccgcatagaggatgctgaggagctgtttaatgcaatgccagatcacccattggctgcctgcaatgggatgattgttgggtttgggcagcaggggatggtggatgctgccaagtcagtctttgacaggatgtgtgagagagatgatggaacatggagtgcaatcatcaaagcatatgaacagaatgaattcttgatggaggcactgtctacctttcgtgagatgttgcacattggaatccgtccaaactacccatcagtcatcagcatcctcaccgtatgcgcagcactggctgttcttgattatgggagggaagtgcatggtgcaatgctgaggcgctcctttgatatggacatctatgccgtgtcagcattaatcacaatgtacatcaaatgtggcaatttggataaggccaaaagggtctttcacatgtttgagcccaaagacgttgtgatgtggaactctatgatcactggttatgctcaacatgggttgggagaggaagcactccacatattcgatgacatgaggttggctgggatggtgcctgatggaattacatatattggggcccttacagcatgcagctacacaggaaaagttaaagaaggcagggatatttttaattctatgcgtacaaaatctggcatcaaacctggattagagcattatgcttgtatggttgatttgcttggtcgagctggacttgtggatgaagcactgtatttgataaagaccatgccagttgaaccagatgctgtcatctggggagctctaatgggagcctgtaggatgcacaagaatgctgagattgctgagatttctgctaagaagcttttagagctagagcctggaaatgctggaccatatgtcttgctctctcacatttatacatcctctggaagatgggaagatgcttctaatatgcggaaattcattagctcaagacatttgaacaaatcactcggctgtagttggatagaatacgacaagagggtgcatctcttcaaatcgggtgatgttttagcacatcaagagcatgctagtatccttaaaatgctggagaagttagatgggttgttgatggaatctggatactcagctgatggaagttttgtgcttcatgatatagatgatgagcaaaaaacgcatagcctacggtatcacagtgagaggcaggctgtggcatatggactattgaaaatcccagaagaattgcccatccgtgtcatgaaaaatctcagagtctgtggtgattgccactctgcaataaagttgatcgcta

SEQ ID NO: 114350 - DNA, 1401 bp, Zea Mays
accagatagaaaaggtgaaggcgttggtggccaccttgtagaagccgcaggtgaaggcaccattgggcgacactaggatgggggtggttacatcctgggtggagatggaggagcctctagcaaggtagctgtggtcgtatgcagcagaaacagaggataacgatacaaggaaagagacaagtgtggtgagaatgcagaggtctctcatggccatggctgcttggcaaagatgcacagaggaaagatgggtgggtcacttatagcgcatgtgttgatcaagagtgccctggcggttgggtggcatctaatctttgactttctgtggcgtgtacgtgagtaccagttagctgggaatggggacatctatctctgactttctgtaggggacggcaaggccgaatgtagcagacggttgactatgtgatcccagttcaggacgtctttgaaacttgtttctctattgaaagtctaaattcttcagtacccattctgtagccgccatacagaatttgtcaaaatgtttgtttttgcggttcttccataatccatacagtgacattgccgtagtatatctgtcgtttctcgtttcttagccttgcaaacattcttttgtaatcagaaggattcttggcacaatctcagaagttacgatgcatttaatgttgcagacagtttacttcatgcgtgaacatgaacttcagcaaatagccaacatagaccggaatcttttttattggaccttgcttaatcttcctaggtatgacaccgtctactacgtagtatgtgtaccttgaattgacaaaggctagacaaagaatgagcaggtctacagttgtgaccttttactatggccaggattgggacttcaccaatgcctcagtgaccgatgtattgaattcagcctttgctttcaatgttgcagacagttactcccccgcataaacttctctgcatcgagcaattagacaacaaaggcaggaatcttgtttctattgaatattgcataatcttcctaggtatgacattgtctacgtagtatgtctgtgtacctgagttggacaaagtctagacaaagaatgacaggtctacacgcgatcgagtaaaagtgctagtgcaggagataggcattcagcggagtaaaagtggaaggagttggttagttgaagaatgacaggccctttcaagtaaaagtcttcatctaacagcatgttctatggtttgagatacagcggtccttttgctaccccgatcgagtggtatgttgtatctatggatccatggtagtgcagtgcaggagataggcattcactatcgcgcctcatccgtcctcattagccactccttccacttggtgctggtgctgctgccggccggatcactttcttcatcaattgtacatcc

SEQ ID NO: 114351 - DNA, 396 bp, Zea Mays
gatcatgatacatcttagtgcttccgggatgaatagaatagcgactaagatgtgcttcatctaaaatttgctggcgaatctcatcactcttgggcacaactatgcggttgttaaaccatacaacgccttgatcatcttttctgaaacagttggctttaccgacctccattttctcatgaatgtgtttcataccctcatcatttctttgtgcatcaattattctttgcagaagactgactcaagcttcaagtgatttaaagttccatgttgaatcattcccaggttcaacttctccatttcttggcataatgtaatgtcagaagtcttcatcgtaagacaatgacaggaagccttgcggctgagtgcatctgccactacattagccttgcctgggtg

SEQ ID NO: 114352 - DNA, 298 bp, Zea Mays
taagaggcgaaaggttataatccacaattacatgacatcaaacataacccgacccatcaacagtttaaggccaaatccttctaagccctgatgccccagctaagcaccacagccccacatcctccttcatgcacgtgaggatgttgtggtcgcaagacgagccccctcgaagacacaggcattgtgatgcttccacaaccactaggcaactaatgcaatcaccgaatttagacctctaaactcctttggaactttaggaacagtcaaactccaccattcttggaaaactagagattcg

SEQ ID NO: 114353 - DNA, 594 bp, Zea Mays
gtagattgtagagtgggctggagttattggacatgatgatcacatttggggtagtgaggtcctttatagaaacacataaggggtcaaactccatcgaacacaaattgccagtagtgaagcggtggacaaaaagggttctgaatgatatcaggggtgagaaggatgttgttgatgtagactggcctgggaagaactgagccaccagctgaggtgcggggaaggaggggtagagttggatgatggcctcgatgtgctcaaacttcttgtttaggcctcagagaatgttgaagatgagtatctggtagttgatggaggcgttcaagttagccatggagttgtccatccccttcatcttgcagtagtagtcgttgacgaggaggtcaccgtaaatggtgcgaaaggtagcgttgagctagaaggtgtgtctcacaagtcccgagaaattgattatcgagagcgagtcagagctggcacgccatgtcgttgcgctccttggctatccgacatagctgggagatggtgtcggagatcctgcaaatgatgatgttgttaatccgattccagcatgaattggtgtctcaccaagggtcaggc

SEQ ID NO: 114354 - DNA, 285 bp, Zea Mays
cgagtgatgacatggcctaccagcttttttaggaatagcagctgagtgatgacatggcacgccagtgtttgagaaataaccaccgggtgatgactgggcgctttttggaaacagtatctggcctgggaaaaccctatatgtactgcattgttgcgcgcctctgctttccgtgccctagttcttgattttctgcatccaagccttccttgtgctcgtgcgatactgcttccgttccgctcgccagcaagattgagatggcgcccaagcggaaagcatcaagttcat

SEQ ID NO: 114355 - DNA, 488 bp, Zea Mays
acaaaaaggtttggcctatcatcaaaatggattttatgtcagccttgaagaaagtttggcagggggatgcttctagattatatctgctcaactcagcctatgttactttgttgccaaagaagagtgaggccattgaggtgaaggatttcaggccaataagcctaattcatagttttgcaaaaattgttaccaagattttggctaatagacttgcacccaagctcttggacttggtctctgtgaatcaaagtgcgtttgtgaaaggtagaagtatacatgataattttgtcatggtacaacaaacagccaaggccatttatgggcaaaaagtttctagagtcttgttgaagttggacattggaaaggcttttgactctatctcttggaccttccgttttgagatttttagacatttgggttttggtcctctgtggtgtggaataatctcaagggtcctgagttcatccacaactagggtcttggttaat

SEQ ID NO: 114356 - DNA, 312 bp, Zea Mays
cgaggctggataccagtataccaaagaaaaaattggtggcccgacccctaggaggtagtctctacagtttgagactacctacctctggactgggacctagacctgcacacagcttcggctttgaagttttaggagcacacccgtaggacccaccatctggtatctttcatcctttgattcatgcaacaggacctacaggatttgaccttggaagccaagccgtatgcccgaacccacaggatcacagttccaaatactagggtacccgttgcagagtggtggagcgtgcaggcttagggtacggaatcatgc

SEQ ID NO: 114357 - DNA, 620 bp, Zea Mays
gtcggaggccgcctcctttttcagcgacatcgtctaccattttggggtgcccaagtctgactccatcatcattgacaatggaacccagtttatcggagagccgtccctacagttttgcgatgatttcaacatccgtgtcgacaaggccgcggtggcgcacccggaagccaatggatagggcgagcgagcaaatagcctaatcctacagagcctcaaaccgcggattttcgacaagctgaaaaaatccaccggacggtggccgacctagctaccagcggtactctagagccatcggaccacatcgtccagagcgttaggctgcacgcctttcttcctggcatttggcacggaagccatgttaacatcaaagatagaatatggttccccgaggaccgaggcttaccatgacgcgcgagcgaccactgacgcacacctcgcagtcgacctactcgatagagaacacaactcagtcgtggtttgctccgccaagtatcaacaagacctgcgacgctaccatgaccgataggtgcacgctagatcgttcaacgttggagacctagtgcaataaagggtgatgaccaccaaggacaaacataagctctcgcctccatgggagaggc

SEQ ID NO: 114358 - DNA, 556 bp, Zea Mays
ccaaggtagggacaggtgtcggtgctggcgtgtgtgcaggcaccagaattggagctagtgctggcgtaggggtaggtgtcggagccaagataggggcaagtgttggtgctggcgtgggagcaggcaccggagtcggagctagtgctggcgtaggtgtaggtgccggtgctggtgtaggggcagacgtcggagctagggtaggggtcggggcaggtgtcggagttgaagacggtgtaggtgtcgtagcaggcgttggtgctagtgttggagccggagcacacattggtgctggcgtaggtgcagatgtactgggagccggtgtgggtccttgagccctaccatgagccacaagcacggctgtcacccaaaggagtaggagcgcaggtgaagctatggacttattgggcgccattgctagctagctgcgttggatgatcatgtatgccccaggtatttatagacgtcacctcaccttgggaacgggcgcgcgatcaacatgcatgtcacttgttcgattaatatataatattgcatgcattcctgtacgtgtactaat

SEQ ID NO: 114359 - DNA, 383 bp, Zea Mays
cattcttaattaaaaaaatctttaagacaatcataccaagctctaggggcttgtttaagcctgtagagcgctttgtgaagtagatagacgtggtttggcttccttggatcttcaaagcccggtggttgctccacatagaccctctcttgtagtggtccatttagaaatgcgctcttgacgtccatttggtacaacttgaaatcatggttagtagcataagcaattaatattctaattgactctaaccttgctaccagcgcatatgtttcaccaaaatcaagtccctccacttgagtgtagccttgggcaaccaaccgtgctttgtttcttgtaacaacgccatgttcatcttgtttgttcctaaagacccattttgtcccaat

SEQ ID NO: 114360 - DNA, 508 bp, Zea Mays
cgctgctgggcacagattcaaagacacctgccaagtcgtcgctcgcaaggcattgagggccctgtgtcagatctatgaagaagaagtggccgacacaccgctcagattctttcctccctttcagagagactgtccagtttggatggccaggatgcgtgcattggaagggaagcagctgcttgaggatgaccccacagtcatgtacctcaccgcatacctgctcaccctggatgcccagtatgatttcttggctcggcaccaccgtcagatgattgctcgagtagaagatgtagagaagcgcaaccgttagctccatgtggatctcaccacagctcaagcccgtgcaactgcattggaaagtcatgaagtcattgctgttgaagccctgaagcaagccaaggatgagcacgtccagaagttgatggaggcctacttggtaacccataaccaacgtagagcccagcgaatccaagagccctcttcatccaacccagttcaacctaggaga

SEQ ID NO: 114361 - DNA, 572 bp, Zea Mays
agaaaaacaatcaacgacaacaaaaacactatcgctccccctcttcgtcctaggcaatcccaaaacaaaatccatagaaatatccacccacggaactgaaggaataggaagaggcatatacaaaccatatgggttcaatcgggacttagctttttgacacgtcgtgcatcttgctacaaagcgctcaacatcacgccgcattcgaggccaaaagaagtgtgtggacagcacaacctccgtcttcttggcaccaaagtgacccatcaaaccaccaccatgcgcttcctgcaacaacaaaagacgaaccgaaccaactggaatgcataggcggttagctctaaacaagtatccatcatttagtgcaaatttattccatgtatggccctctttacaatttaatgcaacctcttttaaaatcatcatcaaaagcatattgtcccttaattgtttcaagtccaaaaatacgacaatcaagttgagacaacatagcatagcgtctagacaaagcatcggcaatcacattatcattcccctttttatatttaatgatataaggaaaaatttcaagaaat

SEQ ID NO: 114362 - DNA, 454 bp, Zea Mays
atccaacaagacgacgcacaaggcttagggggagaattgttggagataagtcttgtgatctgttggaaggacaacaacaatccttggtctttgctgcagtatggacagcagcagttagcacctgctttagaggtggagaacatcggtcctttggtctttgctgcagtgtggagtgtggacaacagttagcatctgcttttggtgtaggaggacagcaacatcagttagcatctgctttagaggtgtaggaggacatcagtccttggtctttgctgcagtatggacatcagcagttagcatctactttagaggtgtaggaggacaatagtccttggtctttgctgcagtatggatgacaacagttagcatctgcttttgtgaaggtgtaggacaacatctagtgtagttgtagtgtagaacatttttggagcatatgctctacactttggcagcc

SEQ ID NO: 114363 - DNA, 743 bp, Zea Mays
ggatgtgtagtcgggaaagaaggtctgcatcatgtcttcctcgagtgaggagtccctaggaggctcatcacccgcagaaaaaccagatgcagaagacgtacgatgaggaggaggaggtggaggaggagggtggtgatggtaaccagagccagaaggccacgggtcaccaggaatgggtccctgacccgggtagggaggaggagaatagtgaccagtgccggatggcctggggtcaccgggagttggtccctgacccgaatagggaggaggaggatgaggaggatctgaggtgtagtaggggtcatcaaactcctcggcctcatcctccggggtaatgaatggcacaccaaactcctgttggtgcccctcattaaggtccatgggggaagataggggttggatgtggaggggacccgggagggagaggataacctgtctccgctgcataacaaagaaaatcctcattcagccggtcagtcctgcgacgacatacagactcctcgaccgcccgagtgcggcacatggcgaagacgccaagaaggcccttggccagacgaatgaaaagtccccgacctcgaccccgtccctggtccggaccacttcctctcccgctgtggtccatcagacgtgaggcagcggcgacgcgagaggaggatgggtgatgtggaggctgaggaggtggctcatcagaagaagcagggcctccggaccctgaggaagcccgctttgtacgagcagctggg

SEQ ID NO: 114364 - DNA, 1686 bp, Zea Mays
cgctgctcatctctcttcctcctaaagcaaaaagaagttagatgcctatccctctcacaatactcacaatggtacctcacctctctcttgggtggattttgtttgtgggagggggctttctttttggatggctgaggagctctaggaaggggatcactagagatgtcggaaaaggtgtcaagtgtgttcctgagatggttaggttttggaagccacacttatttctgaggaggagctctcactggttcatcaatcacaccatctctcacaggggtgatagatttagcaggggtggttttgataagcttgggagtgggtgaaggtttctctaaaggtgtcaaaccactgcactcaccaaccttcccaaagcgagcgccacttccatccttagcagcaaagcctaaccccgggccgccagttcccctcttgaactgactgaccatcatgctcaactagggctcactacacgacacccaactcaagacagatcgaagatatgtgttttcttcctcaattcttgtcttgtcgtgtctgcaggactcaagggcagattgcaaaccctcacaaagtgcacactgcgtaggtgcaggggcactcattgagctagccttctcaagcgaagataccatagcgtctctctgtgctagctcagactgcaagccaggacaaacggtacacgcacccaacaggatagacctagatcccaactcatcacgctcatctagcaaggtggagtacttggtctgcaaagtggcgatgtttgacatgtgtagagcgcactcatcacattcagtctcgtcggacacgtcaactgaagctctagcagactcaagttccctaagcgtgctctcgtacttggatctaaactctctcctctcatgagcagcctgcctaagcaacttattctgactagccagagcatcgttcagctcttctatctcagcgacgagatcatcggcggaaggtagtaccttagaagtagtgtcatcgccgatgtctttgtcctcgtttgtgccgaccgcatcctcaccaagtgccatggtgcagaagcctcctgcagtgtcggcgatgaagcacaacatgttcaggttgtcctcgacccttctcttagtctcctcatcactcgaggaagatacaacatcgtcggagtcgtggtcgaggtcgctgagggaggcgaggaaggcatgctccttgatctttgccttctgaaggtacttcttattgagcgcctccttgtcaaatcctcccttggacttgtacttgccggtgatggtcacgcgggctagactccgatttttccttcttggggcagctggcaatgaagtgatcgggatcgccacagttatagcatccgtccttggacctgccattgccgctggctcatacggttgttgtggaaccacgtgaaccagctggccacaagtgccagctcctcatccccaaggctctccaccttctcctctataatagacaacaaagaagataatcaaacatagcaggtgaggagttagaagcagaaccacctccagagaccaaggccatggtgggtgcaccagggttctcaatcttggcccgagtctggtggtcaatctctatggacttgagcttgctgaagagctcatgcacggtgagagtctcgtagttgggcgactcgatgatcaccgagacctttacctcccaaaccct

SEQ ID NO: 114365 - DNA, 473 bp, Zea Mays
gtagaattttgcgttgatgccaccttttttgttttgttgtcggttaaagtttgaactagattttataaattaatattagtgaattcccctttctatagacattataaggctaactctaataaaacgctgtgaagggtcgtctaccttatatttatagaagatttagatcttgtttaagaaggctccccaattagctccggttactacgggagccttcccaaatggtgccaaaaaacaactcccaataaaggccacttaaaagttggagccagttttctaagtggctccccagctcagagtcctatctctcttgtgcccctctccgcctcatgcctagacctctcgcgccccacccactgccccacgactgacgtcacctcctagcctagtgtgtccactgccataggcccacgtcagcctctgtctccccgcgtccgacacgcctatagccatgtccttccaccgccttcgcc

SEQ ID NO: 114366 - DNA, 572 bp, Zea Mays
cttttaagaacatggaataactctctatatctagaacatggcaataatatgatgattagtgaaaaagcatgccatgaggaacttacaacaatttaaagcatgtagattgctatggtatagaaatgatgaatatgcaatctaccatatgcgaggaatttcttcaaagaatggtgacttaatttaaaaacatttgaagtgctttctttttctaagtgactacacaagacacataagaaatgatgatttatgatacttaaaagcataattgttaccatcctttgactttccttcaagttgtaggtcttgacttttcggcataggattaattctttatttcctacaacatcaatatcttccttcgagatgatatgagcttaagatatagtaatttgaagaataaccttgggtcactcatggatatagatcattgaggattgatagcttgagttaataagaattgacttgactctctcaagcaccccaaagtttcacatcatctcattctcctgcaaagcttgtcaagcatgttttggtacccatcgcttgatgggtccattatggttagtcaacaa

SEQ ID NO: 114367 - DNA, 423 bp, Zea Mays
gtgacatcccattataggtgtaggatctgatcaggtatttgactctaatcaaaagcttgaaggcacaaacgatggaagcttttcgttctcctccttagcttgtgcattcaataaaagtcgaattgtttgcctgatgccggacattcgacagggacctaaagttcgtttatttggcacgataaaatgcgatggtacgggagatacctgcacctttaaacaaagtgagaatatatggcataatgctcctctttatttacattttagctgacgtacaaatgaatggaattccaaatagtacaatcactatcaatgggttctaaagaaacaactaatggtccgtgtgctttgtttagcctactttcctacctcaacaaacacaaagaagaaagtcaacaaaaccataaaacaaatttaacaatcttt

SEQ ID NO: 114368 - DNA, 316 bp, Zea Mays
gctcttgtaatccaattttcattcctcatcaaaatgattacaaaaagagaactagtgcttgtgttactaatgccatatctcttgagcctacttatcgaaatctacaagaaaataaatgcaagccgcaaacatcaacgagtactcttcacccaaaggaagaaaggtaaaagcaaaggtatgggaactcatcctcttgatcaaaaatagttcccatcaatggttatgtacctcaaatcatcatattctacctatgtgaagaatagattctttattggatgtaaagttgctagatgtgcattcaatcttattctctata

SEQ ID NO: 114369 - DNA, 314 bp, Zea Mays
aagccattcaagtggaggtttaatggggaaatctgaaattcagatttctgaattttcagcctttgaaccaaaaccgagcgcgttcaccttgatctctatctcaaaactctaagctcccattaacaaaaatgtgtctaactaacccctctacctcataccagaagatggcatcgggacggtgccctggacacatcaaacccgggatcttctctctgtgttcggcagtgagacaaacccaacttcacccctccatatctcttgatccagtcagcgaaacctgcaagcctccacacacaaacgataaaggaatgtca

SEQ ID NO: 114370 - DNA, 331 bp, Zea Mays
gtgtaaggccggttttgaccaggttgtggacctggagcggacttgtttgtttttctcttaattcatatgttgggtgagattggatgagtttaaatgctaaataagtcaaaaaatttttatataattttagagtaaaatggaccggaaaccagagatccttcagagcgtgcaacacacggacgaccacacgcactatcatggctagattatagttactgcggctccaaattaaacacatgtatcatgcatgcttaactgcgtgaatactcgttgtaaaatatgacgagcagcgcaaaaaggtttttggctagcgttgcatgctccatcgtca

SEQ ID NO: 114371 - DNA, 312 bp, Zea Mays
aaatatgcaacactaggttccacataagttgattcacatcagctcaccaacatccactcgtccctgaccctgcaccaagtctccaccaccaccatgatgtgcgtagagaaggagaagatcatcattaacaacgacaagcacgagtagtacctgctaggcaagaacaggtcgccacaacttaatgacttcagccccgaggtgtgagattgttaggacaaggctctcaagagcatgtctaacaagctcctcgcctacttcaccgcgctctaggaatttctggctcactagtcagcccaagtccctgcttgagga

SEQ ID NO: 114372 - DNA, 541 bp, Zea Mays
gaagctttgcccccatatcttcttccacacctacgacctatgggtggccgccgttgcgtccaatcgtcattcctctccgtcgctgacaacagccgcttgaaacaacctcaattactgccatccagctctccttcctttttccgcgcatggaagccgaatcttctacttcttgcgtcgctggtagttcttcttcgtggaggtccgacaggcgtcctggttgtgctgctccacgaaggcccatccgaggcatctccgctggcgcatctcgccggactcactcgcattattccaggtgcgtgcgcccgccctcaagcgaccgaccttgtcagtcttcacccggtcgattcccatgtgcaaagcatgattcatcttgacctgtgtaactcatttcccccaacatttggatacatttttttctcccatgtatactgcacggattcattggtcatggagtggcctttagatctggatcggtattttgtgaaagagtgttataaactcaaggagcgtggctgttgtccagaagcatcgtcgttggttt

SEQ ID NO: 114373 - DNA, 476 bp, Zea Mays
caattctttgtctctggtgaacgattggaggcaattgctggtgctttggatgcgtaattatcctacgaagctcacggcgtgctcaatttatagagtccgtgagcggtggcgtccaatttcacgaagatgcgctagcggccggaggggaagaaggttactagcgcgcaagcttagtggctttcactgtggcaagctcctcggtgaccatcgaacatgcaagacgcgattcacagcgacgtggttcgaagcttgagcacgtggtgcacagcggtaagcgaccaacggcggcgaggtctatcccggttgatcggcgagcaagtgggtacggtgaaactcatccgtgattcatactccgccatgattatccccccaccaaagagcacgaatcgcggcgatggtgcagatcacgacgcaaggtcactggcagcgacgggatcagaatctgctgatattttcgttattgtaccattgcgaac

SEQ ID NO: 114374 - DNA, 370 bp, Zea Mays
cttcaagctctactctagggaaaattaccaaggcttcgaaaatgcaaattgaagccaaaacaaaactgaccgaagccgaagttgcaatgagccaggctagtgccgaagctgagccttcagagcctgctaaggagaaaccctcagaaattggagggaaggcagtggaggaagaggctatagaacagactttgcctgaaaaagctgccgctcctactcccgaagcaacttccgaagaccttgattatgttattcgacatgcttcgggaaaaatattatctgaggaagaaatttttgaagctaaacactatgcccgagaactgaagtacccgataggggccttagtgtttaatggtacagaagaagatgattt

SEQ ID NO: 114375 - DNA, 383 bp, Zea Mays
gctcttagtttgtaggcagatcatatagcactctgaccccccctgtgattagcgtccgccttttagaggatttgctgatcatacaaacagttttgtatgtacagatatatgagagaaagtgtgcagaaatatactcaattgagaagcaaagtttttggtctatttcgttttgtctcctctgctctgtctcttcccttgtgactattttgtggtgtgtattctttactgtgatttctttttgttttgcgtgatgcagaccaacaaaacaaaaaacagtatttgacatcagtatgagaaaaatgagtcggccataatattcttgttcaggtgagatgtgcctcaacaataagcacaagatcttgctctccctagctaaaacatgc

SEQ ID NO: 114376 - DNA, 407 bp, Zea Mays
ggaagtacagcaagcttagccgcaaccgagctcgagtggatcagacgccgagattttactgggctgtgcttatctgatggccacggcgcacgaatcatggcaagcaatcgatcaacggcgacgggccaccggcgacgagatctttttggcgctggcagtctgatcatctcgggacactgtaccatgacgagcacccatcagatgaactgacagagcgacttggagcacgatttacttcagattttgtgtggtgaccaggctagctctctgtaccaaagttatatacctataatccatcttcaactttgctacaatgcttaccatcaaatagtcaccgaattccattcaaaatcgagctcaaagttcaccccatcatactactattgaaaattcagtccagggattgc

SEQ ID NO: 114377 - DNA, 616 bp, Zea Mays
tcttttcactcaaacttggttttagtttgcactaacccaattattagaccaagttttcaggatcacctattcgccccccccccccctaggtgctctcagtacctccacaagaactctgatccataccacagatcatccactatggcttgtgtagtgatatgaaaccgagctctgtaaagacttttttaccaaatggagcatgacatacgtgttttattgatatagcggaaaaatacaagactgtccttgtgaaaccataatcagacaaaaacaaagaaaactacaaaatagctaacacttggagggttggattggagcatcgacatcgcaccatacaaacaactccaaaaggttggattcaagcaacacacaaccaaatcactccatgtcaccatagctcaagtatcataaatgcatcaccatcaccaggacaacacccatggagaatcaaccattgtcatgcctgcatcatcattaccaacgatgtcccacaccaagctagccattctcatatagtgttcgatttcgcttgcacctctttacgaagttgccctacaccgagccaacacccgccaagtagggttggccactgtagatcgctgcaagccatcaaaac

SEQ ID NO: 114378 - DNA, 438 bp, Zea Mays
gttgtagtacacaagcatacttcgggcgagggagttatgaagattttagaggagctgacgaactagcttgcatcagctaccccattagcaacaacacagtactcaacctcagcaatgaagcgggagacaatgggctaacgcttgaaggaccaaaccgtgtaggcagagatagaccgccaagtgtccaggcacccgacctatttagcatcggtatagacaaccaactcatgcatggaggagtgccaaagagctcgtagtcaacattaccttaaagatagtaaaggatctgcttgaccagacttatgccagtgcccctaggtacgggtacttgaggcgttacaacgaaactaggcatgtgcggagagggtaggctacggggcccaccttcaaggtaggctaggtcaacaagaccccctgaagggatggagtacatgatcg

SEQ ID NO: 114379 - DNA, 773 bp, Zea Mays
attttggggcgttagcttgctgttgatggtaagtgctatctaaacctgatagacacaaataccccgggttaattcaaccccttcccataccagaggctgcttggcaaatcataagcctggatttcattgaggggcttcccaggtctgctcatgctgacactatcttggtggttgtggacctattttctaaatatgcacacttcttgccattgctgcatccctacacagccttgaaagtggctcaactccttatggattcggtatacaagttgcatgggttgcctcagtcgatagtatcagatcgagataaagtctttactagtaagttttggcaagaactattcaagttgacaagcacaacacttcgcatgagctcttcctatcatcctcaaacgaacggccaaaccgagcgtgtcaatcaatgcttggaaacctttctgcgcagttttgtgcacgcttgtcctacaaaatggtctcattggttgtctctggcagaatattggaataataccagttttcattcatcattggggcgatccatttggggttaacgctgaccgatgcagctccttccttagaccttcagacttggcttgaccagtgtaaactcatggttaagctggttcaacaccaccttcaacgagcacatcagaaaatgaaattccaagcagataagaagaggacagactgagagttccaagttggagacatggtttaccttaaactacaaccatatgtccaatcttcagtggccactagagctaatcacaaac

SEQ ID NO: 114380 - DNA, 541 bp, Zea Mays
gccaccgtataggttgccacggtcgctttggataagctcaccggtgactgctgccttccggccttgtgccacgtgcactggcacctccatcgcgtcgtcgtgacccgctgtaaccttctgtccatcgccgggtagatggccacgataaccggaaactaatcgcgcgctggtaactcctggtccctccggccgccgcgcgtcgtcgcccaaattcacggcgaccgctcgcgggctctataaattgaccgcgccctcagctccgtcaagtaatcaagcagctagcgtacccacctgcacctcaaatcctccatcagagagctctaattttggattctccccaaatcacgtccgaactccgctcggtttagcctcaccgcggccagctcgattcaggtcagctcataccctctgctccctcatttgagtgttctcatgaacccgtgatgctcatagacctgtccaattggactagaagcccactgaccgtcgggaacgcgttcatctgtccgcaatatccatggtcactgcggctagagcaaat

SEQ ID NO: 114381 - DNA, 509 bp, Zea Mays
cgccggatggcgttgcgagcctgtatgcgctgggggatgccttcgtcttgacgatgaaagggccctcccacctgggctccagcttgcccctggactctgtccgagctgttcggacgagtacgaggtccccttcactgaattccctcgggatgactgcgtggtcactccatgcttttgtttgggcttggtatttatttagagcctgtagggcgcagacgcggtctccatcgatgagatccttcgaagtgggttcgtccacgtcggggacagctgacgagactgttcgtggggacccatgttttatttctggcggggtcatggcctccgatccatataggaggcggaagggggtgaacccagtcgccctgcactcagtcgtgtttagcgcccagaccgcttcaggtaacaaatcggcccacttgccctttttctcgtcgaggagcatcttcttgacagctgtgaaaattttgccatttgcgcgttccacaactccgttggactgcgggtgg

SEQ ID NO: 114382 - DNA, 284 bp, Zea Mays
gagattcttgttaagggggtaggatttgtaatactcaaaagtgtaataaagagaatagagataatctcaatagtttgtggtctctactaattattgcatgtgatcaacactagttaaaagtggatgaatagaacaatgaacacaaaattaatctgtgcatcatgctgagtttttatttgattgtgcatttgtgcttaaaaaatgtatcattaatagcatatcaatggatccatagaattcaaagtctaacttgaaaataaaaccatgaaaatagaggagagaaa

SEQ ID NO: 114383 - DNA, 438 bp, Zea Mays
gaagcctctaggctacgcgcgtctttgcattcattacggataagacgtgcgcctgtccattccggtgataggcggcgtgcccaatccacgttgtgtgggccgtgcagttactcacacgttaccatagcaaggacaataactcaccattactcgcgtgtttcctatcaatgctgcatgcactacagtcatcatgactcccgctgattattcatgcgttactaaggcggagggaatctgaacggctccgcctatacgcctctatgcacaacaggcgtaccaggctactccgtattctactgcaacaagccatcacccacctgtggacacgactagacgtggcagtagctagtcggagaagcaacacagcgtccagcaaagatctttgtgtgctatcagcattaattattcacataatgtatttcttccattatgctcctg

SEQ ID NO: 114384 - DNA, 453 bp, Zea Mays
cctcccactcatggcctatgagcccctcgggctgcaacgcactcatagcctataaaccccacggactgtggcgaatttatggcccacgcgccccatggcttgcggcacaatcatgacctatcagaactaggcctgagtgcgcagaccgcttacaaggcacaacaagacaaagtcgtgccaaaccctaggctacggaggccaggggtcggtgtagctcaaatgatggcacttaggccccacgctacccatgttgtccgctataaagaataagagacaaccagacgaccccgaggcccacgggtgcacgtggcttcacaacatggtagaatggtcggttttaccatcacccggtgactccttcttgaggaagccatcgctagccgaccccctccttggtcgataaaaggaggagatcgatctccaaacaaaaggaggacaatgagacaagagaag

SEQ ID NO: 114385 - DNA, 366 bp, Zea Mays
cttggcaggtacctgaggtggtgtggtgttgggctgagaagaaggtttgttgttagcacccacatcaaggactaaggaagtatatttgttgaagcccctataagaaggcttgatgttgcgtgtttggctcccatctcggacctcctcctgcaaatgagcaagcacataggaagtatcaagatctctagggcattgaaccaaaacaacagaatgaacatcatctttcaacccatcaacgaatttagtggtataataaaggggatcaacatggggttggttggcgttcaattgacccactagttgggagaactgctccacatagtctacaacactagatacttgatgtatcttgataagttgtctgag

SEQ ID NO: 114386 - DNA, 590 bp, Zea Mays
gctttatatgcaagagagacactagagtatgagacatacttaacaatgtcatgttcataacaatatcgaggatgttttctagcatttactctaggatctatcctttgtgcaaggggtaatcctacatgttcaagggtgggaaaacattaccaggtggggctagagcggagtcagaagagaggtatgggactggagcttcaacttgtttaggttgcggctgctcccccagcttcttagcccgcttttgatagtgtattatagcttgttccccctgtttgtcattcaccgttcatgcaatagaacaattaggttgctcccctgtttctcattcatctttcgtccaatagaacacggaattgacccaacactcgtagcctcaacatcctctatctcctcctaactattaatagttggatcatcatggtccccactacttatttcatcattactcaatatcttcgtagttatccctttctccatttctggtggaatcacacctccaacaatcacctttcctgaagctccactagtctcatcactacctcgaccataatcatcctagccactgtcatcctccccctctctatggt

SEQ ID NO: 114387 - DNA, 405 bp, Zea Mays
ttcaacttatgattttctcggtcttttagctaagataaactgtaatctcggtttttatctaatatgtggataataagttcactttaatattaaatttatttttatgggtatcaaatataattatgtgtcgtcgtatcgtatggatattgtattagtacatacaaattgatgcatgaatttagtctccaactaaaaaaacagctcgtccagagcgactttgaaaaactgaccaaagccgtcatcaaaccggcctcagccggttgttacagatttcaactgaactccctaagaaataaattcaaacaagctccaaaaaatttgatattttgcagagaggttataaatcattggattctctaaatacattggattctatcatctacattcagaaacattgccggctac

SEQ ID NO: 114388 - DNA, 557 bp, Zea Mays
gcataacgtctcgggtagaaagatcatcaccgccgttgagctggacaccaatccggctagccgccgtacctcccccttgttcaccgatcgctcgggtaggatctcaccgccgttgatccctcactgccgtccgccgcgtgtccaaacactttaccacatcgcagctaactatgctacgcacgtccgatgatcgccggaggagcagccacggtaattgccacgttgcgcggccaccagtgactcacccagttcatacctatcgcaatccgcgctcctcctccgattccggtcgacgacctataaactgagcaaggattctgcttcttcaccacatcccgcacctcagtaactgagcaatcggctcaatttcaccggagaactcacgcagcccacaaattccctcctccctgttcttaactccgccgtgaagaactccaccgtggtcagcgctcttcgggttagtaacttcccaatttctccctgctctagcttgtttgtagcctcctattgctctcagtaccgaccaattgaagtttggccaaagcctttcaccggga

SEQ ID NO: 114389 - DNA, 358 bp, Zea Mays
tttgaagcggaagtattgatggtatggattaaagagagatgtggctgcacatgtggctatgtgcgatgtgtgtcaaagagttaaggctgaacacgagagaccagctagactactgcacccacttaagatacccgagtggaagtgggaagagattgatatggatttcattactggattgcctcgcacctcgaaaggatgtgattctatatgggttattatggatagattgaccaaagtggcttatttcattccggtcaagactacttataagtgatctcaattggctgagttatatatggcttggattgtgtctctacacggtataccgaagaagatcgtttcggatagaggatcacag

SEQ ID NO: 114390 - DNA, 750 bp, Zea Mays
atcagtctggggttcatccatgaattatgtcagattttagcatcctctcttggaatgttagggggctaaatcagcaggcacgccgcgatgcggtgcgtgaattgatctctgccacgacctgccaccttgtctgtttgcaagagactaaattattaacaatcgataggttcacagcagatgctctaggagggccaaaactcaacaatttcagattcaagcctgctgaatgaaatagtggaacccagggaggtatccttttgctttgggatagtgacgtcttagacctgtctaatgtaactgttggggagttccacttatctgcaagtgtgacacttaaggatcgccgagcctccttctccctaacagtcgtctatgggccaacctgtagaagtcgcaagcctgccttccttagagagatgaacaattagagacctcatttgttttccccatggctgatccttggggatttcaattgcacatacaaagctagtgacaaaaataattctagaataaatcatcgccttatgcagttgtttagacaagctctcgataattgcgacctaaaggaaattcctctgcaaaataggaaattcacttggagcaatgagaggtgacaccccactttggtcaggcttgataggttcttttgcaatccagagtgggagaagttttttgacaactatgggctgcaagctctttcatcttcagtctctgaccactgcccgctgcttctatctaataatgctaggc

SEQ ID NO: 114391 - DNA, 379 bp, Zea Mays
cgaatatgtgcacaagttcacggaattagcccggtacgcgccagatgacgtcagtaccgaagtcaagaagatggcccgcttcctgaagggactcaggccagaactcaagaccatcctggccagccaagacttcctctgtttctctcacctctccaacaaagccatgcaagtggaaagggcaaaagaggaagaaaaaggccatctcaagaggaaattccaagtcctccgggctcagcagcaagatcggcaccagaaaactcgatcctttggatttccacccaagggacaagcttcagtagaccagctggacccaccccgtcacggttcagtcagcagagtcagagctcctttcatgccccctcagttgcaagcaaccaac

SEQ ID NO: 114392 - DNA, 446 bp, Zea Mays
gtcaaccttataatggccgaagactggcgggctccaataacactatacctccaaggccattaccatccatccgatcgcaatgaggccaaaaggcttcaacacaggagcaaagacttcacaatcattgacgaccagctttacaaaaagggaatcagacagcctatgttgaaatgcataactgaaaccgaaggcttagagcttctccgcgaagtccacaacggaacttgcagatcacactcaggaccgagagccctcacagccaaagtaattcgtcagggattctattggcccgcaatcatatgtacggccaaccgagtcactagatcatgcgaagcatgccggaaattctctccccgaacaggtgcccctttgcaacttaccgagcttatcgcccacacctggccgcttcagcggtgggggctcgacattgtcggaccactacccac

SEQ ID NO: 114393 - DNA, 376 bp, Zea Mays
aacacagtctgtgaattgtttttggaaatacagttctcagagcaattggcattgcaagatcttgatctgcaattgctcacaaactattattttattttcacaataaattatttgacttttttgcataacaaattcacataccacatacctgttagcataactctcagaccctcgcatcccatacatgttttgaatgaattgaaagcccattcaaaagtctgaactgtttcatctcccaacaaaacaaatccaaacactgtacactgtagatggttgttagcttcaataaacatgccaagtggtttatcatatatatttgtcttgtgtgttgtatcaaatgtcacagcatcaccataatatgcatattccccctgca

SEQ ID NO: 114394 - DNA, 312 bp, Zea Mays
aggaggcggactcgagctaacacaaggaagagtggcgccgaccgctgctcccctcgccaggcaaagcccgatgctgccgcatatcttgcgacacatagcgtggaccaccggggaaacccgatatcgacctctagagtgcaatgcgcctcatcattaactgcagacaagacgtatacctgcccactccagcgaagagcgctacgaccgaagcacacggactgcacagtggcttgcgcgttaccgaggcgggacctttgactctctgcaccgtgtgggctgctgccatcatgcccccactatagcgcgcgaggt

SEQ ID NO: 114395 - DNA, 409 bp, Zea Mays
agagagatgcacaaggcactagacatatcgggtgtgccactagatacccaacgggactaggtactcagagaagttgcacaacatccagaatagggctataacacattagatgtgtctagtgcaacactagctagagcattagatgtccttacacgaatggttggcaatgactagtttcaacatctagctgatggacaagcacccagatgtttggtgcttgcagcaaagtgtccagagagtacacggaaactttgcatgacttccaagggctaatttggacttggggcctatatatacccgcccaaatggcaatttgagatgtgtggtagctaagaaacattggtagagactttagattcaattcctatagctctagacacccaaatgctcaaagatcactcaaagatta

SEQ ID NO: 114396 - DNA, 413 bp, Zea Mays
tggagaaggtcagttcaagaaataacggaagcattgttaccatagaaaggaagttgtctgttgggatcaatcggagggatgtctggcatggcagcaccctgttttctcttcctgggcgccatcgcgatcatgcaggcaaaaagctcaagaacagcgcgacaaagagtgggagttcgagaggctagaatgcagcggaggagaaacaaagttagggttcatgcaccaagaaaccgttgacgaagatataagcgagcgcattaagtcaagcgcaacgtgacaggctggtagctcggacttgttttcggcataacaagagtagaatgggtcggacaatgtatccggtcgagtacacttgagtgttttcgaaagctaaagttgtcaatcgagttcactggaatcaattcgtcaagcaa

SEQ ID NO: 114397 - DNA, 478 bp, Zea Mays
tcattttgaatgtttctgggtttgggaggcacattaccactgttctgaactaactatttgagaagtttactactccctccgtttgtttttcttctacatattgcacatggtgatctacgtatttccgatgtggtgccactttggcttgggtaactatgcatgcccattcatatggcagtgtgccaagtaaatgcatcagccctcccctcgtctgtttgcatgccttggccaatagtagagagaacaagttgctgactagatgcatatatactgatgtcgtgcatgcatactctgaggaaaaagtactcggagcagttgcgaaccgatagagggagtaattacaacgatggtctcagtaaaatgatacaataagtagatcaaaaacgaatggtgggagtacaactgaagtgggctgttggatgaacagaagcatctttctgttatagaaatggaaagcatgatttgctgaataaatcgt

SEQ ID NO: 114398 - DNA, 521 bp, Zea Mays
atacagctagggataaaacttcctgaggtgttctatattccaggagttcccgacttctgtgccgtccatctgagtgagacgatatgatcctggtcgagtgacttctgctactatgaagggtccttcccataagggtgataacttgtgccgtccctcccccgttagaattcggcggaggacgagatctcctactgagaaggatcgctgccgcacgaccttgtcatgatagcgccttagagtatgctggtatcgtgctgattggattactgcattcagtcgttcttcctcgagtacatcaatgtcctccagcctggtggcctcgacttctgctatgctttcgaagatcaaccttggcgctccgaacttgaggtcggctggtaatactgcctctgacccatagaccatgaagaaaggagtgtttccatgtagagctcggctaggctgtgttcttaggctccagacgacatagggcaattcccttatccattttcctgcgaacttttcattcttatcgaagacct

SEQ ID NO: 114399 - DNA, 555 bp, Zea Mays
ctgggatcctcggtcagacatgatcttcttaggtactccgtgcagacaaactattcatgtcatatacaactcggctagcttggcacttgtgtaagtagttatcacaaggatgaagtgagctactttggttagtttgtccacgattacccaaatggagtcataaccagcagaagtgcggggtagaccaacgatgaagtccataccaatttcttcccacttccactcaggtatctttagcggatggagtaatccaaatggtctctgatgttcagcttttaccctttggcaaacatcacatactgccacatgtgaggctacatcccttttcagcccataccaccaatacttttgcttcagatcttgatacattttggtgctaccaggatgaatagaataatcagaagtgcgggtagacatctagaaattttctaacaattttgatgtgatctcccacaaatttaccattgatcatgtatacaacaggtgtgttagatgtgggtggtgcaactgtgacttcaaatctttccccatcaggactagaaagctctactgtcc

SEQ ID NO: 114400 - DNA, 402 bp, Zea Mays
ttggcataggtgatcatcttctatttcgggaggatgctgaaatgacccctcatgaaatctgccaactactcttgagtgacggctcctccaaacaatgggacctggctgataagagccgatcaattgacgtatcttgcttgccacttgagcatctcctgcttgctagattttcccttgttcagggaacatgctagccactggggatggagttctccctcctagagtggcttgtagcgtagcatgcccacaaaaccctctgaaattcatgttagaggttgatcatagatggaagggctttcttgtggaatctccgggcaataaacaaggtactccaccttggtgttgtcaggtacattgaataatgtcagcaccatcgatgaggtgtagaattgcttatcttcc

SEQ ID NO: 114401 - DNA, 506 bp, Zea Mays
aggagatgcactagtataaatcttgtatatcccatgcctttacctttagatcttgtatcacatgcataatcgcaacagattcactaaacactatcaagaaatcctcgatagttggtgtgctaggtaggggaagcactagtcataatagatttgatggcatccaccaatgaagcataaggagatcaaggtgatgatcaaggcttgaaggcgtcgggccatatcatgacaatgacaactcggaacctgatgagattaagccaagatcgaactaaagaaaaccaagacccaaggatctccactaggaacgaagtctcacctcaaccccaacttgggctcgatgacaccatggagtcggacctagaatacgacatcagctttgacctaagtttagattccaattttgactctaatgatattttagcaaaaccctcagaacctatcacaaacccatgtggtggcgtgctataagccgatgcagtaactcaacattcgaaagcataatacaa

SEQ ID NO: 114402 - DNA, 621 bp, Zea Mays
tgacattaagattaagagctagcacaacattttgatttccaatataagattagttaaggatgatttccaattcctcctagcttcatcatactaccagagtgtacaagtgtaataatccttaacagagatcttttgaaccttatagatttcagagcatgatatccaaataatctttctgatccaagagtatttctttgagcacaattttgggagaaagacttgagcaggactttagggcagctagaatagagcatcacattgtttgcatatagcagatgacaccatactttattctctttataaggaggcaaaacacaataggtgcgaaagattatccaaatttattcatatattacttagcactattacaaatccttaaaggggcaacatttttttcttcgtgacacatactccttctagctaaatgatatattattcttccttgtcagatgtaccaatctgagctggaggttgattgtcttcaactactattctttctccagacggggtttccaaacacatggttctctcagtatgttggattactgccttagttctttgtaaccaattatttccaagaatcacatcctttcccattgattctatcactataagatcagc

SEQ ID NO: 114403 - DNA, 966 bp, Zea Mays
gccagatcaactaaatctaactcgtaatcactagagaagaagtgttcatgaaacttatgctataaatcatcccaagaattaatcgagttaggaggtaacacatcataccaagcgaacacagtgccagtaagggatagtgagaataggcgaacacgaaaagcttctgtgtcgtccaattcccccaattgtgctagaaattggcctacgtgttcgtgagtgcctttattgccttcgcttgagaatttggagaaatctgacatactagtccccggaggatatggaacggtgtcccattgagggtcgtatggcctctgatgggactatcctaggccggatacactgacacctaatttatcccgaaattgttcgactatttcttctcgaacttcatccatagcgatcgatggtaacccatcggtcctcgggacatggggctcatgtggtcggttatcctgatgcgggccttctgcactaggacgatcaaaggtgacgttcggtataggcccctgaggcatacctgtttcataccccattgtcgtttggtatgaggtgaacctttctggctccctagggatcgaaaaatattcaacctcatgcatgggtgatggcatgctatgactacgatgtgctgtaggtggggtgtagtgtcgctgaggtgagtaggaaaattgttcctgacgtgcaacactctgtcctgtgtagatgtactcggaccgtccgacctgggtggccagacgatccgcgaagggactagacgacccagtactgtacccggactgtccagttgtgctggcatctcatgcgagccatgtggcgggctcggtgtggctctgaactgcccgacgtaaggtgctgaaaggtctgctatgaaatcggactgtccgaggttatatctggactgaccgacagtatttggcaccgcatgtgtgccacatggcgggctcgcgttgcactggacagtccgac

SEQ ID NO: 114404 - DNA, 605 bp, Zea Mays
tatgaattaattgatcctagtagtattgttaccttcaggaacttttaacccatcctgtctctcaagtgcatcagcaaggatagtgacatcatgtgcagacccctcccacccagctagtacatatgtgaacttcaaatcaaaatcaactgcagctaatacattctgtgtaggataatgcttcctccccctgaatgcagattgcatgctctctggaacactagcataaatgtgagttccatctattgccctaatgcagtcctatgtgttaacaaataaggtgagatcattgtatcatgaatgcatgtctatgtgttaacagaatcctaagaaattaccttaaaatatgggtaccatcttggactgtttctgattttaagtggggtttcaccagtgggtgccttaatcatgtcatcccttaattcaccaatggcatacaaaacttctttaaaatacctgctaactgtctccgcagacctcctccaactttggtgtatgaccctaaaacgctggttgtggccaactacatgaaggaacatggctacttgttcctccacattgttgtggatactatctctaagcaggttcctactcttaagcaactcata

SEQ ID NO: 114405 - DNA, 336 bp, Zea Mays
ccgaagctactgagactgtttcgatttcggaagcaatgaagcgctccgggctggtaacactggaggacgtccctgccgctgaagcagagcaagctgatgttgaagagaccagttctgaagatgattatagcagcgcggtaccgagcaaacccagccatctggattttggaaaatccacgatctccgaaggtgacctacctaagatgttgaaattgggctattttaatgaagaaaagaaagagctggttcgctttggtggagaggaaactactctgaagccaggaaaagacgaagtagtagtttttaagagtttcttcaaagctggtttgagattcc

SEQ ID NO: 114406 - DNA, 287 bp, Zea Mays
tttttgactcggcattcctttaggaacaacttcagagtctttttcgcctttagtacgtgtttctgtctttgactctgcattcgcttagtaacgacttcggagtgttattacaccttttaaagaagtaagacatctgtgtgatgactatctttacatattctggtccaatacacctgatgacgattggcaaaaacactgttagcatgacgtggcaacgtgggagttgaagttggtcaatgtgcggtctttcatccagaccggacttttgatgttggaagaaaaaccga

SEQ ID NO: 114407 - DNA, 779 bp, Zea Mays
ctctaattattgaaatacatgttcaactcaaatatttggaaaattgtttcaaaggacaatcctcataaaactgaaacgacatgactcataagacgacaatcctcataaaactgaaacgacatgactcataaaccagacacaactaacataatactcaacataagcctctgttgtcggagcagcaacatctaattggactttttaacatctatctcgaatgcatggcgcagccaagcgttccttccttctgcggtcttgagtgaagcaaatatatctctatatttttttctcaatgaacagatgagtggcaaacaaatggaggtcgctaccttctggtgaaccatcatcgatcacttgttgcaactgcgcactaacctcaacacgcacagggtcggtctcagtagaggtgacggacttgttagtggtccttgaacgcgactcaaaagcctccacaaggcgtttcatgtactcttccctcgaatcctttttcctctttggtttaggagaatcatgacgcaccttacgcttcccagtcgcatttgagcaagggtcaggtgtgctgttttcacccccacctaaagtggcttccaaatgatcgtcagatgatgaattagcatcctcgacgcctggaacaagggttctttcatttgtgcagacaatgggtccaaacataatatttagctcgtcctcattctctagggggctgttttgaacataatacaacctggcattgcctgcaccaacatggtagttcctattttcagatggccaatactatt

SEQ ID NO: 114408 - DNA, 354 bp, Zea Mays
tgaatgaaaagcgggaaatggagtatgtgtgtcgattacaccagcctgaacaaggcatgcctgaaggatctgtttcccctcccgcgtatcgactaggtggtcgattcaacatctagttgcaaggccttgagcttcctcgatgcctacttaggctatcaccagatcgcgatgaaggaatacgaccagcctgtgacctgcttcatcacccctttcggctcatactgctatgtgacaatgtccttcggtctgaagaacgtatagccacgtactagtgatgtatgatcaaatgttttagtgatctgatcgaaaggtctgtggaggtgtacgacaacaacatcatggtcaagattcgac

SEQ ID NO: 114409 - DNA, 277 bp, Zea Mays
cacttggtgatcttcccaacgatgacaagcaagttcactttgagatgcctatgagtctaggtgatgcagagataagtgctatgctggacatgttggctgaggattcatctgactcggtccctgttgaaacaatggctgttgcgactatcctagagcctgaaaaaccgtgaacactaaaaagcttgatggtactcgcccgaaacgcctctgccaggctagtcatccaactgcacctgccgaggggaagaaaaagaaaaagagacggcttcggcgagtg

SEQ ID NO: 114410 - DNA, 438 bp, Zea Mays
gtttctttgtcatcgtgcatcgcgctagggaggctcttcccccagcacggtgggttcgtagtcagagatgggcgaagactccagtctcccctgaatgagaggatgtctaggaagaaaggagtaggtgcagtggtgtgcttcttcctgtcctcctttgagggtggaggaatcagggtggtcatccgatgcgcttctctgccccagttcagaatgctcaccttcttctgtcgggtgatctgtgtccactccttagtgggcgaggtggacaacagagttcgtcgagttgggggagaccatggttgactgaccttccaccctctagaggatcctaagccttgcttcgtggttgaccacaccccatcgcgccattagcggggttgctggtgcggttcgtgatttcgccgcagcttcttttggtgatctcaaggaggatctctt

SEQ ID NO: 114411 - DNA, 721 bp, Zea Mays
ggcccaccagtaggtgaccagaattaaagaaaaggggagagaaaggaagtgggccgcgcggatgtgcatttggcccattagggcaacgcagaggggtggagctggaccgaaatccgatttagtttattcttttgccctttttcttttctctttttttttaaaaaaaatacttaaaccaaattcaatttcctgttttgaatttcagattccaaacttcagaaaaaaaaatcccaatataaaaataacacctattatttatttgtttataatatattttagtttattttgtttttttagtgtacactcttttcccatttatttccaaactcaattatacaaacttgcactcctattttaaacttcaatttttttccaatgtacaaatgtgaatatcaaccatattattttaaagattactattttattctccttcttataattgactctaacaatattgactttattacaagtttcttttctcattccctaattcccaaataggggtgaaaacgggacgggattacccggcgggtaccggatacgggtacttaaaatacccggtttttcgggtaccggatacgggtaattttgtaaacgggtcggatacggatactacccggatatgcatcagtcggatacgggtaggatacaggatgaccactatccggcaaatacccgagtagtacgggtaggatacgggtacccggttagcgggtacccg

SEQ ID NO: 114412 - DNA, 682 bp, Zea Mays
agagacactgacagtaattatctttggagcttcttcaattttgctcctagaagcctcgacagaagaagaaggtggcgtcttcacagattctaaaacagcttccaaaacgctcgccatcctccttttacttggagtgcccgtggtacttggcagcttcggcagtattgctgctttcatcttcggcggctctagtactttttctatcattgactctgactctccggccaggtctgcaataattccagtaggcacaacaggagtagcctctgttgccgggttggctgtttccactttttcatttagcttcgacacttcggccgtctcaatgcgcctaggtcggtgcgtcaaaactttaatcttcttcgaccttgacacactagaagatgtcgaggtagcagctttccttttcttcccttgctttcacgtgggatagtagtagtctgggtacacaaacccgataacatcaaacactctgttcaatctcttcttgccccgagcaccgaaggtagttatcataacttcgtctttggccttcgagtacgctccaagcagctcatcgctagttgcctctatagcatctaaccagtcatcattcagtttatcaaactggcttctgtatcgaaaggtatactttagatagactaaaccattttgactagaaccagtggtagcctccttcggc

SEQ ID NO: 114413 - DNA, 467 bp, Zea Mays
gaaaagtgctctctacgagctggttcttcgccgctctggtatggtgaaccgctcacaaccatatacaatcttgagttgggttacccacaagctctccgactgatcaccacactctcaatcgccacctaatcgtttaggtgataccgatcaccaagagtaacaagcataaactctcaattgaccataccaagtctaatgagggtggtggatgcacacaagctattctcagtgcactaatgaggctgctaatcgcgcgattatcaacttccaagttccttattagacaaaggctattcctcactctcaaggggttgcttcaacaattgaaatgggcaagagaacttaatatgcagagttggggtataaatagccccaaggggtgaaactagccgttacaccccatcaacatagttgaagacaccggacatgtccggtgctcaccaactcactgcacctgacatgacggt

SEQ ID NO: 114414 - DNA, 322 bp, Zea Mays
aaaaaagacaaataacatctcacgactcacgtgttcctttgcgtgacctcatgtgaactgggcatgttaatttcttacatatgctcattctccagttcaactctggacgctggatgatagatgcttgttaatgaataatgcaatatttatttggtgctgtttaattaaaatcctgatgtattaattatgctgctgtccttctagtcattgcaaaataaagctgcgaaacaaaacgttgatttattgaacaaagttgaaagtcttataattgagtttaaacatgtaagagacgactatgacagtttactgtcttatattgcaa

SEQ ID NO: 114415 - DNA, 655 bp, Zea Mays
acaaaataaagccatcggacgcatggatatcacatccaagtcacagtcaaaagatatagccccaacaccctacttcctcaaagcaatatcgacagagaagcactgtataatattcagcatcatcgaatcgaaacgcagccattaaacgataaccataatgtcatcgagatcacaaagtgttcatcatccaatatccacagaccaccagcaagtaccccaagggtacaaaggaaaatgtcaaacaactaaacaagatctaaggcataaaagacagcggtcatctgctcgacaaaatattttaaggttctgtaaatcatcatggtgcttgaagaggtcctgcaggctgcatggacgaagcagcacctccatgaatgcctccacaaggggaccccacatctttcaacaaccacattctgcaaggtggtagcattaatttctggaagattccatcaaattccaaaagattttgtactgatggatatatatatataataggtcctaggaaagaattaagataatgcaaatctcccaactcatgagacacatgcaaaaaagatacctccggacctgaggatgaaccaaggtcaaaagaaacattgaggcccttggttctggcattgatccttgcacttctcctcacttgagttggataagg

SEQ ID NO: 114416 - DNA, 554 bp, Zea Mays
atccaatggtaaacaataatctgaataatttttatcatcagtactttccatcagtataggctaatttctatcggcatctgtctcttgcagattaataaacaaaaaacagttgatttatatggacagcgccccaaataactaagagaatgtataagtgttctattgccaactgccaaatgcactatggggacatgggctcccctagctcttagatcattcttgttgttagaagcactctatgatggcgccatgtgtcagcttcgattctctttagaactatgtcatcgacttttgaggcttaaacccggcgaaacatgtgaaaccgtcgctggtgggtttgatactcaaccaccaaatcttcgtagaatcgtaggtagtgtaatccatatgcattccccacatcatggacacatattccgctggtcctcaaccacatcgtcaacacaatccactgtattatgtcctttgcacccgtcgatgttcttaggtgtcagctaccaactagtcaccgacttctccaatctctcgtcaaggtccaacactcgtccttcata

SEQ ID NO: 114417 - DNA, 321 bp, Zea Mays
agactggaattccttccaagactatggctccttctgggagttcccaagccttcttttctcctctgatagagaccgggtgaccttcaagaatctgagggtcttcagctctcctgggttgaactgggttggatggagcgggctcttggatccgtagagctctacgttggttatgggttaccaagtaggcatccatcaacttctgaacatgctcatccttggcttgcttcagggcttcaacagcaatgacttcacgactttccaaggtagttgcacgggcttgagctgtggtgagatccacatggagcttacggttgagcttct

SEQ ID NO: 114418 - DNA, 286 bp, Zea Mays
ccaaaggcctggagtgttctggggaaggtgacgttgatgctgctgctaccatccactagaaccttcttgacctagttttcttggatcacagggtcgacaagcagagggtacttaatagggtgatcaaagttaagccactgatcagcttggctaaacatgatgaaattctctgaccaccgatatggtgtgggggcactgtgggttgccagcaggacatgccggtcggtgagcttctgctgccttttgctctcttgggacccatggcccccgaagatgacattgacct

SEQ ID NO: 114419 - DNA, 481 bp, Zea Mays
aaagattctactttatccttatgaattcatcttgccctaattagcatatttatcctactatagaataacaaccatgagctataatccagtcatatccaacctaatctagattttatctaatctagagtaagttatttagtgttggtacaaaagataaggccatacccctcatgcacttaaaactaaactagggccttaaaccaactcactcacatgcatgaggtctatcccaatcaatagagtcatgatggattgcataatctatcaacccccacctaaaacaaacttttgacctacatcatggagtctatctcatccatatctatcttaaccatatcacccaactccgatgatatacactaacctcaaatcaaagagaccaagaccgaagaataaaagatcgacattgacaaggaaggatataacagtcaagcgaatctcgagatgaatcaagatttaaatatttcggatgaagtcttct

SEQ ID NO: 114420 - DNA, 546 bp, Zea Mays
catttatctaaatggatacaaataaataaaagaaataagtaaaaattatgcatcatgcttgacctttgggtgtgaattcttgtattcaaaattgaatctaagattgaattatgaaaattgaaaactaaaatcagaaaagatcaaaagaaaggagaaaataaaaaggaaaatgcaaaagaataatggaagccagcgtctgggcctatttttcgctgcctcggcccattccccactatctccgcgcggcccattgggctcccactgcgccgctcctacaccgacaggtgggacccgcgctatcagacactgtgtcgcactctggatgcctggggtctccgactcgtggggccggatcgtcagtctcgtcactcacctcacgtgaactccaacggaaacaccgcacatatcggcctgaacagaatcccctcccagctcccgatcggggcggacataactgaatcgaccgatttctgggcacacgattacggggagcgggtcaaatccaggcaatactgcatgcgaatctgtccttggcggcactgactt

SEQ ID NO: 114421 - DNA, 469 bp, Zea Mays
aagcaaagcaccagagtatttgggctagattggacccagcaatgggggtacactgttggcgagcgtatgtaactgaggccatgtgggagttggagacttagcttggggaaggagttggcgctggttgtgtctagacggtgacgtcatgtgtgagtgaatcccttctgttcgtcgagaattctagtaaaactctataacttcgtgagagaaggatagtttcaggggcggggctcgctatcatcaccatctatctctcacaattggtattagattcttgttgcgatcctagcggatccatctgagtatactcttcgcccttaaaatcaggcaagggggcaaaacaaatcgacaacatggagaagagtttagccgatctctctcagctgctgcaatctttacaagtccagaatgattccatcaagcaagccattgaggtaaacatagcatctaagccctagaccgaggacga

SEQ ID NO: 114422 - DNA, 821 bp, Zea Mays
tagcaaaccaacatctcaagcgggggcagagttgccactttgctctccacttcacttcaattatttgcctccacgtcatctcctcccttactcagagcatccatccagcctttctttatttcacagggacacgaacacagtgagggcgtaatggaatcgtaaagcctaactgctctgtggtgcggtactttccctctaatcaaggtcgtcgtccttttagaatttgctggtatagttcaatggcagacaagtactttttcagcaatcgaggtggccgaagccttttggtgaagcctgtcccgtgagatctctggtgaagtctagccaaagccttttcatgcatatacctggccagtcgagcggccagactaaacaaaaaaacaaatcatgcctttgtagatccgagcggccaggttggaaataaagccactaatcacgcctgtgtagacgagtttccctccacacgttattgcttgtctgatgtctgtagtgcgaatgccatatttaccttcgcaattttagccgaggtgggtcccttcctatatttttctctgctctgtttccttgaatgtatggatctctttcctttccaactttctccattgatggaagatggaaatcggcagtgtcctcactggctataaatgtagccacacccccagtttctatctgctctccctcttttcgcgcctccagaatttgtcacctatcacaacttctcagataattgtgttgaatttgtgatctattttacgtttcttgtgatttttattccctgactatgcgagacaccatttttattcccttgactattcgctgga

SEQ ID NO: 114423 - DNA, 658 bp, Zea Mays
gacgaactggcgaacgggttgttgtactggatgcttgacttcataggggaaccgatggcacacttaatttatagggcccgaggggcggtgagcgcctgaattttagcatggcgctgtggcggccggagagaagagagaacactggtggcttagtcgtggcattcaccggtgcaatggctcaaaagattttagttctaagtgtgccatagtttctaccatgcagtaacgagccacgacgtggcataaccgaggtcacctgagtatccacggtgacaacggcggtccggccacgtcgcacggctacaggcgcggtgataagattctgccgcgatcaaatccgtgccccgcgagatctttttacctccccgtgaatatccactgtgtgccaagcacgaatcacggcgaccggggcgaatccgggagcaaggtcaccggcggcgagggggactgaaccctgagatctttctgtggcactgtaccatcagaaccccattcagtcagtctgagagggtcatttgcagggcattaatctctaatttctatgtagcaacttgttaatctctctataacaaagttctagctctataatctagctacaatcttactatagttgccaggctcaaatactcactggatcatgctcaaaatagatctccaa

SEQ ID NO: 114424 - DNA, 372 bp, Zea Mays
gggaattggagctcatatgcaacgacaccaatcttggacataatctggaatgaaccaaagaagtgaaacactaatttctggttggatcatggggccaacgaggactgaatatacggttgtaggcgcacatacaccatgtcacccacgtcaaaggacctctcggatcgatgtttatcagcctgagacttcatatgcaattgagcccgagccaaatgttgtagaataagatcagtcatgaccactttttcttgaagccaatcttccagcataggtacagaagaatcagataacacctcaaactgaatggttttggtgcaaacccatataacacctcgaatggagaaaatcccaaagcctcgtgcttgattgaat

SEQ ID NO: 114425 - DNA, 380 bp, Zea Mays
agataatatcttgaaccatagcaaaagggaatatcatgtatcatgcatcaagaacaatatcattgctcaaacaagctttgcttgtagtcttgtgttattctatgtatattccattacttgaacttcaaatatttagttggcatcttttcgacttgttgaatagaacataaggattgattaaccttttcaacttattgaatagaacatgatgtatttttagtcatgttttatctacctgaatagatacttattttgtctactggttgaattcttaaatgacagttatcacataagagaaattcttgtaaaatgaatcttaagaaacttgaggaattaattgtcagcaatattattagaaaacaaaatggtttgaattacgc

SEQ ID NO: 114426 - DNA, 459 bp, Zea Mays
ctgccaaacacagaacgaagtcattctatccttggaatctagaacataactactccgtcctagtagactatagaaccaaacactacctagtcaaaatatgcagctttatgaaagtgacaattgtatgtatatgattaaacactcaaagttaaggtttcagaaccaataacaataattgttcgatgatagattgatctaaagtaagacatagcctaacacgagtgattttctcaactggaatggattttcaaatttgaaaaacgaaattcgaatttcttggccaaaaatccatgtctaatcagcaaaattcgttgttttttacaaaaaaaatgattcattttgaaacagaatttggcagaatcggagcaaaaaacgttttcctgtctttaccggaattgaaaaaacaccaaaaaatcagtgaattttggtcggaaaatttatccctgggttgagtaactg

SEQ ID NO: 114427 - DNA, 467 bp, Zea Mays
aagaaacctaaatccaagcaacacattgatatatacctgataaaatctaatatatgttagaaaaaatatatacaagaatttataataatttttatagtgaaacaacagcaaaaaagaatataatatgacaaaaaagagcattgctcctactctagttatatgggtaggtcatatgtgaaacactctcgaaaaaataattaacaaatcacgacctttgcagcaataatatgtatcacgacctttacccatgctcctcatgttagttgtttacttacaccgcagcaacaatagtagtgtcttcgtggtatcgatgcgtatagggatgaaccattacgatgctagtgtgctagaaccacacacacagtgagaggaagaagggcagcagtttgggcgcctgtaaccccgaagaggcaatgacgtctaggatgtgttttttgattctacaataaacctcatcgtatatatag

SEQ ID NO: 114428 - DNA, 440 bp, Zea Mays
gcaggttaagttccaattgggagctccccttgagggtcacgacatcagttgccaattacgaatcctagtatccagccccgacgcgtcgaggccatatcccaggggggccaagtaccaaggaagaagttggtaacggtgcacgcagcaaaggaaaagtggtgtgcagataagttgtaatattgcccaataagtagtatctgaagagtatcttgcgaaatcaatggtatattacaacccgttccccagcggaaccctcgttttctccacgcaggcctagctactcatcgccagtaggatcccgctgaaagcgctcggccaccgcgtccacaacgtcctacacgccctcacgagcagcatcttcagtgttggccaccggacctgcgatgactggccccaaggagatagccggatcgtggctccggaagcatgtcaagacatat

SEQ ID NO: 114429 - DNA, 624 bp, Zea Mays
aattctattttctttttgttttctcttttgaattcaaatgcaaatgagccacaaattcaaatacaatcatctcaagcataataaccagtacttcaactgatctgaactggtcagtggtagatcaagttgtcgaaatgttcctacacacaacaggagattgcatatttgggccatgtcatcttgtccaagggggtagcgactaacctggataaggttgaagatgtgtcttcttgacgtcaaccacacaattgcaaggagctctaggggtttttcaagttggcgggtattataagaagatcatcaaacactttgccatcatagccaagccactgactgctcttttgaagaaacactccatttttatttggacagttgaccaagaccatgctttcaacaccttgaaacttgccttgtcaccgacgccagtgttatagttgcccaacgtcaatcttcagttcactatcaagactaatctgtctgcctctaatattggtgcagtattgtgttagaatggacatcctttggcctttgttagtaaggcattgtgaatcaagaaccaaggcatttgaacctacaagaaggaatatctttccattattttggtcatcgatcagtggatgtcat

SEQ ID NO: 114430 - DNA, 846 bp, Zea Mays
tgttgggacattggtggtggcgcctctcccggaagctggtacaaccttggatattcagaggcctgtcagtgttcgcccgaaactcccttgcctagccaatcaacttgattctcctgctgatgagcagaaaaagaaaaagaggcgtcttcggcgagtatctagtttggatcgggatgttggtccttcggttcctgctgctaaggaagtgcctgtgcctgaatttactgacgctgaccccaatgggtgtgatccatctgtcgctgatcccaatgggggtgctatctgtgttgctaatgaaaacgacggggaggaagaagatgaggtccctttgactcggaagaagagtcggcaatatgttgccagtggggaaagtagtggagttccttctcctgccctgtctgccctcattggtctacaagaattgtctctggcgaactttgatcagactcttgaagatatggttctagaggatctgttatcagagccggcggatggtgacgcgatggatgtttgtgctgatgtgttcgacgccgggttggggtcatcccgggcagcgtcccgcgcctcatcgaccttgtagcgcggtcttgagggtcaggaaactgacttgaattgtcttgctcccatggaagtagctgagggaccttcagccttagaggcggctaccgcagagaacttgggcctcgaggatggtgttgacacttatccagcccccgagggtgttgccggggatgattcggctcgggtgggaagcgtaagccgcggcctagcccccgagggtgttgtcggagacgatccggctcaagtggatagcacaaactatgacccagcccccgagggtgttcg

SEQ ID NO: 114431 - DNA, 897 bp, Zea Mays
gttggagagccaggggagtggagcggttccattccagatttagagggtggagcagctgcattccagattctgagagcggagtagaatcgttccattttctgtttggacccaccgcaaagagatagggagaagttgaacggtaggattccaccgttttttggagcgagcttgttccaaatccggtgggaatattcctgatttagagccgttccaccctgaccgctccgtttgctctccaaccaaaagcagaatggatcggctccatcccatctcactcaaccaaatggaccttagaagagcagtagatgaatctaagcggcaaatgtggatggaaatagttcagctagcttcaaccattattttttcagttgaagaggatactatgaatctatgatttggcaattcacttctaatggaatgtacttgtcattctttatataggattattaacttcaactttcagcggtatatataattccagtttacaggtcaggtttatgatccttaaaatccatcctaaagttcatttctttcattgcttcgctttctcaaaatagagttttgactagagataatttagctaaaagaagaaagatagatgatgtttcttgtctcttttgttctgagagaaatcactcatcatctgttttttgtgtgtggtaaccaaacagatatggcttagtatttctcaggcggtgggtactgtttgtgattctgattatgtttcttctggtaatttatggcttagtaaaaagttgttagtggcaaatatgtttacttttgtgcttctgattatgtttctgttggtaatttatggcttagtaaaaagaagttgttagtagcaaatatgtttacttttgtgtttctgattatgtttctattggtaatttatggctt

SEQ ID NO: 114432 - DNA, 314 bp, Zea Mays
gcatgagtttgaagaagatcagatttagtagcaagcatgacaggagctttcagtttaatttgttgctgaatttctgtctcattacttggttccttatgggtacttgcatctctatctttatcagcttgtacaattttagtaagagtcaaaggtagcaaagtaatgtttttatctttatgcctaaaagtgtatgtattactcctaccatggtgacatgcatcagtatcatatttccaaggtctatccaacaaaagagaacaagcttccataggtactacattgcaattcacataatcagaatacataccaatgga

SEQ ID NO: 114433 - DNA, 789 bp, Zea Mays
aataaaaattgggtgtaccttgtcgaatattgatctcttcgatgggcaggtgtgccgagaaagtggtgggtcaagggacgtctctagttgagagatggggctcgttggttcgacaagctctgacctccaaggacgggtcacatcatcgcgacgaacgaaatctgacctatcgagcaagctcgctcatgaggatgacgagcgaggcgggggcaccgggaaggggtggggttgtgtagtgtcgcgacataaggaacgagacatcgaagcggactggatcaggcggtgtcgataagaatgggactgggtcatagtcaaaatgttcctagatcgattggattgagaagcggggtcatgggtcgtgggtcgacactttaaaaggagaagtatacatctatgagacgagaatattatgaatttgatatgttgagtctaatgggccgatgatcttgggtcgattctatgggtcaagggtcgtgttctaaaatttcaataacaacctaacaccagtctaatattatctcattctaccattgaaactttaggctatctctatcagattccatatcttatcctttattttaaactttactctacaaacagtgtcatctacagtcatgcatcccctattttacaccacctgctggagacagtgttatatttatgcaaacagaaaaacttcaaccgacctaaaactttaatttttctatactaacattaaatgaacattagatatataagagagaaaattaagggggacatggcccactttgcccccctctcggtctgccc

SEQ ID NO: 114434 - DNA, 641 bp, Zea Mays
gtttttgttgttgttgttcttgttgtagtagtattactagtagtagcaataggagtagtagtggtttacctatttgctacctctggtgtcaataatgtgctcgagtattaggtgcatctagtttgtacatgatgtgctcaagtattgtgtgcatctagttacaacacatctaggtaataattatcatcttatccccatgtgtggtggttgcagaagatgcaagttgctagtgctgaggaccaccaaagataatctatgggtgatgaacagatagagtgggaggatgtggcttagtagtttcactcagagatgaatcaaagatgagtaagggagtgcaaaaagtggcaatcaaaatgacatactcatggaaatggaggatgaagtgatgctggatgaaaaatgatgtaaataatattccttaactagcgggttacataagggagaaaccaatgaagttccatgagcggatgccatctattaagatcaactgagtgggaaaatctggactagacacatatggaatgggtgggttagcatgagcatttcgaagccttgcttatgtggtctagtgtaaaaacatccaattgcaaactatactttcataccatcatcctactagattagcctctatttgcatcaat

SEQ ID NO: 114435 - DNA, 773 bp, Zea Mays
atcaatttgagggcttatgtatgtaacatagtacgacgggttctaatataaaaactttcaaggttcttttagcaaaggcgcttggtgaatgggtacggagagttttgggtcgttggatttaaattcgggggttcggattaggtcccacccccgcgacctagtgcagaaccgagagccctccaatggaaaactaacgccctagatttaaaatccttagattgattcccacatgcacgatctgtatcggacgaccgagatccccaatcgaatcggtacgagacaactaccactggatcgagatccgatggctcagatcttaagctgcgaaggggtacgtggcttctaatctcatccactcgagccgcatcggacaacgatgggttcgtcttcacgcgccgaactagagtgcggtggcactgccagtccccacaacggagagatggccggagttcagctacaccatgcaaaagggccctagattttaatctaaattgtgcaatatgtagtgaaggacatggcgaacgcagggtaacggttcctcaccggcagggacgatgtacagaggcctgaccatggagaatcgtggtctacggtagattcaatctccaacgagaaatataccgagctctgaccgtccacggcccctgaactccacatggaggtgcccgcagacccttgacgaaatgacgagacacctcgagcacagattcgccctgacgacagcggctttatctctccttctcggcagtgctctctctcacgacaaaattggg

SEQ ID NO: 114436 - DNA, 451 bp, Zea Mays
cggagaccgtatgaggctcgagggcttcttatagggtggggggggggggggggggggtgggggttcgtcgaattgttgttgagcaccatttgtgacactgagtcagtctaaagattgttcttatggagaccttgcatgaacaatgattattgtgcatccatgaatgatgagaattgttaacgacgacgagacttgcattggagaggtcatataaaaataaatatacagtacagcagttcactggcatgcactgcacttaacagttagaaaactaattaacctagcaagcatgcagctagctaattaattttgggtggttgtggtttggttgatgagcgcacgaccatcaagcagacttcacgtgtactaacatgcatgcatgtctgacctggtagtgtgtgtgaccctacaaaatattgtatcaccgaatacacgtgcaattatttcaccg

SEQ ID NO: 114437 - DNA, 307 bp, Zea Mays
acgtggaacacactatgaacaacagacaatgtttcgggtaactggagtcggtatgccaatggcccatatctttcaagtataggaaatggaccaatgtaccggggtgcaagctttccttttatcccaaaacgcgatactcccttcattggtgaaaccttcaagtagacgtagtcccctttaagaaaatacaagggccttcgccgtttgtctgcatagctcttctgccgagcttgggctttcttcagattatgaataattttctgaaccttttcctcggcctccttcactatatcaggcctaaagaaat

SEQ ID NO: 114438 - DNA, 426 bp, Zea Mays
aagctgttttgtatgtgatgcaataatggagtaatggtatatagttcataaaaaatatctaagaaaataagtagactctccactaaagaaggtatatatagctgtgttttggactggaaccagcagagaggactccactaattggcaacgatcttttctctgtaagatgatatcatataagattatatcagtgcttaatggtagttctttttctgagaataactaatggtttgatattatttgtttctaataacctcatactgttcaatcctcttacttggccatatttactgtacaaaattaaagtgccacagtcaatgcctccataacatgcatggtcctgtaccggagtatttttcatattgtagctagattctacattaaataatatgcacacttcatttgacccgagaatttggtaccata

SEQ ID NO: 114439 - DNA, 454 bp, Zea Mays
aatctgatacttctcatgaactttccagggccaaggttggaggcttgtaaagcatccttccataggttcttataaatggaggagtctgccacatgttttgcagtgtgataaatgtgacaatatttccattgaacttccattggtacttaatttattttcaatatattttttcttttaggaccattatatgttttcttctaggataggattctctcgtgccttgctttttaagttgcatgatacttcattgcgacattaatggatagtagtttccatgtgagcttgtcataccttatgcttgcaaataatagaacaaaagcctaaggagcactcagtttggtttatttataaaatatacaaatgtaataacacaaaagggttgccctgtgtggctacttgtacatgcttatctcaaacttggatcaaagatttatttttgatatttttgttcaaa

SEQ ID NO: 114440 - DNA, 284 bp, Zea Mays
atcctgtatatattaaagtattgtaaggaagattcgagtttgaagaaagaggtaagcacaaggtatgattttgttaccggcttaagatgactccgagcttcatcaccagctatgcttcgtccaccctttgtccataccagttttataaatctatttgctatgcttcgggcaaggttgggaatattctctagatctgctggtgataaactgaaattgggtctattgacaaccttcccatgttcgcagccaaatttcaggaaggcgacagttgtgccccgagaagc

SEQ ID NO: 114441 - DNA, 448 bp, Zea Mays
tgttttttagttgatgttagatttgtatgattcacaatcagtttcataattttgaggcaatgttagagtcggttttctatgcgtgcggggggcgcaaccaagtacaacaataaattgtaactgacattgttgaacacattacacatggctggtgcctggtgctgaaccgttgatgcacggttgttagcggtggcagacaaaaggaatttagaagcaactaaaatcttattgctaccttgcttctagaaaatcagatagattctataaattgcgaccgcaaagtcggattgctaccttgcatgaatgatgcagcctgccttaatctgttaacttaaactttaatgttaccaaactctggaggcttagcgctaaccggcacagactaggcacttacaatgatgcatgttcgggaggggtgatcatagatggagttgatcttcacaaacct

SEQ ID NO: 114442 - DNA, 355 bp, Zea Mays
gggaggcatttaacccacataaaatagtaaatagtccaaaaagggacatctatgcatgaagtgagcttgtagaggatatatggataagtggtacaaatgtctacatacaaatttgtatttaaaactgtaaagtcgtacttctatttctccatacaaatagtctagtttcgtgaactttcatacaacaaagtccatagctcagtggtttttcatttctcactgttgtcgcaggtctcaagttcgattcttgattttggcggaagtgaccctttttttggatttttattggagaaacagaacatgtcatttttttcaatttatgtcctgattcagatctcatcacacaattcacata

SEQ ID NO: 114443 - DNA, 615 bp, Zea Mays
cgtctgagcgggtaggcttggtttgcggggataacaccgtggaatggcaccatacttggtcgtagcgcggagcgtgcgatccctaccccatcaaaggtctgaatgtacatgataatgagtctgcacccccatccatgagcaccttggtgaggcgcttcgagcctacgactggctcaacaacgacggggtaggccccgggatgtgggaccctgttcgggtggtcttggcgtccgaaaactattgagaactacgaccaccaaagatatcgtgggatggcaggttccgtagtgtggacttcctggtgtgttgccttgatacaacgtttgtcgtcatatgcttccgtcccaccgaatatcatgaggcatcccatcgtctcgaagaattccacggtgagggtctcctgctctgcaggtttcaccggctcgtccaactttgccttcttggtgggtggcctggagatgaagtgcttcaggagttcacaatcctaaagcttgtggcggacatgaaaactgtggttttgacacagtgagtccatcaatttctgaaaatggtcaccatcgctcttggtcggtggcctggacagttaatctgtggtggcgacttcttcttcaccgt

SEQ ID NO: 114444 - DNA, 753 bp, Zea Mays
attttttcgcaaggccgattaacttctagaaaatgttaaaccaatccggctaggatttggcaacaacacatgcctctagtttcagtaatatctacttgtatcagaacaaaatcattactctgtgggaagttttcaaataggcaaatcacattggcagtaaaaatgtacttgctctagtaatcgtctcctcttccgcaacctttcctcagggctcacatcttgttgcttccacttcactgcaccattggcgtccttagtagtactagtttgaaccagcgatgcaatcatcttctatgtgagaaaaccgcattttaaaccatggtggtctcttcttcttcctcaatggggaatagttccccttcttttgatctctcgtctgctttttcctgcacttcaagttcctcacactccatttgacgtacccctataccaccaccttgtcttccaatgttgaggaaccataggattacctataggacaccgacccggaggtaaccgactacacctagtcggacactaatgagtccaacgcggacgcaatagttgatgggctagattccctcctcctcggtcccccatccatttagattcatatgatgactggagttgggacaaatctactgatgacttcgaggaggaagttagcccctccgaggaagaggaggaggcaccgtgggtgtggggcagcagtagtgaagaggataatgaagaagatgaggtcacgaaaggtaaaaagccttaatatcatttcta

SEQ ID NO: 114445 - DNA, 634 bp, Zea Mays
tcctagttgattttttgattaatgataacgtaagattatttttgacgtgtgttttgcagagcaaatagtaagttagatcacaatgcagcaaaatagtaagttagatcacaatgcagtaagttacgctacaaccggtcaaaacaatcccttagatgagaacttgaagctaggctcctagttgattttttgattaatgataacgtaagattatttttgacgtgtgttttgcagagcaaatagtaagttagatcacaatgcagcaaaatagtaagttagatcacaatgcagtaagttacgctacaaccggtcaaaacaatcccttagatgagaacttgaagcgacgactgaaaaacacgagtcaagatgaaggtcttcatatcctaagggtcgaaggagttgtgggacacttggtatagagttagaacttttaattttattttagccatactataaagaggagttgtggatgagtagtttgaccaagagataactagtgtagtgtcggtgcatgttcacactcaaaactagtgctatgtgtcactcataacctcactcacaagttagaatcaaaatcagtttagaaaaaccctagattagaaacaagtgcagctgctctaagggtaccagactatcc

SEQ ID NO: 114446 - DNA, 514 bp, Zea Mays
gacgatttgggtaacccgcatcaaccacataatacttgcctacatattttgaaaggtaaacgatgagacttagatgaactagtttaattggtttaaaattgttgcaagaaaggtgaagtaagaaaacctggtggtggatgtggaaatttgtggtgatgagtagttatggcatctttgaaaactctcatgtcatgtgctgaaccaggccatcccgacaacacaaaggtaaatctcatgtcaaaatcacaaacagtaagcacattttgactggtctcattgtgcctgttcaaatatggaatcctcttactcttatcaaccacgaccttgatatgtgtcccatcgatagctcctatgcaatcgttgaagtttggccaaaatgctggattctctaaatttgggtgcatctctgcaaatgttgggtccttgggtgcaatgttgtcatgtgctaacttcaggaggcatgtcaaaactctgctaaatgtcctacttactgtctccagagacctcctaaaac

SEQ ID NO: 114447 - DNA, 329 bp, Zea Mays
agaaaatgttgattattgcccaatgctctgatcgggagaaggttctatatgcttctggtcgtctgacaggtcttgctgctgattggtgggattcatacactgctgcccatgatgctactgatactatcacatgggcggagtttgctactcagttcagaaactaccatatttctgctagactgatgaagattaagaagaaggaatttatatcgctgaagcagggaagcatgttagtcagcaagtaccgtgacaagttcatttagctctccagatacgcaccggatgaagttgttgaagatgagaggaagcaagagcactttattgaagga

SEQ ID NO: 114448 - DNA, 274 bp, Zea Mays
gtccaaccccttggcctctgcctcggctcctagcgggaaatcaacaggcacaagtcaataatgcagtacaccttcacgccagcttacaagacgcatgacatctccccttggaatacaacgacccaggcttcacagcgtaatatcctacatgtataaatagggcagtgtagttcttccaaggggcaaggcagacacacaggcgaacactcagtcgtctcccactaagtcttaggatattggcccttgcctcactaagttccagggacttgggaac

SEQ ID NO: 114449 - DNA, 500 bp, Zea Mays
tgaaaatcttgtgttcttgtgttctttgctcttgtgattgttcttactcaccatgctctttctattgcgagcaaagattcaatttataactttgtgtgtgtacatttcatcgagttatttgtctcaaatctactccacacacgtcttcaaagtagtaagatcacttattctaagtatctctcattaaactctgagttggttttgatttagtttttatctcagccagtttaaccggtttagagctattgaaccacccaacatagagattgaaccgaccttcatcggttgaacaggttgatcccacttattttgaaatttttgttataattttcaggtgtaccctattcacccctcccctctaggctactttaaccgttgtcgtcgcttcccgcactcgaaactacctcgatcacgattgacacaccttggtgaagcttctcgaccacttctctagactagcacgacggtgtggacaggattcaactacggcggacttctcc

SEQ ID NO: 114450 - DNA, 908 bp, Zea Mays
attatggatttgtattctcacgatgatatgtcatgagaaataatagctaagttggcagttgacgcagctgcagttccacattactcttggcacgacggtcttttgcgttacaagaatcggatttgggtggggtaagctattcccttacagactcggctgattgaggcttttcattcaacgactgtcggtggtcattcgggtattccagtgacgtatgctcgcttgaagcagctgttcgcttggcgtggagtgaaaaaagttgttcaggaatttgtcagtcaatgcattgtgtgtcagcgtgcgaaggtcgatcgtgctcatttacctggtttgttacagcctctactggttcccacgtccttatggtagataatatccctggattttattgaagcattaccgcgtcctcaatcatttacatgcatcctcgtggtcgtggatatgtttaccaaatatgcattttttttgcctctgcgacatccatacacagctctctcggtggcaaagttattccatgatcagatatataaacaccatggtttacctcagtctattgtttctgatcgtgatagaatatttctcagtaatctgtggagggagttatttcgtctggctgatgtgcatctaagaatgagctcggcttatcaccctcagaccgatggccaaacggagcgtgtgaatcagtgtctggaaacttttttgcgctgttttgtgcatgcctatccgaatcagtggagtcaatggttatctgtcgctcaattttggtataactcttctcctcactcagctattggtcggtctccgttcgaagtcttgtatggttgtcgtcccaggttttttggcattgatcatgacactatcatcagtaccactgatctggcgtcatggttgcatgagcggcagttgat

SEQ ID NO: 114451 - DNA, 487 bp, Zea Mays
caactgttctttagtagcctgcgatatgttagtgaatttgtcgctcaaacataaaatgaactgacttgttttcaatgcttcccctaatataacttttatatatgatatatgttaagtaatacaatgccgagcttatgtgtattgggggtttttattggggtataaagtttatatgcattcttccggtatatattggttgatgctaatttttagataaaattgtgcgtggggaggcattagacattctctctgtagagtcgaaggccttattttgctgctcgtctccaaataaaatctcggcagaagtagtttggcttctgttgtgccccattccttttgcatgagaaggagttcgacttcacatgaaactgctacaagatgcccaacacatgagtggcaaagttcatcaatactaagcaggcctctaagacagctcaacagattccagtaataaatccacaatgcccatagtgtaagcagcatcacc

SEQ ID NO: 114452 - DNA, 769 bp, Zea Mays
aagatttccaactttgttaagggcaagactcctatggtgcaagatagagaagactacattttatatcatgagaactatactgagcagaagattagaacttagtaacatgttcagatgtttgaatatcttcatatttgaaacacaacgcctgctggcttatcagctaaacggaccaagtgttggacggataacacccatagggcctgcgcacccatcatcccaactcagcaacatgttcagatgtttgaatatctccattccagccatcttcttccttctgtaatggcagaatactaaccttcccccgttcttgaaatgtcacttgttcccaagcgactgcatgaggaaaacgttgctgcaatgccaattcatcttcctagatattcagcgccgcatccaagtgtgatcattggattaagacttgatcaaccatgcatccaccacgagagatagtccttcgttgtagcacctcaaatggatactgaatagccaactgatcaaggatcaaagcactgatcggacagtgagaccgaggcgacgacttgagtgagatacatggataacgggatgaatagcagtagactcatacaacttcagcttgtatgccacatcaccaatgcgttgcaagatctcaaaaggctcgtaatacttgtaagaaaaagtttgtggttggcacaggcagctactgatgtttgcacatacgattgcaacttcaagtacaccatatctccaacagaaaactcgtgctccgagcggtttttgtcggtct

SEQ ID NO: 114453 - DNA, 516 bp, Zea Mays
ttggtgtcccatgcaacttgacaatattgtcaagaaacacctgtgccactccaacagcagtgaaaggatgcttgagggaaaaaatgagcatatttggaatatcgatccaccacaaccaaaatagtatcatatccctcagatctaggtagaccttcaatgaaatccaatgtaagatcctgccaagccccttgaggcactggtaaaggttgtaggagacccgaataatgcaccctttcatgcttagcatgctgacacacctcacattgctgcacaaactgaaacacgactgacttgagccctttccaccagaacaacctcttgatcctttggtaagtggcctcaccaccagaatgtcctccaccacactatcatgcagggctgaaatcaacttagtttgaagggcagaattgttagctatccagatttgatccccttttctaataatactttgatgtaaagaaaaaccttgctcattaggactggccagggccaattgagccaatagatcttgagctt

SEQ ID NO: 114454 - DNA, 339 bp, Zea Mays
atcaagatgaacctcttcgtgaggcaaatcaccagcagggcgagttcatcggaggagagttattacagaccacgtgaatctgcaatcagaacatatgctttgactaaggccgatggatcatatccgcaggcgtccccgcagaatagatcaaatgccaataagtcaaacgtggatatgatattaatcccgggtatatccacatctacatcaggtagaagcattcaaacctatatggttacccctcaacgatttctggcaaactccatatacataggagtacacaccgaacgacatgttcagtttggcttttgtgcgtttaatagaatattgagacattac

SEQ ID NO: 114455 - DNA, 545 bp, Zea Mays
ctctgcatcactaggatccaaaggcacctcaaagtggacctgccgttcatcatcaggaatttctccaatcgaagcaaccaaagcactaacttctttggcagagggtcgcactctaaggcccaaaccaccatcagtagtaggaggattcgacacaaaatgagtaaaggccttgaaaggaggcaggttccagaccgagtatgcgacaggggcaccaacatttgataccttgcctctaagtatcatttcaagccggtttaccaagtctacagcaggaattcttctgttggtgacccgggttgagtcagctagacctcagtacagataggccgggtatgccctatccttcaaaggttgaatattcttgaagacaaaatcagcaaccacagcctctgcagtcagacccctctccttcagcattccatcttcagccagcaaagcccctgcctcagccacctcctggtccgtgggggactcggtccaactcggagtacgaacatccggctgtctccctgaccgtggagggagagattttccgtggttctcaa

SEQ ID NO: 114456 - DNA, 426 bp, Zea Mays
ggagatgagatcgaagctactgacactgttcctattttggaagcaatgaagcactctgggttggtaacaccgaaggacacgcctgctgccgaagacatccctgctgtcgaagcagaacgtgccgctgttgaagaaactgattccgaagatgattacagcagcgcagtgcagagcaagcctagccacctggacttcggaaagtccaccatctccgaagctaattttcctaagatggtgaagttgggctatcttagtgaagcaaagaaggaattaattcgtttcggtggagaagaaactatcccgaacccaggaaaaaatgaagtggtggttttcaaaagtctttttaaaactggtttaagattccctctgaacaagatgattgctggagtgttgaagaaatatgggatctaccttcatcagctgacg

SEQ ID NO: 114457 - DNA, 1537 bp, Zea Mays
gtggacagaagagtctttggatgtggagttggattattttgcggccttggatgtggctgcggcggaggcttctccgcgtgtgatggatgctgaagttctgcctggtccgagtgctgggcgtaggcggcgaagggcggtggcgaagcggagagttagtgaggtggagggttgtcgtcttcgtgtggacggggctagtaaacgggagttgttgtcctcgccgactggggcgagtgtaggagagggggagctgcggaatctttttgagggtgaagagctgaggataatgctgtttaactacagggagatgggtatcatcccaaaggttgaaccaatgtaaggtgtaatgccctcgctacatgtatgtaactataatttgtatgatgaggctgtgtgccttcgctgatccggtcgtgcccgtaggggacttgtgcacttgatctagcgcgtttactgtgttggtccggttgcacccgtagtcggtttttgcacggagggtccggctgcacccttaggtgacttttgcacggatagtcttttgaggaagacttcgattttgcgcacttgttgtgctagttcggctgcacccttgggcgacttttgcacggagtgtcacacgcgagggtagctagcattgcccctcgcggtgacttcgttgtggtcgaatgccaaagaccgtcgatgcggtcttttttgacgttgctttaattttttgcgtgggatttttttgcgtgtatattacatggctccgcctcattaaaaacctcacctcccgggaggaaaagagtgcgggccggaataaaactgtttggggaattacaagggcgagttggccttgaggagtcaaacaaaaaatttgcgaagattgtctatgttccaggaatgttccaggtcttcgccagattgtgttgttaatctatacgcgctgggagacgacttcgtcttgacgataaatggtccttcccacttcggttccagcttaccccgtgactctgtccgagttgtgcggacaagtacgaggtccccttcgttgaattctcttgggacgactgcgtggtcgtgccaggccttcgtttgggcttgatatttgtcgagggcctgcagggcgaagacacggtctccgttaatgaggtctttggaagttggctcgtctacgtcgggtattgctgaaacgcttgtccgcggggacccatgtttgatttccggcggggtcatggcctccgatccgtatagcaggcgaaatggagtgaatccggtcgcccgacactcggtcgtgttcagtgcccagactgcttcaggtagcaggttggcccatttgcccttcttgttgtcgaggagcattttcttgatcgccgtgaaaatcttgccgttggcgcgctccacgacaccgttggattgtgggtggtacactgaggcgaaggcaagcttggtgccaatggagaagcagaaatccctgaagtcttggctgtcaaattgcttgccattatcaactgtgagctcagacgggactccgaaccggcaaacaatgttttgccagaag

SEQ ID NO: 114458 - DNA, 580 bp, Zea Mays
agatatgtgtggatggtgattcaggttgcattatgtttggattccattccaaataacaatgatgacctttgtgacctttagatgaaaagtcctaaaaataagattgctaatctgtttcttttttggtgtggtgctgttctttgggctatttggagaaccagaaatgattggtgttttggtgacaaatctttacttgatccctctaacgtcatatttctttgctgcttctggctggattcctaggctattcgacagaaagagaagtaaaaaagatggtggtacaaggaagcaagctcatcataagaatgacaagtgaagatctacaacgagcttatggttggagacttagagatcgtcgcattactggatagtgggttccagtgcttttgctagtttgctcgtcttgcagttccctgtatgtcggtggttatgttcttctgcatgttgtgtcttgcctcctgtctggagtgcaattgtcgtaataagaaaaacttgtggtttctatcggggcatgtggttcgctgcggtaggtcacttctctatcgagttagctcgatattgtagggggtacttgacgcgg

SEQ ID NO: 114459 - DNA, 453 bp, Zea Mays
aaaatattacacactttgttcagcaaatattacattattattccaaatgtttttacaataatagctattcttcttttaaaactgcttccgcagcctcgtttagtagtcgagtaacaacttcgtccataatagcttcggccatcttagtaatttcatcttcctttttttcttcggggtcggccagtgactcgaagggctccgggagaggagatagttcggctgcgatataaaacataaataagtccgaagtcacaaaaataaaacataatgtcaaaagcaattaggcaataccaatccgcctttcaagttctgcagtcttttcagctgcctttgttgcttctctagcatcgtgagtatctttttcacttttctttataattttgtgggccatccctcgacctccattttcccagatgtcggtgaaaaactttccaccaactaagcttgcttcgc

SEQ ID NO: 114460 - DNA, 353 bp, Zea Mays
gctttttctagagacaacatctcatcacaagctgtgtattatgatgtaatgttctggaaccccagatatatttctgtgaagaatactgttttgtttgtgatgcactttgacagtttgacttagggctggtttgtaaaacccgtccatggtttggcaagcacaatatttgattatttttttacctccatgttcagatgtcgggacctaataaagctccatttagtggagtggctgatgatttgaaaggaagagcaggttgctacaaacaagactggaaccatggatttcgttctggtttaaggtttgcacaacaccatgttgtaattgcttgacatgtcatcattacttaatta

SEQ ID NO: 114461 - DNA, 290 bp, Zea Mays
accacatgctagcattagttatctacacgtcatcgggcatacaaaatcaatatcattagaaagacagcaattactttctagaaattaatcagcgcaacacggcatcacacgtgcaagcatttatcacattcgctctaatttttcattggttcctttattattatactagttaagtacaaatcaatttgccatgactcctatatatacaaacttagttaaaagggaataatcacttaatcgggttctacaatcattcactaggcaaacacttattagaccctaaccaattt

SEQ ID NO: 114462 - DNA, 448 bp, Zea Mays
attgctcaattaagttttgatacacacattactcttccttggtcactgtgtcatcaacgaatatatcaaacaaaaccgaatggagggagtataatagagtaactctttgcaatggtgtatttatagtagatatctatagctgtttttaatacttaatacactctctacaccacctcagtttctacgtataggttttctccaggttcatacaagccgtttgatatagctattttgcagctactgccactgctcgactgttgttcatatagctgcacagcttaaactagaaagtagcagctagccgaatgacgtcatagatataaacactctctttcttcatttattttgttaccacataggatagatgctgtcggcatttggacccgaggtcctaaccgactagtgaaataatgttgtgtgctcctaaccagatggtgatacaagatga

SEQ ID NO: 114463 - DNA, 446 bp, Zea Mays
gcagttcgcgtctctgccgatctgatgctattcgcctattcctcgggaaatcaagatacaagctccaaataaattgggtaatgattactagcaagcacacacttgacactagacgcctattcctcgggaaatcaagatacaagctccaaataaattgggtaatgattactagcaagcacacacttgacactagacgcacctcgtagtcacatgcagaaaattatgtttctccgcaactcagttttacagaactggaacctctcgtttacacctaagttgccatgtcatattgtaacgtttcgtgcattcgttctaaaatcgctactacttattaagactgtaagagtagtctgccatcattccatgttctgtcatttcgtgttctgtctttctcatttccccctccccgtaaaacccattctcattctcatttccacgtacagccc

SEQ ID NO: 114464 - DNA, 565 bp, Zea Mays
ttcgaacttggctgcgtcatgtgattgctatgtcgcgctctccattaatcggatcgctcctgttgagtcagaccgccatcgctgagtcgcgtatttttcgtatgccctgtaggcattgtctatctgcctcgagccacaattgtgcctattgcgcacgttgtgtggacttgtcttgtaccccgactatcgagtcacaattgcgcctgttgcgtttgttatgaaggcttattgtgttgtcgtagccctgatggtcgcacatgctttgacgtcagatacactagagcttgtgctcgcgtggattgtggtgggttgttcaagcccctgaagtcacatcataacgcaaccttcttaaataatcttgtttagctctataatttatttgattgtgttgtgtggcatcatatatttatttatattgccaagtggccataacaactatatcaagctctatagtgcttgaataatctgggaaagtaaatgaaataatataaaacacagataagttaatcctctgctctcatctcatgcataaagatttacctgaagtaacccgaagatatataac

SEQ ID NO: 114465 - DNA, 885 bp, Zea Mays
aatttttcttgtaggagcaggactcaaggtttttgctgtttctagcacaacatctagcacatttgccatccttctcatcataggagttgcggcagaacccttttgtgccttcggcacttttgcctctgttgaagggctcaaaatctctggcatatttgtcatttctttaatttttggcccttcagccttatcagccttcgtttcaactagcttaactgtaagcaccttcggcattacaaccagctcttcagtgctttgcgcagacggagtagttactcttgtttcagcagttgaagaggcccttcgccaaattcaggaatcacggccggttcgatgtaacgcggccggtgagtcagaaccttcaacttttttctcttcgatacaagctcaattggggtgtctgaagtagcagctttcctctttttcccctgtcctcgcagcggatagcggtaatcggggtaaacgaagccaatggcgtcaaaaactctgttcagtctcttttttccccaacctctgaaggctgtggacagtgcattatcttctgccttggaatatgctccaagcagttcatcacttgtagcttcgatacacttcaactagtcgtcgtttggttcatcaaacttatccccaaacctgaatgtatacttcagtcggaccaaaccacctttgctagagttagtgatggtctccttcggcatttcccagctttctacaagtggccatactctgaattctatatgttcttgaattaaatctcttgtgccaatgaaggagcaaatagtactgaaggccttctgacacgcttcggtggcatcattaatttcgacctacggccttcggaggccgaagcgggaccagatggggcgtataatgacttccttaatg

SEQ ID NO: 114466 - DNA, 393 bp, Zea Mays
ctctgagtcaggcagaggcagatcccaataactagagagagccgatcatcagatacataagaaacgaggaagaaccggatgacaaggtcgtggtagagcgcatcgcaagacagtcggcccactataccatcattgggggcctgctgtatagaagaggcgcaggaggggtcctcatgaagtgcatccactcggctaccaagaggcagcttttatatgagattcacgtcaggcagtgtggcatacatgcaacatcaagaactctggtgggaaaggcttttagatctggggtttactgtccgactgcgaagaatgatgccgccgagttagtctagaagtgcgaggcgtgccaattcctgtcaaaataacaacatctacccgcacaacagttgcaga

SEQ ID NO: 114467 - DNA, 305 bp, Zea Mays
gaagactatagcattgtagtttgtcagctatgtgcttggtactgcagctgagatattaagaagggttgcaggttgtgtcgtttttctaaaaaacgacagtgaagacgatagcattttgccgaggtctttgaatggagagctttgccatgcaacttgtggtgtgctgctacaaatgcttcacgttccgaaagatctccccttgatggatcgactcttgtgccaatgctatcaaagttgacattgatggcttcagacctctcatcctcgacaatcatattatgcatgatgatacatgtggtcataat

SEQ ID NO: 114468 - DNA, 1472 bp, Zea Mays
gtacgccaaggttggggatgtggcgagcgcgcggaggctgctcctgggattaccctgcagggatgttgtttcttggacggccatcgtatcagggtgcgtgctcaatgctatgctcgaagaggccctcggggttttcctcatgatgctggaggacggcgtcctccccaacaacgtcacgatgctgagcgtcattcaggcgtgcgctttgatgggcgcctcggaattgtttggtccagtgcacgctcttgttgtgctgttggagctcgagcatgatgcctcagtggtgaactctctcatcatgatgtatgcgaaaaatggatttgttgaagaggctatccggcttttcaagggtttctacctaaaaactgggagcgtatgctctaacgaggatgttcttgcggcagttctttatggttgcaccatttcagggtccgtgaagaacggggaggggctccatgcgcacaccattaaaatgggtgctttcccaagcatcagcgttgagaactcccttatgggcatgtatgctagatttgagcaaatcgatgctgcactcttggtgttcgaaggtatggaggttaaggatattgtttcatggaacaccatcatctcatgccttgccaagactgatcgtgtgaatgaagccatggatattttcagtgttcttcatgctgctgctggtggtgggcttgcgcctgactttgtcacggtcttgagcatgctgcaggcttgctccaatgcaggattacttcatcaagggcagatgctccatggatacgtcatgaaatctggtttcgtgtacgatgtttcaatatgcaatgctctcataagcatgtatgctaagttaggaagaattgattttgctgagatgatctttgagcggatggatatcaaggaccttgtttcctggaattcaatgatcaatgcttatggtatgcatggcgatggtcattcagctctacgggttttccaccagttgaaggatgctggaacacctgcgccaaacgctatcacatttgtgagtgtgatatcagcttgcagtcactctggtttggtttcagaaggtcacaagtgctttgaaagcatgggaagagaccacggcattgaacctagcatggatcactatgcctgcgtagttgatctgcttggaaggtctgggaggtttgcagaggctgagcaattcatcagggacatgcctgtccgtcctgattcaaccatctggggacctcttttagctgcttgccagcttcatgggaatgttgatcttgcagaaaaagctgccaaagaattgtcggccttggaaccggagagtgacatatggagagtatccttgtcaaatacctatgcctcggttgggagatggagagacgctgcaaagattaggtctgaaatgaggagagttggattgagaaaagagactgggtggagttttgtagacgttggaggggttgagggttttaagtttgtgtcagcag

SEQ ID NO: 114469 - DNA, 535 bp, Zea Mays
atgggagcataacttcgtttaagttacaagatatgagtgttgtacaaaaattggagttaaatggactcaaagtaatgctgtcagtcacccatacagtgtgatactggtctgacaatgagttctgatgaactttggactcgattcaagcttgatggagtaagtaaatgagcaaggtctctgtagtcgaattgtagatggtttatagagctacaactttgatagagatggattaagtagttactacatgaaaatcaaagatccaggctcctgaaatcgctctgttaggcgccctaataagaagtctgatgatacagtgtctgcagaaagatcttcagattcatcccctctctctggccgctagcgcaccttcgcaaaattggacgccgtcgccaatggaacctataaattaccacccagtgaactccgcaaggtcgtcacaaagccagagcacctgcccttgcctccgattagccaccatagcctcccaatttctctcttcccccaaatcgaatttccgcgccaccatgaacgtcgt

SEQ ID NO: 114470 - DNA, 836 bp, Zea Mays
gacagaatgaaaaaaagctaatttacctgaagattagaaaagaatgaaggcaatcccaagtcatgagaagttgtgttataactcgacgaaggaagatcaactggaacaatctgaaaagcatcgtcgggggttgattcagctccaccagtagatatcagaatcctgtcatccagtgcgctgacctctaaggtgactccctcacttgaagttaaagaagtatgcatcactattagtccatcagaatgtggtggagacgacccgacttggacgtccatggaggtatgggaaggagaactcgcttggacaccctcgggggctggattgcagctcgcataacccatcagagccgaatcactaccggcaacaccctcgagggttgggtcatagcttgcattacccacctgagccggatcattaccgacaacaccctcgggggctgggtaaccaccagcgtcacccttgaggactggattttctgcaacagccacctctaaggctgaaggatcctcagtcacctccatgggagtcgggcaatcttgaccaacctcttgacactaaagaccgccatccaaggtctacgacgcgtgagatgctgcccgggatacctctaatcccacatctggaatgtcagaacaaacatccatcatatcaccatcagtcggctctgacagcatatccttaggaatgacatcctcaagggtctgatcaaaatctattatagataaatcttgaaggctaacaagagcagacagggctagagaagtaatatcactatctcctctactacctctgtagagtcggctattcttgcgaattaatggaacttcttcttcttc

SEQ ID NO: 114471 - DNA, 378 bp, Zea Mays
gaatcaagccctgtaaataagaagaaagaattaagtatgacaatgaaatatgctagtttccaacttaaaagtaaacttttatacctttatactattatatgctaggctatcagcaagttcatccttcgataaaatcgaaaggtcgtcttctagcttcgggaatctgatgctcttacctatctcctggcaaacagatatttctttgttatccgggagacagtacagaaaatctacttcgtcactaccattgaatactaacgcccccttcggatatttcaatttttgggcgtagtgtcgtgcctctagcatttcttcttgggatagttcttttctcgaagcatgacgaatgatgtagtcagtgcttttgttcgaagcttc

SEQ ID NO: 114472 - DNA, 704 bp, Zea Mays
ctggcatgctagaccacccggcccggcctggcatgctagaccacgacgtgttagggcatggacatgaaaagaacgattagtctgtcgcgtcgcgtcgtgtctaaggtagagccaagccatggcacgggtattccttaagggctggtttggtgaccaggggattggaggggatcgattcgctctagttccttagtcaccaaatcagcctaagccacgacgtgcccgtgtcggtctcaactcccaaaaaatcaaatacacaaatttataggctctcaagtgtgttgcgcggacgggaggggtgtaagaggagcctcagaggggaggaaggagagggaagcggtggctgtgaggtgagcaggtggcgtcgcgatggatgggggcaagggcgagtatgggagaggcgatagttggagtcaggagatggggatgggatgagcctgtctcgacgggagtggggagtttagtaggttagactatggttaatgtgggagccaagtggctaggagaaaatttacctttgccataggccttttttcctcttttgtcttgaaggcctaaatccctcatttgggcctatttttgtttttacgtcttctctttctattgtactttggctcctttttctcccctcaatatatttttttggcaaatgccctgcgcccctgccagcaaattaaaaaaaacgttctagtatgacctcgatg

SEQ ID NO: 114473 - DNA, 595 bp, Zea Mays
attttagattaaaatgcactactggttcctaaacttgtattgtagtgttatgtcatcccggtccctaaattcccgaagtgcacatttagtcctaaacttgtagtgttgtgtcatcttggtccctaaactcttaaagtacacataccggtccatatgatttgtttgggtctcaccatggtccaaacagctctcatatcatttgtgtggtatgttgaatttgtgctgatgtggaactgacaagtccatttatcttcttcctcatccctctcccttcctccacaatgtaattggtgttccttccatgctgccgttaccccctcctcatcatgccaccattgtcaccaatacgtacctagaagctcttttttggagtagacagtagcggcagcaacagcgatgaggtggaagggtgcaaggtgacggtgagcgaggtgggaaggggcagaggttgcagcaaactgttttgtgcagagaggggctgtgtacaacaacgggtatatggtagagggagatgagagagagggagggagaggaagaaggatgtagacacatgtcagctccatgtcaacacgccaagtcagcaagtggagtgggt

SEQ ID NO: 114474 - DNA, 773 bp, Zea Mays
cccgcaccagcataccaagcgacgccctggaaccccactcacggtggtgcatggcatcaggacgcccttgcacactccttcaacactatgacgctcaatccaccgaacgctacttccgagtggtatgccgactccggtgcaggatcacacatgacctcggacgctggtaaactctctgctatttcctcgcccacttcattcactcctacatctatcattgtgggaaacggtgccttgcttcctgtcacagccactggatcacacactttttctttcccgcatcgcaatttagttctcaataatgtgctggtgtctcctaacattattaagaatttaatttccattcgtcgcttcaccaccgacaataattgctccattgaatttgatccctttggcctttctgtgaaggatttgcaaaccaggaacgtgatcgccaggtgcaatagctccggtgacctctacccgttccatgcaccctacaccagcacctctgcattactcgctgtacccacctccctgtggcatcgtcgtctcggtcaccttgggcatcaagccttgtccaaactcattacctccagtgtcatttcctgcaataaagatgatgtcaaccacatatgtcatgcgtgccaacttggtcgtcatacacgtttgccgttcaattcatctagctctcgagcttctcacaattttgatttaatacactgtgatttatggacctccccaattgttagtgtgtcgggctataaatattatttggtaattcttgatgattg

SEQ ID NO: 114475 - DNA, 306 bp, Zea Mays
actctccagacaaatctagcaacagagcatttaaaaaataaatggtcaatagattccataccaccacaaaaacaacagtcatccgaacctttccaatttctttttttcagattatctttagtaaggattttgtttctaatcaccagccacagaaaaacttttattttctgtggtaatttggatttccaaagaaatctgtaaggaactttgatctgatccaatgaatttttcttatataaagaattaacagtgaaaccatttttacccaatctccaaacaggtttgtcttcatggcttgacaaacta

SEQ ID NO: 114476 - DNA, 600 bp, Zea Mays
ttctggtgtcagcttcggattctttgttaaccttttcttcttgtccttctcgacaaatctttgtgcttgccttttcaagatacacacaacccttttcttttttattccccccgcttcttcgtcaagtctttcatagtcaggatacttgaagccaagggcatccatcactcgattcagccttcgtttctctcgtgtgtcaaaggcagcggtcattagctggtcctcttttttagtataatttctgaggatttcgttacacattgtttcgatgacctccaaccattcggcatagggtttgctaaagtttttctgaaatttaaagcggtatggaagtcgtccaaattcaaatttatttccttcatctttcttcttcggcattacccatccactcgatgtcaggaaagttttatacactaggtattcttgaaccaggtctcgagtactaatatgttcagccacaactctgaactctacttcggctaactggcagggggagccgagttgcatgttgcataatggtcttgtcatgctgaagctcaatctcaggggactcaccaccatagtcataagcttctcccttctcttctcatcagctttcac

SEQ ID NO: 114477 - DNA, 401 bp, Zea Mays
ccgctcccctgttgtattacatgtactgtcaggggctggtagacggcgtgtgtgtatagtggcgcatgcataaccatggttggtgaatctttgacaagactacagtattgttgccactatatgcctgcagccctgcgcgaggtaggtacgtgcattgaatgtggttgtcccccagtggccttcgggaggctttgtcctgagcttgccctactcgcccgtcgcgtgctcgagcgaggtggacatcattgtttaggggtgaggtgacctcggtcgagacggagattctcccgagcatacgccccatccgagatcgggctccggcgaggcggagttttgggaagacccctgagggggacctcaggcgaggcagagttcttgattccttaacctcgggcgacgta

SEQ ID NO: 114478 - DNA, 421 bp, Zea Mays
tgataaaatgtcctaggtgaataattatgatggtattaagtgtttattgaaaagcctcgttattatagttatgaaatggtgttcaaagtgttaagtagatgcatagcttaacaaggtttaggtttaagacgtggattaggcgcgaagtgccttggtggatatataggtctagtgtaattgaagtaatcccctttatgcgatacaattgcgtcccctttatacgatacaattgcattcacgtgtctgttataaacattgtgtgtatgtgatgaagtcggtaaattgctttattagtcatcatgttcaatgttagtggccgagtaagtgtcatggttggatattacttgatttttcaagtatttggaatcgaataacatcgataggtattttaagtgaaatatgaaaatttgcataataaaag

SEQ ID NO: 114479 - DNA, 361 bp, Zea Mays
ctaaggtcgaggtcatgaaatatttagggaggcctctatggggcctaggtgagcgagagaactctagaagcttgggaatgcctcaaagtatagaaagatcctgaggccttaggggccctggtcatgccaattatgatggacgggagtggctaggacaacctcacgggttcaggggctcaagatgaggtccattagggtgggtctctaggggcacatgtctggagttagtcaggctctcgattacttttatcgagatccttagaaggcatcttcatctagagtgtgaccttccccatgcgctaatagaggtccccaagtcaaccatagacctatgaggcttgctggtgggcccaaatttctc

SEQ ID NO: 114480 - DNA, 1178 bp, Zea Mays
cacctcggtctctaactgggtggctgactccggtgcttcctaccacaccaccccggacgcaggttttctgtcttccacctccccccccccacacccctcccttcctccatcgtggttggaaacggctctgtccttcccgtcacctcaataggtgacgcggtccttcccggtcctttccgtttatccaacgttcttgttgctccccatatcattcaaaatcttctctccgtccgtcagttcactactgacaactcttgttccatggaatttgacccgtttggttttttgtgaaggatcttgccaccaggacccttctcgctcggtgtgacagccccagaccgctctacgcactttgcctgcctgcttccactacaccgacctctgccccacgtgttcttgcagcagttgcctcttctgtgacttggcatcgccgtctcggtcaccccggtcgtgatgtgatgtccaagctctccagcatcacctctggttcaggttataggggatcttttgagcacctctgtcatgcttgtcagttaggtcgccatcttaggcttcccttccccatctcctcttctagagcagcaggcattttttatctaatacactgtgatgtatggacatcccctgtaataagcatttctggttgtaagtattatttactcattctcgatgacttctcgcattatctatggacttttcctttacgtcaaaagtccgacacttatcccaccttgtctcacttcttcgcttgggtctccacacagtttagttgcaccatccggagcatccaatgtgacaacgggcgcgagttctataacaatgcatcacgtgacttcttcctctctcgtggcgtccatctccgcatgtcttgcccctacacgtctccccagaacggccgggctgagcatatgattcgcaagacgaacgatgtcatgcgctctctactcttccaggcttcccttcccgctcgttactgggctgaggccctcgccactaccacctaccttctcaaccgtctccccaccgaggcggttgcccaccccgccccttacttcgctctcttcggcatccatccctcttacgaccatcttcgtgtcttcgggtgcgcttgctaccccaatctcgcttccactgctcctcataagcttgcccctcgctccacgcgttgtgtcttcctc

SEQ ID NO: 114481 - DNA, 554 bp, Zea Mays
gtcggactctaaacatcgacaactggcgtgctaggtagggcgtgtgtcgttgatccaagctagctcaatggccatcacatcccagtgcgagattgctcttcgccctggaaccatgttctgcttcggtaccatctcatccatagtggatgagaagggaactctacatctcatagcggacccaccggagaagaagttttcctcggagatcccaaataaaaccggagtagaacagcgagtggcgcagccgcccgcatcccaagcaaagataacctcttacaaacgaaaaagcgggagctttcctacccggaaaacttcgttgtccacctcgcccacaaaagagtggacacgaatcactagaaagaatgaggcaaacgtcccaagtaaggggacgagacctcaccaagtcatctttccggcaccttcgccctcaaaggaggacataaagaaaagcgccgtcgcaacggctcctttctaccccgacatcctcttcattggggggagattggagtcgtctcccatctccgacgacgagccaaccatgcaaggggaagaac

SEQ ID NO: 114482 - DNA, 325 bp, Zea Mays
ggccgaggctatcgctgccctggtcaatgccaccgctgataatacgcgcttcttgcgcgaaatggcgggcaatcagttccaacatcacggaggaagagttcctcctcaaagactacatgatactacttatttggaattctctgagactcgaccaccacttttcattaaagtagaagaacctttagaagtcgatgaatgggtgagagttatggaacagaaatttgggttaattcgatgcacagagacgcaaaagccactatttgccgcacaacagctaagaggacatgcgcacctggtgggcaaatgtttcaacaatccaacctgc

SEQ ID NO: 114483 - DNA, 772 bp, Zea Mays
ggagactcaggttcttctatgcttcatgaagcccaataagtgggttcttcttttaatgtttttgacatcatttgggaagaaaccatacatgcttcttggttaacttctaagggatgtgtgcatgcaccttacataatgaagatgattgaggttgtctcttagacttggtttgagaaacacatcaaacatttgcagtacatgccctactggatcgaccccaataaaccatctggttgttcaaagagggcccctagaatgtctgaaggctagggtgcctccacttcctttgatgagcttgctcctcagccatcgccttcacatgatgttgccgcatctctccccatgaaccatgtcgagagaagaagaaagggaggaattcgagcttttctcatgaagggcttcaatgcaatctttgctatgtgtcgtgagaagtcgattaataattctgagctagcatgacaacatatcttgaaacatatgataatgttcgtcgtgtggtggcctcaatgggagtggaaccaacaaaattatggtgtcccatttctgatcccagaggacatggaagatgacgaggatgagattcgaggaggtcatgcaaaccctcaataccatcctcatcatcaccagcagcatcaggctcctcctcatcctatcgacgaccctctagcttacactcaggacccaaccctcatgctgatgatcctcaatcatttgcggtggaccttgttgcgtagttctttgcacctcctcctagtgctgaatcttatggcgg

SEQ ID NO: 114484 - DNA, 551 bp, Zea Mays
cagatgccttcacagactcgcgcacatgatgatgcggggacttcccgcggtagggaggatactcctaatcggccaccagtaccaccaactttggccgaggctatcgctgcactagtcaatggcactgcggataatacgcgcttcttgtgcaaaatgacgggcaatcagttccaaccgcatggtgggagagctcctcctcaaggaccgcgtgaaactacatacttggaattttgtgagagacctccgctctttattaaagcagaagaacctctagaagccgatgagtgggtaagagtgatggaacagaaatttgggttgattcattgcacggagacgcaaaagccattgtttgcagcacaacagctgagagggcctaccattacttgctgggcaaattttgtagcaatccaaccaaccgggcatcagatcacctgggaggaattcaagctagcattacgagagcattatgttcccgagggagtgctccatatgaaaaaagaagagttcatccggttaaagcaagggggagatactataatgcagtatctcaa

SEQ ID NO: 114485 - DNA, 304 bp, Zea Mays
tggacctgcagagaagcgccatgtttcctagtttctcccaggaagggtgaacaagagttgggtcatctggagagagaatttgacgaatccactgtcggatcgatgcacaatcggttggttcctctcacaattgacgatcagattctagaggatgtgtcaaatggtactgaattccatggtaaggatgccttcactgcttacatgttcatttgattgtagctgtaacttcatcttacaacacaacacccccgacatgtattctggttctattgggaatgctaaaacgaatatcccagcatgtgag

SEQ ID NO: 114486 - DNA, 353 bp, Zea Mays
cctaggtctcttgaaactatttttgttctatatataaactgggtcagttgctattttccttttaggcggctcctttgctgtgttttattgttacaaataaaaaacccccatcatttaagctttataggagaggaaataacaggcctaaatgtcaaggaaggtagcggtccttgagttagctttgtaatggggaatatatgtatttgcagacatactatgtcttaacactaaattaactgagccatactattgtaacatcctccattccaaagtttttctttatgtctccaggctaaataggtatgtggcactatttggtgaatttagtcatgtaagtattttttagacaaatg

SEQ ID NO: 114487 - DNA, 590 bp, Zea Mays
ataattcgggtgattccgccacaaggcgggcaaggctgcgccttcagccacaactgctgtggcggcggctgctcctgctatggctgcagttgatgctctagttgttgttgctgctacgataatggttacttatgttccagctcctactttggctgttgcgacagcggtggtggtggttgccactattcctattgttgctactgctaggggcgatcgcgcccaagcgatggtggcggtcacggaggtagtgggccagcaggcgcctgcatgatatggatctaggagctgccttgtgcctccaccctcgtggttcttagatgctttgcggtgggctctgtggcaaaagacccatagtcatagcacagcccgcaccacctttcctctttcgttcccctaaagtcactaggggtggagcttttaccctcgagctacttacccttgcccgatggactagagactgttctactaggccgagaccccattgagatacacctaggatctggatcccatggttggggtcgcctccggtctatcggaccaccaaaccgatgtcatcgagggttggtagggacgccatgattatcgtcctc

SEQ ID NO: 114488 - DNA, 557 bp, Zea Mays
gcattctatgtaagagggaataaaaaagctccttgaaatccatgtaacatgtttggacggacgagtcagatccatagaatagccattcattccttttttccaaattgcctaggacataagaatgacaatatctatggcaaaggacaccattaaatttgacttcgattgcaagtatagcttgagtagtattaacatgccgtgagtagaaaacattcagcttactccggcgccttctggcaaaattgcacctaaaaacgacgggcatgacatcccctgggttgatcttgtctggaactcatattatgcctcaggtcgggtccctcatgcttctcaggtgaagggttccttcaggtggaaagacgttataagattggttgactattacagaggtcattctattcccttggttggcgatggtaggaacatcctcctgtggcacgatgtttagaacaacctcttcctcaagtcttcgttccctagcctcttctatttcaccaggaaacaaagctgctctatgcaaaattttctcgagaatataactttggaagataattttc

SEQ ID NO: 114489 - DNA, 329 bp, Zea Mays
ggattgctgactgcatcagctcgaatggaaaattcagagcttccacccccttcaggcgccatgagatggggatgccacactcaaagcgttgggttcctaaattaaaagctaaagctgtttctttcgctgttccgctgatttctgctgtgtggcctttcgtgggcgaagagggggcggctggtgctgacaggctcttgctgaatggtggcactgaagctggcatgctggaggcgcttggcttccatgccggagggggatcaccaacaaagctgattgcacccaaggtaattgctggtgcaggtttctctgcaggtgctcttcgcactgat

SEQ ID NO: 114490 - DNA, 520 bp, Zea Mays
caatttaacatgactgttgtactatcactattgttgtattatgacagttgtaaccaattttgtcacgtttaatttcccaccgttgtactatcattgttgttgtgttgtacccctatacaatacaactcaagaacatgtgctggtctgttcagaggagttgagtagagttgtagatactcaatgtgtctgtgctgcagtgttggtcggtttagaagctatgcagtaatagataagacaacttgcttattgtaaacaactaacacagataacacattttgcttattttcttcactaagtcttaaaaaatattttggttaccatccattttcgtttattttttgttcgtatttatttctattcgtatatccgtatatcccgctcccattccctgtggaagatataaggtaacagaaacgattgagggtgtttcccacccgttcctgcctattttcatccctatccgtcgggcagtggagatgtgaggacgatgtagaagacttattcccttcccttctcgtgg

SEQ ID NO: 114491 - DNA, 630 bp, Zea Mays
acccgtcagatggtgatgcatggaaggctcttgacaactttgatccagattttgccagcgatgcaagaaacgttcgtatcggcttggcaactgatggtttcacgccgttcaatataaccgctgtgtcgtattcatgttggcatgtcattgccatactgtacaaccttccacctgctctttgcaagaaatatgagtttatgttcctatgtcttgttatacctgggcctgagcatcctggcgtacgcctcaatgtgatgcttcaaccactgattgaagagttaaagaagctttggcaaggtgtggaagcctatgactgcttcaagaagcagaaattcaatcttcgtgttgcatatctgttctcggttcatgattttatggcgtatggtattttctctgaatggagcctgcatggtagattgatgtgtccttattgtgctaaagatacagattgttttcgtcttagtgctggtggcaagatatgttactttgattgccatagatgttttctacccttcaatcaccccttcagaaggcagagaaaggaatttaggaagggcaccatcgtcacgaagggaccgcccaagcgacatagtgggatagaaattacagaagagtataggaaacttgtcc

SEQ ID NO: 114492 - DNA, 384 bp, Zea Mays
agggcttgaagtatatattatcagggagtgaaaagatcggcggggaaggaacttgggtacagagccagctgatccgtagtgcccacatgctcggcgtcgtgactgtgttactgtcgtcgtgatctgtcggtcccccttgctatgccatgcgtagtcttgtttcaccccgtcattgtgagcgtggtgagtggtgaaacaagttcacgagtcactatggtacctgcgcgccacggtgaatacgctgtcatgaaatatcctaccgttgtcgtaggtgatcttatcccaaattcacgaagccagtgaccggtccctttaaattggagactctccctgctccgcctctctgttacgcacccaacacaacctcagccagcccctctcgac

SEQ ID NO: 114493 - DNA, 298 bp, Zea Mays
aggatgtagggatgtgattagatctggggaaggaatcactgtgggccgttgatcgactgatgatcagttcggattaaaccaggggataacgtttcggtccaaggaatcctgtacgctagatcgcgattgtgtggtttacgtcgttcgcgggttcataatgcgcttagtctaatctgagccatcgagcgttgatccaacggctcagatgagcctataccctttcgccgaggcaaactttgctaaacagtccccgtgcttttatgaaatagaacccgccgtcctcgctagtaggcaaaac

SEQ ID NO: 114494 - DNA, 730 bp, Zea Mays
gggatctgcctttgttagctttgtgttcagatgcttgcaaaggtcttaaaaatgctatgaacaatgtcttcccatatgccgagaaaagggagtgcttcagacatctgatacagaactacataaagtagtttggtgggtctgagtacatgtatccagccgctagagcgtataggagagaggtcttcgaccactactttagaagcatctaagaaataccaaaggtcaacacttggctaaatgagcatcacgacagtctttggtaccgaagtggcttcaatacggacatcaagtgcgactacataaccaacaacattgctgaggttttcaacaattggattaaggattggaaggatttgcctgtttgtgacttggctgacatgataagggaggaaattatggagctgtttcacaggaggaggaggattgcacaaaagttgcaaagacggattttaccgtcggttctgcatatcctacacgccaggacaagaggtttaggtcatttagcagtacagaaagctgacaactacattgcagaggtaagggataacaatgatgtgcattcaaagcacattgtaaatgctcagctgcgggaatgttcgtgcaaagagtggcagcacacgggcaaaccatgtatccatgccctgtgcttgataacagctcaagaatttagggatgacaggatggagggttttgtcgacgagtactactttgtagctatgttcaccacagc

SEQ ID NO: 114495 - DNA, 272 bp, Zea Mays
agcctatgaggagtggtttgccgcatatcaacaagtcctcggttttctgctcagctccctgtccagggacatcttggcgcaagttgccatctcaaggacttctgctgaagcatggaaggcaatcagcgatatattcgcgtcgcacacgtgtgctcgtaccaccaatgtatgactcgctctcgccacgacaaagaaggagaacatgagtgtagcccagtactatggcaagatgaagggacttgcagatgagatggctgcagcaggaaagtgtg

SEQ ID NO: 114496 - DNA, 352 bp, Zea Mays
tggagatgtacccaaggaagagtgaatgttggtgttataccaaaattcagcaactgggagccactgaaaccatttgcccgggcatgtgtgaacgaaacaacgcaaatatgtctcaatgcacggattaaccctctctgtctgcccatcggtttgtgggtgatacgcagaactcatactgagtttggtgccagtgagagaaaacagttgctgccaaaactgactggtgaagatcctgtccctatcagatactatggtgaatggcataccatgtaatctgtagccttggtctaagaataatctggccaccttaacagctgtgaagggatgtgccaaagctaagaagtgactgtat

SEQ ID NO: 114497 - DNA, 321 bp, Zea Mays
gaagttttgtttttatgcctctctgcaactacttctggagtcttgcaaagcatggcactcattgatttgcttgccttctgggtacttagttttggaggaacggatacaagaaatgaggacatggcagtttgggcaattttcttctttgcttgcttgttttttgtcccagaacttggttcaggaccttcatcattccgctcttctccctcttcaccttcaatattatcagtaatcacaagtctcatgttccttttcagatacatgtgcatttcctttgaaaccaattctggtactctagcacacttcatggtgtcaccaaac

SEQ ID NO: 114498 - DNA, 641 bp, Zea Mays
cgagcacgtgctggtagctgcaacttataagagaccttcccaatgcgacttgtcacctggtatggcccaaagaagcgaggacccagtttcgacggagtagccgcggtgacacccactgctgtctgatgttgtaaacggagccatacccagtctccttcctggaactctacctctcgtcttgactgatcctgatgtcttcacaatttgtgcttgcaccagccttgctttgatttcagtcagaaattcatcccaatcttgaagctgttgatccactgctgtaaccttggcgatgcctggatggtaagacaccaatgtcggaggctctcgaccatatactacccgaaaaggggagcacttgagggtggtgtggtatgaagtgttgtaacaaaattcatcccatggtaaccactgtagccaagttcttggacgatgccctgctaggcagcgaagatacatgataataactcgattgaccacttctgactgtccatcagattgaggatgaaaggcggaactcatatgcagcttgacccctgctaagcgaaacagctcggtccaaaacgcactagtgaaaaccgtgtctcgatcactgacaatggagcaagccaagccatgcagccggacaatgccatcaaagaaag

SEQ ID NO: 114499 - DNA, 592 bp, Zea Mays
cgtaactcttcttctctttctcaagtagtttcatcttctccacggtgactccattgcactttgcacattttgatcactttactccttgtgacatgggtcagtgtatcaataatcttgataggatacttagaataagtcagatcatcttgaacactaagatcctccataggtagctgctcttcgggcacctgagacatttcttcagttgagatacatggaagacattatgtacatccgcaagataatcgggtaattccagtcgataggcaacttcttcaactcgttttaagatcaagaagggtccaataaagcgaggggacaatttccctttgactttaaatctcctcataccctggatcggtgacaccttcaaatacacgagatcaccctccttaaactctagcagtattctctgggtatcagctagctcttctgccttgattgtgcagttctcaaattctcacttatcattcgtacttgttcttctgcctcttgtattatttctggcccaaagaactgcctttcaccagtttgatcccaatacagtggagtcctgcattttctaccatatatagcctcaaacggtgacata

SEQ ID NO: 114500 - DNA, 456 bp, Zea Mays
caaggcacacatggacttagtcgtgatatgtgatcgtccaacccaagtgcttagagaaaacggaggcaaaccaaaagctaactattgtctaaaacctaagcaacgaaaagaagtgatgaagtggatgaaggatattaaattccccgatggttatgctgctggttttagaagatatgtgaacttgaagacaatgaagattaatggactgaagagccatgacttccacataattatggaaaggctcatgcctgtaatgtttcgtgggtacatttccgatgttgtgtggaaaacgttagctgaatttagctatttctatagacagttgtgtgctaaagaaatcagaagagatgtgatggaacagctggagaaagaggcaccggtgcttttctgcaaattggaaaaaatatttccaccgggtttcttcaatcctatgcagcatctctttatacatcttcc

SEQ ID NO: 114501 - DNA, 436 bp, Zea Mays
caaaatcttattgtggtgattagaaaatttctatgaaatatttggattaaagatggtttgtccttgaaactatttttctaaaaccaaataaatgggaaaaataaaatattagctatttgtttaaatcattttaaaacataagtcataggatgaatacatgaattattgtttttttgggagattaggtggtttcaaaaaaatagaaaagttatttgatttttaggaagcatgaactacgcattcaaaattaaactattaattaaaggaataaaatgaaccttgcattgcatgaccggtaaatttatttgtttgttcattttaaataaatcttgaaattcaaagacctgatttgaattgggattcaaatttgaatttaaaaaaaatagaaaggaaaaggaatagaaaagataaaggaaaagagaaactcgttgtctgg

SEQ ID NO: 114502 - DNA, 652 bp, Zea Mays
ttttgtcatttcagttgattggtggcttgcatatggtggtcgaaccattgagttatataagtttgcaagacgaattgttagtctttgtgcttcatcatccggttgtgagcggaattggagcaagtttgaatttgtaagttaactaacatgatcatattacactatgcaatttgtagttgttactcctttatttattgttgtttgcaacttgtagatgcataccaagaaaaggaacaggctagagcacaaaagactgaatgatttagtgtatgtttcatacaatagaaagatggccgctaggttccaaaaaatgcgtgaagaagggaagaactttgatcctttggttcttgaagattttgattaggacaatgagtgggttgatccattagctaattcatctgttgttggggatgaccctcttttcacatgggagcttgttgatcatgccatcggtgcatctacacaacttcaaggccgctactttcctaggagagctcatggtactcaagtgccaattcttgaggatggtgaagatggtgttgatgagggtgatgagaatgaagacgatgacaattttgtgcttgacgaccttgatatggatgatgaagaagaaacaaacaacagtggtggccctggtgatgagcaagacaag

SEQ ID NO: 114503 - DNA, 389 bp, Zea Mays
gtccacttgcgcatataagacatcagatgactttggttgctaggctcaacagaccatgttaggactcaacggctatcttcagattccaacggtcggctatcatggcaaagtggtccatatgcatggacccgatccggtgcctctaacaagacctgtgcccagcagaacagctccatgtcgtggcagaccaacaggggcctggtgcacaacataccttcattgttcatggtccggtgcgacacaaaatagtgcatattttcccactttattccaacggctatatggggtggttggggctataaatacactccaaccagcatattgaaggcataagagctacaccaaacatctctacacctagtgcaattactcccaagcattcaataacc

SEQ ID NO: 114504 - DNA, 561 bp, Zea Mays
cgaggtctcccactgaaaaggatcgttgtcgcatggccttgtcgtgatagcgtcttagagtctgctggtatcgtgctgattgaattactgcattcagccgttcttcttcgagtacatcaatgtcctccagcctagtagcttcggcttcttctatgctttcgaagatcaacctcggcgccccaaacttgagatcagcgggtaataccgcctctgacccatagaccatgaagaaaggagtgtttccatgtagggctcggctaggttgggttcttaggctctaaacgacgtagggcaattcccttatccactttcctgcgaacttttcattcttatcgaagacctttttcctgagtgcctccaatatcatcccgttagctcgttcaacctgcccgttggctcttgggtgtgctactgaagcatacttgatctgaatgcttttttgctcgcagaaatcgaagaactctaaacttgtgaagttggatcctaggtcagttatgatattgttcggtatcccgaacctaaatattatgtcttgtatgaattccacggccttagctgagg

SEQ ID NO: 114505 - DNA, 337 bp, Zea Mays
gcggtggtggccggagggagggactgagtcactggcacggtgaccgtggctgttaccgtggcaaggccttaggcaatagaagggctgtgtattgtgatcaattgcgacgtggtaagatggctaacagcgtggcataaccgcgaggaacgacgacactacggtgatggtcgcacggccacgtcgccggcaagtggatgagcgacagagcggctactgtgctccaagttcatcgacggcatgatcttttcacccggggaacgttatctgcgtttaactgggcgtgaatcgcggcgccggcgtgattccgagcgcaagatcaccggcggcgagggggggg

SEQ ID NO: 114506 - DNA, 565 bp, Zea Mays
atgaattctgcccgcttgtctctgggcacctgtggcatctggacttgcacctgaggttgaggtgggggtggccgctgctgcacctgctgcatcgctgctaaggtctgaccaattgcttggactgcttgggtctgcatcaggaacatctgctcaatggtcatcgggggtgacggtggcaactgttgctgagctgcatcttcctaaggtgcctgctgttctggctgagcacgccttgcacctcggcgcttgttttcagacatctgtagaaagcatacacaaatcagatctgactctgcagtctctcagcataagaaaagatgtatagaaaatcttcatagcactgaacaattgatcatcttcactgtcagctacttagataaagagaaaagtggaaataaagagattacccaactaaataactgactttattaataactacaccaagttgcaggggatgcccacaccttgatgacaatcattacaaagattcgacttcattacatgttcatcatgacaaacatttgaacatatggaaagcaaactaactctaactaagactcaccga

SEQ ID NO: 114507 - DNA, 543 bp, Zea Mays
gtcatcagttgaacagacatcgcacttgccaactgctgcatcaattctggtggaggatttgatagcatttgagacatcaagtctttgaactctttctttgcctcctgcttaaaataatccgacaacacttctttgtatcgatcacgtttcttgtacaaaccttcccactgtggtccgaatccttccttagacgagattcctcgtacacggcctggatgctcagggttaccgagaccagccattaggatgtctctctccctttgtggcttaaatgatccttggctctgcttagctgtcattacatatatgtttttcgcaacttctttgacatttggatcatcaaaagatacaccagcctcagtttcccagggttttctagcacgaatctaatttgccgtcctttcaccaagttgctcggaaagcatcggcaaccctgcggccttcttctcggcgtcttcttgtctccatttagaaacttgacgcttgtaaccacctgtgcctaagtggtggtggtacttgttcttcttagatagttctgatttt

SEQ ID NO: 114508 - DNA, 627 bp, Zea Mays
acttgttgtgctattccggctgcacccttaggcgacttttgcgcggagtgtcgcacgcgagggtagtctgcgctgcctttcgcggtgactttggcgtggtcgaatgccaaagaccgttgatgcggtctgtttcgacatgttgcatcttagtttttgcggtggatttttgcagatatattacatggctccgcctcgttaaaaacctcaccccccccaggaagaaaagagtgcgggcctgaataacgctgtttggtgaattacaagagcgcgtaggccctgaggacttagacaaaaaatttgcttagattgtcaatattccaggaatggtctaggtcttcgccggatggcgttgttagcctgtatgcgctggaggaagccttcgacttgacgatgaatggaccttcccactttggctccatcttgccccgtgactctgtccgggtggttcggacgagtacgaggtctccttcgttaaattctcttgggacaactgcgtggtcgcgccaggccttcgtttgagcttggtatttgttgagggcctgcagggtgaagacgtggtcttcgtcgatgaggtctttggatgtgggttcgtcgacgtcggggatgacagatgcacttgttcgaggg

SEQ ID NO: 114509 - DNA, 872 bp, Zea Mays
gttgtgacgcatgtggctcagctgaccgagtcctcacctccagcccaacgaactctgttgtccacattgcccactcgagcatggacccggatcacttgacgaagagaagcatgtgcctctcggacaggcacgaccccgaaggcaccaccgacggccatctcgaccactccgccctcaaaggagatggaaggagtgcgcagcaccatacccagctccttcctagacatcctcttcatccagggaagggtggaggacacactcatttccaacgacgagcccaccgtactgggggaggaacccccccagcatgacgcacgccaacaccgcaacgtgtggcgtcaccatgaagccggggaacgagatccaacacaacctgtctcccaggatgaggcctctaagtaggggaaacccccgacaaaagagcgatccgagaatgccgcaactcctgtcgtcgtgatcgtcgccgcgcccagaacgtgagcgtgaacaagctgaataggacgccaggctccaacgcgagaacctgtttctccctcgaaacctattccctgacttttctcgagcactaaatatgccaagtgaggttggaggggtcctagctcaaatcgccaatggcctaccgcgcaccccagactcggaggggtatcgacaggtactcacccaaacggcgaaccaccttctcccccttgctcacccgtcgaatgatctactccacgccatcaacggtcgacaagatgcacggagcaacatcaatgctttgcatgattgctggcatgaggaagagatgaggcggcgggaagagtacgacagggatcatggtgcgccagcacacagccgtgccaccaggaccaagtcagcaacagcttccacca

SEQ ID NO: 114510 - DNA, 777 bp, Zea Mays
atttgattgaagaacatatagcctttagggtatggccgcttgtggaaagctgggaaatgccgaaggaaaccatcgctgactccggtgagggtaatttagtccgactgaagtatacctttaggtttggggataagtttgatgagccaaatgatgactggctgaagtgcattgaagccactagcaacgagctacatggggcatactccaaggccgaggacaatgccttgtccgcagctttcgggggtcggaataagaaaagattgaacaaggtatttgatgctattggcttcgtataccctgactattgctacctgctgtgagggcaaggggtaaaaataaagattgttgcttcgagaaaggttgctgcttcggccattacagctgagccgaagggcaagaagatgaaggttctgactcaccggccgcgttacattgaaccggctatgatacctgaatttggcaaaggggcctgttcagctgccgaagcaaaagaaactgtcctgactgcgtagagcactaaagagccgactatagtgccgatggtacttacagtcgagctagttgagaggaagattgaagagccaaggattgaagaattaatgaaaatgccagaaattttgaatccttcaacagagataaaactgccgaaggtgcaaaaggcttctgccgcaactcccaagaggagaaggatggcaaacgtgctagatgttgtgctagaaatgatgaaggccttgagtcctgctcttgcaaagaaagttgttccaactgaaaccaagt

SEQ ID NO: 114511 - DNA, 333 bp, Zea Mays
agctcatgcatgttgcagaagcattttacatttggttttagcctctggctcctcatagctcaaataaagacccccatcttgataataacttcgggggtaagctgatggaggtaaatttcgaaagtctttaaaacttcgaccagcaacttatccaaaggaaaccgaagccctgccttcatgaagcttctataaactactacctcgtcaacttcgggcagagggacattactttcccctctagccctcacaatagacatatcacagaagtaccttcctctcatagcatcaatttgcccttgcttgatggttgacttcccgaagacaacatggctt

SEQ ID NO: 114512 - DNA, 702 bp, Zea Mays
cccgggttaagtaagcgtgagcatgttgcaccgccttaagtcgtcgccgacttaagtcgattgctccgttagcagggcatagtggtcaccccgggttaagtaagcgtgagcatgttgcaccgccttaagtcgtcgccgacttaagtcgattgctccgttagcagggcatagcggtcaccccgagttaagtaagaatgcaagtccatcataaatgagccgagtatctttgaaatctctctttgttgatgatatatttccattatacagaatacatggtcgccccggctgttttgaaatacagctaggggtaaaactttcggaggtgctctatgttcgaggagttcccaacttctgtgccatccatctgggtgaggcgatatgatccgggacgagtgacctctgctactatgaagggtccttcccacgagggtgataacttgtgccgtccctcccctgttagaattcggcggaggacgaggtctcccatcgaaaagaaacgttgccgcacagctttgtcgtggtagcgccttagagtctgctggtatcgtgctgattggatcactacatttagccgttcctcctcgagtacatcaatatcctctagtctggtggcttcagcttctgctatactgtcgaaaatcaaccttggtgccccgaacttgagatcagcaggtagcactgcctccgacccatagaccatga

SEQ ID NO: 114513 - DNA, 408 bp, Zea Mays
gtcgtgatactataaccgtggctgaagtgtatgaagctttgactacgaaagaaaagatgagacagatggttaactcgaaagatgctgctggctcgagtggagaagctttgtatgtccgtggccgcactgagcagaaaaagtctaactcaggtggcaaaggaaagggaaagaaccagaggggtcgctccaagtcaagggggccatccgatgaattattttgcaaatactgcaagaagacgaaccatgtaattgagaactgttacaaactgcagaacaaggagaagaggaacaaggagaagggtaagaacggtggtactgtctctgttgcatccgaaaataattctgataatggtgatgttcttattgcctttgctagttgtgctgctgatgatacccaatggatcctcg

SEQ ID NO: 114514 - DNA, 288 bp, Zea Mays
ccccaccccacattaattttatcttcttgcggtagtaaataaatcaaagggcctaaccaccgcaaggtacaatcccagacttcctgcacattcatcttctcctagggtatgccgctgccacacacaatcgatctagtattttgcatctgcatcattgccggttccatcaatacatcttccaccatcattgcttttgttgatgggtcagcatggtcatcaagggtctctggtggtcgaattggcagcaccgacagaggttgacggctcccaggcgtgctgcggtagttc

SEQ ID NO: 114515 - DNA, 768 bp, Zea Mays
cacaattattgtctattacaacattagacgacataacatagagctattatgtcctccacgatttatggttcgaactaagtacaatgttctcaacaaagatatcacataaaaactgtccacgccaggaatgatgtcgacgccatgtgacacaacgttaaaaattactcaaacttaaaaataaactgctgcaacttctttttctgttccttcatgagaatccaaacttctggatcaacatcttcctcattcgttgaacacagcatctgtaatcgtgattgggccgattcgagttcttgaagtttcaattccctttgtctaattagtactttctgtgcttccaattccaaccttttttctcaaattccttgtcttcttctgtgctcttgtctttcttttcacatttttcaatagacctctgaatttgtttttctgtcatttcttgcaaacggcttaagtactctgtagaagaggaagatgcacctttctttctctcagatttactgtaatcacgacctctcagtcgtttgcctgtcaacccagcagaaccactatcagtttcaagtgggtcaccagatggattacctgaagatccaatagattttgcatttaagcctcggaacgaatgtcctgcacatatactctcccatttgggttcacccttcagtttatgccagcaatgcatataatggaatggtttctgttcgtcgtgtgcaaacaatgttgccgcctttgaagtctgcacaaatattagatgatttagagaaatgt

SEQ ID NO: 114516 - DNA, 294 bp, Zea Mays
ggcagcttcccgcgcctcatcgaccttggagcgcggtcttgagggtcaggaagctggtctggattgcactgctcccatggaagtgactgagggaccttcagccttagaggtggctgctgcagagaactcgaccctccaggatggtgctggcgcttacccagcccccgagggtgttgccggggatgattcggctcggatgggtagcgcaagctgtgacctagccctcgagggtgttgccagagatgatccggttcggatgggtagcgcaagatgtaacccagcccccgagggtgt

SEQ ID NO: 114517 - DNA, 667 bp, Zea Mays
gtttacctgggagaaagccgaaactactcgaaccatccttctttccaagtcactttcaccggataccgcttcccagatacttgccaaaatgttgcccgaaaagccctccgacaactatgccagaactacagcagagtaatctttgaaaccccccttcgctactttccacccagcaacaaaaatacccccgcctggaggaaaagacttctggccctgtcagggagagaccctaccgaggatgaccccaccatcatctacatggctggatacctccacactctcgataaccaatatgatgaccttgccttccactgcactcacctaaactcccgggtggaaagcctggagcaacaagtcagggaacttacaagggaaaaggcatcccttcaagagagcctcaagatagcgaaaggtgaggaaaccaacacccgtgaggcctaccgcactctgaagatggattacgacaagaagctaaagaagctcgcccctgcaagaaaaatccgcaagaagaccagaagccaaggatgtcagactgagcagaaggaagaagcccctccagccctacctcctaccaagatagggaactcgtccgacaccgaggaaatgtccctagctagccttgacgaccttctcaaggaatttggggacaccttagagatggagtttg

SEQ ID NO: 114518 - DNA, 495 bp, Zea Mays
ccgaggtgggataattctgaggcgcacatggtcgtcgtccaacaacaattgggctaactggaccaattgtgtctttgtcaacgggtaatagtggaggatctcctcatgaggagcatcgagctctaagaactttgcctggccatcggcacagtatgcgctcacctttttcctccactgtcgatcaaggtccctctaatcgaccggctacgtgcactacacgaacatgtagtgtgtgtggtcgtcgaaggtgcatatcatgggagcaggttggctctagggcaggtggtctcccactttgatgagatcgacgcaattgtaatagcataaggctttgccaccgactaaagtaatgaggagctggacaacattgaggagcaggttcatccccatgggctgttgatcgcggactggttcaatgtgaagttcctcctgaccgggcctccagactcatccaccggtggtccatctgccaacgtttagtcaacgcttatttta

SEQ ID NO: 114519 - DNA, 597 bp, Zea Mays
ggactactttgttgatcgtccattatacaacaatgaaatgttcagaagaaggtacattttagaaagcattggataaactgtaattttgatgcttatgattagtacgatgatctcattcaaacattggtgaactattttatttgtcgtctgcagatttcgcatgaggccagaactattccataacattgtgaggaagattgctaccaagaaaaaatacttccaactatcacgtgatgctgcaggagtattaagtttcagtcctgaccacaagtgtgctgtaggtatcaagatgctagcatacggaggacctgttgattcaatggatgaataccttaaaatgggagagagcactgtccttgagactttgaaggaatttgctttggctgtggttgatgtctttggcgatgaatttcttcgcccacccacaagtgctaagatagaacgtatattgaaacggaatgaagaaagaggatttccgggaatgatcggtagcatagattgcatgcattgggagtgggctaactgtcctaccgcattggccggtatgtacttaggccacaaagggaagccaactatgatacttgaggccgtggcgac

SEQ ID NO: 114520 - DNA, 603 bp, Zea Mays
ctcgctttgctcgccacttcaaagaaggggtaatgtagttgggagcatgtagcatatgtgctgagcactcgggctattcttgacttcctgtactataaagaggatgtcacatatgatgcaagctactgtactgccagaagaagagaaatattttgccgcagtacatggggccaatggtttcaacttttaagtccctttctacatcccacctgtctttttctgtctcgagaaatttggccactttgtattgactaatatttcttgtatttgagtttggttttctgcttcctcgctaagagaaaaatggagggtctaggggcatgcacatgataattaggtattgtcctactgcagcattttcttctatgctttcattgtttctgaaatatttagactcacaccagaaaactggatttccactacaggtgttatcttgcaggtgtgaatcattaattggatctcttgtgaggtactttaatagatcatagaagatgcagatagtatgatagttactgttgaagaaagtattatatcagttagcttttggcaacatggatttgaattatcaaagtaccaactcgcagatcagaattttcgaaatta

SEQ ID NO: 114521 - DNA, 537 bp, Zea Mays
atttgagtagacgtgcatagagatagtctttttatagtgaagagaaggttagtgtgcttgtgatatgcatttgtgttgtgctgtgctctaggagttgtgttgttgcgctcttgtgttggtgctcttttgattgtaaatgctagcaagaggctccgagttgtggggtgccttgtggagatgccatctctcacatcagaagatctgagggcttaagattgaatgttgtaatcattcaagggggttgaaagagagcacatccttagggacacctcaataaagatgtaggttctttagaaccgaacttcggtaaatcgaatcacatgtctctctttgtgtgttttgcatttgcttgtgatttgttcttccctctcaccctccctaagttctcttgcttgaatcttaattcatatccttgagtgttgctaccaaattaattctgcaatcctttgagcacacttggcaagaactctctccctacaactccgattcgattatctctatctctaacatctagcttggcatctagtttgtttttaa

SEQ ID NO: 114522 - DNA, 351 bp, Zea Mays
ataacactgaggttgcccaaggtgaggtactcggtctgatgtagcctttttctaacaactcgtcaatctgcttcttgaattccaccaactctggtccggacactcgataagctctcttggaaaggggcggtgcctgggataagctctatggcaaattcaactttcctttcaggtggcatgcctggtaactcttcagggaatacattgggaaattctgacacaatcctaattgcctcaatcggattggactccttgtcatctactgataaatggtgacaagctccttcttctagttcaggtaagtacaacttggttactacttcctttctagatggggacaccaacttaact

SEQ ID NO: 114523 - DNA, 395 bp, Zea Mays
ggttgagtttggttgctggtttagatttgtcttggctcagtttcattctgtccatctgcttccatcctataaaaccgaccctatccacaaaacagatcctatccctaaaaccgaccctatctacaaaacaaatcctatctctaaaaccgaccctatccacaaaacagatcctgtatctaaaccgaccatatccacaaaacaaatcatatctctaaaaccgaccctatccacaaaatagatcctatctctacaaccgaccctatccacaaaatagatcctatctctaaaaacgactctatccacaaaaccgaaccccccactcttccaacaccacgccaggaaccctgatttggagtccaaacttaaaacgaccataactttcgcctcggaactcg

SEQ ID NO: 114524 - DNA, 1462 bp, Zea Mays
gattatgggatttctcttgcctgcatagtgtacatcttgcaattccccaaatgggggagaaagaagtgagtttgggatttcagcaaagttgaagtaagagcttccctcattccgctcaaacagctcggggtgattgcagacctaaaaggcaatgcagagaaatagcatccaattaaaaccagaaaaggagtcacatttagcaaaatttacgttagggaaggattttttctaggcagttgggttcttctaaatgattttacatatatgatcaaaagcaaaaaaacatactataacaacccgctaccttccgtaactgcatgacaatattcatcaggctaagtaacttcttgtcatttagactgccacgacttccagcaagcaactcgttaagcgagatcttattttttatggcttgatagaaaacttgttgacgagaactcaatttgcagggaacaatttcttctttctttttggtcatttcagcaatgacatcaatcttaacccggcggagcataaagggcttcaaaatagcgtgctgtgaaaaaaagagaagtgtcattataatcttagcaagatagcaaattgtacccagactcaaaatattcaaaaaacaacaacataaacagtatgatcaagtcttaccaatctactaagttgatgttcattcaaagctcctccatgctcagcatgaccctcaatactgtcaaaacatcagcaacttaagtatgtacaaaataaagaaagtacaactagaaaaagagagaacaatacccctttgagaaccactcgttgaactgttcatggctgtcaaatagagtgggcataatgaaatgaagaagtgcccataactcagccatattgttctgtattggtgtcccagtaagaagaagacggtttctacagttgaagctcagtaatgtcttccatcgctggctgcagcagagagataatttgtcaagcaagggaaggcatatacgatagttccttaataaatcaatgaaaacacacacacacacagagagagagagatttcaacatgtaaagtcacctgcttgaacttttgatagcctgggcctcatccaataccatgtattgccatttaacacgtctcaaaagcttctcttcattcacaagtatctgatagtttgtaataagaatatgaaagctagcatctctgcagagttaagagagaaaaggttagatgattaggcaatcaggttatacgctttttaaagaaaaggatcactcgcacaagtttctctcctagacagcaactcacctgcgatacagacgcttggggttgatattctttcgaagaatcatcctctctggaccccagtaaggaagtatctttaggtcagggcagaatctaatcaactcctcagcccaattattcacaacagatgcaggagccaccacaagaaaggggccccatatgtttttgtcctgtgtgatatatcaa

SEQ ID NO: 114525 - DNA, 479 bp, Zea Mays
aagccaatacgcgggcctcatggcggatcgagggatcatggggaagaaacctggcgcagtgaagaatggcgggctggcacggtcggtccctgtcctggctactggtttgccaccgaggcctccaaacttcctagggatgttcgtcggtgccctatgaagctttgcgtggcatcggtgagccggttgcgtctggggcactgctccaaattgttcattggagcatggcggcgtggtggaatcgcccctcaacgtggtcaggactcccatcgctgccatacgcggtaagaagaccttcgtcgggttcgctgctatctctactacgcgtagcgctagggaatcatgaactgaacgtctatgcgtgtggttggggtgctcaggtgatgtcctccgccgcggtatgccccgcgccgccgtgtctagtaggtaaaaggaagaagaacggtcccgggccgttaaaccgttgatgaacgactcagatg

SEQ ID NO: 114526 - DNA, 697 bp, Zea Mays
cttgtgttgatgcctactgcagaggtcgtttctgaatgtaatgcttgagtagcaacttaggatcgttgagccgtgcttcagactgtcttcttcacgatgccagcactttaggtagtggtggccgattgattatcagcgatgtcgggtccttttagaggtgatggccgagtggtaacgggccgcgtcggtgttttagaaataacgaccaagcggttactggcaacgttggcgttttagaggtaacagccgaacgattactggcgacgttggtgttttagaggtaacagccgagtgataacagaccgcgtcgaccgctttgaaagtaatggccgagtgaagttagataatgtcagcgtttttagaaacaacagctgagtcaatttgagccgcgtcggccgttttggaaataacagccgagtgatgacatggcacgccagcgttttagaaataacagctgggtgatgacatggcaggccagcgttttagaaataaccattgggtgatgactgggcactttttagaaacggcatctggcacgggaaaaccccatatgtactgcactgtcgcacgcctccacgctccgtgccctagtttttgcttttttgcatccaggctttctctgctttcctgcaatatcgcttccgctctgctcgctagcgaggttgagatggtgcccaagcggaaagcttcgagttcg

SEQ ID NO: 114527 - DNA, 425 bp, Zea Mays
agagtttcaaggcgtgccccggggtcgacaggctatccgggacgtccctagacgacgtagagtcgaagagggatgaagatttaggattggttcaaagataaactagatctaaattacccctaatgcgatgaagaacaaagcaaataaagtatattgtattaatagattcaattgtaggtgccctcaatcggttgtacccctttatatttatagcgagatgtctggatccgttcttatgtgtttcccaacatgttatcgtggattagcatataagcacgcgcgggaaagggactttcgcacaagagctaatctaatcgtggaccatccaggctacacccacggtccgtctagggcgtggaccgttcgggccacatggtcgaaccatccgaccgtccccaggtgccacaaatagtgctcaacacatg

SEQ ID NO: 114528 - DNA, 360 bp, Zea Mays
caagtatggctcggcgaagaggtacgtggccatctgagccgtccagaatagatcccgcagcccagattaaaacatcccaacaacgaaacggtacgcatttctgaccgtgcgatcagagatccacgactaggagtttaccatgacacgagtttgtgctagccctcgaatcatcgaccgacggccaggaattaaaatagcagatcgattcctacgcgcccgatctagatcggacgaccccgatcgcatcaatccactcgagtccaggacttgatcttgatcgtcaaacacatatcctacggtggacgccatcactcaccgcgccatctaatcctgtacgcccatttcctgatctacgcccca

SEQ ID NO: 114529 - DNA, 605 bp, Zea Mays
ccgaacggttccaccccctggctacgaagagcccaaatgtaaacacttaatctaacaatagcattgggggtcagctaatgaaggtaaatcccaaacttcttcagtacaatagcaatcatcttattcagggggaaccttagaccagctttaagaaaacttttgaagactactacctcgtcttttcctggctttgggatagtttcctctccaccaaaacgaattaattccttcttggcctcactaaaataacccatcttcaccattttagaaagatcagcttcagaaatggtggactttccaaagtccaaatgactaggtttacttggcatcccgcagctgtactcatcttcgaaaccaacttcttcaacatcagcttgtgttgcttcggcagcaggtgtgtcctctcatgaaaccagcccagaacgcctcattgcttcggaaatcggaacagtttcagcggcttcggtctcatctccatcacgctcaaccctagcagtggaccgtactctggccatttgattttaaatttcttgaaaattccttggaaattaataaccttttttccgaagctcttctcgtgacgaagcagaatccaaactggagct

SEQ ID NO: 114530 - DNA, 437 bp, Zea Mays
cggagattatcgatgttccatgagtgttcttagtcttcgccggatgacgttgctagcctgtaagcactgggggatgcctttgtcttgactatgtacgacccttcccacttcggctctagcttgccctgggactctgttcgggtggtccttacaagtacgaggtcccctttgttgaattctcttgggacgactgtgttgtcatgccatgctttggtctggacctgatacttgttgagggcatgcagggtgaggacacggtctccgtcgatgagatctttggaggttggttcgtcgacttcggggacgactgatttgtttgttcggggggacccatgctttaactcgtgcgacgtcattgcttcggatccatacatcaagcgaaagggtgtgaacctggttgctcggcactctgtcgtatttatggcccatacgacttc

SEQ ID NO: 114531 - DNA, 328 bp, Zea Mays
gttgggtgtagatatagcccctagtacaatactgtagcaaagaagtcctccaccattgaaacaaagaaattaaaatagatgagtgagtactttcatactctgcaagttcaccgttaactagggaggtcagggccaaaatatacatgctcttgggtaggtagagttttcaacacctctttttaggaaaccaacatttgcatgcaaggtttaattcccttttgtataaatctttttgattactcttaaaaacaccactgggctccttgtcctgtggcacacgacattgcttgttggaccaaaacaaagctattttccttcctatttttag

SEQ ID NO: 114532 - DNA, 430 bp, Zea Mays
tcagaatgggattattcgaaaccctagctttttaacaaaggggtacaaccccctatatcattaagaaatagacacagaaatagttccatacatggccatctagccaccacagaagaagagccaacaaccaaaccaggactatcggctagacataaagtgacaaggaaatacttccaccatcaactaccactgtcagacccaaaagtatttaaaaccacaactagagaaaaaggaagttcatcaagatacatccatgactggaaaccaaagtatgaacaagtggaactctctgacaagcctaaccaaagcagaaattgcagagccaaaaatcactgaatgtgtctgtccactggtttccagccatgagcacccctgaagacttcacttgttgtccttcggattttgaggtttccttgctccaccagttttc

SEQ ID NO: 114533 - DNA, 446 bp, Zea Mays
tcagttcgcccgaacagggcccatgaaattatgggggcgcacaaaatttttcctctagtagactatctagtacatatccgtctgctagttgcgttcaagcgtgtgacaactgacaacgtgactgtgtgagtccctcactccctctcaaatcctgtcgttcccaattcgctctggtcccctgctaggctgctcctcctaattctcaatcacaattctcctgacatcaagcctgcaaaatcgtcgggcggctgctgcttgccggcccctacctaaatgcccctacgacctaatttgcactacacagcaccaagaagtacaacactaaggcactcatcaaggcgagagaagcaggtaattgctcaagatcatctattcataattcatctaatgtgtgtaggagtttagctctaggctctagtaatttgttattgtttacaagacatcag

SEQ ID NO: 114534 - DNA, 577 bp, Zea Mays
gtctatagtagctaatatcctttttaagcttcgggaatccaatgctcttagataaagtgcttataatattagcctcggcgtggtcacgaatgcatcccacaatttcttcatcaaccccgccgaagagcatcgatccaggttggtagccgcaggatatgacaaattcctttaattttgatatgtcctcttcggaaagctgttggccgcccagatgccgaaggtcgaaattcatatcttacgaagaggtttcttcaattctcttccccttatcagatggtactatggctacatctttcttagcaaccacatttgatataagtctgtcgatttccaacagtgtggttgcaagattctcggcttcggctacggcggtatcttcagcatcgacgggtatagtagctttatccaccgaagctggggcggggtctgttcaatagcttccattatattcatcatacgccgcttcttttgccccccgtttttcccctcggcagccaaagtgatttcctttgactgcaagaggctagtcagatccaacctcagaggacttaacagtgcaaatgggaaaggttcagtc

SEQ ID NO: 114535 - DNA, 338 bp, Zea Mays
tgggccaaatccgcccagccacggcccaactctgggcatccgtgtggcccatttctccccctgacactgttctcctttcaccaacgtgtgggccgagggcgttagcccctcaccccatcaactcacgcatgcacggactcacgactgctcactaacgtacgagcccaattggtcagatcgatccgctctcacaacaaccaggtgcacatgctattaccgcccatggctctcgtaggtcgttcaattcagttgagctagcttggtatctatcaaccacctcctcgcagctatataacctaggccaccttttccttccctcacccgttgagcttgagtca

SEQ ID NO: 114536 - DNA, 588 bp, Zea Mays
cttgacttggtcctgtgataattaaatcatcaacatacacacccaccaacagaaagttgccattattatccgatcgcctatacactgcatgctcaagtggggtttttacaaatccaagtttcaacatctccttatcaagtcttgcattacaagccctaggtgcccgacacagcccatataaagctttcttcggtttgagcacctttccattccctttttctacaacaattcctggagcttgttgaacatatacctcctcaaccaagtctccattgagaaatgccgatttgacatccatgtgatgcaccttccaaccacttctagctgccagagctattatcagcaaccttactgtctcaatacgggttacaagcacaaacacctcttcaaagtccacccctcatgttgagcatattcttttgctactaacctagccttgtgcttgatcacactgccttttggatctttcttcacattgaagacctacttgaggcttacaacacagcgaatcgactccattttagctaccattgcctccctctagcactattctcgcaaggcatcctccacactcttaggttcttctgc

SEQ ID NO: 114537 - DNA, 1713 bp, Zea Mays
taactttccaacccaaaaaaagggggaactacacaataatgggactctgtcccaacaatgaatctgcagcatcggcattctccggaattacccaaccgaacaatgcagctaaggcagcgacatggtcctgagatagaggcttagaaaacagccgcccatattcatcaagagcttcttgtgccaatccctcctggtcagccaatatccccaaagttctagcaatatccactctgatttttctgacagctgtggaaggcgccccccctaccatccttcttcagcctgtgacttcttctaggcataaagtcttttggcgtctgcttacgtcgccgcttttgggtagctggtctggccaagatgcagtcaactggcttagtgatggtggccaaaaaatcctgcaccagcgaatggtcaacatctgaagtcgtggtatccaaaactgatgccgaaatacagtcagtggagcaatcatcccccgtctgtccctctagtagctcttgccttcccgttggagaactaagctcgagatcatccacccggtctgctgtcctagaaacagagtccgcaccaacatctgcgagaatggggcgtcttctagaatagacaagcagagcccgtggggaaatagtcccagcaaccgacaacacccccattctgacagaagacgcctcgagtgtaaaatcaaaaccaccaggatggagcgaattcgcaccagcctgttccagcgacccaacaacagccccgtgtcgctggggcgaaacagggaggactgaatccagcgtgcctacagcagccgacccagacggcccagctaagttaatcttcgaggttgtcatgcatggcacttgagtggcagaaaggggtgagctcaacccagccttctccagcggctcagccaaacttctgtgctgaggcgaggaaggtccagatgaggtcagcagcccatcaccaacactgatagcagcaccatcttccagagctagaaccggcgcctccatcatatttccatgcatagctacagaccgttctctgcccactctctgatgtgaaccgaggcgatggtggataggctgacgctgcaaagggcacgactgtcggatccggggattggacggaccccggacatctccatcctcctcaccatgaaactcattctcatctgaaggaggcagactgctgtccgagggaagctgaaggggagccgaaatagcagcaatgctaatcttgtaggttagacatctcgcctcctgattaaatggccctcgctcaatgatgtggaggtccatatccctgcgaagcttcatcggatccaaacaccatgcccgaagcttgagtgaggagagatctgtcttgctcgcagaggcggggtgcaactccaaaatgtgacatgagtcgtgaagaagcatcttggctgtgttcagaccccacgcgtgcgctgggatcccacggatctcaatatccatcaagtgagagaaggacgtagccgaggcatgtgcaaatcttgtccattgcttgaacacgagcgagaacataggtcctctgaaaggctttccttcattaagcactcttgtcgccacttcctcatccggcaaaaacagaaggaagtcttccggcatggactggtgaatagacatatcatcaatattgatgcaataacgacgggccgcttcctccagcacatccgagccgagaacaacgggtctggtaccagta

SEQ ID NO: 114538 - DNA, 668 bp, Zea Mays
tttcgaactctagaaataacggcaatactgtcgtgagcttttcagtccctgccaaaggaatggaatgaatttgagatcttaccaggatggagccccttggtgttcgcttggtttctcgagcagggatgttctgaaaggtggcttgatcgattttcatttcctttggctttctcgaggtcccatgtaagttgtgtagacaaaaaagaaaggaggtacattactgtcatccatgcttgttagaaagacaaaggatgcaaaaaaaaggtttttggaaagctagtcgtctcccctatctctagccctcgatgtctcttagccctgggcagctgttctagggtagggaggcagaaatggtctaggacgccgaggccttgtcaagggtggaatcatcatatctgctccatgttctgggcataagttagcatccttcctctctcatcctctagctcagcagctcacagccaaaggtggagccaagcagctaattgatgcatgggaggggaagcgaatccttcagacatgccttgccgaggactatgtgaccaacaaacatcctccacttcccgctcttcttctagactagtatcgagttggccaactactctagacggcgtaccttcttgatgaacccgaccacgaggagtttgccaatctcctccccgattgcg

SEQ ID NO: 114539 - DNA, 365 bp, Zea Mays
cgtggttgctgaaggcgattctgatgattctgtgtctaagttttttgagtctgatgattctgggagttcgattgtgtggttggaggggtcttcggaagaggacttggattattttgcagtgttggatgtggctgcggcggagactcctccgcgtgtgatgggtgctgaggatcatccgggtgcgagtgctgggcgtaggcggcgaagagcggtggcgaaacggagagtgggtgagttgtcacgaggtgaaaggcgtcatcgtggtgagatggagggtggtcgtcttcgtgtggatgggactggcaaacgggaattgttgtgctcgccggctggggcgagtgtgggtgagggggagctgcaaagtc

SEQ ID NO: 114540 - DNA, 563 bp, Zea Mays
gatagatgggtgtcacaaagatgacccagacgatgatgccactattcaaacgatgaggtagaagtagtagaagcggatccagcaagactgacaggaacaaccgaatgaatatgaagccattcaagctcccagagacactgagaatcacgtcgagtagggccagtaccaaccatgtgacccatgcatcgatcctgaacatagcaaaagtcaggatcaagaataacatgacagtcatgatcagtaggctggccagtggacatgagctgcatggttagatcaggcacaaaagaaaaaggaggaacatgaaaagaattagatgaaagagtgcctcacccaacaacaggaagtggtgatccatcggtagtatgaacagtgagagagcgagattgactcatagacgaaagatagacacgataaggagtcatatgaaatgaagcaccggagtctataatccatggacaagtacctgaagtaggaatagaaggtggttcctcagtggaagactgagaagtagcagctttaggatctaggacaccggctagagggggtgaatagaaggtttt

SEQ ID NO: 114541 - DNA, 546 bp, Zea Mays
ctgtctggccatcggtttggggatgataagctgagcttcgtatgacctgggtcccaagtgattcctgcaattgctcccaaaatcgtgccacaaatggtgctcctctgtccgagactatagtccttggtatcccatgcagacgaactatttggtcaatgtagatctctgcatacttctctgtcctgtgggtggcgtgcactggtaagaaatgagcagtcttagtcaatctgtccacaataacccaaatagaatcatggtgcctggatgtattgggcaatcccactataaagtccatgcaaatgtcctcccatttccaagatggtatgggaaggggttgtaaagggcctgctgccttcaagtgactagcttttatcctctggcaggtgtcacactcagatacatacttggcaatttccctcttcattctggtccaccaatataaagttctgagatcatggtacatcttgttgcttccagggtgcatggaaaatttggaaaggtgagcttcatccagtatcttctttctgagctcagggtccttgggaa

SEQ ID NO: 114542 - DNA, 319 bp, Zea Mays
cttgcgagtacgaaaaatacctttggaggaagtagaaattttggcaacaaggcggcacgaaagcaataaatgttgtaaaaaccagaagccagccagtccgtttaaatagatcggtgagcggtgaatacaagcgaccatgttaccttgaccggttgatcggtggactgatggtgctcagattttttgcacgtttttaataacaagctcagggaaggtgttttttggaccttcaataaaaaaagtcttcgtatgttttgcggaccgagttcgttatgaaaaaatgatgtagcaccacgaatgggctactgttggggtattc

SEQ ID NO: 114543 - DNA, 289 bp, Zea Mays
aaggcaccaactgactttaggtgacttgcttttatcctctgacatgtatcacattccgacacatacttggctatctctcttttcatccttgtccaccaatacaggggtttcaccgtttcagatcatggtacatcttggtgctccctgggtgcatggagaatttggagaggtgagcctcatccaaaattttcttcttgaggtccccatttttaggaactaccagtcggtcttcgaaccataatatccccttactgtcttggaggaaacacttatacttctccactttctg

SEQ ID NO: 114544 - DNA, 447 bp, Zea Mays
caataaagagatgaagatttggtttaaaacactaaatttggacttggaagagaaaatagaaagagaatagaaaataaaaaggaaatggcatgcagcctcgtcttgggccaaattctcttctattggcccaaacctctgcacagcccaaactaagagaatcacgtgcactcgtgtatgacgcatggggccgcctaatcagccgcatgcggggaggatagcttgggggatcaagtcagtgacacattgggcccactcgtcgttccccgctccgtccgctcttctcaactaaatcagccgcaccactggagaaacgagcaatccgcagctcaacgcgattcttgcgctagaccccaaccgaccctaggggataaatggacgcccccgtgactcgttcctccctctgttgtcttctcgcgtgaaccctttccccggggcagccgctccctg

SEQ ID NO: 114545 - DNA, 598 bp, Zea Mays
tggagtgatagaagagagcaggaatcccaggacctgttgatctgtagcaacccactcaatgtagagcgggttctgcacctcctcctgtttgccatctgatgtcctcttcacggtagacgcaggggtctttgtgatgcctgtgagaaatccctccagacgtgcgcccctcacaatggccagcacttgcatcttccatagtgcgtggttgtgtttggttagcttctcggaaactacttgaccgaccaagggattaatggcggcgacataggaggttgacatggtggaagatagatttaatctattttgatggctctggtaccatgtggaaaacaatcagagggctggaaacatgcacttgacctcgtgccgtctgcgtgttatttataaccaggaaaagcccctggcgtggcttacaataaaggagacaaatcatgtacagggaaggttcttgactttcctgattacagaagatttatagcatattctatctatagtcaagaacattctggatacatgtgaacggatacattcaatagggcatattcatgagttggtccaaactagccaacccgtggatgacctggactggatcaaatca

SEQ ID NO: 114546 - DNA, 350 bp, Zea Mays
ttccattcgagtagtgtgttgtgtcgtgcgcttcgccgcgtggcaatcctttttatttccgtttagatcatgtgttgtgtcacgcacttcgtcgcatgactatccttttaaatttacatatgatcacgtataataatttaagggagtagtgtaacgatagttaatcaaataccgaactaattaggaattagtgctaattgtatttactcgttgcgtgatgtttaattaatatgattatatttagacaaatgttttagtccataactacctaacataactgctatgtctttcggccgtagcctcgactgttgtagtttcttttctcgcatagtcatagatgcgagtcctgc

SEQ ID NO: 114547 - DNA, 528 bp, Zea Mays
cttgttttttttgcttcaatccttttcattgctggttacagggagaggggattgttttggtaaagattctcttaggatttaggaagtttctagcattgaaccctccaaagttgttcattgtgtataatagtaggcctaaaattcttcggacataaaaatagatgttttgtgcaattttaaatgagaacttcgcctacgtaggaaggtcagatgccatgttagcttggaataaattttgagatggaagggacagatgacaagaaaggttcaattgttttcagtttgcagtagtctcctctacctttgggatactagataaggtccatttacattttgatgcactaccagttatatacaaaggactaaaggagtaacaaggtagaattcaatagtatgtgcagaatgctcatttggtagtttcttttcccatcaggaggactgttgaatttcttgctatggttccaatgtgtatgtatgtttcccaacagaatttttataatgttcagacctattatacaaacgggtccg

SEQ ID NO: 114548 - DNA, 462 bp, Zea Mays
ctgaatttctactgcctacctagacatttcagtttatatgtccgtgaacttcttgtcttctgagatcccttcctattccgttgttaagtcgttatattttggctttgttctattcccttgtcttggtatgctcgtgtccttgaaatcttgcatactaatatttttatatatgcttaccctcatatcccaatgactgttcaaaaccttttagttaatatgcccttgatcacccttgcttcttgatggtccatgagcgaccattctatttcacacatccttgatgatctcaccgtttcctcataacttccctatgtaataatttctgttacttcaaccattctgttgggacctcacctatctcacccttgattgtctcatccactttgccacttcgagagtctttccttaactgcatccttggttatgctttcacgatcatcatctttacccttgtcgcctcta

SEQ ID NO: 114549 - DNA, 371 bp, Zea Mays
ctcttgcttagggtttaattagtgttgatttttagaaaagcccaattcaccccctcttgggcatcgtgatcctttcagcctatttgtttcagtttctggtccgcttctggccctcaaaattgtcttctggccgtcaaatgtttcgcttctcattctgcctctatgagatcactcaaatcgatgtggatacagaatccgctaagtcatcacaatggaaggaatatgtcgcttcctaaaccctaaaccctaatgttgaacgccagatctatcaaccacgaacaaattaatttggtctagattcctcagcccttacgtggttatcctaataattcataggaaactattggatttcccctagtacatgtccaaac

SEQ ID NO: 114550 - DNA, 359 bp, Zea Mays
aacatggtcatctcagtcacttcccttgagtaccaaaaaacatctattcgtctgccctttataacttctgttgacccgccttccgctttcagtttgcagcataaaaagcccaattatgtccgctaccggttcaacgcagcgtgtgccgaggatttctactgccgagcataagaatctatctgaactcaagaaccttcatatgttcaagcataaggtgtttcctttcaatcataagcatgtgccttttgtttgatatttgctttcttactctccagattaaactgttttgttgaagattcaatcgttctctaattaatttgaatatgacatgtataattgtttattcatatttttctcag

SEQ ID NO: 114551 - DNA, 1144 bp, Zea Mays
atccctagaaggcagtgaattgctgagcgttgacacctcctcctgggactctttcagctcattcctcttgcgctcctgctcctccatggtaaactggtggctctagtctggagtggtaagggagctggaggcatccttgtagagcttatcaaaattattccgaaaagagagcagcatccggttctcagccttaagcctctgtatccccaccagcggatgggagaattcttgacaataggtcgacaacatggaatatgcaacctaaagctcttggcaagttacctcatgggttttcttctccatgtctaacttcgattgcagggaagatttcatggtgcgggcaccatcaaggaacctagtgaattggtcaagctttgcttgctttcggacgcacctttcctcagcatcggagcaccgctgagttatacctgaagaaacaacttatagtcattaaaaatataaatgagaaagagaaaagttagcaaggaacgacattaataacttaccagtattaacagcccttagatcatctatctgcctttgaagagcaacaagatcccactgtgacaaagacgatatctgctcaggcacctaagctgcttgtgccttcagttggacaactacttgattcaagatgccctgcagagacaaaagttagaagatagaacaccgattgggaaaatgcaaggtaatgtgagttccataaacatgtacctagaagttcgctaagaaaactagaagacccaaagctagtacaaccaagacatctgtagaaagcaacaacacccacagaagccacaagggaagtagggacaaaagctgaaggttctaaatctcccagaccaagtgtgatacccattgggattctagcactggaaccactgacctccaaagtggttgggttggctagaccaggctcgataggcaggtcagaaactcgttgccacaaaattgtcaatccgaggaattatcgacccaacatgagccaccattgaagcagcagaaggggaaccaactgcgacaccctcggggctgaaacacccttgggggctggagaaccctcgggggctaaagtgtcctccagggccaggagtggattggcggcaaggcttactaacacagaacccctaggggactagcaggc

SEQ ID NO: 114552 - DNA, 464 bp, Zea Mays
gtgcgcccaatgggtgtgtatgctatcttgtctcaaaatagtaacctaacgcgacatggtgtagtaatgagcctgagcggttggtattactcttctccgatgctgtgttacgccaatgggtgtcagtgactttctttttcttggaaatttacatgactcttgaaggctttgcgactcttgaaggttagtttatgtagaacttttcccctatatgtgatatcaatgttttaaaaatatatcttgaggatagtgaggagtatctaagtgcttggcaacatggagtacctaagtgggaaaccctataacatagtcattgttgtcgatgtagccatgtgcccccatgtcacctcatacgagcaactcggacagctccccaaccccagtcatcgccctttcctctacctcattgcgctttatggtgctggtaatgtacattgaagcaagccagcagggcttgttccttc

SEQ ID NO: 114553 - DNA, 724 bp, Zea Mays
atatggttttcatgcccaaacagagacattatgtgataaacaacattattacaaaattataggaactggactggattaagttggtctacgcatgaattttctatggattaaacaaatttctagaattatttttgtaataaaaatcagtttctataattaattctccaatttttactggttcttggactgcgcgcatgatttcagaggaaggcaagggtctcggtgtaaaatgcccaagacacagagtgctacggcgcgaactgcaggtttatttcggataatcctaggggttccattgtaaaacattatggccgaaagggtatccttaaaccctagccaccagatcattagtgcacgatcacgattcgatccgcggtgttataaatcggtatacgctcaccgaccgttgacggccagatcgacggacgagatttaattatttgagatccgatcgtgcccctcggattcagatctaacacatgatacacccgtagccgaactgttacgacgcgacttgatcctagccggccatcactaatctagtggacacaagttcgtattcaaccccagccggccgaacagcggcgacgagctttcacccgcggtggtccatcgccggtcaacatctaaaaccataccctgggcgctaggaaacaatccaagaagcgcaaaccatactagaggtgattgtgggactatgtataggtacctcaccgagtattgg

SEQ ID NO: 114554 - DNA, 1397 bp, Zea Mays
cgaatgaggaagggttcagtttgcagcaaggcattatcaggagggaggggaagatctggattgggtctaattctgccctgagaactaagttgattgctgctcttcatgacagtgctgcagggggtcactcagggatgcatgcaacataccaaagggtcaaaggagtgttctggtggaaaggaatgaagacagatgtcattctgtttgtgcagcagtgtgcaacttgccagcaggccaaggctgagagaactcatccagcaggacttctccaacctttacctattccaaaaggggcatgggaggatgtcactatggatttcattgaaggtctgccgaggtctgaagggtttgacacaatcatggtgattgttgatcgctttacaaagtatgggcacttccttccactaaagcatccttttactgcttcaggggtggctcacatttttctggagcaagtagtgaagttgcatgggttgcctaaatccatagttttagacagggataaggttttcactagctctttttggaagcacctgttccagctcatggatgttaagttacttatgtccactgcttaccacccacaaacggatggacagagtgaacgtgtgaaccaatgtcttgagatgtatctcaggtgtgcagtcaattcccaaccctcaaagtggaaatcttggttggccttagcagagctctggtataacaccacttttcatacagctcttggttgtactccattcaaagctctttatgggtatgaggctcctgtgttagcagttcggtatacaagtgtggtggaggaccggtctgtgcaagactggttggctgataggactgaattctctagtctgctcaaggaacaattggccagagcacagaatagaatgaaacagctggctgacaaaggaaggattcacagggagtttcagataggtgaaaaagtgttgttgaagcttcaaccttatgctcagcagactgtggtgaatcgaccatgtcccaaactagctttcaagttttttggaccatacacagttgtcgctcgcgttgggccagttgcttataaactggggttacctgcagatgcccaagttcacccggtgttccacgtttctcagctcaagccttttcatcccaattatacaccggtattcacacatctgcccaggttggctgatctctctaaaacaggggtagttcctattgcagtcctggatcgtcgtttggtgcgcaaaggcagtcaggctgttccacaagttttgattcaatggtcagacattccaaaggaagctgctacctgggaagactattatgtggtaaagaacaggttccccgatgtagtcgcttggggtcaagcggatattgaagccgggggagttgtcacagacagtgctatggtg

SEQ ID NO: 114555 - DNA, 3372 bp, Zea Mays
caaagttgtgccggacagcttgaataactcttgccataaggtgctggtgaagatacggtcacgatccgagacgatggtttcaggtaggccatgaagacgatacaccgaatcaataaacacttgagctactttcagagctgtgaatggatgggaaagggcaatgaagtgactgaactttgagaatgtgtccactaccaccaaaatgcagtctgacttgccagacttgggtaagccttcaataaaatccatggagataacttgccaagcgtgtgatggaaccttgagtggctgtaataaaccagggtaccgagaccgatctggtttggcgcgggagcagatttcacatgaacggacaaaatcccgaacaacagacttcatggatggccaggcaaacaactgtttaacgcgtcgataagtaactgggaagccggaatggccaccaacagcactgtcgtggagcgaagatattaccttctgttggagagccaagttattgcccaaccatagtctgcctttgtacttcataagcccaagctgcagagtataattgcctgaggtgccagaacctgcagtcaactcagttaaaagcttcattgcctgggagtcttgttggtaacactgttgtatgtcagtcagccagcgcagagaactcacggtgatagcagcaaattcaacagaatcatgggggcgccgagagagagcatctgccgcgctattatcagagccttttttgtaaaccacctgatactggagtccaaggagcttggtgaagactttctgttgccatggagttttcaatttttgctcattgaggtgggagagactccgatgatcagtgtaaataatgaagggggcgtgttgaaggtatgatcgccagtggtcgacggcgagcaacacagcaagatactccttctcatacacagacaagcccatatgtttaattcccaacggtttgctgacaaaggcaagagggtgactgtcctgtagcaatacagcacctactccaaaaccagaagcatcagtttccagagcaaaaggcttgtcaaaattgggaagagccaacactggggcagcagataaagcttgctgcagccgagtgaaggcagaagcgtgttcagaagtccagacaaacactgagtttttcttgagtaagttggtgagaggcttagcaatcacaccgaaatttctaacgaacttccggtaatatccggccaaccccaaaaatccccgtaattccttacagttacgtggttgtggccaggaagatactgctgccacttttgcaggatctgtggcgacgccagctttgctaatcacatgcccaaggtaggcaatattttgttgagcccatgagcacttggacaatttaatctgccactggtcttgtttcaacagctgcaagacccactccaaatgaatgagatgattatcccaagtgtcgctgtacactaatatatcgtcgaaaaatacaaggacacacttgcgtaacaagggttgcaaggttttgttcatagctccttggaaggtggcgggtgcgcctgtgagtccgaatgccatcacacgaaattcaaagtgaccatgatgggtctggaatgctgttttatattgatcctgaggtgccatgcgtatttggtggaagccagctcggaggtccagagtagaaaaccacgcagcaccgtgtaattcatccaaaaactcgtcgatgacaggaacaggaaattttgttttggcagtcaaggcgttgagatgtcgataatccacacagaaacggtatgtattatctttcttgcgcaccaaaattactgaagaagcaaacagactcttactgtgttgaatgatatctgattctagcatctcagtgacttgtttctcaatctctgtcttgagggctggagcgtaccgataaggacgcatttgcacgggacgagcatctggaactagaggaatgtggtgatcacaatctcttgcgggcggaaggcctttaggtaattcaaacactgaagagtactggtccaataatgcttgtaagccggctggaagtgattggatcatgtcttgttcctttgttgagaagtcactgagactgcacagttggataaacgagccttgactgtctgatgtcttcaccccatagagcttgatgtaagaatttcccaccggaatagagacccacttgtccagccaatgcaccatcattgggctatttgttgccaaccaatccatgccaagcactacgtcgtactgagttaaatccaatacccggaatgtagcggtgaactggtaaccttgaagggaccacactgtgtcaaccaatgcagattcacaagtcatttgggcgccatttgccacacggaccagcaatggttgtggcaaggaagtaagattggaacattgatttgcaatggtggagctaataaatgaaattgagctgccggaatcaagcaggatgagcaccgagagaccacaaacttcgcccacaaaacgcattgttttcatttgaggcacctgagcaattgctgaatacgataactgaaagctgttgagctgaatgtcctcgagcttttcagaaagggcctcttcagacggttctggaaattgatcccaaagttcttccacgaggtgcagctggactgaatctgggcattgatgaccgcgggtataaggtgacccacacttgtagcataacccttgagccttccgatacacatagactgaagcaagacgatcaccactcccaggtggctgaacagagtgcagagacttgtgttcttgtggccgaacaggagttgtagcaccagccttgggtggagaaggtagaggtaggggacctctattgtaagaccttcccagtggtatataatccatcttcttatactccggcttcttggctgtggcgccgatttcctcctgcaattgcgcaagaacgtaggcagtatccaaatccttgtgtcgctgaatcatgaccatagatttaatgtcaaaacgaagaccatctagaaacctcatggtgtaatacagggggtctgacatggtttgataactatttaactgatcgaccagctgggcaaattgatccacatactcaactactgttccctgttgcttgatatgaaatagctggcgaactaatagagcgtgttgatccttcccaaaacgttctctcaacatgtggacaaagtcgacccacgaagcagtgctcaactggtgctctacagattgccaccagcgagcagctgctccagagaaatgcatggtggctaccttaatccaaactgaggaactcactgcatacataacaaaataatcctcacaacggcgctgccagagcttagggttttcgccgtcgaaacatgggaagttcaatctaggcag

SEQ ID NO: 114556 - DNA, 764 bp, Zea Mays
ggaggaagtccagccagtatctcattgggaaaaacatctttgaagtcctgtaaggagatcaagaacaacacgaggcagcgatgaaggtaaatcgttagttgaaagtaggacctctttgtgcaagagcacaaagaatggggatgtggtgtttctcacttctctcaaatcactcttgctcacaaagagacacttagtgtggcatggctgtttaggattggcatgaggctttatgtggctggatgggttagaactctctcctttatttgggttggggatctcactcaattttcttttgtcagattcctctcttgtcttgcgagccatatcttaagtatgtatctcctctagagataatggaacaagaaccaccttcttgtcattatgaatgaaagtgtgtttgttagaccatccaaaatgcactggatccacatcaaattgctagggccgaccaagcagcaaatggcatgcttgcatggggacaatatcacaatcaacctctccatgataatcaccaatggaaaatgacaaacgaatcatggctgaaaccttaactgtccagaattattcaaccattgcatatggtatggatgtggatggcgacgtggctgcaaaccaagcttctcaaccagcaaagtactaacaatattattacagatcccaccatctatgatgaaacgacacacttgtcctttcactttgcatcgggattgaaacaagttatggcattgtccttgttctacaacaacaaattgagtggaaagaac

SEQ ID NO: 114557 - DNA, 406 bp, Zea Mays
tacccttgatctgcgagcagggttccatcaaattcgtttggcacctcatgatcagcacaaaacagccttccaaacccaccacggccattttgaattcaaggtcatggcctttggcctctccggagcaccggctacctttcaaggagcaatgaatcgcaccttggcaccattactcagatcctgtgtgttagttttcttcgatgatatcctggtatacagtactacctgggaggatcacttacatcgcctagagctggtgttgaatctgctcgcacaggatcgttggcagatcaaactttcaaagtgttcctttgccagacagcaaatttcatacttggggcatgttatctcccatcaaggggttgctactgatcctgccaaaattgatgctgtcacgtcgtggccc

SEQ ID NO: 114558 - DNA, 476 bp, Zea Mays
atttggtgaagggacctcttccgctgccgaagcggaacatgctcccgccgttcagagcgctgaaggatcgactgtagtgccgaaggtgcctatagtcgggtcagccgaagccaaagatagtgcggccaaagagctagagttggaaaaaacaatagtgctgccagaaattctcagcccaccggtagaggcagaactgccaaaggtgaaaaaggctcccgccacaactcccaagaggaggagaatggccagcgtgctagacgctatcatggaaaccacaaagtcattaattcctgcccctgcgaagaaagttgccgaagctgctacggcccaggctgaagccgaagctgggccttcagtgcctactgagacgaagcctaccgcagctgaggataaggctgagcaagaatctccaaatgccggtatggcagcggatcatgatgcgacagaaaaagttaaatctcctgctcctgaagcac

SEQ ID NO: 114559 - DNA, 374 bp, Zea Mays
ttaatacacaatgatgacaaattaagtacccccgtaccattgtcgtaattatagagaggctgagttgcgatcccttttcattttataattctttttcttttacttacgcttaaccgtacacagatgacttctcacggatcctcggatgaagggaatgcacagtcccacactgacaggcttgcgcgagagggttttccccgtatcttgtgggaggtacttcagggagctggttatacgacgcctccccagtacgcggtgcagctgtttgagaagcaccgagtgccccactgtagggtgaggatgaccctagagcctcatcccctgcagccaggctagcgtttgttggattccgagtcttttggatatagggcaga

SEQ ID NO: 114560 - DNA, 341 bp, Zea Mays
acacatcctcatattcctgtaatgcatcaaagacaatacttggcaaagtagagggtaagttgttagtagaaagaagggtgtccttgtacaggagcacaaagaacatggcattagtctcactcaattcttttagatcccccttcctagtcatcatgactaatccctcttttcccggtgtcttggacattgaaagttgtggtgttttatttggctttggaaactcttctttactatttttgtggatcactctcaagtggttctcgctctctcgctgtttctttagatcatccttcaaaatttccttcggtgtcaaaggaagcaaagatattcactcccctttg

SEQ ID NO: 114561 - DNA, 724 bp, Zea Mays
tagaagtaaaatgttgcgtgatgatttcgagacttcttcatgggacatagaggccgcccctagatgagtaactgtatgtgcgccgagtgtgctgcaccagtttaagttagtattaactcaaactgatcgctctgtgagtgtggtttagtggccaccccgagttaagcaagcgcgagcatgtggcaccgtcttaagtcatcgccgacttaagtcgattgctccgttagcagggcatagtggtcaccccgagttaagcaagtgtgagcatgttgcaccgtcttaagtcgttgccgacttaagccgattgctccgttagcagggcatagtggtcaccccgagttaagcaagcgtgagcatgtggcaccgtcttaagtcatcgccgacttaagccgattgctccgttagcagggcatagtggtcaccccgagttaagtaagcacgagcatgttgcaccgtcttaagtcgttgccgacttaagccgattgctccgttagcagggcatagtggtcaccccgagttaagcaagcgcgagcatgttgcaccgtcttaagtcgttgccgacttaagcccgattgctccattagcagggcctagtggtcaccccgagttaagtaagaatgcaggtcgaccatgaacaatttgagtattcttgaggcctttttattgatgatatatttcccagtttacagagtacattgtcgtcccgatagcttttgaaatacag

SEQ ID NO: 114562 - DNA, 555 bp, Zea Mays
cataaattatggggacatggtggactaggaggcatcccctgaatgcccaagtatggaaattaatgttgttactttttctatcgattatgatattaccggtgatgatggatctgtgatggattggtttgattttggtccttaggatgcagtcttcaataaacccaaggaatcagtcaatcatttaaaatcactcttcgtgcgtggccatattgatgggacaccaatttcgcgcatgatgattgatggtggtgcgactatcaacatgatgccttactctctataccaaaagataaacaaacaagacaatgaactgatcaggatgaacatgactctttgcagagttagtaccaatagtctgatcgaggccaagggtgtcacatccgttgagctgaccatcgtgactaagaccctagtctttgcattcctcatcaccaaactagaaggaaatacaatgttatattagagggagattggatacatgacaatcagtgtctgacttgtactttacaccaaatgttgatacaatggatagatgacgaagttgaaactgtacat

SEQ ID NO: 114563 - DNA, 483 bp, Zea Mays
atccagtacagcatccggtctacttcatcagtgaagttcttggaccctctaaaaagaagtatccccaggttcaaaaactactgtacgtggtacttctaaccgctcgcaaacttcatcattactttgacgaccacaaagtcatagtagtcatcggttttccaataggggatattcttcacaacaaagaagccaccgaaagaatagccaagtgggcctacgagctaggagatcatgacatagagtttcttcctcgcatggcaataaagactcaagcactagttgacttcgtatcagaatggactgagcatcaggtaccagacaacctagaggctactaaagtatggcgaatgtattttgatggctcattgaaactgcagggagcaggcgcagggatcctcttcattgttccaggaggtgaacaactcaagtatgcacttccgctattattcccagcatcaaataatgcagtagaatatgaagcac

SEQ ID NO: 114564 - DNA, 540 bp, Zea Mays
gtcgccgttcgtgtatcacggccatgccacccttcaccgtggtcaagtagctctgcgccctaatgtctggtaagtaatccgtaacagtgttcgccataattctctcctcctatttctggtatctacgtgtggatttggggcttgtgcgccatctggtgggattcgccagagttccagccgtgcatagtagctggcgtcgccgccctgctgtttggggaagaagagagggttgggggaaattcgtgcgagccatcgatcccgtgttttacggccgtgatcggatccttagtgtttaaagtaggcaccgtgggatcttgatccaatggccaggtttgcataccggtttggagggctcagatttaatctgagcgctagaactaggatccaacggctgaaatctatccatacctcttcgtcgttgcctttttgctaaatagcccttctggaaattagaaaataaccctcgacccactgctgtgtaaaaataattccacataggccctagactttgtagattcgaccctggactcttctgaaatt

SEQ ID NO: 114565 - DNA, 438 bp, Zea Mays
gtggtccctaggcttaataacgtcattagacatcctatatattgcgtgtaggacttcactaaatttctggctgattgtttccaatgaataaccaaacttgttccgtatctgtctaaatgattgcggcccctgcaagcccacaagaaaattgctagtgtctccttcgtactaactccgcgactagctaccaggccataattatgtaccaatgtatcatggagacgatgaaacacagttcgacgcatgcgaaacatgtcgtggcaatcatcactactctccaatgtacgctcaacccattggataccagtttccgccatgggtcttcttgaaaccccacttgacgaaccccccatatatccaaagcaactagtgcaactatgaattcctcatccccgttgtcattactttggtcgttatgaggctggaacatctgcaaac

SEQ ID NO: 114566 - DNA, 313 bp, Zea Mays
aggagaagtaaacgtgtgtaacggcccaagaacttgttgtcgggagctgagtggaaattgtaaacctggcctaatgggggcagtacacaaaccccgtcgtgggcaaggggaagaaaaaaactggacgatgaacatgaaaggaaaccagcggcgattcggtaatcgtgagtcgagataaaaatatcccgtgatctcgctcgtgtgtgtcaaagggaggccaaagacaaaattgcagagcgggtcctatttgtcactatctactagaatatttttaaggatcaacggtgcagttggagacatgtagttggaagaa

SEQ ID NO: 114567 - DNA, 325 bp, Zea Mays
tgccaaataatagtatacgtaggaggtaggggatcaacgaaaaagttgattccataatcattaggtcatgcatgcatcatgttcaaactatactaaataaatcttcccctcttatggaagtatggcgtgcaccaagactacctaacgaaaggcatccggacctcaaggtgtgcctcgacaccagttggctcctcgacatgaggggagcagtagcggaagcaatgatcccataggggatctagaggccaggctggaatgactcatgtcagaactgtgccatggatatagggagcgtgcgcaagatagctaccacattgctgagcta

SEQ ID NO: 114568 - DNA, 323 bp, Zea Mays
gagagatgtggttgcacatgtggctaagtgtgatgtgtgtcaaagagtcaaggccgaacatcaaagaacagctggactattgcacccgcttaagatacccaagtggaagtgggaagagattggtatggatttcattactggattgccttgcaccccgaaagaatatgattctatatgggtgattgtggatagattgaccaaagtggctcacttcattctggtgaagactacttataaaggctccgagctggcagagttatatatggctcggattgtgtgtttacacggagtaccaaagaagatcgtgtctgatcgaggttcac

SEQ ID NO: 114569 - DNA, 290 bp, Zea Mays
cataatctctagaagcttcgtccgccatcagcctgccaccaccaagccaaacatcataatagaatttcgttcctagttctatagcttcagctaaaggagtatttatatcatctgccgcaacattgaaatatggttgaataactagcttcgcatgcttgcaacatgccttctcaatcaaggagactgtccctcatgtgcccatgcaggcacagaaatcccctcgaccagttagcacttcgtcaaacgcttcaacctcaccttcaatccaatttataaccccagcggcacca

SEQ ID NO: 114570 - DNA, 362 bp, Zea Mays
tgggcgggtaaagatcttggcgcctggatcaacttgggtccggtcgcggctaggctcaccgtatccccttgctcaccgatcgattgggatagatctcaccgccgttggccgattaccgccgtgcgccacgtgctaaagcactttaccacgttgcagtagctcggcttgcgatatttgctcatcgccggtgagttcgccacgacggaagacactaatcacgcgcgccagtaactttctatttccccggccgccgcacgtcttcgtccaaatccccggccaccgcttagcgatcctataaattgatggccaggtctgttgcgccatgttatcatgaagccaacgcacccacgcttgcctcgaat

SEQ ID NO: 114571 - DNA, 378 bp, Zea Mays
ttctatcgttttctcgaacgcagagagagctgtgccatttcattaatatagaagaaaaaagtttgttagttcacaggccctaagcccattaatattaacaatacatcatatgcaccacaggcatagcataaacgacccacttaggtactacccaaagaaaactatgtacaattgataggatctaggatcctaccatgactgcgtaggttgtacgggtagaattttgatggttgggtttgtacccctggtggagcataggagccatggtcgtgcacaggaagtaggcgagcaagagagatatgggagatggtctttgaggccagacaagataattgcgttgcttgattagattgataaatctcctatctttatattgag

SEQ ID NO: 114572 - DNA, 467 bp, Zea Mays
tggcacagcagctgcagaccatacctgtaacatggccatttatgtgctgggggctggacatgcttggactcttcaagaaagctcagggaggccatacccacgtgctggttgccattgacaagttcaccaaatagatagaatacaagcctattgcttctttaacctcagccaaggcagtggagttcatacaagacataatattcagatttgagataccgaatagcatcataaccgacctgggatctaacttcactagctctgaattctttgatttctgtgaacaacagagtatccagatcaagtacgcatcagtaacacacccaagagccaatggtcaggtggaaagggccaatggaatgatacaggaagcactcaggaagaaagtgttcgacaaaaatgaaaagtttgtaggaaagtggatcagagagctgtcgtatgtggtttggagcttgagaactcaacccagt

SEQ ID NO: 114573 - DNA, 1661 bp, Zea Mays
ggagttataccagtaccagttttgccccctgacccaatgcaaaggggtgggcaagcgcttctgaaagttgagaatgtttctaaggtgtgcaatgctgtggcaattctatccacctcttcataccatgctgctgtacgtgcaggctatatcaagaatattgtcactctaacgaagagtgctcagaaatgctcagctcagtggcctgacctcccatggattcacactgactcatggattaagaactatcgacgaagtccaggcagcttcaactcagaaagtgttgtgcctatgattaccaagccccaaccaagtgagttatgctttctacaattcacttcaggttccactggtgatgccaagggtgtgatgataacacatggtggactaatccacaatgtgaagatgatgaagaagcgatatagaagtacttcaaaaactgtccttatcagttggcttccacaataccatgacatgggtctaatagggggtcttttcactactcttgtaagtggaggaacttccattctattttcaccaatgacatttatcagaaacccccttatatggctcaaaacaataagtgactaccatggaacacacagtgcagggccaaactttgcatttgaattggttataagacggcttgagactgagaagaacaaaatgtatgacctctcttcaatggtctttctcatgattgccgcagagccagtaaggcaaaaaactgtcaaaaggttcatagagttgactcaacctttgggcttttctgaaggtgtacttgctcctggatatggcctggctgagaactgtgtctatgttagctgtgcttttggtgaatgcaagcccatttttatagactggcagggaagaatttgttgtgggtatgttgatacaaatgatacagatgttgtgatcagaattgttgatccggactatttgacagagcatcaagaggatggtgctgagggtgagatatggatcagcagttctagttctggagttggttattggaacaataaggaaacaagccagagaaccttttgcaattggctcaagaattaccctaacataaagtttacaaggactggtgatttaggacggatcattgatggtaaactttttattacaggaaggatcaaagatcttatcattgttgctggtagaaatatttattctgcagatgtagagaagacagtggaatgttcttctgatgttcttcgaccaggctgttgtgctgttgttggtgttcctgaggatgttttaacccagaaaggcatctcaatccctgattcttctgatcaggttgggcttgtcgtgatcgctgaggttagggagggtaaagtaatctctgaagagatcgtagacagtatcagaacacgtgtagcggaggagcatggtgtaactattgcatctgtcaagcttatcaagcctagaaccatatccaagacaacatctgggaaaatacggagatttgaatgcatgaagcaatttgtcgataatactcttagcttggcaagtggtagtcgtatatctaataagaagtctctttttcggtctctcactacaggaactggcatggacatcaggagacctttcttgaagcacactgttgatcctaccattcgccctcagcctagaagcaaagtgaaaaatctcatgga

SEQ ID NO: 114574 - DNA, 681 bp, Zea Mays
gcatgccagaaggcctttagcaatgtttgcgccttcattggcacaagggatataattcaagagcacatagccttcaggtgtggccacttgtggagagctgggatatgccgaaggaaactactaccgaatccagtgaaggtggcctggttcgattgaaatataccttcagatttagagagaaatccgacgaaccaaatgatgactggttgaaatgtattgaagctaccagcgacgagttgcttgggacatattccaaggtcgaagatgatgccttgtccgcagccttcgggggtcggggcaagaaaagattgaacagggtgtttgatgcgattggcttcgtataccctgattatcactacccactgcgaaggcaaggaaagagaaagactgcagcttcggccaccactgttgtgccgaagggcaagaaaatgaaggttctgacccaccggccacgttatattgaaccgaccgtagtgcctgaatttggcgaagggacctcttcagctgccgaagcaaaacaagatgctcccatcaggcaaagcgctgaagacttgattgtaatgccgaaggtacctacagtcgggctagccaaagatgatgcggccgaagaatcaaaattggagaaaacagtgaaaatgccagaaattctgagcccaccagcaaaggcagaattgccgaaag

SEQ ID NO: 114575 - DNA, 575 bp, Zea Mays
ttaaatgcagacagagcttacaaaattcataactccaattttatccagccaaatttggtcaaactaattttgctaggtactaaataatatgaactacttaggaaaaataccaaacacccagggtactgcaagactttttaaagttttgatttaaatagtaaactaaccaaaagctaaataaagaaggggaaaatagctatactgttggactgaggttaaaaaattagagagatacttaaccactaactatcctgtttaaaaataataaactcctcagtgcaccagattagggagggatttaccattaaaacttgctttgattcaaacttaaagaaaaggaaaaaggaagtttaaaataagacccagaggacaaccacatttttgctagcttactttagtagcatagttcactagaaaattttgttgaaccctctgttagtacaaaagaaatgcaccacattttatttcatgaaaacaatgaaaacttagaaaaatcctagaaaaataaccctaagaagaacccaccccaatccttgggataactaataatatgctaatataaatctagaaaaaat

SEQ ID NO: 114576 - DNA, 283 bp, Zea Mays
gttgaagctgaagtattggttgtcaagggtgatgatgtggcagaaactatttcaggtgttgtcttagcatgccaaattcacaagctttttgttggtgtctcttctcatagcaactttataaggtactcaaaacttgtccagtactaattaattatgaactgcatacacgaaaagttgctaatttggtgaaatggcttaggaagttcaagggcactaggatgttctctcgaatatgcaagtgtgttccaagcttttgtatggtgtatgctatttcaaaaggtgg

SEQ ID NO: 114577 - DNA, 842 bp, Zea Mays
cgtgaatcgagtcacgaggtcgtgcgaagcttgccagaagttttctccccgctcgggcaacccttcacagttcaccaagctgattgcccacacatggccacttcaacgctgggggctggatattgtcgggccactacctacggcctaagggaacctcaagttcaccttcatcgccgtcgaatactttaccaagtggatcaaggccaaggcagtatccacaataacgtcgaagactgcccagaagttcttctggcaaaacatagtttgccgatttggagtctcgtccgagctcacagtcgacaacggcaaacagtttgacagctagggcttcagggacttctgcctctccatcggcaccaagcttgccttcgccttggtgtaccacccgcaatccaacagcatcgtcgagcgcaccaacggcaagattttcaccgctatcaagaaaagacttctcgatgacaagaacagcaaatgggccgaccaactacctgaagtagtctagggcctaaacacaactgaatgtcgggcaaccggattcacaccttttcatctgttacatggatcggaggccatgatgctgcaggaaataaagcacgggtcaccccgaacaaacacatcagcaatcctcgacgtcaacaaaccaacgtctaaagacctcatcgatggagaccgcgtcttcgccctgcaggccctcaacaaataccaagctcaaaccaaggcctggcgcgacaacgcggtcgtcccaagagagttcaacacaggagacctcgtactcgtccggaccacccggacagagtcacagggtaagctagagccgaaatgggagggtccattcatcgtca

SEQ ID NO: 114578 - DNA, 430 bp, Zea Mays
gaacaggctcggtccccgcattggctctccatgggctgccatgaaccatggcatcccatttgggttcgtcttttaggcgagtccagcagtgcatgaaatgaaatggctttttctgtgatgttgcatacaaagttgctgcttttgaagtctacacattatgtagaagcacttgtaagtgcatgaataatagtaagttcacataaaccattaccaaacatacagtattacaaattcatataagtgtaccttgtcgttatcggtgaggccactctggttttcccttaacactctagcgtagaatccagcaaatttgcctgtttcagctctgattttgtcccacctgctgctcagggccctatttagtctcattggaaactcacctctaagttcattataccttttctcaattctagcccataacccctccttt

SEQ ID NO: 114579 - DNA, 383 bp, Zea Mays
gcgattggtaccagaggaggggtgttaatatcctggcgtgatggagttttttcatctttggcttcagttatcaagcagttttcggtttcagttaaattgcaagagaaaaatggttcttgctggtggttcactggagtgtatggtcctcaccaggacaatcttaaatcctcctttcttcatgaattaagagaaatcagagatacctgtatgggaccatagatcattgggggcgattttaatctgattttcagggaggaagataagaacaattccaatattaacagggctatgctgggggacttccgtaggcttattaattccttggatctgaaagagattcctttgaagggaaggaggtatacttggtccaaccagagggatgc

SEQ ID NO: 114580 - DNA, 571 bp, Zea Mays
cagggaacctaatcatgttgaaatcaccaaggaaaatccaaagtttgtcgtcatcaatttcaaggttagaaaaccagacaagaaaagcttctctaccatgaggatagcagggggcataaatgttagagagccaccagacttgcccatttagattgaattggaaacaaatagtgtgcccaaatgggttttgatcaactacctcagtctcaaagagggagcttttccaaatagtgatgaatcctccagaggctccaatagaagggccgagggcaaatttatcaaaatggcgattgcagaagagacgaatataagcgtcatcgaaggattccttttttgtttcctgaatacagacaatgtcacatttggattccaaaatattgttccgcaaagaattccacttggagagtcagagttaatgcctctgatgttgtgagacaaaattttaattgaccgacgagaactctgaagaggattatccattgaaaaccagaagtaattcactgaagaagtcgagtataccaagcatacatcgacagaagccccagcaatcaatatgagtggggtatgctaa

SEQ ID NO: 114581 - DNA, 294 bp, Zea Mays
ggcttattgaagcttggtcccttgggtggaaacccaaaggatcgaattctctggtgcctgtcttgctgctgagctcggaggacttagaatttcctcttgaggtgacctttttcttcttcccttgccctttccacttgtatggccttgtttgagaggtgtgagaagctgaggaaatcttggctggcaaggatagtcttgagttctggtcttagccctttcaaaaagtgggccatcttcttggcttctatgctgacgtcctcaagcgcgtagcgagccagttctgtgaatttatgc

SEQ ID NO: 114582 - DNA, 674 bp, Zea Mays
tgggtgcgctgagtgcttgaataccttgtggagctaagggtatgctcaatttataggattcatgagcagtggtctgtgaatttgagatgtcacggtggtggtcggagagaaggggggcactggcgcaagcaattggtggctttcaccgtggcgagctcaccgacgatcaccgaatatgtgtaacccgagctattgcgacgtggtaagacaccaaggcacgtggcacacgatcattgagcggctaacgccggcgaggatgatcccgaccagctgtggttcaagtgggtacggctggtgcaaaggtgagcgagtccaagctaatccgagcgccaagatttttactcttcaccgttatccatctacgctaggcatgaatcaccacggagggcaaatccgggcgcacggtcgccggcgatgaggcatctgaacctggcattctgatccagacactgtaccatgacactgcctattcagtcggtctgtcagagcaacttgcaaggagatttgttcccaaattaatgtagtagctctatgatccagctacaaatcgactatagcaactatcctcaatcgagaaatagatcctactctaatttgacccaaaagtttggccaatgtcactggtgacataaaatcagtcatcagagtgactgacagcacaactttgagcttat

SEQ ID NO: 114583 - DNA, 316 bp, Zea Mays
cacacatgtacgactccactctctacacccagacgactgaccacgactcctggttgccttttgaaggtaagatcaaccgagctcaatccaacgtcgtccgatgtattcgtcgcgagcaagacagcaaactaaaaaccttggaggacacaaaagcttgctaaacgtatgtacgctggtagaagctgcacaaaaggcacaacaacctgtgctggtcaaacagaaccgatcgaagctggcgggcggcgacggctaaatggttgatgcaatcacaaagcattagctgtgccctaagacctaagaaggtattgagtcaaag

SEQ ID NO: 114584 - DNA, 429 bp, Zea Mays
gagcagaaatgaacgagtgcgtagatccagaatcaaataatatagctgcagaaactaaattaataatgaacgtaccaatagcaatgtcagaaccatcagcagtagcctcaacactgatctggttaactctggcaataccaaaccccttgttgttagctggagtctaattctgcttcccctgattactacctcgagctggtgtgttggggatcctcttaggataagcattggcataatgcccaacctcaccacacttgaaccatgtggtgcctgtagcagtgttctggccagcaggtctcgctagggtgccagtgggggcagcctaacgaggacgtggagtctaaagtggtggcctgaggtgtctactgagaaggacgctggtaagactgctgccctcctctagaacgagctggtgtaccctaaggtgga

SEQ ID NO: 114585 - DNA, 466 bp, Zea Mays
agttgatgtaggatttctcttgcaagtgccaactgggaagccacatgaccactcatctcctaccacaacccatggatcatgacatgcacttctgatttgccttaactcttgtagaaaaaagatatcttttcatcattactttgaggcccatacacgcaagttaaccaccagggctgaccattagatttctgaaattgtacagagacactataagcatccactctacttaaacatgtcaccttcacatgccttttccaagatagtactcctccactatctccaatagatggtagagcaatgaactgatcaaaatcagctcctagtatggccaacattttccttgattgattccctgcatctcaccataagattaaaaaatgttctaacagaactctgtcttgatgcggaattaagaccccttacattccaaataattttttctttggatccatttaacatttttgac

SEQ ID NO: 114586 - DNA, 507 bp, Zea Mays
gtggtgaatgtgtccgacttcaaccgaagcgggaaggtccagagaaaatgggaaaaatcatccaaaatcatcaaatagtatttataaccagaaagactgagtacaggggaggtccaaagatcacagtgaaccaggtcaaaagcctgctcagcccgaggagaagtagtaaatgagagacgagtatatcggcctaactgacaagcatcacagagaccctcaaaatatcccctactacatgaaggatctagactactggtaatcttggtcatgacgtcgggtccaggatggccgagacgacgatgccaagtggtggaggaggtggtggagaccaggacaggaggtggagacacgccggcggtggagggctggagcgtgtatagcggccccgagctgtcacagcgggcgagaagggtcctggtggccagatccttcacagaaaaaccagaggggtcaaactcaatggaacagaagttatcagtggtgaatcgacgaacagaaagaagattg

SEQ ID NO: 114587 - DNA, 1069 bp, Zea Mays
tgtcattatgagcactagaagtactatatttaattaacaacgcattctccccgataatcgatatcgaagtgttgttcacacaataatttgtattttaacttagacctcacatgagcactaatacttttcatccgcgaccaataaccatacgtatttagactacaacaagcaattcatcgtgaccacgagcttaactaaagtcatctaacaagttggttaaccaatataaaacttagcaagtattttagacttcgcaactcaaaaacagaggtgggagcaggttaattagtttttcttaaccattttctcaacttaaactggacaacacacaagtcacttaaaagaccatattttaggagacctcacatgtcgagcatcaatttataacgtaagtgactcaacctctatcacgcttgacaactaccacatcacccgatttatctatttggaacaccgcctgcctagcgtgctactagtaccccgcattttgactcgacttaaaaacatagaggaagcaatgactacttcggcatgtcaccacctcactacacaagccaaaattattattgcttacccacacgcctaaataagaatgatttcaattcaacgcgcccatattttaaatctcggcataagcttggctattggctaacgaagtgaccattttctaactaccaacatacactcctttcaccatttgtggatacttgtatgacacacggctattgtaatacatcacaagtacatacaaccccatcagtaaggcaccagcacatttccaaaaattctcgagactacgacgacaaggcatcgatccgccatacaacaaaaatcatgacgaagacgataggtgctatcaactaatcgttaaaaaaatattagacttacttctctctttgccactactccactctttagtcacatgaccatcatgtgcatcctttattcgattatataatagcgacctaagcgtcgtgtcacaatacatacatatttcctcgttgtgagtataaccatatcacgacatatacccgcacacctcaatcaaatatcttatgccaccatcact

SEQ ID NO: 114588 - DNA, 626 bp, Zea Mays
gtttcgccctacctacacacgtgtccggacttaaccccgtggcccagatacctaccgcatgacccaagtcacccgacctcgagccgcctgaagtcgaaaaccttaaaccctagacatagtcgtgtgcccatgctaaatccccatctcgtctggagtctaaacgtcgcgccacatctagctcctggtctccataccgtcgcatgactccatagctccaccagcccaccccatcgcgccgggagccaccaagacgtgccgcccgaccactttcgacctctctatcagactgtcactcttcacgcccgaccatcggtctctgcggtttgtgcccacccacctaccacgtccaaccaggctttgtatcagattttgattccgggttggctccgccactaggatatcaggtaacaggataacaatatttattcgtagtgtggtagatgatttctagagcatagtactataagaggatacatagacgtacaaatgaaccatctgccatgttaattagggcacggtcggatcggccaggactaggcaaggacacaacatgtcgtcggaccatgttaagtagagcatcaaattcgtggtcatcactatgagtaatcaatcatcgtcttcgtact

SEQ ID NO: 114589 - DNA, 333 bp, Zea Mays
aagcaatgttatcatgatgaaaatcatcataccatatgtcatcacggcttgggctttcttgacgaagctctctgtgctgtggcttatgcccttgctcgttgtcttgtgtgatgtgacgcatatcttcggtggcttcgtcaatctttttttggagctcagccaactgaatcatcttctcccttcttctctccacttgttgatgaatagcctctagatccctgatttcttggtccaactcttcttcctgtggtgttgggctaatagctttccttttttggctttggtcctcccttagaaggagcccatcttgattggtgtccagcagtgcaaggg

SEQ ID NO: 114590 - DNA, 1949 bp, Zea Mays
tttttgtttactctctgctctttcatgtattttgtattatgtaaggagtatatcatttatatgtcttggttttgggttttggaattttatgggggattgagtatagtgttgctgggattgttcagatttttggtgtatgaaatcttgtcatgtggtctactcgtgtagaattacaaggtatcttttatggaaggaggaattaaataatttacggaataaaatttacgtgtagtttagttcgtgtataattaaaaggtatctttacgggtgaataattaaatattatacaaagaaaaatttacttgtcgttctcaaattattacagccgacgttgttcaaagataaatagcaggagcaggtaggaggaggaagagaggtaagacttgggaaggaagaaagttttgtgtatcttcttacatgcctcacccggcagccattccctcatacataagcctcccagcgcccactagttaacccattccggcccatagacgacgacattgtcgtacctaagccttgacgagcgacgcagcccaattgcttctgttctttgtccggtacacggttgttcctttactgcactgctggcactcttctgcctgggagactggactgggaagatgggagaagagaggaatgagaaagaaacacggcagggtatttatagcggcagcgtaggtgcaagggcagagctaagcacgcggcttggaagctgcttcgtaatttctttttgtttactctctgctctttcatgtattttttattatatacagagtatatcatttatatggcttggttttgggttttggaattttatgggggattgagtatagtgcttgctgggattgttgggatttttggtgtatgaaaccctgtcacgtattgctcctggtcaattcgtgtagaaatacaatgtgtcttttatggaaggaggaattaaataatttacggagtaaaatttacgtgtagtttagttcatgtataattaaaaggtatctttacgagtgaataattaaatattatagaaaggaaaaattacttgtcgttctcaaattattacaaccgaagttgttcagagaggaatagcaggagcaggtaggaggaggaagagaggtagacttgggaaggaagaaacttctgcgtatcttcttacatgcctcactcggcagccattccctcatacataagcctcccgacgcccactagttaacgcattccacccatagacgacgacattgtccttcctgggccttgacgaacgatgcaacccaattgctcctattccttgtccggtacacggttgttcctttactgcactgctgacactcttcagcttgggagactggactcataagatgggagaagagaggaacgagaaagaaacgcggcagggtatttatagcggcagtgtaggtggaagggcagagctgagcacgtggcttggaagctgcttcgcaatttctttttgtttactctctgctctttcatgtattttgtattatgtacggagtatatcatttatatggcttggttttgggttttgaaattttatgggggattgagtatagtgcttgctgggattgttgggatttttggtgtatgaaatcctgtcatgtagtgctcctggtctactcgtgtagaattacaaggtatcttttatggaatgaggaattaaataatttacggagtaaaatttacgtgtagtttagttcatgtataattaaaaggtatctttacgggtgaataattaaatattatacaaaggaaaatttacttgtcgttctcaaattattacaaccgaagttctttagagaggaatagtaggagcaggtaggaggaggaagagaggtagacttgggaaggaagaaacttctgcgtatcttcttacatgcctcactcggcagccatttcctcatacataagcctcccggcgcccactagttaacgca

SEQ ID NO: 114591 - DNA, 695 bp, Zea Mays
ttggcttcttcatttctctgaatctaagctttggttgctattgtttttcgtggcgctggctgatggggccttcgtcctcagtggcaaggcaatggacattgcactgtcctgggatgaagtctctttcaatattgcgagcggtttgctggtccccatagatcgttatcgtgccaaaggggcttggtatttttaggcagagatagaggttgtgaatgactgcttcgagtttgtttatggatcatcttcccattatggcgttgtatggctagaccatatcgactatgtcgaaggtcacttgttctgatctcgcattggggcttgtgccgagggagaggggtagctctatcttgccaagtgggaatgttcctttccctccaaagtcgtacaatgggttatcgtctggctaaagcaagttgtggttgatgccatctaatcgaaggcgtgcagaaagatgatgtcagcttgactcccattgtcgacaaggaccttgtgtagttcctagcctctcacattacaactaacgacaagtgcatctgcatggggtgagctatggaagtcgacgtctcttgcgtcgaaggtaagtggaatatgagaccactttgtttgaacgacaagtcgtgtgacagcaacgtgattgactgtttgataatgatctctttttggcgtttattttctaagtctgtgctggaccctcc

SEQ ID NO: 114592 - DNA, 1862 bp, Zea Mays
ttagagaggagaaacatttacaagacactcacacgaagacaaagagggagaaaaaagagagcagaagggcaaaaactcaaacgcctactgaggttaaacacaacactgagcccaacaggccccaactaacccaaaatggcaccaactagttctttcactaaagaagcgacctggtctggattcttctgttgattcctgaagatcctgttgtttctttctaaccataagctccaccaaaaataaatcagaagaccgtcgaattttttccgagattgcctattacagagccctcttagcttcctccaccaaccatacagcgactcggatgtctgatttcctctcagaaaagaacagttcccccatatcaataatctattccacacctctctactgaaggtgcaatctttgcataaatgagttaccgtctctagcgctgagttacaaagacagcaaaccggattacactgccaatgtctcttctgaaggttgtcagcagtcagcactttattatgcaaaagagtccacgcaaaaaaacgacatttaggttcagcttttgctttccaaatggggttgatattcattgtgcaataatttgttgcaaattggatcttatatgcgctgctagcgctatactcaccatcttccgtccatctccaagaaatggagtcttctagatcattcagcccgtgtgtactattgatagcctgccaaagggaaaccaattctttgatttcatctgcatcaccaaagggagagcatagctggatccaacgattatttctcagggcctggaaagtcgaaatgttcttcctttttgctttttggaataagcttggtgcaatgttttttggtgcttgaccatggatccaactagatttccagaatactgcagttttcccattgcccaccgtcacacaggtggaagcgtagaaaagatcttcatctgttttatcacatggcagctgcaaatccacccatgctttatctttggctttccaacgcaaccacaaccatctaagtcttaaagccctcgcaaaacgattcaggtccaggatacccaatccccctttgcactttggcaggcaagtagtagaccaattgatcaagcagtgacccccattgcatgactcaggattacttcctttccagaggaagcttcttcttatcttatcaatttttttcagtagccatttttgagccgggaagaccgtcaggtgataaataggttgtgcggataacacagatttaactaatgtctctctacctgcctttgataggagctttcctttccatcctgcgagtctgttattgattttttcaactaaaggttgcagctcaattcttttaacggttctaaagtgaagggggagacccaggtatttcccgggtaatgcagcgaatttaccggggaaggcttctacaagatttggccaaagggcctccgggtaacggatcgggaaaatttcagttttatcgaagtttatcttcagccctgaacacccttcgaaagtctctagaatcgattttagcactttgagatctgctttatccgctctaatgaacacccctgcatcgtctgcgtatagggaacagcgaagttttgcccctcttggcaggacccgccccagtaacccagcctcggccgcccgctcgatcatcatctggagcggatccattgctaatatgaagagaaaaggtgaaaggggatccccctgtcgcacaccacgcctgtgaatgattttgtctgattgttgaccattgatgataactctggaggtagatgaaccaagaattgctgcgatccaattacgccaccgcaggggaaatccccgagcttttagcacatcaagaagataagccca

SEQ ID NO: 114593 - DNA, 436 bp, Zea Mays
ccggcttaagtcgttgccgacttaagtcgattgctccgttagcagggcatagtggtcaccccgagttaggtaagaatgcaagtcaatcatgaacaaactgagtatctttgaagcccctttttttattgatggcatatttcccattttacagagtacatcgttgtcccgatagcctttgaaatacggctagggataaaacttcctgaggtgttctatattccaggagttcccaatttctgtgccgtccatctgagtgagacgatatgatcctggccgagtgacttctgctactacgaagggtccttcccataagggcgataacttgtgccgtccctcccccgttagaatttggcggaggacgagatctcctactgagaaggatcgctgttgcacggccttgtcgtgatagcgccttagagtctgctggtaccgtgct

SEQ ID NO: 114594 - DNA, 404 bp, Zea Mays
atcgaattggagcatgtatataggttaataactttgttgtaatccagttggtaacttgtcacgcaaaaattgaaggaaaacacctctgaagatgctctgtcagaacaactgaagaagaccctgatggtacagtcgcaaaaaagatcttctgattcagtgtatctcgccgccggtgaccttacgccgtgattgacgctggtcatcgcgattcgtgcgccctggttgcggataatggctggtggtgaaagatctcaacgcagggaaggattggagccttatcaccggactaatcactgtgccacttgtcacgcgattgattgaggtgtcctcgccggagttcgccgtctttcgtagccgcgccatgtacttagaagagctaccgcatcacagtagatagccgtagg

SEQ ID NO: 114595 - DNA, 383 bp, Zea Mays
aaccagcaaagacaggtttcagaacatcaatagcagttttgttagatgaggcattatcaagcacaatggcaaaaatcttatcagtaatgctaaagtcatttgcaaccatttcaacacgttcggcaatgttaagacctgtatgagctacctctataggtctaagaccaagtaatatcttttctaaacaccaatcagagttcacaaaatgagcaacaacacttatatagtcctctttagctttaccagaccatatatcagatgtcaaagcaacagatgaaacatgtttaagaacttcaataagttgttcaacacgctcattaaacagtcggatcaagtctctagcagtagtttgcctagaagatttaataaaccttggattgtgg

SEQ ID NO: 114596 - DNA, 279 bp, Zea Mays
tgtaatcgctagttggttgattgaggtgtattaatacattctaactcatcgattctagttctcttgcccatttaatcaactgaaaaccccagcacagtgtaaagaagagtctttggctagagatgaacttaagagttgataatctcgattttattgatgcattgagagtaactagtgtgcatctaccgttattattaacgttggataggttaattaacattttatactctttactattggtgatcgtcatcacgtagacgattttccaagcacattttg

SEQ ID NO: 114597 - DNA, 307 bp, Zea Mays
gctgatcccaatgtgagtgccccatctgttgctgatcccaatgggggtgctgcttgtgttgccaatgtggatgatgaggaggaagaaaatgagattcctttgactcagaaaaacagtcggcagttcatcgccagtggtgaaagtagtggagttccccctcctgctttgtctgccctcattggtctgcaagaactgtccctagccaactttgatcagactcttgaggatatggtcccggaagacttgttatcggagccagtggatgatggtgcaatggaggcttgcgttgacgtgcctgatgctgggt

SEQ ID NO: 114598 - DNA, 410 bp, Zea Mays
acaggggttacctcttgcctacattgcactgcatgccggccaagtcattccagacttgccctctcctcctcgatcagtgatcgatcgcaagctaactatgactgcaacgcgtctccggcctcctgctccacttcccagctgtatatatatacacatagctctctttcgtcaccgccaccggccggcaagctagatgcactgaccacggtgacccatctcgatcgatcggcggcttcgctagctagctgggacacagcccccatataaatcatccactcctccgtagcaagcacatcctgaagctgcctttcttttccaataagctaagcagcaggtgcaaagggaattcgagatccagagagctagctgatcgatggatccgaaagttggcgttgctctgaccctctccc

SEQ ID NO: 114599 - DNA, 493 bp, Zea Mays
cttgattcctcttgaagttgggtttgactcatctcctttcttatcgaggttgagctcttcttttcagaccttggtgtctttgtccgggttagggacaagaggtttagtaggtagagtagctagtttaaaatgtggctttgagttaaatcagtgtagtcagaatctcatttggttgttttcttctggattggttggataggttatataacctattatgtaggtcaagttgttgttcatgaccaagttggtataaggcaccaatatagttttaaacatgattatagaagtagggtctaacttatttcaccagtattaaattgttaaatgactgtcctaagattaggtcatatgagattagatgggatctagattggattagctgagatctaagtaattaggatttgatcatgtttgttattctaggatgggataagtatactcattaggacaagatgaaactattgggataagatagaatcttttaagataagat

SEQ ID NO: 114600 - DNA, 284 bp, Zea Mays
taggaaatgccgaaggagaccaccactgattctagtgatagtggtctggtccgactgaagtataccttcagatttagggagaaatttgatgagccgaacgacgactggctgaagtgcatcgaagctactagtgatgagctgcttggagcatactccaaggctgaagataacgctctgtccgcagcctttggaggtcgggggaagaaaagactggacagagttttcgatgtgatagacttcatataccccgattatcactacccactgcgagggcaagagaaaaa

SEQ ID NO: 114601 - DNA, 304 bp, Zea Mays
gtgaactgagcggaagtgagatcaaagggaaacagaggaggtctggaagcaaaaagtaaggctagggctcataaagcagaggcgtgcgacagcacggtacaaatggggttttcccgggccaagcaccaattctaaaagtgccccgtcatcactcggttgttacttctaaaatgccgacgtggctcgatataactcagcggttagttctaaaatgctgacgtcaccggtcttcactcgactgttacctctaaaacgctgacatggttcgatataactcggctgaagcgctgacgttactggtctt

SEQ ID NO: 114602 - DNA, 335 bp, Zea Mays
acgatgccacacaacacaatcaaacaaaatataaagtgaaaacaaaattgtttacgaaggttgcacataatgtgacttcaggaccttgaacaacccaccacaatccatgcgagcacaagctctagcttatctggcatcaacgcgtgtgcggccatcaggactacgacaacacaacaagccttcgtaaataagcgcaacttacacagttgtggcttggtagttggggtacacgataaatccacgcaacgtatgcaacaggcgcaaatttggctcggtggtcgaggcaaacgaatattcctacaaggcatacaaaaaatacgtgacttggtgatggc

SEQ ID NO: 114603 - DNA, 578 bp, Zea Mays
tcttaatagacccatcttatctcggaaagattctatcctatcctaatagatctaactaatctcaaaagattatatcttgttcttcgagactcatcttgccctattgagcatacttatccccaaccactttgattatctcataatagtgtaacaaacatgatctattccaaataaattaagcagatcttatctagtctaatctgattacaccaacttaattctgatcccatgtaatctaattagatctaacctaatggacaaacatgttagataatactggtaaaataagattggatcctactcttataaatatgttttaatctaaattggagtctaagtccaacctgaccatatgcaactaccttaaccacccgatagttgcataacccctctgttttaaccgacagagattctgacttacctataccatataatccctcatgtctcaaaagattctaacatatcctaataatatatattctaccctggtagatctatccaacttaaactaagtttaatccaatctaatctagaccctacctaatctaatatggtctaatctatgttacaagtattaa

SEQ ID NO: 114604 - DNA, 470 bp, Zea Mays
tgaaactcttcttcattttgccggatggcttcgtctgccatctctcgaccgccattcatccacacttcggaatgaattttccgctaagggtgattgcttcggttgatggctccttgatgtcagtcgctgaaactgagaagtcaggctaaattacagccttggcatgttcagagctcaagcgccaacggtaccaaatgagattgttattgaagccatgatcaatggacttcgtccaggaccaacagagcatattttgccaggaagccccacaaacccgagagaagtttctacagaagatggatgagtacaacaaagccgacaatgatttctgacaaagcaaggacgaagcttacatataatctgagatggccaggggcttcgaaggaatgctccacccaaggcatgtcaggacgatacacaatcccagccaaagtgaagacagaggcaatcacaaccaagggcatcaatat

SEQ ID NO: 114605 - DNA, 417 bp, Zea Mays
cggaatctatgatcagagtacaccatgtattccatgtatttatgttgaggaagtatttgtggaatccagaccatctaatcgagctagagccgattgccgtgtagcaagaccagactcttgagtgtcgtctgctgcgtatcttagaatcctaggagcttgaggagctgatgcggcagaagtacccaaacttttcattatgtgtgagttttgttgattcattaatctttcttttgtcgttccgatagaagcgtcggaattcgaggtcgaattctttttaagggaggtagagtgtgatacccaattttcaaaaggaagagaaattgaagattatttttttccttgttttctcttccgggtcctgtgctacaggggtttgaaacttttaggaagcattcaccagtaaaacagtagaattct

SEQ ID NO: 114606 - DNA, 356 bp, Zea Mays
aatttataccaagtgaaagaaaacggaaaatattgcaaaggcgggaaatagatggagaaaagcgatctataggacataagagagtaaaaatgagcaaaatggcaaaaggaaggtatctcctctagttttagtgcaaaacttgaaaagttcattgaagtaagctagcactaagaatgggaaagcaagagaatatgactgaaattcagcaaagctcagctcataagaagattgaggtacgtcatggatggactaagtgcaaaacgctatattactgcagatgcattggctgggagaaacaaagcaccaggtagcctgataattgctttgttttgtaaggtatgacattgttaattatt

SEQ ID NO: 114607 - DNA, 374 bp, Zea Mays
tttggtggtggaaagtttgtcaatcaaccccgaaagttgtactgccttttttgtggcgaggacaagggccatacaacaaggacacgccatgtcaccattcagaagcagaagaaaattgttgaagctgaagcgcggcagaatcagccgaagcaagccctccacactgcttcgtgctactctccttatgtcccggagtatgtaggcaaccaagagcctacgacctctgttgcttcggcaagccattctcaagcttcctcggcccagttgccaccaccaccaccgctaccacctgtcttgggtcacaatcagcagccagaaggacaacgccacgctcagcaacaacgcgaccttcgggaggagtccgaagctcgcac

SEQ ID NO: 114608 - DNA, 429 bp, Zea Mays
caaacatcgagaagggccagaagaatgtgaaaaatcagcactgaaaactcgaccaaaaggggaaatctggcaaataagatccccacgggcatccaaaactcgagacaagccctttttaaagcgcacttcatagtcatcctcaagaagttgcaaaactgaaagcagattgaattgcagattcaaaaccaaagcaacatccttgagaataaagctcccgttcacccggatggtgccacgagaaacaaccttacctcttgacttatccccaaatgtgatgtattccttaccaatcatggggtcgaggctagagaaccattttgagcttccggtcatgtgatgcaaactaccagaatccatgagccacgtgttctcgtggcctccgccctgcatcaatagtaagatacggggtgagcaaatggcatagcactg

SEQ ID NO: 114609 - DNA, 401 bp, Zea Mays
ctacaccttctcccatacaaggcttcaaaaggtgccatcttcaaactggactggtagctgttattataagagaactctgccaaggaaagacacttgtcccaatcctttccatagtgtagcacacatgccctcaacatgtcttccaaaatctgatttaccctttctatctggccatctatttgaggatggtatgctgagcttcttatcacatgggtcccaagtgactcctgcaattgctcccaaaatcgtgccacgaatggttctcctctgtcagatactatagtccttggtattccatgcaagcgaactacctggtcaatgtagatttctgcatacttctccgtcctgtgggtggtgtgtaccggcaagaaatgagttgtcttggtcaatctgtccacaat

SEQ ID NO: 114610 - DNA, 379 bp, Zea Mays
tcctaaggttgagccgatgtagagtgtggcgccctcgcgtgtatatatatgtaaaggtttgtacgatgaagttgtgtgccctcgcttgcctgtgcctgcgggggcgttgtgtactttgtctggtatgttttgttatgctgtgctggtgtggttatagtcggtcttaacgcggacggtttgatgctgttgtttctgcttttgttgtactggttcggctgcgccttttaggcggctactgcgtggatggtcttcgcggtagacttcggggtttttcgcacttgttgtgctattccggctgcacccttaggcgacttctgcgcggatggtcttcgcgatagacttcgtgttttttcgcacttgttgtgctagtccggctgca

SEQ ID NO: 114611 - DNA, 301 bp, Zea Mays
gcctattatgtcatttagttgatgggggtaggggacgtagggcggagcctgattagctgcttcctgcataacaggaagagcgggaggcgtagcttgttccccctgaagcggttgattgaccgacgaggtggtacttctactacgcccggaactagccgaatcctctaccaaataggaatcggaagtataagtaaataaggccgaaatggaggattcggctgctccgtgcatcatgtaatttgccatggatagcccccctccggtagcgaggaagaaggcccgtagagcgaatccaacgagc

SEQ ID NO: 114612 - DNA, 415 bp, Zea Mays
gcgactccttgaccaaaggcttgggctaccaccatgcaaccagagtgtggaggagaccctacgtgaacatccatggaagtacaagagggagaccccgctcggacaccctcaggggctgggtcatagtttgcgctacccattcgagtcggatcgtccccggcaataccctcgggggctgggtcgcagcttgcgcttcccacccgagccgaatcatccccggcaacaccatcgggggctgggtaagcgtgaacaccatctttgagggccaagttctctgcagcagccacctctaaggctgaaggtccctcagtcacttccatgggagcaggacaatccaagtcagtttcctgaccctcaagaccgcactccaaggtcgatgaggcacgggacgctgcccgggatgaccacaacccgg

SEQ ID NO: 114613 - DNA, 502 bp, Zea Mays
tgatgatccgtgttcctccgttgttactgaagctgccagttaattgtcaacctattgatcttgtcactgaactgtatcagtatcacagtttttccttgttacccttgaatccagttgtgtttgtcacttgccagccagtgtgttgactttgttgtcgaatgtcttttttacccttgtaattgttgtgccacaatgcatatgttgttagtgcctaactctatgttgtcatcttgtgaattcaggtgcttcggcgttgcagcagcccaatgttgatgcaatgtagaggaatagggaaagtgagacttttgtcaacaacatcacagttcatatcttcagaaaaccgaacatgttgttgcttctgttagaatgagatgaggaatgactatacttcctttgttgcgataggttcagaaaactcaacaagccttctgtttttggtagtaggttcgttgccttattgcagtgcttgaattgacataggtgtttcacaacttcaaaattg

SEQ ID NO: 114614 - DNA, 617 bp, Zea Mays
aaattcttaaaatgcactgccggttccccaaatttgttagttacttaagtgtgccacttgattttctagttaccataatcagcataaacttgcctatatggtgtgaaaaatggtacctgacatgtagtttacacgacaacaacaatgaccatgatcctgttgtcgagcatggtgaccttttggtcccaagttaaagtgtaaagtgccacataagtaaatatttgctaaatagtgtgattaggatcccagtgacacactaaagtctctctttagttgttttttctaacctgctctctcttctcaaaaagccaaccaaaggggcggaaacctataggtgcttttggccaaaagcagctttccctccagtacaaaactcacagcagtccccccctgctttctatggccatggaaaccataacttcaaagaaattacccacctatcactggttatgaaaataccgattcatttttccccttgtgttcccatctgtgtgaaaacatcacgaggaatggtgagcccgatgctaaggttccttctgccagcgcctgtctccggtcgcacgccgccaccaggctggcacccccacatgaaatatggcgcccccaggctgtcctgc

SEQ ID NO: 114615 - DNA, 399 bp, Zea Mays
cttctgggctttccgggacctagtgctcagtccattctgatacgtagtcaaccaatgcctgagtctttattgccgtgcgaggccagaactctatgtcatgagctctgagcttgcacgcccacttgggtatcctctcgatggcttccttgttgtggaggatatcacctatcgggaatcccgtgattactatgactttgtgatcgtcaaagtagtgccgaagcttgcgagcagttagaagtaccgcgtacagcaacttctagacttgaggatatcttatcttcaagggctcgaggacttcgctgatgaagtagactgggtgttgcaccgggtatgcatgtccttccttcgcccgctcgactactaatgcagtgcttaccatgtgagtcgtacagaagatgt

SEQ ID NO: 114616 - DNA, 370 bp, Zea Mays
tgtcagggagagaccccaccaaggatgaccccaccattgtctacatggccggatacctccacaccctcgatacccactacgatgatctctcctcccactgcacccacctaaactcccaggtggaaagcctagagcagcaagtcaaagagcttaagaaggagaaagcatctctccaggagtgtctcgacatagaggaaggcgaggaggccaacacccttgaagcctatcgaaccttaaagatggactatgataagaagcttaagaagctcgcccccacaaagaaaatccggaagaaaaccacgagccaaggatgccagacggagaggaagaagaaagctcccccagcaccagctcccgccaggatagagaa

SEQ ID NO: 114617 - DNA, 394 bp, Zea Mays
taaggaaataaaaatgtgaagcatttccttttccattacctaccctacgacttttaatctcgggacgagattcttttatgggggaaaggatgtaacaaccctggtgttactgctactaaaacttgagcatgacatcataaagattggcattgcatatgtttgacacacctagagtgcattcactaggtaaaaatttcaaacaagttgtattgttttggtgttttgcaaatagaaccctagaataggatacttaaccctaaatagggattaagggggtaaaacatgacccaaattgagaaaacccaaaagctttatttgaatagtcataaaatgctcccaaaaatgaatttgaaccacatttatacccctgagataccaaaaaccctaattgaaa

SEQ ID NO: 114618 - DNA, 478 bp, Zea Mays
caatagctatcgcctgattttcgagcttttagagcttcggtttaaaggcgtgcttgctccaaatttgaggagaagaagatgagtggggagaagaagatgacaaaagagaagaaaataaccgaggagaagaagttgaatgaagagaagaaagttgcggatcctttcatcgctgggttttatgagtccatggcaaaaacgaatacatagaaaattactaaggagatcatggagggtttgtctgaagattctgatgacagtgatagttatgacgtgaaaagtggggatgaagattctgaggatcggccctggcggccaagtcatactatcttcagaaagtcgactatcaaacagagtcatattgacaccatgagggggagatattttcgcgacatgtctattgtcagagttggaggagacagcattgcccctgctcctgaggaaaacaaagttgttatttattgaagcttcctgaaagcag

SEQ ID NO: 114619 - DNA, 291 bp, Zea Mays
attaaataggaataggagtcaagctagaccccaaaggaagctagattatgccatgtcaacactcattctatgcgacctacccactaaccatctgtccttacctacaagccatcttaactatgtgtccccaacttaggtgaagattccatggtcgaagatcgaagatgatcaccctcatcaaatcaaggaaggataacattcaagccggatcctcaaaagaattaagatccacaatcttggatggagtcttttcttaccctactctttcttacccaaacctatctatgcttt

SEQ ID NO: 114620 - DNA, 776 bp, Zea Mays
ggatttttgcagatatattacatggctccgcctcgttaaaaacctcaccccccctgtaggaaaagagtgcggccctaaatagtgttgtttggtgaattacaagggcgcgtaggccctgaggacttagacaaaaaatttgcgtagattgtcaatattctaggaatggtctaggtcttcgccggatggcgttgttagcctgtatgcgctgggggatgccttcgatttgacgatgaatggaccttcccactttggctccagcttgccccgtgactctgtccgggtggttcggacgagtacgaggtctccttcgttaaattctcttgggatgactacgtggtcgcgccaggccttcgtttgagcttggtatttgtttagggcctgcagggtgaagacgcggtctccgtcaatgaggtctttggacgtgggttcgtcgacgtcggggacggcagatgcgcttgttcgaggggacccgtgctttatttcctgcggggttatggcctctgatccatatagtagtcgaaatggagtgaatccagttgcccagcattcagtagtagtagtttacttcaggcagctggtcggcccatttacccttcctgtcgtcgagaagcctcttcttgatggcagtgaaaatcttgccgttggcgcgctcgacgacgctgttagattgcgggtgatatactgaggcgaaggcaagcttggtgccgatggagaagcagaagtccctgaaatcctggctgtcaaattgtttgccattgtcgactttgagctcagat

SEQ ID NO: 114621 - DNA, 358 bp, Zea Mays
tgaaatttggcctgttcacagctctcgcgtgattacaaccgacttttataaaggcggcagctgtaccacaagaagctaccagcgcatagtagtcttcatggccggttatgacttcgtcgcggacatcaacctccttttcaatacattcgagtgccccgggtatatcttcggcagagaggctggtttcctcggacgcagctccaactgaattgaaaatacttctcatccgagcggtgcattggcttgcaaactcaaagcatctctccttcagagcccttagcgcctcactaagcttcgtatttttctcagtctcaaccttaagtgttgctttcaaagcttcattttcctggttgaatcg

SEQ ID NO: 114622 - DNA, 611 bp, Zea Mays
cacaggctcttaataaatcctcgagaaccttgttgaccctttccgtctgaacatttgactaggggtgatagtcggtgctgaaatctaacttggtgcccatagcttgctgaaggctcttccaaaattttgaagtgaactgtgtccccctatctgacactatcttccgagggataccatggagtctgactatctctttaagatatatccgggcaagggtggctcctccaatggtggttttcactgggatgaagtgggctaccttggtaagacggtctattattacctagatagagtcattccctttttgcgtccggggtagtccggttacaaaatccatgcctatttcctcccacttccattcgggcactgggaggggttgcaataggcctgcaggtttctggtgctcggcttttgttcgttggcaactgtcacatcgggccacatactgtgctatttctttcttcatccctctccaccagtatctggttttgaggtctaggtacatcttggtggttcctgggtggatggagtaggctgagttgtgagcttcattgagcaggacttcccgtgcctctccttttggtacacatagacggttcttaaaccaaagg

SEQ ID NO: 114623 - DNA, 1052 bp, Zea Mays
ggggtttctctaccttaacaaatagcggtggacgggtctcagagaactctagatatgtggtgtctcgtggtccttgaggttgacctcttcctccgtgttgctgaaattgatttcccgccatttcacgcaagaagcgtgtgttgtcggcggtagagttgactaaggcagcgatagccgcctcagctagtgtaggaggtacatgtggcgggttgggagtgtcctctcaccgtgggaagttcccgcctcatcatgagcacgatttcgcgatggcatctaaggaagaaaaacatcctgaattattacatgccaaacatacaccatctttattacattgctgaactgtaataattatagatactcagtatacaactcgacttccttatttattttacataaggacattgcttaaactatactactctaatcctcttcatccttagctgctccactgtccgctttaggagaccgttcatctgcgaggttcatggaatgaggggctccaaaatggtccaaccccccatcagatcctccatttgctgttccatatggtccagctcgctgcaacttctggcggcacgtttgggtgcagccggtcatacaatacatgcacctcttcatgcagggtgttgcaatatgcttgcaggttttccagggatgcgcttagttctgctacccgtgctagagctttggcttcacaatcccaggcgaaagagcgcgaatttacggcccactcaatggtcgtatcgtgttccacaatttctagctacaagtgattaacttttgctgatagttcagcaatgcagcggctatcacgcgcacgctccctactcccgtggcgtagtgcggacctgagtcgctctactctggcctccaaatcccctattgggtcgttgcttccactactgcttccttcatgtctagaagccagctgatgccggggtacaccatgaggtccagttgctttgtgttgggtggtcttggttcgcgccatatctccataagaggggaaaatttatttagtgtagtttaaacatgatgcatgcataacctca

SEQ ID NO: 114624 - DNA, 740 bp, Zea Mays
cgcttcggggagacgcactggtcgtgcgtatggtctttctgggcttgattggggacagtcggcgctgtaatttctcgccgtgagtctctcaccgccgcggagccgcttcacgccgtggtcaggccacttcgctgctccaaccattggtgagacaccctccttgttaccgcccttgctttgatttcaatttcgcgcgccaccgtgggaatgttgtagccgaagcaggcggatttgggggcgcgccggtggggatctccgccgtggggcgggccgctgtgtccctggtgtcttgtggaggaagaagaacgggcgtgggtcgttgatattgcagggaggggtcgggattaggtcatcaggggcgatgcgtcaggatgcatcacaaccgtaaatcagtagaggaacgaatgagagtggactatgggtattcatcgtctggaccgttggatcgggtgggatcgaatccaaccgggatgaatcgggcaccgtcggattcagatccgagggctacggctgcttaccggttcggtattaggcgatccaatctaggccattgaatttagattgtgcggctcagatgcgatcttaccccttcacgggcgtagattaaaacaatggcccctgagtattagagaaaccaacccgccatcccttgtcgcggtgcactgtgttttaggatctttgcgcagagacccctgcgttttttagatttcatgcacgcagtcccaagccgtgtgataatg

SEQ ID NO: 114625 - DNA, 356 bp, Zea Mays
ccaccattgggctatccatggacacaacaaacaacaaagccaaggcaaccgacgatggactgatagtgcccatgctctaattgtcgcctggctccgccactgatagtcaggaagggcccccgtcaaataaattgtgcaaatgcataactacatggttttgaagacaataatcgcaataatggcacaattgatgccacaatatgcagggcaatgatatgttagttccaactattcaagagcgtagctagtttctaaagcaaaataaaaggcacaaactgatgggacataataaacttgacagtttctaaatcaaataattatcgactgctacacatcacacaaatgaacttcgaaat

SEQ ID NO: 114626 - DNA, 553 bp, Zea Mays
caaatatcaaacaaagtccaatacacaagactagaagaaacctaagtaaagaatctcgaagcatagaagactcgacaaattctaggtgcattagactagtctagtggtgcaccagaccggacagtggaccgaacatgcagagagcgagttttggcacccaagtctgctaggtgcactagaccagtctggtggcgcaccggaccaggcaccgaactgagcacacagggagcatattcctagcacccgagcctactagtacaccagaccagtcttgtgtacaccagtggtccactggactaataggctcaacggtcggcaacgactagcttcaacggctatctggcatggcggttcactggacaagtccggtgtgcaccagacctttggcgtggcgtggagaatctgtcagagcagtaacggctagctgacgtggaaggacactaaaccagtctgatgtaacatagttggcgcatcggtccggtccagtgtgatgcagataaagttgcttcatttcaatggttcttttgggggcttggactctatataaaccccc

SEQ ID NO: 114627 - DNA, 342 bp, Zea Mays
atgagttcaaccgcatcaaaaatctcacaaccgttcatgagatttggataaagctaatggaaattcatgaaggaaccacaattgtgaagagtgcaaagttgtatgtatgcaatggaaagtttgagcaatttctcatgaaggaagatgaaagtgtgtccgacatgtttaatcgcttaaatgagatagtgaatgagctcaagggacttggttttaatgtaccagatgtggatttcactcacaagttccttagatctcttccgaaaaaatatgacactattgtgaccatgttagtaaggagtgatttgaccactacctctccaaccgaagtattgggagaaattc

SEQ ID NO: 114628 - DNA, 464 bp, Zea Mays
tgggggttcattctgtaaattcctggacttggttgtgacgttttctgtataggctaggatggcgagtttatttctataaagttcaggggttcttacgtaaagctgcatccgcgaaggggtatgggctatttttggccgtccagatcagatctcacggccagggttaaatctcacataagcctaaccagtacgtaactgggatcattggatcccgatccaatggttcgatagaacccgaacccccatgcgctcccaaccctctgatttaagatctacggtcaccactgccccgcccaaaatggtacgccagatttaatcaccaccgcacatccagttttcgaccgcatccatgtgtcttctcatcccgaccgaactccggcgaccaacagagtggagggcagcccacaagtcagtgaccgagcgtgcctaacaaggcggccctacctgtcggtgccgaagttcct

SEQ ID NO: 114629 - DNA, 463 bp, Zea Mays
ggcgagtgtacgagcctcctcgggcttgctactacatcactcgcattcatgtcagggtgatggatgcaggtgatagagggttcaggactctgtcagctcatgagtctctaacaccgctatccacctacgctgctttggtcagcgatgctgctaggcgaacactatcatccctcagccacacctactggtagcagctgcacaacacgaactataggcatcttcctctacgcattcgtggagaaagccagaccagcattgttccaggtggagctggagaagatcgcctcaacaccctagctggtgtggtggcaggtcttaacaccgacctggatagtgctaccatggacctctctagggtacacttggagctagaggatgcacacacaaggatcgcagccctcgaagctcaacttgatggaaggaatccctctaaagttcaagtccctaccatggtgttgtcccc

SEQ ID NO: 114630 - DNA, 534 bp, Zea Mays
tattccttcttggcttcttgttcctttttgttaggacaatccgctatgaaatgaccggtttggccacattcataacatgccctcttctttcctttcctttgaaacttatcatttttccttacaaatttcttgaatgttttgatgaacatagctgtgtcttcatcacttgagctatcttcatcacttgatgtctcgaccactttccttgccttgtggtctttgttcttcttgggggtgtcttgttcatttgagatcaaggcatgagagtctcttgtctagattggggcttcttcggattcatgttgttgaatctttgcaaataattgatgaggcgtcatttcctcatagtcatcacggtcccttatcatccttgctagactcttgtccttttctttgtatgctctcatgaatagtctcatgaccttggagtcactccaatcttcacttccaagcactcttattttgtttaccaacaccattaaccgatcaaagagtgattgaagtgactcacccttagtccaatcatatctagca

SEQ ID NO: 114631 - DNA, 366 bp, Zea Mays
atattaatccctatttttttacttatctgtctgtacttatgctcagtaacgcaagtaatagtgaagtagacggggctccatcccctactccactaaagactcctctaaaatttaaaatgtatatatatgatataatgcaaaaaagatcttatacgttagcagtttcatttagtcctctcattcgttttggctccgtctctgcacatgcttctattatataactgtgaggcgtgagtttagccataacgtgtatatctgtagttttacgacgtttcattcaccggcgactggtgccctccaccaataaaaaaggcctcgttttaaaacctgttcagggcctcagattttgccggcacggccctgttc

SEQ ID NO: 114632 - DNA, 373 bp, Zea Mays
agacgagctaacctccaaagatctcatcgacggagaccgtgtcttcgccctgcaagccctcaacaaataccaagcccaaacgaaggcctgacgcgaccacgcagttgtcgcaagagaattcaacgaaggggacctcgtactcgttcgaacaacctggacagaatcacggggtaagctggagccaaagtgggaaggaccattcatcgtcaagacgaagtcgtctcccagcgcgtacaggctaacaacgcaatctagcgaagacctggagcattcctggaatatagataatctccgcaaattttttgtttgaatcctcaaggccatcacgcccttgtaattcaccaaacattaccattccggccctcactctttt

SEQ ID NO: 114633 - DNA, 484 bp, Zea Mays
gaggcaaagaaacatttgaaaaaaatatagcatgccaacatacaccatcatattacattgccaaaatgtaataattaaacagactccagtgtacaacttgacttcattatttattttacataagtataacacctaaactgtactactctagtcttcttcatcttttgttgctccatttcttgctgtaggagaccgttcgtcagcaaggttcatggaaggaggggcctaaaaaggtcctgctccccatcaggtccttcatttgctgttcccgatggtccggctcccattgcagcaacgtctggaggcacgtccaggtgcagtcgagcatacaatacatgcacttcttcatgtaaagtattacaatacacttgcaggcttttgagggatgcactaagctctgccacacgagctagagctttagcttcgtagtcccaagcgaaagagcgcgagttgatggcccaatcaatggctgtatcccgttctg

SEQ ID NO: 114634 - DNA, 754 bp, Zea Mays
acatgacatgggatgcctgagttttttcttggcacatcagcagaataaatatataactatataggtattatataatctaaactcatccagatagttgaaaagcaaaaatcagagaaatcatgcccgtgaaaagttagggtccataacacaatcgcaaaaggcaaacaggaagttaataggttgtctgctaacctagcacagttctgtctcagtctatatcagatgttaatctcagtgcttgaactgtcgaaaaacaacggagaatctcgaacaagaaacaggtgttccctttaagttactgggtttacatgcctaagtagagcaactcagtagaaacaatcttggataggtcatcgaatgcaaagatagtgttggtctgttggacaaactttttgctggtaaaagtgctgttatggaacgaataagatagatcctaggcgtaagtgcttcactcaaacaagaatattaccagactaaacttgatctaaaatgtacattctaaattaattgttaagggaatttacatgacaaaaatatatgttctgccaaccttgaaagtgattatattgcctataaaaatcaggtctggagattcagtacaatggaatgccatcagaaacaatactaaacaggaaaacccagatgtcgacgagagtaaacatctgctcccaaagccaatcaggatacaagcgtaaagcaagaggccccaaagccaaacggtacaaacagtttctaaccaatctttgaataaagc

SEQ ID NO: 114635 - DNA, 525 bp, Zea Mays
catcgaacacagaatgagatactagagcaccaaggagccaaagctgaatatgtgtggtagcctatctatatcccatcctcagtagcagggtgcgcctcatgagctcatataagaactttgtcgctggggtgaagtcagcaatagaacaccgagacctgtctatgaacgaaggtctgaacagagcggcgacgtgagcggtgtcgagagctactctactatgaggacaaggaggagggtctgaggtaccatagcacatgctgtgaagcctcatcgtcgactcaaggaatccaaataactcctggatctgagttgtatgcagagtgacgtcctcatgctcgaacaggaacctcctccactgatggtcagggtcgatccatactgtggcatagaacactcggacccactcctcaacatatcagccaccaaaagtcattaaagagtacaacccttgtaaatatgtgatgtgaccctctgactctgcatcggccgctgtacagaaagaagagagatccagatgctggtgag

SEQ ID NO: 114636 - DNA, 552 bp, Zea Mays
ccatacagcatacatgttatggatatatgtacatacatatatattttatttatttgcacaggaagttacaattgatccgaggttggtacctaaagttggtatgacattcagtggtgtggatgaagcatatcaattttatagtaggtatgcatatgaagttggctttccactgaaaaagtatagggaacagaaaaattgtaagtggttgaattgctcgatggaaggaaagagtgcagtaaggggaatatcaaacccaaaggtacgtaataccagctcgaaacggacataatgcaaggccggtatgaaacttaaaaaaatttatgatgatgccaaagagacagttatatcagtgtgtattgatctgttgcacttggatcataatcatgaattttttaagaaggatacagaaaagaatcaattacaatgcaacaagacgcatgatcctgaatacatggagttcataagttcaatgcaggagagtcgaatctcgcaacattgtattatggattatgttttagaaatgcacggtggtcctgagagtgtgcctgtaac

SEQ ID NO: 114637 - DNA, 437 bp, Zea Mays
acgctggtgacttcagtcacagattgatacatttctatgaccaaatttacatcttcgtcaacaattacaagtgacgaagattagacttgaatattaatgacgaaaatgaaaggaacgtcatagacacaaagtttggacgcaacaagttcgtcacatattagatttgatatcgtcatcgctaatttgccttgatcggttgacgtaatgatgaaataaattggtcacagatgagttttagtaaaaaaacacccacgtgtacacaccacttgacggcatgggatccttggcctacatgggccgcagttttttgggacacagcccccgcctggcgacgcggccccggcccaccaactggaagcggtatttgtttatttggcaaaaaaacttgcgcccacagagcttcgaaccagagacctgcgcctgaaagggaattaggc

SEQ ID NO: 114638 - DNA, 380 bp, Zea Mays
aaaaaaaaaaaacgggggaggcaagaagcatcagggcaggcaggaggatcctagtacatatcctacttactggcttgcagcaaggctagctgatggctgcgtgcgtgcttacatgatgatgatcatgcgtgtcgttcgtactcgtacgaggatcgaggaaagacaccataactcaccttcaacagacacccttcgttaggagcatgcacggatagatggcgtctagcatatcgataggacatgacaagtggtacgatccccgtcacatgtccatggaggcatctgatatggacacggcgtgtatctatcgcggctggaacagaaccagcgctcgcgcggcggtcggcgggagggacagaccttggctccgtgcgttcagg

SEQ ID NO: 114639 - DNA, 743 bp, Zea Mays
actcctagaagacatccatggcggcatctgtggcaccatgctgcctcgaggagcctcgtggggaatgcctaccgacagggattgtactagcccaccgcggtgtctaacgcgcatcaggtggtgagaacctgcacagggtgttagtactacacgcagcaaacccatctgcccgcgcagacactccaaaccattcctatcacctcgttgtttgccatctgggggcttgatctagttggacctcttaaaagagcactcgagcggctacactcacatcttgctcgcaatcgacaaattctctaagtggattgaggcgtggcccctcgcaaagatcacctccgagctggccgtaaaatttgtcaccaacatcatccaccgttttggggtacccaactcgatcataatggacaatggtacacagttcactagaaacaagttcatagagttctatggcgaataccacatccgtatagattgggctgtcgtggctcaccctcgcgcaaacgggtaggtcaaacgagccaaatgatcatgcaaggcctcaaatctcagattttcatgcacctcaagcagctcgaccaacgatggccagaggcactaacagtggtcctatggaacttaagaacaaccctaaatcgctcaactaggtatatgccctactttgtggtctttggggctgaagcgttgctccccaccgacctcgactacggtgccccgagggtaaaacaatacacaaccaaacaaaa

SEQ ID NO: 114640 - DNA, 426 bp, Zea Mays
cctagccacaaccgtttgcctcttctaccctctagcgcgacttcgcgcactggatcttctctctaccgccatacaccatcgtcacgggagcttcgccgccgtcggctggagaaggaaggctatctccaccgctccgctagctgtgagtactcctaaggacatacgcttgtacctcctactccgtttgcaactagaatcgttcgataaaatgcacgcgtcccctggcaattgctcgccggagtggtggaaccgccgcgcgccatggccagggctcgcacgcacgttttacttcagttaggttctgtccacgtgctcgagccattcatggcaacgtgtagattatctagattggaggaattggtgcttgatgcatcagattgatgttcttccggtggctcttcgccgcgggtaagagctctgccgccg

SEQ ID NO: 114641 - DNA, 761 bp, Zea Mays
cttgcatttttaatacccttatcccttaatctaaagcacttacccttgtacccctgctgcctacttaaacatttcagtttatatgtccatgaacttcttgtcttctgaggccccttcctatttcgttgttaagtcattatctatcggcaatttctattcccttggtcttagtatgctcatatccttggagtcttgcataccctcatattttcatgtatgcttatcttcgtttcccaatgtctaagacacttcagttaacatgcccttgaccacccttgtttctgaatgatccatgagcgatcattttattttgcacatccttggctatctcgttaattccttgtaacttccctcggtaataatttttattacttgaaccattttgttgggaccttacctatcttacccttgcctgttctctccacttcgtcagtcctaccttaactctgtccatgattatgcttttcatcattatcacctttacccttattagctctatatcttaccttgatgtttatcttacacagaccctttaaaatctcctcatttcatctcaatctgagcattgtactttacctacttttcccttggtcgtatcctcctctttgtcacctacgcgtttttaactctatcctttgttgtgttttttgttatgtcatttgctcttctcacccctcgatcttatcttggtaattacactattttcgttctataaaatctccaatatcctatcctagtttgagagcggtgttttacttatc

SEQ ID NO: 114642 - DNA, 467 bp, Zea Mays
ccgccgcgtttggatctggtcttcaccgtcggtacggcctcggggactcgcccagggtggtgcgtgatgcgcctggtgatgttgggaacaaccttcaagcttttggtgccgcgggtaagtcacaatccctcgtcggtgtaccacaccgccccaaatccgcacttcgccgtggccaaggcgtataactggacaattcgtggtttgtcatccaccctctagtttgcaatgtcgcctgctccctatgacctaatcgatttcgagtttgggatcttgttgctcgggtttgacaccatgggtcatggcgccgccgcaccggcgctgtgcgccgccacggtctgatgctcaggcggccggaggactgggggagtgttctggtcgttagatcggaggggaacggttcagattagataaatcacgtatcgcttcgaggaatgaatctggaccgtgggtttgaatcgggcggtccc

SEQ ID NO: 114643 - DNA, 393 bp, Zea Mays
ctcttcgcgaatttgtagaatctatctacgcctttgttcttcaagaaatgtaacagcaaactaacggttgttccgggccaccaaagctttttgaattgctgcaatgaatgccacaattaatcacatctacacgtagttcatgatataatgagaacaatcacgatttaaatgtaactaattttttagaatatacttacgtccaaaatgatgggtgttgtgatggaacgaattgaagtgtattgcggtatgatccgaagattcgaggcactctagaattacacatttaaatctccgttacgaatcattataaagcaaaacttagtgacagatgtttttgaaaggcgtaaagacaagttgtaccttgtcttctgaaccctctaaacatagtcccaa

SEQ ID NO: 114644 - DNA, 794 bp, Zea Mays
tgtgggtcccactctaccaatgatgggataggggccgacgaatcgcggcgctagctttcctttcacttggaatcttttaacaccacgcatcggggagaccttgaggtatacgaagtctcctttctcaaatctgagttctcttcgcctgttgtctgcataacttttctgccgactctgagcttcaagtaatcttttgcggatcagggcaactttctcttcggcctctttcacaaaggcaggtccttccagtgtcttctcccctatgttggaccacattaggggggtctggcacttttgtccatacaatgcttcaaacggtgacatcttgatactggcctgatggctgttgttatacgagaattcagcatacggcaaactggactcccagtttctgtcgaacgtcaacacacaggctcttaataaatcctcgagaaccttgttgaccctttccgtctgaccatctgactgggggtgataggcggtgctgaagtctaacttagtgcccatagcttgctgaaggctcttccaaaattttgaagtgaactgtgtccccctgtctgacactatcttccgagggataccatggagcctgactatctctttaagatatatccgggcaagggtggctcctccaaaggtagttttcactgggatgaagtgagctaccttggtaagacggtctattatcacctagatagagtcgttccctttctgtgtccggggcagtccggttataaaatccatgcctatatcttcccacttccattcgggcaccggaaggggttgcaataggc

SEQ ID NO: 114645 - DNA, 575 bp, Zea Mays
caccggcacaatattggagacccactctacgtatcagcaaggtctaataaaattagcttctagcagccggtgaatttcgtcctttattcgtgggagtaggtctggacaaaatgttctagctttctgcttgaaaggtctgaaaccggacttaatgggcagtcgatgctctactatctctcggcttaatcctgacatctcagtgtaattctaagcaaagcaatcagaatattatttcaatataccgataatttcatctctaggatcggtctccagggtcttgttcacaaaagttggccttggagttttatcatctcctatatcgatctcctctaaaggatccaccgatgtaaaaccatgtcctaatttgccgaggtctctgaattcctctattatgtatcccacagaggaattagattatctctgtgtgacggtggaccatccggtctcgagagccggaccgtccgtgacactggttttatgctgtggtggccgctcagccttaaaagccaaactgttctgtgatagaccggaccgtccaaccttagaagccagaccgtccgcgaccacggactcat

SEQ ID NO: 114646 - DNA, 397 bp, Zea Mays
gtggtatacttggtaaattgggtcaactttagctaaggtaagtagtaggtttatttttggggttccactgaattctttttaagccttagtgagaattgataagtactcaagctagacttattggagtgaggtttatttcttcttcccttttcttttattctctttaatgttttggagtgggtttgaacaacaagttgctttaataaaattccaaaaattctataaaaattacagtggcttggtactggtgtatatttctttgcctcaaaattcgggggttagaaggtgaatagttttctctggacaaaattaccaagttttagggcagaaggggtgctttgaactacaactattatttaacagtgggtagttctctaaaacttatttttgctggctt

SEQ ID NO: 114647 - DNA, 1029 bp, Zea Mays
tacagagattcataactacccagctcatgtcagggatgtaaatatgccctagaatttcgtttgagctatgcacagcattagagcaggggcaatagccctgtgcaagggtttgcttaccaatcaggtagatagtagatatggctgcttgagttccaactacagcaagaagagttgctatgatggaggttgtccagtatatggcttatgcagttagagtatcttaactttggtgaagtttagtgcgcaacgcattagcattccgtacatctgtaagataaacagatgccagtctgtgcatagtgtgtttgttctggtaatatagctaaaagaaaagtcgttaaaacaaactatggcaactaaaggagacatttagtgtctaggacaaaatttagatctaaattgaactaagagtttcgccgtctacagatttcatggtttgtgatgtctggctatcgaaccactctgtgcaggtacaagatatccctcaccgctgaagacgatactgacaccgccgagtttatcttctttggacgaatggcgcagcggctcattaaaaaaatgtggacaccctcatctcgactaatccacccggtttcattccaaaagagattacaaatctactggaaaagtctttcgagtggaatgttagcttcaccgaaagcacaattatttatagcaatgtttccttccaagtgaatgctataaacgcagaaatggatggtggcaacatacttccaactacaccgtcctcacagccatcgtcgatcgtactttctcaaggtacatcttatcatatctgtttagtagagctatgtacattagtttatgccaagttagaaatgaaactaatggtttgtttcctctacttgtttctttccgtttcgttctacctgtatatgatgggtcacctaaagctgaaacgacacagactgcaaagtgtgctgaatagacacaaactggcactctgctgtctgctcacctgaaactaggcagcttcctaaaaaagagtattaaacaattggctgaacc

SEQ ID NO: 114648 - DNA, 372 bp, Zea Mays
gtccagatactctgtaagctctcttaaaaatgggggcggtgccaggaagaagctctatggcaaactcaacttttcgctcaggtggcatacctggtaagtcctttgggaacacatctgggaactcggacacaactttgatgatctctagtgggtctgcttcactgctatcaacggtcatctgataacaacttcctttcttcggctcaggtgggactaactcggtcaccacttcctctcctagtggagacatcaacttgattgtcctcttatcacaactgataactgcctgatacttatctagccaattcatccctaggatgacatctattccatgagtacccattactataagattagcgggaaacactatcc

SEQ ID NO: 114649 - DNA, 387 bp, Zea Mays
gccgcccaggtgccaaaggtcgaagtcttcttcgcccgaaggaccggaatcaatttccctttctttaactggcgttgtggccacattctcatctgcagtaagatctctagctacctctgatataattctatcaatatacgacattgtagcttcggcttcatcggcgtccttggcttccatagcagcagcagctttagcttcggcacctgtagttgccgaagttgaaggcggtgttcgttcgattgcttgcatcacatttactattcgtcgtttctttggttctttaattttctcctctgtagccgaaggttgccctttcctctttaaaaattgtgtcagttctgatcccagtgaacttagcagcttgaaggatagggagtcagtcat

SEQ ID NO: 114650 - DNA, 664 bp, Zea Mays
aactttgcctgaatccaaatccgcagacaccaccgaactgacacaacaatagtgggtaggacgaacaccatagggctgcaaatcttgaaccaacccgacagaacccaacttaatctgctcatgcaaagccgaatcgaacgccccaggacttaccgcaagaggggcatcaagttccttcccggcattaggtctcgccagcaccaagccctcatccgaagaggcagagtccctcccattgagatgaagccctccggtcgacaaacccaaaaccggagaccaaggcgcaatatgcaggacatttatgtctggatctagggtttggaggctggtgcgggtggctgggttgggggagagggagaggtccatccctcgtcttctggtcagtacatcccttccctcaattttatacacgcttttatgcctaataattatttagtgctaagtgtagaaaaaaataaaagttttagttagtataaagtcttgttctaaacctctaaaactaatagttagtggcttaaattagttgaggtttagaatggatcaactaattgttagatgtacccctcaaattagtattagttgttagaagctccaacccagctaaaaccagataacaattagctctagaggtttagaacatggcctaaaacaaccctgtcatgag

SEQ ID NO: 114651 - DNA, 1020 bp, Zea Mays
ctgaggttgatcccaatgacagtgtacatgttgaagctgatcccaatgggtgtgaccgtgcaccagctgatcccaatgggtgtgaccttgttgaagctgatcccaatgggtgtaatcgtgctgaagctgatcccaatgggtgtaaccgtgttgaaattgatcccaatgggtgtgaccttgcaccggccattgtccgtatttttgatgaggacaaagaagaggaagaagaagtttcgctcatttgtaagaatagttggcgttacagaggtagtagggggatagtgatattccttctccagctctatatgctcttgtcagccttcaagagttgtccataacaaattttgatcaggcccttgaggatgtcgttcctgaggatatgctgtcggagccgactgctgacgacatgatggatgtttgctctgaaattccaaacgtgggattagaggtatcccgagcagtgtctcgtgcatcatcgactttggaaggcagtctccgatgtcaaaaagttggttaggattgcccaactcccatggaggtgactgaggatccttcagtcttagaggtggctgttgcagaaaacccagcccccgagggtgccgccggtagtgatctggctctggtgggtagcatgagttgcgacccagccctcgagggtgttgccggtagtgatccgactctggtgggtggtgcgaactgcaacccaacccccaaaggtgtccaagtgagctatccttcccacacctccatggatgtccatgtcgggtcgtctccaccatgatctgatgggggtgatggtgatgcatgcttctttaacttcgagcaagcgagtcggcttggaggtcggcgagccagatgcaagaattctgatatccgctggcggggctgagtcaacccctgacaatgttcttcaaattattctggttgatcttccttcgtcgagctacgacgcaacttctcctgacttgggattaccctcattcttctccaatcttcaggtaactcagctctttcgttctg

SEQ ID NO: 114652 - DNA, 573 bp, Zea Mays
ccttccaccacgtcgccgtaactccctatagctatcccatcgtcgccggggagcttgccatgacgatggacacgaattcacctcgcccaggttcttcttcatctccggtcgccagcacggctcggccaaattgatcaccaccgctcgctccttctataaattgagtccgcggccagctccaccacattatcacgcaccacaccatctagtatcgctcccaatcttgcaaccgtgagctccaatttcaagttttccctaaatcagttctccgccacccggaaacgaacctcaccgcggccagccctttctcggtcagttcatcccccgctctccctcgtttgagcactcttttagctctgtgatgctcgccgaaccaccaatttgaacagaatagctttaaatcaccgggaacacgtacccatttgtcctcatcgtccgcggttcacgtggacagagcttgatagcttaccgattgtgaaattaatttaggggaatcattcggggagggttcaatccggtgtatgtcgctcgggagcaccggtcgtagcgtaaatccgccagtacaacttcgcc

SEQ ID NO: 114653 - DNA, 319 bp, Zea Mays
cttgggtgttcagagtgtgaaagctagttctcattggacccccaaagttgtcgaggattcgtctgagcactgcttccttcttcatctacaacggcatccccgccttgactttcctggacatggaagagtcttagcggctgattggttggactgctgttcgtggcctgcctcaggcgagcatggccggtgagaaacagaagtttctagcgtacccgcgcatgcagcctgaagagatatttttggccagcgttgcgccggtacaacttgatctcgttttatgcacttaaccaaacaaagactagtgttggatcaacgcacg

SEQ ID NO: 114654 - DNA, 401 bp, Zea Mays
cgagtgaacaggacgaaacaccataccaggggtacgacatcgcacgaccctacggacgacgtcagtaggaccacgccactagagacagcaagccaagctcccttctagtagaatatgaataaagtcgtccctttaattataaaagggcaggggcaaccttccttctacacacaagcgcactagatgtaacacaatctactgcaattccacgatcaacactacactggactaggggcccgacctgaagcagaataaacccgtgtcttagatttctcatcgagtcccagcaactcaccattcagagcaagtccacgctagcacccctaccgaatacaaatctcattgtcccccgattttcgaaaccacgtcatttttatcttgagtttaggagaagtcgtact

SEQ ID NO: 114655 - DNA, 445 bp, Zea Mays
ttcgtaacatagaaattgtatgtgctttcaaaaaataaagattttctgaaaggagtgattaaatacaatattgttttgatttaggacaagagatataagaaagacgaatgtgataggtgatgctggacttaggacatggcatacaaaaaagaaccaagggaataggtgagtaccaatacaatggtcagcaaggactaattcagacttttctcattttttgatgggtaatttgtttttattgggtaacaacaattaccaaaataatatgatctaacataaaagacatgaacaacaccataattaagtggtcttttgaaggttctctaaaggtaagtggacaaaatcaagagataggctcttcgcgaaaagcttctcttcaagactatcacgtacctaggaaccgagtgcccgaagaaggcctccaaaaaatggcccactaatcgac

SEQ ID NO: 114656 - DNA, 1334 bp, Zea Mays
aacaataaacctcacttttatgaaagttgattttcagaccagacatcttttcaaacaaaatcaagataaattttaagttccttgcaaattcaagattgtcctgaagcaaaaaaaattgtatcatccgcatattgaagataagcacaaccattacttataatatgaggaatcaagccagcaatcagatttttttcttgtgctttttcaataagacacgcaagaccatcagctgctatgttgaagaggaggaggaaaaggggtcaccctgtctgacccctttatgagtagaaaaataggggccaatcatgccattagttctaatagcaaccttccctcctttcacagttttcatcacccaatcactccatttgtctccaaaacctttttgttggagcattctacataagaattgccaattgactttatcataagccttctcaaagtcaattttaagaataatcccattttgcttcttttttttacttcatgaataatttcatgaagagcaacaacacaatcaagaatatattttcctttaacaaaaccaaattgattttcactaatcaccttgttgatacacgaagataacctattattcaaagttttggtgatgattttataacaaacattcaatagacaaattggtctgaaatttttcatttccatggcattatctaccttaggaattaaggtaatcacaccataattaagtcttttgatgtccaaatttcctttacaaaaatcatcacacaaataccaaatatcctttttaataatatcccagaaatcctggaaaaattctgcagggagaccatcagggcctcgagcactattatgtttgaggtcagagacaactttgtaaatctcatcgagactaaaggggacagtaagataatttctgtcatctccattgagccttcgcatattcatatcattcatattaatagttgtaatatttgaagggccaaagaggtttttataatagtcagtggctaacttattaatttcatcctcattatccacaagtctcccattatcgagcagagaatgaattctcagacgtcttttttttccattagcttttagatgaaaatacttagtgttctcatctccagcaatgatatttttttctctggcaatctgtttcatcttcgtttcttcctcaagaagtaaggatctcagctgcaattcatactccatcttttcatttttctctctatcagagagattttcagactcatttttgatgtccaatctattcagattcattttcagagtgttgattttcctcctattggaaccttcttcattaatattccatcctttcagagttc

SEQ ID NO: 114657 - DNA, 785 bp, Zea Mays
caggagacataatcttctgtctcctgaaactcaaactcctggaattttttcatgattttgtcccagttacctctgatatcatcattcagccatctacgaaagtcaagttgggcattcctttccctagcaagctggactagaataaatttatcattgcacagttcatataaatctggttcagacacagctagaggaatctcattaagccaaggatcctcccaaaatctggttttatcaccagaacgagtgataattttccttccaataacataatgatctctaatattcaacagatcatgccagacctgagaatcaaacgatttgtgactaacattcatgatactgtcactgtgaatatattttttttcacaatttcttgccagatcccattttcatattcaagtttccaccaccatttgcacataaggcaaatattcatgactctcaaatctttaataccaagtccaccatttttcttgtttgcacaaactctatcccatttaacaaggtgatatttctttttatctccaccaccttgccacagaaattttttccttttaatatccagttttctaatggtggtgctaggaaggagatacatcgacatatgataaatgggggaattggataaacaagcattaatcaaagtgatcctcccagcaatggaaagggagcttcccttccagctatccagtctcttgtcaaatttttcttccaaccttatccaatctgcaattctcagacgggaaggactaacagggaccccaagatacatcatggggaaa

SEQ ID NO: 114658 - DNA, 437 bp, Zea Mays
cttcagtttcaacctacatcatggtagcttcagaagattcctttgaatttttgtctcccatgctaggtgattctacagaggcaggagttagtacctttgtggattccataacagcatccaatacacttaccattctccttctcctcggagttattgaagcaatcttttgaaccttcgccagttctgcctcttgcaatgaactcaaagtttttggccgctccgctgctatcttcgagattgcctcttcgaccgattctaccctggctttggcagtagtggggtgacttggctcaacggtagaagaaggcccttcagcaagcttcggtactttggccgtttcaatatacctgggtcggtgcgtcaaaactttaacctttttcccttcggcgtggtagagatagctgaagcagcaacctttctcttctttccctactttc

SEQ ID NO: 114659 - DNA, 972 bp, Zea Mays
cttatttggcttttgattgtgttgtgcagaactgagaaagaatataaagtgcaactaaatctggggaactgttgcctgtaattttatgtacatcagcaaatatacttgtcgatattatgtacgaagtatgctgcaaattgcaaccggtggccattgggactttgagaagaaagctattacgaactacacgaggacagtttgcgaatacaaaattccaacaattttcctagcttaagagtcagtttggataccaagggctaatcagtttcgtgcttcataattttgttagaaacacgactcaagtttcgtcacataccctgtaaagctagtggcgctcctgcttctttacacagaccaatcattcctctgattcttcccaactagaagtctggatgtgcaacgctgtgcaagtttacaaatgcagtgtcaagtgcggcgcatgggaactgaatctgcagcgaatgtgcaagaaatacacggcatcatatttcacagttcacaccgagcaacatttaatttctttttcctgttaacttacactaccgctgtctgtattttcattgaattactgtcaagaacaaactgcaactctagcagtttgagatgtgaaaccacccgatctgtaaacatgttgacagaaacctagaacccaaaaccatgtttttaaaaaccaattaaatcaatatttactctgctcatttatgtgccattttatctggcgtctgcttggtggttgggccttcaatagtgatattttggccatagggacggtccctcctgcatgacagaatgctttccttagcttgacagttagtcggagatcgacgcgacctgattgacctcgaaaagccttctgctgctgtcggagggacgcatatcctgcggcgatgccgacatgaccttaataattgggaagccatgcaagggctgcagaataaggacatgtacccgtggcaaaaaggaagcttctcc

SEQ ID NO: 114660 - DNA, 338 bp, Zea Mays
cacaaatcagtggttaaggaaatgaaatccacacctttaaggacctttgctaatgattccttttcagactcataaatctttaaacattcagctcttatggtcttcctaccaacaaattcatacaatagattcatatacttcatgagaatattaaactatgtgtgctcaaccattctaaatgggtactcatgaactatgatcattttggtaattagtttttttactcgctcatgattataatctttaggtgatgagatagtagggagaccagatccagattcacctatcgttgaaggagcaaagttcaatagagactgatcaagcttttgttcgatatg

SEQ ID NO: 114661 - DNA, 599 bp, Zea Mays
tgtacaatgccatttctctctcgtcaagtcgtgagatgaaatgactcagtgctgctatgcagcaagtaagcttctgtaccttgttctgtgattgtggtggctccatcctcagaatggcttcaatattctccaggttggcctcggttccctggtgactgacgatgaatccaagcagcttctcggctggtaccccgaatacgcatttttctaggttaagtttctagcggtagcgcttcaagctattgaaaatctgctagatatcgtcgatgaagttcttcgggttcacggttttgatcaccatgttgtcaacgaatgtaagcttccacccgcttgccccattggtcggctaagcatgtttggatagctcgttgataagtctctccaacgtttttgaggccaaacaacatggaggtatagcagaaggccccaaaaggtgtgatgaatgcaatcttttcttgatcttcctttgctagactgatttggtgatgtcccgagtaacagtccaggaaggagagcatagatcaaccggtggtagagtcgatcacctggtctattctagggagcccaaagggatccttcggacaatgtttgttgagatc

SEQ ID NO: 114662 - DNA, 508 bp, Zea Mays
aaacgatgattggttgaaatgcatcaaatttacaagtgatgaactacttggatcatactccaaggcagaagataatgcactgtctacagccttcagaggtcggggaaaaaagagaataaatagagtttttgacgcaattggcttcgtctaccccgactaccactacccagtgcgggggcaagggaagaagaggaaagctactgctttggccaccccggctgaacctgtgccgaaggctgcaggcaaaaagatgaaggtacttacccaccggccacgttatattgaaccggtcatggtgcctgagtttggcgggaagtcatcttcggctgctgaatcaagagaatctgctccgatgcagaaggctgaagaaccggctacaatgccgaaggcaccttcggttgagccagttgaaacgaaggttgacaaagataaggctaacaggtcaacaaccgaagaggtgaaaaagatgccagggattttaagtccttcgacagaagccacaacgctg

SEQ ID NO: 114663 - DNA, 630 bp, Zea Mays
gcaatatgctcttcaactaaatctctggtgccaatgtaagtagacatcatgttgaactccatcaagcatgcttgcactttgttcccactcacgatagatggccttctgatgccgaagtgtgaccgtatagggctctggattacacccctcacatcttccctctcattcagatcattcttgacataaaaccattgcttcatccaagagcccgaccatttctttcggaatgttggcacaagatacctcacatcagaacggtgcacaaagttgtaacatccgaagttattatgatactgctccttcccaattgcctttgtctggtaggataattcatgaatattgtagaagcacttggcatttggctccatcccttggcttctcatagcccaaataaaaactccaactttaattaaggcttcgggagtaagctaatgaaggtatatctcaaatgtctttagcacttcaaccagcacgttgtgcaagggaaaatgaagtccagccttcataaaacttttaaacactaccacttcatctacttcaggaagaggaacaacgctttcccctctagctctcagtatggatatatcatgaaaatatctgccctttatcgcctcaatttgcccttgtctg

SEQ ID NO: 114664 - DNA, 1060 bp, Zea Mays
cgtttttgggatgaagcctttctcactgcctgttacttaatcaatcgcatgcccactcgaacactacatcactcctctcctttggaatcacttttccataccaaacccgattatatcttccttcgtgcttttggttgtgcctgctacccaaatcttcggccctacaactcccgcaaactttcttttcgctcagtacaatgtgtctttttgggttatagctctatgcacaagggttacaaatgtcttgaccgcacgtcaggacgaatttatatatctcgtgatgttgtgttcaatgaatccctgtttccttttgcttctactgaaccacccttgtctgcatctacttctgcccctacttcagatgagccactagcatataatgatcatatgcggcgatatagacttgaactgttagcatctgacagttctccaaagtgttctcctgtgcaggtttcaggttgttcccaggagccgttcacaacaacaacgacatcgacttcatctgatgtttctctgataacattgcccctgccagctccgtgccttcctctgcatactcagacaactgatgttactgacgtccactcgccatcagcttctgagacccaaccgctaatagaggaagtgtctgcagctatgccctccagaacagaggaagtgtctggagctatgccctccacatctacggtgcttactcgactacgcaacaacattgtcaaacccaagattccaacggatggcaccattctttatcatcactctcgtaagggtttctttgctgcacccacctcttacaagactgccttgactgatgaaaagtggtatgctgccatgaagtctgaattcagtgctcttcagcaaaacaacacatggacattggtccctaaacctccaggtcagaacatcatcagctgcaaatgggttttcaaagttaaagaaaagccagatgggtctattgacaagttcaaagcacggttggttgctcggggtttcacgcagcaatatggaattgattatttagagacttttagcccagttgtaaaaccagctactgtccgtc

SEQ ID NO: 114665 - DNA, 351 bp, Zea Mays
cagatggtcaataccagcaagcgtggtggaatttatctacccccaatccattcgaccagagggtacttagacaacaacaacaagcagagatgaatcctccaaatcctccaccagccagaactgatccagcagttgcagcccagatgtggataatgcaatagatggctgatattgtggcagatatgcatgcgcagatgcgataggagcatcaggagatgcgccaagagagagaggaggtgcgtcaggagaggatggggcgatagcagcaagtcccattgccaccacctccaccaccacttccaccccgggacaagcaccgagaatttatgagccacaagccacctaccttcg

SEQ ID NO: 114666 - DNA, 574 bp, Zea Mays
gaggatgaggaagaggaggaggaaacccccttaattcagaagaacagtcggcgctacatagccagcggggagagtagtggtgttccttctccagctttgtctgctctcgttggtctataggaattttctctggcaaattttgatcagactctcgaagatatggtccctgaagatctgttgtcggagccggcagatggtgggacaattccgaatgttcttcttatttcgcgaggcatggagatcgccctaagatgagtaattgcgaatgtgcttgtgttggatcgagtaggcgtgagcgtgtcgtgccgatttaagtcactgtcgacttaaaccgaccgctctgttagtagggtatagtggtcaccgtgagttacgcatgagcatgtcacaccgccttaagttgccgccgacttaagtcgattgctccgctagtagggtatagtggtcaccctaagttaagtaagtgtgagcatgtcacaccgccttaagtcatcgccgacttaagtcgattgctccgttagtagggtatagtggtcaccctgagttaagtaagcatgagcatgtcacaccgcct

SEQ ID NO: 114667 - DNA, 771 bp, Zea Mays
tggtccaacactctaagcttgcacagtccatcatcctaggatggccattccagaacctagagctggtccctaaaggattcggccttatcctgaccaagagataggtcttgagaccctgcttggcgaggttctaaaacaaaatctagaagattgaaagcgtttggaataaggaccaatagatacgatgttgaacaccataacgaggccatgtgcagggacaccttttttgcagatcaccaggcggggaggcggaaagaagttgtcacaaggaagagtggtgctgaccacttctcccctcactaggcgaagcccagcattgtcgcatgtccgacgacacatagcatggaccacgggggaaacccgatctcaacctgcgaagtataatgcacctcagcattaactacgaacaagacatatacctgcccactctagcggtgggcgctacgaccaaagtacacggaccacatagtggctcacgcgttactgaagcgaggccattgactctctgcgccacatgggtcgctgccatcatggcccccactctactgcgcaagggaccaaggcaaagcgtgacatgcagagaagacaggaaaacatccctagagcatccctacacacggtagcgcttcagcccacgttacaacctacttctgcgctctgccccgattagatgaggcaagggtacggcgggtagcagcacttcagcctgtgtcgcaacatactcatgcgctctgccctaattcgatgaggcaagggcacggtgggccagga

SEQ ID NO: 114668 - DNA, 746 bp, Zea Mays
ggcagcctcaataaaagaccaaccctttaagggagataccctcccttggtggcttgggggctactatcagggatacaatcccaagtacttggggcccattggttagcgagcacactagggaaagggccctggcatctgggggcccatcgatcagtttaaggagataggtaatgtcttccttggaagaacccaccccggacaaactccacggcaccgagcctagggtcgtgcatggaaagacctgatagggggcgggtgtaatgaagggaaaccactcgactggatcctgcgcctagctcgagaccgacccgtcataagtaaccgactgtattagctatgactggcgtcgagccataatggaggcgtcggtccgcctcccactcattacctacgagtccctcaagccatagagcactcatgacctacgagccctcggactgtggcgcatttatggcccgcgcatcccctagccaatggcacactcatgacctactaggactaggcctgagtgcacatgccgctagcagggcacaacacgatgaatcgagccgaaccccaggctacgaaggccaagggtcgacatagcccaaatgatggcgcttgggacccacactgcccacgtcatccatcataaagaatacgagacaaccaggtgaccctggtgcccataagcacgcgtggctttaccccaggtagaatgcttggtgttacccttgcctgatggctccttctcaggtaatccaccg

SEQ ID NO: 114669 - DNA, 398 bp, Zea Mays
gatccaagctcgacaatcgccgaagccgcctcttcttccttttctcttcaactggtgcagtaggccggctcactcgacgtggacgctttggacggacctctttgggtttccggatcctctccattccaacaagttcttgcccgtctgtgatagccattggctcggcatgtgccgagtcagatgattccccaaccaacaagttgagcacagcatctatctcctcgtcgttcgtgctagctgacatctcgaaatgattatgtctctcaccctctaggagactccatagtgggacaattaaagcttcaatgtcttcaggggagggtcgcactctaagacccagaccaccatcacgggcaggaggattagacacaaactcgaaaagggatctatgtgatggc

SEQ ID NO: 114670 - DNA, 711 bp, Zea Mays
gtccgtaccaccaccgaagacagccgcaaccaaaagtggtgctcaacaactgcgtagcgtacatgtttcgttatgtgtgctcccctctccaaacagctttcgccattcctgcaacaggccgatccatcttgatgaatggtacagttggagaagtgcccttatcttccttgtgtggcgtccatcattcactgtgcgtttatggctggaaggaggccacccaaaagaaaaggcttagctacgttcacctcaatatatcggcactcccgtcacctttcagttatgctttacgcttggaatatccctttcctgtcttcgtcaggcccggcggttttcactcaattattcagcgacactgattgggaaatttcagagtagcggataaactcaactgaaagcccccgtttccttttttttccagcttccaacaaatcttttcttttcttttgtttcccctgggggagaagatctcatctgcatgcattattgcattcctgcggtccaattctaccagactaccttgtaccttctcttctatgacctcttcaccagaagttctctgaaaccacgatgaaagagatgccccttcgttcatttacttcaccaacataggtgcatctcatttggtgttaattctcgcattatctttcgtcccgttgaccagctttgcacttggcactatcctaatctcattccataaaatgtgtactcggg

SEQ ID NO: 114671 - DNA, 469 bp, Zea Mays
cgtgctaactgagctttgtgcttatcttaatctaattctgtaattcaaagggaagttaaggaaaggtgccggccgcgaggcgtgacagcagggatcatccgacccctttccggcgcccttgcagcctgttgcatgcgcaacttgtgcatggaccaccattagcctagccacactacgggaatctgtgcccattttatacactagcacgcagctgtctgtcattaaatatcactatcacgtctctttgatctcctttcacgcatcattatatggaccgtcgccactaaactaatccttcacctcgtgttgccctttgctctcatctcatgtacgctgtccggcagatagatgtggtcctatactcttgtacctacaatacactacactactactaggactaataataagatgagttctcaactcgagtctaaaggtgtaccagaatttaataaacaacctaagatactat

SEQ ID NO: 114672 - DNA, 748 bp, Zea Mays
attggttttaaacgtgtcgtgtcatatcgtgtcgggccatcatgacgagctatgctaccatggctggtggtccagacccgccttgcaacaaagatcgaaaatatcttttccgtttttagagcttgttttctcattttttgtaacaaatcttgaaaatatctcaaaaaatggtgggctagattgggtgagtaagatcgggccacaaacaggctagcctacgccatgctcaacttgatgggctatccatgtttagcattagactaaataggtcgacaataaataggttgtgcacgtgtcacctgaaaggcttatccacaagcccaagcatgaccatgatggacctcgggtcaactcgggcacgattattgaaaggcttatccacaagcccaagcatgaccatgacagacctcgggtcaactcgggcacgattattgtcgtattttgctatgcccatgccgagccaaaatagatgtgcctcatgtcgggccatatagtctcacccatctagtcaactatagctggctttgccctgctcttaagtcatctccaacattgtgccataaaatagtgccaccaaaactaaaataccatatcatttaaagtgtttagagcatctcaaatagatttcaatccttcatttagggggaaaaattaaaaacagtcgtccaacagaactctatcaattggccctatatttgtccacacaaaaagctctcctcccgttcagaaatttctgcctgcacttgtc

SEQ ID NO: 114673 - DNA, 548 bp, Zea Mays
tgcagaccgagcgctgtgccctgcactgcactgcacacacctgtgatgtgctgtgcctgtgcttcgccgccggccgggcgtcgcttcttgctcgttgacatcacactgagacttcggaactgtctttgtcaggtaatttggcgcagtgaattcagaggccggcctggtgggaggagtggtgtggtagtgaattgagtgctctgcgcctgcctgaacagctagctgctggtttagcgcgtagatccatccattccagcgtcaggttcagtttgttttagtagcagtaatttagcttcagatctaacgaccctacttgctgccgtaagagtatgccggagagcaagagatggaaacatggtcctcgctaacaatatctctgattactagcttgtcatcattacccactcatgcccagacggagggtagcgtgcagtatgcaactcggtagcggtagggacacagcgagggggtcgaacaagtgacctgttactcgaaatccttaaccatacgctagaaaagctctttcgcctacataccacaatttacgt

SEQ ID NO: 114674 - DNA, 556 bp, Zea Mays
attaacacatggcataaaactccataagactacatttgctactgaaggacctaaagcacttatgtgcatttcttttcggattgttcttcaattttaacaaggaccgacttatgaacgctactcgcctccaataattattgagctatgataacgctcatataagacctctaatcaatcaacaagatatttatttatccaataggcatggaatacaataactgacaaagcaaagcatcgatccgccatacaacagaaatcacgacgacactaatagatgctatcagctaaccgtttaaaaatactaaacttacttctcgctttgccactacaccaccgtttagtcacatgaccatcgtgagcatccttcacacgattatataatagcgacctaagcgtcgtgttacccaatgcatacatctttccacgtcgcgagtataaccatattacggcatatacccgcacaccttaatcaaatatcttacgccatcaccactgtaatgcaccatggcacacacgcacatacatgtcctcatattgcgcacaagacatcaaccgc

SEQ ID NO: 114675 - DNA, 273 bp, Zea Mays
aaaagatgaaggctgaagcaggaagaaaaagggaacgcaggcaaaatcccaagtacataggtgagcagtggggaaattaggcccagtaggaccaggaccatcggatgatttctatatatactatgtgctataataagacaggtgaacttggatgaacctaggcggcggcagacactatcacaatacgaaataccactcggcgacggatttgccgcggaggcgcacctgtgtgttcgtcttgatgagtgaaagtaagagcgatcgtaacaccat

SEQ ID NO: 114676 - DNA, 574 bp, Zea Mays
cgctacccttcattattacccagccctgaatcacccgtcacttgttgtagatgctggctctcatccatccctatgcagcgcattgatagtctagtgaatctagcatttctccttcatcccttgtgttcgctctaggtttagtatgttggcatagccctggttattattgtagacttcttagctagactttgggtctgtttggattcaagatctaattactagctagctaaaattagctaaaattgattctagtgcatccaaacaagagggctaatagacgtgataattttttagccaagtttttaactagctgttagccaactagctagccaaactcagctagattttaacccatctagtagccctaactcatccaaacatgatcttttctagtcatgcagacaacattttaataaggtaagttagttgcattttaaatgatgagtgtttattttttaaaacagaacaggtgtaaataaaggaactagaaacttcattcaaactaagaaaggaaactctacaaattatttgaccaccgctccttaagctttccatgcaaatcagttcattcacc

SEQ ID NO: 114677 - DNA, 757 bp, Zea Mays
cgggtcttcagtcgcctccaccaccggtacgaccgggtccctactattcgcctctttctccacttcgcgtagagtctatccatggtaggaccgtgcccctgtgtgcttgagaaaggtcaagatggtcgtttggctggggcaccagtggtgctctgctgctaggtgtccgcgctgccgtgtttagggttggtggggaagaaatccaaggaccgttggatccctgatgtgggattgtggtgtgaagaggtgatcaaccgttagattggctatggacgctcctgatctgacggaggatacccctttcggctatttgaatcatgaccgtagattgcttgatcgacgaccattagcacgtaccggttcggttaggtttgaatctaatctgagctgtcaaatggagatccaatgacgcagatcttctcataccccttcgccgaagctgtgtttgcaaaagagcccccgcggaatctcataactaacccaccatccaccgaaggtataagcccattactgttaggtccaggtttttatggaatagaccccgaagacttaagaaataatatatgcagtacatatcgtttagaaaataataaatgaaaatatagaaatcgattttcaagtataaagtaatacccaaatcttagaaaatccatatgttgttcattttaactccgattggattcattcaagttgtgttagctccataataacattgcctacacaatgacacaatttattgtaacatataacatatttt

SEQ ID NO: 114678 - DNA, 425 bp, Zea Mays
ctgaatagactacggtggcggccgtgctgtgtttttattccatccaaacatatcggctgtgtgtgtagcgttcctgcagctggaaatcatccaggctctgttctgtgggggctgtgccactgggcactggccatgccaggaaggagggatcgctgcagtgtgcagttctgctctcccattctgcagacagaaggtgccaagcagaggcagaggctagctatacgtttggcaccagaactgatcagaccacctccgaaattcagcatggtactggagtactggactatacgctacgtccttgctagcttatggtgtagtggtattatgttcctgcgacttgcagacccaagggtggctacagcctacagtgcaacgctttgcagtctctagctaggctctacaactacaaaacgagggcaccggag

SEQ ID NO: 114679 - DNA, 761 bp, Zea Mays
ggctgctgctgggtctagccaaggtggcttaatttacatgaagtatacgttcaaatacaagaaccaatttgatgagccaaacgacgactggctagatgccattgaagcaaccagtgatgaattgcttggtgcttattcaagggccgaagatgatgttatgacagcggccttcgggggtcaaggcaaaaagaggctgaatatggtttttaatgtcatcgggtttgtatacccagattactattgtccttcacgaaagcaaggaaagaaaagaaaagctaccgcttcggcgatctctaatacaccaaagacgaaaaaagttaaggttttaacacatcgccccaagcacgctgaaactaccaaagtgtcgaagcctattgaggggtctacttccacatgtgaacccagtttctctgcacccgtcgaaaccagatcagaatcagccaaagagctaggactaagaaaatcgatagagcaaccgaaggctttgagtctgttgcaagagacggaactaccgaaggtatcaaagattgctgcaataactccaaagaggaggaggatggccagtgtactagatgctgttatagaatctgtaaaggtgtcgactcctacctcagcacctgatgcagagggcgaagccctaaagaaatctagcgaagctagcatggcgcaggctactgttgaagctggaccgtcaatccccgccgaagcaagatcttcgaaggctgctgaagaaggtaccaaaacaagaccttcgaaggctg

SEQ ID NO: 114680 - DNA, 461 bp, Zea Mays
ctggaatgtactgtgtgcgtgatggttcatcagtgcacaccaactacgtggccaagcggcaatcaccggcgtgttcgccgttcaccgggtggatgccacgccttaggaggtttatcgtgtcaatatgagccgaggtgactatccaatgaccgccgtagttcagtcgctctgcggttgccacggtagatcgccgccgtgactcattcccctctcgaccgccagcgcaattcgcccaaattaaacaacaccgctcacggactctataaattgagcacgccataagctccgtagggtagtcaagcaccaagccaccaagtcgtgccttcaattgatcccgagagctcgctaatttctcatttctcccaaacctgctttccgccaccgtgaaagaggcctcgccgtgcccagctcgattctggtccgatcttgccctctgctttcttgtttcagcacccttactt

SEQ ID NO: 114681 - DNA, 274 bp, Zea Mays
tgatgcaagaagacacaagttttatcctggtttgggcaatagaaggccctacttacagcaagggggtgagacttatattatcttgcacctatgtgcttctagtagggggtacaagctagtcgagagagggagtgaatcccaagtctctgaagatgattgaggcgagtgcaaatatcggtcgtggagggtgaaaacccgtgaagtgttctcctctcttgtttgaagccctaggctcctccttttatagcctcaaggagggatctcaggagcgcct

SEQ ID NO: 114682 - DNA, 581 bp, Zea Mays
ggaatccgcgaaacatatgacatggcacaaaaatggaaaacaacacaatcctgacaagatggtgcacgcatccgatggtgaagcatggaaacactttgatgcctttcaccgtgagaaagccgaagaggctcttaatgtacgtgttgcgttggctacagatgggttcaatccctatggaatgagtgttgccccgtacacatgttggcccgtgtttgttatcccaatcaatctccccccggtgtgtgctttcaaaggcagaacatattcgtgtcattgataattcacggacactcgggaataaaatgagcgtgtacatggagcctttgattgatgaattggtacgtgcttaggaggaaggggtatggacgtatgaccgagctacaaagacaaactttgaaatgcatgcttggtaccagtactccatgcatgacttaccggtgtatgggctattctgtgcctagtgtgttcacggtaagttcccatgcctagtttgcaaggaagctcttagattcatttggttgaaaaagggtggcaaatatttgtcgttcgataaacatcgataatttctccctcctgaccgc

SEQ ID NO: 114683 - DNA, 372 bp, Zea Mays
gcagtcttcaacatttgatgataacatggtgttaagtcttatttctgaagttaaaactataaaatgcggtatctgcaatagtcatttggcaaatgttataatatggcttcaaacagccaccaaagtctatgctgaatgcattgacatcttattgtgctgtttatgcttttgagttcttatccagctttaccatctgaaactaatattagagagcatgcatgagtagcatgacttattgccatgcactatattattttatagctggaggaaatgatattagaacagtgtttggttcaattttttctagcaagcattgcgtaccatatttaaagtttcctgatgctgtgggttgttggatcttcgaaggatttt

SEQ ID NO: 114684 - DNA, 274 bp, Zea Mays
gaattttggtagaagacaagtaacatgaattacttcaacgttgagctggttgttcacatgtggtgtgatacctttcaaatatatgtccatgataattttgacagaattttcctatttgcatcatgctgtatttttctttttcttgtgttgactcaatttctttaacttagcgtactggttgtgggatttgatggtaacataaacagtatcagagttgcttgggaattagatgattctggagaatcaacttccaaatgttaatgacaacggaaaa

SEQ ID NO: 114685 - DNA, 402 bp, Zea Mays
aggaagaagagcaagcttccacattagctaagtgccatttttgggacatgttaatatacaaccaacgtgacctatgaggcatggcttgagattcgtgagctgcataaacgctctgtcctacctcctctcgaggctcctcctcctgcttacagtgatatatccattggccgacaggattctctagttacacttctacttctcacaaagacggtcacgcagttgtttcggatgatgtcgatgatggtgatggtgatggtggtggtgcacagggaggagacgacattccatgggacacggtaggggttgaggatgattcacttcttatttcctcttctttttcctttttggtgcttggtgccaaagaggataagtgttgacgatgggaaagggttcaatttcttt

SEQ ID NO: 114686 - DNA, 506 bp, Zea Mays
aaatggctcaagtcaactaaaaagaacaacatttaaactaacaactcgagtcaaattgatgtaacattggggttacttgatcccgatgcgtgatgactgacacagtcgctagtgaggagtgacagggtcggtggctcgggggcaggtgcgcgtgactgatgtcaaatgaccaagttggtgcttgggttcagattagcattgagacacataacctgtggcgtagccagaacccgaagaaacacatcctatttggcatttcagtttcactaactgaacgattcaacttgcatttatgtgattaaaagataaaaattaatgagagcatttttattgaaacttatttaaaataaagcaagcatttaagtaaacgtcgtgcatggaacatattcaaaataaataaaatatttcctattaaattaagccataaaccctaaacattttcccagctaaatccttaatccataaactctaaaccaacattttcctaaatggtgcctaaacatttc

SEQ ID NO: 114687 - DNA, 557 bp, Zea Mays
ggagcatttatcaactatgttgttcaattaagcctacagttgagatgtagtctaaatcttgcatattttatttttctattccctccattgcatattataagatattttggcttttttaatatgtagtttttgcaacatacttagatatacattatgtcagatacatagtaaaacaatgtatgtaggaaaaagccaaaacatattataattttgaacagagggagtactattaactatggttgtgtgccctagtttaggtgttttaagttcttagatattggcactaggcatgcagattcactagcttcgtcgctatctctagtgagttcaatgtctatggagcacacttcacattggaatagaagtgttgaaccaatcccctaaaacagactgaaattcccaccaccttgccacataagctcaaatttcccatgttgagtggggattctccaacctgaacttcactttatgctatatttggagtcgttactacgaatgatagcaagtagtgacctctttttttacattagatgtcccctgtgcagtttgattcctga

SEQ ID NO: 114688 - DNA, 451 bp, Zea Mays
gcattaatttcagagaagcacaggggcctcggagtaattctcctaagacacagagcgcatgcggcgtggatggcgggttagttctgcagaactgcgagggctcttttgcatatcgcatccgcgaaggggtatcgcgatcacacggccgttggattagagattcacggcggggattacatccatttatttgccgaaccggtatcaactggtgaccaccagatccaaaatcagcggccatgattcaaaaccacccagatccgttcatccagtgttcaacggtcctgatttaattacagggaaaggggtatctagcacttaatcggagccatccgcttatgatcctatggctaacggttccttcccagctttccctctcccagcttgggccatacggcggcgccgcccaacggtgcatggtggcgcacccaccgaagaccccggaatctacaac

SEQ ID NO: 114689 - DNA, 370 bp, Zea Mays
ccaacccttaagatgttctttcgtttggcacgcatatgggagataatacacttgtgtggcctgttgggccatgatatagacatcgtctcctggtaaggtggaatcttgtcgaatttcgactatcccaagattagaatgtgtttgtctcatcacttgagggtcaaaccaatgacatttgaatataaatggagtaagaggtttggaaccataaaaaatgagctcatatatttcttcgattcgtccaaaataatcgacattgtcaaggccaagcgtaaagactctagaacacgttgttttccgattgggccgacttttgtcgtagtttgttgtgcaaaaacggtatccattgacatcatacctagaatatttc

SEQ ID NO: 114690 - DNA, 407 bp, Zea Mays
gaaaggtcactgacccccacgaccccaccacaagatgatgaactcgatcaggagatccgtaacctcgagactattcatcaacaagttaagaaacacagaaaaatgctttgaccttctcagctctagaagcaaatcgatgaagcatctgagcaactgcgtaatattatgcaacacatcaatcagtcagaccaccaataccatcaaagggatcttcaacatgaaagtcataaccatgatgatctttgtcatcaaggacacaaccatgatgatattttacacgaggactactcatgtgatgactttttgtatgattatgcttctccattagccatgccatggccaccattatacaaaccaccccagttaccaatgtacgatggtcatttagaatcgaagcaaattctgat

SEQ ID NO: 114691 - DNA, 629 bp, Zea Mays
gatctgattccaccaagttatggcatagcctttgaactcaatggctgcaagctttgcattcttttcagcacggtattcatacaaatcaaatatttgttccactttggtttcccattcaaaataatcatcagcattctccttgccgctgaatggaggaatggacactttaaccttgctcaaaccatcatcaatgtgacgttgttcaggatgacgccgacagtgatcaccataacgaccacgcgctccaaaacgaccaaaattgtcatggccatgattatcatatgcaacatgttcaacactataatttgaaagtgtttcatcattaaaatcagtaggatcaccaacaagaacatgtcgtgcacgaccaaaaccagtaaaaagtcctcgaccacgaccacctgcaaagttatcaaaaccagcagcaaatcttcgaccatggccgccaccatggtgatcgtcatcctcattatcatgaggtggaggttcgtcatgctgttgctgaatggattgctgaagttgttgcattccgtgcatcaattgacgcatttgttcacgcacctcctgaaactcttgagcagaaacagtatgggaagaggaatctttgtttcctgccatgttagtatcaaagg

SEQ ID NO: 114692 - DNA, 772 bp, Zea Mays
ctttctttctcaaattttgcttcacattgtcttgcctcttatcatttgcttgagccttcttctcaagattgttgggacaccttgaggcaaagtgacccatatcatcacacatgtagcacttgatttgagccaaatcatccttcttcttttgatttgtgatcatcatgtcatattgattatatattgaatgccttcttctttctcttcttgttttccccacatcaccattatattcatggttaatcttgatttgcttttggggattcttcttttgctcaactcgtgactttggttgaggcttcacttgtggattcactagtttcttggttgggcacattgaggtgaggtgaccccaagtgtggcacttgaagcactggtcatgctttagcctccattcttccttcttcaacttgagcttccttttattggggcatgcctttgcaagatgacccatctcatggcatttatagcacatgaagtgaaatatcttatttccttttaatttgaattgcccgcctttgatattgctcttgttgaaaccaaggccactcttgtcatcatatcttctttgatttttcattataagatcatgagtgacttctgatttatgccacctctcaaacatgttgcttaaattcttcactttgtttttgagcttattattttccttcaaaaggtttagtctcacaagacaagggaagaataataataatctatagttgaagaacatggcatagctaataaatcatcacaataggtgggtacatgcttc

SEQ ID NO: 114693 - DNA, 430 bp, Zea Mays
tgagtgtctagtttggatcaggatgctggtcctttcgttcctgctgctgaagaagtgccagtgcctgcatttgctgaaactgatcccaatgggtgtaacccgcctgttattaaccccaatgggtgtgacctggatgacgctgaccccaatgggtgtgacctagatgacgctgaccccaatgggtgtactgtccgtgttgttgatgagggtgaggaggaggaggatgaaatccctctaactcggaagaacagccgacgctatattgccagtggcgaaagtagtggtgttccttctccagccctgtccgctcttgttggtctacaagaattgtctctagccaactttgatcagactcttgaggatatggtcccagaagacctgttgtctgagccagcagatggtggcatgatggacgtttgcgctgatgtgc

SEQ ID NO: 114694 - DNA, 446 bp, Zea Mays
gctaatttctggtgatcgggacttctcgaatgcccttcataagctagtgatgaggcggtacaatattctactagcacaacctccaaatgtgtctcaagcgcttactgctgcagcaaaacatgtttggctatggaaagacctcgtggctggggaaccaccattggcagagtccccatacataagtagcataacaaatggcagtgtggaccattcaaatgcatcgaagaacatggattcagattcttcagttgcaactccacatagcagtactcaaggacagaatagcataccgtgtgatcagcaaaaaggtggtaacagcaaggcagacaaacaatctaaagttaggcaacctcggaaaaaccagtcagatgaagcttcagttgatgggctacctggtagtcctaaaggaagcactgcttcccgagccaaatcaatctcagccttca

SEQ ID NO: 114695 - DNA, 464 bp, Zea Mays
tggcagtttctctgacccctcatctactattgcgtgagtccctcatctactactgcgtgagtaacaagagtaagtagcatatcctttcagaaagcattaaactgaattatgtgagtgaaaaaggttttgagagactctgcctgttcgattcaatgaagttgtgtgaataccagtgccgagaaaacattaaaaacatttatttgatgggtttcacgcattcaatccaactaaatcgtgtgattgaatacgtttatttgagaagctttgtccttattttatatttgtttgctgtaaaatactttaagttattgctttatattaaattgtttgttgtcaactaaaacgtatatatacacacacatatatagatttgtacatgtagttctatataaaatctgccataccttaatttttgtgcgtcctccgtcactgctcaccggaacatattttcttctatctcggtc

SEQ ID NO: 114696 - DNA, 431 bp, Zea Mays
gagaaatcaaatcatactcactaggatatggcttggtgtagctaattgccctttgcctctaaatcatggcaaactgatcccttagaataatgttgatctgatttgcggtagcatcccctagggccgagctctcatgactcggcctgtgatgtatttgtccaatcacacctgtttctcagcgtctactctagaaactcttgctgcaccaaactgcactaggtgtgttgtgctaacatgatctgggacatacatacatcaatactcgtgtggaatgtggttaggcaacctgttgtagaactggcattcatcagaaccatcacccgtcttataaacaacatatgccggcgaaccaggcggatgcgtctctagggcagtgactgaatatggcagtggcagcctagtctggaatagatttcccctttgtgacttcc

SEQ ID NO: 114697 - DNA, 422 bp, Zea Mays
gctacccggttaatcggcggccaccggactttcaccgtggccgtgccgcgcgggtatgctcgccagcgcagtcacatcttggggatctcatccatctccggctggctaactataaattgagtcgaggcactgcttcttcgttgcatcacgcgcacaagctcttaggcaattgactcaattccaccgaagaacccataaatccctcgtttcctgttcttagctccgccgcaaggactccaccgtggtcatcgctccacgggtcagtatctaccaaattacttcctgttctagtttgtctttgatctcctattgctctcaatactgaccaattgaagcctgaccaaagcccttcaccggaacgcgcacctgctctgtaagcgccaccgtgacaccctctccggagccccgcgtttctattcacg

SEQ ID NO: 114698 - DNA, 345 bp, Zea Mays
gtattgataaaaaaaatcactccaagaaagaggaagtcggttccactaagcatggacgagatgtagtatctgttagttgtatcatccatgtgttgtcagcatgtgactgcagacatgtgccatgtatcagacttattgtatcagactacgttcagcctacttgttagtagctgagttattgtgtttcctactacgttcagactacatctatcagacttattacatctcgttcagacttatgtgtttcctgtttgtgccatgtatcagtggaagtctcaatgccctgggaaaagaagaagagagccacgagaaaggaaggggcaaaactggaagtctcaatgtcgc

SEQ ID NO: 114699 - DNA, 388 bp, Zea Mays
gtgatttgtttaaattctttttgtatacagttttgggtgcttatttgatttgaacggtccatcccttttttcttgctgggactggattctcacccactttcagtcgtcttcctgtgctgggattcttctggttctgttgcgggatcccatatgaggtacggggatatctcaaatggattatttggattcaattctccgggagctgcatttcggcatgacttgaatcagttcgcgctgcgaccaagcgcaatctgagctactttgcttgcgattctcgtgatttggagttggttatctcggatcgaacgattttcctgacaatctttaccaaatccatttggtgttccttggttattccgtcagacaaggaagcagagtttgaagttgt

SEQ ID NO: 114700 - DNA, 520 bp, Zea Mays
tatccaatagagacgaattcaatcaagccaccggctgagcagcaaggtgaactgggagagaaactgtctgagttgagtctgaaaccggctgagccggtatccagcagagaagaaactggctgactgctcgattgagcagggagctgagcaatgaggaaaaccgggtgagccgagtctgaaaccggtagagtcggtattcagcaaataatatcccggtcccagggtcggctgagtagggggtcggccgactttctgcagagagcagcctagtcgacaacccgactgagtagggaactcgatcgactttcaccaaaatgcatccatgaccaaaactcaagattttttttgaggattttgaagagaaaaatgttgagctcatcacaaaacttactcatttgtgtggatcactctgcattgaatggtgaatcctaatactcaagaattataaaaattttaagcggtcatcaaacggaaacacatgaagcatgccatatgatgtatataattaatccataacgca

SEQ ID NO: 114701 - DNA, 311 bp, Zea Mays
gaactggccacagtgcctgaattcggcagtgcaacatctacggctcccgaagctaagggatcaactctactgccaggatccacagagttggccgaagcgccaacaacaaaagaattggaggagccacagactctgttaccagaaaccaaagagttggctgaagcaccatcaacagaaaagatggaagaagcaaaagcatcaactcagagagtaaaaatatcagaaattttgagtccttcagtagagattggagtaacaaaaattaaaaaggggccaacagtgaccccaaaaagaaagagaatggttaacgt

SEQ ID NO: 114702 - DNA, 782 bp, Zea Mays
atttggtccccccaatcttagatcctagcttcgcccctggtaaggatggctcaggaaaagatgatccaacaggagaagatgaagcatcagaaggattgagccattagaagatggcgagatggggaaaaattccttgcacctagatgtacagaagcaacaccacatgcttcgtctgatcatgacacatgtccatcctactaatcttaaagcaaccgaacaaccaaccatgttggctcatgctttaagattggtgttatgttgctttaatattggtgggatggacacgtgtcacaaatcgagaggagcatgcagtgttttttctctgcagctgactgtagggaatttttagacgaggtcatgtatagacctatgtcataggaggcttcatagtgtaatttggaaccacaaccaaagactctaaagaaaacacaaaataaggcacaacgggaggcgccaagcgggaaatcgacacacaagctatagcgtcatcagatataaataagaaagaaagtgggtcaacaagtgatgttgaggaaacatagaagaagcatgagggtaaaaaggatgagactcatcaaaaaccatatcccgagacactcgcattcgtcgagtaaccggatcccaacaatgatatcccttgttctcgacattatacccaagaaaaacacaagaaaaaacacagtcaaccgactaattaatcaactaattgtgcttaggaggtgcaagaagcacatagcacacgcaaccaaaaagatgaaggctagagtagttagacaccttgc

SEQ ID NO: 114703 - DNA, 553 bp, Zea Mays
atgtagagatggtggggttatccttggtaggatctctccctgacagggcctaaagtcttttcctccaggtgggggtatttttgttgctaggtgggaagtaacgaaggggggtttgaaaaacctctcggttgtaattttggcatagctatttaagggcttttcggacaacaatttggcaagtgtctgggaagcggtgcccgatgaaggtgacttggaagggagggtggtttgggtaacttcggctttctcccaggtaaactgccatagaccacttctgaactccgttttcttggtattctttccagacatattccggcttcttgtggatccccatgcgtagcgcgcaactccgtaagagatgagggaatccttcctcctttgagcagtaggatgttctaatgacccaagagccttccatctggtaggagaaaagaagggtctgttaatatcggggaaaggagagaaggtttttcttaggggtaagaggtgttttcttgttaaggcaacttttaaggtcggggttgcgatctacggccagtcctatggctctgat

SEQ ID NO: 114704 - DNA, 329 bp, Zea Mays
ctcagttatcgcaccaagtggccaactggctggaagagtgagtggttttatatcaaggccgatgagaagaagagggagaagctgaagacgatggtcatgagcccattgagtttaagcttcaggatgaccagacccttgtgcaacatgaagctagggttaccatgccagctagccgtagcagaattcagagtggtggctgaacatatcagcaccagggatctagtacaagaatacttggcgaacagggtctctccaacattgagtgaatggagtatgctgaagctgaaaggaacaaagaagaagggtgaacttgttcgattgccctatcg

SEQ ID NO: 114705 - DNA, 454 bp, Zea Mays
cagaccgtagatctcgtggttggcggctgtgattataaacgttatacccttcgtccaaatcgtacgcgggccgtcgatcctggaacgttcagtcgtgcggctggcatcgttgtttaaaatctccaccctcgatcgcccatctcacgatcaccagtgagtaccggttcggaagggtactcgatctaatctgggccgtgcgagtttgatcggacgactcaggattgaagttaccctttcgggtgcgaaattattcaaaagaacccctcgacttgttctgattcaatccgccatcctcggattgggtgaattcatatgcctgagtccctggtagagatcaaaatagtgtccgaagcccaaatatgatatctggaataataaaacccctttaagaaatgaattttaatattgaaagttaatcctaaaacttcataaattcataacttctccgtttaaa

SEQ ID NO: 114706 - DNA, 610 bp, Zea Mays
tacttgtttagagctaaccgcctatgcatcctagttggttcggttcatcttttgttgttgcaggaagcgcatggtggtggtttgatgggtcatttcggtgccaagaagacggaggttgtgctgtccacacacttcttttggcctcgaatgcggcgtgatgttgagcgctttgtagcaagatgcacgatgtgtcaaaaagcgaagtcacgaccgaacccacatggtttgtatatgcctcttcctattccttcagttccgtgggcggatatttctatggattttgttttgggattgcctaggacaaagagggggagcgatagtgtttatgttgtcgttgatcgtttttctaagatggcagattttataccttgtcacaaaacggatgatgccattcatattgctaacctctttttcaaagagattgttcgtttgcatggtatgccttctactattgtttcagatcgtgatgtaaaattcttgagtcatttttggcgtactctatggaacaaattggtgacaaaattgctgttttctactacttgtcatccccaaactgatggacaaacagaagttgtgaatagaacattgtctgcaatgctgcgagtaatat

SEQ ID NO: 114707 - DNA, 524 bp, Zea Mays
aaagtttggacggccggataccctgcatcgatcgttctccaccctatatacggagctgaaagtaggtaaacgtgatgaaagcatccgagtttgatcgagctagccaaccattggagaccatgcatgtcacttttcggtgcatttttttcgtctaagatagctctgtccaccttggtgcctcggtgcgtgcatgtcaccttccaaagtatataaaaaaaacacatgcatcacccattttctgcagtatatatataaccgcgctagctgccgtaaatatcttgcacaattaaaccgtcatgatttcgcttgtaattaataatctagcattctagcttccgtcatgggcacaactagctagcatgtgcatatatgactgatatgatcatgtgtggcgtggtgtaattaatattcactaaaaacatcataaataaagggtaatatgtacctcaccatcgcgtcgttatgtattttgttgttttttatgagcagtcaaagctgtaaactaataatgatgtatggacgcc

SEQ ID NO: 114708 - DNA, 373 bp, Zea Mays
aatatctccgtctttctttgggatcctggcgttcatgcgaaagacagcttggggacaagctgtatttcaagaagtggggaatgttaggtatactagatggttatgggttcgatgtggtaatgtggtgcgataatatgagaatatatgggctagaatgggccttgtaagcctgagcgtaatagcaagtagcaggtgagatataaggctggtgtgagaattctggagggataggaagaatttggctatcagatatcaaatcagatcgtcctcctcgttgctatctccttctccaacccttcttctacctgaacatatctcttctctccgatattcccttctaggtgctaacatggagaagccgatgaagcgggtg

SEQ ID NO: 114709 - DNA, 609 bp, Zea Mays
ctcttgctaccagatggaaggctcctttgttattagaacatcctactgctcggaggtggaaggattccctcaccttctgtggagttgcgcgcttcgcatggggatccacaagaagccggagtacgtctggaaagaataccgcgagaatgggattgagaaatgttatatggcagtctacctgggagaaagctgaaactacccaaatcaccctcccttccaaatcaccgccactggacaccgcttcccagacacttgccagaatgctgcccaaagagccctccgctagctatgccaaaactacaacagggaagtttctgagacaccccttcgctactttccacccagcaacaaaaatactcctgcctggaagaaaagactttaggccttgttagggagagatcataatgaagatgaccctaccatagtctacacttcatacccttgacaaccactatgacgaccttttctcccactgcacccacctaaattcccgggtggaaagcctagagcaacaaatcaaggaactgaaggaagaaaaggcgtcccttcaagacagtctcgagatggtggaaggtgaagaagccaacacttgtgaggcataccggactc

SEQ ID NO: 114710 - DNA, 433 bp, Zea Mays
ctcattagctgctcaactttatgggttggatattcttgcagtaagcattcaggtacaacaactttattctgaatttatgaaatgattccttatttccttaaagagagatcaaactccatgtacatgatgatccataacctccagatagggccgtccctaggggagtgtagctggtctaatcgaacaaggtccccaaattctaaggtcccctaaattaagtgtatcaccccactaatactatatagagcactctgcttgtttacatttcagcttgccttttgctcatatatttgatttcctacctatgtacaattggagaaaagtgttgttcttttcaggccaaaatttctcatggctagagaaggtaatgcttctagcagacatggcacatttatcacggctggtgtagtgactaccactacccagaaatcac

SEQ ID NO: 114711 - DNA, 796 bp, Zea Mays
cttttagcaagtctgtcagcagtccaacgcctcttgtgagctgcaagccagaggaaaaatctgcactttgatggggcccaggttttccacaccatacggtagtggccaaaagttgatcctgcaaaaataccctcgtatgcagatttagctgaataattaccatctgaggctatgctgaacacatgtttgtcttctatttcttgctgcagcactacttcagatagaagatcccatagctgaatatattccactaatacttcaacagataaggctcccttgatgtctgaggtccatcttctattcagtaaggcctcttgtactgttctccgtttagcaatcctccttggtatggtttggaataatctaggagcaatatcactgtttttttgccgcgaaagccacttatctgtccaaaacaaggtattggccccatttcccacctctgagatcagaacagtggagaagaaagccttagctttatagggaacttggatcggtaggttagcccaaggacgttttggatcggttttatgtagccagagccatctcatacgaagcgcccaactcaactcttgtaagctggatatacccaaacctcccagcttaaggggccggcacactcttccccaggacagaaggccccccatttgcttctttgtgtcctcgccacaggaaaccctttcggattttatcaatggcatccaaggcccaagcagggagatcaatagccatagctagataaatgatcatgcttgtgaggacatgttgcacctgaattcttcttcctggccttgtt

SEQ ID NO: 114712 - DNA, 824 bp, Zea Mays
cagaacgtcttcccctttccctcggctgttcaaccacgcatcggtggcggtgacgcctcgtcttccacactctcatttattcctgtctcactttctccaaaggcatatggcggcgaaaagtcacaacagtggttcgaggggcttgtcaatgggggaaggtgaaggtggcggcgtaggtgacagtggggtaccacggtagcggatgacaagtaagaggcgatggcctgctcgatgtcctctatggccacttgctcgacaagatatcctctattgccacgcgaaagaatacaaggtaaagaacacagagacaggaatagagatggaaagttaggggttaatatacgacgacaacgagaagttggaagcgctcgtgatgattgtatggttgtttacgcacacaaggaagcaatagataaaggcttaatgtatctttgttagacgaggaacaataaggaagaagcgctcatggtggttgcatggttggttacacatactcgtgttttataagaatctaggtgagggagatggtgacggaaaaagagatggaaagttgggggttaatatacgatgacaacaacgaggtcatggtggttgcatggttggttactcagactgtcgcgttataagaatctaggtgagggagactaaaaaaagatgtaaagtttggagttaatatattacgacagtagcgaggaggatatcagtacagtgacgacagttgcactcgagcattgtactcaccaaacatgtctagtgtgagcttcggatatcaatacagtgacgactagttttctgaaactagttattggaaagacattagatgt

SEQ ID NO: 114713 - DNA, 744 bp, Zea Mays
gtttgatgaaccaaatgatgactggttgaaatgtattgaagctactagtgacaagctgcttggggcatattccaaggctgaagatgataccttgtccgcagacttcgggggtcggggcaagaaaagattgaacagggtatttgatgtgattggcttcgtataccatgattatcactacccgctacgaaggcaaggaaaaaagaggaagactatcgcttcggccaccacagttgtgctgaagggaaaaaaggtgaaggttctgacccaccgaccgcgatatattgaaacggccgcagtgcctgaatttggggaaggaacctcttcaactactgaaacaaaacaagctccttcgattgtgaagagcgccgaagacccgattgaagtgccgaaggtgcctactgtcaggccagccgaagccaaagatggtgcggccgaagaaccaatagtggaaaagacagtgaaaatgccggaaattctgaacccatcagtaggggcagaattactgaaggtacaaaaagctggtgccacaactcccaagaggaggaggatggccagtgtactagacgctgtcatggaaaccacgaaggccttgacccctgctcctaccaagaaatctgtcgaagttatcgaagtccaggccggagccgaagctggatcttcagtgcctattgagatgaagactgtcgcgcctgaggaagatactgagcaacaaacttcagatacccacatggtggcggggcaaag

SEQ ID NO: 114714 - DNA, 389 bp, Zea Mays
atgtgctgctgaatttttttgtgctgctggaatgttgtgctgctgataattacaggatttttgtgctgctgaaaattgcagattcaaatttttgtttgctgttgaatttttttgctgttgaaaacaatttttgtgcggcaaaaaattccagatttatttttttgtacagatttgaatacgtgtgctgattaaaactgaaataatacgtacgtgtgctaatgaaagttgcttaactggtgttaacagtgtaagggtataaatgtctttttttctttaccacttaacggtgttaagtggtgttaacggatttggggcaaatggcagttttattttgaaaaatgaagggcaattgcacaaactctaaaaaagaaggtcaaatctgcagttag

SEQ ID NO: 114715 - DNA, 481 bp, Zea Mays
aaataaattaaaattgtgcacaagtgaagatttgaaccacgatcgttggctccaaatagattcacacccacctagccagcagaacatacatactttttatgttttataatatatactcaaacataatataagatttaaaaaataggggaaaaagaagttgtagtaatgcatgggcacttaacttgtggatgcagacctgttcacacagagtgtttttgccattctatcatgtagtgtgcacattcaattagcaggtgtgatgctatatggtgtgaagacgaagccaaacatgtcttgggcgaccaatatcttatttttacggcccagacttccttctcagcccagcgagccactccctgctgccaccgccaaacgaaccagcaaacccccctcgtgttcctcctcaagctcggtcttctcagagcaaccgccctgctattcctctggcacgcagcacgctccacgacctccacttcttccg

SEQ ID NO: 114716 - DNA, 273 bp, Zea Mays
aagcttttgtgcatggggttgaaatgtagaacgtgtctgcaagtcacagattgtggtatcagccatagtgacagaagctctgaataccgtatcctacataaactgtgcctctgcaactcttctgtgtttagtgtttaactgaacccagtagctctaaacttcctcgttgttgtcagtaaccagaactcaaaagctaatagatatggtagataattcagcagttgctgtctttagacatgtactccagacaataaatgcataaccttccttgct

SEQ ID NO: 114717 - DNA, 619 bp, Zea Mays
ttttccgcctttgtctttccggcctgttctaactgctttgcgaagtcaggacatatttgttccggaaaattggcgagtctagtgattatttaaaattcatcgctcgcgcaaagacgaatttgaaaatttagttcggccttctgagttcatcccaaacaaattaattagaactcaacgacaaaagtattaacgcaaaattaaattggatcaagataattagagctggtattgagtattcataattaatctgtttccctattcagactatggataaaattttccggttccgaatcaaatctagcgtagtctaaaaccgcaaatataatgacgtggtctagtgccagtttaaaatttttcgattaaggtgaattagaaacatcacctaattattttgttcttattcgagcgatctctacgaattctgtagcgataatattaggggaaggctgtttaaataaatcgaacttgaactaaccgaaaccggaacaattgttagctgattcggtgtcctatttcaaagtccaagaaaataatgtgtagccgaaattagtttaattcggtctgttgcttctcgctcagatctacaacttcagacataaataactggtataaatttttg

SEQ ID NO: 114718 - DNA, 720 bp, Zea Mays
gcatgaccattttatcactggatttgcctaacagttagaagaaaaataccatacagtacaaacacaacaattgaacgccatgttagataaaatagtttggttgttatctatgtaaatccatgtaaacaacaacaacgtgagataagtatgccacaagataagccttcgcatgttagttcatatttggttgttgagctatctttggtcatgcatatccggtggttgcagattgtaatccttgacgcattggtcgtctctatataacacgaaggcagagcacggtgatggtgtatctgtttccattaatacttccgcgcctctgatttctttcatggtaatcggagcttaaccaagatccaatccacataaatatggctggctcttcctccttcacgtcaggacttgcccccatgatcaccaatccagcaatcatacaacatgggaagctcaggtcatggccacaatgtgcgacgcccgccttgaaggttatctcaccggcaaggcagatcaacggcaaggatggagacaagatctctaatcctgcgtatgaagactggttagcttcggatcaacaggtccttagcttccttctctcatcggtgtccaaggagatccttgttcagatcgcgactaagcagtccgcggctgaagcatggaccgtcatcgaaacgatgttcgagtccaagacccgcgcacgcgtggtgaacacgaggctctccc

SEQ ID NO: 114719 - DNA, 315 bp, Zea Mays
cacgcaagtcaacgggaccaattggagtaccccagcatcaactggccccttgacatgaaagcagcagtagtggaagtaatgaccccataggagatcttgaagcccgagtgggtcgacttcaagcagcgctgcaacacaggaccgatgcttgggtcgcagacggagatagaatcaatgaactaagaagggacatccgtcacctgcaggatcagcttgctgatcgggacttagcacttgactgggcagtacagtctcgtttgctggcatggctaaggaagcaagggctcaggcccgaattaaagaacttagctcaac

SEQ ID NO: 114720 - DNA, 388 bp, Zea Mays
gggctacaagttcgtcaaagctttaatgaggccactgaccattttggcccagaagccacagttatacgatttgattcattggcctcgagtaaaaacttgtatcacccactcactcgacaagtcgacagctacagctcgagttgagtcatccatctagtctcggccctgccgacgtctgtgtctgtccacgcgccagctgaagctgaaatcaaagcttcggctgaccggcgacggcgaccgcgaccggagtctggctagggctgcagcccagctcgctatccagttcacaacagcagctgttggaggttggaactagagtctagagtaaccaaccaacaaaaggccacccatgtcttggggaagaaaaagggcagcgcttttttgaccc

SEQ ID NO: 114721 - DNA, 768 bp, Zea Mays
agtggatcggtctgacgcctccaaatagatagcccaagaacactccaattgttggaccctataaatagtatctcattgtaccaatgcattaggtctgatggtttgtgtgatcaaacccaagagttctaagggtgcatcagactggtaagacggcatgcattggaccatacaacgacactatatatgctagggttccttctacagagtcatcagatcttgtgaataattacctcattgaactgaagtggatggatccaatgattctgtgtagtggacatagaggtttagatgaacattggactagtctgacggtcatacgctcaaggcagtgctaaaatggctagttgcaatacaatagtataatagttattgttatgtctcatcggaccttgcgaggtggtccgatggtgaacattgaatggttcgacagtcatgaattcagattaagtttgatgtaactattcgttggcttgttggacactataaatactctagcaaccggccaatacacttgtctatgccccctacaatagccaaagcaacttacatagggtgtgataagaagccattgcatagtgagagacttgagagtcggattttatgggattaacatcctcatcggtgtaaacaagagtgattagtgtgcacccatcgatctcattcatattattaaaatcaagtgagagtttatgtttattactctttgtgatccacatcatctagatggtttgggggcgaacaaagtgcgatgatcacctagagaaattg

SEQ ID NO: 114722 - DNA, 754 bp, Zea Mays
ggctgaactaggaggaatagaatggagcagcaacactgataagtttggttcagtgtctggtttagtaactgaagaagaatctcctctcggtgctgtgctataatggtatttttaagctgtcatgtggatgaagtgcatgacttatatttagaggcctcactctccactaaaaatacctagtttggactgaaatatggttgttcatagctgcagtgttgtctgtttgactgctgaccacaatatgggatcaagttcaatgccctgtggtgtttcactcgacaacagagacagaggtatggctggggtacaaagtgaagggtccagtgatctcagctctgctggaagtatcaaaggtttggactgttgtgtgactatctgcaagggcagacttatctgcttgcccttgcctaaataaatcagtccaggttcaaagttttggctgtgtttgtgtgccggcgtgggtcaagggagctaagccacgtgtgtagccatgaggtgttggcgcctatagtggtatggataggctttgggcttcaaatatctgagcctagtgaagtatacaacttgtcccctaattgttactaggctgcctgcctgtttccctgtcaagagcttctgctgtttgatctatggatgccctacggtgcttcatctgattatataaattggagtgaacatgcagtgcatagttaaggtctagaggtctcactctcccctgaaaatatcaagtcgagctgtcagtttgggggaaagg

SEQ ID NO: 114723 - DNA, 518 bp, Zea Mays
cggtagagtaagccaccgataactggaagtagggacgttctaaccaaaccagtataactcttgcgcacaccgcgcacgccctctaggcatggaacacgcataataaatttacttgtcggagcgaggttcaaaatactgacaatcctcatatcatattgtattatgtatttgcatcaaatttatgataattgtttctttgaagctattccacacaaaaaatccaaatgtgaacgttagcggcagttgtgtattttgctacatatttcacaaggttctatctttgtaatcacaatcctttgagaataccagttatttccttttagcataaggttgtcattcgtaactctatttcagtgatctatatttggactagacactacgaaaacaactcggaatacgtgaattatgttagagtaacaccataattgtacattcattgagcttccaacatgtgaagcatatggcaccatattcatttaatccattccatattgcctcttggaacattcaagttctca

SEQ ID NO: 114724 - DNA, 359 bp, Zea Mays
catgcatcatcggatccacttttgatggctaggatttgaagccgcgtatcgtttcgctcgggtagttggtgaccgtagatgtgagatcctgtggtaggaagcaattctgggtttcattaaacgctgaccattagatcgggatcgaatgggcctagtttcgtatcgattcagaaagccttcgatctaatcgtggccatagctcttggattggacgaccaggatagatcgataccccttcgtgggtctaatttgcacttgagcccctcagtttatgtcaaaacaacccgcgatccacatataggagattctgagtctagagatttattacaccagggcccctgacttttctggaattcgag

SEQ ID NO: 114725 - DNA, 367 bp, Zea Mays
gtggtaagtcgtgattgttttctactcaggttatgaaattacattcgtctgtacagactattttgtgaatctgcattgttttgagctaacagaggagtgtgtttgttggatttacaacatctatgttctctcatctgatccaattaatatttagacattgatgcttaaaatctatgtgtgattagaggcacggtaaattcagtattgcctccatgtgttaaatacatgggtggtaagataccgcagcaacatcactcctggccatgaggcgtgctgatcttcttttgcatgttcttatgatcatagcaacagtgcacacataaccaactaggaatgaatgcaaacatcaatgcctggcggagaagtg

SEQ ID NO: 114726 - DNA, 500 bp, Zea Mays
ctgaagtggtggaggcggtgccgactgaattgggtgcacaagagcaccgttatgctaaaggatatgagtcataagtgcccgatgctcatccctatcttccagtagctactactgaagtgtattctagcggtcctggatgttatgaaacatcgagagcatccactcagactgttgctattgaataggtgcatgacgatcctgctcggtggccaagtgagcctgttgctgagtcatctgctgaagaatagctgtcaaggctgggtcaatcgacggaggagtagcagagggagtagaactagaactacaccaaggggaaccatactctgatcccaaatctgtcgaatcgcctcgtcctcaacctgacacttagaggctaaaggatctcgaaatctagtatctggggcacgagcttcgatatgagcctcatccttaggtgcagggcggtaaaatccaaacacaagtctggcggtatcaaggactgcatggaactgaggaggtca

SEQ ID NO: 114727 - DNA, 635 bp, Zea Mays
agtcttctagaaagttggtcccttttattccaaatggctttcgactgagggcgccggctaccacgttggccttcccggggtgatagtgaatttctaggtcataatccttgatcagctctaaccatcttcgctgacggaggttgacatcaggttgagtaaatatatacctcagactcttgtgatcggtgaaaatgtggcatttgtttccgattaggtaatgtctccatatctttaaggcatgcactatggctgccaattccaaatcatgggtggggtaattctgctcgtgcggcttgagtaggcgtgatgcgtaagcaatgactttctcgttttgcattagcacacaccctaagccttgcctcgaggcatcacagaagacgacaaaatcttgatgaatatctggcagtgatagaacgggtgccgttgtgagtttctcctttatgatttggagacttccttcacattttggggtccacacaaatttgtgatctttcttgagaagttctgacattggtcttgctatgctggagaatcctttgatgaagcggcggtaataccctgccattcctaggaagcttcgaacttcactaacgttggttggttgcctccattttgacactgcttctactttggaa

SEQ ID NO: 114728 - DNA, 309 bp, Zea Mays
cttggggtaggcactcggcaaccaatctgctccatggttctacatgtgagctccgattcgcgcgagagcagcaaggcggtccttatttcgcaggtcttctattccatctagcttatagtcctcactcgtagcacgcctcaacaaactccgcagattcctctgcgttagttgcaacaacctcccacacaagccgtgatctccctcaccctgggtataaattaagctcggccccacgtcccactggaacccaaaccgtgctgccgcggatagttcgccgatgtgtagtgaagatcgccaccaccgttgaat

SEQ ID NO: 114729 - DNA, 841 bp, Zea Mays
tcgtaaagtatctttgggcaaatgttaaagagaagaaaaaaatacattagatttttagataatctttggattcttgatccatcccctcagccacttcagtagatatgctagattccggaacaatgctgttgactgttcgtgcttcggactgttgacttgcatcacgttgtggctgatcctaaaactacccttgatgtttctgattatatgacaaagttggagctgatgcgggtggttgaggcagggcccatctggccagagaatgacttgctgaagcaactaaagctgaaggctgctggtttggctattgattgcatacatactctggaatgtacggagaataatatgaagaagtatgaaggacctgtttcggctaattctgccttgcctgagcttcaacattttccttctgtttttggattgtaacgtgacaagttcttgttgtatggccttatcttctccacaaaatagacaggatagccttcttggctaagtgttgtatctccctctaaagcttcttcctcctcttcctcatcttggggctggcggtctaaaggaactctgttgtgtccctgttgattaggagtaactgtgctgcccttgagtatggctgttttttgtcttcactttggtctgggttgtggattgttctgacgtgtcttggattgaaccttcctcctaagccccttgtcatctaagagtatctgtaggcttattctctcctttgtcaaaaatcgttgtcagccctgatatattcatccattttttggagaagtttctctagagtgtgaggaggcttcctggcgaaataatgcgccgttgggcccggtcaaagcccctt

SEQ ID NO: 114730 - DNA, 771 bp, Zea Mays
gttgtgtaaaacatgcatatgcattgtaccactcgatgatctatacatgctgctaatatgaatcctactagctaggcaataatatgacgatcctagctggctacgtatacggtaatgagcgagatatagcactctatatatacgtggtgcatggtacatatgcgtgtttgtttgtttttcttatcagggttggaggttttctaataggattgcgttgtattatttgatcgttttttattttttaagagtgtgctgaatcggtgaggagtgagggagattttaagtcttttaggctaacaattttggtcttcttttgcgagcagctggagttgttatatggtggtgtgtgtgaccttggtcctaccctcgaaagagccgaaaaccggattttgttccattatctaaaaaaataatgacagagagatgataggtaacacgaggagccggagaggctcccgagctaacgacactttggaacctagccccattcacgtctagaggatccaaaccactatggttaaagctctcaccgcataatcagaacatcctacatgtagctgggcccagcgagcgcgacagatggtagaccgctagttagattagaggcacaaaagatagtgggagccgactcctagaacaatccctgttcaaaccagcgcaaggcatcagacaagtcaccggaacatccgactcgtgtgcagggcctaaccatgcatatgttaaacaggtccttaacggataaggactaaccatgatagatcatatctacca

SEQ ID NO: 114731 - DNA, 421 bp, Zea Mays
acgaaatattgtgtctaggcacgtggcatcggagcagcaggcatctaactctggtgagcttatctgaaccggctgtgagtcaagcggacacggcggccggggtggaacagtgccataagctcatccttagtgcccgatttttcaccgaggagcgttatccgtgttcgaccaggcgtgaatcgcgatgccaacgtgaatctgggcgcaaggtcaccggcggtgagggggctgaacctgtgatcttattcagtcactgtacaatcagaacaccatttagtctgtctaacggggccatttgcagggcattaatctctgttttctgtgtagcgacttgttaatctctctgtaacaaagttctagccctatattccagctacaatctttctatagtaaccatgctcaaacactcaatggattatct

SEQ ID NO: 114732 - DNA, 472 bp, Zea Mays
gcttccactccagcattcatctttgtcaccgtcatgccttcctcctactcggtgctcaccgccacctctaccgtcatcggctccgagctaccggtgaagaagcccaaaagagggaggaagcaacaaccctggctgctgcacaagccctaaccgatgccacggctcgcgccaccgaatatgatgttgtgatcgtcgctgcctcttccttagagcgcatgcgtgaggttgaaagcgatctccagcacgagcgcgaccttgcggcaaacctagaacaagaggccactcgcacatgtcgtgccccttcaccacctgatcatgaggaccaagatgccaactatgaggctgctatgatctctcatccatgcttaggcgaccgtagtccagaacatcaaggtgctggtccccaacaccctcgatctcctatctctcaataaaacaagtggcacaacaacatcttactaatgctcaacca

SEQ ID NO: 114733 - DNA, 394 bp, Zea Mays
ccaagaaattgcttgaaggtcttggtatggagtatgagaagattgatgtttgccaggacaactgtatgcttttttggaaggaacatggcagagactagaaatgcttaaaatgtaggaagtcgaggtacgtggaccttgtaaatgaagatggggagaaggtggtgacaaatgttgcacataaatagcttcggtacatgcgtctcactcctagagtgaaacatttgtttctctcgaggaagaccgctaagcacatgaggtggcataaagattgtacggacagacaagatgggttaatggtgcacccgtcagatggtgatgcatggaaggctctttacaactttgatccagattttgccagcgatgcaagaaacgttcgtattggcttggcaactga

SEQ ID NO: 114734 - DNA, 1098 bp, Zea Mays
cctccgctgaattctaacgggggagggatgacacaagttatcgcccttatgggaaggaccattcatagtagcaaaagtcactcggccgggatcatatcgtctcactcaaatggatgacacagaaattgggaacttctggaatatagaacacctcaggaagttttatccctagctatatttcaaaagctatcgagacgacaatgtactctgaaaaatgggaaatatgtcatcaataaagaaaggcttcaagaatactcagtttgttcatgattgactcacattcttacttaactcagggtgaccactatgccctgccaacggagcaatcggcttaagtcggcgacgacttaagacggtgcaacatgctcgcgcttacttaactcggggtgaccactatgccctgctaacggagcaatcggcttaagtcggcgacgacttaagacggtgcaacatgctcgcgcttacttaactcggggtgaccactatgccctgctaatagagcaatcggcttaagtcggcgacgacttaagacggtgcaacatgctcgcgcttacttaactcggggtgaccactatgccctgctaacggagcaatcggcttaagtccgcgacgacttaagacggtgcaacatgctcgcgcttacttaactcggggtgaccactatgccctgctaacggagcaattggcttaagtccgcgacgacttaagacggtgcaacatgctcgcgcttacttaactcggggtgaccactatgccctgctaacggagcaatcggcttaagtcggcgacgacttaagacggtgcaacatgctcgcgcttacttaactcggggtgaccactatgccctgctaacggagcaatcggcttaagtcggcgacgacttaagacggtgcaacatgctcgcgcttacttaactcggggtgaccactatgccctgctaacggagcaatcggcttaagtcggcaacgacttaagacggtgcaacatgctcgcgcttacttaactaggggtgaccactatgccctgctaacggagcaatcgacttaagtcggcgacgacttaagacggtgcaacatgctcgcgcttacttaactcggg

SEQ ID NO: 114735 - DNA, 536 bp, Zea Mays
cacgggcgccatcatggatgctacccgagcatacccataggcttaattcgactagttcgtcgttaattcgtatttgtccgcgacaacaacagagcaagatcaccggggtacccattctggtttacctgagctagtctcattcaatccaaagactcaaaacgaatcagtgaccgactaggactatggtgattgcgcaaactcggacgtaggctacccggaacgaccggtcaacatgaaccatgtccacagcggcgttcctaggcaacgacacaacgttccctaagctacggcatggtagcattcaattggctgagaccgagagtttcactagcaccagaggatgtagaaacacggattagagggacatgaacgaacctaagaatggctggccatggctcgatgcctcacggtggcgttccggccaatttagaggagtggcatgttgggttcataacagagagacggagcaaggggaacgctcaatttacagcgatcgtccacgtgctttgcgaatttgggacggaagtgtacacgat

SEQ ID NO: 114736 - DNA, 843 bp, Zea Mays
cttgatcttctctgggtttgcttcgatgccctagtgtgaaaccaggaatcccagcaacttccctgcggagacaccaaagacgcacttgtccgggttcagctttgtgcgggttgcacgcagcttgtcaaagaccagggttaagtcttccactagggtcgaccctctcttagtcttgaccatgatatcatcgacgtatacctctaccctgtccctaatcaggtcaccaaaagtcttactcatcgcccgtacaaatgttggtaaggcgtttttcagaccgtaaggcattacaacataacagtatagaccatccacggttacaaaagtggtatgcttcctatcttgtctagacatctggatctaatgaaaaccaaagtaagcatctaggaaggataagaggtcacacccggaggtagaatccacgatttgatctattcgtggaagtggatatgggtccttgggacatgccttattgaggttggtgtagtcgatgcacatccaaagcttctcgtttgccttgggaacaatgactggattggccagccatactgggtgatggacctcttcgatgaagccagcgtccagtagcttccggacctccttaaggatgaaatcctgccactcgatggactatcttcgaggcttctgactcaccggtttggtgttacggtggatcttcagatggtgctcgatcacctccctggggatcccaggcatctgcgatggttcccatgcgaatgcgtcagcatttgcttggaggaaggcgatgagcgcgagttcctatttctcctccagatcacccgcgatgcaagtggtctgggaggtatccgcgctgagcaggatggt

SEQ ID NO: 114737 - DNA, 281 bp, Zea Mays
ctatggcagtctacctgggagaaagccgaaactacccaaatcaccctcccttccaagtcaccgccactggacaccgcttcccagacacatgccagaatgctgcccaaagagccctccgccagctatgccaaaactatagcagggaagtctctgagacactccttcgctactttacacccagcaacaaaaatactcctacctggaggaaaagacttcaggccttgtcagggagagatcctaatgaagatgaccctgccatagtctacatggccggatatctc

SEQ ID NO: 114738 - DNA, 491 bp, Zea Mays
gccactcatgcaacgactccctcctaggagttgatcaggatctttgactaccgcaccatggcatggtggatgttgtaggtcattccctagcgacattgaaagatcgaccttctctagcagtgtctccggtttcctgatgagtcggacaccaccagagcatgtccaggtgaagcaagtgaggagtttgtcagttcagtctttgagggcctgattgtaacacttgtatctcgaaactaaagtcctcaagctacgacagtcctatcttggttgccaggtagtgcttgttgccatcgttggggaggacttctttttctcatgtgagtcatgatggtggtgaagaggtgatacaaggttgtggttgaatcgatgttgatgagccgatgcaaatcgtccaatgtggaggttgacttcgttggtcccaccagacgtgctagaagtttgtcctcacaggaaacttgttaggggttgtccgggagacgacacacaaggag

SEQ ID NO: 114739 - DNA, 461 bp, Zea Mays
agttaaaatctaatataaactgaaccactgagtgcaagcggaaaccagatagcattggttgcccacataacacttactgcttgctatccttgttgatttgcagcttgcaagacacacacatgcttgtaatggcaatgaagcatacgtccttccttccgtacctgctcctcctcacaaccttggcatcctgcgatgatcaatttctgttatctggcttcacccaatccagcttaaaccttgatggttctgccatcgtcacaaatgatggcctccttgatctgaccaatagcactgcaattaccaacggtcacgcattctaccccagccctttgcacttccgcaaatcacctgatggtaaagttgaatccttctcagtcaatgttgttttcagcatcttcatcacatacccagacttgagtgctgacggcatggccttcttcatcgcacctaccaagaatttc

SEQ ID NO: 114740 - DNA, 484 bp, Zea Mays
gttttggcttatatagaggtggtgacataccaaagtagtcatcgcttcctctatatcttgagtcgggtcaatacgcgttatgtgttcatgatttgggaagtaagcgcatgatggttttgagttagagattagtggtttacaattcgtataaattggtcgatgtacgaaaatacttgtgaatctatgtgtttataaaaatgttgtagtatatgttatgtcttgggttgcgacgataataggcaagccgacgtgtatgttatttagcggctatgtcgttactctagttagccaaatttttagatggtttggttaagtgcgtaatcgcaataaattgcttgttgtagtctaaatgtgtatggttatggtcgcgggtaaaaatttgtagtgttcatgtgatgtctaagtgaaaatgcaaattagtgtgtgaagggcgcaatcgatatagttgttcatggtgtatggtaattctagcacacaaaataac

SEQ ID NO: 114741 - DNA, 865 bp, Zea Mays
gttaagccaaaagacatgactatgaactcgtaatgcccatacctggtgcaaaaggtcgtcttctcaatatcctcctcacgaatcctcaattgatgataaccagagttcaaatcaatttgggagaacacctgggcacccctcaactgttcaaagagaacctcaatacggggtagcggatatttattcttgattgtcacttgattcaaagcccgataatccacacataacctcttgcttttatccttcttctcaacaaacagtactggggaagcccaaggcgacctgctaggcctaatgaaacccttagccagtagatcatccaattgtcgcttcaattcaacctgctcctttggagccatccgatacggggccttatgaataggctgcgtacccggaatcagtttgattttgaaagctgcatcgcgatccggtggaaggcctggaagctctactggaaatacgtcagcaaagtcacacaccacccgaatgtcctgcacccgcaaggcagcctcaccctccaccaccatggagaaaaagattcccgacttccgtgaccggcgatccggaagcaattgcgccaacaaggataacgtgaactttggggaacttcccaagaataccacctccttacccgacggcgcctgcaataacactgtcttccaaaaacaggatataactgcgtgatactgagataaccaatccatacccaagataacatcgaatgcccccaaggaaatcacaacaagattggccgaaaagacctcatcaacaagaatgaaggaacacccctgacaaactgaacagctactaatggagccattagcagaactaaccaaaattgggtgacccagcctctgcaccgaaa

SEQ ID NO: 114742 - DNA, 277 bp, Zea Mays
ttgggggtaagttgatgaagatatatctcgaatcttttaagtacttcaaccagcattttatgcataggaaaccggagacgagccttcataaaaccgtggtaaaacaaccacttcatcagcttcaggaaaaggaacaatattctctcctctggccctcactatagttgtatcacgaaaatatttacctttcagtgcttcaatatgtcctctcttaacagtggattttccaaattcaacatgacttggcctccatggccgatcttcggcgtcatcgttg

SEQ ID NO: 114743 - DNA, 375 bp, Zea Mays
ggtgggccgtgggcctgatctagcttgcagtcacacttttagggccaattaaagtccaacctctaccaaacggaccagcctgcgtgtacaaatctcaaatctgtagagtgtagactcatctcacttttaaaactgttccatttagctcctgatctatttttaaaattgaaatggttttagttgacttgtcgccaagttcatcgttctacgtaactatgtcaaccacgagtgaggtaataaggtttaaacaatagttcagagctcaattaaactttatcaaataattatatgaatatttttttaaaagtgtccaaatattttgtgaaactaaaatgcatctagaaatattaaatattatttcatattataaaaatt

SEQ ID NO: 114744 - DNA, 337 bp, Zea Mays
tgtttctgagctcagggtccttgggaacaaccaatctatctccaaaccatagaactcccttgctgtcctgtcggaaacacttgtatttctctgccttttgcttgaccatttccttaatcatttggacacccttatcctcaatttgcgcccttactatttgctcttgcaatgtgggttccaccgagatataacttaagtcacccgaagaaacaacttccaggttcagcttgcacaactcatcgcacagggtggtgactcttgcatccatgctcatacaattgcactgggcttttctgctcaaggcatctgccacaacatttgctttgcccggatggta

SEQ ID NO: 114745 - DNA, 887 bp, Zea Mays
gtggtggcgcctctcccagaaactgatacaaccttggatattcagagacctgtcagtgctcgcccaaaacgcccttgccgagccaatcaacttgatccttatgctgatgagcagaaaaagaaaaacagacgtcttcggcgagtatctagtttggatcgggatgttggtccttcggttcctgcttctgaagaagtgcatgttcctgagtttactgacgctgaccccaatgggggtgctccacctactgctgaacccaatgggtgtgctccacctgctgctgaccctaatgggtgtgttgtctgtgttgctgatgaaaacgacggggaggaagaagatgaggtccctttgactcagaagaacagtcggcagtatgtcgccagtggggaaagtagtggagttccttctcctgctttgtctgccctcattggtctacaagaattgtccctggcaaactttgatcagactcttgaagatatggttccagaagacctattatcagagccagcggatgatggtgtgatggaggtttgtgctgatgtgctcgacgccgggttgggatcgtcccgggcagcgtcccgcgcctcatcgaccttagagcgcggtcttgagggtcaggaaactgacttggatcgtcttgctcccatggaagtaattgagggaccctcagccttggaggtggctactgcagaaaacttggtcctcaaggatggtgctgacacttgcccagcctccgaggatgttgccggggatgactcggctcgggtgggagacgcaagccactgcccagcccccgagggtactgccggagatgatccggctcaagcgggtagcgcaaactatagcccagcccccgagggtgtccaagcggggtctccctcttgtacttc

SEQ ID NO: 114746 - DNA, 379 bp, Zea Mays
cgtgtttagaggtagctgccgagtaatttgtagacgacgtcggagttttagaggtaactgccgagcgactgaagacaacgtcagtgttttagaggtaacgccgaatgacttgaagacaacgttagcgttttagaggtaacgccgagggactgatcacgatgtcggagttttagagtcaactgtcgagcgacttgagggcgacgtcagcattttagaggtagcgccgagcggcttaacactatgtcggagttttagagtcaactgccgagcgacttgagggcaacgtcagcgttttagaggtaacgccgagcgacttgaagacgacgtcagcgttttagaggtgacgccgagtgactgaatacgatgtcggagttttaga

SEQ ID NO: 114747 - DNA, 614 bp, Zea Mays
tagtagggtatagtggtcaccctgagttaagtaagtgtgagcatgtcacaccgccttaagtcgttgccgacttaagtcgattgctccgttagtagggtatagtggtcaccctgagttaagtgagcatgctgacagtaaacaagttgagcacctttgagaatgaagtctttttattgatgatatatttcccattttacagaatacaaggccgtcccaatagcttttgaaatatagctaggggtaaaacttcctgagatgttctatattccatgagttcccaatttccatgatgtccatttgagtaagacgatatgatccaggccgagtgacttctgctactatgaatggcccttcccatagtggtgacagtttgtgtcgtccctcccccgttagaatttggcggaggacgaggtctcctactgcaaaggatcgatgtcgtatggccttgtcatgatagcgcctcagagtttgctgataccgggttgactgaatcaccgtattcaatcgttcttcttctagtatatcaacattctccagtctagtagcttcagcttctgctatgttttcaaagattaacctcgatgccccaaacttgagatcagcgggtagcactg

SEQ ID NO: 114748 - DNA, 766 bp, Zea Mays
tgaaaatagaaatcagaactgttcattataatcactagtatagaagaacacacatgaacataccaataaactctgatctgtactagtatacatataacacatggttatctttcattctcttccagcttgaaaatctcatgggatgttttcttcattgtgtagaaaatttgaactcaatcatttgctgccaggactgatagtttcaataatttgttgccctggtcttgacagcagtgtgcatcagtgcatgacgctgtgtggtgcagcggcagccaaaacctccagcgatttccaaatcctagcagcaaaaatgcaaaatgattaaatgaactaggcttgcaagtctataacgcccatcccaaatccaacgagttcagaaaatttataaaactccaacgcaatgcttaaacaaagcaggttaagtctaactttaattcactccaccgaagaggagcaaacactgccttcaagcaggtgtatcagtcgttttctcgtggcatcaccatcgaccatcaagctccagcaagcaaactaaatccctctcgagcatttgatcaaaaacctcacgcgcatggtgcacaccggcaccgcttgagctgagcgcggagaggagaaaaaaaaaaggagccgacgagccatctgtaagtaagccagagcaaaaggagctattacagatgagaaaagaaaggagccagaggagtccgcaagccaagccagttcttttctttaagatttgtggacggacacgtgtcgttgatctaaaggc

SEQ ID NO: 114749 - DNA, 565 bp, Zea Mays
attgattctgatgcctttgaggttttagaacatgaagaaggtgattttgcgttgagatgtctggtacatcacaaagataacgagtttacacagaacctcatcaatgtttatggggctactcaatctgataataaagataaatttcttttatgaattttcgcccttttgttccagaagcaaagttcctctcatgttcagtggtgacttcaatattttgagaagagttgaagacaaaaacaaaactgggatttaatagatggagtgtgctttttaatgctataattaaacaacatggtttgattgagcttgatctgactagcagtttcttcacttggtctaacaaaagaaatgaccccacatttgaaaaactggataggtttttagtcaactctgaatgggacttaatgtacataaatgttatgggtagaggattggattgatattgatcttaccgtgttcctctatgcataagttctaatgattcttatgttaagaatagtgagtttagatatgaattgtgatgcagattgagaccttagtttatagatattttggtgaaaagttg

SEQ ID NO: 114750 - DNA, 288 bp, Zea Mays
cgcgtcccacttcttacactcgaccgacctagtccctcacccacatatttcctcgcatccacaccgcacccgaatgccgttgacagcagggaccccttgttaggtgttctcttacctcgcgtcacagatgggccaacagcaaagcgaacaccgggattctcatgtcgctcattctttcttcagccaggaccttgggagactatatatacatactgcactgcacccccttgacccataagcgtcgtagtagatgagccgcgagcccattgaagcgagggaagagagaac

SEQ ID NO: 114751 - DNA, 3228 bp, Zea Mays
agtaacaagttgtggaacaagtattaatgcaatattaccttcaccagtctccttaattagcacatcacaatcatgttgcagatgtttggtgtggagattgttagaaaagataacggttaggggttttcgtgcagattcacatgcacttgcttcacgacagacgcacttttcaacagctatagggctcactccatatttttcttcatgctcttcaatagggaaaaccaaagacaaaacatctggagatttagcaagtttaatttagtgaattgaaaatcttgaagcaagattactaagcaagatctttagaaaaaaaacagtgaataatcagctggcacaggtggatttagatgttcagcatacatattatcttcactcatcaatgttgcagagtttttattatggatacaggattaattcagttgtacctttatcagtctctttagctattctgtcaatatcatgctgcagacttttggtgtggagatcagttgatgtgacgttagctaggttcttttcctcaggctcattggcatttgcttccaagctaactctctgttctccggacacagggctttgctcttcacggtctgcgacaatgaaactaattgataaaccatttggtgattttggaccaacaaagtctccctttgagtatataacatgacaataatggacaaagctaattacaacatcacaaaatcaatagggtattaatatgccagctttccagcatccaaagaagatcaaaaaataataatacaattgtgatgccatataacttaaacataattaaagcctatagatttggctatgcagagaataaattaacaactagtatgccattaccaccaaatgttgacctcaccttcactcatcaatgttttgtcctctgagacaacacaattgtcagagactaatcctgtgatgcatgttgattgatctaatttcccacttcttgtttcagataaatggtcatcaacagtttgagtgacagaatgttcctgaggttgcttactcttatcagaactttgatttgcatcgtcaccagattctgacccaggtatcaccacagctacactctgcactgtgcaaatttcgtcactaggagctactgttacaagcaatggacctgaagagaactcttctcttgcagcattaacctgacaaatttcttgaactttactactagactcattattatattcaagtgtgtcctttgtttcttccatgataactatgtcatcatttgccaccttgaaaggcatcacttcttctggagcagttgttcgtctcttctttgaagaccttctctttgaagttgtgcaatttgatgcctgctgcgatccttctgtgttatctttttcattagagatctgtgcattctgatgcttccaggaaacattagctgaagatgatatttccagcaaaaacctactgcgcttcctcaatttcaagccttcttcaccaacttcaatgtgatccatgctgacctcttcaactgcattaagggcatgagatttgtgtgttgtcctcctcgtaggatttttgaacttttttccttcatcattattttgtccctcaagtagcactgtagcgatagatctccttgattgcctaatagaatcttttactttctgttgcttctcaccatcttgatatttaccactttgcaagttctcatttctagccattttatggtgatcttgcttctcattatgcatgtcaggaagaacagacttccgtgttgatctcctaacattcatctcagcattcattttgggtgctagaagtccactattattctcaagcatatcaggcagcacagatttgcgcgatgatcgcctagtaggttgcttcacaacaaattgtttatccacatctttgcccttaccaatttgaattccttcaccaacagctttaatatttttaactgggattacaggcttccgcgttaatatcgcttcatctgtttccatgttcttttcggcaatgagactcttctctttctcatgcaattctgtgataacagatttacgtctcagccccctagcaggtcctttagttgctggttgcttcgccacatcttcactgttagcatattgagtctcttcaacaatacttttggtatctttaacctgcacaactgatttcctcgttgatcgcctaacatgtgcttcagggttctttccttcaattacatccttctctttctcaagtgcagccaaagcaatagatttacgtgttgaccgtttaattggttctttaactgctggttgtttctccaaatcttcagaatgagaattatggtgtgccaatggctgagctgtgctcgagtctttggccaatttgatgtttactgaatttgcactattggcctcagaatagtttctccgtgaccacctcagtagaggggacttactggtagcaggaattttttgacctttatcctccggagaagatgcaacctgttgatgcctacgagtagacggacgcatcttgttttccaactgcctggtagtgtgagtttcgtccacgacgctgttgttaacgtggacaattttgttccttaaagacctggtggcaggaaaatcacttctgggcacatctgaaagcatagtcaactctacagttgtttgtggatctccagtcttcctcctcttgttctcaaccacagtgggtggcaccacaacaggtacgattgagcgagaccttgtagtcctagctgttacttccaccagagcggacttctgcacatcagactcagctgcattctgcctccctctcttcttctcaacagcaggaggcaatacagtagcagaccactccaaatttgaccttctcgtaactctagcctgagcgataacagcaacgccctcgtcattctcctgattcttgcgcttgggcttcctgtcaacagcaacagcctctcctgcttcctcagcctcggcaggattgaacgaattcctcctggaccgcctcactgggacatcagcgcccacatctgcagaaataccgtcttcagcagcagaatcagtaccggctcgagcagacttcccccttgtcttggcaacgaccggcgaccatatgacccgagacctcagtctcctggccttccctacctccgccccaaaagtaaccttcttggcctcggtggcacctccgcccgtttgcttcagacaccccttcctcgccggcactccggcaacctcctcctccacaacagcg

SEQ ID NO: 114752 - DNA, 417 bp, Zea Mays
tagaagtcatctacaacatctttcactgactatcatattcacaccatcttccaactaatagcatgctaataacttccaacctcttaatataagttataagctatccaagttatatctacttagttttatttcaaattcttcataatcttcgtagcaacatgtatgatatcttctactatttaataatcctaaatcttagtaaagtttattcgacatgcaagttgtccacctcagcaatccactatctgatgcaattataatccatgggcatatacaattatgatatacatatcagtggaacacatcatcatccactaacatgcatttagcttttcacaccaccatgccatgccatgtactaacattgatttataaatatttatccattcatataattgattatatatagtctaattt

SEQ ID NO: 114753 - DNA, 389 bp, Zea Mays
caataggtgtataaacttagttaagcaacttaaccctagaaacatttgaaacctagtgaaaaacctgcccaaagtggggttgtcagacttgtgttgttttagttgggtgcagataactgaagttttgattcagtgagtttggcagaagtttggatccattttgtggctaatctatgggggtatgagttaggattcctataccaaagatgtaaagctatagtaggagattaagtttggtgaatgctcgtaccctttaagatgtttagaacttaggcaaaaccttgctccaagatgggttgtcaggttgtgactgttttctgaatcggttcagatgactgaagtgtagtcactggattttgccaaactttggagctttgtggttttagatc

SEQ ID NO: 114754 - DNA, 517 bp, Zea Mays
ccgagttctatttcttcaccgcccgaagtccacgacggcgaacagcgctgggccgagctccggtgagcttgtaccggccggattacttgatgacgggtgctctacttcagttgaaaccaaattcaaggcctaacaatcatttcccctcaactaatttcatgaacggcgctctaacctgctctgtccgtgttgaccacatgatcaacagacattctaatgtgttcccggcgatctaaggtagcttagctcaatcgagttggtcgaggagtatcaagggaacacaagaacactaaaacgagagggcagagggtatgagcggacctgagacgagctggccacggcgaggtcacaccgctcggtgttcttgggtgatttgggggaaatcccaaattggggagttctagtggatgattcgaggcattggttgctctactgggtgcacaattacttagcggagcaggcggggtcggtaatttatagcaggcttaagcggtggccagtgaatttaagagagacg

SEQ ID NO: 114755 - DNA, 337 bp, Zea Mays
tgtcagtgctctttgtggagcttttggcatttcttcgatgacctatgccgcgcagaatgttattggcttcttgttggctttattgctccattagttctgtagactttctccctttagtggggtgcaaagaatgttagattacatgattatctttttatgatggcaagaacaaggtttaggaagattaggagttttgtttcaatagaactacttgtttcgtggtgctttgaggtgaggtgtttgattttcttatacattcatctggtgtggatgtttcaccatttaattaaaatgaattgttgaagttggtaagagttgtgcttattgcatattaccc

SEQ ID NO: 114756 - DNA, 294 bp, Zea Mays
tttggtgagccggctggaaatgatccttagaggcaaagtatcaaatattggtgctcttgttgcatattctgcttggaatctgtcaccttctaagtcctttttcgattttgtgtccaatcctcctgctggtgacagtggtttgggtcttagagtgcgaccctctctcgaagaagttgaggttttggttgcttcacttggtgatcttcccaatgatgagaggcaagttcactttgagatgcttatgagtccaggtgatgcagagataagtgctatgttggacatgttggctgggga

SEQ ID NO: 114757 - DNA, 647 bp, Zea Mays
catttgtatttccactccttaaattcaagctgaccttcacatattgggcacttctggagaggtccatagaacatcatatcctcactacagacatggagaaaatggtgacacaaagaacaaaatgtgaatgaggaggtcctagttgacaaataaagaactccagttttagcagaagttcagttccatcttggaacgactgcatccctgccattaggcccatattcccttgaggagaggtgttcacctatggccttgtaaaactctgcaatttctcttgtagcagcttccctgccatttggctcagattccccagctttgagcttcttcgttggtacctccggctctccgtcttgcccttcattatcggcagacttcttgttcttggagggcccattctggtccctttcttggatttcattatttggtttctgcttttttaaggcgagcttgccttgttcctaggcagctgcgtgcacccgtgatctcgtctcgtgcacctccaagaacatagttcaaactttcaagtcagacaagaatatccagaaactaaaaaacagaatgggtagaaaggcaatgccacagaacataacataagtctaaaaagttagatttcagtttgcgagactcatgtcgcgcgtccggcctcc

SEQ ID NO: 114758 - DNA, 422 bp, Zea Mays
gagaccgggtgaccttcaagaatctggggatcttcagctctcctgggttggatggagcgggctcttggatccgcagagctctatgttggttatgggttaccaagtaggcctccatcaacttctggacgtgctcattcttggcttgcttcagggcttcaacatcaatgacgtcacgactttccaaggcagttgtacgggcttgagctgtggtgagatccacatggagcttacggttgcgcttctctgcatcttctgctcgggcaatcatctgacggtggtgccgagccaagaaatcatactgtgcatccagggtgagcaggtatgcagtgaggtacacgactgaggggtcgtcctcaagcagctgctgaccttccaatgcacgcatcctggccatccaaactggacggtctctctgaaagggc

SEQ ID NO: 114759 - DNA, 356 bp, Zea Mays
gtcttccattcacaggataatcaatatcctttaggtgtccaccaacaccatgttggttaccgaagaatagatggtctgcatttactatctcaaaaggtctagccttcattagcttgcaagcatcttaatcctaggatttgtgaccatacttctccccctcttatttacaacatcattgtaatagggagtttagtggtgttccatttaaccactctttctggcacttccacataggattaatttgagtgacacctcatagtaaatgcacatggcagtcaatttgcaacttcttgcaaatcattcgaaaccaaagggttcagttttagtacgtgatcctgagcctgaatgcttactgc

SEQ ID NO: 114760 - DNA, 386 bp, Zea Mays
ggaaatgtgtgagcaaccagtgcatactgtagggggccattgagtccttctatgaagtgctcttgcttcatttcatcgtctgccacctcatcaagagcatatcctaacaactggatgaatttgtcatggtactcgctgacagacatgttgccttgcttcaatgacagaaattccttcttcttgatcttcatcaatccaacaggaatgtggtagtttctgaactgagttgtgaactccgcccaagtaatagtgtcagcagcatcatgagcagcaacatatgaatcccactagtcagcagcaggacctgtcagacgaccagaagcataaagaaccttctctcggttagagcattgggcgatgttgagcatcttctcaattgatttcag

SEQ ID NO: 114761 - DNA, 357 bp, Zea Mays
ttcgtcaatgattgtattggcgacctccatcacatccaaggcttcttttatgatggggtcagcctcagggttgaatggctccggaggtggcgaaaggtcggctgtagcaaagcatatggtaattagggttcgaagccataaacaaataataaagcaaaagagcattaaatagaagtacctataatcaatgcacgtatgacaacttcttcagcttcttttgcctctactcgggcatcttgggattctttttcatttttctttattgcttcgtcggctatctcgcgaccgcccttcatccaaacaccggaataaaatttcccacccattagagtagcttcgactaaaggttcctttgta

SEQ ID NO: 114762 - DNA, 330 bp, Zea Mays
atcaaccctaatgggttctgcatcactttctactccgctcggaacacgtttcgtgatgtcgtcgttcatggtgatgcgtattatcatgcatgcatgacatggttcttatcacttcgaagcagcatggctttagcttatctgacatgcaccatcttgagaccaatctaatcttcagctagcgctgaagaaccgtgtagctagcgaaggttattatcacctgtggatgcggaagaaacaacgctgcgctattgctacaaaaggtgactactccacagaccacagggctctgcttcgtcattagatgtttcggatacgtctcgttctgcagcg

SEQ ID NO: 114763 - DNA, 461 bp, Zea Mays
gtcgaaggctgtcgatgcggtctttttcgacactcatgaccgtgatgtttgctggattttttgcaggggctttttggcagtatattacatggctccgcctcgttaaaaacctcacccccgagaggaaaagagtgcgggcctatgtaacattgtttgaagaattacaatggcgcttgggccttggatcttaaataaagaatttacggaggttgtctatgttccatgaatgctctatgtcttcgtcggatgatgtttttagcctgtaagtgtttggggatgcctttgtcttgactatgtatggcccttcccacttcggctctagcttgccccggaactctattctggtggtccttatgagtactaagtccccttcgttgaattctcttgggacgatattgttgtcacgccatgccttagtctgagcttgatacttgtttagggcctgcaaggcgaggacacgg

SEQ ID NO: 114764 - DNA, 452 bp, Zea Mays
gagctgaaagaagttcctttgattggcagaaaatttacttggtcgaaccagagacaggaacccacccttgtgaagcttgatcatgttttttgcactactagttgggaggagttttttcctgattgtcttctgtatagcaacgcctctgtttgctctgatcattgccctttaaccctcaaatttcgagaggattgtaaagggaagcgcagatttcactttgaaggtttctggcccaagctccctggtttcaatgaggtggtggctgattcctggaatcagccaatgttggcaacctgccctttggaaaggctgtcccaaaagatcagaaggcttgctaaacatctgcagtcctgggggcatagagaggtgggtaatgtgagaaaccagttgggtcttgctagagaggtgatgccataggttggaatcagcacaggacaatagagttttgtcag

SEQ ID NO: 114765 - DNA, 284 bp, Zea Mays
cggatacggatacagagaccgggtatttattcgggcgaataagagacgcatatggatattatgtagccggatacatgcggataatgagtacatatcggataatgcatacattgattatcattcactataattcagttggtgtataactgtataaaatagttatactccaatatgacaatatagcaaagttcacatcatacaacacaatagtccatcattacaatataacaataagtttactcatacaacacaatagtccaacatgacaatatagcaataagttt

SEQ ID NO: 114766 - DNA, 396 bp, Zea Mays
gtagctagggtggccgctcccctgtttagtagtagtatactttaatccaaagaggaaaacctataagaacctccacgcggccccccacccaatgctagtcaaatatagcatgggctgcctgatctcttgacgcagctaattactcttgttctccgtatcatcatcatcaacgtaccaatcgtttcagcatgcaggttggctctggctgttgaggctagaggacagacaggtcgaggaactgggccataattgcttgacgtctccacgtctcgtgcacttgttttcttccatgccatggctcgatatctgtcctcgcgtgtgtgctgtgtggtctgtctatctcaatccaacctgatgccgaaatggccactgcaacgaatgaatagccgcacgtcg

SEQ ID NO: 114767 - DNA, 699 bp, Zea Mays
gtctccacgagcctaggaaattactctgagtttaaatttaagttagcatggtttattagagagggcttccatgatatggttacgtcgatttggcaaaaagaaaataaaggtgaaaccgctatacagatatgacagaacaagattagggcccttcggcaatatctaaggggttggacaaagaactcagcagggtcaataaaaaaagagaagcaacatctttcagagctgattgatgacctcgataaaaaagcagaatttacttacttatcgcctaacgagttgaatactaaagcttttgctaatgatagacttgccagtattttgagagaggaagaaattcgtcacttccagagggctaaagtcaaacacctccttgaaggggatgataacacaaaatattttcatttagtggctaacggcaagcaccagagacaaaggatttattctttggagaatgatgacggcgcttgtatagctgatgaggaagagcttaaaaatcacataacgaattactacaaaaacctctttggaaagccagacacaacatcgatcgaacttgatgaatctattatccataacatacctcaagtttcggattcagagaatgaaaatttaactgctaattttactatggatgaagttaaaaaggcggtatttaatatggaacataataaggctcctggccctgatggctttcca

SEQ ID NO: 114768 - DNA, 946 bp, Zea Mays
ttcaaactgacgtcgatagctgtcggggaaaagatccttgggcccctggggggcactagtctgcaaaaggacgaggggaagatctgcccaggaaggatccaccctcagatagccctgaggcaccgagcccggggtcggacgaggcggagccagaagggggcttgggcgaatcgagaggaatccactcgagcagatttcacattaactgcatctggtgccaagccatagtgggagagtcggttctcctcccactaatgacctacggggccaaggcctacaacccactcttgacctatcaaccctaggcttgagtgcactgaccgtctatagggcccacaacatgacgagcatcgccaagacctaggctatggaggccaagggttggtgtggcatagagacgataacgatgatgtcgaagctcttcgccacccatgtcgtcatccataaagagcgcaaccaggaagcccagacgactgaggcacctgcggataaccatgactttaccagggtagaacaccccattttaccacggcatcgtagatccttccttgatcggtagtcgacccccaccttggccaataaaaagggagaggtcggccagaagacacatgaagacatagaaaaacacccatatacgaccacactagaagacccagaggactacagaggccgaagccatggagcgaaccaccatgaagcccaaggcttagcagagagcaccagattcatagtccttaggtctaaccacgcataagagacctaggaggtcctccctctctcgcccacttgtaacccctaatacgagcattgagcaacaaaggtgccagtagcgcgtgcgtcaaagactagatgtagagatattctacctaaatcagtataaatcttgtgaccatagggcacaccatctgaacccctaaaacacacacaaacaaatttacttgtcgga

SEQ ID NO: 114769 - DNA, 385 bp, Zea Mays
ggaacatggagcaaagatgctgaagaagatagctctgcattttcatcagcaaggaaggatggatgggagagacaacaggttggcaatatgagctcgaagtctggtgaagaatgcaggaggctctgacgtctggattgcagcctgtgtagtggtaccaccaatatgggcgtgtaataagaatagtatcgttactagtagttaagtagttaactgtgtttacgtttctggtgatgtgagccggttgggcctgaattgtctggtacagctgtgttggtgtggttgtggtgccggttgggtgaaccctctgcgttcatcccagtcccaactgggcaatttcctaggatggctcagttttattccacaaactcttgtaattccgttgctg

SEQ ID NO: 114770 - DNA, 576 bp, Zea Mays
gaggcactgtggctgcccggttgccataccaacttgcgccacaacgtggccgcgcggccgtcgcggtgaggatcgccgttaacccgagcatggcacgctcctaccttgttaccacatcacaataggtcactatagatggcctgtctatcagctgagtcgttgctccggtaaatgccacggtagcttgcgctagtgaactccctccctccttggctgccagcgcatcttctcaaaattgggtgccaccgctgatgatcactataaattgagtgtccagtgagctccgttagattgttacgtgcctagtgcaccagccctcgcctctgattagccaccgtagctcacgaatttcaaacttcccccaattcggttctccgcgccgccatgaaccatcgcgccgtggaccgctgcctccaggtccgttcacatcctccttaccctcgtttcagcacctttgcatgctaaggatgcttatcggcccaaccaattgaactagaccacgctagatcgccgggaacacctcgggttgaccttggttttcaccgtcgtcgtgtatagagagattttgagctagaa

SEQ ID NO: 114771 - DNA, 494 bp, Zea Mays
tgaatttcgcaacgtggacccgtctaaacttaaccctgatgacctgaacagatctcgggccattggcaatgctattcagaggccaggtgctcctcccagcagcaaggacgatgtgcctagggcgtctgaagactaggtggaagactccttcaatgatgatgatgatgatgcggggtctagtgcccctgcggagatgtaaggcttctgccttccccttagggctttatagtgttatctgtgccctggttggtggatcttttggtggttttccatgtatagctacaagataactgtcggtgttggtgcgcatgtggcgctaattttgtttgccgcaacaaactctgaaagagtcgatgactctttggttgtcgacgcagataattatggtgtttggaatttctgttgtctgttattttggctcctttgggaaacttctagtttggcccctttggggaattatgtccttcattccatgattatattttggttttctg

SEQ ID NO: 114772 - DNA, 453 bp, Zea Mays
aataaggtgattttaaccctttcaatttccttcttccaaacatgcggtaaggctgccttcgatggtattgctcccatgtggaggaacactcacacactgttttccctagatggctcaaaagattccccgcaaacgagcgtggatgaacaaattcccgacacatgtgacgtaaagaatatacgcccgaaaacaccgttttagctaattgatgacgcgagtgaagtttacaggcacatatagaggaagtcgacgagcagacaagcgcatgcgctggagcgtcgagtcgctggtgtcgctcgtttagggcctctcgtccagcacacgcagcgctctactgggaacttcgtaacggttatgaatcattacgatacaaagcagatcaaaatagagaaaatataaatttaacgtgtaaaccctctccaaagcgaaaggggaaaataacggacgtcggcc

SEQ ID NO: 114773 - DNA, 495 bp, Zea Mays
agacagtccattgagcggcaggacttcatccgaaaggaggtccagaagctgctggacgccgacttcatcgaagaggttcatcacccagtgtgactggacaatccagtcatcgttccaaaggcaaatgggaagcttcggatgtgcatcgactacaccagccttaataaagcttgtcccaaggacccgtatccacttccacgtatagatcaaatcgtggattctacctccgggtgcgacctcttgtccttcttagatgcttactctggtttccatcaaatccagatgtctagggaagataggaagcataccgcttttgtaacagtggatgggctttactgctatgtcgtaatgccttacggtctgaaaaacgccttgccgacatttgtgcgggcgatgagtaagactttcggggacctgattagggacatggtggaagtgtacgtcgatgacatcatattcaagactaagagagggtcgacccttgtcacacccggc

SEQ ID NO: 114774 - DNA, 354 bp, Zea Mays
cgaggatctgagcgagcattggcaggccacgcgcgctatgctgaaggtcgtccgtagcgtggagtgcggaggaggcctcaaattcccgtaacttttaatactttagatgcgacgacggctaagagacgtgacgtggtcaattacatatacagttgcggtgcgagtcaacttttacgcctatgctattaatactggccctcgcgtagtcgtatgtactgttggtagggtctaaccaaggattaaccaataccccatcatatataaacagtaagattaaatatgattgtgtgctattgaaacgtatgaacattgcattagtatatgtatacaggtggggtgcagtttgttattaag

SEQ ID NO: 114775 - DNA, 805 bp, Zea Mays
ggcattcggcacgagtagtctttcttttttgatagctagcaacctaaactacaacagcgtggtacgtaaaattcttgtgttgggcatgatgatctatacgcacaccacaacagtaatcaactaatcatcaagcacggtacaagtatccctcccggtttatagcctaaattttggggttattacacttctacctaagaaatgtaatgccttaaagatccaagaatatcgacctattgcttgcttaatgttacctttaagataattactaaagtactggttgcatacaagattattaacccctcgcaaactgctttcatgcctggtcacaatattcgtgaaggggtaattgtgcttcatgagactattcacgagctacataggaaaaaatgaatggtctgattctaaagttagatttttgtaaaggcatacgataaggtaaaatggccctttctccagcaggctatgcgaatgaaaggtttttcgcagaaatggtgtacttgggttcaatcgatagtctctgagggagatgtgggggttaaagttaatgatgagattggtccttttttagtactcacaagggcctccgacaaggtgattctctttctctaattctctttaatatagttgtggatctgttggcgattctcttttcaagagcaatggaaaataaccatttcgctggtatggttcctcacttggtggaggggggactttccatactacaatatgcgaatgataacatggtttttatgaatcatagcttggaacatgctcgtaacgtcaaactccttgccgcttttgagca

SEQ ID NO: 114776 - DNA, 696 bp, Zea Mays
ctgggttgtgggcataggggctcttgctgccctcaccggccgtgcgccaccgtaacgggatagcgccaccacgggcttatttcacgtcgtagttggtactcccccctacagcgacccactggatcgctctctcccatgttagttgtttcctcgactccggatgtattgggtcgactcaacggtggggattctggggcgtcggtcgccgttgcaacgacgatctcaccatagggtagggcagagctctggcacctgggcgcttcggttaggaagaaacatcgtgggacatcgattcgtgagtgggtggtcgagattggtctaggaataacccttcgcagggttgatctggtctgtaggaactagatcggacgactacgatctgttggctgcgtaccgcttcgatgtgatcgaccctagcccttggatcaagatcaagtggagccggcgagatctctgttaattaaaagccgcaccatcgatttcggatccaagagtcacgatagtgtaccggttcagtgtggtgaacatctaatcggcaccatagaattctgatccaacgtcctgagttcctggatacctcttcaccggttacactttataaaagagaccctagaaaacagacaaatcgacccgccgacctagcacagtgatagaacatttaaatacggtcctgtttttagtagttgagtccctggc

SEQ ID NO: 114777 - DNA, 541 bp, Zea Mays
gtgatatgctcccatttccactctggaatttctaatggcttcagcaaacctgcaggccgcttatgctcggccttcacgcgctgacatacttcacaggcggccacatacttagaaacgtcaaccttcatccgcttccaccagaagttttgcttcaaatctcggtacattttggtttcgccaggatggacggtgtaaggcgttttatgagcttctctcaagatatccattttcacctatgatttctgaggcacacagaggcggcccctgaaacgaaccaaatcattctcatcaatggtgaactcccgcggtttaccatcacccaccctctttcgagcttcctgcaatagacgatcctgctgctgagccgcacacactctctccatgagagaggattgaataagcatctgagtctccttgctagcagtgccgacataacacaaagcgatccccaaacggtccagatcagcgatcaacggcaaggccacctttggaaccccggacctgctaagggcatcagccaccacattagccttccctgggt

SEQ ID NO: 114778 - DNA, 467 bp, Zea Mays
gactgccgaagctgtggttgctgactttgttttcaagaatattcagcctttgaaagacagggcgtatccagcttacttgtacagtggtattactgactctacccgggtcaccaacaagaaaattcctactgaggatctggtgagccgactagacatgatcccgagggacaagatatcaaatgttggtgctcctgttgcctattctgcttggaatctgccacctcataggtcatttttcaattttgtgtccaaccctcctactagtgatggtggtctgggtcttagagtgcgaccctctcccgaggacattgaggctctggttgctccccttcgtgattttcccaatgatgagagatagattcactttgagatgccagcaagtccagatgatgcagaaatagatgttgtactcagtatgttagctggagaatcttctgactcgacccatgctgaaccgatggctatca

SEQ ID NO: 114779 - DNA, 281 bp, Zea Mays
attaaaaccaatcgttggaaggaaaacagaatctctgcatatctgccagactccccggtgcatccaccagatatgctagtccatgttagttagccattggaactaatcgttgctaagggcatccggtgcgatgactagtgtaacattggacacgtctgatgagttatatccttctcgggttactatacatcctctcaaattatcctgtctagtggggtgtccgctgctatacataacatgtccggtgccttatatatttctccaaacatgttgtagacctc

SEQ ID NO: 114780 - DNA, 722 bp, Zea Mays
cattgagtcattgtgcgtaagtagtgtgttagggatatttttattacatgtacattgctataatatcggcacggtttcaaaaattatggaaatactctggaaacgtggatgcggttacttgtttagtatagcatccgtgatttcctttcattcgaaaaaaataccccctagactgcagaactagttggcggtggagatagctggctctggacaatcgccgacgatggtaggagatggcgttcgtcttgatccagacacagagggagtagttgatggtaacttactggttacaccacctcctgctctactggggcctgtaatcgacgagataagcataggggaggaaggagaacaacggattcgacctccgatgtccaatattagctccagggagatggatacgcctcaaatactgcattcacatgtaagtccaattgttgtatttgattcttgattgattagattgttatgatcataatccatggtacaaacaacattgtcaatgaattgcagcaaaaacattgatccgaatatagtgccaacagtagggatgactttcaaggatattgatgatgcatataaattttataaaaggtatgcatatgaagttggatttccattgaagaaatacatgaagaagacattcagtaagtggataaattgttcacgtgaaggtaaaagtgcaccaaaaccaaatgatacacctaggatgaggaatagga

SEQ ID NO: 114781 - DNA, 1583 bp, Zea Mays
cagtggcttgcccttggtgtctccatgtatctactcacgacacctactaaaaagcaatatatggccttgtgttgactagatatctcaagctccaatcacactcatgttctttgttgcatcgataaggggagacttatcttccttgctcagtttcaacttgttctccattggaacatgatagggattgcaccctttcattctagcttgcttacaaatctttagagcataagaattctgacataaggttgtctctctccttctgatctacctaaattactagataatatgtgagtagaactaggtcactcatgctaaaacttttaatcattttctttttaaatgcatcaatatttccttgacttggtcatgtgataattagatcatcaacatacacgcccaccaatagaatgttgtcattattatctgatcgcttatacactacatgctcaagtaggtttctgacaaaaccaagtttcaacggctccttatctagtcctgcattccaagccctaggtggttgacacaacccatacaaagctttcttcagtctgatcacttttccattcccttgttctacaacaaatctaggaggttgttggacatatacatcctcaaccaagtctccgttgagaaaatgttgatttaacatccatgtgatgcaccttccaaccacttctagctacaaatgctattatcaaccttatcatctcaatacgggctacgaggtgcaaacacctctttaaagtccacccatcatggtgaacatagccttttgttactaacctggccttgtgcttgatcatgttgccttttggatctttcttcacattgaagacccacttgaggcctatagcacgatgactaccaaacaacactactagctcctaggttttattggactgaattgactccatttcaactatcattgtctcatttcagcactgttcccttaaggcatcctccacactgttaggttcttatgctgctagataacaaatcccattatactctaatttttttacctcttcaatggtgtcataaatgttttccaatgttctgaatctcattggcaccccataagaattcctgattctccagttcgcagtgttgcaaactcaattacctatataatagggctttctagaggtgttggtttaggtggtgttacacctgaatgagtaccagttgacaacagaccaggtgaaaggtgatcctagatcagaagcatatggttcagataaatcttcatacaccgcacctaaattcccaccatcaggtattgttccttatccgggaatagtgtaaaattccactacaagcacatggggtagcagattcatataagatcttttattccacctctaagatcaattatcttcaaatattatatctcaaaattatgtagcttcttggctataggatcatataacctatagcccattgtcccagtctcatagccaataagcaccatcattgtgaacctctctgacaacttggaaatgctagggccaactttcttgacattagctacacacccaaatgtcaaaaggtgatgtacctcgggtttcttgttatgtcatgtt

SEQ ID NO: 114782 - DNA, 413 bp, Zea Mays
cagggaaggagctcggctgggcgagcgtcgcgcggggaagagagtggcctgcgtgaagggagcagcggccatggcgaggtagagatccggtcgtctagggagagagaggagatggacgcgagatcgtggagaaggatgaggctgaggaaaacagtggcggatgaattttctagagacgcatacgtgcacaagataaggattagttggagatggacatgtagaggcaagaaaattcagattttcccttctctcttttctatacaaatatacacagataaatacaatttcagcaaataggattttgaagatgcattgggtgtgagacggcctccggcggcggtgattcttggggttcggagtccatgattattgggcggcggtggtcgttcccgagggaggcattgggtgtgtat

SEQ ID NO: 114783 - DNA, 756 bp, Zea Mays
ggcatcgagcacgtggcagcatttgttctggtcatcttcaagcatcgattggcctgttatctcttcgtatctatccaaaatccctgtataagatttcttccttgttgtataccctttgtatctcatgcagtgctcgagtgggtttgacctcgggttggcaagttacgaggaggtgaagttgggtctgtccgaccagacttttctggtggaaaatgggcgccaacacatgtcaaaccaattgggtttgctttcaaatttttccagagtgtcctaggggtctttaggcgccattttgttaattgggccatatggttttgaggtttggaaaaaggtgaacatgtttgatctttgaaagagggctggttttgaacttgagaaaaacctgatttttcttttatgttcttctctccagtgacctttttggggtttttctgaaatctttttggggtcactctctttctattttttgtagggtattaagtgtactacaacttttataattagcccaagtcatgacaatgtggtttacatagcctttttgctgaactcccctctagggctccatttgcctaagggagttgaattagggtttgagtcattctctcctctttaggtgcatggtaaggtccaagcatgacttctaagatgggttacacctacttaggatcttgacccccaagtttggtgtcttgtgctcaatttaaccacatgtgatgataggttcaccagtgtagtctttgagtgaaaaccctaagt

SEQ ID NO: 114784 - DNA, 371 bp, Zea Mays
ttcaagaccttcgtttctcaattcaatcacctctgaacgaagtttgttcagagccatcgtatagccttcgtcttcaatatttttctgtgccctaaagacattactaagaattaatccctacaagaggaggaaagaattgagtatgacaaatgaaatacctcattctcaaattcaaagttaacttctatacctttatactgttgtacgctaggctgtcagcaagatcatccttcgacaaaattgaaaggtcgtcttccagcttcgggaatcccatgcttctacctatctccttgcaaacggatatttctttgttgtccgggagacagtataagaaatcatcttcattactcctgttaaaaaccaaggctccc

SEQ ID NO: 114785 - DNA, 1233 bp, Zea Mays
gtcagcccagtgtaccaacatagggctaaacatttccaaccaatccatgcctataatcaagtcatatgtttgtaatggtaacacccgcaggttggacttaaactcataacctgaaagcgaccacgcagctcccaacaactcctgtgtacaagagagtagagaaccatttgccactcttactgacagtgctttgggcaacatagagagacctgtcacatgatcagccacctgtgtactcaagaaggaatgtgagctgcccgaatccaacaggaccaacaaatccattccctgaatgtgtccaacaaactgcatggttttaggagcagccttgccactaacagcagcttgggacaaccatagggcatttatctcttctgacgaattgtcctcctctgttacctgcccttgcaatatttgccacagctcttcaaccacatgaagctgcacattatcagcacacctgtgaccccgtatataaggaagaccacacttgtagcacagtcctttcgcctttcgataggctatcagagatgccaatttatcatcagtagaacccatcttggacacaccaatatttgatgcactatcaggcttggactgctgagatgtcttgggaggcggtggcagcggcagaggtgattttggatatattttggaaggatatgacccatcatactttttagaatcacgcctcttgtcgccgacttcttcctgcaattgagccaaaaccacagcagtatccaaatctcttggtcgttgcaccataactactgatctaacatcctccctaagaccatccataaatctcattgtgtaatatagtgggtcagcatgtggactataggcatgtaactgatctataagctgagtaaatcgttctgcataatcagtgacagtagtggtttgttgtatgtgaaataattgtcgaataaggactgcatgctgatctttgccgaagcgatcaacaaccatgtggccaaattccacccaagagattcgactcaactggcattctactgactgaagccagcgtgccgcagcccccgtgaaatgcatcgtagagattttgatccaaacacgagggtcgaccgagtacatggtaaagtaatcgtgacaccttcgctgccacaacttcggattgtcaccgtcaaaccccggaaatgggaccttgggaaggttgcccaaaccatgaacgaattggtcacgtgtgctatccccaaaaccatctggtgg

SEQ ID NO: 114786 - DNA, 724 bp, Zea Mays
tgatgatcaaaatgtcatttggagggaatcaaagttccaatcgacatcacccaacttctgcagctattgtacccctataactacatcaaatccttccaagggaatcaccaagaatgaatcaaagatgcaatgatcctggatatagaactggatggctaacatacgcccagacatggtaactgagctccattggccacctgcacctgttgtctagttcctaacatttgttggacctacaacaatgaaggagcattgctaatgaaattatgggtgctgccactatccactaaacccaccgactgatgtccacctagaaccaaaatgacatgcattgtacgactagcctttagaccactcatggctatagcagatagtgtcgactcctcctcaatagaatcatcctcttcatcctcgcttagcacttctagatgaaacaggcgctaatagagacccttctctcggtgtttagaaatcccgacgttcagacatcttgattgagctgagatgatgatgatagggtggtgcggatgatgccatcaccaaagtttgcgaaactactagcagcattgtacctccttctagcttggactccatagttgctacaggaaggttactatatgctggagctatcgactgattgctcaccgaggcatcagagcctgctgtccaaggcaggttgtgagtcaggcgagactgcgtggcctcgacaaccttggcaagaaag

SEQ ID NO: 114787 - DNA, 577 bp, Zea Mays
gcgtgcaagggcgacgagaggaacaagaaaacgaatcgttattttaagttgtgtaatcagtgatatgttgaataattttatatcaacttcatcttcacgtgtaaattggtgttagaggaaattccacgttttttttaaagcatagctgattgaagttggctgcggcacttcgacctcaacctgccggccgaggccgagggtgcgatgccggagacctagcgctcgttccaacggcggcggggtgtttggtagtttagtttcggttgttattgaaatcgatgcttgattgatcgctttcttaatttcggttgcgctgcgttcgtcggctgcaatcgatctgatgagcacaaacagttgcggttttttcagtgggtagatagtatgcaagaaaatttctgctttccttttcaatttcagtatgaaagtgaaagttgtagattaatttctgagcgagttgcacatcttgttgcagccctgcggatgatgataacggatcggaccgaaagatctgctagctagatgccagtactagaacacggccggccatggcactgctcgcaataaaacgcgatcagcg

SEQ ID NO: 114788 - DNA, 554 bp, Zea Mays
gttggtggtaaagtgcaagcagatagaatatgcccaagtataagggtggaaataagggggatagggttccccagtgacctaatagtaatagacacccttggagtagatgtcatcctagggatgaattggttaatgaaatatgaagcgaatgttagttgtgacaagaggaccgtaacattgaagtccccatccggagaggaggtagtggctgagctaaggatgcctaaaccagcggagggagattgtcaccagatttcagttgatagtaaggaggccaaaccgcttgaggctatcagggttgcgtcggactttccggatgtgttccccgaggagctaacaggcatgccacccgagagaaaagtcgaattcgccatagagcttatccctggtaccgcccccatttccaaaagagcctatcgagtgtctggaccagaattggtggaactcaagaagcagattgatgagctgttagaaaagggttacatcagaccaagcacctcgccttgggccgctccagtattgtttgtagagaagaaagatggtaccaaaaggat

SEQ ID NO: 114789 - DNA, 687 bp, Zea Mays
tatgactgctgctgatcccaatgggtgtggtatgactgctgctgatcccaatgggtgtggtccatctgttgctgatcccaatgggtgtgttgccagtgttgctgatgaagacgacgaagaggaagaagatgaggttcctctgattcggaagaatagtcggcaattcctcgccagtggggaaagtagtggggttccttctccggctttgtctgctcttgttggtctgcagaacatatccctggccgactttgatcagactctcgaggacatggtcccagaggatttgttatcggggccagtggatgatgatgcagcggaagcttgtggtgctgtgccggatgctgggttgaggtcgtcccgcgcctcgtcaaccttagagcgtggtttcgagggtcggggtgctgacttggactgtcctgatttcatggaagtaaccgagggtccgtcaaccttagaggtggttactgcagagagtttggaccttaaagctagtgctgacacatgtccagcccccgagggtgtcatcggggatgacttagctcaggtgaagggtgcaagccactgcccagcccccgagggttctgccggggataatccagctcaggtgggcagtgccagccacaatccagctcccgagggtgcccaaacggggactccttccggcacttccatggacgttcacgcagg

SEQ ID NO: 114790 - DNA, 400 bp, Zea Mays
tcgttgcacatagtttctatcatttctaaccattcttggcatgaccctttgaactgtttctcaaatttcaaccgataaggcagtcgcacaagctcattcttttcctttgtcctctttagcttcggcatgttccattcactcagcgtcaggaacacttataggcaagatattcttggactagatctttggtgctgatctgctcggctaccaccctgaattctgccacagcttgttggcacggtgaccccatcgacatgcggcacaagggcctagtcaacccgaagcttaagctcagcgggctcagtactagcatctttagcttctccctcttcttttcatcggccttaacatagaaccactcatttttccaaccggttggccacttggtgcgatagctaac

SEQ ID NO: 114791 - DNA, 628 bp, Zea Mays
attccagccatcaccgccggcgatccaccacttgacgtgaccgccagaacctcccggacctcacccagccctccaccgaacctctccttccgccgataagccgcaccaccatttttcccctatgcggctactgttccggcgaggagggagcttgggttaagatagaaagaagccagggggtattcgcaatgtcagtgactcagtgaaacagttccgcaggggcacagtttaaatggtttagttaaagaaaaacccaggggtcccgatgcaaagctgttttccttaaacctttaagatttattcttttaaatgagtacaaaacttgaaaaattcataacatgagttttatccaaccaaacttggtcaaaccaattttgctagatcctaaatattatgaactatttaggaaaaataataaacaccctgagtactgcaacactttttagagttttaatttaaataagtatactgcccaaaacaaaataaatagaggaaaaatagaaatacttttggactgagtatgagaaaaattagagacataattaactactaactaccctgtctaaaaatgttaaactcatcagtacactaggttaaggagggattaaccattaaaacttgtattggc

SEQ ID NO: 114792 - DNA, 275 bp, Zea Mays
ctggttttatatatgagagggtgaagtagacaactatcaatagttgagggggttaagtagacttttcctttgggaggccatgttatgtcaaggtgtgcctcataaaagaaaacagaagtagtattagataagaaggggcttcctttggaaaggaagaagacaagccaatgggggtcactgtttggtggcgtggggcaaggttactaggcctaaggacttgggtgggcttgggatcactgatctgcggctgttgagtgtggctcttcgggctaggt

SEQ ID NO: 114793 - DNA, 647 bp, Zea Mays
aaggaacatacccatcatcaccggttcgccttccagtgtagtaggcacctgggtataatacactcgtccagtcttcttcatatttctgcccggtggaggattggtcgtgtttccctttccttgatttgtgttcccggaagtctgttgaaagtttgatttgttctgcttcaggtaggggtagtctttgatgaaatatccggacttgccacaattgaagcagccactcgaggaactgggaagggcagggaaacgagcaccaggggcactcggctgattggtctgggtgggggcaggagtgggacgaatgaacacgagttgtttgaagggatatgtgggtgggtgagtagaagaacgatttgaattgaaaggtcagattaccaaccttgtcctcttttcaggtccctgagttgatctttcacccgcatatcattttgactttccttgtcccgcatttttggcttcaactgacagtgttgtgctgatagccctacaatatgtaaggtctagacacttagccatcttgcgctgaagtctgccatttaatcccctcataaagaaattcttcgttttcaagtctgtatctacttgatcgatggtgtaatgggagaggtgattaaatttgttgacatactacatcacagaatctc

SEQ ID NO: 114794 - DNA, 856 bp, Zea Mays
gctggggctagaggatacggagtcctatttattttagagagggggtagagactgtgatagaggaaaaccaaaacaactatgaagtgggcagtcctatccaatttattgaggcatattacatttttacatttagctccctgctcactctactaactactgagtgaaccagctaaccctaaggcattcttgtataactctgatccgacgatccgcttcctacctagacttgtcgtcatcgcctctcgcaacctccaggattctaccacgtgtcgcatgcttccatcccgggttttgaggcccagacccaaaaaccgcctcaggggcatggttttgggctcaaccactaaacctccacgagtagcatcctttgacgtgttccccactttctgaaccgtgtccagctagccttcgaccacgctggcccacgatccacctccatgtacactctagtcacccggcctatggcccaggtgtcagccaccaaggctagtcactcagcgacttgggtccatgggtctaagcctcgacatccatctttcaccgctccacttgtcgtcgcctcaacataaccttcaagattctgccacgtgtcgccacgcttcctgatgactccacgactatacagttgatgggaatataaatcatttaactatatagctaggtttattgtcatgtgatgtgtcaagagtggcaacatgaagaaaggagtcatgccatctactgaccaatcctaaacttttctcatgaaaacttcatgttttccaactcctaaaaagttattaggagctgaagaggaggtcatctccaatagttcctaacatttcacatctaaacaaatcaaaatttgcttccacct

SEQ ID NO: 114795 - DNA, 1051 bp, Zea Mays
tatgaaaagcttccagcatgactgtccacttggtgatgcgtcttgtagcgttaaggttgtgtagaatatcatcgagcagctagtcgcatcttacgtgcattgaaataccggtagcggagatgcatcttggtgatgctcttgatatagatatatctgacttttacttctgatttcaagcttaaaagtaacaaaatcatgtgccgcagtaaacgatgagctagccatgttcgtatttgacagcgcaacaggtgccggcgtgtgccaccaataatgacggcctccttcggtgtcaccgtagattttttcctcctatttcattaaaaaataggataaaagtcattacaaacaaaacgatgagcaacaacccatcaacaaaagagcacctagtgatgctagccccctcacattatcaaactagacaagctaggatcagcaaccactaacatctatccagacgcaaccagagtttttaagcaaaacttattacaacgactgaaaataaaagcgtagctatgaagctaacaagccagttttaactaattcaccaaagcgataacccagagtttgagcgatagtcaaccacaaaaatgagccaaaatcacccttcatctagaaatgcagcgatctctcggacaccacccaaacgaccgacatataacttcacgtgctatctttctgattagccggcttccttggaccaccatctctctttccttctctctctctctctctctgacgaatagcccaagaatccagccaaaagcaacagagaaatattatgttagcaggatcaaggagaattttatcacaaaaaaccaatcatttctggttctccaaatagcccaaaaaacagctccacaaccaaatatcatcaaattggagattctgtctttagatttgttcaaccatctgtcacataattccccaatgttttttggaatgaaatcaagatttaaggcaatttggatcactctccacacaaatctagcaatggaacatttaaagaacaaatgttcaatcgattcaagacccccacaaaaacagcattcac

SEQ ID NO: 114796 - DNA, 369 bp, Zea Mays
gacctgtcaaacagcctgtaggccaccctagccagacattaagcctggccaagaacgatcatctgcagctccagacaatgcaccaaggcaaagagtcctggccgttaatcacgctctggcccacaggtcaaattctcatcaaccaggtttaagtacttgccttcttattaatcaaagatgcaacagtacgatcctatagaacagatcctgttcaagtaaggtcgtgctgtgagttaccaaagctaaatttttaagctggcttctacgcatgtgagcaaccgagatggcactaaccggtgggactggccaacatactgcgtcctgggtcggcccattctggtatcctacatgtgggcttcgggtccagcc

SEQ ID NO: 114797 - DNA, 491 bp, Zea Mays
ctcgaggtcttattgcatcctcaaggttttacttagtagtagactctgaaaaaataaccttcatcagaagtaaccttcatctcgaaaacaacaaaaagttaaggtaagaactttaccttaaaattagaataaaacaagctaccagcgatatgttgccgccggtatctgctgaggtcggcctcaagctttggaaagccaacactcttcgatagagttctgacaaccttcgctccagtccggtcccggaggcatcctaagctctcttcgtcaacgccaccgaagagcaatgctcctggctggtagccgcaagatatagcataatctcttagttattctttttcagccttagataactcctaaccaatcatgtttcgaaaattgaagttcccttcctccgaaatatcttcggtaatcttcttctctttgttaaacaccttctccccttttccaggcactgtggcaagggttgcctcagcagttgcaacagtttc

SEQ ID NO: 114798 - DNA, 486 bp, Zea Mays
gtgcgttcgtggggaaatctcccacgccatcggggccgggttcatttcccgggtcggggcgataggtttttgttgggatggatggtgctcaaaaccatgcgtgggctaaccgaacacaacttttgttccaggctaggattaaatccaagcaaggttgttccacgtggatccgcccacgaccccggcagggaatgggctaaacgaacaagccctaaagctggtcgtaggcggcatcaatggccctatacagactaatgtgctaagcattgagcacctccatgtggctcttgaccatggaaaaatcgccctccatcgaggcaagctgtccgagagctctgttcgacaaaacaatggtctggagctccatcaaaaacagacatagaggatgagtcggggtgataaatagggggttaccatcaactgaagcccttagcaggtcctccacgttgccccgacgcacaacttcggcctccaaagtttggacct

SEQ ID NO: 114799 - DNA, 455 bp, Zea Mays
atcatctaaaagcttggtcttattacccatggtacatatcagcgatagtagcccctgaatcttatttgtctgagtcattgaatcatacatgtaagactcttatcttgaatatttttgataatcttgatcatattgtgtcgagttgtcctatcttctgaccgagtccccaactctatcatgcagccccctgactctataaacttggcttactattcaggagtcagcgcttcactagatagcacatctaattctattgttttctatagcttcagctttctcagtcgctgcataaaagagaaaatcatgtggtgctttagcttctatggattgttataaaagaatcacctagtggtgcttggactcccatgggtcatcaatttgcattcttgccttctagcgctcatcgcatctaacacttcaccttctagagagctctcttggcctaattttcacca

SEQ ID NO: 114800 - DNA, 350 bp, Zea Mays
ctctgggagaaaagaacaaacatatttctttatatgagaaggagtttttagccttgattatgacagtagataagtggaggcagtatttgcagaggggtgcctttgtgattaagacagatcacaaatctttgacattcctgggagatcagcagttacaatcagatcttcaaaagaaggctatgaccaagttaatggggctgcagtttcagattgtatataaaaagggggcagagaatgtggttgctgatgctttatcaaggaggagttcagtattggagttagctgccatttctgaagcgcaaccagtttgggtacaggaggtgctaaattcttattctaccgattctgaa

SEQ ID NO: 114801 - DNA, 334 bp, Zea Mays
tgttgtcttcaactctagttatgtgtacatgtaatctgggtacccacaccaattgcggagtaggacacgatagttccttattccctgtctgatctagagtcacactcaaaagtatagcgtttgaccataaactcaaatcatggggcccaatggccagtctaaagccgcctagactgagttactggacccttttgactgacaacaaaataggtttagaggaaggtaatcttttagcctctcacctctatgtcagggcacatgtttggctacgaaccttctcgtattacttaggacctcataggggatactctcatgttatgccaaatttgtgcta

SEQ ID NO: 114802 - DNA, 495 bp, Zea Mays
tgcccccagcgcctaggccgcttcttgcgtttacttcgttttgtaataacgttcttggacaagatctttgtgtggcgtgttgtcttcactttgaaccttttgcccttcgaatcctagccttagtggtgcttgtggagttcatagatctttgtggcggtggttccttttgtgttgactggcgtgattttcggtaggtgtagagatctttacttgcttcccgcagggcgcggaggcctagccgcctgggtgacttattcgtgatactttgattgaaagcggtcttggccattggtactttaggtcgaaaaaatcgtcttctgtttggcagggtcttatgaggtcaaagtgattgatgggaacctcttgatcttcattgattttttctcaatagatatagggtttgcgacatccaattgattggaaccgcctttccttacaaagcctatctgctaagaattcccacacgggccttccctcgcctttctctcacgtagc

SEQ ID NO: 114803 - DNA, 410 bp, Zea Mays
gactgttggatgtgttagtgacgatccagattagatcgggcgtaccgtttccacacgttagatccaaaccgtagagctataatctaatgggtgagaatcgacctcggctatttagaatttggaccgtagatctctaatccagtggcctgcgcggcataccgcttcgcccatttggcgatctaatctgtaccatccatcgtggatcggacggtgcagatccactgaaacccgtcagccgcgtcagttttgcacatgagtccttcagttatttaagaatcaacccgccatccacaggaactattcactgtgtctggggaattcttacccgagaccccctgcacttcccagaaatctgcgcccagtccagataattaataaaaccagaaaaatagtttagaaaatagttttag

SEQ ID NO: 114804 - DNA, 474 bp, Zea Mays
ataaaccttatttggttgcagctttggagctaatggagaaaaatgtagttgctgtgattggcccacaatcctctggaataggccatgccatctctcaagttgtcaatgagttacatgttcctctcctatcatttgcggcgacggatccaactctctctgcatcagagtatccttacttcttaaggacaaccacaagtgattatttccaaatgaatgctgttgctagcattgttgattactatcaatggaaaagggtgactgctgtatacatcgacgacgagtatgggcgaggtggcgtctcggctctcggtgatgcgcttgcattgaagagggcacaagtttcatataaagcaactattcctccaaattcaaacacagatgtgatccgtgatgtactgtttaaagcaaacatgatggaatcaagggtcatggttgtgcatgtcaatcctgacacgggtttgagggtattttctg

SEQ ID NO: 114805 - DNA, 968 bp, Zea Mays
atatctagggatatcgatatggtcgtactgctataggggctgaaccgggcagcaacctgatgcggtggccctgtcgtctcggtggtgggagcccctgtggttccacaatgatgtccgcaaaagaggagagtagggcctgcagcagatcagtcgccgtgtctagtgctgcgcattgcgtccctggtgtgcccactccctgccatatgagatcctgaccattgtgccaaatctgcattgcgaggtctctgaagttccacaatattggtcctgagggctgaagccactgcacacctaaaatgatgtcaaatccagcaaggggtaatgtatatgctgtgagaacaaactatgtctgatcaatggagaactgaatgttgtggcaaatgccatcactgatcttgtcaccatttgcgaccttcactgatagacctggtcggctgaccacctgcagctgccacattctcttggttgaaagtgttggttgactcgaaatataccgggcaattaggggtgtgccatgaataatgacctgaagttgcctggtatttcccacagtgagtgcgtcgagtgaaattctcaattccgcagccacctcctcctcttcctctttatcatctaactccagaaagaagacccctttcgctgcacaattatggtcagcagtgtacttcttcgtgcagttatagcattcgccgctcacccctttcgcagccaattcttcttctgaagcttgatctggggtttggtgtcggcttctaggccagtgctggtgccacggattttggcggtgcaggcccaacactccctcccttgaaggatctctcctttgctgcttcattctcgcacctctcataagcccttgccagactcgtggctgtctgaagatgggtgggggcttggagctccacatctgcccgcagcggctctccaaaaattggaatgcccccatgcatatcatctgtttgctcggt

SEQ ID NO: 114806 - DNA, 390 bp, Zea Mays
tggcgacagaaaatctgcttcagataaggacatttacagtttacgagtgtgtgatgtcactgaagaaaaatctagcgttcagatatttgcacccctagaagggatggtcaacatcatagacatggatgccgatcagccgatgcaacgacggtgtttagtgcgcgcagaagaagaaagaaaccatggacactgcgtgccgtggtatttgaccacgcatacgtgcagtgcaggctgctgtgtactgattcgaattcgatttacaagttcatttcatgatatgtatttagggttcgtctctcgaagcggataactctaggagctatgaatgagcttcgagtccatcaaaactcccagcgaaagagcctgaaccacttgacagctctactcctc

SEQ ID NO: 114807 - DNA, 435 bp, Zea Mays
gttggtttgtcgataggtgcagtttttaattacgtttgttattttacactacaattggcactcaccctctcatatgccaccactttataaaaaggcaacgaacccctccaaagcaacgctgaactcctgtatcgaagtttttgatgacctgagcccgttgacttggtggattggagaaggcagcagcacatcactatctggttcttgtgttcttgctgcaatcagtcgagattcaggctgctttggatatacttgcaatccttgacaggtgattgatttgctttctttatacctgagcttcactttcatcccaacataactgatgcttgatttgctttctttatgcctgaccttcacttgcatcccaaaataactgatgctttaggtttgtcttaaatcaagccatttagggctagttttgaaactcaaatcccc

SEQ ID NO: 114808 - DNA, 808 bp, Zea Mays
gatgcggtggagatgcttagacacgcggcgcaaggccgaaaggcggcggtcaccgacgtgcatatcagaatccaccgcgacgagctgtacggtggccggaatattttactagccgtagcttatccacggcgacgtactccgagcgttaaccacttaaccagagcacgtatcgaaacggcggcgacacgaattgcggcggaggtcgtcggcggtgagatgcgcggttgatctgatcttgttcaggcactgtaccatgggattcctcattgagttggcgtgacagatcatctttgagctcaattttctcccaaattcatatggcaacataaccaatgccctgcagcaaagttgtagccctaccaaccatcttcatctttgttatagcctccctagatagattctcactggatcatggtcgaaatggctctcaaacatggttctaggccactgtcagtgtgaaattcagactttaacagcctgacaaccagacattagacctaattatctccaatttcttctcaataactatgcttacactcttaagcaaagttgttctccttttatagagctacaaaattgatgtggtgacttagggcaaaatcccttctgtttgaaagttacaaggtcacaaagatgagcacatcacactgaaattcagacttagtcaaaagagttcaaatgtggctcttttgcaattaagtccaaaactcagggttcaagttgcaaatcttcataattgtgaaccacataacttaaaacaccttactttactagtttttgcactttagtccaaaagtgcactaatttt

SEQ ID NO: 114809 - DNA, 522 bp, Zea Mays
gctccctcaaccttgtgcttgattgtagcggcgagcttgtgaaggcaccgcttgagggcggcgacatggctcttaaggcatctcttctccaccttactcgtagcggtggtgaagcgtgtgggtcctcccatgcttgccttaacaagcgtgtcagaatcaacgaggcggagctcgtcggtggcggtggcgaggaagtcaagggagccaaaggtgatgcggctcccaggcgtgaaggtctcgctaccggagaaagcgaatgactaagccatcagagtgtaaagagtcgcttggcacgctaacagcccccacctggcgtgccaactcacaccaactatcgtggtttccaaaaccaaggagacaataaaatttgtgttcggtgggaggctagcatggactcactctaaatggtgaatcaagagactgaaacatggggtttatactagttcaggcttgcaccctagtctagtgtagtgttgatcatagtattgccctaaggaacatgttacagtgggtgcaagtgtg

SEQ ID NO: 114810 - DNA, 312 bp, Zea Mays
gcccatgagattataaagaagagcgaaaaaggtactcatgacgttagggaagcaatgaaggcagctgaaaaagctgcggaactcgaaaggcggataggtattgcttaatgggttttaactttattgtttatttttgtgacttcgaactgatttacgttttctaccgcagccgaactgtctcctcccctagagaccttcaagtcattggtcgacccagaggcaaaggaatcagcagaaattattaacatggctgaaaggattatggacgaagtcgttactcaactgctgaccgaagctgcagacaaagttttg

SEQ ID NO: 114811 - DNA, 512 bp, Zea Mays
acgataagctatatgttcgaccagtagaggatatattgtctagccaaccaacatttacaagtgtcatgattatttcatgacatgttgtaatttaacatgttctaatttttatctagtgtttatatgtagtattgagcaatgcattgatctttatatgttgcttgcgacaaggtcaatgagataaatatggttgtttagcgtatttaatttctaacttgatgtgctcgtaggcactctagtattaatagtgctcgagttttacttaacgactacttagattgtacaattttattgaggctttctttggtcataaaacacataatgtgaaattggcatttaaaagacccgtaaacctaaagattcttctcacgtaaatgttacatggcacacatactgagttgtcacttcattctctcagtggaagattcttctcaacaaacctttacgtctggatttctaagaggtattaaatttgtacatcttgaagatagatgatgagcggtgcactgacg

SEQ ID NO: 114812 - DNA, 285 bp, Zea Mays
gcttccatgaccgatcttcggcatcatcgttgtcactctcaacatcaaaatcctcactgtcactagaatctcctgacaacctagctaaaattttatcagtaatcttttcaacattggtcctttctatagcttcgtaaaaaccagctagtgcagggtcctcacttctcttgtcttcgaccatctcggcgttgattgaaatgaaaagccgaagctccaaagcaatcgtggttatagaatccgcaagctaaacaacaaacccaacacaagcttgatagcacggaaaat

SEQ ID NO: 114813 - DNA, 377 bp, Zea Mays
aagtcgcctaagggtgcagccggactagcacaacaagggcgaaaaatcgaagtcttccgcgaagactatccgcgcagaagtcgcctacgggtgcagccggactagcacaacaagtgcgaaaaatcaaagtcttccgcgaagactatccgcgcagaagtcgcctacgggtgcagccggactagcacaacaagtgcgaaaagaaaccgaagtctatcgcgaagactatccgcgcagaagtcgcctaagggtgcagccggactagcactacaaaagcaaaaacgacaacaccaaactgtccacaccaagacccactatatgcgcaccagcacagcataacaaaacacaccagaggaataaagccttcgcaagcatagcca

SEQ ID NO: 114814 - DNA, 680 bp, Zea Mays
cggagtacgtcgccgtggataagctacggccagtaaaatattccagccaccgtacagagctcgccgcggtggattctgataagcacgccggtgaccgccgcctctcggccttgtgccgcatgtctatacctttccaccgcaacgccgtgacctgctctcgctctccgttgatcaccggagtaactgccacggcgtgggacacgaattcgttgcgccagtactcttcctcccctccggccgccagcactgctcggccaaattgagcaccaccgcttaagccctctataaattgaaggccgggtcagctgcgctatgttatcgcgaagccgaagcacccgttctcaccctcaattaaccaccgtagccggagaattcccttcttcccccaattcggtcgactgcgccgccgtgaatcgcctactcgcggctagctgattccatgtccgtcctcgcccttgttgttcgtgttttagcacccacatgtgcttgtgatcgtcacctgcccagcccttggagcttgacttcacctaatcaaccggaacacctcgatctgagttcagtatccacagtcaccgtggtcaggcacatcctggcccgaattagtccaattagagcatgttctagggtcaccttgggtcggttatgcctcccatgtagctagactaggcgaccaccgccgg

SEQ ID NO: 114815 - DNA, 467 bp, Zea Mays
agaatgttggcgatactttgatgagcagaaatgaaatggtttcttttcttttacgagatttatatgtgaatattgtctagtcagtatcgcaatctgctgaacttttcatgctcaccgtcgagttgtgttatcgagaatctcacacttgttgcgcacttgcaatagtccaggactagatacatttttgggcaaacacaaatcgcccctgtatctttaaaatgaggattatttatccgggctataaaacatcgtcggcgtctcttcggttaccatcattttttctgcgtgtttgagggggtaataaataaaaacactgcatttttctctgggcagtttctgttgtaggtcaggtcctgtgaacagaagttgacatatatgaattgcttctgctgtccctgtccttgtcctcgttttccaactctagtaagtacttgcctacctggtgtggtgtgggaaacattctcaag

SEQ ID NO: 114816 - DNA, 738 bp, Zea Mays
aatggacttacattcgacgactcctggtgaaaggacgacggctgtgatggaggaacagcgaggatagagcttgtcgcggcgaggatagagctagtcgtggctgtgacgcgccaacgatgatgaagacgcaggcggaggagcgcaaccgcgttggagcaggcacgggtcggggatctgagagacgacgatagatgtggagatgagatgcgtgcgtggggagctgagaccagaggccaggcaactgtcacgtggggccgaccggacgagcgtggagcgagcattctgcacatccgtgatagagaagcgttggcgtggtgcactggtgtgtgtacgtgtcggcaggtgagaggaccgtcgtgcggaatgcggagagaggctgaaacacaagcatcttttaagactttagattaattccacgtcaagccgaaatgcaagtgatcgaatacaagttcagggccgtatcatgtaaaccaaccaacaacacatactcaaggtgttctatgtgcgtgtgttttaataattccaatgcaatcatttttggtatcactcagaactgcaaactgcaaagcttccttgaaaaaattctcatactagccacgccccattccctcgccgcacgtgcctcaaatctcaccgctcccagctccgatttcttcctagtgtgttggttgtcgttgcaccgagagacatcgcgccaccaccgaggtatgtagcttagttagtttgtatatagtttag

SEQ ID NO: 114817 - DNA, 812 bp, Zea Mays
atcgcggagcactacacttcatgtttgagacgggacactttccaaacttgctacaggatgtgctgcatgcgttgggaaccaatgtttgacctctctatgacacaaggcgggtgtctaagccccctcgggcttgttactacatcactcgcgtgcatatcagagtgttggatgtaggagatagaggcttcaaggctctatcatctcatgagtctctgactccgctatccacctacgctgctttggtcagcaatgctactcggagagctccgtggtccctcaaccacacctatcggcgtacagtcaccttcccctatgttcgcgtggtgaaagccagacaagtgtggttccaggtgaagctatagaagatcgcctcaacacccttgtaggtgtggtggcaggtcttaacactgatctggacagtgctacccaagatctctcaagggtacatgaagatcttgaagacacacatgcaaggattgcagcccttgaagctcaactcgaaggaaggaatccacccgaagctcaagtccttaccatagctgtatccccgcgtcgtaagaggattcgctatggagccccaggatctattaccacactactttagagttttataagtcataatgtaataagtttgattttgcgttagacaaggaaactctttatgatgatgttattataataacaacaatgtgatggtgatgtttgcataatggatgatttggatttttgcttgagtgcaatgatcttatggaatgatggccataagaacattaaaaaaatttaacaaataagcttaactttagttcaaaaac

SEQ ID NO: 114818 - DNA, 556 bp, Zea Mays
tgtgaattgcgaaaggttgcccgatcgaggggaaaacttctggcaggctttgcacgacctcgtgactcgattcgcggcgcagatcatagcgggctagtagaagccttgacggatcaccttggcagcgagggccctaggccccgcgtgagagccgcaagttccgctgtggacttcacgcaggatttggacgccttcggtctcggtgacgcatttaagcatgggttggctgacccccttcttgtaaagctggccctcaatgagtgcgaagtctcggctttggtgtttgaggcgcttggcctcgttgatgtcgcttggatggtaatatccctgcaggaacagggtgattggcgctcgccagtcttcggtcatgatgaggttgactatgcggtggccttcggtgtcgttggttatttgtaggccctctgggctgcggatggctggcgtgccgatgacatggtacaacacgtcggagggcaaggcctcacctctggctgctgctttggccaatgcattggcctcctcgttcttggctcggtccacatgctgcaaggtaaag

SEQ ID NO: 114819 - DNA, 459 bp, Zea Mays
gcgtccagtgggtcttccgtcttggtgagcagcagcggttgagtgctcaagaattcctgatacgtagctgcacccggtgggcattactgctgccctccaccaaactgctgagggtagggttggcgttgcatcagctgtcgcaggatctcattctgttgagccattagttcctgcatcgtcggagctgggggaggtggtgggggaacttgcttgttttgtccgcgacaaggtctagctgccatctgaaaacagaaattccattgttgttactccgacccaagatttcaagggacttcatatcatatgaggagaataaggacacaaaattatatcgaaccaaacgaagataatcactcattcattgcattattcatataggtctttccgggttacaacaaattaggagatccaccctatagcgtagttcaaaagttggtgccaaaagctaagcttatgtgg

SEQ ID NO: 114820 - DNA, 602 bp, Zea Mays
ggggccaacctttgaaccccttatcaataacgggctcggagcccatatgtcctgaggcagtttcccgaaccccgtcgagggcccgaacatcgaacccctaaacagtactctgctttccttctcctttccaaaggaggatgcctgaggcaggggacgctctcttctcgttatctgcaaggagatggaaaggaaaggagagagggagagaaaggcataccttttgaggcgaaagctgactgtgttatttccatcggaagcacatgtatttaatgtgatgggatgtctttgcctgcaagccgaccattgtggcgcgcatgcgcgtgggattcgaagcaacctagcctactttgactcggaacggattggccaacgtctcggtgactacgcatgtccctataaattcacccgagaggagatcttcggttctttactttctcgcttcgccttcctactctagacgccttctgcctcagctgcaaaagtgcacattgcctccttctcgtctccctccttaaccccgatggccaaaaaattaagcgttcttcctccccgcgacccatggcccatatcctccatcatcgacgaggctctggaagcattgg

SEQ ID NO: 114821 - DNA, 2854 bp, Zea Mays
ccgatccgcctccgccgccgtctcccctgcccaggcgccggaagtccacctcgggctccagcatatccgcgatgcatctggacggcgtcgacgacgagctcggaggcggcagctgcgccccctcccccgcgcgctttgagctccaagaggatccttccttctggaaggacaacaatgtgcaggtagagttttatccgcctcaatgcgagttgcctcctccggacctccccttccactcagccatcgtttctctcccctagctggagtgctctagtctaagctcgcgcgggactgcgcccgttagcatttcatcgagcacatctatgtttctagtcgtttaactgctccaatctacaggttgcgatccgtatccggccgctgagcggcagtgaggtgtcgatgcaggggcagaagcggtgcgtcaggcaggatagtagccagagccttacctggattggacaccccgagtccaggttcactttcgatcttgtcgctgacgaacatgtcacgcaggtgcttttgctgctctcgattctcagtttagcattcgtccctctttccatctgctgacttattttcgtgctaactgtgcaaaatgcgtaacttcaggagggcatgttcaatgttgccggggtgcccatggtggagaactgcatagctggctataacagctgcatgtttgcttacgggcaggtaaactgcaggtttcacttgctagtcgctgctgtaaatactcaagttttaagattgcattattctgttattacaaaattatctgcttctgctagactggaagcggaaaaacacatacaatgcttggtgacatagaaaatggaacacggaggaacaatgtgaattgtggtataactcctcgagtgtttgagcatctctttgtaaggatccaaaaggcaagtctcgaagatctgttgctttctagacgcctaattttgggcttttggctgacatgacatgttactgttcttagctaaatgtactccttacggtttgcaggaaaaagaattaaggagagatgaaaagctcatgtttacttgtaaatgctcatttttggagatttataatgagcagattctggatctgctcaacccaaattctgtaaacttgcaggtaattcatgcacggattttgtagttgtacatatatttgcatgccttgttgtagttatacctcgtgttaatttaatggtccctgcttttttctttgttgcatctttttatgtgctgttagcaaatgtctatatttcgagatatacattattcatatcattagctgattagctctagtttgattctttcagataagggaggatgccagaaagggtatacatgttgagaatttgacggaacatgaaatctccaatgctcgagaagcgctgcaacaacttattgaggttgtttgatggaataatttcattttattctgtattttatgctgaggtttgtctctagttgggattgttggaagcttgaatcccttttgcctgttcaaacagaatcgagtttgcacaattgtctggttcctaagtttaagattcagtacatgactgaccttaatatacattcttcatttctttccagggagcagcaaacagaaaggtagcagccaccaatatgaaccgagcaagtagccgctctcatagtgttttcacctgccttatagaaagtaaggtacatgaaagatgaaacacatattctccagagttgttactggtttgtaataagatctcattgtggttctctagtttcaaggtgtcatagtggtattatatattcaaccttattattgttcgttatgacgcacacatattgcccttactttctcttgaaattaattattcagtgggagtcacaaggtatcaagcaccaccgcttttctcgactcaaccttgttgaccttgcgggctcagagaggtaacttgcataagtaacatcacatataatcatctgatatgactataatggaattttagtgcggccacttttcaatgtctttcactctcctgtttagcacgcatgacttctgccttgcaggcaaaagagctcaggtgctgaaggggagcgattgaaggaagctaccaacatcaacaaatcactatcaactttggggttagttgattattttctaataataccacaaactgtggaaaatcttttgaaatttgttataaacttagtatgtgagtcagattaaagtcatagcatgacatattttgtaactattttggtcaatggcatcattgcagacttgtcattacgaacctaattgctgtgtcaaacaaaaagtcacagcatgttccatacagagattcaaaattaacattcctcctccaggtaatatcagcaactgatgcagtaaagttgctcatgttgtaacttggcatctaaggagctattatatgattgcaaaatttttagatgtgagtttacattctctttgctgataaaagatttggtatgcctttcactgctttccaggattcccttggaggaaattcaaaaacgaccataattgcaaacataagcccatccagctggtagactcctaatcatgattgttctattcaactaccctttttattttgaagcttccattccattttgaaagttacacatttgatatttctcgctttctatccagttgtgctgctgagacattaagcacattgaaattcgcgcaacgagctaaatatataaggaataatgtaagtaacctgcacacatttagaataccaccttttttgtgcaagcgtcggccgtcagctgactattactttttgtaggctataattaatgaggatgcttctggtgatgttcttagcatgcgtttacagatccag

SEQ ID NO: 114822 - DNA, 636 bp, Zea Mays
tcacgcattggaggatattatcccagaaggccttatattggaacttcctaaaactaggggtgctagcatccgtgtagaagtcctagatgacattcccttagctagcaatcttatatggcaagaaataacctggacagttttccatgcttcttcgacctttgagggcggcctgatccatggggacacctcggttcctgctatcacatgcgagggttatcctgctccggagggtacgattgaggacaattcagcccccgagggcgctgctgagggtgattcagcccccaagggtgttgctgagggtgacccagcccccgagggtgctgctgaaggtgatctagtccctgagggtcctgagctcggctcttcttcggctacttctatggatgttcatgtcggatcaccactagctaagtctgaagaaccagcgggaacaagccttgatcttcctactgctcttgttggcccggtcactttacgggtcagtgacccgggcattgaggatccgcttcacgttgttggagctgaggtcccactaggtgttgccttgggcatgagctttaatcctcctctagggctcaaatctgctctcgatattgcttctaccagtgttccgctgtttgatggcacctcggc

SEQ ID NO: 114823 - DNA, 772 bp, Zea Mays
gtcggatgacagagagcagtcaaagacggatcactatcgatcctacgcccgcgtagactccatgcgccggcccaaaatcgtctcttgcgttgggtatggcctggcgagaagaggagcgtcgatctgcaaacgaagccaacaacaggcacaactagtggattggtggtgagccgaacaaaaacaggccttgcattgcgtccttggttgggatgggccagacactctgtacttgagtggccaatctgctcgttcacttccgaaagggagtcacacgccaacaaatcacgaaaacaacggtgccatggctctttctcacgcctagccagcacctcaacacaccttccttcctagcttccacgccatcgctttaggtcgagctcgcccccgctgtcaccctccaggagctcggcacctccaggtgttcatgtgcttcgccatgctctacgagtaaacgctcgaacttgtcgtactagctcctctttcactggaatccgcccccttccctatcatccgccaccgactgtggttgtgaacacataaatagagagggttaggagacattcttttgtcttggctcggtggagatctctggtctgtcgctgggatatcgatgtcgtcgtcttgtagaggagagacgatctgagccatcattaatgtgtcgctcttccagccacttgcgaacgccaggctatggggcctctgtcgattagggtttagggcaaggtgttgagcaccaaagttgactgagcgggtccgtggtagtggcgcggac

SEQ ID NO: 114824 - DNA, 515 bp, Zea Mays
taccactccaccgcggtggatactcttttttattcgctgacgtcatgatgacgtaacaatggcgtcattcgtttctttccctgtatggtcgccatgtgggaccgcctggcaggtctccatcgcattgtcgtgtgctccgctgggttctcggtgtctcgtgagtggggccaagatgtcgggttgtcggtcctagaatatcgctgcaagaagccgagttgttgcaaagccggccatcgcgctaacagtgggacccatgatccagaagcttcttctccaaagatagttgcgagtggatcaaccgggtcgtgccgaagtcgccgttattgtttcccttccctgactcggactctgcctcctcgtatataaataccgacctcgggatcacctctattcaccaacccagggatatccgtaccccaaaactaccgtaacgaacttgtcgccaggcatatgagagagagcacggagagaagaggacctccactgtgatcaaccacgagccgccacctccaatc

SEQ ID NO: 114825 - DNA, 435 bp, Zea Mays
ctcacacacacccatatacccaatcccatggttaagtaccctactccagggttaagaagcacatcaagtctggtcatcacacttactttgaagtttgagcctagtggatgcattctaggtgtaacaaacataatgaaatgtcaatgcatatgatgtcatgcccaaattttagttcttgaacaccaggcctggatgacatccctttagctagtaatccagtcgggcaagaaataacccgaacggtttctcacactccttcgacctttaagggtggcctagttcatggggatgcgttggatcttgacgtggcagtctagggttacccgactcctatgggtacggttgagggtgcttcagccctcgagggtgccactgaaggcaacccagcccccgagggtgctaccgaggatggcccaacccctgagggtgccgagc

SEQ ID NO: 114826 - DNA, 293 bp, Zea Mays
ctccgacctagccaatccccagggctaggatcctctgcccttccccgatgcagcttcgttcctacctcgtcctcccattgccgagcccatctatgcaattctgtcagtgcagctgcagggtctggccacgggcgccttggccacgaacgactctcgacggctcttccagcagctatgtgtaagatctagaacatcggctagagggggtgaataaatggttttgactaaaatcaaagacactagagaaatttaatcaatatgataagagattcaacaagtaagcaatttatgag

SEQ ID NO: 114827 - DNA, 362 bp, Zea Mays
atttttatcaccttattccatgtaactcgagttaaagtatccaaaatcttgattgggtactccgtataagtcaactcaccttgaacactgagctcttccattggtaactgttcctcagggacacggagacacttcttcagctgagatacgtggaacacattatgcacatccgatagactatcaggtagctcgagttggtatgccatctccccaactcgcctaaagatcaagaatggtccaatatagcgaggggacaatttgcccttaactttgaatctcctcattccacgaagtggtgacaccttgaggtacacataatctccttcctcaaattccagtggtcttcttctattatcagcata

SEQ ID NO: 114828 - DNA, 353 bp, Zea Mays
agctaccttcggctcagggctcgattttctccttttcagaatttcttcatcttcttttaccattctagcagcttgcctgctcagaacactaacaatccttttccttttttgtccttcggcacccttgttcaatcgctcataatcgggatattcgaagtttagggcatccatcacacgattcaaccttcgcttcggccgggtgccgaaggctgcagtcatcagctgatcttctttttagtgtaattttccaaaattttgttgcacatggtttctatcatttctaaccattcttgacatggccctttgaactgtttctcgaatttgaacttataaggtagtcgcacaagttcctt

SEQ ID NO: 114829 - DNA, 524 bp, Zea Mays
taagttatgataataaattcaatataaagaagtatgtttcctatgattgatcaaaaatgttaaaaaggtgcatattcctcttttctaatgatgtgcactaatgttgaggattttacatcatgtctatgtgacttgtggatgatgaattgtttatatttctcatataaagaaatcatccttcatcatatactcccttgtgctattaacatatttcttgagtattttcaataagtttggaaggaaaaagagacaactacaaagggaggacactcaaatgaaaaaggaagacatcaagaacaacaacacctacttggacagtaagatcttcaaaacaatcaatggtgtggttgtaagcattctaaatcttttttgtgaggataccaggcatatgttgtttattgcaaattttataagccttgatcaagatatatgatgcttctccctatttgtcttttaaggtgagtgcatctatccaattcattcaaatacttgatgcatatctttagggggggcctatttctata

SEQ ID NO: 114830 - DNA, 573 bp, Zea Mays
catctttaggatttgctctatttaaattgcgaaaatcaatgcatactctaagcatacctgactccttcttctccaccgacacaatattggagacccattctgcgtatctgcaaggtctaataaaatcagcttctagtagctggtggatttcgtccttaattcatgggagaagatctggacgaaatgttctagctttctgcttgaaaggtctgaaaccggacttaataggcagccgatgctctacgatctctcggcttaatccaggcatctcagtgtaattccaagcaaagcaatctgaatattcctttaatagaccgatcatctcatttctaggatcggtctctagggtcttgtttacaaaagtcggcctttgagttttaccatctcctatgtcaatatcctccaaaggatcagccgatgtaaacccctgtcctagtttatcaaaatctctgaattcctctattatgtcccctatagaggaaccagatgatctttgtgtgatggtgggctttccggtctcggggacagaatcatccgtaacactgtctttacgctgcgatagatgttcggtct

SEQ ID NO: 114831 - DNA, 473 bp, Zea Mays
gtgaattcaaagttcaaacatgaattcaaatttagtttggaatccaaaaataggggaaaggggaatagaaaataaaatgaaaaggatatagggcgtagcctcggtttgggccaaattctagccccggcccatcacctcttttccttctctccaccgcgccccctggtttcgtttttccctcggcccaactcccaccctaccccgccagctcacttatgcgccctactttacttctctgccatgtggaccgcaaatgtcagtctcatggctgcccgcgtgtggaggactactgcctaggcccgcgctccatccttccttccacgcgcgttggttcgctctgctttcgctgtcactgggcctatgttgtcatctctttcctcccctccccataccggatcccgaattcaccgctgccgcacccaggtccggctatggaattcccgggattccgtaacaacctgggcgcccaatcg

SEQ ID NO: 114832 - DNA, 575 bp, Zea Mays
atcaagattggttataaggtggaagttccattcaagattggagagtatgttgacaatggagtgcgatgttacaccgatgtttgtgtgtcacttgctgttgggaatactttggcaatatgaccgatattctcagcattgtggaagaacaaacaatacacgctagatctgaaagggagaaagtttgtactcaaacctatgacccctcaacaaatcatggctgaacacttacaaaagaaaactgaaattagtgcagcaagtagaggaggagaagagcaaaagaaattcagtgccatccacaatttggtgagtgagtgctacaagccaaattcaagagataaaaagaaagaagtgggagaacatctagttatgctaaccacaaaatctaagctgagagaagtgaggaacaaccaaaaccaagtgctctttgtacttgtgagcaaagatgatttgatttctcctaacgacataacatctcttcctagtgttgtggttgatcttctgcaggactatgaagatgtgtttccacaagaaacaccacctggactacctccaattcgtgggattgagcatcaaat

SEQ ID NO: 114833 - DNA, 449 bp, Zea Mays
acgcacctgacatccgaaaccaccagcgatagctcagcacgggagcaccggattttccttgagatagtgaaggctgtttgctactagttaggagataagtagggagatcacaatcaacacttgtgtgggaaagccccctgtggtcatgaatataaggctaagggggaccccctccatttatatatcatcagcatcccagcagtttagtgatcacgacctgtcttgaatataaggctaagggggaccccctccatttatatatcatcagcatcccaacagtttagtgatcacgacctgtaaccccatccttatacagagagacaccccaggaagtagggtattacactcctcaaagcggctcgaacctgctgaaattcacttgttcctctcttgtgccaaagcacgaaccatcgagtcacaatcaacgacaccgtcgtacccaaaagcac

SEQ ID NO: 114834 - DNA, 592 bp, Zea Mays
gatggggcttgtatcaaagactttgcccctgctgtagctgctagtgttgggaagagggctgtttcctctagaacggtggcccaggctcttgaaaactgacagtgggtcagtgacatcgagacccctttttctttggttgggttgcagcagtacctgcatttatgggacgctataggagtggtacttacacaagaggctgatagacatgtgtggatccatacttcctctgggcagttctattctaagtcttgctataaggctttgttcatgggttcagttaactttgaatcatggaataggttatggaagtcttgggctccacccacatgtattttttttctatggctggcaataaggaatagatgttggacaactgatagactacagaagagagggttggatcacccagaggtctgtcctttatgtgaccaggagccggaaaatatccaacatctcctgtacacttgcatttttgctagacagttttggcattgcattctatcgccgatggggcttgttaatctttctcctgctattaatgagatcttttgctgagtggtggaggaaggtgtgtaagcaagtgcacaaaact

SEQ ID NO: 114835 - DNA, 599 bp, Zea Mays
ttggcaaaagagcttcggtggacagacaaggtcttgatgacccctcttatgaaaaaactggcaaaaaggctagaaatgtaggagaaaagtctgtcaaagaacagatgaggctcgaaaacattggagatatgatgtctcaaggcaaatcttctggccggggacctaaattaggtgacaacaatgaggatttgaacccgatttctgaagatcctataaatgaagatgaagagtttcatgaaagtgaagatgacctcttaagttctcaagatttggaggaatttgccaaagatgatgagggggttatacctccttgccaaggaaaaatcagcaagtctcctttgggtgctcaagctaaaggttctggaaaaattgaagctgaaaaacaagttgtgagtatggaagtggagcatggtgaaggcattaggagaagcaacagacttgaagctaatgatgatatgaagattgttgataaagctgcggcgagagctatggctaaagatgctttcatgaataaaggtatgaactctaatcctttttctgttcttaatactaaaaatcatgtgcttatgtctattgcttcagatttaggaatagattta

SEQ ID NO: 114836 - DNA, 530 bp, Zea Mays
ccaacaaccaaggtttgaacctccacttatgcacaattttacattatttgtgcataaagtgggaaggagatgatgttgtggaaccatggaaagtggtgctttatatagtagagatattggaagaaattttacattattttgtgcataaaacgggaaggggacgacatcgaggaaccatggaaattggtgctttatatagtagagattgggttgaaaagttttaatcgcctattcaccccctctaggtgacacccaaggtccttgagtacctcgaaggtacttttagaatgtccctttagtacttaagtaacttatatttcatagggataagttatggatcattctcacaggaactcaaatgtttagcaatctgaatactataatgcatcattaagtgagatgttagataatacacaccaaagagcacacatgttgaatcataaaatagtttgagaaatatcaagatcttttcagaagcatactaatggccatcagttagcaacaaagtctcacatatcgctctagggtag

SEQ ID NO: 114837 - DNA, 408 bp, Zea Mays
atttcttcggaatgatgtttcttctatatgatctaagatcctttcggtgaatttcttcaatgtgcgacgatctttggttttatcatgtccttccatgtgataaacgtaggggttttcaaggaatttttgaagcttgggctaccattgccttaggtaagtttcatcacttattacatcatgtttttagcttattggaacatggcggccatagatgttggaaacttccttgttagctcaagagatagactatgatccaaaaggtttttcttaaaaatccttatagcaatttttttctggaacatcgggagtattggccatctcgtcgcgtcattttctaatgtagctacgttggaactttgcctctccctagcctatttgctctaggcggtgttgagttattgcctgact

SEQ ID NO: 114838 - DNA, 293 bp, Zea Mays
cggagaagagatacgaagcgtcacaagtcacgcaccgtgtggcacgtagtgctgccataatcgatgagcatgatgagcgccatcgccacaaacgtcgtggcggagaagagagacgaagcgtcacaagtcattgctagcggctaggagaagtgcttcctcgggagtgaggagctacaaagccgtcgcgtgcttgcgacgggtccttggcgagcattttattgtagcctattcaaagctgagcgtgtactgtttcgccagagctaggccagttgggaacgagatagagatggttg

SEQ ID NO: 114839 - DNA, 668 bp, Zea Mays
gtttccgtcaggacagtaagggagttctatggtttgaagatcgattggttgttcctaagaatctcgaactcaggaagaaaatattagataaagctcatctttccaaattttccatgcaccccggcagtaacaagatgtatcatgatctcagatctttgtattggtggaccaggatgaagagagaaattgctaagtatatatctgaatgcgacacttgccaaagagtcaaggccagtcatttgaaggtagcaggtaccttacaaccccttcccataccatcttggaaatgggaggatgtttgcatggattttattgtgggtttacccaacacatcccgacaccacgattctatttgggtcattgtggataggttaaccaagacagctcatttcttgccggtacataccacccacagggcggagaagtatgcagaaatttatattgaccagatagtgcgtttgcatggaataccaaggactatcgtgtcagacagaggagcaccattcgtagcacatttctgggagcagttgcaagagtcactcagaacccatgtgataagaagctcagcgtaccatcctcagacagatggtcagacagaaagggtaaatcagattttggaagacatgttgagggcatgtgtgctgcactatgggaagaattgggataag

SEQ ID NO: 114840 - DNA, 290 bp, Zea Mays
gaagtagcggcctctagtgcttccgtccgaccgtccgcttgcgctctttggggtggaggtgtttttggcgtcgtgtgtttttgtgacaatgctaatctttagttcaatgttgttttattataatcgagaaccaacataaattgtctagcacacaagatcgcgatgtttttagtcataattgatatggattcttgactaggtcattatttacaactaataatttatatttactcaaattcaaatagagcacgtctggaaggttgacaacttgatacttgcccatatcctta

SEQ ID NO: 114841 - DNA, 419 bp, Zea Mays
ctggagtgtatgttaggttgggaggttaagatatctaccccatggctgaacaagatctatttataaagttccaagagacaactagtcgttgctccctttactaatgagaaaacgggtttgttggaccatagaacacctgccatcggaccaaagctcattagtccgatgactccagattttgccacatgtattagctatttgaatgttaccattatcgcactaacagctataacaccatatggtaagatgactagattgtgacgatgacgatcgttggactaacatggaccagagtccaacactacgtagaaagtgactagataactcctaactgtgtcaggagggttccacggtcctcatcaacccaacgcttagggtctaacaaccctatatgaattttcatgtgcacctagtaagtg

SEQ ID NO: 114842 - DNA, 814 bp, Zea Mays
gtggcactgttagtgaactcgatcccattatcggtctgaaaacagcgcacagaagagctgaattgtgtgttagcgtaagcagtgaactaaacgatatgctcatgagcctcagatttatggcgcagggggaatgtccaacaaaaatgagtaaaatcatcaactatcacaagataatatttatagcctgaaatactcaaaactggagaggtccagacatcacaatgaacgagttcaaagggtgcagaagtattagaaacaaaactagcaaagggcagcctagcgtgtttgcctagctggcaggcatggccaatgcggcgagctgctttattacactgtatagctgaaagcttatttagggtttgaacgacggctggcgctggatgaccgaggcgagcatgccacaactccggagtaacgacagcaacatggcagcgaggcagcagacgatgtggaatggtgtagagatcctcgttgctattgcaccaaagaaggaccgttttggtttggagatccttaacagaaaaaccagaagcgtcaaactcaatagaacagttattgtcgcgagtaagttgtcgaacagatagcaaattgcgagcaagttgaggagcgacaagaacattattaagatgaaagtagcgatcagctataggtaagaaagatgtgccacggccagatgaagggatggactgcccgttaccgttaccgaccgtaatggagcacggtggggaaggaaaacgggagaggagtataccgtcgttggaggacatgtgggatgtcgctccgctgtccataacccaggaagaggagtcctgca

SEQ ID NO: 114843 - DNA, 593 bp, Zea Mays
tgaagtttgagcctataccggtggttgtggtaaggcccacgcagctggagagtgacttgccgaagccactgaaactgtaggttgtgaaaatggctattgattgcccacatactctagaatgtatggggaataacatgaagtagtatgtaggacttgcttcgtctgattctgtcgtgcttcggcctcagctatctccttttgcttaggtcacgacggatgaagcaaaggcagcggcagcggagaaaatgtgtgagcttttacttgctcatgaaaatgccctcgctacgggacgttgcacggatgcccttctcccggaaaggagcaccgaacttcgagactctatctggttgtcgacatagtgtgcgttcatctctctcctccaccgtcgacaaagacacatctggttgattacctgtgggtgctgccagaccgtttggcactcgccatcgccgatgacatttgtcgagggggtggcatcgcccctggctggatggtctctcattttgatgagatcgacgacgacgttatcgtagagggctacgctgccggccggagcgatgaggaggtagacattatcgaagagtaggtccgcc

SEQ ID NO: 114844 - DNA, 875 bp, Zea Mays
gaatgtgaaaaatcagcactgaaaactcgacaataaggggaaatctgacaaactagatccccacgggcatccaaaacccgagacaagccctttttaaagtgcacttcaaaatcatcctcgaggagttgtgaaactgaaagcaaattaaaatgcaagttcgaaaccaaagcaacatccttgagaacaaaactctcattcactcgaacggggccacgagagattaccttacctctcgacttatccccgaatgtgatgtattccttaccaatcacggggtcgaggctggagaaccatttagaacttccggtcatgtggcgtgaacagctggaatccatgagccacgtgttctccaggcctccgtcctgcatcaatagtaagacacggggtgagcaaatggtacatcactggggttaggatactgatagggaaaccagtgctgcgacatttgcccatgataagtgttaggaaaaccaccaaacatccccggtcccatggggggatagagatcaccacaagaaggaaactgtggtccgctagagaaggtggaaccaaaaccactgccacggggtccttggccatatggcacacgaccagcaccccgccgagcacgaccaccacatggtctctcctcctgaggcctagcagcaagaggcaaagcacctctaggcctcgcaggacatctctaaacaggctgagcacgaacaccaagagaggggcggttcatgttcttcctgctcgactcagaaacccgccgctcatctctcttcctcctaaagcaaaaagaagccagatgcccatccctctcataatactcacaatggtacctcacctctctcttgggtggattttgtttgtggaagggggctttctttttg

SEQ ID NO: 114845 - DNA, 354 bp, Zea Mays
gaaaatttgagcaattcattatgaaagaagaagaaagtgtatctgatatgttcaaccggttaaatgagatagtgaatgagctcaagggacttggttttgatgtaccgaatgtggatttcactcataagttccttagatcccttccggagaagtatgagactattgtgaccatgctagtaagaagtgatttatctacaacttctccaaccgaagtattgggagaaattcttactcaagatgtattcaagaaatctcaagctgatgctataagtttgacaaagaaagtgaagaatgaatcaatcgctctcaaagttaaagcttctaaggcaattgaaaaagaagatagtgatgatg

SEQ ID NO: 114846 - DNA, 400 bp, Zea Mays
atcaaaatatcatccctcctacccccgtcaaaccctaatgtgagtaaatcaaatgacctccagtcccttagacaataggtagatctataagggaatcagttgcaacaacgcattggtggggatcaaagacatgcttaagaaactcacacgcacgatagaaaaatatgtcgtgtctaattttccatcacacggggtcgcgattgagtcaacctcactgaaagcattggttgcaaatgggtctatacaaaccaagccgttatacgatattgccgatgaatacattctcgacacaaccacaaccctctcaaccaatttgggaccaacctacgaatctgcgcacgaccagatcatctgggccaaagctcggaccgttcggcccagcggcggttggctcctgtcg

SEQ ID NO: 114847 - DNA, 362 bp, Zea Mays
ggaaggctgccctccaaagtcgatgatgcacgagacaccgctcgggttacctcttgcccagcggaatcgagcaaggaaagcccaccgtctgggacctctgaatagacgcccgagatatcatcttcaggaggctctaatagcatgtcttcggggacgacctcctccagtacttgatcaaaatatgatattcatagcccctgaagactcacaagggccgacagagctggagagggaatatcactacccccctcgctacctctatagtgccggctgttcttgcggatcagcgggactttatcttcttcttcctcttcatcctcatcaaacaggcagccagcagcctgcgcatgatcacaaccctt

SEQ ID NO: 114848 - DNA, 828 bp, Zea Mays
acattggtggtagcgcctctcccggaagctggtacaaccttggatattcagaggcctatcagtgttcgcccaaaacacccttgccgagccaatcaacttgatgctcctgctgatgagcagaaaaagaaaaagagacgtcttcggcgagtatctagcttggatcgggatgttggtccttcggttcctgctgctgaggaagtgcctgtgcctgaatttaccgacgctgaccccaatgggtgtgatccatctgccgctgaccccaatgggtgtgatccatctgccgctgaccccaatgggggtgctgtctgtgttgctgatgaaaacgagggggaggaagaagatgaggtctctttgactcggaagaacctcgacaatatgtagccagtggggaaagtagtggagtttcttctcctgctctgtctgccctcattggtctacaagaattatctctggcgaactttgatcagactcttgaagatatggttccagaggatctgttatcagagccagcggatggtgatgcgatggatgtttgtgctggtgtgttcgacgccgggttggggtcatcccgggcagcgtcccgcgcctcatcgaccttggagcgcggtcttgagggtcaggaaactgacttggatcgtcttgctcccatggaagtaactgagggaccttcagccttagaggcggctaccacagagaacttgggcctcaaggatggtgttgacacttacccagcccccgagggtgttgccggggatgattcggctcgggtgggaagcgtaagccgcggcccagcccccgagggtgttgccggagacgatccggctcaag

SEQ ID NO: 114849 - DNA, 499 bp, Zea Mays
aaataattgaaacctgtggtatgacatgtaaccattggccagagaagtaaacatgtaaatttagatgatcagctagcagatatcctgacgaagcgtctgggaagaatttgattcacagagctgaggagacagcttggaataatccgaattgaagattaacaagattaagggggaaaatgttgcagtagcttcactgtaatcttgcctgcatattgttagtaggtgcattagtttggctttagattgcttatgcatatttgtaattcggcgtagaatcatgggcggactgacgagtgcactcaatcctcgccgtgaccgcttcaaagggcgttctttccgctgcgacggctcgccgtgcatgtcgcagacgttgctgaaattaaggcacgtctcgcagcagctgagcgtaacggtgtagacggatccgggtgttttaattcccagttgaatgcatttgcaaaggttgcacagttgcggcaacaaaacaactgtgtcctct

SEQ ID NO: 114850 - DNA, 437 bp, Zea Mays
cgtcacggagtggaagacatcgccgaatgggtatggaaaggtctcgtcttcgactggatcggggtgatcagcgcgagctactttcctcgacgtccggaacgtgcatcagagagggggacttgcgggacctatttgagggggaagagttaaggatgatgttgtttaatttctgagaggcgggtcttattccgaaggtggagcctatgtgacattttcgttgccctcactgctcttgttgcgattgtgagtgaaaacgctgccctccccctcttcgcaatagagttgtgagggtaacagtcgtgatttgtattattgcgcaatggtgtcgttgagaccttcgtttgttgtttgtttgtgattgcgagttgtatgttgtgctattgagagttggcttggatttgtaaccgcgtttgtgccgtagggatgacttcgcggca

SEQ ID NO: 114851 - DNA, 346 bp, Zea Mays
gttcttttgtgcataacttatcttgtttcttatgtcctctctttcagaaattgttaaatgcgcctttgtatttattgacctatagcaagttcttatctcgtttctttgaccacggcaagttcttatttcttttactacatgtcctctattccaaaaagttacgtgcatgtgcaacttgcccacagatgagttcgtcagaccgtgccagctgggattcgatgacaactaaatattcattgacctatgcatcattcagaagaaccttaataacttcaatagcatgggcttaactaaatatggatggcaacaagtgtatcgcagcttcagagagcagactggtcttgat

SEQ ID NO: 114852 - DNA, 837 bp, Zea Mays
aactttgccctcctccccctgtcacatgaaaccttagtatcgcatactgttggaaataatactgtgtctaggttcatagcatttccttcagctaaatgactaaatttaagcatggagcaataggaagtaacaggctgattagttgggtaatattctgcatttcttagggcctatcacagcttgatttatagctcacattggctatggagaaaaccagaaaaggacaagtcattccagtcaccaaaacacttgcggtcgtgtgtgtgatgtagtgttcctgggacctgttggaggctttaggcctgtcacatacctcaacaatcagtggaatgatttggcaggattgggattggatgcgtagggaaataggtaaaacagtacctcagaaaggaagacttagttggggtgtcccaaaagaacggtgacctagggcaccagggaagaacagtgaccaagggcgccacagaagtgcagatctagcgttatggggaaggaggggaccggtagatagggtcatgtcgcttagaagttcctgttcttatattctgctcctctataccttcggatgggacccagacacttgtattttgggcaatttgctctccaagcccaatagcccaacctcttcctcaaacccaatagcccaaattttgcaaggttacccatggcaaacgcaactaaaatcttactccccgatgaatcgctcaaccccaagcttacggtgaggtccaggacgaggtactgaacatgttttatcattggatatgagcacatggagaatacaaatccaagtgcagaaaccatgaactaggataccaatctcatttattattgttc

SEQ ID NO: 114853 - DNA, 588 bp, Zea Mays
gcataagtcaaatcttcttgaacactaaggtcttccattggtaattgctcctcaggtaccctgagacatttcttcagctgagatacatgaaatacatcatgaacatccgcaagatgatccggtaactccaattggtatgcaacctctcccactcgccttaagattaagaagggtccaataaagcgaggggacaactttcctttgactttgaatcttctcataccccggagtggtgacaccttcaaatagacataatctccctctttaaactcaagcagtcttctccgggtgtcagcatagcttttctgtctggactgtgcagttctcaaattctcccttatttgctggacttgttcctctgcttcttggataatttcaggtccaaacaactgtctttcaccagtttgatgccaatacagtggggtcctgcactttctgccatacaaagcctcaaacggtgacatcttcaaactggcctaatagctattattataagagaactcagcgtacgacaaactcttatcccaacttccaccatgtttaagggcacaagctcttaacatatcctcaagcacctggttagtcctc

SEQ ID NO: 114854 - DNA, 454 bp, Zea Mays
ttccacttgccggagactgagacggggggaaaacgtcgtcgcgacgagctctggtgaaattggggatgcgattggggctacacagtcgcaaatttctaccgattcaccatgcacactcaatttgggaagaggtggagaggattccacgaatttgggcttcaactgagctcactggtggagatgtgaatacctcgccatggtccatggtgctatttatagggacggcggtctggctaactatccacggccacggataacatcgttaacgcatgtttaccacgtagggaagagacacactgagggagaagcaaggcatgggtgacaccgcggcggaagtgaccgagccacggcgaccgccggtgggatatctccggccacgctcaactgagttcgcgggatggtgccacgtccgtagttatctcgtcgcgatcaaatccccttcactggatcactc

SEQ ID NO: 114855 - DNA, 1436 bp, Zea Mays
catgataaaagagatgcagcaaccacaatatttttttggttcccaataataacttgaagaactctcaagtcatcttctgaatcacttgagtccctttcattatcagaagaagaagacatctgtatacatcaaaggaatgagacaacaacaaaatatcttaaaaacaaaaaccagtgaaaagggcagcaacaaaatagataacaaaaaatagggcagcaacaaaagtgatacaatccatccacaataatgtcacaacaagttcaaactggagtaaaaaggattaaacagatacatagtagcactgaaaatgggacataatgctacaaaaaattacagatcctagtgactcatcctagtgacccaatcatgtttcattgtaagccagttgaagcgttcttccggtgtatccaaagtcataaacatctccctctctgccctcttgaaaaaaacttgagatgctatgaagtgttcttttgttcctggaactgcaccacactccttcaccagtgccatggcatctctaatggagcacccattgtcctcctttcttgccaaagactcaacagatgttgtgctcttctcacttgctgtcacaagtttgctcaattgatcttgcacccaatgtcctcctaatgacctgggctttttacccttgtcctttcgaccaacagaaacatgacgctttcctttagcagttgtaggggaaacctcttcacattcttcatagtcttaatccttatcatcattggcctcatagtctccatccttgtcatcagtgttctcagtgggttcaccctccagaatttgtggtgtagtaccacttgacagagcccaatgatcatctcctgtgttcctaatatcttcatacatgatggctttttcttcctcatgcaacagaggcccatctttaaacgtggcaattcctttgtattgctacacattaggggaaagaagatgttagacaaacacaagatgcaataaagacaattatccaaagttctattaccttattcaagttcttccacctttcatttgtcgcactacaggtttttttcgcggcgtcccatcccaaaccagtttccttcgatagtcttttccaatttgtgtattcaatcttcatcttgtcccatttgttcttgaactgcattttggtgtaggacaacccagtcttttctttgaatttgtccatcacatttttgtaccctgttttatttaagtgggaaccagaacggttgtgcaccttcacttgttcggcgaacaattcacacactagagcagtgttatcttcattccaatcggcactatcacccatattgctgtaaaaaaattaaaatctaaaacaaatatatgcagctaccaaaaaggaatgtgttctaccacaggccggccacggatagcagagcggctgggacttaaacctgatgaaggttgagttt

SEQ ID NO: 114856 - DNA, 826 bp, Zea Mays
acaataagtttccattgtttggatcaagctgaaagttttgaaagacctaatcaaataggatactacagggtaaaatagaacatttaatttggtgcattacgagttactatgagttgtatggacaacgtgtatgatttattatctatgagcagtgaaatcgagagttatcagttgccattgttttggcttaaggattaaatggaaaatacacacaagagcagatgaagattcctgcaggaaacccaactatgaacatagagtaaggaaatgggtagctaggagttcccttttgttgtgtaaagaatagcttgcccccaatctcaatacccctcccggccccaaacaaggcgtagacatccgcccccatcaagccccgcgccacttcgttgccccgacattgtcccgctggagaggaaggacgacgaagaagtagcttgccccgccgacggataggaactgctattgctcaaccgtgcgggcctcgaccaacgtatgatcgactcatcattcggctatgatttatactcagttagctaggagccatttttaaattgtataccatgtactgttttgattgattcttatcatttaaggctcatgtggcaccaattgcgggagtacaaatgggcacctaatgcgcccaaatgcggcctgtgtttgactacaaactaatggagacccagctaatagaccttaaatgtttagaactcttggttagctcactaaggattgatattccgccttggcatgttgctatgttagtctcaagttactaaccccattgattatcacaagctgtgaacgaaaccgggttttattatgtgac

SEQ ID NO: 114857 - DNA, 524 bp, Zea Mays
tgcagttattcagtcaatcaccatatagtcattaacagaaacttaaccagtgcagaaaaatcacccaatagattttaaaccatctctagtagaagggtccaaaccaacataggtgccacacaagcctccaaggaaaaacttgagtacattgtgatctacctccaggagttagcctggtcccatctggctacctccaggagttagccatagcttaagcttttcctgcatgttcccatgccggctgctctttgagcctcatctctttctttcccagcctcaccaacgtgctgcgccattatgcgaatgtgtatccgaagaactttagattcaccgtcaggtgattatgcaagacaaaaaggaagaggaaggagtgcttaagaatggtaggaatgggaggcatcataaagcaccgtaggctccctcttcaaagtcagagaggagacaaacacgttggctttccatcatgttcccactcccactactcttaggccttctttctttctcttcctgactcgctaagccaa

SEQ ID NO: 114858 - DNA, 511 bp, Zea Mays
gcgccgccaggaacaatcccacgccaccactcccatccgctccgctgttttggttgtcttcccacgctgtctctgtctttcgtcacccacatctcgccatgtatagacctctgcgtcccaattaatcggtagaaattggcttgttgaatgcatctgtagagattggtcgtgcttctccatttgcgccaggaagccaggatctgccccatgctaatgcaatcgacaggaaggaagaccgtacatgtgagacgatggttgcaatttatcatatattttccttgttgttttcaatttgcagagtgattgtatccacgctatgaacaaacaaacgaactgaattaggaacaggggcaattcgaccataaggaagaagcatattaaaagtaccataataacaaaaaaactcatatgcagcaacagaggtataaattgatctaactaaaacaataacaaaacatcgattagatcatgagcaaaagaagaggttgtattgtatattactctaagtagc

SEQ ID NO: 114859 - DNA, 509 bp, Zea Mays
catatttggagaacaaatcaaccaccaccagcacagtattagcaccaccagatcgaggaagaccctctataaaatccatactgacaatctgccaggcatgttcaggtaccggcgaaggctgcaaaagcccagggtagcgattcctgtccggcttagcttgttggcagactacacaattcatgacataagacttgatttgagttttcattccagcccaagcaaacaactgtttgatacggcgatatgtcactggaaaacccgaatgtccgcccattggaccgtcatgtaaggccttaatcacctggagttgcaaggtctcattagcccccagccagactcgacccttgtacctcaaaatgccttgagacaaggtaaaattaccctgagaatgcccagttactgacagttcagacaataactgttgcgcatgtgcatcactggaatatccttccaccacttgagttaaccactgtggtgtacctgatgaaatactgaacagcgaggattca

SEQ ID NO: 114860 - DNA, 305 bp, Zea Mays
gactgcttgcatcaaagaaaagcctcatctcagacgacagaacctcgtgagccagccaccaattctgtgctcctcttccatacagaaaagaaggcagaactccagcatgtaaagcactgcttggattgttccacgccacaatcagccctctgtcagagctctccgatgatgaccacttggcaactagaatctcctgcagctaatgcagacatatattaattggtcaacagctacaggcacatgccatctgagaatgcttgtcagcttgtgtagcattggttttagatagacgaaaaggtacctcc

SEQ ID NO: 114861 - DNA, 615 bp, Zea Mays
ttcattttggaatactctgcaattcatcagctgacgatgcattagacatgagggaatctgctaacagttgttcttggggagacatcttcctttttatgctgaaaaacaacatcttattcctcaattttatggcttcacatccacctacattgatttggcgacaaggaatcccatagtactcacaattgtgacatgcttcaagatttttttcagttgttttggatttgcatccttttgtgtcttgaatgtaagttcatcaattgtttcctttctgatgcagttttgatttaccaacacttgctggctcaagaagttgagttgagatgcttcttgtagtatcaaagcgtgtgcatctaatagcttccccaagtcaattattaaggatagtgttgcaattgatgtcatatggtcatcagtagtatgctctgccaaaacaacttgatggagactggccaccaattgagatgttgcttgcagaaagtgtgtatgtgtcttcatgaactgctctatctgagactgagctaaaggagttaacaacactctatgctcttcaagcttagtagcatcacttgtatttgtcatcccaagatctgacatatgcatgggtatggaaag

SEQ ID NO: 114862 - DNA, 366 bp, Zea Mays
atcatcactatcaaccatttcatagtcaacaccatctgaaggcgcaagttcgtcattaatgtcattgccttcaaggattactaagtcattctcattttgcacctcatcatccttctcatcaacaaccatttctatatctacatccattccgatagcttcggttaagtctatctcaaatcgcccttctagcccatcttcttggaagaactctccatcatatgtgtccgggtctaagttataatcttcatcgttaggaacatgtaatctcccgtgcggcgataccttatacacaacatcccaacccttaagatgttctttcgtttggcacacatatgggagataatacacttgtgtggcctgttgggc

SEQ ID NO: 114863 - DNA, 531 bp, Zea Mays
agattcagacggggctcgagaaaaggtaagggtatttcttcctcaaagagtcctcactttcccaggtagcttcctcttctccttctctgctccactgaactttacagagtcttacttctgagttgcgggtctttcggactgctgagtcaagaatctttattggcttttcccggtactggagatctttctgaatctggattgtctctgccttgatgtggttctctggtacttgcaggcacttgcggagctgggacacatgaaacacattgtggatatctgacatggattctggtaattcaaggcggtatgctgcgggtcccactctgccaatgatgggataggggctgacgaatcgcggtgctagctttcctttcatttggaaccttttgacaccacgcattggggagaccttgaggtatacgaagtctccttcctcaaatctgagttctccccgcctgttgtctgcataacttttctgccgactctgagcttcaagtaatcttttgcggatcagggcaactttctcttcgg

SEQ ID NO: 114864 - DNA, 333 bp, Zea Mays
cagagtagcatcgagcgacaacgaggtttacattgttggacatcatgggactaactcttcaaacctagatcatcgggtgagttgtctacactttgtatttattgtaaaaacattattatcttgcttggtttgtattacaaatgcaatatggtcaagaaatgctcaattgatttggagagtattgcaattgacaagtgataccaattgatatttgtattgtgtatgctagtggaggatgaaggagacatatagggtagctactgtattttcacaaattctataatacaagtataaagttggtttggtgttctaaattgtttgtgttgtatgtat

SEQ ID NO: 114865 - DNA, 405 bp, Zea Mays
gttgtgccaatgcctcgatggaaatgtcatcctcactaggcggactggggccactcaggtctgaccaccgaaagcctgcatgtgtgggaggggagcgggttgttgaggagcatgttgatggactatgggacgccgacgaggatgtgtgtggaggttggggagtcaatggaggatgaggcagaggcaacataggtgatatggagagacaaccgcgacgccatcgcggtggcccgtggtgacagtggggtcgatcaatggaggtgaggcatggagagattgagatcttggaggcgagaggccaggagctaggtcaggcggatgcagcatctgtatatccgaaatgagagagggtggggcggacgcaggtcgacgaaggggacgacgggcgagattgtcacaaccggg

SEQ ID NO: 114866 - DNA, 568 bp, Zea Mays
attatccagtgtatacatacagttgcaaccagcgcaactacgatgttgcaattggttggtcatgtgtgtccagtgtttttagaacagtcacacagtcattattgagtttaacttacacagagctataaaataagataaaattgaaatattacattggagattcagtcagattcatagtcattctttaatcactttcgtcctggtaattaacatggcaagttgtcgccctcctaattcttgcaatcaccgtgtttgctactgactcctccatggccatagtgcacccagattgctgtgtctcatccccctcactctgcgcctcgtcttgattcccatctagtcctttttttattgttgggcgacctctttttcttggagtccaacctacagttttggcacttctctttttgtccttgttctcggctgctctgcttatgtttaggttctgagggcatgttgtgctatagtgccccctaacatggcaggtttggcactctcttatgccctgacccccactgtatgtgttgtatggattagcaggttccacactatttttagcacatttagc

SEQ ID NO: 114867 - DNA, 1436 bp, Zea Mays
gatcatcagagcactgctcggaatgtgacgacacggacagagagctgtcactgcccccggggctcttgtccgatgacttgcgcctccagagccaacccgcgcgatccataaccatgaaccgctcagaagatcaaaaccggtccttctgctttctccctccttgctgagagatcaacactcggcattggaatggggagacagctgtgcaccataggcagagatgctgattactagggtgaactcaaaaatcttgcagcataaattataactcgaggaaaacgacaactaattgctaaagatacagttttgactaatgtaacagaacccgtgaaaggtggagactactggaactagtagtactcgttgcatgatggtcgaaacgcaagtagcagctgatccttctctgtcaggctaatttgacagctaaaaggctaaaactaacgcgttcaacgaggtcacccaaacaaataccagcacgcgtgctctacacatctgctgcggaagaaaaggacatctcgcatagggtggttcagcttggctaagaaaaaacggaggggaaaaaattggtccccgtcaccgtcagcatgtgcggttcctttctttagcacagcttggcagcacttggacacccgcgagcggctctgctcgccgtcaacacggaagccgaccacggtagagtagaatctcaggaaaacccgaccaaacaaaatgcagtgggcaggactcccgaggtccaaacaatctatggcatctttagcgctgctgcgcaccaaagaagtagaaatgatttgcaggcattgcggtaaaagtagggctagaaagatgaaatgcttccacaagtaccgcccatgtcgcatcagagctgtgtagtggactagtggcaacaagaggcagcgagtaccagttgagcatgacatggcggcaaacttgtggccaccggctacggaggcaagcggagaaatcagaatccatcggcggcaaccaaacatgtggcgcgactgaagacgaacacacgggcaaaccaatcacctaccaagcccttgagcggaatccgccgccaatcgcgtcagaagtctttgctggagccgaacccggtttcagcggagaaaccgaagggcgagcgagggagacagagaaagaagacgacgtgggggcgcttgaggaaaccgaaaccccatggatggaggagcagcagtactgaatacgattggggaggaggaggaggagggaaagccatgaacggcggcattgataggtactgcagttagatacctgggcggaattaaacgggtgcacggagaacgccgcgcgcgtcacaagaggcgaacgcgcaaggacacgccctcgctcgctccctctccgtgtgtgtgagagagagagctgaactcaacgcagtgcctctctgtctatctcctctacatccctagtaactccgc

SEQ ID NO: 114868 - DNA, 440 bp, Zea Mays
aataggaacataaggtgtggccaagatttttaccaagcatggcaattgtacatataggcatagcggggcatgggctgtattgatgaattaataatgaataatagcaggcagggcaggacagggcaaggtgtgagggagagggagacagcaacgcaagtggctccctcctttcccctcaactgttgtcctcttttgttcgccagtggcctgcctccctttccgtgattccgtcgctgcatcgtcccgccggccgcccgttggccgtcgtctgtttggaaattggagcaagctcacgacacccactgcatttcatgcactagtacgtgccgtatcactgccgacactggtcgtggactaataaaatgtcgcttgttgtaccggcactgcattgacggcgaataaattgttactgccaccgtcaccactgttttatttttttc

SEQ ID NO: 114869 - DNA, 358 bp, Zea Mays
ctgatgtaacccttctccaacaactcatttatctgcttcttgagttccaccaattctggtctgaacactctataggctctcttagaaataggggcggtgccagtgataagctctatgagaaattcaacttttgtctcaggcgacatgcctagtagatcctcgggaaacacattcggaaattccgatactactttgatggctttgggtggatttacttcctcactatgggtagtgatctggtgacaacttcctttccttggtccagacaaaactaactccaccaacacttcttctcctgacaagtacactaatctcacagtcctcttatcacagctaaggactgcttggtatttggtca

SEQ ID NO: 114870 - DNA, 539 bp, Zea Mays
tgacattcctacaacaaacgatcctgctgctgagccacatgcactctctccagaagggaggattggatgagcatccgagtctcctctctagcggtgccgacatagcacaaagcgaccccatacggtccagatctgcgatcaaaggcaaggccacttttggaaccccggacctgctaagggcatcagccaccacatttgccttccccgggtgataatgaatgaatagatcataatcctttatcaattcgagccaccgatgctgtctcaaatttagctccttctgagtgaaaatatacttgagactcttacgatcggtgtagatgtcgcaagactcgccataaagataatgcatccacgattttagggaaaagaccaccgcgaccaattcgtgatcatgagtcagataattctcctcatgcttcctcaactgcatagagccataagcaatcattatgccttcctgcatcaacacacagccaagaccaatacgagaagcatccgtataaactgtgaaacacttaccactctcaggcaaagct

SEQ ID NO: 114871 - DNA, 455 bp, Zea Mays
tgcagacagacagccaagagcagcaccctattctgtgcaccgtggacggtctggcacgcaggcacagaaggtctaggacaccaccagatagtccggacagatctggtagacggtctggccatacccaggagcagcgacgaccacgtaccatcaagccacgacgaccagaaataggtacgtggaggacaaatgcgtctaaagcattaggtcgactagtaaaggccggtccaacctttgatcaattgttatccaaatatgtaaaaaagaaggtcgaccctagcaatcagccaacaaaatgaacccattcacctccccatgaaagacaggtgggatatattgagtcacctaagaacaatgaccaattaatatccaatgtacctacatggacacctccaccaccatatccacctgtgtcgtatcaatatgcatacctaccaccaccctatgtcccaaat

SEQ ID NO: 114872 - DNA, 425 bp, Zea Mays
gcttcacattgcagaccagagaaagtaggagggtaaagcctagatgcttttgcagcatttttacgctttctcatagtcttgccacggtagtatgataacggcacctgcatgaaaagcagaggccttttcttggtcggttctcgctccacttggatccgatggtcaccatactcggttgtgataagcagacaaatccaagttgattatgttcacaaaaaaagccttttttatccgtgatcctgtcggatcattcatcctccgtcctccctgtgtaccaaacaatatatccaacgcaatctgtaagattttcactatgaaacagacaaactgttaattgcagcaagaacagggagaatttctgtagatgctttgagcacgagcacgagcaccacaggcacagctagccactggcacggcattttggt

SEQ ID NO: 114873 - DNA, 376 bp, Zea Mays
gttaagtgcaaaattagtccacttttggactaaagtgcaaaaaccatgataataaagtgtcctaagtcatatggatcacaaataggtggatttgcaagttaaaccctaagttatgggtctatttgcaaaaagcactacttaaaccctatatagactaagtctcaaaatcaaagatttggctcaactttggagatctgtagctttcaaattattgagaattttccctaggtcaccacatcaatattatatacctatcaaaggtgaacaactttgcttaaggggttcaacatggttgtcatgaaaaatatgaagaaaaatgcacccaaagtcgggctgtcaggctgccttcagtctgaaaccagtctgacagtgtaac

SEQ ID NO: 114874 - DNA, 544 bp, Zea Mays
gttttgcatagaaaattgttgttgaatctaaggtggtcctagaagatgtaggtcatatgatgaaggttttggtgtacaaggctgagccacaatccaatgagttgaggactgacttgtcgaagcgacaaaccctaaatgttgtgtggttggctgttgacgatgaacatactctaggatgtatggggagtagtatgaggaagtgtgaaggacttgctttggttggttttgtcgtgtctcagttttagcaatttccttctgcttttagattgtcacttgacatgttcttgtggtatgccctttgccttctctgcagaagagacataacaactttcttagctgagaattaaaccttcatccaatgcttcttcctcctttgtcgcctcttggggctagtggcttgaagctactctatgaaggttgttgttgagtgatggaggcttgtgattgattctgttgtccttgagtctggctagtcttttcttctgtttaaggcgggttgtggatagtcctgacatgccttgggtggaaatgtcccccgaagccc

SEQ ID NO: 114875 - DNA, 352 bp, Zea Mays
gtttgggaggagtgtcagtccctgtctagtatgtcgttttgtaccactttgtttgtcttggttaagaattcagcaattgttgctaccgacatcttaaatggagatcatgtctgattgcccatagcactgttaactctttaagtaggttttagccttttagggctttgttagtttttctagtacttcgtcctgtgggttctttgctaattattttcttgagtatcaacaaggtattttcactaacaagcatgaaatgaagctcatttcatgtgattaggtggaatcttttgtctctgctcatctactgacagttggtactggagttgtatctgaacaatgcattgaacatgac

SEQ ID NO: 114876 - DNA, 292 bp, Zea Mays
ataaagataaggtcgaagagccaaaaattgaaggaacaaaaatgttagaaattttaagtccttcggcagaagtaacagtgccgaaggcgcaaaaaagttttgcggcaactcccaaaagaagaaggatggcaaatgtactagatgtgttagaaacagtaaaggctttaagctctacgccttcagggaaaattgccgaggcttcaaaaatgcaaaccgaagctgaaacaaagccggccgaaattgaagctgcagtaacccaagctagtgccgaagctgggcctttagagctcgc

SEQ ID NO: 114877 - DNA, 308 bp, Zea Mays
cgaagactagtaaaacggaggagccaagaatcgaaggaacaaaaacattagaagttttaagcccttcggcagaagtgacaatgccgaaggcacaaaaaggtcttgcggcgaaccccaagagaaaaaggatggcaagtgtactagatgtgctggagacggtaaaggcttcaagctctactccagggaaaattgccaaggcttcgaaagtgcaaattgaagccaaaacaaaactgaccgaagccgaagctgcaatgagctaggctagcgccaaagctgggccttcagagcctgctaaggagaaaccctcg

SEQ ID NO: 114878 - DNA, 343 bp, Zea Mays
gcccaagtgaagaccaaggtttcagtcaagtaactctgtggatagctacaatccttccccacatgcaaataggctattgtgtgccctctcctatgcgcaaattaaagagtgagggagtagggtcagggcctcatcctatgtgtctgctccaagacatctcccacgagatttttgccgtcactcacagatgaaccccttcagactactgtagtttttatcgaccaccacatcagctatagactctactaccaaccatgctatatatcgtactatcgatcacaatcaaccatagttagattttatctaccatatcgttctagtgcatagcatttaccgtcatctt

SEQ ID NO: 114879 - DNA, 375 bp, Zea Mays
atttgctcgctcaaatgtatgtctaattgtcagggtgatcagccatttgttgcccctgcaaagcggagacaaattattggaactgctgataggcctcaattgacattggtaggcaaaatagattctgaagttgtacgagatcgccttagccctcaatagggtgatctccttgggcttgtttgattgaactatggcttctgaaaaagttgttatttcttgtgagctgtgaaaaaaccaaaagttattttattattgagcagttagggttagggcatgtacaaccttgataccatagtataattttttaaatagaagacacaagtaaaacacatgtaggtacaatgagacttatctaaaccttatgccttatttaat

SEQ ID NO: 114880 - DNA, 609 bp, Zea Mays
caaaattttcatgcatcttcactttggaaaaagatgctcacaccctggaccccctcttgagccattggacctccaagcatgggattagtgggaaagctatgcaaatgaccatttcatgacttaaaccctttatcaaagttgaagtatatttatatatctacaagaaatggtaaggaaggtattcaaaagagtcccacaaaattctcaaatttagcccccaagtgaagagcactcaagagcaaccaaattttctctaagttaaaaaccagccctcttccaaagatcagagacgttcacttagttgctgtcaccaaatccatatggtccaattgacaaaagggagccaaattacccaaggcacacctttgaaaaatttgaaaccaatccagaaccgtttgatacggtttggcaccatttttgtcgcgggttgaacagtgccgacactactgactttgcgccaccatatctcccaaaccagaccgaatcttccattggaactcacatgaactaggtatccctaggagcagagaagagatctcacaaaagtcttatggcgagatttgcacgtttggctgctcagcaagggctagaactcgagcagaaagaaat

SEQ ID NO: 114881 - DNA, 324 bp, Zea Mays
gaggaacctccctagcgtgatgcccggcaacggagaaacaaacgccggaatgtgcggcgacatcatgaagccggggaacgggatccggcgcagctcgtgtctcgggatgaagcctcgaaagtgggagaaactcccgacgaatgagtacaccgagaaagacgtaactccctccgccgtgatcgccgacaggctcaagatcgagagcgagagctagccgaacaagacacaagactccggcgacagaaccctatcctcgctcaaaacttgtaccccaatttcgctcgagcactaaacacgccgagtgaagttggaggagtactggcg

SEQ ID NO: 114882 - DNA, 451 bp, Zea Mays
aaacaaagcatatgtaggtaatgattgtgtaaagaatgaagaaagacagccctattgtaaataaggctatgctatgttatcgtatcatttttttcccattgttaaataagggtttatataagtaccttaatctttgtaagcttatgaataaagaaggggagattacagtttcgtacaaagaaaatcgaaccttgccacgttcaaaagttcgaacaatgcatgacactgttcctctatttataggcacgggatacagtttcggcgaatttacaattacatccttaagtctacacatttaaactattatgcatgctaagggcaaagttgtcatttccttcctctatcttgttaactaagctttgaatgcttcttatggctttattcagcttcatcaagcatgcacacttgttaactgcccaaagcttcctccttcgggtacatatacatcggc

SEQ ID NO: 114883 - DNA, 303 bp, Zea Mays
tcgtgtcgtgcagctgctaccgttgagggaccacagagctctccgagcagcattgctgaccgaaacagtgtaggtggatagcagcgtcagagactcatgagatgatagagtcctgaaacctctatctcctgcatctaacactctggtatgcacacgagtgatgtagtaacaaacccgagggggctcagacacccgccttgtgtcatagagaggtcgaacgtagattcctagtgcatgcagtacatcttgcagcaagtttggaaagtgtcccgtctcaaacatggaagtgtagtgttctacgat

SEQ ID NO: 114884 - DNA, 595 bp, Zea Mays
ctctgcgcaatattcgaaccctattcaataaaatcaacaagactgcgaagtacaatctgtgcaatgaagtagaggttcacggatccggtagcggcttcataccttgtgcttaatgtgtttcaccgaggacaagcacgcgctgccgggagatgtcgaccgccgccgacgcttttcaccacgctccagcgccgcagatgggggcgacgtccttcgacctaggagacaaacctccaaaacttagcgcgagaccggcagcttggaggaagaaagtagatctggtgtcgtcgtaccgacgaaggaaggaagaagcaaacctggttcggatgacggttgggttgcgcggatgagagagaatacgcgagaaaagggagcgccaacccctgccccgttttttcgtcgctgtttacggtacctgctggggaagtgaacaatgcgcgggcgcgtaaatttgacggatacacggccatatacggaggctactggagttggtctaaggtcttttccaatccgtgcatctcacactgcatgcagggctaccatcgcgcctgctcttctcacattcagctactatactgacaactaatgttgtttgcac

SEQ ID NO: 114885 - DNA, 575 bp, Zea Mays
cgagcgtacaacggtagtgctggactgcaaaatctgagcaatttttttccagaatgctctcaaattttgcaagaaggaagatatggtggagaaaaggtgaatcgtgaagtttgagcagaaaagaatgaaaactcctattccggtagtgctaggcttgagagtggcagtgtcgtgcagtcaaaactttacagattctcctcaaattttgcagacattttgcatggggtgtaagaagttatctggtaagttatgaacctaaacaaacctaaaatcgaagtgcagttctgaaaacccagatggggttttgttggtgttttctcaaaatgaactcaaatgagaatcaactcggatcacgaccaagaactgcattgtgagggtgtacgcattggtccaaagagtctatatccgcccaaatcgatccctaatagtacccatgtcacaagaactcgagggttctccacaaacccacaagagaaggatatggaagaaaccaagaacacaaaacttcaaaatttcagcatgagtgcaaaactgagattgagaagtgatcaaaacctgtgggccgtaccggcgac

SEQ ID NO: 114886 - DNA, 2205 bp, Zea Mays
cttgcttgtactgaaagatctcgaggaagcgacagttctgtaggaaagtaacagcttaagaatggtaatgatcctgtcaactcatccactttcttttgtgacagacagcacgattctactgggttttgtaacaaattagagaactgtttgtaaggatacgatgggggattgggggtaggaatattttgcacgggtttttattcagaagctgagaaaataaagagaagcctgtcatagacgacctactgaccgttccagcaatggccgaagccttttcatttgagagcaatgtcgagaaagaaaactgcagctatacttggatcaaatttccttcaaattgcagcacagcgcagcaaaaacaaaaaaagagcctgtcagacaacccatgggctgacccaggaaagaaaacaactgttgcgacaggaacagtttgatcaaatttccttcaaaatgaaacaaagcaaaaagaacttggtccattaattgcaaatggaatattttgatcaaatttctttgatggtaaaaagcaaaatgaaaaccaaagcaggaaaaaaaaggagcctgtcagacaacatatgggccaggctcccccgtttctgaactggtacgactagagcgatccgtggtccatgaaaattctgagcacccagttaagtggaggttgctgacaatctagaaaaaggagctttgttgtcgaagaacataaaacggttaccagatggcaggtgatggttgaagagagagctgctccagcgccaaccatcagtacatgttagctgaagaattgtactctaggtgccaaagaactgtgtgttggagacttggagtaatgcagttgcgatgtgctattgtaagactcccttgtgggcaattagccttcttattatcctcttatgtcatgcccggcagtattggataccacgactgactaaaagcccacctttctaactctgtctatatctctactcctttaaagtacgagtttcgtgcattgtctattgtgcgtcacatgcaaagtgagtaaggtgatctattttctcccctacatctcggctaataaataggttgttaccttctagatagggccgtgagaaacacctaagcctaatatgatacgaaaccacacgcaatacaacgctcttagatagtaccatctcactaggtgaaggaggaaaagcgaccgagcgagctacaaaaaaagaacatgtctctttttaactcatacttttctcgaccttttacctaagataaagtgcaatatctacaatttaatatatggtatgtgagttaatcatgtccactttaattttattttttgggggtctattttaattttaaatttatttttatggagatggtctatcaaactggcttgctactagaccctcgggcgttgtataactattatactatatcatcaaatgcctcagcaacacacgggcattacactataaaacccttagggctagtttgaaaatgatggagatggaaatgaactagtttctccctcaatgctctctaattattaaggggatttgagtttccaaacaagccattatagattagaaaggaaaaccaaacttctcagattgtggaggtgaaagaaaaaaaaaataccaataaggacctacagtacactgatgtggctatgtatgcatgcaagattattacattgaaatagctgggacctaggagtggctttggaacacgaaagaattgcacaaggccattgttaatttgaaaactgtgtgggtcagactagcttttcgtcacctttctttgcccgtcctccaatggcagccgtgactcagactagcttattttgatagtgtactagacaggacctttgaaaattgtgtgtcctccgaactttttcatcacctttctttgctcctctaatccaatggcggccgcaagaaccgaaaaggtagcatatgtatgtgcccctacactacaccaacacacgaagagaactacgtagcctacccagcatgtcttcctcgtgcttttcgttccctcagtgctcgtcaaagaatcaccatgcccatgtgaaagggaaaccgatcgaaaccgcaacagatatagctgctgacctgtcacgtaaacttgggcgacggttactcctcggatgccatgccagtgttcacgttcatgccacgcctacaaatcgaccgaccaaggtccaagctgcagctagcgcacgta

SEQ ID NO: 114887 - DNA, 393 bp, Zea Mays
gcggagtccgagaattactgctttgtaatctgctatgttgttggtgcgcttgtttatctcgagggctgacatgacctttcaccctgctgttgaattgacaatcttgtcgattctagggaggggaaagttgtctttagggcatgcttagttgaggctagtgaaatctatacacatttaccatttgccgcttttcttcttgaccatgactacgttggtaagccaggtggggtagtcgatcggttcaatgaaattagcttcgagcagtctgtggacctcggcttttgttgctttggtttttttgtctgacattttgaggagtttctgcttttttggatggattgaagggtctatgcttaaatcgtgctcgatgactgagtgactgacacctacgag

SEQ ID NO: 114888 - DNA, 345 bp, Zea Mays
ccttgaggaagacgagttacgtcacagttacgtaacaaagtagtgtgtcttgaaagacgacatccctagagccatgcccgataagatgactatttttttcaatggcctcaagaatcatgaattgtctcagaagcttgtatgcaaggctccaactacatacccatgccttttgtgttctaaattcctgacaagtacgcacaagtacgccatgattgaggaggtccttcgacatatgtgcttgtctcaaagggtcaaggagaatagagaatagaaacctaagctacataaaggtaggggataacaagcataagattgatcatcgatgtacatgttgcacccaaattt

SEQ ID NO: 114889 - DNA, 282 bp, Zea Mays
caaaactgtgtcgctatctgtcggtgttttgaacctagctccgacaagtaaatttgtgtgcacgttccaagcttcagatggtgtgcatggtggttgtaaaatttatactagttctggcagaacattcttacatccagtctttgacggcttgcgctatcggcaccattgctgatcaatgctcatagtaggggttacaagcgggcgagagagggaggagaggctcccaagtctcttgtggtggaggaggtggagttaagggatgtagagtggtgtcctaactaa

SEQ ID NO: 114890 - DNA, 377 bp, Zea Mays
gctgattaagtaaataagcaaaggtgttaagggcttcgacctaataggaaggaggaaagctagcttgaaataacagagatcgagtgatattgttaaggatttgaaggacgcgttcggctttaccattttgttgagaggtgtagggcaagacatgcgaagggtgacaccgtgggggaggaagaacgtgtgagtgctggagttgtcaaactcgcgaccattgtcacactagacactcttgatggtacgacttaactaggtagagacaaaagagataaaaaaattaatgatggtggaaaacatatctgacttaaacttaagaggaaacgttcacacaaagtgagaacaatcatcaagaatgatgagataatatttgtaac

SEQ ID NO: 114891 - DNA, 485 bp, Zea Mays
atggagcaatcgacttaagtcagaaacgccttaagtcggtgcgacatgatcacgatcacacgactcagggtgatcactataccctactaacggagcaatcggcttaagtcggaaacaccttaagtcggtgcgacatgctcacgcttacacgactcaaggtgatcactataccctactaacggagtaatcggcttaggtcggaaatgccttaagtcggtgcgacatgctcacgcttacaggactcagggtgatcactatacccttctaacagagcaatcgacttaagtcggaaacgccttaagtcagtgcgacatgctcacgcttacaggacttagggtgatcactataccctactaacggagcaatcggtttaagtcggaaatgccttaagtcgacgcgacatgttcatgctttcatgaataggggtgattactttaccctactaccgaaacagtcagcccaaatcaaggaatgtgtcaaagtaa

SEQ ID NO: 114892 - DNA, 349 bp, Zea Mays
cgttgatgttgttggattgtgatagttgcgtaaacaagaaaaatatttcattggactacctaattatgctttgctacacataccgcttttattccgaacatcatggagggagtggtagtcttacatgagactattcatgaactgcatcgaaagaagcaaaatggtgtaattctcaagatagactttgagaaggcttatgataaaatgaggtggagttttgttcaataaactttgcggatgaaaggtttcttagataaacggtgctcttggattaatgctttcattaggggtggtcatgtggcaatcaaaacaaatgatcagttgggacagtttttcaaacgaaaaaggg

SEQ ID NO: 114893 - DNA, 503 bp, Zea Mays
caactccacacttttgacagaaaggacgacgcgcaacctcaatctcttttttcataatcgcgggaggggttttgaggatacctgtgtgacctccctcaccagcagacgaagcaccaatgtcttccttgacttcagcttttccaataatcggcttcaatctccagctgggattacgaatcttgttccacgactgggaaccttgaggattctctttctgattccaccgatcccagttagggtttcttcccttcggatccatcttttgcaacggcaccgcacgcgacagcgccggccactcctcgtccacaagcgggggacgaatcggagattcaatccacccaccgcggaagcttacacggaacgacgacggaagcgaccaaagacgcgagagcgaggaagcaaggtgcgggaaggagtgcgagccaataaagtccgaaggaaaccctaagacagaataagaagacttcacctcgccacgaagaggagaccacggaggaacctgg

SEQ ID NO: 114894 - DNA, 336 bp, Zea Mays
ggcttcttcagctttcctcgcttcttctaaagcaatatgagattctttctcattttgcctaatagcctcgtctgctatttctcagccaccattcaaccaaacttcagaataaaattttctgctaatggcaatagcttcggttgaaggatccttgatgtcactcgctgagactgagaattctggctgaattacagcctttcgcatgctcgcagctagctttttcaaggagtgagacggctcctcgagcgtcgatcttgtccttggaagccttagtagaagcaggagttggcaccttcgaagaattcagaatagcgtccagaacgctggccattctcc

SEQ ID NO: 114895 - DNA, 488 bp, Zea Mays
ggatatggcaccttcgtcgtttctacgacctcgcggccgcgtgccgggaaagctgagctggagactaaggttgagcacctgcagaccaagaatactgagttgtatgggaaaaatcggcggccgagtcaaagagtcgatgcctggcgaagaaggcctgcaagcttgaacaagagaatgaggacctcaaccgctagttgggcgagataaaggaaatggtgactcaaatacagttggatgcacagggcgtgtgggatcgtgtcaccactctagtgtaggaattaccggctatggagacttatttcgagaagctggaagctaagacgcgggctggcatggattaggcccattcgttgtttgttgaggcctatcacgtactaggcgctgtaacgatgcccttcgatagctccagggaggagctaggcacttgtttcctcggctggtggcaggaggagctggcaagtctcccggacaggttgatggcctatgcc

SEQ ID NO: 114896 - DNA, 620 bp, Zea Mays
cataccctggaggttaactagccctgatagaggcagaattgggacatcgttgctggctttgctacgacgattcctgcaaaccaaaagagggaattcatccacatctacttcctcctccgaaacatgcccaccatctctgatgccaccgcaactctcaatatcatctttgagatcagcactcgctgggtcaccaccaaggtctggagcggcagagtcaccctccacctctaggccagacgagtgccgaagctttcttttcctcttctttgtctcggcagacatagctggataacctgctcggcgtgtccgtttgtgacaaacaccgccggggctgcaagctccctcctccccaccaaatgcacgcccagcagcagcactcggcgactcagtgcgagcagatacgaacgactcatcagccagcatactaagaacatcatttacttcggcctcgtcaacgattgcttgcatccagagattagtctgttttccctcttcaggaagaacccggtacgtagcaatgaaggcttcaatatcctctgaagaaggtcacgctctatggcctggactaccgtcttgaacagatgggttggatacgaactctgaaaaagacctctacagcg

SEQ ID NO: 114897 - DNA, 546 bp, Zea Mays
gttagcgccgatttggttccaaactatagaatgaacctcctgacgctgctctttataggagcacgaatggtccacgaccttgttacatgagtgactcctcctgcgtgcttccggacgatccatgcctagggcctggacggtctgtgatggcgtagggtcttcttctccgcagaaacctgaatcttgcctctcgagagcgaccccattggggacgagagatcctagggttcccttgggtttggaaggccacccaagacgcctcttgtcgacgtagagccaaagatagagtttgagaaaggctaaactaagactaggttacccctactcctaatgcatggaaggaacaaagcaaataagataaatacggtaaattggtttgattggatagcttgttgggactcaatcggccgtacccattcatctatttaagtgggaaggtttggacccgttacaagtcgattcccaaacaaatctcgcaagaaatcagaaacccaaactgattctgtttatgcgcagaccgttcgcaccgccacggcgaaccgtctg

SEQ ID NO: 114898 - DNA, 579 bp, Zea Mays
gtcgactcccatattgcagaagtgttattcgatactggagcaacacattcattcattactgcatcatgggtagaagcacataatcttccaataactaccatgtcaacacccattcaaattgactcagccggtggtagaattcgagccgatagaatttgcttgaatgtaagtgtggaaataagggggatagcgtttcccactaacctcatagtaatgggtactcagggaatagatgtcatcctagggatgaattggctagataagtatcaggcagttatcagttgtgataagaggacaatcaagttgatgtccccactaggagaggaagtggtgaccaagttagtcccgcctgagccaaagaaaggaagttgttatcagatggctattgatagcagtgaagcagatccacttgagattatcatggttgtgtccgagttcccagatgtgttcccaaaggacttactaggcacgccaccagagcgaacagttgagtttgccatagagcttcttcctagcaccacccccatttttaagagagtttatagagtatctggaccagagttagttgaacttaagaag

SEQ ID NO: 114899 - DNA, 980 bp, Zea Mays
ccttgaccgagggggagggacttgccatggttttccacaatgaaccactctaaacgccatcctttaatgctatccttaagtgggatgtcaaggtattctgttttcctcccacggtgcatctccagacttgcaccacccatgagctggtgctgcccccaaccatcccaggacgacaatgatacaagtacttccacaaaccgaagtgaggaagaattccaaggtaggcttcgcacagatgaacaaagacagaaatttgcagaatagagttggaatttaggtgagtcagattcaaattgtaaaagtcaaggagaccgcgaaagaagggagaaatgggaagagcaaagccgcagataagaaaagggatgtaaacaacggactcatgggtatcttctgtcgggacagtaaccccacgacaaatcctccaagagcaaagctccttcgaaggaagactccgacagagacaaggtggagaagatccggttccgaaacaacaaacatatgattacctgcgaaaggcaattggttgttgagatcgataggaggaatgaccgcagtagcagaattctgattctttcgcttgggcgccattgcaatctcgtcggtggactgagcggaagcgaaatcaaagagaaacagaggaggttcggaggcaaaaagcgaggctagggcttagagtgcagaggcgtgcggcgacgtgatacaaatggggttttcccgagttagacaccatttctaaaaagtgcttagtcatcactcggtcgttatttctaaaacgccgacgtggcctgatatgactcggttgttacttctaaaacactgacgtcgccagtcatcactcgactgttatttctaaaacgccgacgtggctcgaaatgactcggctgttacctctaaaacgccgacgtcgccaagcaccactcggttgttacttctaaaacaccgatgtggctcagcatgactcggctgttacaatcgaaaac

SEQ ID NO: 114900 - DNA, 343 bp, Zea Mays
ccagtatctctttagtaattttctttgtgtttgtttttgccatctattcaacaaatccagcaacataaggatccacagacctctactcctcaaacagcttcgcttcttcggtcagcttcgtctccgcaacaaccttcttttcctgagacatcttttctccagatatggtgaaaacacgttttttaaaccgaagttcacagagcttgaaaatctagcaagcgctagtgagcaagagctaaaagattgagaaaataatgcaaatggcacaagcagtgtatcaaatgcagctggtgtgagttcctatttatatgcccagcgcgttgcaaattggagggccccgtct

SEQ ID NO: 114901 - DNA, 871 bp, Zea Mays
aaagaaggtatgagacggaagaggggcgattttaaagggcaggtatgagacaaacatcaatgtaggatatagaggtgtcaagggtgcatatgataataattaaaagcatgacaaaggatatagttaaggcaagactcgcgaaacgacaaggtgggtaaaacaatcaagggtaagataggtaaggttccaacagaagggttgaagtaacagaaattattaccgagggaagttatgaagaaatggtgagatcatcaaggatgtgtgaaatagaatggtcgctcatggaccatcaagaagcaagggtgatcaagggcatattgaccgaaaggttttgaacaatcattgggatatgaaggtaagcatatatgaaaatattagtatgcaagattccaatggtacgggcgtaccaagaccaaaggaataggaaaagctaaaagataacggcttcacaacggaatagaaagggggtctcaggagacaagaagttcacggacatataaactgaaatgactaagtaggcagtagaaattcagatgtaagtatttgaaacaagagtattgaagaatctatgagtacgagcatgttaatattaagagaacaaagatagtcaaagggtagcaatttaatgacggaagagggaagaatcccaacagacaaaaaaggttatggtcagggggcatctacaaagatgtcgcaagcacaagagtgagatcagatctaatatattgagagaagtatataccatactagaataaaatacttttggcaaggggcatataggagcacaacatagaattagtcgatatgactgaaattttgaagcagaatcaaggatgaggtgaagtaacagtcaagaagtccttaaaacggc

SEQ ID NO: 114902 - DNA, 476 bp, Zea Mays
gatgatgttaaatttagtgtctgccatgttctagttattcttgaacttgcttttcaaaaccattgctattagaaaccgtaatgcaaaggacactgtaaaatgtacgtgaggaagaaaaatgctttggtcggtcgctcttggactgatattcatgaggttgtttccggtgcttcgtgtaaaatacgggacacaaaactatagatcacacgaaattatagatcatatagtttgacactgcgtacagagcgtgtagagtgaagtttaaaatatagtaaatgagatatgagattggatagagggtctgctagagatattctaagggtaggattggttctgatgtatggttacggtagaggcaataaggtcattttctaagtcaacttaagattaaaaaaacatgcaaaaaggtcattttctaagtcaacataagattaaaaaaacatggtgagctctcggtaaggtgctataatccggag

SEQ ID NO: 114903 - DNA, 587 bp, Zea Mays
caccagtggctcaagaagaggaaaaagaacactttatgacagctgggtgtgatcctgatggagatgagccgataggagcaaatgaagaatggagatacttcaaatttgttgatggtaaaaatgttcaaccagtgaatccagtggatgttcagacaagaaggagggcaagggctattccagaatttgatttagaaagtgtccctgatgatgaggctggtttggtagatgattatgttgtgccccatacaacatatgaccatgagaatccagtaatcaaagagggagacacatttgaagacaaggctgaatttcttgaaacaattaggacatattccataaaaaatgaatttgagacaaagattgtacatagtgatagagagaggtacagagcaaggtgcaaagatgttagttgcgagtggaaaaggctgaagtttatgtggccttgtgcatgggcatgtacaactcgtaggcatgattaccttgtggaaaatattacagttgctgctcctaaagcaatcccttggttaaacaagcatcacaaattgatttggagcagatcaaaattctctaaaaagtgcaaagttgat

SEQ ID NO: 114904 - DNA, 338 bp, Zea Mays
gtgttcagtcgaattggttggtgaagtaaaatgggttagaaatggttagttatgcagcgtgcatgattttaacactgaaccgcatgcaacagttgcacaatcacagtttagtttgtgctccaacacatttggttagctcaatgtgcctaaagcttgagctaatgaacttatagtaaagtaacataggctgttcagaaatatcaatagtcactgaagttcaaaatctcagcaatcatatcatttggatttgattattagattaatccctagaactcaatagttctcttcataactatgtgtacactctgactcacaaaataaataacactatgcgtgca

SEQ ID NO: 114905 - DNA, 343 bp, Zea Mays
cgattcgagttttccttcaaaagtgcctgagcatctgccagttctttatccaacttcttgttttgagcttgcgcttcggcaagggacccttcggctgaacatagcatttcgtctttttccttcaaagagtcttcgagttctttgaccttatcttctaaacatttgataataatttcgttcttcctgtccttgtcatcttgttgcatctttaaagcttagcttagtaataaactctataaaagcaagcccaaacttaggatatttaagctaatacataaggagtaacttgaaagtgagtttttactttaaagttggaataaaacaaactccctatgatatgctg

SEQ ID NO: 114906 - DNA, 985 bp, Zea Mays
tatcaattgattcatggaagactctccgcaacaaattcccgctgaatttctaaggctacagacctgaaacagacgcactggcagaactctcactttgtaggcagcaagagaaggaaagtcttcgtgaatattacaaaaagtttctcatgtttaaatcacagccctcggtcgatgaccatatagccatccactatgcaatcagcggccttcgagcaggtgtcctatacaaccactgcataaggaacccaccaattaacctgtaagaattttagcaacttttcaaaaatatgcccgttcagaactccatcaaagaaaagttgagtcacagcgaaaggcaaaagagactctacaattcagtaggacatggatcaggcctccgtggcaatgcatgacctagcccagcaagagcgcggtcagctccaagtacagaatatcacaaaccagcagcaaccaggagagaaccccccaacgccagggctactccccgcaacaaggtcgcgatggcaaagcaactagggtcagaggctgaggctgaggccctcagtggccgagaagattctactgtgttttccatggcgaagactcagggcacccaaccagggattgcccggagaccaaggcgaccgaggaccgactggctagggctgccccggtagaaaaccaaagagtaatcgctcatacctatcaaccataatagtatcaccagcatcaataccaaaatgagcatccatattacccccagcaccaaaaccccaaacccttcccacaacaacatcgccttcaacaccaagaaaggttggccctgccaccaccaccacaccacatcagtcaaaccaacacccaccaccaaagcatgaagacttcgctgatccacccttcgagggagtgattcgtatgatcactagagggtccacctcagattccgagaacataggcgggagggggcccaaaaaatatatgtttcatataagtttttagataatca

SEQ ID NO: 114907 - DNA, 352 bp, Zea Mays
atctgtagcacacccaagagccaacgggcaggttgagcgagctaacgggatgatactagaggcactcaggaaaaaggttttcgataagaatgaaaaattcgcaggaaagtggataagggagttgccctatgtcgtttggagcctaagaacccaacctagccgagctctgcatggaaatactcctttcttcatggtctatggtttggaggcagtgctgcccgccgatctcaagttcggggcgccaaggttaattttcaacaacatagcagaagtcgaggccaccaggctggaggatattgaagtacttgaagaagaacggctgaatgcggtaatccaatcagcacggtaccaa

SEQ ID NO: 114908 - DNA, 452 bp, Zea Mays
gggtggcttcaacatgtcactagcttgttgggattgggcggcatcagcaaaacttagtggttgcggtagctctcatagtttgccacactgatcagcttccttgtccgcatcaacctacatagctctaaaaatttaccgatctgatcagctcatttatcttctccaaccagaatccactatggatggcttcatctgctcggcctcgaacctacgaagcaattcaagagaaatagttgctttgatgggagccatgacaacaactacgatggagattattaccatgcaatgcaagtaatggatggcatgcagttagtttatcaaagtcaaccataagcatgtgttgaggagtaaagaattgaacacaatggttcaattctttgcatgccgataacacaattggttgctgctaatgtaatcatgtcgaaataatgcaacgtggctagacaacagag

SEQ ID NO: 114909 - DNA, 522 bp, Zea Mays
gctgacaacacatgtttcctgtgtgaattggtggggaatcagtttcagcaacatggatgcagaggtcaacctcaagggccccgagacaccacatacttggagttttctgaaacccgtccatcgctttttgttaaagctgaagaacctttagaagcggatgaatgggtatgggttatggagcaaaaattcggactgatccgatgtactgaaacatagaagcccctattcgccgcccaacagttgagaggccctgccatcacttggtgggcaaaattttcaactattcagcctgcgggacacctggtcacgtgggcagaattcaaacaggcgttcagggaacattatgttccagaaggggttctacagatgaaactggaggagttcttacgtttgaagcaagggggagactcagtaacgcaatatctcaacaagtttaatcatctctcccaatatgttatcgaccaagtggacacggatttaaagaagaaaaattgcttcatgaggggtttgaatgatcgactc

SEQ ID NO: 114910 - DNA, 476 bp, Zea Mays
ggctgttttaggtacgtcttttgttcgaatctacaactgatgatagcctgatcttagatctatttttgagaataccttagctcctctcatctgatcaaacaaatctttaatctgaggtaacgggtatttgttcttaattgttacttcattcaaacttctatagtcgacacacattcttcttgaaccatctttcttgttcacaaatagaactggggctccccatggagacaaactggggcaaataaaacctttttctagtaattcttctatttgtttcttcagttcaattaaatccttgacatcgattctataaggtctttttgaaattggtgcagttctgggtaataatttaatagaaaactctatatcacgatcatgtggcatacctagtaattcctccaaaaatacgtctaggtattcacacacactattctaatgtgttccaaagatttctcctctaattgatttaccatggc

SEQ ID NO: 114911 - DNA, 360 bp, Zea Mays
tttctggattgggcgctaaattctgaaaaacccagggactgatctacaaatacaccctagactcaatgatcatcgcccacggacggcgggttggtttaaggaaagtagaggggctctttagaaaatctgacacggtgaaggggtatcgagctatttgggtcgttcgatcaaaaccgagggcccagactagatacgacttacgttgaatcggtatgcgatacatactgctagatctaaatccaacggatcacaaccgatctgaaccccaggcgttagatacccgatcaacagtccatggtgattgctcccccagatctaatcccatccactcaatctaaatcggacggtgatcgcatcatc

SEQ ID NO: 114912 - DNA, 284 bp, Zea Mays
cttcacttcgcgtacaagtggccaatggctcccaattatcctgtgaccatgaattgactaatgtcacatggtacctcaatgagtatgccttctcatcaagcttgaagattattcagctcactcactacgacctcatcttaggtatggactggttaagttcccacagccctatgtgggtacactgggaagataagtggctgattataccgtaccaaggctctactatcaaattgtgtggtatgggggttcaggacatgcagtgtactgttatggaggtatcttcc

SEQ ID NO: 114913 - DNA, 342 bp, Zea Mays
cccaaatgtcctctttatctagggaagaatagaggatgctcccgtctcggacgatgagcccactgtactaggggaggtgctcctacagtgcgaggcacgccaacgtcgaaacaggtgccataacatccggcgtcaccataaggccagggagcgggatcccacttagcctgtatcccaggatgaggcatctgaagtaggagatactcctgacgacatggcgcatcatgagcgccacgatcgtcgccacgcctaggagcacaagcgggatcgagtgcaccatgatgccaggctctacgcgagaagccactccttccaaggaatctgctgtgcgacttcgcttga

SEQ ID NO: 114914 - DNA, 333 bp, Zea Mays
ggtttgcgacatttttctccatgtgccgcaacatttctgctgatgtccatgaggtggcacggcgtcagcgggagactgacgacaattcttcgtcgtcaagcttcatccatgggcatgccttttgtccctcgttcgcctgatgtgcctctccatccttctcccccggagatcaatgagtggcaccagcaggcctatggggtgccttttatgtctgcagacgatgacgaagaagaagcctatgttgatgatcgtgaggagtttgccccgcctccctaccatggggatccgggtcaatcatcctcccaccctccgcctccttacccgggtccggga

SEQ ID NO: 114915 - DNA, 543 bp, Zea Mays
attcatgagccaccgacctcgggccctataaattgagcgtgccatcagctccgctaggtagtcacgtatccagcgcacccactcatgtctcggattgtccaccagagagctctaatttgggatttccccaaattagtcaagaacaccgccgtgtgagtgctcaccgtggctagctcgctacagctctgttcacgacctcctcgatctcgtttccacatacatgtttgttgtagatgcttatcaacccggccgattgaactagaccacactagatcaccgggaacaccatggattgtcctcggtgtgcgccatccccgtgggcagagagttctcgacctagaactgtgcaattagttaagggattcttgtcgtcggggttagaattggggggtcaagcaaagaagaagcatagcctttgcgttttccggttggtcttggctccccggagccactgctccgccgtccacggtgggggcttcaattcgcgaaggaatagaaagtgaggggcctcggcgcaatgtgttagtgacacatagaaatagt

SEQ ID NO: 114916 - DNA, 328 bp, Zea Mays
gtgtcggactccgctaaattggtctgaacctggtgagaggtgcttctttagacctgatctggtgaaagaagccgaggataaagtttagaaaattatttataatctgaagaaagcacaagctcgtcagaagagttatgcagacacacggcgaatgcccttatatttcctggaaggagactatgtttacctgaaggtctcaccaatgaagggagtatcacgtttcggggtaaagggaaagcttgcacccagatacattggtccattcctggtgcttgagcaatgtggaccagtggcataccgacttcaactccccgaaacattgtctgct

SEQ ID NO: 114917 - DNA, 358 bp, Zea Mays
gcgcagttcgctgcactggcctatgttatggtccccggcacatatggtgactgtcgatggccaccacacaaactcatggtgtgctcagtctccaccatcgcccacgcccgaagggggtttaatcctaactcccttggtgtgctgatagagaccagcaagcaagcctatattgggttgcgccttcgacaacctcatcatgcatgaggtggccagccagccatggtgggcccatgggagctccccacatgcaccggtggctccaagacccagctcgtctatcacaagctccatggcgttcggagtagcagccaacaacccccaggcgctgcttaccctttgagtcagacgcgcaatggag

SEQ ID NO: 114918 - DNA, 357 bp, Zea Mays
cctaattatagcttcaggagtaatttggtgaagaaagatctagaatatcttcaacacttcaaccacgaatttgctcaataggaaccgaagccctgcttcaaaaagctttggtaaacaacaacttcattttcttcaggagcaggggcggtgctgtctcctccaatcctcacaatagacatatcatggaagtaccttcccctcatggcgtcaacctgacttcgtttaatggtcgactttccgaagatagtatggcttggccgccagggccgatcttcagaatcttcatctccactctccacatcaaagtcatcactgtcatcagaatctccagataaatctgccattatttccttggtg

SEQ ID NO: 114919 - DNA, 637 bp, Zea Mays
ctggtgttgtattttttactttctttttaccagaactttcatgtcaaatgagtgggcattattttggataaggtttatcctgcctgatgcagtgatgttgttaattacaatgggccacattgagattatgtcaaatgtagcaaattatgtataaaaaagacaatgaaaggaatagggatgaaaacggtcgttaaacgctaaaaccatttctgttttcatattttatatcggaaacacaatcgaaaatggtaactccagaaacgaaaacgaaattggtatttcgaaaacatttgaaacgaaagtttgtacggaaaatacacctgtaaggttgaaatttgaaatacaatcgataaatatatcaatatgaaaatatctcaatataatgagttcatagtataataagatcacaattatcacaaattgaaaataaaacaagttcacaatccacaagttcataaatatcacaagttcacaatccacaagttcataaagatcacaagttcacaattcacaagttaacaagttctcaaagatctcaagttcacaattcacatgcataacaaagatcataagttcacatactcacatttcacaagttgacaagtttgcaaagatcacaagttcacaattcacaata

SEQ ID NO: 114920 - DNA, 420 bp, Zea Mays
ttcacatgttgcactaagtgatgtttgccagagggtgaaagcggaacatcaaagacctgctggtttactacacccgcttaagatacctaagtgaaaatgggaagagattggcatggacttcattgtgggattaccccacacatctgctgggtatgactctatatgggtgattgtggacaggctaactaaagtagcccactttattccagtgaagaccacgtattcaggagccaagctagcagagttatacatggcacggattgtatgcttacatggggtgccaaagaagattgtgtcagaccgaggatcacagtttacttctcggtattggaagaagttacacgagtccttggatataagattgaattttagttcggcttagcatcctcagactgatgggcagactgagaggaccaacca

SEQ ID NO: 114921 - DNA, 687 bp, Zea Mays
tctccctctttttctcgtcagccttcatatagaaccactcactcttccaactagttggtcactacgtgcggtagctaagaactggtgcctttgtatcccttcaatacacaaaattgtaacagccaaaattttcatgaaggccatctgccctggccttcgtctggtaatgcagctcgtgcactcggcagaaagcttcggcatttggactcattccttggcttcaaagggcccagatatagacactgagtctaacaatagcgttgggagtcagctgatgaagatatatctcaaagttctttaaaacttctcctatcatttcattcagggggaatcatagccctgctctgaagaagctcttaaaaacgacaacttcatccttttttggctccgggattacctcttcccaagcaaattgaataagtttgctctcatcctctccaaaatagcccaaattcatcatcataagcatgtcatcttctgttacggtagatttttcaaaatcaagatgactaggctttgttgggatcagaatgttgtagtcttcttcactctcttcaacagtttcaccctcaaccacaacttgttcagcttcggcattagaagcaccttcgtcagcaacctcctctgccacaaccagacctgatcgcttcattacttctgaaatcgatgctgtttcgggggcttcgg

SEQ ID NO: 114922 - DNA, 732 bp, Zea Mays
ctacggtgaggtaaaaatcttggcataggatcgactcgagctcggttgcggctaagcccgccgtacccacttgctcatcggtcgatcggataagagctcaccgctattgtttgatcactgccgtgcaccgcgtgtctaggctctgtaccacgtcgcaattagttatgttaagggatccggtgatcgccggaggaagcgccacggtgaaagccacccatcccgagcatcagtatccctgtttccctacggctgccagcacaacctcgggaaattagacaccaccgacgatgggaactataaattggcacctccgcccgctccgctaggtaactgcgtagccggtgaagcaattcgcaccttgaatcctcccctagaattcaccaatttcggatttaccaagctgctcaagaacaccgtgtgtcttgacttcgccgtggtccgctcaattcaggtccgattttgccatttatgttcttgtttcggcacccatgcttacccttgatgctcatcgacccgtccaattgaactagaacccccttaatcaccgggaacacattcatccatccgcaaaatcctcagtcactgcggccagagcaaaccaggaagccattagtaaaattaagtggggggaaacgctcattggaccatgaattcggtctcagccgaagtatggcgccagtcgtcgtgtgagtcggctggtgtacgggttcgccggagctctgcgcaacgccg

SEQ ID NO: 114923 - DNA, 1512 bp, Zea Mays
cacgatccgatcctctactttcaatttgccaataaaattttttctctttctataccttgaatggtgatgaaaataagcagtgttagcatctccctccttcaaccagttcagaccactcctatgtctggccattgttctctctaatgatgccagccccaaagagtggtgttttagtttacgacgcagccattcttcatgataggagagatctcttgagtctctagcaacttccagcctatgcagaatctcattagacattaccagctgccgtttaacatgcccaacctttttgctactccaagattggaggtgtttagatagcctttttaatttatctgccatccgctgcaaaggacaaaccgctgcaattggttgacaccaggaattttctacttctgtcatgaaaccttccaacttagtccaaaaactttcaaaatgaaaatgatgtttgccttgagtgaactcgtgcaaccccaccaccagtggacagtgatcagagattgaggaagaggaactttgcatcaaacaattaggaaataaatcctcccagtccctggaatagaaaaatctgtcaagacgcacaagggtgggggatgacctttcgttggaccacgtgaatttccttcccaagagcgggagctcaactaactgcagatcattgataatcctctggaatctccccatcatggccctatcaaggttgttgttatttttgtcttcagcccgatagattagattaaaatcccccccaactgcccatggcccagcacaaatagaccgaaccatgcggagctcctgcagaaactgcaactttttttcatcagattgtggtccataaactccagtaaaccaccagggaaggttactatcatgattgaaccgaactgaaattgaaaattcatccacccttgtctggagagcagagcacaccgcccctttccacgcaagcagaataccccccccccccgagtgccaatggctggtagaaaggtgaactgatcaaacacatttccaaggagggagaagaccataaatctggatatagattccttcttcatttcttacaaacacactatgtcggggcgagtagactcaaccattaaacgcaccgcatccctcctagctttcctattaagacctctgacattccaaatgaggatttttgacagattcattgataacagaaatacaaccaacacaatgtgaggctacagcaggccatcaagcacacgtttcaatgcttaactccctaagcaaaggaacatccaagcattcttgcacattatctgggaccggccatccaaacaaagctgccagggccttgatgtgagagttggaaaggggtttgtcaaacagctgtccaaattcctctagcatttcatcagtaacagccacctgtgagtttgtgacgttcaacttcaacatgagctccgcctggacttgtctgactgttgaatttaagccttcccttttctttgacaagcgactactgcgacgtgggacaaaatctgg

SEQ ID NO: 114924 - DNA, 751 bp, Zea Mays
agtgccacgacaaccatttggtggtagaggaaaacaaggacaaaggatagatgtgtcacgtcaaccacgatcaaagagcttgactatgtacgatggttggatggcagggtggcaaggtgtcatgctaggatgcatgatattgatgtgtgtccactggtgggatgttgttcttattgaagcacacacccattggatattgtcaggttcacaatacaatatgggcataaaatggatacaaagagaggaatagcaatggcacaatagaggcaaactacatccttatgggcattgtaagccaaagtgagaaaaaaggggaaaacaaattttgctagtgaattgatacaatagagttaaacatatgttaaaaaactagggcacatcttaaggtggaagagactagaggcataagcaataaaggaaaaaaggaagcaacatgtcaaccttgagtgtaaagaggttcatcaataataagagttgaaaatgggggtggtagcatatccattgcatgcaaggcaggtaactggtaagcataggtgggcagaaggaaggcaagatttgatattgataacaaggacatagtggcgagggtcaagcggtgggatggctaggtgtcatgcagggatgacaagtcaccgatgatggtttaagcggtgggttgcactgacatcatgtatgaatagtaggtaggacattaaagacatgggagatgatgcaaaggagaagaccaattgtagcaactgtaataatgtca

SEQ ID NO: 114925 - DNA, 404 bp, Zea Mays
gttaatttaggctccggggcgttggtgcgtctgtgggtgctcgccggagaaatctccgtcatgggggatttgccgccgtcgcggtattacgacttagaggtagacgactgcgtgtgaaccattagatgctaaatggacaacttagattaggcgtcgtgtatcccttcgactggacagatctgcgccgctgaatcccactcgaacgtctcggtgacgtcgtggggtgttttgaatctgtgtcgtcgatcggcgatctaatggctgccatagcgtatcgtttcgcgctcgggtagattaaatctggagcgtctgaaattgatcggacggctgagatcacatagtaccccttcgcgtggccgacttgcataagagcccccgtagttttaatgaataaacccgtcgtc

SEQ ID NO: 114926 - DNA, 339 bp, Zea Mays
cttaaaaagaatctcgtcctcgagatttaggaaggactagggaaaaagatggagaaaatctatgtgaagctcttcttctcttttccaagttgcttcatcttcgccgtggtagctccattgaactttgcacctctttaccactttattccttgtaaatcgagtcaatgtgttaagaatcttgatcagatactccgtgtaaatcaaatcaccctgaacactgagctcttccattggtaactgttcctcagggacacggagacacttctttagttgagatacgtggaacacattatgcacatccgatagactatcaggtaactcgagttgataggccatctc

SEQ ID NO: 114927 - DNA, 304 bp, Zea Mays
gggacatgttccctattggtaagagtgtgatatgttttcctcggttgacgtcgtctttatggttgtgcgtatccgtacccccggcatcgcgtaccactttgtctgtccagtatacgggtccatgtagtgagttcgatgttgatgtccttgtagtggtgtttgtgggtcccacggggtagagtcgtggtatgtttcagggtagtgcgtggggcaaccccgccttttgtcatgaacctcgtgtcaccctacaacatgcataagcgtacacccggtatggtgtattgtcttgtccttcccagtatgc

SEQ ID NO: 114928 - DNA, 1066 bp, Zea Mays
aaaggccttcttcaagcttaggaaatctcatactcttagctatctcccggcacacggatatttctttgttatccgagagacagtacaagaaatcatcttaattggtaccattgaacactgaggcccccttcggatattttaatctttgggcgtagtgtctggcttctagtatttcttcctgggataatttcttcctcggagcatgtcaaataatgtagtcaacatcttcgttcgaagctttgggggcaggagcttcagtcttttctggtacaatctgccttgctgttttgtcctcatgtgctgtaggcttcgtctcggtgggcactgaaggcccagcttcggctttggcctgaactttcgtagcttcggtaattttcttaggagcagggctcaaggccttcgtagtctctataacagcgtctaatacgctggccatcctcctcctcttgggagttgcggcaggatttttttgcatttttggcaaatctgcctctatcggtgggctaaggatttctggcgtttttatcaccttttccacctgtggctcttcagccttatcatctctagcttcggctggcccaactgtatgcaccttcggcactacaatcggctcttcagtactctacacaatcggagcagctctctttgcttcggcaactgaagaggtccccgcgccaaatttaggcaccacggctggttcaatgtaacgcggccggtgggtcaaaccttcatctttttacccttcggctcaactgcagtggccaaagcggcagtttttctctttttctcttgacctcgtagcaggtaatggtaatcagggtatacaaagccaatagcatcaaataccctattcaatcttttcttgccccgacccccgaaagctgcggacaaagcattatcttcggtcttgaattttgccccaagtagctcatcgctggtagcttcgatacatttcaaccagtcatcgtctagctcatcagacttctccctaaatctgaaggtatacttcaatcagaccataccaccctcactagaatcggtggtggtctccttcggcatatcccag

SEQ ID NO: 114929 - DNA, 541 bp, Zea Mays
cttggatgatttggaaactcagaaatagagtggtgtttgatggtgtgacacctagtctctccctgctgctggaatctgttcatgaggaaagggagaaatggcaagttgctggagcaaggggcctgtcctttttagctggctctagtactgctcttggaggattgtagttgtttcagccaggattcctccattggctccagcagagggggaggaacacaaaaccagagaactccactcccaacatagataaaatgtctcctctactaatatattatatatttgtctcctgacagcatacaacatccacctgaaaggtgtcctccatttctctgacaacatccttcctaacagaagaaatgagccctctaacattccaaataagaatctttgaaggattcgtaggaagaacaaaaacaacaaacaaccacagggggaatgctcctacagatctactggtattgaccagccaaacaaggcagcgagggcctccacctagatctggttaagagggtggttaaaaagaacaccatatttctgcaag

SEQ ID NO: 114930 - DNA, 863 bp, Zea Mays
ggtgttttttgtctgaataactggcaggtttatttaatctatctacctttatcccagtttcacttttgcggagaacacatgcacatcccataagcacaaatatttgctttgatatgttaataccgaaaactgattgtgccttctcattttaacttgcagttgtagtcttagcatgtcaacgtcatttgagagagcagcagcacacaaagcaaaatctataattatcttgccagcacagcatgaacggtaagtatgtatcatgaaccttggactttgctcatgttagcatgtttctttgacgaactgccaattttctcaaaggctcaggctagcatgtgttacatgatgtttcctgtaccagagttatttgagagaggggcagcttgttctatttctcataacattcctttatattggtggatcaagattttgctgtcaattagcaagaattgtaacatcagatcatctggttcttgtgaaatatggtttatattcatttgattaaacattgggtggcagtaactgttaacttgaattttcaaatgaatggcttgaaacaatcacctcgtttctaattgccaaataacatatcgagacaagtgtcgaggatatgatacccggtccctggggcccatcggtcagcgaccacactagggaaagacctctaacaattggggctcgctagtcagtcggaggaggtaggtaacgtctaccctgcaagaactcgtccctggacaaacctcgtggcaccgagcctggggtcgggcgtggcggaaccggacatggggtggcatgccgaaggaaaaccactcgagtggatctcgcgcctggcccgataccgacccatcataaatgaccggccg

SEQ ID NO: 114931 - DNA, 411 bp, Zea Mays
gtcccaatgtaactgtctttcggcgaagcctttaactgtgaccttgtgccaggaaatggagaagttaaacatggaaatagtgccacaagcatcaatagtcaatctccagttagggtcagttttgatttatcaaattatcgaagcccaaaagattaatgtctggatagctcatatgaaggaaagaatgatgattgatccaaccacacaattatgggtagatgataagggagttttttggttcaaagatcgtttagtagttccaagggttcctaagttatgacagcaaatacttgatgaagctcacctatcctggtactctatccatcctgggactaataaaatgtatcaagacttaaagcaatggttttggtggactaaaatgaagacatagattgctcgatatgttgccag

SEQ ID NO: 114932 - DNA, 601 bp, Zea Mays
gtgccatatggccaaggaccccatggacgaggctttggttcttacttccctggcagaccatgatttccatcttgtggtgatcgttatcccccataagactgaggatgtttgatatttttcctaacaacttttcggctgttcgtgaagctctagatggttctctagccttgaccccgtgattggtaaggaatacatcacactcgaggataagtcaagaggtaaggttgtctctcgtggctccgttcgagtgaacgagagttttgtcctcaaggatgttgatttggtttcaaatttgtatttcaatctactttctgtttcgcaacttcttaaggatgactatgaagtgcgctttaagaggggtctttattgtgttttggaggcaaagggagagcttatttgcttgatttctccatttggttgagttttccaagctgattttcccattcggttgttccctctcgatgacttttagcaggatcttcctctttgatttggaagtggcataggaggttacgtcacttgagctttgatcttttgtgtagactgagcttacttggcctcatccaacgattgctcaagttaaaatttaagaaaggtcttg

SEQ ID NO: 114933 - DNA, 551 bp, Zea Mays
tcttaacaagaattaggagatagagaggatggaaggtggtcagttcagtaaaacgctgaagaccaaaactctgcaaatatctgaagaacgcggataaaagatctaaggcactgttgaatcagatgtgtgcgagtgatctggtgaaggggatttgatcgcggagggataacttcagacatggcaccatcccacgaactcagtcgtgtgtggccggagatatcccaccggcggtcgccatggtgcggtcacttccgccgcggtgtcacccatgcctcgttttccccttactgcgcctcttctctacgtggtagccatgcgtgaacaatgcaatccgcggtcgctgatcgttagtcggaccaccgtggctataaatagcaccatggaccacggcgaggtattcacatctccaccagtgagctcagttgaagcccaaattcacggaatcctctccacctctcccaaaattggtagtgcacggtgaaaccatagtactttacggccgtgtagccccaatctcacctcccaattccacccggaaccgtcgcggcgcc

SEQ ID NO: 114934 - DNA, 543 bp, Zea Mays
ctagcttggtgcccatagcttgttgaaggctcatccaaaatttggaggtgaattgggttcccctgtctgacactatcttccttggaatgccatggagtctgactatctctttaagataaatccgggcaagggtggctcctccaaaggtagttttcactgggatgaagtgggctaccttggtaagacggtctattattacccagatagagtcgttcactttttgggtccagggtagtccacttacaaaatccatgcctatttcctcccacttccattcaggcatgaaaggggttgcaataggcctgcaggtttctggtgctcggcttttgttcgttggcatgtgtcacaccgggccacatactgtgctgtctctttcttcatccctctccactagtatctggttttgaggtctaggtacatcttggtggttcctgggtggatggagtaggctgagttgtgagcttcatcgagcaggacttctcgtgcctctccttttggtacacacagacggttcttgaaccaaaggactccttgttcatctgt

SEQ ID NO: 114935 - DNA, 726 bp, Zea Mays
gtggaatggttgagggttttggtgggtaggatgtttatgagataggtggcagtgcctagagctgcggcccaaaaggcagggggaccactagcgtggaaaagaagggaacaaatgacattgtttatggatcgtataatgcgttcggctttgccattttgggtggaggtgtaggggcatgacatacgaaggtgaatgccgtgtgaggagaaaaatgtgcgggcacgtaggttgtcaaactcacggccgttgtcacactgaataccctgaatggtgattccgaactgggtgcggacataggcaaagaaagtagtgagggtggaaaaggtgtcggatgtgaggcgcaaagggaatgtccacagaaaatgggagtaatcatctaaaatggcaagatagtatttatgacgagacactagtcaaaggagaggtccacaaatcacaatgtattaattgaaaaattttagtagccctggaggtggatgtatgaaaaggaagacgaacatgatgtcctaattgacaagcatgacataaaggagcagtggcactcttattacaagaaatgacggatgactgggctagatgtgataagacaacgtgaccagggtccccaagacgccggtgccacagggacgtagtagatgttgatgcatgaagggtggtagccggtagccgaagggggtataggggcctagagctatcacatctgaggatctcgcgccgagtaggaag

SEQ ID NO: 114936 - DNA, 481 bp, Zea Mays
gttgtttctcccctctcggtggtaagggcagagggaaagggcccttggctggccctttgcctcaccacgacgattcctgccgatgagcaacccagcatttaacaggtaccgccacttcctcctgtaatagagcgagcacacaagcagtatccaaggaagggggatgttgtacaatgacagcggcacgaatatcctcccgaagcccgtcaacaaaacgctgaatgaaatacatgggatcggtgtgacacccataggacaccagattgtccaccagcatattgaactggtcgacgtactccaagatagacgtggtttgcttaatgtgaaacaacttacgtatgaatagttcatactcatctttaccaaatctctctaacaccatcttagaaaatgatgaccaactccaggattgaaaattgtcatccaaggaggacaaccaacatgctgcagatccagtgaaatgcatcgacgctaccttcac

SEQ ID NO: 114937 - DNA, 309 bp, Zea Mays
acttcctcctcttctcagggcactatcaacatgatgtcaagtgctgagcagcagttttcagttcctcttcctccgcagcagctttatgtgcctgggacttcttagttcgtgccgatgcagggttttcctcagtatctggccgcgcctactcctgcaccgtctactcctatgccgtctcagtttggagctccgcgtctgcctcacctggcgggtcagtgggattcttctgttaatttcactccgggagcttccgcttctgcgggtatttctggagcttatgtgctacccgctgcggatggcagagagcaa

SEQ ID NO: 114938 - DNA, 499 bp, Zea Mays
gctcaacaccatcaactgatctgctgccttctctaatttcggctcttcggtcgggtttgtactagccttgactggcacaacatgacctggttctatggcagaaggggcaactcctacacgttcaataagctccggcacatcggccgtctcaatgcgtcgtggtctacgtgtcaagaccttcactttctttgtcttcgacgcactagaagatgccgaagcaacagttttccttttccccttttgtttctgaacaggaaaacagtagtcagggtagataaacccgataacatcgaaaaccctattcagtctctttttccctcgagcgctgaaggcgactgtcatagcttcgtcttcagccctcgggtaggctccaagcagctcatcacttgttgcctctatagcatccaaccaatcattattaggctcgtcaaaccaattcctgaaccgaaatgtgtacttcagataaaccatgccactttggctggagccaacagtagcc

SEQ ID NO: 114939 - DNA, 697 bp, Zea Mays
gtgaagtaaagttgacctgggatgtagctagagtgaacaacaatttgagttaatatattacgaagaatgatttgaagaacaagagaatatacagtgatatcaggttttggggaggggggttatttagcatagagcatgcaaggcccatgcatctttctcaatgtccccactacaagctactctatcaaagtccaaagtgaacacacacaaacatttcccctacaatactgatacatatatgcatatggtaatccataaccaattcatggttcaagataaattaacaggaccactgatcatcattagtcatgagactgtacatgtatctttctctgagaatgttttattttttttggaattccatggcatcgatgagattcagaaaccagtttcagccgatgatgggcgtgtgttaattatggcttagaccagagtagtcttggtagaatttgtatgtcttgattttcagaatcatctgccgaagtccgccaatcggtgacagcaccatcagcagcaccccaatgacaatgcatatctgaagaacatgtagaacacaggggaaaggaagtagaggtcaggccgacacgttctgatgatgctgaagagggactctgggtactcagttgcattgcatccatgttattcttacccagttggtaagccatgagaggctgaaccttctgggcttgtagatgat

SEQ ID NO: 114940 - DNA, 462 bp, Zea Mays
cgagtatgtgtctgggaaggaaaggagctttcatccaacagtcgagtccatgacctggtcaatatgtgggagaggaaaatggtccttggggcatgccttattgagcctgtgtagttgacgcacatcctccaactcccgttcttctttttgacaagcacgggatttgtgacccacattgggtgatgtatttcccttacgaatcccaccactaggagcctcgctacctcttcacctatggccttgtgtttttcttcatcaaagcggcgaagtcgctgggtcactggctgttggctggatattctgggagtgttcagcaaattccctcgggattctaggcatgtccacgggcttccaggcgaagacgtcatgattggcccggaggaagtcaatgagggcgccttcttgtttgtcggagagtgttgtcttgattcgaacatgcttggaagggtcgacgtcgtcgat

SEQ ID NO: 114941 - DNA, 619 bp, Zea Mays
aagaaagacaatacacaatggatgtttatagactaccgagcgctccatgtgttatccgtcaagaacaagtactcgctaccacggatcgatgacctattggatcagatgagagtattgtgtgtcttttttaagatagatctccatttagggtaccatcaacttaggattagaccgttggatatatctatgatcgccttcatctcaatgtatggtctatatgagtatatggtcatgtattttgggctcaccaatgctacgacattctttatgtacctaatgaacaacatgttcatgagtaccttgacaagtttgtcgtagtattcatcatcaacatcttgatgtattccaagagtgaggaagaacacgaggaatacctaaggttggtgctacaaaagcttcgggaacatcaactctacgctaaatttagaaagtatgaattttggattgatcaagtacctttccttagccatatcttctccaacggagggattgttgttgaccccaaaaatgtgcaggatgtacttaattggaagacaccttagaatgttagagacatctagtgctttctataaatggccagctattactgaaggttcatcaattggttcttgaaattggc

SEQ ID NO: 114942 - DNA, 546 bp, Zea Mays
gcaagtgaaactgttctttagtaggaaagggtaaaggacatgccggtggccggtggtgatttgattttagtagccgcgtgctttaccactttaccggcaaccaatcatatcagtactaactaacatatggaatctgtgcccagccacataaaagcagcaggtggtgtgaccatgtgtgtggtgagtcaaatgcggacatgtcagtccctgacattttttaaatctaccgcgcgcgggaagacgcgagcgcctaaagttaaggaaaatgtatagttaagagcaagacacgtcaaataactcgatagtgaagagatggcattgatcgagaacttggctttaactatgactagagcgatgcttacgcgctttctcaatgcctgcgtaaaaatatcatcgtcaaacgggagtttatatttctgtcgttttttctttctttcacatcttcattatgtacattacttgtgtacttgcgtttggcttcagcacattacttgcgtttggcttcagcacagcaaggctgaatgcgcaaacaaaacatccacaacc

SEQ ID NO: 114943 - DNA, 524 bp, Zea Mays
gaaaggtcgaaaaaccgtatcatcacctttgcaagaatgggttatgcctaactatctagtgtggcactcacatggagaagtagagcagaatatcacagagtaagacataattgatgatgatgaggaggatttgatggatgacttggtggcagattttagtagagagtatccaacattggactcagaacaggctacaccagtggaagtgtaggagttttataagtttcttcacgtgttagaggaaaaagtgcattatggcaccactatgaccgtgttgcaggtggttacacgtcttatggcgatgaagacaaagtataacttctcaaataattgctacaacgatataatcaatctgattaatgatctcatcccatcgaaccataagatgtcaaaaaacttataccagtctaaaaagattgtgtccggtcttggcatcaagtataagaagactgatgtgtgagaagataattgcatgctgttcttgaaggaatatgaagaggccacccattgtcagaaatgtggta

SEQ ID NO: 114944 - DNA, 410 bp, Zea Mays
gcaaggtcagtgggacaccattttacatttttgcatctatatattatttttaaattatttaaaactacttaaggtgcattaaacaagttaaatcactaacttaatcatacatgcacaataattcatgaaatatttatcagccaccaaacatcacaccaagagtctactgtaaaaattgcaacctatttagagcaccagagctacagatccaaaaataacaagcaaataaatcttcttttctctattttacttgttttaattaacacaccaagaaaacagtgaacaacatataagttttgtatttttcttagctagagtatgacaacatctaactaacaaaacaggtttcatcatttttggatttttataaataaaattatggagagaagcaagttcgtttattctctaaa

SEQ ID NO: 114945 - DNA, 551 bp, Zea Mays
ggcgtctagagtggttcatagttgataattatggaaattctcttccctcccggtcgagaagacaaccagacgttcgcacttcgagctggaccgagtctcccacagatcaggaagtggttgaggcaggtgtgttgctaactgaggtgggactgctgaaagagagaggtctaactgctgaagctgtggtcgctgactttgttttcaagaacattcagccactgaaagatagggcctatccagcatatctgtatcgagggctggccgactcaactcgggttactaataggagaattccttctgtagacttggtaagccgacttgaaatgatcctcaggggtaaggtgtcaaatgttggtgctccagcggcatactcggcctggaacctgcctcctcccaaagccttcaccctttttgtgtcaaatccgcccgtgactgatggcaatttgggccttagagtgcgaccctctgctgaagaagtcaatactttggttgcttcacttggggagattcctgatgatgaacgacaggttcattttgaagtgcccctgaac

SEQ ID NO: 114946 - DNA, 640 bp, Zea Mays
ctttactgttatgtcatgatgccctacggtctgaaaaacgccttgccaacatttgtgcgggcgatgagtaagacttttggggacctgatcagggacaaggtggaggtatacttcgatgacatcagagtcaagaccaagagagggtcgaccctagtggaagacttgtccctggttttcgactagctgcgggcaacccgcacaaaactgaactcgaacaagtgcgtctttggtgtctccgcagggaagttgctggggttcctggtttcgtaccggggcattgaggcaaacccggagaaaatcaaggcgattgaagcaatgcggcccccagctcgtatcaaggacgtccagaagcttgcagggtcattagccgcccttagccgcttcattttgaggctagctgatagggcgctgcccttcttcaagctgttacggaagtccggtccattctcttggaccgaagaggcagaacaagccttccaagagttgaaacagcacctagtgtccctaccaatactggtagccccagagcctggggagccgctgtatttatacatcgcggcgactgtagaagcggtgagcatggtgctagtcgttgagaggacagcacaagaagaccaagaacctgagggctcgggaccgg

SEQ ID NO: 114947 - DNA, 409 bp, Zea Mays
cttacattgtatatagggcttttcctattttcctcttcaccttctatatcttatttctcaaattattggttcccaaaattaggtttaatgtctcttccaccatttgcatatttcttttatcattatctttatgagtgaatgcacaaacaaataaatcacagcattatgcacaaattactttaagtgtcactaattaattaatgacttttgaggtgttggttcacatgttacaataaacataggcaaaaatcatgtatctatctcaactatgctttcatcttacatttttgggtattacaatgatacattatatctaaactagcataaaatacttaaaaagtgatcttttcctcccaagagttgagattcttttcctactattgacacatgagttgagattctttttctc

SEQ ID NO: 114948 - DNA, 524 bp, Zea Mays
gaaaattctggcaggcttcacaggaccttgtgacctgatttgcagcgcagatcatggcgggccagtagaaaccttgacggatcacctttgcggctagggccctaggccctgcgtgagagccgcaagtcccgatgtggacttcgcgcaggatttggacgccttcggtctcggtgacacatttaagcatgggttgactgacccccttcttgtaaagctgaccttcgattagtgcgaagtctcggcttcgatgtttgaggcgcttggcctcattgatatcggttggatgatagtacccctgcaggaacagggttattggtgcccgccagtcttcagtcatgatgaggttgactatgcggtggccctcgctgtcattggttatttggagcccctctgggctacggacggctggcgtgccgatgacatggtagaagacatcggagggcagggcctcgcctctggcggctgccttagccaatgcgtcggcctcctcattcttggcgcggtccacatgctgtaaggtaaaa

SEQ ID NO: 114949 - DNA, 779 bp, Zea Mays
gatgggattcaggcgaaggagcaacagtatcctgatgcagtacacgatcagcaggcaaggtggtcccagcaggcacctcggcggaaggcaactgaggtgaagcagatgacccaggcacatgttctgttggtgtaaatgtgccagtatcagcaggctgaccagatgtagccaaggaggaagattcgtcgagccttcttgtagcagaggtggtcgcatttagcgcaggcgctggcgctgcaacctgtagccattcttgagactcaggcagggatgaggtggctggattttctgcatgaacaatgttagcaggcaacgacatatgcacatgatcataattcacatcagtactactaatgtccgactgcaatttgcgcaatgtggaggaacaatcggaatgggattggacaagatgagaagctgctgagcgtgcaaaaggaaaaatattttcatcaaaaacaacatcccgagaaatatagatgcgaccagattctatgtcaaggcacttataccctttgtgaagcgaactgtatccaagaaaaacacattctttggagcgaaaagcaagtttgcgattattataagctcgaagatgcggccagcatgcacatccaaaaattttgagcatggagtaatttggaggagtattaagcagacgctctaacgggcacttgttgtctatgacacgagtaggaagacgattgataagatacgtagcagtaagaaaagcctcatcccaaaattttagaggaacatgtgcatgggcaagaagagctaggcca

SEQ ID NO: 114950 - DNA, 283 bp, Zea Mays
gaataatcctcaacgtcaaagtgaggtggtttaccaagtggaacagacagtaactgggcatgtgaatttctaggaatgcaagaatagttaactagagtgtgattagaattagatttggtcatcttatgtcggtgatgatgtttggaggaggatttgctgctacttgatgtagatggtgatgaggatgagtccttctcatagtagacgacattcttcatccttctcttttttgccaccattcttcttgtggtgtgagtcgatgggcttttcatcttgtgtcttg

SEQ ID NO: 114951 - DNA, 507 bp, Zea Mays
cgggcgaagaggacttctactctacgactgaccgtaaaggacgatgacgtcaagcagaggcccttgaacaatcgacaccgaccaaggccttcaccatagcgtcgcccccagagccaaccgcgccatacctctgtcaggggagagcgaagggcgccgagatgtgaaggctccggaggtggcggcgaaggctatgcggcgaccaacacgtcgttggtccaccaggagacgcttccagaggcccacttgtcagtgtaatgtatggaagtattatttagtgtgtgctgccagcaaggagaacagtgttgtaattaccctgttatgcggaatattctttggatatagttggtggactagggtaggaccatactttggactacctgcccctggatgaccctataaatacccccgtcctatactcctacagatggacgggacacacataacgagacgctacagtttccacctaccgtcttgtcgcacatcagtgtttcttgtctctgtctctga

SEQ ID NO: 114952 - DNA, 360 bp, Zea Mays
gtccatgttggattgccgccagtccaatccgaggaggctgcggtgacacatctatctacggctcttgctggtatggttactttagaggtcagtgaaccagacgccagaaattcgccgcctgccgatggggctgaagttcctccaagtcctgcctctgatatcattcccgctgatctcccctcgtcaaccaatgtatcaactctttctgccttgggtcttcccttgttcctctccaatcttcaggggagtcaactttcgcttttttattgttcccattggcaaactaactttttgcttatcttttcataatcataggatgtccttggtggtgtatgtgcccaactgagatcctgtggtgct

SEQ ID NO: 114953 - DNA, 353 bp, Zea Mays
aattttttggctgaggttgtttctacagtgatttatttgattaacattcagctgacttctattcttctgggtgggattccttttgagcgtctttgtggtaagacgtctaactattctagtctttgtcttttttgttgtatgtgctacatgttgttttcacaacgtgagcgaaccaagctgacgacatagtttgctgagtgtgttttccttaggtacaatgctgagcataaggggtatcgttgttggcgtccggtcactcgtcggaccaggaattctcaggatgtggtttttgattaggctcgtcctttctatcctcgaccctcattgatgcttcttatgtgtctttagttgac

SEQ ID NO: 114954 - DNA, 909 bp, Zea Mays
gttgtcattggacctgccatactatagacgagttgtagctagaaattttgttgtgtgtgttctgacacaagaccatcaagtttcaaagctgcccgaaggtgcacatgtggcatccaagtttatttatttttctcgaaccagcaagagagctgcacgttatattaataagggaagaaacagcaatacaaaacagtgggggaaaaccctcccaccagccctaaaacatcacaaatctaaatgaccgagggccaactccttcatcccactggcccctgcagagcaccacacagcatactccgatgagatgcgctgtaaaggcctaccaacagcaggttgcatcccattaaacacagtcatttctatgcttccagagctcctaggcgacaagagtaacgaccgtattcaatcttttccttgaattcttggaaatctgcctctttgatctgctccacccgaacagaaaacagtcatctgtgggtcgcggaaccaatgatggaagccccagcttttgaaagacagcagcccatacttgcctggcaaagacacacgacaacaggaggtattgaatggtttcagcttcttggtcacatagaggacatgccaaaggatgaggtagtcctcgttttttgagcctatcagctgtccaacacctattcttgaataccagccacataaaaaaactgcacttagggggtgcccaggttttccaagccaatttccatgggacaaacctgattgatccctgaaagcaggctttataagctgaacggctcgagtaggatccatcctgctcaagtctccacttgtgctgatcatccacacccggttggagcccaaactcatctagaatttcccacaacttcagaaactcaataatcacagggactgtgagggcgcctctgatatctc

SEQ ID NO: 114955 - DNA, 400 bp, Zea Mays
cccgggaggtcttcgacttcgcctcccgccacataaaaccaataatcatactaattgccccacttgttgtgggtgcaaggaaccagctccacaacctccgccaaagtcttgccagtcctcggcgtaaaggtgcatgacccaaactgtgcaatctcgtctccaactttcctcttctgccagtgcaaacaataatttttggcgaagacctctacgaagggctgaccgccatacggagtcactgcccagacatacttcgccagggctaccacgacattaggtgtcaattgatgaatctgcacctcaaacctctgcaacacctccaccacaaaatgatgcgcgggtaaccgaaggcccgcagtaaaaaatgcctcgaacacaacaatctcaccctccagctctg

SEQ ID NO: 114956 - DNA, 649 bp, Zea Mays
gtgcaagctccaatgactgtgccgcacgttacgaaagcgggtgattgtgtgtcagcgctacgtccatgggtcgcacagtaagccacgcgttaccgaggcagactgttgtgtctcagcgccgagtgcgtgggtggcaccatcatgagcaaccactggcttaggcagagcatccactacaacgactgccaaaggcaatagctcgagtctatcacctttaactcctgcacatgtcagccaagccagcccctacatatgtcagcataccagactccactccgtagccgactcgagccggcagacagggtgaagggatgcttggttagaagatctacacgacgatcaagggagaagatctctgttcgccacaacatttaatacttcatgttgtacatatttaatactagatcattggggcccacctgtcggggctcatcaaccttgtatgtgccccctttggactataaaagggagggcacatacgatatgaactcaggtccacttagacacaactcaagctcaagcaacacaactcaccagtggacatagggttttacgctccggtggcttgaaccgctctaaatccttgcgtgttcttgtgttccaccatctcctcaggctaaccctaggcaacccccttgtttttagaatt

SEQ ID NO: 114957 - DNA, 980 bp, Zea Mays
tttggctcagctgttgataagtatgtggctcttccagctcagggtactaggggggagtgatcatcgcttggaaaagcaacatatgtcaagcaaaagcaattgccacaagaattgataatttttctgcctcggttctttttgcggaacaggaagggcgtaactggtggtttactggagtttatggcccacaagctgatgaagacaaggtcacgtttttacaagggctaaaagatatcaggatgttgtgtaatgggccgtggctaattgttggagatttgaacatgatttatcaagcttcagataaaaataataataacctggacagggccatgatgggaaggtttcggagattcataaatgaaatatatttgaaggaaatccctcttttgggccgtaagtatacgtggtccaatgagcggagatcccgtaccttggtgaggctggatagggccttttgctgtttggagtgggaaaatatattccctgattcagcttctattgtatctgatcatttcccgttgattctcggattaaaagttcaaaccaagggagagcggagattccattttgagagcttttggacgaaagtgccgggatttcttgaggctgtccaacagaactgggaagctcctgttcagtccacatgtgctgtagagcacctttttctcaagttgcaacgcgtcagcaaagatctacaaaagtggggacagagaaaagtgggtaatatcaaattacagcttgaaatggcgaaggaaatactgcatcggctagagattgcaagagattccagaagcctctacaacagagaagaatggctaagaaagaaactcaaacttcactgtcttggtcttgcctccatggaacgaaccattgctaggttgcgttctaggattctttaccttaaggaaggagatgcaaatacctcctttcaccaacaagcccggtttagaaagaaaaagaatttcattgctaaattgcaa

SEQ ID NO: 114958 - DNA, 378 bp, Zea Mays
cttgccacctaggcgtgatgccatgaaatggacccccattatccggaggtgatcttgactggggcccatggagtcaaatgcgatggagtagagaatattgagcctgctgcccccatccatgagtacctttggtagtcatactgacccaacgatgggattgatgataagaggatatcgctcgagacaggggacgtgctcggggatggttggagcgatcgaaggtaatgtcatggttggactagttgaggaaggtcgagaccgcttgtcatacgttgaatacctcacattgttcgagcttctagtgtttttttgaagtgtagtagtcagacccgtcaaaggtcagcagacactcgtttcatcatggaatgcggggcccct

SEQ ID NO: 114959 - DNA, 340 bp, Zea Mays
gaagatatagtatgtggagctctaggacaggcacaatatgtatgtgaatgtggaacaaaatcgagtgcagattagcgaagttcaataagtgtccaaagcacaagtcacaattgttggctaagacgtgtcctatcgaagcacaacaagataaaagtaacaaactagcagaatggcagttctataaatagcgcagatttttcagcactagtagaaatcaaaggcgcgtttccaaaggagtaccagcaaacgagctcgaaatattctgaattttttatcactgatccaaaatcacaattgatggaagcacacaaaatttcacttgaaacagagttgtattgtg

SEQ ID NO: 114960 - DNA, 618 bp, Zea Mays
aagaggcaaaaatttcatgtcagtgacaaattggcaatcagacatactccactcaactgctgggagatgataacggcatgaaagcacttgaccgttggctacttgcacagatatggttctaggcaactcttgaacaccagacaactgtggccgtaagcggtcactgacaaaagtgtgagaagaccctgagtcaactaatatgaggatgtcgtgttgctgcatgcgaccagcaaatcacatagtggttcctttgtcaattccttcccatgctgctggtgatagagatagtgccatcatgatttgttccggctggtcaggtgcgtcttcgacactttctggtactgccagtagatcccatacctcctcgatggcatgtaactgtaccgtgctggcacatttgtgaccgggaaaccatttctctgcacagcggtcgcacaaaccgcgagcacgacgatagcttttgagcgatgctacacgatcagctggtgaagatgcacgactgaagtcaccagtcgttttgtcagtggattgattttgtccgcctggttgttccttcttgctgaattcagacgacgccatatgcggccaagccatccggttggagaaaggctcagcatg

SEQ ID NO: 114961 - DNA, 1229 bp, Zea Mays
gcgagagggggtggcttgggccggaagaggcccaggcgaggggggttttcctttttttcttttttctatttcttatttctattctctatttatttttatctctttttcttttgaacaataactagctaaataatcttaggtgctaaaaataatctacgtgaggtgcttctaacaatcaaagtgtatgcatatgatgagatgacctatgggatggagtttagggggagataaaaaaggttaggagattagggttccaaaccttgggttgaaattttgggatgttacaaacctaccccacttaaaggaatctcgcactcaagatttagactgggcttgagaaaagataagggtattccctcctcaaagagtcctcactttcccaagtagcttcctcttctccttctctgctccactgaactttacagagcctcacttctgagttgcgggtcttccggactgctgagtcaagaatctttattggcttttctcgatactgaagatctttctgaatctggattgcctcttcttcgatgagactttctggtacttgcaggcatttgtggagctaggacacatgaaacacattgtggatatcagacatggattctggtaattcaagacggtatgctgcgggtcccactctgccaatgatgggataggggctgatgaatcacagtgctagctttcctttcacttggaaccttctgacaccacgcatcggggagaccttgaggtagacgaagtctccttcctcaaatctgagctctctctgcctgttgtccgcataacttttctgccgactctgagcttcaagtaatcttttgtggatcagggcaactttctcttcagcctctttaataaaggcaggcccttctagtgtcttctcccctacgttggaccacatgagaggggtctggcattttcgtccatacaatgcttcaaacgatgacatcttgatactggcctgatggctgttgttatacgagaactctgcataaggcaaactagactcccagcttctatcgaatgttaacacataggctcttaataaatcttcgaggaccttgttgaccctttctgtctgaccatctgtctgggggtgataggcggtgctgaagtctagcttggtgcccatagctttctgaaggctcgtccaaaacttggaggtgaactgggttcctctgtctgacactatcttccttgggatgccatggagtctgactatctct

SEQ ID NO: 114962 - DNA, 358 bp, Zea Mays
gcttaatactgctacccttctgcatctacctcctaactgaattctgaacacgggaatgaacggggggcgctcgtgaaggagcggccaaggacaaggagtagtaataaccatggattgggtggcaacaacgccagccaggctcgctccaaggggaaagagacaggatccttcatcagagacggacgaaatccgctgcttgcagtgatcggtagtagctagggaggaaggcagcgtgtataaagaaacgaagaaccttcttcttttcttttttcccctttccattcacatgctaattaaaagcagccaaaactacaatcatgcaagtgctactgcgatcggcaacacagtgtctgtcgtg

SEQ ID NO: 114963 - DNA, 550 bp, Zea Mays
cctccagatcttgttgcatcttcagaaccttgcttaataatatactctatcgaaatgaccttcgttagaacacgacccaaaagttaataataatagtaataaaataacaaaaatatttgttaccttgaagttggcataaagcaagcttccggcgatgtggtgtcgttgataacgacacaagtcgcttccagcttcggcaagccaatgcttttggaaagggttctgacaattttggcctcggtgcggttccgaaggcatcttagtttcccttcgttgaccccaccaaatagcatagcccctgatttgtatccgcaagatatggcatattttttcaactcctctttttcggtgtctgttaattcttgtccgagcaaatcttgaaagtcgaaatctccttctgaaatttcattaatttgctctttccccttctcagttgccgtattcactgtagccacgatagcttcctcttcagccatttttaggagtatattgtcaatagcctcaattgtggtttccaggttcgactcttcggtggcctcggcttcggccc

SEQ ID NO: 114964 - DNA, 399 bp, Zea Mays
caccatcagggcatagaatattttgggttaagtagttgctattggctttatcattactaactatacaacttctttttccttggccattggcccttcattgttatcattaataaagacatccgtagtgcccaccttaataacattataagttgttattctttccaatttttagagctgaaaaccgatgactcgggtataggcgttgatattagggaagttttctccctatgtccccctaccgaattagtctttgtggccgaggattccagcatccttgctgatcttgtgcttggggaccagattgaggagcactcaattggtcaaatactgaagtttaggatgccctcatgcatgtggcatcccataagtatattatgtgtgaaacatatgtgctcccca

SEQ ID NO: 114965 - DNA, 646 bp, Zea Mays
tgcgaaaccaacagtctgtcattttcagtttggctgtagaaaactcgaaaacatttcagctctgtttctgacgctgcaactctgtttggaagtaattctagcgtttctgcatgaaagatcgggaccaaattacccacttgcgatccgctagggacgttgagattcaacctgatggcccattaaacgtttggcccaacaaaccgtgcgctgacgcttctcaccaaagcccattccaccaatttttgtgtcatttttcgtaaagctaactattgaggaagattccagattcagacccgaacatgaacccgtgaggaatatacagaagacatgttcccttttcttctcgttttggcataagagataagagacagaaggtgggtaaactctttccttattattcattacgataggagagtacatatttatctatatctatatctatatttatatactaatctattaagaatctaatgttggcacctggtgataccatgtcttcagcctccgcgctaccatatcatatcatataaaaaatagtgcaaaacgagcaatcgaatccacacccctttactctaaacattatttagaggtaaccaccagaccacacatactttaatgtatacaaataaacaataattatatttta

SEQ ID NO: 114966 - DNA, 1073 bp, Zea Mays
attgctttcaggttttcatcagaaattagtttctttgcgggcataacaattggtaaccaatcatcatttgtgctgttactaatactatggtcctcatattcctcatgataggacaaaggggagctaataggcaatccagctccaataaccagacattcatgatctggtggagttccctcatccatatctgcaccgatgccagaaacatgtgccctgaagtcatcttccgctccatacatactggagtaatttaaagacatgctatctgcaagaggatgtgaaataattggttctgccagagcattggcgttttgcgtgttagcttgtgaccacagtatgtctgtttgcatctctaccttctgagggatctcagcaacaccactatcctggtcttcagctataaggtcattaaccaattttgtcttggcttcagcttttggtgaagctacttttggtgtttttgacagtatgtccctcttgccagtacgtggagaaacagcagtaaggacagatgaaaacctgtcttttctaccttcagttggggagagaggctttggatgtgttgaactgaatagtttactggcagctcttggagagaaaggatctgaaaacaatgggctaatctgtctgtcaggagtgattgaaataggcccaggaaatgatggatccaaatccattctgccatcaggaggaatcgcaggagcattctgtggtagaaatagatctcttttgccagcaactggttgaccagtatatggaaagacagtcttttctttgctagttggagcacaatctggcccagaagaaacatcatcaacgaccctctgcgattttttagaatgcacaagctgtgaacagccagatgggaaatcactttcactgttaagaaaaggtccttctttgactaagtacagttcttcatactgcctcaacccaaaaccatggtattctaatagattttcaacatcctcgcccttgaaagagaaaatgaaggcatataaggatttcacaagttcccagttcagaattagtttctgtccaaaggaagaaaacatactaacctccatagcaag

SEQ ID NO: 114967 - DNA, 325 bp, Zea Mays
ctgggaactcggacacaaccttgataacctcgaatggatctgcttctctgctattaacagacatatgataataacttcctttattcggctcaggcgggactaactcggtcaccacttcctctcctagtggagacatcaacttgattgtcctcttatcacaactgataactgcttgatacttgtctagccagttcatccctaggatgacatctattccctgagtacccattactataagattagcgggaaacactatcccccttatttccacacttacattcaagcaaatgctatcggctcgaattctaccaccggctgagtcaat

SEQ ID NO: 114968 - DNA, 341 bp, Zea Mays
cgcggctacaggtgatcgatatatgcaaggaaccaaacatacggtatatctctcaattcccttccactacactcctcactaagtatagggtcggatataacactaaaaacgatatatggacctttagacacaaaaaactagctctttctacaacagtcacagctaaccatactagtcggtatatggacctttagaggcttattcggcacaagagccctactggctagaaggaaggtgtatgtagtaggtttggatggccgtgaactgactattgtgctgttcaagtgtttcggagatttgggtcactggatgtccttggttgctaagaggctggttgctta

SEQ ID NO: 114969 - DNA, 773 bp, Zea Mays
taagtcgagtaagcgcgagcatgttgcaccatcttaagttattgctgacttaaggcgattgctccgttagtagggtatagtggtcaccctaagtcgagtaagcgtgagcatgtcgcaccatcttaagtcgtcgccgacttaagccgattgctccattagtagggtatagtggtcaccctaagtcgagtaagcgcgagcatgttgcaccgtcttaagttattgccgacttaaggtgattgctccgttagtagggtatagtggtcaccctaagtcgagtaagcgcgagcatgttgcaccgtcttaagtcattaccgacttaagtcgattgctccgttagtagggtatagtggtcaccctaagtcgagtaagtgtgagcatgttgcaccgtcttaagtcattgcctacttaagctgattgctccgttagtagggtatagtggtcaccctaagtcgagtaagtgtgctggttccaagtctaatcaaatcgaagttaattgataaccaatagtttgagtgcctttgagaatgaaatcttttattgatgacatattttccaatttcagagtacaacattgctctgatagcttttgaagtcttgctaatgataaaacttcctgaaatgctctatattccatgaattccccacttccgtgccatccatttgagtaagccgatatgatcctggccgagtaacctctgataccatgaatggcccttcccatagcggtgacaatttgtatcatccttctcccgttagaattcggcgaaggacca

SEQ ID NO: 114970 - DNA, 319 bp, Zea Mays
caagtgatgcttgtgatctccagttttctgagttatggtctggcactttgcgtcgacttatcgagccaacccatacttctcctgacataccccttgaatttcgaaccctagttctcgctttttcctccaccgcttctctgttttctgagcccttgagtccacccgcttcgcttgagagatcgcgatggctcctaagaggaagagacagagtgttctgctccaattatctcaccaacagatcctaacagccaacttccatttgtcagcaaccacatgttcgttgtctccgaggctgaccttttgcacctcgtcaaaactg

SEQ ID NO: 114971 - DNA, 667 bp, Zea Mays
gttcagggtttttctctgcccttgtggctgaggcttcttattaatcataataatgcctcgggaaagctgttcccagggttgtgatttgttttttttaagcatgggttttcatgaggtatttatttcttgccatctcatgagatgccaaagttgcattcactccttacccgcggagctcttttttgtccgagacaggcatatcttattcatgtactgtgtatgtgcatggcacctgtctaaacagatcaaccttgtcttgcagagtcaaattgttctgtcagatagccattgcagattatataacattatgagatgaatatgcatgattttatacgttttaagaacattttcttataaatataagataacatttttgttggtgcacccttattggacacgaaagacatctcacacggaagaacttgcaactctgcagttgatttccatacatgaatatgaatatctataattagcatttatatgcgaaagggaaatggcatgattcttagaagataaattatatacattgactataatggaaaattgaatttgaatccggataaagtttgaattttaaggcagtgtacaactaggattgcgaatttgtgatacctctctgacaagaacctggctgggctctgtaatcttctagagtcatgggattctg

SEQ ID NO: 114972 - DNA, 423 bp, Zea Mays
aaacaaactaactccttcacacaaattgcattatggacctactcgatcactcgaagcgtctactcaatgtcatgaacacaaacatacactatatgtgaagcgtagttcaacgaacatataatacacactaacctgactcataaacacagaggagtgatgactacttcggcatgtccccacctctctatccaatccaaatcaatttctaactacactgatcaaaccatcatatcgcgcaacacccatacttcactgtcttgtgtataaccatgttgcgacaagcactcgagacacttccatcaaacctaacgtaaccacttatataatgtgctctgacacactgattcaccgatacgtccttcacatacaccgacgtttctcactctacttatcacatcaaacgaatacaatcatccatttctc

SEQ ID NO: 114973 - DNA, 386 bp, Zea Mays
gccttcctcgggcaagtcctccaagatgcagcctcaagtaagcctccgtagccacctcagtgtcgtcatcagttcagcagtctcaagcctagaggattagccgatgccgcggtggcttggatcgtaccgcttagtctcagtggtggttgtggattcacggagcgattgaactgaactggccctgctgtttacacgcgcccaagagaattattactgatctcacacttgagtgccttccaagcttccagattccggttagtatcaaattagaagtcgttgtctcccgtgaaattctctgtagttcaggagtagcaatgggacaaaaaaagatttttgcttcatttggcaccatgcttaatttccaacaattcagttgctcattgttt

SEQ ID NO: 114974 - DNA, 743 bp, Zea Mays
aaccgactcaacaagagaggccaagtcaataggaatagatgacacactaggagacatcgacacatcgggagaagatggattaatagaaggagatagctcatcaggcgaagatggcgtatccgaagaaggaatcgtagtgcgacgtgtgtaaacttgtgtcactagaggcttcatggaataaccaggaagcaaagaagaaggcttcaaagaagacatagaagaagactgcaatggtcgtgaaactggtacagtaagagtaggggcatcaagaaagaaaagagatagggtcaactaatgatgctgaagaattatcagaagagggacgaggataaaggacgagtctcataaaaaaccacatcctgagaaattctcattcgtcgagcaaccagatctcaacaacgataccccttatgatcagcactatacccaaggaaaacacattcagtagactgagccatcaatttggtctgcatatggtgaaagaaacacgcagcacacacaaccaaaaagacaaatattggaacaatcatgcgtcttgccacaaagacgctcaaaaggaatcccaccctgaagagtcaaaaaggcagaatgttaatcaaataatttgtagtagaaacagcttcagcccaaaaatgagggggacctgaggaagcgagcataagggtatgagcagtctaaacaacaccattctgagcatgagcaccaggacacgaaaattgggcaagagtaccttgtgtagaaag

SEQ ID NO: 114975 - DNA, 540 bp, Zea Mays
tgggagaagaagacccagcggcaccggcttacccctcggagggccccataggcgcgacggaggcagcgaccctagcaccagcatccgctttctatgaaagagtgctagtgctaggtaccacatcatcaagactacgagaggcgccctccgatactgaatgctccaccccaccggaagccatgaaggtcatgtcttcagtgtcggttgacagggtgatgctcctccccgacccgacgtgggccaagcgctcccttttcttttccctcttcctatgatggttgtgtttcttccacgccaccatggccgcctcctctgcctcccgttgccttttcctctccgccttgatagtggcgtcgccaaggagggggccaagaggtcacaacggtacagagcccctacaagagtggatgtcagaacagaccaaggcaaaagggaatggggaaaaccaaaacatactaggtcaggaactcttgcctgattaaaaggcaaggggccgctcacgtccatgaagtcggatgtcacccccaccgtgatggtgag

SEQ ID NO: 114976 - DNA, 296 bp, Zea Mays
atggtaaaagatacaaaaataatatgtttgtaagtaaaagcatctttaccttcagactgttataagcgaggctgtctgcaaggtcattcatcgacattgcagagaggccaaccttgagcttcggaaaacctatgttccttgccatctcccggcaaacagatatctccttgttgtcggaaggcagtacagaaagtcatcttcatcagtgccattatacaccaaggatctttttgggtactttaattccctggcatagtgtttagctttggcaatctactcttccgacaactgtttac

SEQ ID NO: 114977 - DNA, 683 bp, Zea Mays
gcgggtagtgtgcggacaacacgcgacatgagtgagcgacgcgtgatgcgtgaagcagaatgcgaacatgcgagaatcactaactaaatgttgtttttatactaaaaataaattagttaaaatatgtgaaacaatgaaacaatattattaacacgtcgttacaaatctaaaacaactggaacgcgacgaaatggatctacgacgtaaaatatattcaatatttactagttcacgtatttaagatgaggtagcgtattttagttggctaagccgaaaccacaaggagtaccacaaaatcgtggctgcaaccaatcctgcacaacactttttctacgtgagtggtgagccaattttattaaagcgcgcgaatcgcgtctcgctcgaacggcgaggcgagaacagcacaggcgagtcgtgcgcgggttaaaaacggtaaatcagcttcaatggggaaaacaatattaaaaccttagttaaataaatatttaataaaatacctaaaacatgtgaaatgatgaaatagtattagtaacacgaggacaacgtcgttgcaaatccaatgcacttaaaacagattgaaacgagtaattaaagcaaaaggcatggaataattacttaatcgcagattaccgatgatgtagtgcatctcactggtgacgaagtggccgcacaaagggtcacaa

SEQ ID NO: 114978 - DNA, 709 bp, Zea Mays
ttccgcctcttcgttccaagagaagggcccggacttccgcaacagcttgaagaaaggcagcgccctctcagcgagccttgaaatgaagcgactaagggtggctaatgaccccgtaagcttctggacgtccttgatacgggccaggggcctcatcgccttaatcgctttgatcttctccgggtttgcttcaatgccccggtacaaaaccaagaaccccagcaacttcccagcggagacaccaaagacgcatttgtctgggttcagctttgtgcgggttgcccgcagcttgtcgaagaccagggttaagtcttccactagggtcgaccctctcttagtcttgaccacgatgtcatcgacgtagacttccactttgtccctaattagttccccgaaagtcttagtcatcgctcgcacgaatgtcggcaaggcgtttttcagaccgtaaggcataacaacatagcagtaaagtccgtccactgttacaaaagcggtatgcttcctatcttccctagacatctggatttgatggaaaccagtgtaagcatctaggaacgacaataggtcgcacccggaggtagaatccacgatttgatctatacatggaaatggatacgggtccttaggataggccttgttcaggctggtgtagtcgatgcacatccgaagcttcccattcgctttggggacgatgactgggttggccagccac

SEQ ID NO: 114979 - DNA, 810 bp, Zea Mays
ctttttctcagttattttgtaattgccacgtcgtcacatatattcaaattttgaatgccaattgccaacgtattgaaggattttgtcacttcggttcgatatttcaatttataagaaagttgaggatcgagttactcgtgtagttttagcactgccagtttaaccggtacacactattttttaccgtttgatttatttctgtaatctccatgtatctatatagggtcacaactcactataagcgaaagaattcagccagcaacagtcacagattcatgattatgcaattcaatttcttgaatataacaatagaacagttgattctcttgtgtttcctgaagctccaccaactccggacaggctgaatgactttagagtcttgaaagttcttatcgcctctcagaagtaaaattttgaaacattttgtgtttcatgattgatttccttaactttcatgatttaccccaacgagcacttatggaaacagtttatctggtttgccagacagggacttgcacaaatagctatgcaatcgtaatatgatattttcttaatttttaggaaagtatcttctatactgtagaaacacttggtgtagtgctggcatacatggggtctctggaatctcttttaacatatcataaggtacatagaagcattatgcacacttcccaagattttagtgatcccagtttggttcctccttttagcttcacttcccttacaggactttgttaaattgttgaaccacaaggtggactgttatgtttgtgtaaagatctagcaaatgagattaaggcagttggccta

SEQ ID NO: 114980 - DNA, 349 bp, Zea Mays
ctctagagcgatctagactacgtgcataactcagaagggagtcgtgggtcagaggaccatcgttattacccagaacattaatcagatcttgggccagataaacaataaaccatatataagaacatcccagatacaatctactacatgtaccatactgataaacctagaaacatctgccactaaaaactactaaccgcacgtgtgaacatggatcatgatctccaaagaagtccaactaaagtaaacaatgagcctaagcatataagacaggatgccagatgcatatcggacatccgagttaccgtgtgcaaatgtgcagctagcatgttgtggaatatggcaacctatt

SEQ ID NO: 114981 - DNA, 442 bp, Zea Mays
actggtggttttcttaaagaaaccgccactggcggttggtttgcacatattactaacacatacaacgggtttgttttcgtatttggtgggtttgcacaaattactaacagttttgtaattgtacacagattattgacaaaggaatctagaatggagctattttggaatttgtgatccaactagtgtgggtaatgtgatgttcctcagtggatgtcacgaagtagtttgatgaatctgatttgtgtgtaatgtattgtggtattgagtactttctggtactgtgttgtaatgtattgtggtaatgaagtagttagatcaatattttgcactgttcgacggctgtgttggtaattcaacggaattgtgttacatgccccttgtatttccactggaggtcgacttaagcaaccgcaagtggaaatgctattttccactggcggct

SEQ ID NO: 114982 - DNA, 474 bp, Zea Mays
ttgctaataaggatggcagtgtcactcactttgggaaggttggtgagtgcagtggtttgacaccttcagagaaaccttcacccactcccaagcttatcaaacccacctctgctaagcctgtcacccctgtgagagatggtgtgattgatgaacctatgagagatcctcctcagaaacaagtgtggcttccaaaacctaaccatattatcaacacacttgacacctttcccgacatctctagttatccccttcctagagcccctcaaccatccaaaaagaaagcccccttccacaaacaaaatccacccaagagagaggtgaggtaccattgtgaatattgtgagagggatgggcatctagcttcgttttgctttaggagaaagagagatgagtggtgggtttctgagtcgagcaggaaggacatgaaccgcccctctcatggtgttcatgctcagcctgttcagagacgtcctg

SEQ ID NO: 114983 - DNA, 649 bp, Zea Mays
cacgagctaggcatcagacgccaaccctcactgggtgccattcaccaacacaagagaagggtatacaagtcacgattaatgcactaaaatcgattttggcactccgccggggaataaccgtaagaacccctcacaatcaccaccggtgtggcctcgaaaaatcaccaatcgagcttaacaccaccttgctgcctccaagccgtctaggtggcggcaaccaccaagagtaacaagaaaactagcagcaaatcgatcactaagtgcctctagatgctatcactcaagcaaatgcactaaggatcactcccaactcacttgagatgcacaatcaagcaataggatgagtggtagggtgttgctcaagctcacaagaatgttatgtcaatgaaaatgatcaagagagggagcaagagcaggccaaacgacttaaatagcctccaaggggtaactagccattttctgtttcagggcaaccggaccaaggtcggttgccaaccggaccatcaagcctcggtccggttgctctccgtcagcttctctgagctcaccacgtatgcttgaccgttacctctgcgcgcgaaaaccaaccggactcagggtccggatgcaaccagactaatcagccctggtctcgttgctccccttcaac

SEQ ID NO: 114984 - DNA, 575 bp, Zea Mays
ggcgaaatatgtgctgatatttaagagctctagtttattcttgtttccaaagactgctgatagcgttggttttctaagcgagtcataatgtgttcatatctgcaagacgttgttgctggttgatggtatatttgcaggggagcagtcgcttccagtaactctgcactgctagccaaccattgcttgcagttgagctgtttaataaaatgcctgctttagaccagattagttttttatttgttgatcagttatcaatacttttgtgtatttgttttctgatcaataacctatatgcatgctccaaaatctgagaccaggcatgactaagaccacatactctattcagattctacaaatattgctgaaaaccaagttttggctgcaaatataactggatcattgtctccacttcttttcaacaattgcgtagtcatacaaggactccaaatttattcaccctctgtgcagtttacatacgcatcaaactgataatttattttatgtgctttggagatggcgaaaacaccaaaaagtgccaatggtttccagaccagcctccgcaaaagctaacgtcc

SEQ ID NO: 114985 - DNA, 409 bp, Zea Mays
taatactaacgagctacaatctcttaggaattatgtagatgaacaacgtgaacaaatgcaaaatatcataggggatatgcaaaacgactatagaagactagtacgtgcatttgacaaatctagtattgcaaattttccttcgcacgaggttgaattaggggataacatgtgtaatacatcggctataggttgtcacgaccagtcacaacccctttatgggatgccgatggacacataccctgagcaaccgcaaatcggcagtaaatcagtcgatctgcacatgcccggaccgtccgcacgtgagcgcgaaccgtccgggccagccacagtcgggcccatttttaatgagttaccccgacatgcacccgagccacaacatacgacacataatttaaactacccagtcgga

SEQ ID NO: 114986 - DNA, 538 bp, Zea Mays
ataatgctattcggtatcccaaacctgaatattatatcttgtatgaactccactgccttggctgaggttaaagaagcaataggcttgtactctatccatttggtgaatttgtcaatggcgagcaacacgtgagtatagcctccttgagctttcttgaagggtccaatcatgtctagtccccaacacgcgaatggccatgttatgggtatggtctgcagctgctgtgccggtaagtgttgttgctttgacaagaattggcaagcttcacatctctggactaactcggctgcatcactctttattgttggccaatagaaaccataccaaaagactttcccaacccgagttctggatgctgcgtgtattccacactgtccggcgtggatctcatctaatagttgtttcccagtaatcgaggaaatgcacttcatgaggactcctgtcgcaccccttctgtacagtgcgccccctatgagggtgtagtgggccgactgtctcgcgatgcgttctgctgcagccttatcatccggttcttctt

SEQ ID NO: 114987 - DNA, 398 bp, Zea Mays
ggccctctaaaatctggggctcttcagctctcaagggttgatctaggtcgaataagctgagctcttggatccgcagtgctctacgttggttgtgggtgaccaagtaggcttcaaccagcttctggacatgctcgtccttgggtttcttcagtgcttcaatagtaatgacttcacaactttcgaaggcagctacacgggcttgagctatggtgctccacatggagatgacggttgcgcctttctatatcttctgctcaggcaatcatctgacagtggtgccgagccaagagatcatattgtgcatctagggaaagtaggtatgctctgaggtacacgactgtagggtcatcctcaaacagttgttgtccttccaaggcacgcatcttggccatccaaac

SEQ ID NO: 114988 - DNA, 360 bp, Zea Mays
ggctggcccactagcaatttttatggtgaatacctaaagatttttcactcaactactttggtcacatataaaattctatgatttataaacatgcaattttagtagatgtatcaacgaccagaaaatgacgaccacctgtaatatgtggttgtgaggagtctccacggcacagtgcaagctttgtccaatctagccggcggcacagtgcaagcaccttactatttaaaaattgtcactccattgtttgcatcataccttgagatctctgattctctgatgcatgtgttttggagctgaattcttttatggtgtttgtcaccttggaacacacagaatcatattgatctttgctttcctttg

SEQ ID NO: 114989 - DNA, 343 bp, Zea Mays
gtggggacggagtgcagctgtacgaggagcatcgggtgccacattgctgagtctatctaactctagaggctcaccccctatagcctggttggcgttcccttgactccgagactattgggttcaggtcggacgacaccaccgaggctgcagctatgaagaccctgacaacgttctgcggctaccatcccttggagatggtaatgcacccactgggactcttccttgctgagaagagggatgaccccatgtggtgcaaccgagtgagccatgtgaaggacgtgtggtccatgcatcccgaccaagttgggaggatcactgttcagtgcatgagcgcactgtacca

SEQ ID NO: 114990 - DNA, 356 bp, Zea Mays
gtgattgaggacaagcactaggacttgactgaggaactagagaagtcgagtgactaactgtggtgactaacatctgggggacaccgacaaatgcgaggactagcaagacatgtgaataggatatgaaaaacgcgtatggagtatgctacctacgatggtttggtggttgagccacaaaatcacccggtaatagttttcgtgggtctgacctcaaaatcctaggcatggtttcagcgagaatcaaaggtgccacataaagccataatgaaggttgcatcgaggcaaagcaaaataataaaagggagtgtggtcatcttatctacaatttgggagtttgtccattatgtctctgagta

SEQ ID NO: 114991 - DNA, 492 bp, Zea Mays
taaaccccgtgagttcaccattgatgagaatgatttggttgattttagggaccgtctttgtgtgcctcagaaatcagaggtgaagatagatatcttgagagaagctcctaaaacgccttacactgttcaccctggcgaaaccaaaatgtacagagatttgaagcaaaacttctggtggaagaggatgaaggttgacgtttctaagtatgtggccgcctgtgaagtatgtcagcgcgtgaaggtcgagcataagaggcctacaggtttattgaaaccattggaaattccggagtggaagtgggagcatatcaccatggattttgtggttggcttacctcgttctcctcggggtagggatgctatatgggtggtagtggatcgcttgactaagtctgagcactttattcccatgaagaccacaaattcagctttagagttggttcccttgtatatgaaagaagtaatcaggcttcacggggtgcctaattctat

SEQ ID NO: 114992 - DNA, 466 bp, Zea Mays
gagggctgtaggctcggggagaagagggttgcaagatggaggaaggagaagcgccatattgaaaaagcgaagaaagaatatgatgggacaatggagcgctcttcgaagaagacaactctcatcagagcattcgtttttaagatgaatgatgaactaaatatccgatcgacgaatcggaagcgcggtgataaaggtcttgtcgagccgattgcgatgatgtactggagcgcctctgaagatgaagggtcaaggagtaattgttcgccggagttgaggatgaattcgaacttcaatgagcgattgtgggagttgtagattgaatttagaaaaaaggtttcgtgttctgagatgtgctcatcgaggagaagccaagcatgcatatgtagtattggtggtttgagattatccgtaatctggataaatttcaattttaaagattttctatttttgaaaaatctagaaattc

SEQ ID NO: 114993 - DNA, 566 bp, Zea Mays
ctaaacttagctcattcaataggaaaacaccaaatgctatcagtttatatctttcttaatgagggaatgacaccaaaaactaacaaaagttaggcacaccattttaggacacctaaacttagactatgggtagaagtagtttaactagctctctaaaccactttactaatttaacttgcttaacacataaactaaacaaacatcactacttttaatttagcaaatagagaattatcaaaggagatatagctccacggaaccgcattcttaacaaccaatacaataaaatcaacaaaagcacaagtgactccaatggaacctattacactctttattcgcatcgcccattcagccacacaaatccacaactccaaacttaatcctcacatcaaacagtatgtttgctctccaatcgtgaatgagaccctatcattgcatacaatcgaaatatttttcacacatttaacttgctcctaacaataatctggaacataagaaacattcgctctcgtttctatttcacttactcttctacaaaattcaatgcacatgcatacacatccacg

SEQ ID NO: 114994 - DNA, 468 bp, Zea Mays
catgatatcgtgaggacaccatgaggccatcaacatgcaaataagacattggtgagtggggcctaggagtaagcaccgtcatctcctcatccatgaatagcggaaggtagagtccgcctaggaatttctctcaagtagggcgccgctaggcaatttggctctctgcttgatggatgattggtggagccatggcacctgggtcatctccagccatgtctccttcgccgaactggatgctaactaacactggcaccaaagcaaaccgtagaccgaatctatcgccaaaatcatcgtgagctcgaatcaactaatgtcgttgcaaatcgctagatttcagcgtggttgttgtgatctaggttgggcagcctcgattgggactccgtttctagtgtatataagtacccatacaaccaaagcgccaatgcaccgagcaccaaattcacgccgagcttcatcgaagagagagaa

SEQ ID NO: 114995 - DNA, 692 bp, Zea Mays
aaagcctggtggttgttgcatatacacctcttcatctaaataaccatgcaagaaggcattttgaacaacaagttgcttcagactctagcttcgagaaacaacaatagacataataattcttatggttgctgcctttactatgggactaaaagtatcctcataatcaatgccatattgttgtttaaatcccttagcaatcagccttgctttatatctatccagactgccatcaactttcctcttaactttgtatacccatttgtatcctattatattcatgcctttttgaggaggaactaaatgccatgttttattattcataagagcatcatgttctaattgcatagcttgcttccaatcaacatctgctaaggattcatcaagactgttgggttcaccagtactagcaaggagaccatacctaacagttccgtccgtgtagaccttggtacaccggataccatgttgtaacctagttctcggcgatgaaggatcggctgtaggcgacggcacagaaggtcccaacgaatcgtcgtgcgtaggattcaacggagcagaaaatttgggctgacgtcgtcctccctcggtcgcatgtgtgggcaccagtgcagtctatgtcggccgcatgtcgtcgccagacagggccttcatcgctcctgaaggcagctatgagctagactcaacttccgaag

SEQ ID NO: 114996 - DNA, 929 bp, Zea Mays
gcacacatttgaggcgcacccgggtttggcccttaaatccggatgtgacactctaaaacaaaatcttgcactaagcactatctctgaccaagagaggggttacaagcactattgactagctagaaatgagtctttatacttttgaacacttgcttgtatgctttagaggggtggtatatatagctccaaggccaaactagtcgttgcccaatttatgcactttctggtcgcaccgaaacaaccacttttgcaggttcggtgcagaccagacctctgactatggccgacacctcaattttcattctataaaggtattagattaccagcacttaccggaccatccggtgcaccaccgtaccttgccacatcatccgaccattggccaaacctttccgatcgttggatatactattggttcggtgcaccatctacctaaatcttgaaaacaatatttttgtgtacttggtctggtgcactatcagatcccaatccggtgcaccgtgtgtccgattccatcaaataccttctctacttagttattctggttcaccatcagacttggtctagcgtgccaagccctctacggccaaaacagtctctcgaactttggtctgatgcacaatcagcaactagaccatgtcataatttagtacaacttcctcgacttcacttggatcttctcttaggcacttctatgacttagacatatattccttgagtccatccaaagattctaagccataccttttgctctatcccaacctccaacttagattgcatcttttcttcaactcttttctgcaattaaccctcataactccaatcttcaaatcttggcaatcatgctactccattgagttctagtatgctgttgtggtcatcaagaacctgtccaaacactagaataatccagagtacaattccttctt

SEQ ID NO: 114997 - DNA, 523 bp, Zea Mays
gctcactgtaccacctgcttacgtcaaatattattacgtgttatgctcatttgtgcatcagtttatacacttcttacgtgttatgctcatttgtgcatcagtttatacacttctggtatgcgcatgtttcgggcatccgggcccacacgaagattgtgttcctgcaatctgggcagtcgtactagtccccacacaaaatattgttattatgatgtcttatgtttccgtttacgaaacagtaatccacgtgtcggtccatgggccttcgtgtagatttcgcccagcagagtacgtgtatcgggcccacgaatccacccacgagcacgcagttattcagctcacctcatccgtaacgcacgcggcagccgaaccctagcattatcgtcgtctgctgcttcttctccaccgcggcggccgaaccctagagattctacccgacgtcgccttcagcgtctccaacgcacagatcgaccgtcgtcgccttcaccttctccaccgcatagaccgagacgtcgttgccttg

SEQ ID NO: 114998 - DNA, 363 bp, Zea Mays
caacgactcaacacaaccaagtgagaaaaatggctagtcttcaacaagaggtagaagaggggaccaacactactagccaacagacaaagctaaatcgaagcacaaaagctgaaatcaaaggtagttcctctagaaagaggcctcaacacaactagcaaaagctccccatgactcagaaactccccctgacaaaacatctctccctgaagcacaacttaaaaacctaatagaaggtcagtcatcctcgacaaaaatagtgtaaacaagacgaactccccaaattcttccccaattgcacatctccaagatttaccccaaaggacccaaaatcacaattcttcttaaagcttctccccaattact

SEQ ID NO: 114999 - DNA, 498 bp, Zea Mays
gtatgcaccttatgtggaatggttaatccttatgttccttttgtatgaaccttatgtgcaatgcttcatccttctgttccttttctatgaaccttatgtgcaatgcattaaagtttcaactttatagtacaagtttgttatctgttgtccaaattaatgtattcctgtatttcattccagaatggctgacaacaacacaaacacaccttttcgacctactggtgccagccccaattcaggtaaccagattcccccccacccatgtgggatcctcagatgtggcagggccaaggtttagacccaacacatccttctacatttactagtccaacatcccatatgagcaatcctacctggtcccagggagctaatgacccatctgcatatacctttcgtagtccatggaacccattttttggtatgatgaatcctgggggtcctccaccacaaacatcattcggtcaaccccagttggtaccacccattccatgtccacag

SEQ ID NO: 115000 - DNA, 383 bp, Zea Mays
gccccagtagggtttgcctcttcggagtaatggcaccagtgccaccttaagaatcctggcatccgaccccaacaagtcgaggccatatcccagggggggcaagtatcgggaaagaagccggcaacaatgcatacaacagagaaaaaagagaggcatgcagtcaagttgtaatgtcaccgacaagtagtacctaaagagtatcttacaaaatcaaagacatattgcaatccactcccaggggaaccctcgtttttctccatgcaggcctggctactcatcgccaacaggatcccactggaagcacccaaccaccatgtccacagcatcctgtacaccctcccgggcagcatcttcagtgtcgaccaccggacccgcaataaccg

SEQ ID NO: 115001 - DNA, 645 bp, Zea Mays
ttaagccgattaattatgatttgttgctaatcggttctgacggtttttggcgggcaaccgatatttctgaaccctggccgcacctgtatatgatcgtcagctagctaggtactgtaacttgcaagcaagcagcagtgcatatatctatctatattcatatactagctacaacggtggagaaaggtttggaatttgcttgtggtggctgcagaatccggcgacctaattaatcgtggcgtacgttttcacttgaccaactccatcaagtagtagctgggaaaacaggcattagggttagctactaaaccaaacacgcgctcgcctgcagctgcagtgcacccgttcgtgtggcgcgtcgttgcaagcaagcgatgtgattcgagcgtccacgctttgtctgaaagtttcagagctgatcgtctgctgatgcatcatgcgtttggcataggaaaaagatcacagctctcgacgtcccccaaacaacaggttatattagctagctaactgttaactgcatgcaactaataagtagacagattatattagctgcatccggagaagctaattattacttagtagctaaccaataacgactatagaattcaaatagaactttagtttgtatggaacccagggatttcacgt

SEQ ID NO: 115002 - DNA, 577 bp, Zea Mays
agaaagtgcagaactcctttgtattgggatcagactagagaaagatagttctttggggcctgaactgattcaagaagcagaagaacaagttcgtctaattcgagagaatttgatggtagctcaaaccaggcaaaagagctatgctgataatagaagaagaccgctggaatttgaggaaggagattatgtgtacctcaaggtgtcaccacttcgtggaatgaggagattcaaagttaagggcaaattgttctctcgctacattggattattctgagtttttaggcaagttggagagatggcctattaactcgagctacctgataatctatctgatgtgcataatgtatttcatgtgtctcaacttaagaagtgtccccgtgtccctcaggaacagttaccaatggaagaccttagtgttcaagatgatctaacttatgctgagtaccctatcaagattttggacactttgactcgagttacaagaaataaggtgataaagatgtgtaaggtacaatggagtcaccacggagaagatgaagcaacttgggaaagagaagaagagcttcgcatagatttt

SEQ ID NO: 115003 - DNA, 411 bp, Zea Mays
ctggtatggggtaacggtccttcacagtcttcccattgagctcccggtagtccacacaaaatcgccatgttccatctgatttcttcactagaagcactggggaagagaatgcggatgtgcattcccttataattccttgctgcagcatgtcctcacattgcttctcgatctcatcctttaagagctgggggtagcggtatggccgcaccgctattggcgatgtgccgggtagtagtctgatgtggtgatcatggcgccggactggtggtaggccacgaggttcttcaaacagatctccgtatgattgcagcaagttctccaataattccttgccctccgaaactacacaacagcggggttttgagctacccatccctgtccagcacaccttgcgtccttgtttccagaacg

SEQ ID NO: 115004 - DNA, 618 bp, Zea Mays
attgcaatgaatacccccaagtgggtgataaaagaaattgataaaactagaacgggatttatttggaaaggaaggaagctaatggaggcagttgtctggtttcttgggaaacagttacaaagcctatctctctcgggggtcttgggatacctaacctgcagtttaagagctgggcactgcaagcaaagtggttatggctagaaaaaaccgacccaaatagaccatggcagggtcttaacattcttgtgcagcaacaggtcaaagacttatttgcaaaatctgtgatatctattattgggaatggggtcagtaccctgttctagactgacaattggatgcatggggcggcaatcagggacattgcaccagaagtagctgccaaggtgggcaaaagagctctgtcctctacaaccagctgttgatgctccttccttcacatagtggtggaaacaggtggagtgtcatgtgcccaaaagcacaagaaaggagcttaacagtgtcatcatcttagggcgtggtgtatttggctttattatcgtaataaggtggtcttcgatggggattccccttcgctgagaagattcagagaagctttcttgatgaatcagtttgttgagt

SEQ ID NO: 115005 - DNA, 755 bp, Zea Mays
cccaagccagcgtgagaagggagctcgcgtccaggctcagtatctgggacttgagcacagggtacaaggcgaaggcgagtgctatgcgctatgcgtgagagttcaattggagcacgttcactgaaagaaatatctgaagccgagatagagagagagacgtgagagatttctagagagtgtacgtgtgcaccggataaaagagagaacgttgagagatgcaactagaatggataggaaggagcgcttgaattatctagacgagagaaatgatgtggagataaggaagagaataaagaatttcagagagacgtttcagagagtggacgtctgcaccaaattgcatgccccaaactgatccaagtttcagttatcagcacctgaatcccacacttcttcgacagaacccccatcttaatccccttaaatctcacgattccaaatgataatagtgaacagaccataacataaattgctctccgaacatccttctacatctttgctgcagaattcctagtccaaaaccccacggatttggtactataaacctccaaaattgagcacaaattcacaaaaactcagtttgcagctaactgaaccagagttcagaccatacccaactgacggaggatgtttaggtgcagtttactctcagatttgtacagcattaagcctatctatccttagaaaacttgctcaccttactttggtctccaagtttggtacagaaactacggtctaaaaccactcacattgat

SEQ ID NO: 115006 - DNA, 918 bp, Zea Mays
tgcttcgccatgattaatgtggcatcgatcttgctggctacctaaacatggatggcacctgcatgcaccactgcattgccggcaacaagcaaggagccatgacacttgtggatcgagtgtggcaatctgatctgttacgcggttgaagagatttatttggtaagattttggatggaagaagaccgcgcccctgcgtgcgcccatggatctagggggaaatgaacactagccagaggagaggagttaagttaccagctgcttggccaccaccaccattctcatggatgatggccaaaggcatggcggctagcttctcaaacttgcaaggtcgatactacttttggtttagtgcaatggcggatgaaggaggtggaggaagaagatgcgatggcgtgcgtgatggacacgttgcatggaaacgcaccattgggagatccatgctaggatctttggcataattcaattgttcaacttggtaagccttccttcaaccactagttagctcctaccaattcctttgtttttttttcttgtcataatataatatatatgctactattacaagtctctctctttctctctctctgcctcacacggtacatttggtggagttgttatagtttgctgaccattttgatatggctatctaatgctgccaatattgtaatgggtaaagcgggatatgctcatttgcatgctcctgagaaaattaggtcaagtccctagataaagctgatttgttcgctcccaataatgaagaggatcttgaagttcctgcacacgcctcagtagtggatcgggtccatctttttaaaagtttatcctgaaaaatttcgcttgctcttctatatatcttgctgtttgttgcggttgtttgtattataactaatcgtgctttggcctccactggtaataagt

SEQ ID NO: 115007 - DNA, 560 bp, Zea Mays
gatacgatgaactcaagcacagttgtgtgccggacagtgcaaatagttgttgccagaaggcgttggtgaagacacgatcatggtctgaaacaattttgtctggcataccatgtagccgataaacctgatccaaaaagagcttggcaactttgggtgctgaaaaggggtgagactaagctagaaagtgtccgtacttggaaaaacgatccaccaccaccagtatacagtccaccgcaccagacttcggaagtccctcaatgaagtccatggaaatggaatgccaagcatggggaggcactagtagaggtgccagcagtcctggataacgagatctatctggtttggcctgttgacatgtgctgcacgactgaacataaacatgcactgcctatttcattccttgctaatagaacagttgtttaattcatctataggttactggaaaaccggagtggccgccaataggtgaatcatgaagggccaaaatgatttggcgttgtctatcctcagaactccacagccacactcgtcctttggtgtatggagcagcagcatccgca

SEQ ID NO: 115008 - DNA, 301 bp, Zea Mays
atccagaagtcctgcataataaggattttatggaccgaattgctaaatgggatattgaacctaaagtttataacatcaccttcaagccacacactgctatcaaagcccaagcccttagcaactttatagccatgtggaccgagatacaagtcctcacaaaaataaaaatatgtgactactagatagatcattttgacagatcactacaacttgtagggcagggacatgagttgttctcacttcccctagaggtgagaaggttcgatatgtattacaaatacaattctctgtatccaacaac

SEQ ID NO: 115009 - DNA, 402 bp, Zea Mays
tttggtttcgccagggtgaacggtgtaaggcattttatgagcttctctcaagatatccatcttcacctctgatttctgaggcacacaaagacggcccctgaaacgaaccaaatcattctcatcaacggtgaacccccgtggtttaccatcaccaaccctctttcgagcttcctgcaatagacgatcctgctgctgagccacacacactctctccatgagggaggattgaataagcatccgagtctcctcgctagcggtgccgacataacacaaagcatccccaaacggtccagatcagcgatcaatggcaaggccacttttggaaccccggacctgctaagggcatcaaccaatacattagccttccccaggtgataatgaatggacaaatcataatctttt

SEQ ID NO: 115010 - DNA, 677 bp, Zea Mays
gtgaggtagagtttgcgcccgagggcttgcctatactcttgtcgtattgtacgtcccatcgggagttggtagacggcatgtgggaacagtggtcacatgcgtaaacatagttggtgaagcttgacatgaccacgatcttgttgctcctgtacacctacaaccctgcgtggggtaggtatgcacattgaatgctactgtcctcggagaacttcggctgagtcttgccctcagtttgtcttgcttacccgagatgggctcgggcgaggaggagacctccattctggggagaggggacctcggtcgggacaaggattctgccgagagcacatcctgtccgagggcaagctcaggcgaggcagagttataatgacctctgtggggggcctcaggctaagcgtgacttatgatccattttctttggggaacgtgctttgatggtggtctatgggtcaagcgtgctttatgggtgtaatctaggtacccctaattactatacctaacagtagcccctgagtttgttttgtcacttgtttggaggctcttctattctccatgcgggtatgctacttaaccctaagaagtggaagatttgttttcgatgggtgcgcgtggaccctaccgtgggcttaatcttcgaacccctgaacagtatgtgacctctcccttcttccttcgcg

SEQ ID NO: 115011 - DNA, 346 bp, Zea Mays
cccaagcatggaattcttcgtggcatcaaagtcgcttgtgatgagttccaagtctactgacgctgtcttggaaggtaggctggcaacctcatgaaggcagtcaccatagtgaagttccacaatggcaaaggccatcactatgccatggtgaataccaaactccatagcctcaagaacatgctttggtatgtcaaggagacgtgacatttgattcctcccccgcgcatgtatgaatcttatagcccaatcaatgcatagtaaaaagcccagcgctttgggcctaggacatgtgatgaaccatcaggtagtcagggatctagaaaacgtcgagaacctagaggccaga

SEQ ID NO: 115012 - DNA, 390 bp, Zea Mays
gccattttagactggactggtagctgttattataggagaactctgccaaagaaagacacttgtcccaatttttaccatagtgtagcacacaggctcgcaacatgtcttcgaggctttgatttactctttctgtctggccatctttctgcggatgatatgcggagcttcttattgcatgggtcccaagtgattcttgtagctgctcctaaaagcgtgccacaaacagtgctcctcggtcagatacaatggtcttcagaatgccatgcaaatgcactatttgatcaacatagatttctgcatacttttctgtcttatgggtggtgtgtaccggcaagaaatgagctgtcttggtcaatctgttcacaatgacccaaatggaatcatggtgcc

SEQ ID NO: 115013 - DNA, 535 bp, Zea Mays
gaaaatgagacgagggtgcggattattcgtcgtcgaagcatgggggaaaggcccgcgacgtctccctattcagagtggagggaatcgtccatgacatcatggagacgaagaagtagaacctcgccggcggttataaaggtgcaccgtcgctctgccgccctatgtctcaatcaccggtaagagcaagttcctgtagttcgcttcgctaagcgcagtttctgctcacgtcggcggtagcagaggagaacaataaagctgggcgatgacccgcctgcttcgttgggtggagggcttcgctggagcaggcaccgcgcgaggtgagagaggggaagaatggctggagcgcgtgagagggaagatgatgcgcaccgtccgatttagaatgagtggatgggattagatctggggaagcaatcaccgtggaccgttgatcgggtatccaacgcctggggtttgatctcgtgtaaattgaatccgagccattggtcacaaatccatcggcggaaatcgtgtaccccttcggcttctaatctcg

SEQ ID NO: 115014 - DNA, 803 bp, Zea Mays
cgtctatctcgcttaggcgccacctaagatgcagttcgtagcaagtgcctgctacctccaaggctccaaccatataaagcagcatgaactccgcccggtagcctatataacacaaacgaccagctaatctttcccagtcaacgcaagcaacaatggtgctgctccttgagtgtctcttgctcgccctcgtctctctagcatgctctaccataaacatggcagggacctcacttgcagctcatccagcgtccacctcaaacatctccgaccacttcgcactcgtgtcgttcaaatctcacataatgagtgacccgtcccgagcccttgcgacatggggcaaccagtctgtcccgacgtgccggtggcgtggcgtgtcgtgtggcttaaaaggacaccgccatggccgtgtggtggcattggacctcggcgagctcaaccttgttggcaccatcactcatgcgttgggaaacctcacgtacctgaggctgctcaacctttcgtcgaatcacatccatgggatcctgccaccagagctaggtaatctccatgaccttgaggacctgcaacttagctacaactacatcgaaggggagattccgtcgtcactctccaactgcagccaccttgtcaatattttgatcgatgtcaaccaattgcaaggagggataccagtcgagctcagctcattgcgcaatgtccagtcagtcaaccttgcccacaatatgcttactggaagaattccttccaagattgcaagccttttaagtctgaaacagctcaacctaaaatttaacaacttgaca

SEQ ID NO: 115015 - DNA, 295 bp, Zea Mays
gcattatcctcaattcctcaccctcaaaaagatttcgcagatccccttcacctatgctcgccccaatcagcgaggacaacaattcttgtttaccaatccggtccactcgaagacgaccatgctccatccccatacgacggcgcctaccacttcgcgaaaattcacccacactgtgtttcgccaccacccttcgccgcctatacccagtactcgcactaggaagatccccgaaaccctccacacgtggcgaagtctccgctgcagccacatctaatgcaacaaaataatccaagcc

SEQ ID NO: 115016 - DNA, 540 bp, Zea Mays
agagaatccatgcgtcgctgcctgcttgtgaagccgcaaggccttagctggtcgctcaggagggatctcaccaaacgacgctagaggtgtggacatcggtgtcggtggccagggatgactggtgtcgcaggatgtggatctcgccggacttgggtcgttgggcattgccgcgatggggcattgctacatggatgtaggtaaggaagggtaccgttgcattctcctaggagtcctctgcgtgtagctcgtttgaatctgagtaatgaggttggggtttgaattttggtggtccgacaatggctccgccactggggggcatgtgcaccgccgcgtccggctgtttgagtggagaagatgagtggtaaccgttgatccataaaccaacgatcacgattagatagtaggtgtacagcttcgggcaagcgatttgggccatcggttcatgcttgggtggattggatgaaattatggtgttaatcgggtttgggccgttggattcatatcggacaatccggatctgaaacaacgtctactgcttcg

SEQ ID NO: 115017 - DNA, 1008 bp, Zea Mays
tcgggagtaggggatgtggatttttctggaaaattctcttctatcagccctactagtgcggctcccgaaggtccggcttcagcatcagcagaagaagcgcttatagtaaccactttccttgtgtccccaattttctttccagaaacttcggcagcagcaggagttagcgttttcatcgattccaaaacaacatccaaaacagtagccatcctcctcttcctcggggtcgttgtcgcagtagccgatagcttcggtagctatactaggggctcagcagctttagctattcttctgctgctttccctgttttactaccttcggttggcattgtagggacagttttaacattctcaataaacttcatctcctctatcacaggcaccgcagccgtctgttctaaagattgtagcttcggcctacgggtcaggaccttggctctctttggctttggcacaccagaagaggtcgaagtggcaagtttcctttttccctccttgctttcgagcagggaaacaataatcaggataaacaaacccaattacatcaaaaactctatttagtcttctttttcctcgagcaccgaaggcaacgctcatggcttcgtcctctgtctttgtataggctcccagtagctcatcactagttgcctcgatagcatctagccaatcgtcattgggctcgtcaaactagattctataccgaaaggtgtatctaagataaaaccaaaccaccttggctggagctagcagcagtttccttcggcatttcccattcattcacaagaggccatactttgaaagtaatgtgttcttgtacaaaatccctagtaccgatgtaagtgcatatggtgttgaaggccattaggcacgcttccacctcattcccaattgcaatatatggtcttctaatgccgaagcgcgatcatatgggatgttgaatgatgcccctcacatcctccctctgattcagatcattctttacgtagaaccattgcttcatgcaagagcc

SEQ ID NO: 115018 - DNA, 588 bp, Zea Mays
ctcgatccacttggtgaagtattcaacggcaacaaaggtgaatttgaggttcccttgagccgtaggcagtggtccgacaatatccagcccccagcgttgaagtggccatgtatgggcgattagcttggtgaattgcaaaggcttgcttgagcgaggggaaaacttttggcatgcttcgcatgacctcacgactcgattcgtagtacagattattgtgggctagtaaaatacttgacggataaccttggcagcgacgaccctgggtcctgatgggagccgcaagttccgctgtggacttcgcgaaggatttgaatgccttcggtttcagtcatgcactttagcatgggctgactggtccccttcttgtacagctgacccccaagaaatgcgaagttccggcttcggtgcttgaggcgtttggcctcattgatatcacttggatggtaatggccttgcagatacaaagttattggggcccaccaatcttcagccatgatgaggttgacaatgcaatggccttcggtgtcattagttatttgtaagccttctgggttgcggacagctggtgtgccgatgacgtggtagaac

SEQ ID NO: 115019 - DNA, 536 bp, Zea Mays
tgcgcagtgaaatcgatacgtgcagtgctggtcttgtgtcagttaaagctgctggtgtggacaagagcctgatgtacccctttgatgaggggtcatgttccctctgtcagtcgtcgtgattcgtgaggtgaggtcaccgtgtcctagcattgtggggattgtcgagcgccagcggcagtgagaattgaattttttttgaaaaactaagaatgcatggctggatagaatgagtgtcaaattgatttggaagtaagccaaattattttttagtcaatctcgacgataggaggctggatagcaaaaaccaaagtgaaattcgctccccataggccccgccaaggaatctcggttattttattcccgcggcacagtagtgacggagtgacgaagagtttatcccataatgttttatttttaccctctccttcaaagcttaaatagatataaatttataaaataaattattacaaaatcaatcttcgtacagtcgctatataatcaaactaataaataggattttgttttttatatttctt

SEQ ID NO: 115020 - DNA, 600 bp, Zea Mays
gtcgtgataggaaggcggaccactttccaaagcccgttgcgtgcgttccgcgccggtgatcactgacaacggatagccttgtcaccttgcagtgagtgcaggttcattttctgctcttttccagcgccattagagacttcagtatttgttttttttttcaagtgtgtacgcgtggacgcgtggtgatcccactgcctgtccttccctttgcttccgtgatttgttcatgaaaagtcggtccttttattttgtttaacatgcctagtctagtacgtacaatctacttattagttttagtccctgtctcctattctttttttaatatattttcttcaaagatatcagcatttgtcgcctgtccttgatgtcatatatgattgcaccttttaatcgttgacttgacccaggggtggtttcatcatgcacgcagtccttctgtctcctgtcatgccctctgtccaaattttcaaacatacgaattacgtcgttttcgcgctcgataccgcgactagacctcttaatcaaggactcgggtaaaggtcattacattggcgtatcggtctgaaaacactactagctgtattcttttctttaagagca

SEQ ID NO: 115021 - DNA, 305 bp, Zea Mays
aagcaaccatgactagctcgggtacggtggtcggagtaaattagtggccagaacatatccacggcgtgatatttactcaccccaagcgctatccaaccgatctgagcgtgaatcgccaacggcgagcacaaatccgagcgcacagctcgtcggcggcgatgtgatctgaacttgatcctatccggttactgtaccatcggaatcctattcagtcagcctgaaagtcgatgtttagggcaggttttctccaaatttgtcatggcaacataaccaatgctctgcagcaaagttgtagccctacaaac

SEQ ID NO: 115022 - DNA, 560 bp, Zea Mays
cccattttattcctcgggtgtccgggaattatcaacgacatgaatatattctgcctttgaaagcacacaccaaggggagattgattgggataacaaacacgggccaacatgtgtacggggcagcgctcattccatagggattgaacccatctgtggccagcgcaacacgtacattatgagcctcttcagctttctcacggtgaatagcatcaaagtgtttccatgcttcaccatcacatgcgtgcaccatcttgtcaggattgtatcgttttccatttttgtgacatgtcatctgtttcgcggattcctctgtcatgtacagacgctggatcctcggtatgaacggaaggtgccataggattgtcaaggggatgtcgagctgcctcttctgtccatcaccagagtctacctccatgaacctagacgatttacacttgggacagtactttgccttcgcgtattctttcctaaatagcacgtagcccttcagacaagcatgaatctgctcatacgtcatcttgagtgcacgaaggagtttctgtgcctcgtacatgctcttt

SEQ ID NO: 115023 - DNA, 354 bp, Zea Mays
gacgaatttcccgaaccttctcagaagtctgctgaacccaattaggaccaaccaaggatctctctcccaaagtctcccagcacagaggggagatacaccacctgccatataaagcctcaaatggtgccatcttgatgctagcctcgtagctgttgttataagcaaactctgccaatgcaagatgatcctcccagctacccttccatgacagaacacaagcatgcaacatatcttccaagatttggatcgttcgctccgactgaccatcagtctgagggtgaaaagcgacactaagtgaaagcttggtgcccaatgcactgtgaagactctcccagaatttggatacaaatttgg

SEQ ID NO: 115024 - DNA, 1035 bp, Zea Mays
gtgcatactcacttaagagaagtaaagtagacaaatagcaaataaataaatatagaaatatgcatctcatgccgaggttcttgtaattgtgcatttgtgtttaaattcaccagacaagtttaagttaaaaaaatatagaatttgaaaaggaaggagagaagagaaagaaaaaaagagaaaggttatgaaaatataaataatatatataattatatttctaaaattggtatttttaaatttcacaatatgatttgaggataatgtggcacaggtttgaattcaaattcgaaattcaaattgatcttagaaataaagaaaataaaaagaaaataaaaagaaaaagggaggaaaatgagaaacttgctcctgggctgaattcattacctcggcccatctagtcctctatccgcgcggctctgttcacgtgcgaaacacgcccggtgtgactgccatgcgggcccgtgtgccaggtcgtctccctcctcacgattaccccgctagaatcgcgcgcagctaaaaaaaatcctccgctcgaatcgcggagtccgttgtagctaaagggcaaaatccaggcgggctggagaccctcggctcgcggtttgttaggctcggacaattaggggataaataccaggggggtcatcatcgctgttatcttgccatggccagttctctccttcgcccagccgcgcgtcaatttgtcctggtgttctctggtgaggacatcctcaaggatccgaacacatactcgcccctttccctctgttgacttggccgatgatgcactgacgtcctcctgggcctcgccctctctgtactctctccgtctctcttgccgctccgccgtccacagccgtgggggttgatgcagatgaccttcacggggcagcgcagcaactagcccaactccgccgggcggattgcaacaaatcgtgctcgcgggtcggggtttaaaactccacgtcctcgcgctccccagcttaccgaagatcaccgccatcttggggaggaatcgaccgtgcgccaggatcgcgg

SEQ ID NO: 115025 - DNA, 689 bp, Zea Mays
tggaaggaatgtccgtcgacgaacagaagaggaggatgaagaaggtggcatcggcagttctgatgtatgtcttcttctaggactaataatttgttgtatattaaagtatggaattatggtttgtcaactactttactactatctccactctaaataggtacttctaggtttgttttgggtaaaaaaccccgatatgttaacttttaaccaagtttgtacaaaaataattaacatatatgacaccaaattgaaggacagacctggtagagtggcgagaagcctttccactgagccgtcctgggttcgacgcaccctctctacaaaatacagggggtaaggcttgtctcggttatttttgccctggaccccactcatgtgggagccaccataactgggtctgtcctttttatatatgacaccaaatcagtacattccgaacatatatttcataattgatcaaataataccagtttagtgcttaaatgttgctattttgttctaaaaatttggtcaaatctaacatagttcgaattaggacaaacctcgaagtatctatatggagggagtattatttattgttgaatctggtttatttgatgccttgtaggaagagaaagaaatgattagagatcagcaggaaaaggctcagctagaaagaaacatgagagaaagagatgcagctaacacaa

SEQ ID NO: 115026 - DNA, 804 bp, Zea Mays
cgtgactgttgataatattgtttgatactgtttgtagagtgaagattgaaatagaggatgtgataggagatcggctggagatagccttagatatttggactcaacaaaggaaactcagaaatagttcgaagtttataatttcgactgcgttcaggtccaaaaaaatataaggcatagagttattagtcgaattgctctctagtcaaatgttcggatagcgggtaaaattcatctaaatttaaccgaaacaaatgcaaattaaattaattgattaaggcgaattagaaacgtcatctaattatttcgctcttgttcgagcgatctctacgaattctgtagcgaaaatattaagggtggactgtttagactaaatcgaacttgaactaattaaaaccagaacaacggttagctgattcgctttcctatttaaaaatccgagataattacagctgatattgagtattcataattaatctgttaaataaatatgaatttggaagctcgatccacagttgcaatctgtgtcccaaataaatttattagaactcgacgacaaaagtattgatgcaaaaaattaaatcgaaccgggataactagaaccgaactgagtactcgtaattaatttgttgcactgtctaaaactgtggaaatttgtctgatcccgaaaatacctaccattgttaacgtagtccaaaaatattaaaatttgtattgttttggtgggtctatttgcatctcgctcggattcaaatcctaaatttttcgcttatttggtattctattggttagaaattggaggataaa

SEQ ID NO: 115027 - DNA, 449 bp, Zea Mays
tgtggattctatgaccgaatttacctttgtcatgtcttattggcatgagggcgaatgctctagtgtaggttacagcgtagactggcacactgacgtgcgtaggggtacatggactgtgtcgtcctatcccctccgcctctctctgtagcgggaactatagaagtcatgatgagggccgcccatgcatggcacagagagtcaatggtcttgcatcggtaatgcacgggttactagcatgacccatgccttgtggactgcgcgcgccgcttgtcactggtgtggagaggcgcacatcctgcccacattcaatgtgtgtggcctccacgccagagccacgcgttgggccacgcctggtggctttcgccatgcaccataggccacatgccagcacagaatctctgcctgaatagagagcaggggctaggaacacatgcaaacgtggcaccaca

SEQ ID NO: 115028 - DNA, 536 bp, Zea Mays
aacaagtagatttgtaatgcaattatgtgtaatgtgtttataatgacattttatctcaagaaatgttatgttctgcgcataaataagaagtatgtatgttttctgtagtaaggattgattgtgagtgagtgtgtcgcaagaaatggattagtgtgcatataggagatgaatgtgtgtgatgaaatggtgacatgccttcgtagtcatcatgtcgtctgtttggtgacttagccgaaagtcgtaaagaaatgtcgcttacctatgtgttattattgttactctgcgactctatataaattgccatgtgaagtatgattgaattagtctatgtttgcgatgtgtggtgtagtggtggtatgaaaaatgggttaggaatcgatcggctaaatgccaaattcggttagagttgttttgttacttgggattgtatggtaaagtaatggcatgactatgtacacgtcacgtcatctattgtgtgactatgcttaagtgtgccttgatataagttagagtaattcaagtctctagaacacgac

SEQ ID NO: 115029 - DNA, 411 bp, Zea Mays
atgagcttgcttgacacctaagaaaatactctgagttgctgtgctgccctagaaaggagtataaaaggctgcacatcgcattgatccggcagactcaaagatgctcagaatcagcggtaatcatgggcaaggacaggtgcatttgcgaactgatgatgcgcgtcggccgacaagagtgccaatacatacgcaactgttgcagcaaaaagaccatagaccgcccacaggccaccacagcacagtgtctttcactcatcagaagtcagaaccattccattgcggcccatgagtccaagaaccagagcactctcaccatggcgacatcgcgggcccacctggcaagtcccagtgccaactggcgacacagggtgtcgacggctgagatgaagatacgatcggattcgtgggaac

SEQ ID NO: 115030 - DNA, 379 bp, Zea Mays
tggtggtggcggcgtttgatgcgtggcggctcgcggtggctttagctgaagatgaacttggcggcgacagactgggaggagtagattctgagtgttgtagcaggatcggagtagtgggatttaaaccagtctgcgttagtcaggacaatactctgttcagttcagttctgttctgttcgtcggtgtctcgattctgcagccaatgcatattcggactggaaagggggaaatttgcctcctttcccaacttactagaggcagcacggaagcttagttttgtaatttcctaaatcctaaatcctaatgagtgggaaaagatggctacacaacttgccaatttacgaattgtggtgctagtaatgttgtgtgtgtgtttgca

SEQ ID NO: 115031 - DNA, 644 bp, Zea Mays
attatccacgtccggttattagtttgggcactgggaaggagtttggttggtgctcaccggcgagagctaccatgggggctgggtttttctccatgtcgcgactcggaggaagacgatggccttttggtcgttggatccgacgttggcaatcgcgatcagatgataggatacccttcgcgtgattagatcgtggtcgtaggattcatgacgggcggccgtgattagatcacggcgtaccaattcactctatgggatctagagcgttgatgcggtaatggacggtttaggttagatcagggtgggatcacccttcatccattgattccggatcggattgtgggggctagttacccgttttataatgcaacgatctagtctggtgcgtcggttttagatccgatgaccctgaacgactgataccccttcgaccctggaaatatgcaaaagagtcctcgggcttttagtgaatcaacccgcggtccagcgcggatagatatgtgccttaggaaatattgcgccgagccccctgtgtttccctgttttagtgcgcgcagtccatatcccatttaaattggataaatgaattagaaaatgaatatttaatatgaaaatatttgctagaacttgtataaatcatataaaat

SEQ ID NO: 115032 - DNA, 402 bp, Zea Mays
atggcctcctccatttcactgctcgtcaccatcatgttgttgctgctgctgccgtcgtcacctgcttgctcctcgttgagttgcaggcttgacttcaccagtgtggcgctgcactcctgccaggagacggcaccacaaaaccctactgccacatgatgcgacgccctcctctactccatcgacatctggccaattcatgaactagaaaaaggtctttgctgcctatgtgtgtacatggtttcaaggaacactacctttgacctgcctacgtctcatgcgggggtaaagactcaagtaatgtgctgcagtggaatgccatcatccctcgccctatagactgcaacggtaagtcacggactttccttaattaatcatgtgggggtaaagactcaagcatgcggg

SEQ ID NO: 115033 - DNA, 647 bp, Zea Mays
tctaaggctgaaggattttgaaccacctccatgggaacagagcaatctagatcagccgcttggctcttaaaaccgcgctccaaggtcgatgaggcacgagatgctgcttgggataactctaacatgacagcaggcacatcagcacaaacttccatcgttccatcatctgccggctctgacaacagatctttagggaccatatcttcgagattctgatcaaaatttgccagatacaattcttgtagaccaacgagagcagacaaagctggagaaggaataccactactctccccactggctatatagcaccgactgttctttcgaattaaggggatttcttcctcctcctcatcttcatcaatattatagacagtacacccattggggtcagcatcatcaaggttacacccattggggtcagcatcatcaaggttacacccattggggtcagcatcatcaaggttacacccattggggtcagcatcgtcaaggtcacacccattgggttcagcattagtcgggtcacacccattgggttcagctttagtaaaagtcggtactggcacttccccggcagcaggagcagaagggccagcaccctgattcaagcatgacactcgccgaagccgtctctttttcttttcctt

SEQ ID NO: 115034 - DNA, 336 bp, Zea Mays
cgccagggacaattcctgtagaccaatgagagcagacaaagcaggagaaggaactccactactttcaccactagcgatgaattgccgactgtttttccgagtcaaaggaacttcatcctcttcctccccgtcgtcttcattagcaacacaggcagcaccccattgggatcagcaacagatggagcacccacattgggatcagcagcagatcgggcacacccattgggttcagcgtcaataaattcagtcacagacatttcttcagcagcaggaaccgaaataccaacatcccgatccaaactggatactcgccggaggcgtctctttttctttttc

SEQ ID NO: 115035 - DNA, 370 bp, Zea Mays
ctggaggggaccatctcagaatgatgaattttaacttggtaatcagtcagttggggcttcaagaaattcctctcaaaggacaagcttacacttggtcaaatatgcaacgtcaccctctactcgaaaaattggattggtgctttgtttcgcaggcatggtctgtcaacttcccggccacttctgcactttcgctctctagaggaacctcggatcacactccttggatggtaaatgtccaaattaatgttcccaaaccacccatcttcagattcgaaaattattggctccagcttgaagatttccactcaaattttcaagattcttggagtcagcttctatttcaaccagacccagctaaaaggctcatggc

SEQ ID NO: 115036 - DNA, 539 bp, Zea Mays
ttacaaatgggccctaaaggtggcggggtgtagcatggaccccaccgtagaacggtgtagccttcctctgtgtgttgcgcctttcactctgtgaagtcgagccttcgacctcgtcgggactattttgctaagtggaagagtccgagccggcgggggcacgttcgcgaggctacagcaagcccccctcaagcagcatggcccttcgctccatcacctcagagagtcccggtccaagacctcgatgtcggtactggtcaaagtactcttcacttcttgtacctacaccaaaaacctgtttgattgtggttggattagtcgtaccgagggggcggtcggccttcgctccaacactcactccctggagaagctgctccaaaaaatggatgaatacataaggtaagacaatgacttccgccaaagaagggaggaggtccaaaaatatgcaaaaatcgccaaggacatcaagggagattccacccgaggtatgtccgaagcattcacaatctagctcaaagtgaggagaagacagcccagtctca

SEQ ID NO: 115037 - DNA, 449 bp, Zea Mays
gtggaacctggagtgttacattagatcatcgtcagaccctttcctcagacgatcttgaagagctgcaaccccaaaatcttctttcgataaaccaagttcagcccttaaattgttggtagcaatagcttcatcaatgcccaatgtcgtccctccgccagcatttggtaaccccaaaataaagtgcaccgtatcctttgtaattttgagctccttccctgggccggctcgaattgtcatgtcattatggtcaatcttttccatcagccaaactaaatgagatctactgcccagtgcgtcaactctcatatcaagaatactggagaaccccctccgtgcaatagcttggcgctgtctgtcatttaatatctggatgcttactaatacgtcttggggattgcatctcacattaagcctctactaaaaaaatgtatacaatgaatagagtaaac

SEQ ID NO: 115038 - DNA, 346 bp, Zea Mays
taggaggtcgtcagtcctcccttgcctttaccggacaaggtctgaaggagatgctggagtactacgacaatgcggtgagtccgtgatggggattaccatttgcgtctccttgacatcccagctcgtgcgtgtgaaatcgtggagctttgggacttcaccgggccgcggtagtacctcttgtcacgttgcagctaaacatcggtggtaacttttggaatgccattggtccatttgagagtttgtctgttgtggttcagggcccattgttaggtggtttcaatgctatgcgaacgtcaccctggaggtggtgttttgtgatgggagtaattgtgcatttgtagtccca

SEQ ID NO: 115039 - DNA, 618 bp, Zea Mays
tgggcataagcttcctttgatgatgctaaccgcttgagaattgcaatgcacttcttacatcatttcaggtgtcctctcttctccttgggcgggcttgttcatacctatgttaacaatctcccaaagactcggatgcacaccgattagatgcgacttcatcttgtcggcacactcatcatagttcaacttactaagagttggaagctttcagagtggcgccgaagagaagttgggaataaaattacgagagtaatcaaattgaactctattgaattcgttacctttacttttggtggatgactcttcggtgttgagacttaccttgctcatcacctttgacaccaaaagctctaccaagtcatcattgtattcaatttttccctttcctttgtcttcctcgacctttctctttgcatctttatctttcatcttgaggaacattttctcggcaatcttcatagcgaggtcaaggatcttaggatccacttcctcaccggttgtggtgaatagcggctcctcgagaagaggatcttcgttgttccttggagtcgacatgattgtttcctcatgcggttaggcactaaaaacgaggcatgtggctccgataccaattgaaag

SEQ ID NO: 115040 - DNA, 319 bp, Zea Mays
acctggttcatatgaccggatggacgacgggtcacgcccatagaccactcggaatggagtgtccctcagcgatgtctggtatgctgtgttgaagagaaactccacctaaggtagcaactggagccacttgtgtggctgtccccatgaggcatcgccggtacatgagaatgacgcggttggccgactcagactgaccatcagactagggatgaaacgccatcgtcatctgcaacttggtgcccatcaagtgcatgagttcttgccagaatgtggatgtgaatatagtgtcatggtcggggaccatggactggggaatgtc

SEQ ID NO: 115041 - DNA, 623 bp, Zea Mays
gtcttggtgtgaaagcaacgatcctttgcgcaaggaaatggcaaaaaaaatgttggcaaagtacaacaagtattggggtgatcatactagcttcaacattctcatctttgtggctgttgctcttgatccgaggtacaaactttcaaactacaccaagattgctaccttagagatgtttggtgaggtccatggagaagtggtttggattaaaatgaatgaaacactcacaaagttgtttgaagagtatgggagaatatatgctccaagtgaaaaggatggccagaccactaaagcaaaaaacccacaagaagaagaagatgaaggtagtagcttgatgagaacattggttgctaaaaggatgaagtcaaacaattgtggtgtcagtgcttccaaatcagagttggagaagtaccttgctgaagagaatgaagaacatactagcaaatttaatatcatggactggtgtaaggtgaattctacaaggtttccaattttagggtgcttggctcgtgatgttctagccattcccatctccacagtcgcatctgagagtgcctttagtactagtggacgcattttagatgattttagaagctctctcactccattcatggttgaagctc

SEQ ID NO: 115042 - DNA, 482 bp, Zea Mays
cgcgcagaagtcgcctaagggtgcagccggactagcacaacaagtgcgaaaaaaccagagtctatcgcgaagactatccgcgcagaagtcgccgaagggtgcagccggactagcacaacaagtgcggaaaaaccaaagtctatcgtgaagactatccgcgcagaagtcgcccaagggtgcagccggactagcacaaccagtgcgaaaaaacgaaagtccatcgcgaagactatccgcgcagaagtcgcctaagggtgcagccggactagcacaacaagtgcgaaaaaaccaaagtctatcgcgaggactatccgcgcagaagtcgcctaagggcgcagtcggactaacacaagcgcgaaaaaaccaaagtctatcgcgaagactatccgcgaaggcagaaacgacaacatcaaaccgtccgcgccaagaccaactataatcacatcagcacaacaaaacaaaccagacaaggtacacaacgc

SEQ ID NO: 115043 - DNA, 760 bp, Zea Mays
ggatagagcaagcctataaaggccagctccatgagagtattctccgataggtggaggagtaacatttgtttcacacatcctagaacctctagatgaaccgattcgccgtcttgcaccatttttgtcggagcgcgataaggtccaagatggtcatctcaccggtgatggagtagaagtgagagtggaaacactcctccatctgtttccataaagttatggactcaggctagagagaggtgtaccagccgaaagagagtccagacactcacagagaaaataccaaactttcatgtgtttggccaatcctactaagttgatctaagtcgtgtatcggctcacatgctcaacggtgttcacgccatcgttactagtaactttgtagaattatggtaccttgaacttgggtggtagcggcatcttgtcgaattctttagggtacaacttggcgtaggtgatcaccttttgcttagttaggatgtcgaactggtccttcatgaaatccgccagttgttcttgtgtgtcggtggtgctcgtccctctaaacatcgggcctagttgctaagcgccaacccattgtaatatcttgcttgccactcaagaagctcttgctcgttagctttgcccttattcagggtgtgtgttgttcgctgaaggagcgctccccctcccagagtggcctgtagcgttgcctacacacaaagccctccagaatgtatgtcgaaggatgatcgtagacggaggggaccttatgtggcatctt

SEQ ID NO: 115044 - DNA, 635 bp, Zea Mays
caccctaggaagtagggtattacgcctctcaaagctgctcgaacctgcagaaaatcgtatgtctctttcttttactctctcatgctcctagcacgaaccaacgagctacgatcagcaacaccgtcctacccaaaagcacgatgagggtatccccgggtgtgcggttggacactagacactgacagctggcgctccaggttggggctgtgtcattgatcaaagctagctcaataaccatcaccttcaagaagaagatcactcttcgcctaagagctatgttccgctttggaaccatctcatgcatagcgaaaaaagaagggactctacaccgcatagcggatccgcccaagaagaatactcgagggaagccagagcaagactacggacagcgcccccgcccacagctcgggggaagatcagcccttgtgcaccgaggttcgggagccctcgagagaagaaaggtcgatcagtctgggtttcgcttacctgaaaaactccgttgtccacctcgcctagtaaggagtggacacagatcacttggaagaaggaaataaacatcccgagtcagagaagtaggacacgtcaagccacctttccgatacctccgccctcaaaggaggacagtaagaagaaca

SEQ ID NO: 115045 - DNA, 939 bp, Zea Mays
cagtgattatcaagagcaaacaagagtgccgaaacaagaacgcagagggcgagattggacctgatttgggctggccgcggcgagcttggttctatggtggcggaaacagatttggggagaattccaaattcgtggattctagtgaatgaccgaggttgattcgtggtggctggacagcttactaccctacggagctggtggcacatgcaatttataggcgcatcgagggtcggtgacgaattcggccgaggggtgctggcggccggagaggggaggcgagctcagtgcgggagaaaaaggtagctttcaccgtggcagtgactccggtgatcgccggacatgcaaccagtgagtcaccgcgaggaagtcccacgctgagacacgtggtgcgcaacggtggtagcttatcggcgacgaggctatccaatcgacgatgagttggggggtgaagtacggcggccttagccgtagctcaatccggtaccggatttttaccaggtcaagcttatctgttgtacacggtgcacgaatcgcaacaagagatcgaccaccggcgacagctcaccggcgacgagcaagccgcgctggcaacctgatccactttggtctactataccatggcgagacctcatcagagcacctgacagatcatgtttaggtcacattttctctaaaatttgcatgtgaacttcatcaaacctctgtaccaaagttgtagagctatagttaatcttaaactttgccacaatgcttaccttcaaatagtcactgaatcccattcaaaatcaagctcaaagttcactccatcacactgctactaaaaattcagtccagggattgcctgacagcctgactttgagctgaattatctccaaatttctcacaagaacatggcttgcactcttaagcaaaattgttatccattaataggtctataag

SEQ ID NO: 115046 - DNA, 470 bp, Zea Mays
aaatccgccaagaacagagttcttttggaggtaaaaccccaacatccacaaggtgaaggagatcagactctgaaattatagacatatggttacccgcgaacaacaactaactgttggggtcgattggcgggatgattgccgcggcggagctctgcttcttccgtttcggcgccatcacaatctcgccggcggaacgaacagagcgaaatctcagggaaacagaagagtggttcgaggtggaaatgtgaagttagcgctcagaaatcaaaagagcacgtcgacatgagtttaaatggggttttcccgggttgagcgccatttctaaaaaagtgccatgtcatcactcgggaaagcaaaacttcagacataactcgactgttaaaataccgacagtgtcaaacataactcggtcgttacctctaaaacaccaacagtgtcaagcacgactcggtgtttacctctaaaatgct

SEQ ID NO: 115047 - DNA, 959 bp, Zea Mays
cggtggacggcgacgcgcagattttcggcaagcttgtaccggctaggatacttaatgaccagggccctaacctggccgacaccgaattctacctttggcggccatttcccctccatcaattccataaatccgagtcggactctccctgtccacgatgacagcggcaaccgagaacattttgatgtgttcatgatgactcagggtagtctagcacaaatggataggtttacgagtaacaggagacttaatggaggctagaacattaagcaaggatgctagaactgacctgcagacgtctggccatgatgaggtgcttacgggcgcggaaaactgatttggggagaaaagaaaattggagctctctggtggctaatcggaggcagtagtagatgctttggcttcgtgatgccttaacggagctagaggtgtgctcaatttatagtatctcaaagcggtggctctcaatttggtcatggcgtgctggcggtcggaggtagggaagagtactggcgcaatagctgcgtgtccttcaccgaggcaggttcactggtgatgagtccgcaatgtaaagcagcctactgcaatgtggtgaagtctcaacacacgtggcatacgatcggcaggcagccaacgtcggtgagcttatctgcgccggccgcaaggcaagggggtacgacggccagccaccagggttatcccctagcgaagatcttttacctaggagcgttatccggtcaccggtgagaacgaatcgcaatggcggcatggatctgggcgcacagtcgccggtggtaaggtgcgctgcaccagcgatcttgttcagggtactgtaccatcacgattaaccttcaaaacgactgacagagctcttttgagggcaatttgtgtagtgaccagaccaacactctgcatcaaaattgtagttcaacaaaccaactttaagtttgccacagaggttt

SEQ ID NO: 115048 - DNA, 624 bp, Zea Mays
gtctgatagttctctggggttcaaaaagtgatggacatgtaaatgtgacccagcgggtactctccctcggtcggcacgataccaaagaagggggtatacgactaggtgaggtcggcaatggagattcccagagcttgaagtgttcgaggaaaggtgacattgatgctgcttccaccatccactaacacctttttaacccgactctcttggatcacagggtcgacaagttgggggtacttgcctgggtgattgaagttgagccactgatcggcccgactgaatgatatcgtgtgttcctgtcatcagtacggggtcgaagcgttgtttgtggccactagaacatgtgggttagtgagtttctgttgccttctgtttatttgtgccctgtgtccttcgaatatggtgttaacttcccgattgatgcatgggaaagccccgcctccacctcctccctgtgttgaggttggcctgtcttggcaagctctcctcgtggagggggaggcgacagtggctgaaacggtcggtcattcccgatagagttcttgaaatctcaacagttccgcagggtgtgccacatatccttgtggtatggccactgagattcaaggatctcatccagtgtct

SEQ ID NO: 115049 - DNA, 498 bp, Zea Mays
gttgagccaaccttacaagagcagataatcatggcacagattggtgacaagggtgttcaaatcattaaggaaatgctcaatcaaaaagtggataagtataaatgctttcgtcaggaccgcaagggtgtcctatggtttgaggacagactggttgttcccaaaaacccagcactcaggaagaaaatattggacgaagctcatctttccaagttttccatgcaccccggaagtaacaagatgtatcatgacctcagatctttgtattggtggaccaggatgaagagggagatagctaagtatgcatctgagtgtgacacttgccaaagaatcaaagctaatcatttgaaggtagcaggtaccttacaacctctccccataccatcttggaaatgggaggacctcagcatggatttcattgtgggattgcccaacacctcccggcaccacgattctatttgggccattatggataggctgaccaagaccgctcatttcttg

SEQ ID NO: 115050 - DNA, 684 bp, Zea Mays
gccgaaaaggtggagttgacaagcgtgagtctcccagccatagacagccaagtattggtggcattcaaccttctatcaattttagaaatgaaaggaagataatctttaattttcgactttgtgtgatccataggcaaacccaagtaggtgaaagaggaagcaccaacttggcaaccaaacattgcagccaactgaccgtttttgacggtgtcgaggttgatcggcagaagacaagacttgtggaagttgattctgaacccagttgcaagcaagaaagggtggaaaattcctttcagacagaacaaatctctttggtacgccttcatgatgataagagtgtcattagcgtattggataatcgggaagtcggacatgttgtccctctcaaggggacaacgaaaacacccatattgggtaccttattaatgatgcactaaagaagatcaacaacgattaagaaaaggagaggaaacaaagggtcccctaagaaaaggagaggaaacaaagggtcccctatcggacacctcttttgcacaataaacttttacctaacacctcattcagcaacacagccgaggcactagactgaaggatggcttgaatccaggaaatccatttctccgggaagccgagatgcttatacatttccagactagcactgtgcccccccttagaggagaattt

SEQ ID NO: 115051 - DNA, 302 bp, Zea Mays
cggccttggacacacatttgtggacgctggtgtaccttttagggtagtggtagcattccctgtttgcccatttggccgccaactcctttagggacaaccattagaaacatggcttagatgtttccaaggttgcctatatggaaggaaacgatactagggtcttcctagccgatgtcatagtagatattggtgaggttacgcctgaggatacaaacatatatcactcgtaagctcgggcgactgcgtgtcacactataggttagggaaattgatctttgggtgatgaaagttgtggtcatcat

SEQ ID NO: 115052 - DNA, 439 bp, Zea Mays
ttctcgacgagatggagaagttcaccagtatggatctcaagtgggagcatcaattcaccgatttttagtgtcatgaggaaggtcgtctggaggcgttggagtctgccacgacagatctagagcagtggtgacctaagatggaggccgccatggaggacatcaagctggagatccgcaagttcggcaagcattgggaatgagcggtgttcaagcattccttggcaaaacctgggatcttctccaagcccccgcccactggttcgcttcctggcaccggcaataccactgacggcctgtacgggcaccacgacgaaaactacctccgggatcagggatttgggtcagtcacgacctttctccctaccccggtcaagggtacactccaaattccttaccctccttcccatccttgttgccatggctagttgtttgatgattg

SEQ ID NO: 115053 - DNA, 520 bp, Zea Mays
tttgaccctttattcttataatcttggcttggcttgtttatccctataggcatgcacatgaaaatgaaagtttgccaccatagaattatgttgatagacaacacattccctaattattaccttgcaatccaagcatgcatattgggaatgtcacaaaattggaataaacaaaactgatgtcatgatgggaatgtcacgtcaacaaaactactcactaaaaccgtctaaggggttactagcttggttttataaaatggagcaggttaaataactgattttaaaggtgaggggtacacctcggtcatgtagatttttggagttatttgcccattggtcagtatcaaaggggggtttcacccaaataccatcacggcaatgggcttcgccactacgccattttcaaacttcatttcacagacaaaatgccatttgtactcttgagcacattattagactctttttaccatcttttacccttggcaaaataacgatgtcaacactcatcgtgagaacttgctat

SEQ ID NO: 115054 - DNA, 630 bp, Zea Mays
caagaatagcaagaaaagttgtcaacaatcacaagaacataccatgttcccaaaaagagcaaactcgagctagaccaacagtgttcttgtgaagcaaatcaccgagttgcgaggtcatcaccttggtggctaggggaaagagaatcggtaaccattttgccatgatgacaagggtgacagacaagatctttctcaaatttcaatttgggcaatccttcgatgatgtcaagtgagctcaaacgacacaaaagatcgaagctcaaatgacctagcctcctatgtcacttccaaatcagataggaaattcctacctagagacatcaagatgggtcggctgaatggaaaaaatcagctcgaaaaactcgtccaaatggagaaatctggcaaacaaactcttcccttgcatctaaaacacaagaaataccccctcttaaagcgcgcttcatagtcatcctcaagaagttgtgaaatagaaagcagattgaaatgcaatttcgaaaacaaagcaacatccttgattacaaaattcttatccactcgaacggagccatgggagacaaccttacctctcgacttatccccgaatgtgatgtattccttactaatcatggggtcgaggttggacagcca

SEQ ID NO: 115055 - DNA, 467 bp, Zea Mays
gtcatttgatgcggtagccaatcacggaggccttagtgtcctttcgttatgcaaagttgtagcacccaaagttcttgtgcagaccatcaactcttgccttcgtctgataatgaagctcgtgcacccgacagaacccttcggcactggcactctttccttggcttcgaagagcccagatatacaggctgagcctaacaatggcattgggggtcagctcgtgtagttagatttcgaacttcttcaaagcctcaccgatcatctcataaagggggaccgaagtccagccttgaagaagcttttgaagactacaacttcatcctcttttggctcgggaatcgtctcttctccagcgaaatgaattggttcatcatcactctccccaaagtatcctagtttcttcatcaaaactaaatcctctgcctttactgtggattttccaaacttgacatggctgggtttgcttgggc

SEQ ID NO: 115056 - DNA, 465 bp, Zea Mays
gacagacgatgtggaatggtgtagagatccccgttgctattgcaccgaaggaggaccgttttggtttggagatccttaacagaaaaactagaagcgtcaaactcaatggaacagttattgtcgtgagtaagctgtcgaacagataacaaattacgagcaagctgaggagcgacaagaacattattaagatgaaaataacgatcagctataggtaagagagatgtgccatggccagatgaagggatggactgcccgttaccgactgtaatggagcacagtggggaatgacaacaggagaggagtataccgtcgttggaggacatgtgggatgtcgcttcgctgtccataacccatgaaggggagtccggcaccgccatttgattaagggcagcaatcaaattggttatattccagccgcctgaaggagcacctgcggcatagaactgcggtggcgcaaaggcggtg

SEQ ID NO: 115057 - DNA, 568 bp, Zea Mays
cacggcctgggatgcccgacgggagcttcagtggctggaccgctgtctggatgcaccggcgaggccgccgttggcctggcgtgagaggttttattaagggtgtgtctggtttaatgttaaagtaggatgaggtaggccaacaacgtcccttcgattttttagaactacgttgccaccaaaaattcacaaatctccgtgtgactctcatcaaacattatagaaaacatgatcaccccttccatccctccctggaccgtaaatgtggcattgatagccgcggcacggccagccactggaatcatgcgccaattattgatcagaatccgcatgttgctccgcagcgtactctgtactgtactactgtgcctgattctagcggcatcagagcggagggggacacttctcagtctcgtggcattgatgccccggtgaaagctgagtgctcacaatcacaagtcactactcaaactctcaaagcaacaacgcctccaacctagctgttgaaatgtactggaggaggggagggagaggggagaaacgtctacctcaggagaccactgaccggcgt

SEQ ID NO: 115058 - DNA, 587 bp, Zea Mays
cgcccggcggctcccacaaggcagagtcggggcatgtctcggggtcgtgcgcgacgcggccctgccttctatcagaaaccccgcgtcaccttcctagcatacactcaggtatggtgtattgctctatcctgctcggcgtgcgagttactgtgtcgactgatgcttaggttccctatgactggggttgatcggtcccacaaggcagagaccgtacgcggggtgtaccgtcacgttgatagggactttccggtacctcttcggtatgtcgtgccatggtcctgacatagtttggtgacgacgcgtcctgttgtggctgacgtggatcaatagtactggtttggggcctatgtctcgctgaattgctcggtagggacttggtcggcacctccgtctcgctaagttgctcggtagagacttggtcggaacctccgcctcgctgagttgttcaatagagatttggtcagcacctccaccctgctaagttgctcgacagagacttggtcgggacctctgcctcgctaagttgctcagcaaggacttggtcaggatctgtgcctcgctgagtgctcgacaaagacttggtcgag

SEQ ID NO: 115059 - DNA, 446 bp, Zea Mays
ctccttggaatcttgcatattctcatcttttttatgcttaccttcatatcccaatgtctgtttaagatatttcattttacatgcccttgaccacccttgtttcttgatgatccatgagagatcattttatttctcacatccttggtgatctcgttgtttccttataacttccctcggtaatgaatttttacttctacccttctgttggaaccttacctatcttacccttgattgttttctccacttcatgagtcttgccttaactctatccttggttatgcttttcactgttatcatctttaccctcgtcacctctatatcttaccttgatgcttatattatatctgccctttaaaaccttctctcttccatctcaatttgagagttgcattttatctattttcccttggccacatcctattcttcgccgcttgcgagtttttaac

SEQ ID NO: 115060 - DNA, 747 bp, Zea Mays
atagacagttactgggaaattcacctttgttgttgaacatgccagcaccagcaacagcactgccaccagaacgcaggggcattggcgtcagtataaagagctttcgatccacactaccaaaaggagcagcgaccctcttcctttgggaaacaggagtaggcatagtacttttgtttggactttgcatggtctcatgtaagaagttcattagttcttttcgccctttgtaaggcattggctgctttaacctatctaatgatgttttagtgctcgtaggatccttggcagatgttataccagatacatctgcagtttggttaccatgcctacttttactgtcgaccataggtgcacgtgcactatccactgggcttctactagatcttttcctcttcaaaggaagaggctgctttgagtcagcaactggttctttgacatgaactactggggaaatagttgatagggattgagatgtggtatccttcccacttgaagttgcatcagatttacctaatcaaataaacaaaaggttcattggcatcaatcaggcacaggacacaagaatatatatgcagtaatttgaaatttcaaaatcaataagtatttcctagcattctattgagtaatataacttccccagtcagatagtgaccattaactacatatacattgttgaaaattttcaatatctctgatctagtataccaaggagcaaaaaagtagcatggaaccaaactttccatgcca

SEQ ID NO: 115061 - DNA, 554 bp, Zea Mays
caggattctgtatatgggattcatcagtgtgttctaccggaataaaattctcatggggtatcgttggttcaccattagatgtgtcatgcgtagctttcatgggaaattcgtcctcaaaaaacgtagcatctatggactccataatagtaccaaccaacatgtctggtactccagagtttataattaagaacctatatccaatgctatgaaaagcatacccaaggaaaacacaatcaacagttttcggtcctaatttgcacttcttgttaattgacacattcactttggccaaataaccctaggtgcgcaaataggagatatttaatttcctcttttcccattcctcgaatggtgtgatttctttgttctttgtggaaactttattcaggacatgacatgccatcaagatcgcctcaccccaccattccttagatagtcccgaagtctctaacatggcattaaccaaatcagttacagtatggttctttctctcagcaaccccattggattgtggtgagtatggcggtgtcctctcaagaataataccatgttcc

SEQ ID NO: 115062 - DNA, 446 bp, Zea Mays
gttcaggagcacatagccttcagagtgtggccgcttgtagaggaatgggaaatgccaaaggaaactattagcaagtctgacgaaggtggactggttaggttgaaatacaccttcagatacgagggtaagtttattgagccagatgatgattggctgaagtgcatcgaagctacaagcgacgaactgcttggaccatattcaaagacagaagataacgcgctatctacgaccttcggaggccggaagaagaagaggctgaatagagttttcgatgctattgggtttatgtaccctgattaccgctacccgctgaaagggcaaaagagaaaaaacgcaacttctagaaaaggtgatgcttcagttgctctaagtgaggccatactaaagaggaagaaggtgaaggtccttactcaccgaccgcgcttcatcgaaccagcctcagtgcc

SEQ ID NO: 115063 - DNA, 455 bp, Zea Mays
taccataccattaatcctatcaccaagatcttcatcctgattcataccaacatcttcattgaaactcacatgttcatcctgctggtcaccattttcattaattatgccatccatggcttctccatgatacatccacctagtgtatgtactagccatcccatgaagatataagtggtcctccacctgtcctctatgtccactaagacgattcaaacacttgcggcatggacaaagtatctcttcgttcacattaaatcgctctgttacaagcttcatgaactcactaactccttccaggtgtggcttgctgaatagtgttgcattgatccaagatctatccatctatggatggcaaaattattttagtgccaaaaacaaatcaatgttgcagcaaggtaatagaagtgaacaactttgtagtattattgttatgctaccacttaccactatcaaac

SEQ ID NO: 115064 - DNA, 335 bp, Zea Mays
ataccttacatagagtttgggcccacgagatgcactaaggacaccctaatttacacaaaggcaaacgaaaaaaactaccatagcccaaaagatcgacccactttaaaacttaggccatcccacttgtcaacccctctagctgatttctcaaaataatacagggcacatgctacgtacatcggatgcactgcgtgagccgatccatccgctttcaaaaacttaagtgattaggccattctcacttgtcaactgcttaatcgatttcatgaatctgagggctacatccaacaggcacatcgcgcgtgaccagacgaccaaagtcggcataaaaattc

SEQ ID NO: 115065 - DNA, 654 bp, Zea Mays
gcaatcatacattgtttttttccttatcagtatttaccatctcccagggaaggccataccctcgttgtcaccaagacgattctaggatctcgatatagaaaattatcatgggcccaccaattgggaccctcgccttggggccccaaaccctggcctctacccttgtaggggcttggcaccgagtgatagtgacttgacattggggcaccccaaaggaataactacaccataaattttgtaagaagccactaaggggtctagggccatgggatgtccctggctagaagaatctaagtcttcgggccctcttgtgccttgaggcactcatgaacaatctaagcccttaggattcctcgtgccctcgggtgctcatgaagggtacgaatactcggagcaatccgaccacgacactagggccactgctggcctgaatatctctagcctcagattatgagcacgactaagccccgaaccctttggtgtctatagcctccaaaggaacaagggacttgatgcaactgagtgtaatcttatcacaagacgaaagggtgtgcttgggtccatcgaggcagtatggcctaaaatcaagaccccacaccaaaaggcctgctaaaaagtccatagcgttagcttatcggataagccttaggtgca

SEQ ID NO: 115066 - DNA, 467 bp, Zea Mays
gatttaacaagattctggaattatctttatataagaaattcattttataaatcaatttatctgatctaccatttccctaaatcgcgcctcaattaccatataagacaagggcttctgcgtaagtattcccgtgactcagacaaacccggcaatggattgcgggttgatttataaaggtcccaggggctctttaagaaaagcgtacggcgaaggggtatcgcgggattctagccctcggatcatcggtcaatggctcggattagatccccgcatccttgaaccggtatcggatacggaccgtcagatcaccatccaagggtcgggatctatcgacacaagcgctcactctcacccgcacacccgcagatccaagaatcaacggtcgtagtgcaatctagccaaaacgttatccctcgacttgatcttggccgatcccggcaagatcaacggccctggttagctctccg

SEQ ID NO: 115067 - DNA, 558 bp, Zea Mays
gccgaagagtaaacaattgaaagtcttcacccaccggccccgctatattgaatcggccatagtgcctaagtatagcggggagacttcttcagctactgaagcgaaaggacctgctcctcctgtgcagaagattgaagggccggctgcaatgccgaaggcaccctcagccaaattagctgagccgaagactgataagactgaggagccaagaatcgaagggacaaaaatattagaagttttaagccctttggcagaagtgacagtgccgaaggcacaaaaagatcttgcggcgactcccaaaagaaaaaggatggcaagtgttctagatgtgctagtgtcactaaaggcttcaagttctattccttcagggaaaattgccgagtcttcaaaaatgcaaatcgaagctgaagcaaaatcggccgaagttgaagctgcggtgagccaggccagcgtcgaagttgggccttcagagcctgctgataaacaaccttcgagatttgaagagaaggcagtagaggaagaggctatagaacagagtttgcctgagaaaactctcgc

SEQ ID NO: 115068 - DNA, 437 bp, Zea Mays
ttcttttgcatttctgcattttctcagggagagttctcgtgtcaagggggagtttctgtttctacccttgtttgtgcttgatgagtccacttatcaacaagggggagagactttgagatttttgtcctcctaacaaatggcagagattttttgctttagcagagttctttcataaggggagagattctcaggggcagagactctggattttggagctttttctagttgtgttgtgccatttgcctctttctagatgaactagctttgattttagcttttgtgctgattttgtgctcgaatctggttttgtctgctagctagtggtgttgagacctacttttgcctcttcttggggactagctattttctgtttggtcatgttgagtcgttgtccatttatttggggaccaaactttgctcgcttgaatgacttgttt

SEQ ID NO: 115069 - DNA, 362 bp, Zea Mays
gcggggaggcttcttcagctgctgaaccaagagaactcgttcctcctacacagaaggctgaagagccggctataatgccaaaggcaccttcggttgatctagctgaaacgaaggttgacaaagataaggctgaaaagtcaaaaactgaagaagtaacaaagatgccagagattttaagtgcaacagaagcaacaacactgaaggcagaaaagagttctaccaacactcctaagagaaggaggatggtaaatgtgttagatattttagaaacaactgactccataagtcccgctcctagtgggaaagttgtcgaagctgacaaaacgcaacccaaagctgatactaagcaaatagaagttgag

SEQ ID NO: 115070 - DNA, 679 bp, Zea Mays
ctccgacgaggaagttcgttgggtttgtactagctaccgtgtgaggccacgactaagcgttcgccaagggtctggcttttatacccgaaagaagcctgcatggacgcacggttgggatagaatcgaaggatttcttccccgacatcatcgtgatctgttggtaacaaaccccacataagtttgagatggttctggtgcgcgggcccatgcacgcaccggtgtaccgaaacagggtcacaagaggcggctagggtcaaggcggtcaagatcgagcctagatggcatccggtccatcgcatccacagggtccagtggccaaggaaggagacagtaatgacaactagggcccacatggcggcgaccagctgagacttgcacgacagggaggaggcaagaaattgtcctgcgggtcccacattgcagaggacgggacctgcacccgagcgcgtgaatgaggtgaatgggttgcgcggcagaaatcgacacctgggccggaatggaggaactcagcccaagatccaatttgaccattttcttttttttataatttgttttctaattcccacttcaattcaagtttgtgcttcaaattcaaattaaattgaagcttcctatttcaagtttcaaatatccaattcaaattcgaatctctgtttgatttttttctgatttcaactct

SEQ ID NO: 115071 - DNA, 581 bp, Zea Mays
ataaggattttgagttgtgtgaccatgatgagaattatgtgcctgaagttggtgagtcaattacacaagaacaagtagcaggttcagtacaaggagaagaagatcggaatatgaatcaatttcgtgattggatagcagatggcttgttcaatagactgtaatgattattgtgtgtaataaatattacaaaaatgtacttcttgcatttggacaagtatttttggaccggttgtgtgtaacattttcaacatattatattgtttgcagtgttcagtctttgtgtagtgttatgtttgcagtgttcaatctttgtgtaaacgtactgcccagtttttgtgtagattataaaaacagagaaggggaggttagctctttgcaattttacctagagtttttgtagttttggtcagtttagtttttgtgattgtcagttcttgtactcaaacgaacaaataatctagtttttgtagttttggaacgaacatataatcaaagaatcttttaacggggagattatcttgtactgtttagtttttgtgtagattataatgttagttcgtcaggttttgtagttttggtcc

SEQ ID NO: 115072 - DNA, 524 bp, Zea Mays
cgcgactgagagcgagcgaagaagacggttgcgtgggctaagtctcctaggtcgtgttccgcgcatgcagatgacgtgcaaatctcctaaggactcgctgaccatcggaggaactcgacacgactagcagaggcgggtggacggagattgtgtactaggttgtgcgttgtaactcctctttggttggtaataaggctaaagaggagcccctacgaaaacaagtagaccctcagttgcataatcattttccacctccagaattctctgtaatcccagttaccgagcaatacacatccacaaactcataggacatagggtattacgcactcgagcgacctgaacctgtataatccattatgttccgttgagccccgtacgaaccatcgagctacgatcaacctcgccgcgcacccaaaagcactacacggtacaccttgtagtgtgccgttggtaccaaacaccaacacatatatagtgttgtctcagtataacaagatatgatatagattgatagagagagattt

SEQ ID NO: 115073 - DNA, 555 bp, Zea Mays
atgtgtgccaaggcaaggtagattccccgatccgccgaaatccttcaatggtggagtcgaaggacgctttcacttcttgcccttggctttctttcggcccttgcctcctccctttcccgccatcagggtttttctggagaagaagagaaaggaccaaagaaggaaaacaatagacaagtgaagaagttcatagcgcataagtggcttatttaaaggaactaaagtgtgccccttcgtattctgatcgtacaatgaacaattgccagcctttaaggggcatttaaatttcctagaactgagcacttctgccacccattggcgtaacacgacacctggattcggtagatcaaccactcaggcacatcattacgccccgtcacctcaagcaactgctctcttgacaagacgatgtacatatccacccattgggcgcacccattgagtgcacagatcggattctctggaaaacacaatctgcgaaatatcaaacgacagtcctgcaaaacggcaaactcaagatcgacaaaagtcgctggtcagccctaagccaaccga

SEQ ID NO: 115074 - DNA, 444 bp, Zea Mays
gaagcgtccgtctcatgagctgatataggtatttggctgctgtagtgaagtgtgttggagaacgtcgtgacccaactgagaagggtggtcggaataaagccgcgacctgggctgtacctagagcaactccgccgtgaggggatgaggaggatcagaggtgtcgtaacacaagctgtgaaggcgagtcgatgactagggaaatccaaatagttggcgaatctggctggcatgaatagtaaaatccttgcgctcaaagtggaaactcatccactggtgatcagggtcgatccatacataagcatagaaaactcggacccattcctcaacatatctgccgctggtagtcagaagagtcagaagtccaggcaaataggagaggtgaatcttagagtctgcaccggctgctagcaggaaggcagggagatccaatagccggtgcgctcg

SEQ ID NO: 115075 - DNA, 674 bp, Zea Mays
gtaacttcttgaatccagcgaggttaaacttcattgactactgtcaacgccatcacacagcccacccgagaaagagcatcggcgactttgttctctttgccctacttgtagatgactttaaactgcatcccaattccccataagctttgccatggctttacgttgcaactccgaatgaagctcctgactgcccgagaaacttaagagccttgtgatccgtccggatctcaaactcgctctgttggagataatgacgccaacgatccacagccataatcagggcgatgaactccttctcatagatcgaaagcttctgattggtaactcccaacgccttactcaagaaagctataggtcgcccctgctgcatcaacaccgctcccaccccatcatcacaggcatcagtttcaacagcaaagggtatgttaaaatcaggtaatgccaataccggagtggaaaccatggcctgcttcagacgctgaaaagccagttcagcttctggtgtccacttgaaagcccctttctgcagtaacttcgttagtggccgagcaattatattgtacccttgcacaaagcgcctgtagtaccctgtcaacccgagaaagcctctcaaatccgcgacattcagtggtgtcggctacttgagcatagcttcggttttctgagggtcagta

SEQ ID NO: 115076 - DNA, 508 bp, Zea Mays
ttcagttttgcggcaaattatattagtcgggaactcgggattgatgccaagactaacgtgtgagggtagtgttcgtggattgtgaagaatttgaatttagaaccatgggtaactttgctgagataacagttgaacagtgtagaactgggccagtcccaacccccaagttctcaagtcccaactgctcattatgctgatccatgtgcctgtaatttggactgttgtgtatagcagattagcagttagccagttactttatttcagtgttaatcatcaaagctgaaaatctttggctacataaacagcggaaattcaatggagatgtagctgcgtttgtgcgtccagccaaaatgctcattcatgccactcaatcgtgtttatccacaatcatagaataggttttaaacttctgcgatgaattagatgtgctcagatttcttatgctccatccactatgttgttgtgtgagatttcttctgctccatccaccatgttgcgtgtaacacta

SEQ ID NO: 115077 - DNA, 322 bp, Zea Mays
aagcgttgagcaagcatcatgatcagtactgaacaattggttctagcaaaactaaatatgtcagggttcatgggtgtagtgatcttgcaatatttctgctgcctttactatatttctacatcttaacatgctctattcttctcgtgctcattgtggcggtgcaaattgagttgtttaagagaactcaaggttacgaggaaatctggcattttccctgacccaactttctccgacttccagtggctagtaggtttatgttattttcagtttccctttgtcagataggggttgttggggactgcttcacttcacaaaattctag

SEQ ID NO: 115078 - DNA, 535 bp, Zea Mays
caaaagagaaatgttcacaaaatgaagctatacgagagcaagtttgaacacccttactaatatcacccacaatttgatcaactgggtgatccttcacaatagaatgatgaatccttgataccatttgagaattactagttgaagcatgaggaggaactgaatgatttgaagtatcttgatcatgaatatccataatttcatcattttgttggctttggtgattttcttcatttagggttgaagaggatggaatgacaaccacactattttcatcatcatcttcctttggctttatttcaccaatagccattgttttcatagcatttctcaattgagttccaccaacattatcaagattatcgctttcatcttgagacccattagtttcatcaaactcaacatcatatgcttcttcaataataccatgagtcttgttgaaaactctataagccttactatttgatgaatatccaagtagaaaaccctcatcacatttcttctcaaatttagagagccgacttccttttctcaaaat

SEQ ID NO: 115079 - DNA, 375 bp, Zea Mays
aagaaatggaagaaaaggttcaacgaatcatacataacttgagagaagcacaagctcgacaaaagagttatgcagacaaacgacgccaacccttgtactttcaagtcaaagattatgtgtacctgaaagtatcaccaatgaagggtgtaacacatttcggtgtaaaaggaaagcttgcaccccgatacattggtccgtttcctattcttgaaagatgtggaccagtggcgtaccgactccaattacccaaaacattgtctgtagtgcacaatgtgttccatgtatcccaattgaagaagtgtcttcgggttctagatcgaaccattgatgtggtagatgttaccttggaaccagacttaacatattcagaacatc

SEQ ID NO: 115080 - DNA, 488 bp, Zea Mays
atttggagttcatatgcattttctacaatttaaacaagttctaacatttatttatgcactaaaaattgatttctgatattaatttctgattttcgatgctctctggattgggcctcaaattccagaaagtgcaggggctacggtgtaaaatatcctagacacagtgaacagcaatatgggacggcgggttgttttttgttttagtcagggtctctttagcatgattaccaagccgaaggggtatcctggattgccagccatccgatcatcaatcgagggctcggattaaatcatgggtggtcatgaagtcgtcatctcccgaccaaatcctagccgccccatcctgaatctacgggtgagattttaagtgggcgagattgatcagggatcgctcgatccaaacccacggcccagatccattcctcgaagcggtacgtggttatctaatctgaaccgttcatttatggatctagggtcgctctagcatc

SEQ ID NO: 115081 - DNA, 311 bp, Zea Mays
ggtgaaccatattttagcttcttccattctggagtctgaaaaaggacaataagaaatatgaagtgaggattccatatacacaaaccaaatggcaggaaactaaatcggtactatacctttgcgttttgcctccaccaccagtcaggtgcattaacagtgccatcgggatttttccccaacccagatcgcttattcaattgcaaccagaagccatagagaccctttagttgatctcttctattcttgagctgagtcttgtcatgcttaagaccagtactaatgtaatacttatctgccaatatgttataacc

SEQ ID NO: 115082 - DNA, 498 bp, Zea Mays
gtccttgttcaacactccgcccaatcccagcaggctctgtttcaatgggcaaagagggcccagcttcgggttcagcacgagctgtagtagcttcggtagtctcctttgcaggagcaggagttgatgcccttgtcgactccatgacagcgtccagcacgcttgccatcctcctcctcttgggagttattgcaggggctttcgataccttcggtaattctggctccggtggaccactcaacatttttggtagctctgtcgtttcctctcgctctggctctttggctgcctttcctttggcttcggcagcatgttttggcgcttcggccgactcagttgcaggaacctttggcacttcagccaattcttcctttgagccggctggagcaggctgccttggctcagtagtggaaactgtcccttcaccaagcttcggcaccgtggccgtttcaatatatctaggccggtgcattaaaacattgatctttttgcccttcggcg

SEQ ID NO: 115083 - DNA, 681 bp, Zea Mays
tcatgtcgtgagtgctcaaggaatatctacagatcccagaaaggtggaggttatccaaaattggcccattcccaggtgtgtcaaggacgtcaggagttttctgggtatggctggttactacaggaagtttgtagctcagtttggaattataagcaaacctcttactgctcttgtaaagaaggacaatttgtttgtgtggactgatcagaccaaccaatcctttatggctctgaaggaagctttggctcaggctccagtccttgccctgcccaactttaccaagactttcaccgtcgagaccgatgctagtggaggaggaataggtgcagttttacagcaggatggacatcctattgcatacatcagccgtgcgctaggaccaaagaacctgggactgtctacctatgaaaaagagtgtctagcaattttattcgcagtcgagcagtggcgcccctacccgcaacagggagaatttatcataaagactgaccagcaaagcctcactcatcttgatgatcaaagactttcaacaccctggcaacaaaaggccttcaccaagctgatggggctgcagttccgtatcacataccgccaaggaactgataaccgggtagcagctgcgttgtctcggagacccaacatggatcaggatattgcagaggatcaactgaacaatatggc

SEQ ID NO: 115084 - DNA, 440 bp, Zea Mays
aggaatcaatgctgaggaaaatgttgctgctaatgctgatgatggctgggacccttggcctgttgagcaggctcatccccctgtgccagaggttttaccaaataatgttaacgctgcgatcaatgaagaagaacagttcagctatcagctttcaggtcttgaggatctcccctctgacgattcggtgggctattttaacgacatcattatccctcagggagtccagctccagcaggatgaagccccggcgccggctgaagcggttcttgccttgcctgctttccctcctgaaaacatgaatttggagggaaacaatgtcgagggacaggacgacatgcaaattgaagataacatcaatgtgggcctcatgttgcacttggatcaaaccatccctgatcctgcttttgaagatttcatggccagaaagcgttcctcctctt

SEQ ID NO: 115085 - DNA, 453 bp, Zea Mays
gaaaaatctatatctcctgctcccgaagcacctccccatgacgatttggaatacattgttcgacacgcttcgagaaagcaggtatcattagaacaaattgccgaagtgcaacactatgccaaggacttgaaataccctcaagggtccttggtatatggagggaatgatgaagacgacttcctctactgtctgctcgacagtaaggaggttaatatttgtcgtgagatgatgaacaatatggggtttccgaagcttgagcttggtttatctgctatgacgaaggatcagcttgcggacaacctcgcttacaatagcttgaaggtttgcacattctggcttcgtattcggtactttttgttacagtgaactatttttggtaattcttattgttattgtttgttcgttcttctgtttggcagggtctaatccttagtaaggctctgaaggctcaaa

SEQ ID NO: 115086 - DNA, 394 bp, Zea Mays
agtggtctaaaaattcttgtctgatatatggaagaggggcgggaaggaaattagtatcgaagaatctataaataacagggataatgtttgtattttgttaccttcatcttacacatgcggggcgtacacacactatgactttcaaactttttggcaggctcgtcaggctgctgaaaaagctctagatattagacagaaactacaaggaaaaaaatccgaaggtacttaccctttttctcgcttctgctatattgcattcatgttttgacaatagttttctaactttcgttatgaatttgcaggtgatcattgaagtaaatcatactgaagccgaggttaaggatggtgctattgaagccgaagtagtagctaccagggccgcaaagaaagccat

SEQ ID NO: 115087 - DNA, 479 bp, Zea Mays
cacgtacttcgatggcactgatgaaggaggggtccggtggtggcctcttctttatcttgcctttgggggagcaacaacggtacaccattcggctccatttccaagccttgaacaatgtggtggaatatgaggccctcaagaatagcttatgcatcccagttgagctaggcatttgatgcctcaatgtctgaggtgactcccggcttgtcgtgggacaagtaatgaaggattcagaatgtagcaatcctaggatggcagcatactgcaaggaggtgtgacgacttgaggataggttcgacagcctcgagctaaaccacattcttcgatgagataatgaagcaacgaatgccttgtgaagatggcgtcttgatggggaactgtcactctagatcttttttgtttatgacttctttgagccgaccgttcattatgatgagacccatcgagagaacgaccaacctttaggtgctagcccgctg

SEQ ID NO: 115088 - DNA, 321 bp, Zea Mays
caagaattagaaaagaaacttgacgaagtaactggaaatttcaatgtggagctaacaaaacgtgaaatatcttatctggaacgattaagggtgcagaaaaatgttgaagagcttcgtcaagctaaagaggaatggtacaatgttgctacagaatgtgctaagaatttaaagaatagtttcgctaaggttggcgcattttcctcagagtagaacattatccatggtgatcctgatagggttatctggtgaattagcggtgaagccgaagcttttgatgagattcttagtgatagatgagacttttgcgcttttgccagtgct

SEQ ID NO: 115089 - DNA, 438 bp, Zea Mays
atacaaatgctctggaagctcgtgggacctcaaaagatgcatccaaaagagtggggagagcctccgagactacatccaaaggttttactagaaaagaatgatttgcctaacgcctctaacaccaatgtcatcaatgccttcacctatggcaccacgaatgaggcgcttgtacacgagcttgatcgcggtcgaccaaagaccaccgtcgaactcctcgacatcaccacaaagtttgttggtggagaggacattgtggggaccattttatacaaggggaaaaccccacacgacttcggtgatatgagcggcataaagaaagagagtctagaacaccctggtaggcgtcagaggggcaaccacgctcgacatgatgggaatcaggtcgccaacactgagtgtccgcccaaactagatgaagaatggtcgcaaccacttcta

SEQ ID NO: 115090 - DNA, 1012 bp, Zea Mays
caacactattccttgcgtcgctgacagtttacgaaaacatccctgtgcttctattcctttacggaccgaagtccccgacggcgagcggcgtagcgcagagctccggcgagcttgtaccggccggactatgcaaagactagcactcttcgtcgactgccacctaattcaagccttaaccgaagtttcccctcaactaatttcactaatggcgcactaacacgcccttactacggtgaccgtatggacaacggccaactaaacacgttcccggcgatctagggtgacttagctcaattgagttggtcgaggagcatcaggggaacacaagaatgttgaaacaagatagcagggagcatgaacagacctagaagtcgctgaccacggtgagggctcaaggcacgatgttcttggttgatttgggggaaatcccaaattagggaaatctagtggacgattcgagtcacgggttgctgcactggttgcacaattacctagcggagcagacgggggcggcaatttatagcctccaacggtggtggcgtccaatttcacgaggatgtgctggtggccggaggggaaaagggatactggcgctcaggatgagtggctttcatcgtggcagtcctccggcgatcaccggatatgcataccatgattcaccgtgacgtgggctagcgcttaagcatgtggcgcacaacggtgagcgatcaacggcggcgaagtctatcccggccgcacgacgagcaagtgggtacggtgaatctcattcgcgcccgagctcaagctgatccggtgccaagagttttactccgtcgtggttatcccctcaccagcgagcacatgtcgcggcgatggtgtaaatcacggcgtaaaaatcaccggtggcgaggggaatgcatctgcaatctatttcagtcactgtaccatcgcaatcttcttcagtcagcctgacagtcgatgtttagggcagattttctcccaattttccatggcaacacaaccaatgctctgc

SEQ ID NO: 115091 - DNA, 911 bp, Zea Mays
atcttgtggttgtaatggttgtgtcgaaggagccccctgaagctgtgaaggtcctatctcgtcgtgatcgtagtcgaagccagcacccattcctgtggagggcgttgctgtgtcggtacacgatggtacatggacgtcatgtgcaacattagtcctgcagccacagtgagcagcagctccacgtaggcgcctagataaacgctgcatgccaaagacatattagtttacaacatattcataacaagctaaaggctataaacgatgcatgtgggcttacctgcaagaagttgcgcatgctgctgtcgcccacagtcaaaagttggcgatcaatgtcctctaccgaccgtcgcaatgtgttacccttacaacacaatttgcatcaaacatacaatttatacatgtcgagtattaaaattgagtaaaacttaccactcgatctaatatgggtgccgcctccacttgggttcccaatctagtggacaggtcgtacttcgtttcttcatcatcagaagaatcaatgtcggtgtagtcttccgctgtccactgctggcgaagcttacaacgagtcgcaccctggtaccaagcttggtaccgcctgtagtaactgttgttgtgcaactcatcgttggaatatacattctcagcacccaaatcccattcattcataaatatcagatgatgttgacgaaagtccgttatcttcttttgcttccgctggtcaaatctacacacaaatcatatcatataaagaacacaaagttatgaatgattgatgttataaattgcaaactggatttatagattgcaaacttacttgtgtagctccttagaagtaggaatatcttcaaccgaccatatctggttcctaccaaactgtctctgaaccctgtgaggtaggtgccactcaacac

SEQ ID NO: 115092 - DNA, 703 bp, Zea Mays
aaattgggagtgattgctatagtaagattgtagctggatcatcatgcaacaattttgttactggtgggttagcaagtcatcacatgaaaaatcgaggttcaggccctacaaaatggtctatcaggctgactgaatgagttgcacgatggtacagtgcactgatcagatcgccagctcagtgccctcgccgccgacgagccgcgtgcggattcgtgctatcgccacggtgattcacgctcggatcaattggatagcgccggggtaagaaatatcgcccggggatgaactccagccgctattttactacggccaccgtacccgagcgtgtcgcggccgccttggataggttcgccggagatagactctttgtagccttgcgccacgtgccttggcatgataacctcaccaccgtgactcatgttagtcgtccgatggtcgccggagagcttgccacggtaataggccacgaatcaccgcgccagtaaccttcttcttctccggccgccgcgcgtctcaatccaaattcaccggccaccgctcaagcctgctataaattgccgacctgcctgctccactatgtaattgtgcaaccagtgaagcaaactgtgccttgaatcatccacaagagctcactaatttctcatttctcccaaacctgctctccgccgccgtggtatagccctcgccgtggccagcgcatctc

SEQ ID NO: 115093 - DNA, 549 bp, Zea Mays
gtccaagatggtactagtttccattaacactgaattcaacaggtggagctctaccatttgctaagtcatcaaacacaggcggagctcttgttataggtccttgaaacacatgaggagagaagcattatgtgtagtgacgtcctcatcatggactctcggccacattgatcacactatttggcgtggacgttcggcgtgaggtgttccatgaggttgtcttgtgtgacgatgccatccaacgcggctccgatctgcacatcattggactgcttctccacctgcacgatgttgtccagtgtgcctccagtccaacctgcacatcgccaaacttttggtccatggcgacggaccgcaggacaccgtccaacacacctccgaggctccgagctacacatcgctaagcttttggtccacggcgcttagactgcacgacagcgtccagcacgcctccgacatgcgcaccgctgagcttttggtccatgacgccggactgcacgatggcgcctagcacgccttcaagctgcataatgctaagcttctggttgggag

SEQ ID NO: 115094 - DNA, 605 bp, Zea Mays
gcctaggtcgggttcaagcagggttcctgttagaaaaagaattgcttgatgtgttagcacaagttcgagggtcctccctcccttactgccaagagcccaagaacatcagatgcctaggggaaagattttgcaacctgtcagatgtagacctatctgataatgctctgaagaagaagaagaatccctctggctgtgtgggtcccaataaacccaggaaaggagacaaggaggataagaatcaagattccacagatgaagacaactaatgtgatggggctgcttcggatgtgggcttttgcaggacttctcttcgccaggctttttggctgtgtcggccctggcgcttttggctggttgttgtggcgacaaactttgtggtttctggttgtgatatgtcctgttctaacagatacacttttgcccacccagttattgggtttgggtttattttcgttgacaaacctgatcattcccccgatgaatagtttcaatactgctactttttctgattggtttgttttaagtttcaatgtccgagggatcaattcggtggttaaagggaatggtattcactgcgcgattagggagtccagatgtgatattat

SEQ ID NO: 115095 - DNA, 433 bp, Zea Mays
gagcgaacccgtcttcggatagatcggggtggccaacgcgatttgctgtcctcatcgtttgggacgagtattggtgagggggatctgcggaatctatttgagggtgaggaattgagaatgatgttgttcaattatcgggagcaagggcattatcccaaaggcttagccgatgtagtgtgagatgccctcactagtaagtcccctagctcgtaataaggagggaggggagagctcgattgtatttatctgtgcggtggggctggtggcccttcgttgtgtgtatgtaatttgtgacttgtattgtaatgtggcatgttacccttctcttaccgatgtgatgtatttatttgtgcggtggggctggtggcccttcgttgtaatgtgtgattgtgcggctgcacccttaggcgacttttgcacggagttgtctttt

SEQ ID NO: 115096 - DNA, 478 bp, Zea Mays
cggacaacatcatggtcggtccatctcgtgctcccatagttccgcacttggttcaccaaggatttgagtcagttgtacgtttcttgtggctcttctcctctcttcatggcgaacctcccaattctccttcaataagctctatctttgtgatcatggtcatgtcattgccttcgtgagcgatctttaatgtatcccaaatttctttggcattgtacaaaccacttacttttttatactcctccctgcataaagaagctaataagacagtagtagcttgggaattcttatgaattgattcttatagcattataattttcatcatcgctatctagcaattatattccattttctacggcatcccaaatgctatggtagagtgaaaaaagatgaatacacattttatggatccaccaagaatagccctcaccatcaaagtgagaaggcttgccaagaggaatagaaagaaaatgagcattgg

SEQ ID NO: 115097 - DNA, 436 bp, Zea Mays
gaagaagtggccgacaccccgctcagattctttccgccctttcagagagaccgtcctgcttggatggccaggatgcgtgcattggaagagcagcagctgcttgaggacgaccccacagtcgtgtacctcattgcatacctgctcacccttgatgcacagtatgatttcttggctcggcaccaccgtcagatgattgcccgagcagaagatgcagagaagctcaaccgtaagctccatgtggatctcaccacagctcaagcccgtgcaactgccttggagagtcgtgaagtcattgttgttgaagctctgaagcaagccaaggatgagcacgtccagaagttgatggaggcctacttggtaacccataaccaacgtagagcccagtggatccaagagcccgctccatccaaccctgttcaacccatcaaagctgaag

SEQ ID NO: 115098 - DNA, 368 bp, Zea Mays
aatgcataacatctcagtagaggcaatgatgccgcccatgaggattaattcggttggtggcaaggtgcaaacagataaaatatgctcaaatataagggtggaaataagggggatagggttccccagtgacctaataataatagacacccctgggatagatgtcatcctagggatgaattggttaatgaaatatgaagcgaacgtcagctgtgacaagaggaccgtaaccttgaagtccccgtccggagaggaggtagtggctgagctaaagatgcctaaatcaacggagggagtttgtcaccagatttcagttgatagtaaggagaccaacccgctcgaggctatcaaggttgtgtcggactttccgg

SEQ ID NO: 115099 - DNA, 728 bp, Zea Mays
cacgactacaaaacaaagggtgcctattgtaccctgtcaatagaacaatcgacttaagttggaaacaacttaagatgatgccacacatcctcgataaccaatcaaagagggcacgacctgccccatcaaccaagttttaaaactcagacccaaattatcaaagaacattcggaagatacactgttctccaacctagccaactagtatccacttttctgttattacaaagcattatgcaggagcattttcatgaggaatatcgtccacaggatcgccaggagcgggaggtttccttgaggtacccgacgcagcaagaacgccagccataatatcatcaggtaccacgacgatgggtatttttagcaagaggtggccagctcggattgccttgtccattgccttgttgcaccataccttcatgatttcacggtcgtcctccaagaccttgatatattggcgagcaacttctaactcctgcgacactagcttcttcaaggcacagagctctttaatggtagaatttttcgaagatagagactcgccaagcatcgacacctcatcctgggactccttctgcttgtttctcttgcgctccaactcctccatggtgaagcgatgactcctctctagggtggtaagggaactagaggcatcctgatacaacttatcatgattgttttgggagtcaagaagtttctagatctcctcctgtgggtgggagaaccttt

SEQ ID NO: 115100 - DNA, 339 bp, Zea Mays
tggaggtatagcagaaagctccaaacggggtaatgaatgcagttttttcctcatcttcttttgctaagctgatctgatggtatccagaatagcagtctaggaaggacaacatagaacatccagcggtcgaatcaaccacctgatctattctagggagttcgaagggatccttcggacagtgtttgttgagatctgtatagtcgatgcacatgcgccaatccactttattcttttttagtacaagaacaggatttgctagccactcaggatgcaatacttctgtaattaaccatgctgccactaagcgagctaactcggcgtgaataacttctcttttgt

SEQ ID NO: 115101 - DNA, 541 bp, Zea Mays
gctgagcataagaaagtatctgaaatcaaacacctgcatccattcaagcatgaggtggttcctttcatgctaatcgactacatctttttatacactcttcttatgtgcctaagagaacaatgctaacctctatactgcctcatttaactgttctatagaaagttgagtggttggtaacagttaccattcttaagattgatcaactatggtggtacgagtcctgtagaaagtgcctcaagaaaacaaagcctcatggtgatgcctataaatgctcggacgctagttgtggccatgttggtccgcctaatctaaggtatgtgatgtttcttggtctggtacatctatgcctgctgactccttaatcatagatctgtgactgctacttaatgcgcaggtacaggttgctcatcacagcaggagatgagacaggcgagactgatttcatactatttggacgtatggcacaacgcattgttaagaaaccacttgacatcttgatcgcagataatccagccggatttattcccgatgaaataactag

SEQ ID NO: 115102 - DNA, 485 bp, Zea Mays
ccatcaaaatacatcttacaggcctccatcggcttcgggttcttaggaacctgacttcctgtccagtctaaaataaaatccaccagtgcttgggtcttgatagttgtgcgaggccgaaactcgatgttatgagctcctagcttgcacgcccacttggctgtcctccccactacctctcggttgtgcagtatgtacccaatcgagaagcaagtgactactatgaccttgtgattgtcaaagtagtggtgtagcttgcatgccgtgaagaggactgcatacagtagcttctggacttgaggatacttgaccttggatggtcctaggacctcgctgatgaagtagatcgggtattggactgcttgtatgtgctcttcttctctttgttcgactactaatgcggtgcttaccatatgagtcgtacacgaaatgtatagcaacaaatcttcggttggctgatacatgacggctcggttaggtggcttgag

SEQ ID NO: 115103 - DNA, 518 bp, Zea Mays
gcaccagttgtgtgtagaaaaggtctgaggatatccacggagttacccaaccataagcttggacctcacgtgggcatccttgcgaggacttcaacaaagactatggtgaaacttatgcacttttcaataccttggtaaaaatagagtaaaatgcaccagcggtccttaaacttgacacgatgtgtcatttaggcctcgaaatgagtccttgaattttgctgacccatgcaaaatcgtccaaaaccagatttgctcaaactggatagcgacgtggcattgccacgttatagcctgcccacacctgtcgggtgccacctattacgcatagtccctaaacttggcatgttgtgtcatttaggtcctcaaacttggcacgttatatcacttgggtccctaaactttcgttagtgcccttcagcgtggcacaccacatcagcatccggtttgagaaaatccgattttgaacgattttgtaggggtcgactaagttcaaggacatgttttcctggttttctaag

SEQ ID NO: 115104 - DNA, 483 bp, Zea Mays
ctgaatactagaccggatatgagtagttaagattcgggacggaaatagtacgagaccattaataatccggacatgtaagaaacggataacagataatactcggataggtaccggatagttatcaagtagttcatcccaatgatattaattgtcgaaccatccagcaaacacataaattaagcaatacataatcatgtatatgatagatctaatgtagaaaaggaaaccaataaaattgacattatgcagttcaaagttactaatcacaagaacattgtagaaccagcaccataatattaaaaaatcataaaatattgtagtttcactaaaaaattgcaaataagttacaaaaactaataaacattttatacgaagataactcaagccatcatatggaaatgataaaagtaaagtactgattatgttgaaacttacagtgaaagtgatttcacatgtaactcatacaaataagtgaaagtgaaa

SEQ ID NO: 115105 - DNA, 348 bp, Zea Mays
gtgatttttggctaaaggagaataaattcttgggtcacactatctctgagggaggaatagctattgatccagataaggtgcaagaggtgatgaattggaagctgccagcaactgttcgtcagattcggagttttctaggattggctaggtattactaaggattcattccagatttctctagaatcgctaagcccatgacagaattgttgaagaagggagcaaaatttgaattgggccaaaaatgtgaagaggcattccacactttaaggcaacatctgaccacaacacctgtgttagcgtagcctgacaacaacaagtcgtttgatgtgtattgtgatgcctttggca

SEQ ID NO: 115106 - DNA, 272 bp, Zea Mays
cttaagtatgaagtttatgtctgccatgtgttaagtatgtttgtcattgtcatgtctagtgtgttatgtcgtcagctatggtaatccgaaggtagtatgtgttaagtaacaagtttgtcatgtcgtctgttccgttattccgaagctactatgtgttaagtacgatgcagtttatgtttgtactatgtttctagtaatcggaagctggcgaatgtgtaatgctataattgaggaatgatataagaagtccactattattaagcaacatgact

SEQ ID NO: 115107 - DNA, 547 bp, Zea Mays
tgcgacatgcaaatgactagctttgatcctttggcaagtgtcgcactcggatacatacttatctatttccctcttcatcctggtccaccaatataaggatctgaggtcatgatacatcttgttactccccaggtgcatggaaaacatggaaagatgagcttcgtccaatattttcttcctgagttctggatttttaggaacaaccaatcggtcttcaaaccatagaactcccttgctgtcccgacgaaagcatttatacttttccaccttttgttcgagcatttccttaatgacttgaacacccttgtcaccaatctgtgccaggactatctgctcttgtagagttggctccacggagatataatccaatgtacctggggaaacaacttccatgttcagcttgcacaattcgtcacacagagtggcgatcttagagtccatagctacatagttgcactgggcttttcgacttatggcatctaccacaacattggccttgtcaggatggtaatgcacttccaaattatagtccttgatcaattccaac

SEQ ID NO: 115108 - DNA, 351 bp, Zea Mays
gatatatttcccagtttacagagtacattgtcgtcccaatagcttttcgaatacagctagggataaaacttcctgaggtgttctatgttccatgagttcccgatttccgtgccatccatctgagtgagacgatatgatcccggccgagtgacttctgctactatgaatggtccttcccatagaggtgacaacttgtgccgcccctcccccgttagaattcggcggaggacgagatctcctactgcgaaggatcgatgtctcatgatcttatcgtgatagcgcctcagggtttgccggtaccgtgctgattgaattaccgtgttcagccgttcttcttcgagtatatcaaca

SEQ ID NO: 115109 - DNA, 605 bp, Zea Mays
gatttttttgacaatatagtcgttcataccgtgtactagactccttcgctacataaactcaacctcgtagtcatccgcgtaactcttgtgtgttggcattaagatgaccttttaatcagttatataataagaaagtgaggatggagtaaatcagtctgctatgagcgtaacactatatgctaaaatgatgttttacagccaacgatgttattttaatctatatgaaaacaacacaagcacaacttcagcgccagtattgaaaagcaagattaaccacacaaaataggatcacttgcaagtagacaattatagatgataccttcccgtcatgtagcacattggaatacatgacaaagcaaacatagttgatataatcgacactgcacaatagacgtatggcccggcgtagggatgcataaaaaaacatctctacaatgaactgtccacgcacgaagagcacatgtatatatactggcataccatgtacaaccatgatctaggagcgaggtggaagagggattgcgtgcatggcattataccgcattagtgttcatataaacaacaaagcataagtgctatagtgatggctgagattattgattgtg

SEQ ID NO: 115110 - DNA, 610 bp, Zea Mays
atacgagagcaacaaatggggcatgagttgggctgaccaacagccagaccgaacggcccaccaagtctaaaataaatgcaacagcgaacagaacccttctctcgtctgctcatcctactaccatcgtcagttcgacgccacttaaaaggagaacaggaccgtcgtcctcacgggcacatacacagacagacacaccctgccgcctcaccaccgcgaaccatgctggcgcagagaatgtcatcatcaatcttagcgacgctccactgctcctgccgtatccaccaccactgtgcagtgcttgatatcaactactacgtacaaggcttgtagcaaagaagtacggcctctgtcctatccttccataatcacgacacgagaagatcgctagtaattaacaaccaccactgtcgctgtttctctcctaatccaaccagctccctccctttctagatagaaaccggataaggccccaagcaacagtgcacgatggacctccccgcaccgcacctaacgtctgtccagtacgggcccagcgccgtcgtcccattgccattgggcatttccccacgtccgtcccggcgtactatacagcatgcttccgccccgcaga

SEQ ID NO: 115111 - DNA, 357 bp, Zea Mays
tgcaatcatagaaggtagagaagaaatcttgaataaccaccgaagtaacatcccaggtagtggagtaaaaactaggaccaaaaccatccagccctgctcgaatcctttttcatgtgcatgataacaacctcaagctcttccctactaaactagccatcgaggctagataaatcgggattgtatgttggatagagatcagacaggacgaagttccaggtggaggttgggtcgtccctaataaatcggcgtagaagtcatgaaggattcaggctttctaagcatgcttataatactcacgaccatcttcttcaaaaatctcgactttattagctttgaggcgggcagaggcgaaagcat

SEQ ID NO: 115112 - DNA, 282 bp, Zea Mays
cgatggggccgcgcttggcgtggaagagggcgtcaggaccgagggtagggaaagagaggggacgtcgacaggaccagcatcaaggaggaaatcaaggtcggtaggtggggtggagctaggaaggggaaacaccctcgtcgaacaccacgtgatgtgagatgatgacatggtgggtggtgagattgaggcactggtaccccttgtgatcggtggagtacccgaggaaaagacaatgagtggagcacgacactagcttatggagcgcggtggcagagatgttgg

SEQ ID NO: 115113 - DNA, 815 bp, Zea Mays
gtgctcagctctaatatcttcaggcattcctgaagtatcttgtttgagcaagcttgaataagtttccaacattttggcctcctcttccttagctacctgcaaagaaattttattggcctcaatcttgtcattgtcttgcatttctagagccttcatatgattggctgcgacattgttttgaattttctcaaatctatcaagttcttccacatttatccctcttgctttatattttatttttccttcatgtgcaactcttttagctgccttttgtccaattggtctaggtctctaggaaggtcaccatcttctaatcctccttctgtgctacccttctccatttccttcctcttgacatgactatgatcattatagctcatccagttcgcctcgttatgaaccatgtaccaaacaatcataagttgaagtcataatcctttattctcctcaaagaatttatgtgctttctctaaccatatttcgtccgaatatccaccggtgtaaacccttctagcttttaaccaacaatcattgaacaagcttgtcaatttattaattttgtgccatctatctttaacctgctttatggttctccatctattgtttatggtaacttgattgtactccttctgcacatctcccggcatcttgtgtccactaacttttactccctctgtcccattatattggtcgtcttaatagtgtttgggattatttaaattcatagaattttttatgtatctgaagtccacttgtgtcctgattcagagaatatttcatgtaggtgattgaatactagaacgactaatataatg

SEQ ID NO: 115114 - DNA, 650 bp, Zea Mays
tacaaatcctatccccgttaaaaagaatctcgtcctcgagatttgtaagaaaagggatacaaaaggattggtttgtaattcaacttttagtctataagtggttcaaaaatctagattgtttttttagtcaatagttggtgattaggagagcattggtatatatgggtatagccactttattatgccggataaaagatatctttaaagcatttataggtttgggtaaaaagcagtggggtaagaaaagactccatccaagattgtggatcttgattcatctggcgatccaacttggtctttgaagacttgagttgatgcttatccttctttgacgtggtttgtcttctttggcctttattcttggagttgtcatcgtagttaaggacatatggtcaaggacatatagttcgaatagctggggtacacgaggtagatttgtacagagttttactttgcttttggaacaaatggattaggcaacctatgatgtaggttaggttgttgtttagggacgagttagtccaaggtattaatttagggtaagatatgtttatataattagggcctcatttatgtcgccaacattatctaacttatttaagtaactcaatttggattagatcatgttagattaggtgggatctagatca

SEQ ID NO: 115115 - DNA, 716 bp, Zea Mays
ggctcaccggacagtccggtgtgcaccggacactacactgtgcaatgtccggtgcaccggtagccgcgcgcgcagatcccatttttcctgtgcgttgtccggtggttcaccagacagctactatgcgctgtcctatgtgcactgaacaggcactgtagactgtccggtgcgcccatatcatgttttaaaaaaggcctccagcccgcgcgcgaggcagaggccacacttcttcttctctctctggttctctctgccctctctagcggtttggccccttctccggcgatctctctcgccggcggtgatcttccctcaccggcgacctccagtgcttgtgcctatcctcctctctagtgagcacctctccctctcctctctctctctctctctgtttcacagttctctaaagcctattccaccccttgagtgccaaactcaatttcctatcaaattctgtgaatccatgtggtgagagatgttcctatgtgtcccttgagtatccctgcaggtttctagctccctttgggagggtttcaatcctcaaatggccatttctcgcaaaccctaaatcctcgcacatcacgtgttcgaagaaatgcccaaaccagccaaaaatgccccgattgaacccaaacttttcaggcaccttcataacacctccagtaacatattcgccaaatttcacgccaatccgatataccaggcttcaatttcac

SEQ ID NO: 115116 - DNA, 704 bp, Zea Mays
atagcaccctgaaatgtagcaggagcttcagataatccaaaagccattactaggaattcaaactgtccatgatgagtctggaatgctgttttatattcctcaccagctttcaatcgcacctgatgatagcctgacaacaagtccaacgtggaaaaccaactggcaccagctaattcatcaatgagctgctcaaaaataggtataggaaacctggttttgactgtcaaggcatttaagtaccgataatccacgcaaaaacgaaatgacccatcctttttgcgaatcaacagcactggggaggaaaatgaagatgaactgggctgtattatacccctcttaagcatgtcgcccacttgagcctcaatctcatcttttagagcaggaggatatcgatagggacgaacacacacaggtcgggctccagcgaccaagggaatagagtgatcacactgccggacaggaggtaatgaatctggcaccgtgaacaattgtgagtaggtgtcgagcagggtggctactgccggatgcaccaccgtatcctaggactgtttaaccactgcaacatgaaggaacaaatcatcaggcataccctgtccgcatccttgcaaaagcaccggagtcccatgaaactgaatgagcagccatttagctttccaatccactctcatcgggctaaattgctccagccagtccattccaagaat

SEQ ID NO: 115117 - DNA, 482 bp, Zea Mays
ctcgtgtcatgcagctgctaccggtaggtgtggctgagagaccacaaagtccttctggtagcatcgctaaccgaagcagtgtaggtggatagcggtgttagggactcatgagcagaccgagtcctgaatcccctatctcttgcattcatcactctgacgtgaatgcgagtgatgtagtagcaagctcggggaggctcgctcactcgccttgtctcgtacaagggtcggacgtaggttcccaacgcgtgcagcacgtcttgcagtaggttggggaagtgccccgtctcgaatattgatgtgtaatgttcggtgacaggaccaaaccccatgaagtagtcatggtgggcgtagttggcctccttgttggcttgttcctcttcatcctcattgtcgtcgtcatcctcatcatcgtcattcccagagtcgtctgggtcatcgcctctgggtgtaggagattgaatggctagtgcaggcgatgccga

SEQ ID NO: 115118 - DNA, 319 bp, Zea Mays
tgggtgatgatcctggaaagattgatcccctggtaggcagcactcaatacagtgagacacattagaatcatcatgtaaggatagtcatgccactgatcatcttctaatatttctcaacttctcgcctttttgctattcgcttgcagattccagtggatctagtcattgatcattcggtacaagctgatgtggtaagatcagagaatgccctccaagctaatatgcagcgcgaattcgataggaacaaggagcgcttcgctttccttcggtggggctctgtggcattcaataatatgcttattgttccaccaggttcagg

SEQ ID NO: 115119 - DNA, 413 bp, Zea Mays
gccaatgttgtggtagatgccttaagcaggaaagcccagtgcaattgtatgaatatggatgcaaggatcaccaccctatgtgatgagttgtgcaagctgagcatagaagtcgtttcctccggtgctttaagttatatttcagtggagcccaccttacatgagcaaatagtcagggcacagattggtgacaagggtgtctaagtcattaaggaaatgatcaaacagaaggaggataaatacaaatgcttccgacaggacaacaaagggattctatggtttggagaccgattggtggttcccaagaaccccgagctcagaaagaaaatattggatgaagctcacctttccaaattctccatgcacccgggcagtaacaagatgtatcatgacctcatatccttgtactagtggac

SEQ ID NO: 115120 - DNA, 317 bp, Zea Mays
ctaaatctactgaaaaatcaggccccaaatggccggttttaaagatcacaccgatatctcgcagataatatccttaagccggctatcggaagcctgtcggtcgatgaacaacagttatatgaagacatgatgattcaaatgagggaggatgcatgttgccaaatcgccaaggccgaggagaaagcaacggagaaattcttatcatacttcacggtggatcgctaccagaagattaccaagcatgaagagatcgagattgcatccctactaccttcgcttcaaatctcaaatgtaagtaaatctaccgacatccaatc

SEQ ID NO: 115121 - DNA, 684 bp, Zea Mays
gtggaattgatctacccccaatcgacacagtcaaaggatgtttagacaaccacaacaacaagaagaagagatgaatcctccaaatcctccactagctggagctgacccagctgttgcagcccagatgcaaataatgcaacaaatggctaatactatggcggatatgcacgcgcagatgcggcaggaacgccaagagatgtaccgagcaagggaggagatgcgcaaggagaggagggtgcaacaggagcaagcaccactgccaccaccaccaccaccacttccaccctcgggacaagcaacatgaatttatgagccacaagccacctaccttcgacagctctccagatcctttgcatgccgatgatggttgaagtcagttgagaagatgctaaacattgcccaatgcttcgaccgggagaaggttctctatgcttctggtcatctgactggtcctgctgctgactggtgggattcatatgttgctgcccatgacgctgctgacactattacttgggtggaattcacaactcagttcagaaattaacacattccttctggactgatgaagattaaaaagaagtcatttctgtcattgaagccaggcaacatgtctgtcagcgagtatcgtgacaagttcattcagctatcaagatatgctcctgatgaggtggctgatgatgaaag

SEQ ID NO: 115122 - DNA, 490 bp, Zea Mays
gcactgtgatgtcgaacatgtatatcgaagtgcattgtagtggtaattgtgttaagttaatctgtagtgtctcgagtggacgccacaatatggttgtatgcgagacggggttatgcgcatgatgggtttagttaatatccatcggtgtcactcgtgttaagttgaggtttattgtgcgtggaaagtaataatgtgtttaatacttaggactcttagtcgatagtagaaattgttttgacttatatagagaggtggtgacatgtcaaggtagtcatcacttcctctatatttataagttgagtcaatacaccttatgcgtgcattgaatttcacatcgcacgtagtgtatggttgtgttcatttcttcggatagatgttttcgagtggacaagtaggtttgtaatgcaattatgtgcaatgtgtttataatgacattttatctcaagacttgttatgttctgtgcatgaataagaaatatgtatgttttct

SEQ ID NO: 115123 - DNA, 343 bp, Zea Mays
cttgttgtgtcaaaaaaattgttgttggtgtctagatgcgcaaaccctatcaaggccatgtttctttccataaatctttgcccctaaaacttcatagcatttctgttgatcatcctagctgatcctgtttgcctacctctccttttgcttggatctggtaatcctttttcttgtgaatcatgttggctttatcatccgaatctcgagatcccctattgaatctgccccgttatctggttatctgctataacccgttctcaagtatcagatgttgatcttgcctaaatctctcatttctgatcattctcatactatttctctaaggatcatgacgtcattttat

SEQ ID NO: 115124 - DNA, 1055 bp, Zea Mays
gggtgcgtctccgagcagcacccagacacgccgtaccagcagatggcgcacaggttccaggagtgggggctggagaaagaatggggcgacattgacagagcgtgcgggttctgggtgcccgaggacgacgacgagggtcttaacaccgtacccactcgaaggcttccaccatggcctccacctgtttgggaattctggatgtcaatgaagattactggtccattgagcttcaagttgggtcacagatggcgagtggaagggcttgtctattggaattattgtagtccacagtatacaatcattttccatggtcacaaatgtgctggtaccattcagcttcatgccattgaagaagtttgggacctcctgattgaggaagagctgacaaaagtggtgcccgagccttctgaacatctatggatgtcaattgttgttactgcttggactggttatgctgcaggaactaccctttgtctcaagggccaacttaagcaacatgcactcttgatgttggtcgactctggatccttgcaatcagtcttgaccagcgttcaatcattggagccggcgttgtccgtcagggtggccactatgaaaacactctcatgccaacatcagttaccagtaaccacctggaatatatcgggatgccagttttcagccaagtttaaatttcttactgtgccaatagtggaactgttgttactctcggcaacctcccatcgagaccattttcctgacagcaacatctgggccgggctggatacttccttggtgaattgttgtcaactggagtttgtacgcaacctgaccaatgcgttgaaggctaaattcctacacgccatcgaagagggctgggatttgttgtctttggatgaaggtgcacatgtgatgccagaaaccatgaagaaactcatgatggcgctgtcggcagcagcatggtcaggaacagatgctgtcaccacattgcgactgcatggacagatacaccaacacgatattgtggcgctccttgactccggatcttcacatacttttatcaatggtaaaatgag

SEQ ID NO: 115125 - DNA, 397 bp, Zea Mays
ccaaacctacgccgaaaccatgcacgtccgcgtccgcggtggcagatttgcgccgaggtacctggtgtttcgaacatcccgtaaagagtccctgagtaatattcatgtgtctctctgaccattgcatataagcccgcctctttctatttcttcacgactcaggtccccgaccgtgcacaggtcgaacaccttgccggaatcgcgtgtacttgccgacggtgacccgtttcggtggcgttgagtgtacgggctccgtcaccgatgctatccgaacacatccctatgcttaattcgactagtccgccactaaatcatatctgtccgcgacaacagtagagcaagatcgccggcgtgctcaacctgggtcatacaagctggtagcgttcaatccaacgac

SEQ ID NO: 115126 - DNA, 618 bp, Zea Mays
gtccccgtcgatcaagtttgcgaggtgggacggacgaccaagtccccgtccagatgagccaaattctagaaccgcgagtatacgtcgaccataacaggacacgtcaccaggagcccacgtgatagtcgtcagcacgattgtatgtctgtttcttataatatgagcacaacatgttgtttgatggggcgaagcggcctcggtcaggggtgacctcagcaccggagtctccatagtagtccgtgtgtcagaagcgacaggatagggcgccatatcgaataggagaatccgtgcgcacagagggacaacgtaggacccactatgacaggaaaaggccctccatataagtcaagctccgaggctaaatcgtgggacccgccgcatgtcatcgcaggaatgtcagccataaacccgccgtaggaagaggtgtgacgggcggcgccataccagaagcacaactttacacgaccagaggtggagggcccaccacgacaatcaaaggactttccttctctctctctctctcagagaaacattggtgtaaggcatgtcccttgagatataaaagggacggtccctcttcctctcacacaagcatactcattgtaacacactcaaagc

SEQ ID NO: 115127 - DNA, 291 bp, Zea Mays
cagcatgttcttgcatgtttctacatttctttttccttatcctagatgttctctccggatagacgtttcatcgttttcatctaaaaccttaacctgaaacaggagtataataagttcgagtttagagactattcgacttgacattttggcgagctctcggggaaaactgttccctgtagggggtttcatgtcttcctctgttcccctaatgttttgtttgataagaaattaagaattgtatgttgatgatctattgaaaccaatggatgatttgttgaaatgaacgttttt

SEQ ID NO: 115128 - DNA, 289 bp, Zea Mays
gcacgaaactttcgttttgtttgtcagcatcgctcacttgactgagctatacatgacgcgcttcggtattgctccttccctttttcattcgttcacgaactcaaaatggtcgcactaaactttcattttgttcgtcagcatggctcacttgactgagctatacatgacgcgcttcggtattgctccttccctttttcatccgttcacgaactcaaaatggccgccctaaacttttgtttgttagcatggctcacttgactgagctatacatgacgcgcttcggtatttc

SEQ ID NO: 115129 - DNA, 707 bp, Zea Mays
cggatccagagctggggcatacttcaaccagcttagcagcataagaacggctaacaaatatttaatatagcattactatttactatgctaaaatgtacagtatatatagtaaattgttgcttgcacttagctaaatttaaccgaatagagtgctcattcttctcaagctgactttgttttttcatagcagcagtgattgactgataagatcctcataatccttgagagccttgttgtgaaaactggtgcgagatcacctacaagaagtgctaatctgtcattgttcttccaatagttccagccttgtaccacaaatgcctcacggccatgatgggtgtcaatatttttatccctaaacaagtagcaacacaagcagtatgctttgtcctccttctcacaatctcactatattccagccaattagcatactggccaaaccaatctggattgaatcgacgcctctttcccgcaataatcctgaaaggaaaatcataagtgcgaggttgataaggcccccagagtaaatactttcttcttatttcattttgctgattggggtggtagtcacacattctcttcctttttttgctggatccctaggtagctcatccaaatcaattagttctggcactgaagagttgtgtttatatggcctcgctgcaagaacaggtgtaggtgcagcagctccacctccacctgaacttccg

SEQ ID NO: 115130 - DNA, 336 bp, Zea Mays
gttgagttctcttataataatagttaccaggccagtctgaaaatgtcaccatttgaagctttatatggtagaaagtgtatgactcctctctattaggatcagactagggaaagacaattctttgggcctgagattattcaagaggcggaagaacaaagttcgtgtgatctgggagaagttgagggtagcacaaacagaacagaagagctatgctaataatcaaagaagaccactggagtttgaggagggtgatcacgtgtatctaaaggtgtcaccaattcgtggaatgaggagattcaaagttagaggcaagttatcccctcgctttattggacc

SEQ ID NO: 115131 - DNA, 574 bp, Zea Mays
gtcgtatcgtatatccaatccaaattcttgcaagctatatctatctctttattagcgctagctagtcacaacagtacgcatgtatcggtgaagaaggaattgggggttgggatgatacggttaccgatgatgaggtaccatatatatcggtgaactctagctgcttgctgcttaattattagtgtttttttttgctcctaatgtttctttcttgtatatacatagttcatcaatgattaattggcttgattaggcaacatgtccagcacactaataaggggatgcatgatgctagctatagcctatagctcatgcattacatccgagatttcccccgtaccactagagtcctggtgacagattaagtggcagattaagggggtgtttggttccatgtcttagttatttttagtccctaaaataccaaatgaatgtcaaaaatagtacgttttcaagtatgatttctagggagtaaagtttattagtctctaaagtttagaaggatgactacaagaaccaaacaccgcctaaactaatagcaatgcagtgcgctgctgcttcatacaaaacaaac

SEQ ID NO: 115132 - DNA, 271 bp, Zea Mays
agctaaagcacggatccccacgagcaagccccatagccacccatgacgtcgacgaatcaacctctaaagacctcatcgacggagaccgtgtccttgctttagaggcactgagcaaataccaagcgcatactaaggcatggcgcgacaacactgtcatcccaagagagttcaatgaaggagacttagtactcgccagaaccatcagaacagtctcggggcaagcttgaacccaagtgggaggggccctacatcgtcaagaccaaaacatccc

SEQ ID NO: 115133 - DNA, 308 bp, Zea Mays
catatatataggtgagatgaatgtggcttgtgtgggaagctcgtgtcttccactgcaagctaaccgtggcttgctgcgtacgactgttcgctgtgtgcatccaacagaagcttggttcaatattcacgtctcaatgtttaagaaaaatctggacgaggcacaataataaggtttgttatggaattccaaaattaaatttaacttaaattatgtctgtatgttctgcataatttataaaccataaatattttttacttaacaaaaaataaattccaacatggcaacatgacagacgtgtcgaaaaggaa

SEQ ID NO: 115134 - DNA, 454 bp, Zea Mays
ggaccttgggagactatatatacacactgcactacacccccttgacccataagcgtcgtagtagatgagccgcgagcccattgaagcgagcgatgagagaacatagaggtagggagagccgtcagcatcaccctgtgtacgccaccgttgtgaggctacaaggcaatcgaaggagttcgcgagggcgcggggatcgcgtgcgagaaaattgacggtcgcaaagttcctctaatctcaaccacttgtgtctaatcttacaacgcactgtcgttcttctcctttcaccaacaaaacgggacgacacctcctcgccacgttggacgctcgtaggcgtaaccccgatcaagccatccgagcacctccacgcacaacggtcggtaacgaacgtagccaagacaaccgtgacctatctgatgcacttcttacccggatcattggcggcgaggtaattttg

SEQ ID NO: 115135 - DNA, 284 bp, Zea Mays
tatgacatgcatatataatacaaaagaaagtgaaagtagaaaataagaataaaagaccaaaagtgataggaacgggggtgcccgatcttccgttaggtgaagataactaccgatttggtggagatgtcacacagacgatccgacttcctatcaacacgactagaaccccgcaatcgtagcaccacttctcctctggttatcaaccgtgcactgcgcgattgacctcgccacgagggctaattcctgcctgagaatcgaagacacaagcaagaacaagaaagaac

SEQ ID NO: 115136 - DNA, 859 bp, Zea Mays
cggagaaaaggttggtgcatgtttcaaatgcaagtattgttgagaaacaaagagcggaggggtggtactcgattgaaggagcattcacgcatagagggaagaatgtcaagaaatgtccctctattcctccagacataaatgcatacttccaacttgacatagataagacaaagaaaaaagaagacttctaggttcaggcagtagctgagggcagatgaggcagcacgaacccattttagggacgatgagtatgaggatgaacttcaagcctttgcatacatgtgcagcacgaatttagtcagagggctagtgcaaggtatgccaggggtggtggatcctccagccagagggtatctcaagggccacttgataggatgatgtgaaggagtagggaacaagtacctgagagtgttagagactacaatcttgctcaagcctctagaccaaggcaacagaggacagatactggtccctggacaagtaagggaaggagctcgaaatagattcttggtacggattgggcaaaggcttgtcatgccattggcatcccgggtcgaaaggtcgataactcatattttagggccgcaattatggagtcccaaaaacaaggtaacaaataacgcattatattttgttgtatttgatctatgttgttgacataatcttgttgccttaaatgcaggtgtgggggtcacattaccaactggtcaagagattgatggcaagtatctgatacaatagatcctagtgagtttgatcctgccttggccttcatggatctatcattacacaggcataatgaaaccattagagattggatggaaagaggaagatccaatgcctccaacattggatgaag

SEQ ID NO: 115137 - DNA, 569 bp, Zea Mays
tcaaatagcgatatctcctaaaatataactctgaatcgagcgcataagtactcgttggaaaggtatgacaaaactccacattattctcctactgattaccactaattacccacgaaaaatccccagaaactactagaactgctgctgtttgcccacccacaaaagttcgggatatttctgccgcatcagctcctcaagttcctaagtagcctcgcgctcagactgattagtccacaagaccttaacgtacttaattgatctgttcctcataacacgctccgaggactccaagatacgcaccggacgacactccagagtcaaatcctgctgcacagcaattggttccatctcgatctgatggtccggatcccgcaaaaactttctcaacatagagacatgaaatatcgggtgtacccccgccatggaatccgacaattgcaagcgataagctaggctgcccacccgggccaagatagtgaacggtccaatgtatctcgggctaagctttccggagacaccgaaccgaacaactcctttagtaggtgataccctgagaaggacttggtcac

SEQ ID NO: 115138 - DNA, 598 bp, Zea Mays
aaagcctaaggagaccccagaatccagcagaacatggattaggcctccgcagcaggactcagctcggtaagagcgtgcccagctccaggtacacaatattgcaaatcagaagcaaccaggagagaactcccctcgtcgttcagactaccccccacaacaaggccgcgatggcaatgctaccagggactgaggcaggggctgaggacctcagcaacatagaagattttattgtcttttccatggcgaagactcagcacacccaaccaaagactgtctgagaccaaagcaacaaaagaccgaatggccgggagcacgccagctgacaaccaaagagtcatcgctcatacctaacaaccccaataatacaatcaacatcaatatcaaaatgaacacccctattaccccagcagcaaaactgtaacctctttccatagcaacaacgccttcaacactaagtaatgttagtgctgccacctccatcgccacaacatccaaacaaacacctacccccacaaccaaaacaagaagacttcgtagacccacccttcaaggagtgattcacgtgatcaccggagggtccagctccgatttcgagaac

SEQ ID NO: 115139 - DNA, 512 bp, Zea Mays
tccagcggtagcgcctcaggttgttaaagacttgttgcaagtcatcgatgaagttgtctaggtcctcggtcttgaccacgatgtcgtcgacataagactccatgtgcttgctctagtggtcggctaagcacgtctacatggctcgctgataagttgtcgcgacatttttcaagccgaatggcataaaggtgtagcagaatgccccaaaaggcgtaatgaaagaggtcttttcctggccctcttctgctagactgatatggtgataacccgagtaacagtctaggaaggagagcaaggagcagtctgtggtcgagtcgactagttggtctattcttggtagtctaaaggggtccttcggacaatgtttgttgagattggtatagtcgacacatgcgccaatctactttattcttttttagtacaagaacggtattcactagccgctcgggatgtaggtgcgcaagcgaggccatactaaaaggtaacatgaatagatatggtaacagaaagta

SEQ ID NO: 115140 - DNA, 478 bp, Zea Mays
ggatagagttttatgtgtcgggatgggattctccagcgtggtcgccaccgcgggcgtgtgaccagcgaactcggtctggcgctggataggaagacgaccgttccgctgttagatggccatgggatggatgagattagaacgtcctgacccgtttggatcctaacccttggatcttaatcagacagatcgaatgaacctccactattttaaatctaagctgcatgttttggatcgagcgattgggaattgggcagactatggtctaatctgaggcgcgcattttagatccaatggccggtctcgttccataccgcttcggcctagaattttgttaaagagtccctacccttgtcacaaatcaacccgccatccacgcacgtaaagaataccacaatcatcccctggaatttacagattgatccctgcatttctctgtaatatctcgcgcagtccagacattgaataaatcagataaatt

SEQ ID NO: 115141 - DNA, 502 bp, Zea Mays
ctcatatcttaaccgatctaatctagatcccatctaatctaatattatccaatctaaagtgagttattaacatgttagttaatctggtgatatgggttagacactgcttccacaaacataacctaacctaaattaatgtcacataccaacttgtccataaacaacaatataacctacatcacaggctgcctagtccatttgttccaaaagcaaaatacaactctgttcaaacctacctacctcgtgtaccccgtctatcctaactatatgtccttaactcggatggcaattccaagaagaaagaccaaagaagaccaatcacgtcaaagaaggataagcactcaagccttcaaagatcaagctaaatcatcagatgaatcaagatccacaaatcttggatggagtctttccttaccctactctttcttacccaaacctatctatgctttaaagatatccttgatcctgcataataatgtggctacgcccatatacacccatg

SEQ ID NO: 115142 - DNA, 544 bp, Zea Mays
gaatttccagatgtgtttccaaaggacttaccaggtatgccaccagagcggaaagttgagtttgctatagaacttctccctggcaccacccctatctttaagagagcttacagaatatctggaccggagttgattgagcttaagaagcagattgatgagctgtcaaagaaaggttacatttggccaagcacctcgccttgggccgcccctgtcctatttgtggaaaagaaagatggcaccaaaaggatgtgtatcgattatcgagctctaaatgaggtcacgatcaagaacaagtaccctttgcccagaatagaagatctgttcgaccagttgagaggagccagtgtgttctccaagatagatctgaggtcgggttaccatcagctcaggattcgaccttcggacattccgaagacggcattcattaccaagtatgggttgtatgagttcacagtgatgtctttcggtctaacaaatgcaccagccttctttatgaacttgatgaacagtgtatttatggattatcttgataagtttgtggtgg

SEQ ID NO: 115143 - DNA, 342 bp, Zea Mays
tacaaccttagttattttgttgataggtctttgctacaaacacttcttattaaggcaattggaaattggtttgttgtgatgttggtgatctccactaggtttgcaatgtatggaagtgatagtagttgaatggaaatgacatatttggatgtgttgtgttatatccatagtagaaaggataatatagtgggaggcaggcaacttgatcttgaatgatgaaaggatcacgatgcctaagagaggggtgaattgggcttttctaaaattcttacaaaagattaaaccctaaacatgagcccaacttcacccaatctactagcaagaagtaaaaactatgaaatg

SEQ ID NO: 115144 - DNA, 777 bp, Zea Mays
ccaggggcactcgactgatttgtagaagtgggggtagtggcaggacgaatgaaaacaggctgtttgaacgggtaggagggtggacgaggcgaagaacgattctgattaaaaggtcggattaccaacctgatttgcttcttaggtccctgattagacctatcacctccaaatccctttgattttccttggcctgcgttcttggcttctattgccagtgctatgctgacagctctgctgtaagtaagatccaaacaggtggccattttcctttggtgccggtcgttgagtcccctcatgaagcaattctttttcttcaggttagtgtttacttggtcaatagcatattgggataaatggttaaacttattgagatactgcattacagtatctcccccttgttttagtcgaatgaactcctcttgtttcatgtgaagcactccctctggaacatagtgttcacagaatgctagcttgaattcatcccaagtgacctgatgtccggctggttgaactgctacaaaattcgcccaccaggtactgacagggcctctcaattgttgggcagcaaataacggcttatgtgtttctgtgcaacggaccaatctgaacttttgctccattacccctatccactcatcagcttcaagagggtcttctgctttaacaaagagtggaggacatatttcagagaattctagatacgaggtttcacgtggtccttgtggaggaactctcccgccatgctgctggaattgattacccgccatctcacataag

SEQ ID NO: 115145 - DNA, 285 bp, Zea Mays
ccaattcattacctcctgcaccttatctagatcaacaactatgctagcttgagagatagtgtgacccaagaatttgatttccttcagccaaaaatcacatttagacagtttggcataaaggcggtgctctcgcagatgttggagcactacatgcaaatgaccgacatgctcttcttcattctttgagtataccaagatatcatcgatgaaaaccaccacgaacttgtccagttcaggcatgaagactgaattcatcagatacatgaagtatgctggcgcatttgt

SEQ ID NO: 115146 - DNA, 884 bp, Zea Mays
gcttgattcatagttttgctaagttggtcactaagatcctcactaattgtttggggccatatcttcaagacctagtagcagctaaccagagtgcttttattagaggaaggtcaatacacgacaatttcatgctagtgcaacaatcgattaagttccttcataagaggaggatctctagtttgctgctgaaactggatatttccaaggctttcgactcagtctcgtgggcgtttttgttggaaatttaattttgacacatttgggctttggtcctgtttggcgtaatctaatctccaacttgttattcacttcttctactcaggagctcctgaatggctcgcctggtaatcatatttttcatcggagaggtcttcgccagggagatcctctttctcccatgttatttgtgatggttatggatgtacttagcagcttgttccgggttgctgaaaatagaggcttgttgcagagccttgggggagctgatgtccgcagtagagtctccatctatgcggatgatgtggtccttttcataaagccaattgaagcatacctgaattgtgctaagataatactaaactgttttggttcggcttccgatctggtaaccaatatgctcaagagcagtgctattccaattagatgtgatgatcagcaggtgcttgctggctgcagagtactgcattgcaatcccgctgcgtttccttgcaggtatctggggttgcccatctctgataaaaaattgaggaaatgtgaccttaagttatggattgagaagattgcagaccgtctacctaactggaaggctcggctgctcaacctggctgggcggactgcgctggtgaagtctgttctatcggccattccgacttatcttcttattg

SEQ ID NO: 115147 - DNA, 916 bp, Zea Mays
acaaggaaaaggaaaaggaaaatgaaaaggaagaagaagaggaaaatggaaatgagaagagcaaggaaactggaaatgagactgaatatgaaaaggtagaatgcatgtttacactaatacacattatttaccagctatttatgtattattagacatgcacacacatgatactttcattaacaaattataggtgaagaacataaaactggttcacatagattatattttggagaaggctgaaactggcattcagttcgttggcaatgtcatgcgtagcagtagtcagataaggcgggcacactgttggtttccttgtgttgatagtgccagagaacgctgtccgtaagttaatttcattcgttcatgcttttgtgaatcctggtacaatatttgcctttgcgtgttaataattctctctctatttatcatgttatgctcagatttgatctagaatttacagttagcatggatttcattgctgtcagcaatggtgacttgctttaccaggtatgcgttcagtcttgatcaagagatctggagggaaaatattaatttccttgtttttgaagaactaacttttgtgaagtaacaaggaagctcttttagctttaatacacttggtattacagttcatttcttttctgtgcatgttagttatgttctgttttctgatcttagaaggtctctagtaaggaagatccttaaaaaagaacttatgtgtataaattgaacactccagttagtgcacagtggatatccttggttgttggcgcacttgaagttcttcctgacagaaatgacataaatgtctcacacatatgtttatcccctgctttggcaaagcttcagaacactattgcatttttccacaatgcatacaggtgccgatcaatctttttttttctgtgagaagtgc

SEQ ID NO: 115148 - DNA, 874 bp, Zea Mays
cctcctaaagatccatttgcagcccacaggcttgcaaccagctgggagatcagttatctcccaagttccattcgagatgattgaatccatctcgctacggacagcctccctctagtactctgcatccggagatgtatatgcctctgtaagggagcgtggttcttcatccactagataaataatataatcatcacccaatgacttttcagtcctttgtctcttactcctccttaactccaaatatggagtctggtcatggacactcgagggcagagaatatgcctgagatggaccatctggagctactacttccttatcccgcataggtaagatgctctcaaagaatgtcacatcacgagattccattatgacatttacagcgacttcgctcgtctcggaatggaccactagaaatctataagctgcattgttatgtgcataacccaggaagacacagtctacggtcttagggcctagctttctcttcttcggcaacgggacattcacctttgcaaggcagccccaagtccgaagatgcgaaagatctagcttccttcttttaaatccttcatagggtgtggcctcacggttgcgaggcggtaccctgttcaggacatagcataccgtgagtactgcctcgccccaccagatgtcaggcatccccgaactttgcaacaaagcattagctaagtcacacatcgttcggttctccctttcagctaccccatttgactgaggtgaatatggagcggtggtttcatgaatgattccacactctttgcagtactcatcaaaaaggttggaaaggtattcacctcctctatcagaccgcagccttttaattttcttgtctaactggttttcaacttcagtc

SEQ ID NO: 115149 - DNA, 508 bp, Zea Mays
ctggccaggttacatgcctcaaagccttaccacgtcgcagtagaccaccttaggtagcttgttcatcgcctgagacactgccccggtaaaagccacgatagcgcttgcgcaaatgatttccctctctcggatcgccaacacacttccttcaaattgggcgccaccgctgatgaactctataaattgatgccccagtgagctccgctaagttattatgcacccagtgaaccaggccttgcctccaatcgttcaccatagcctctcaatttctcttttcccccaaatctgttttccgcgccgccgagagtctctcactgtggccagcccttctcaggttggttcatgcctctctgttagatgttctagcatctcttaggtctcctgttgcttgtagggtcggttgattgaactagaccgcgctgaattgccctgaacaccatagtttctccttagatcttgtcgtcgtcgtgggcagacgaactccgggctaaattagtgcaattagttg

SEQ ID NO: 115150 - DNA, 610 bp, Zea Mays
aagacattaaggaagttatcatgcgccccatatggtcccgcttcggcctccgaaagccaaaggttgaaattgatgatgccaccaaagcatgtcagaaggccttcagtactgtctgctccttcattggtacaagggatttaattcaagaacatatagcattcagagtatggccgcttgtggaaaactgggaaatgccgaaggaaatcatcactaactctaacgaaggtgatttggtccggctgaagtatacattcaggtttgaggataagtttgatgaactaaatgatgaatggttgaaatgtatcaaagctacaagtgatgaactgcttggagcatattccaaggcagaagataatgcactatccgcagccttcggaggtcggggaaagaagagattgaacagagtttttgacgccattggcttcgtttacctcgactaccgctattcgctacgtggacagggaaaaaagaggaaagctgctacttcgtccaccccagatgagcctgtgccgaagggaaaaaagttgaaggttctaactcaccgaccacgtttcattgaaccggctgcgatacctgagtttggcaaaggggcctcttcggctgccaaaac

SEQ ID NO: 115151 - DNA, 356 bp, Zea Mays
gatgaaggcaaaaaaaggcaacatctagaaaggcgatgcaagtgcctcaaaacatgctaacaaaggttgtttcaggtgtgagttcctacaacatttgttccgtcaatgcgccattgagaaacatctaattggcatgtattgagatttgaagaaatgccaaaactcatatgctcactttgcccggtcacttgtagaagcttggaatgaagagccccaccctaagtcgcctaagactgctgaacaatctagtcatgccaccatggatgttgatgtccaccactgttagtgaagctctgctaggcaatggtggttttagttatgataatggtggtctcatggagtagatcgagttatcg

SEQ ID NO: 115152 - DNA, 690 bp, Zea Mays
aaaatctactgttcacaccttaaaatctttacaaaatcaattaaactttgttagaaatagcaaagaaccaaagaatgataatcgactaatttgtgtgaaaagatgtagctagaaccacaactccactttaaaaaacacgaccttaaaatcaaaaccttgcatttgcttcttaaattttttacgaaattaaccaaggtttattagaaatgccttagtttgacattcaattaaactgtatgaaatctaaaagatccacacatagaccatagcttaaaagctgtgctcggttacaattctagcatggggtgaggggcatatctgataacccatttcaaccgacttcttagcaaacctgcacaaatccgtctcatttggctctaaaatatatttccacccatccaaacaacacatgtattgatacccacacataaaacccattacaatccaagccattagtaggcctatggggatctggtgtggaactattttaggaaataaatttagacatttttgttttgttttgatgaaagctagtaatgtttaatagagtaagttatagaagtttgaccgaacacgaatgatttgcgaaaggaatgggccagtattgtcacttaaacaacgttacaaaactgctagaagtgtagtagtagttttacattgttgaaggtaaacacaacaaatccaaatcct

SEQ ID NO: 115153 - DNA, 595 bp, Zea Mays
ctcaagagaaatggccataaaatattaacattaatggacttaagtggcacccaaaccttagaagtaccataaaccataaacaaaccctagaaaaccctggactgaaaccctagggggttatatgtaaatgttgcacacttttggacctaagtgcaaaaaccatggaattagggtaccttaagtcatatggttcacatattttaagatttgcaaatgaaaccataagatttgggtctaattgcaaaaaggccactctagtgctcatgtatggctaagtttgaaaaatcgttgaagaaggctgactttggaactctgcagatccaaaaatacaaagattttgcctagggtcaacacatcaaaagtctagagctactataggagtacaactttgcttaagggattaagcattgtgttatacaaaaaatagagataattggccctaaagtttggctgtcagataatacagaaactgaatatggacggtcagtgagttttgaagaactttaggcttgattcatgctcaaaggagtaagcaactgaacatgatctctatagcagaattgtagtttgtatatagggctacaagtttgctaca

SEQ ID NO: 115154 - DNA, 590 bp, Zea Mays
tcgtgtaaattgtaaaatgtgtacatttgttgtaataaaggagtgagccccaaaccatccctgccttgtaccaaaaataaggaaataaagatatgtcgtgtttccttttccattacttgccctaagacttttaatctcgggacataacaatcctggtgttactgccactaaaacttgagcataacatcataagcattggcatatcatgtgattgttacacttataatgcattactaggcaaaatgttcaaacatgttgtattgatgggacatgctttaagtaaaaccctagggtacagtgcttaaccctaaattgggctcagaagggtaaagcaaagcctaataagagaaaacttcaaaactcattagatatggtcataaaatgtcaccatggatgaacttaagtagcatccaaaccctagaatcaccaaaaaccctaaatagacccctggaaaaccctggaatgaaaccctagggggttatctgtaaaagtttgcacctttttggacctaagtgcaaaaaccatgaaattagggtaccttaactcatatgagtcacatgtatgtagatttgcaagttaaaccttgagat

SEQ ID NO: 115155 - DNA, 544 bp, Zea Mays
ccgcgatgatgtgtctgtcctccgagcaattcatggcgccccatggttcctccttcccacgcgatgctagaaaccctcctagagatcaggagaaacacccagagccaaagacgagcccatgaagacggcgcaggcgcatatccatgacatcgacttcatcatcgacggcggatccccttttctccctctcatgcactcacaatgtcgcccacccagacaacccgctagaccacgcagaaggtctgagtgactgcgcagacgagatctggttgcagtggttccatccaacttgccctttccactcggtggcactgctacgaggcgaaagaagctgcggcacaaggtagatggcgagaggggggcagcatgggttttatacccagggtagcggccaaagtccgagtcagagcaagctgcgagatccacgatggtttgttgaaccacctgcgctgattccgcgcgagcggtggaggtttaccgtggagcttggttggggaaggatctgaaagcgagggcccaccgaccggtgagaaggcaagcagag

SEQ ID NO: 115156 - DNA, 315 bp, Zea Mays
attggtagagtatatatggctcggattatgtctctacacggtgtaccgaagaagatcgttttggatagaggatcacagtttacctctagattttggaaaagttttcatgagaatatggatacgaagttgaattttagttcggcctaccagcctcatactgatggacagactgaaaggactaatcaagtattggaagacatgttgagcgcttgtgcccttcatcatggtagtagttgggacaagagtctaccttatgctgagttctcatataataatagttaacaggccagtctaaagatgtcactattcgagact

SEQ ID NO: 115157 - DNA, 819 bp, Zea Mays
gcggacctgaggatggctgaccacggtggagtgtctcacggcggcgacttcgaccgatttggggaaataccgaattcgggtgctatggtgggtaatcggtggcgaggagcggtgctcggggttcgtaacaagctaatggagcaggccagggcatcaatttatagtgattaacaatggtggatccaaatttggggatgaaagctggcggccggagcaaggtgagtcaccggagttcgcataatgtggcattcactgggcaaaaggttacgaccgtcacctggttatcctcctcaacccgcgacgatgtggtagaatagcttaaggagtgtcgtgatcgaggtaaatggcggcacgacaacgacggtcgcgtggacacatcgccagtgcaagtgggtacggtgaagccggctcaatccactccccctccgatcttttcacgtccgcggtaatatcctgcccgagctgaacacgaatcacggtggacagcacagatcgcagcgcggagattgctagcagcgaagttcattgaatctgatcttgttcagttactataccatcgcgaacacccatcagtgcgtctgacagagcaagttagagggctttgatctccaatttctatgtagtaactcactaatccatctgtagcaaagttgttgtccaatgtattagctacaactttgttacaaaggtcttgcgcaaacatccactaaatcccccacaatttgatcacaaagttcgtctgatttcactatcagtcagaattcagtctttaataatgactgacagtccaacttcatgtgcatttatcttcaattttta

SEQ ID NO: 115158 - DNA, 359 bp, Zea Mays
cagagattttcatccactgcatttgaggactcaagtcccttcagcaagactaagatcttagtgatcaactgctaacaacattaattgtttctcgtctaagtaaccttaatgaaacaaccattggaatttatctctaatcggtaatgaactcaccaaactgatcatatactgtgattcaagcctaaaagatgaaacatatgttcaaatgcttatgccagtgacatcagtgtaagtaaatggaagcaaagttacaagaactatcaattctacactacaaattcatctagagatacgctagttaatacttcaaacaatgccagagccatttgaaaaagcattaatagtcaacatcattcgtt

SEQ ID NO: 115159 - DNA, 660 bp, Zea Mays
atatatatagaatcttgacgggatactccgtgtaagtcaaatcaccctgaacactgagctcttccattggtaaatgttcctcagggacacggagacacttcttaagttgagacatgtgaattacattatacacatcagatatagtatctggtagctcgagttgataggccatctctccaactcgcctaaaaactctgaatggtccaataaagcgaggggacaattttctcttaactttaaatctcctcattccacgaagtggtgacaccttgaggtacacatgatctccttcctcaaattccagtggtcttattctattatcagcatagctcttttaccttgattgtgcaattctcaaattctcccttatcattcgcacttgttcttctgcctcttgaataagttcaggcccgaagaattgcctttctccagtctgatcccaatacagtggagtcctgcattttctgccatatagagtctcgaacagtgacatcttcagactggcctggtaactattattatatgagaactcagcataaggtagactcttgtcccactactaccatgtcgaagggcacaagctctcaacatgtccatcagtatgaggatggtagggcgaactaaaattcaactttgtatccaagctctcatgcaacttct

SEQ ID NO: 115160 - DNA, 307 bp, Zea Mays
caacagccgaattgataccgctgctagcacaccctgcactctgcactgtgcgtgtcctcccaagtcacgtactcacgtcacgtgacgcttgtgctgctcggagtgctggggaccctcgggtacgaatcacgtactatccgaaacccggtggagtttatgtatcccaggctcccccactagtactagtagtagatttgaatcctgtttggtttctgcaggatctgcccgtctgaaccagtagctgccaaattagtgaactcaattgctgagctgagtctgtgtctgagtgccgcgcccaacagtccag

SEQ ID NO: 115161 - DNA, 333 bp, Zea Mays
gttgtagaactataataggagaacaactttgcttaagtaactaagctttgatcacatacaaagtttggagaaaaataagctcaaagttgtgatgtcagtcactctgatgactgaatttaggtcaccagtgacattgcccaaaattttgggtcaaattagagtaggatctattgctcgattgaggatagttgctatagtcgatttgtagctggatcatagggctacaagtttgctacagatgaattagcaagctcttatatgaaaatccaagatctgtgcactacaaatctgtctgtcaggcgctctgaatcaggttttcaatggtacagtgtc

SEQ ID NO: 115162 - DNA, 555 bp, Zea Mays
gtgctactgagcagtatcctgattccaatgtttagtgattttgcttctgatctaatatttaatcttgctttgtgccattttgttctgttgaagtctaccatgttgtgcttctgtagcttggccctagttttgttgttggctacattccctggatccactacataagattgctccactatcatgacttgttatttatggggtgcttttgtacacccaatacgaactttggcatgcctgcagactgagtgctgcagaactaagtggtttattagcattaggtatatagcttggattcaaatagttttggaaagagccgatgcattaaagaaactgtaaaacatggcagctgttagctatatgactgagatagattatcaaatcatgtcaatgtaattctaagtttctagtgtccctttgttcgacaatgttttcttgttgtgataatgagttaatcttttcccttgtttttcttttcaggccagtcatatcacatgcttatcctctgtaagtatctcctttgtcgttagttgactgtctcagtttttccctcttgat

SEQ ID NO: 115163 - DNA, 583 bp, Zea Mays
ggcatgcactaaatcccttgaggaaaatgtcaaggacttgaggattgtcaagaggagggagcaaaagaagaaaatcaataactcttccaaaagcctcaaccatgcctccataaaaggtaacatccaaggtaataatcaagttacacttcatacaaataaaaataagaagtgtagtgaatgctttgaaaaggggcacttgattagatcatgtccctatattaaaaatggcttgattattaacaaggatgataaactttgttttaaatgttcaaagaagggacaccttattaaatcttgtccctattcaaaacaaaaaggcatggtgttagaaaagaaaatattcactaaccatgtagcaagaaagaaacaaggaaagaagaaatcttcaagacttgaggatcgcctatgctacataagccgaaagaagggacaccaatgcaaggattgtcccattggtaacaattccactcctagcttgtcaattaattctcatataactaggcaacccaaaatttcaacttgtgttagaaaggtaatgagtttaccaagtgctaacacaaaggactcttgggttcctagatct

SEQ ID NO: 115164 - DNA, 467 bp, Zea Mays
ctggaaaccacacttgaggttattgacaatatactcctgaaaatggctgaagaagaaactgctgcagctgcggtgagcacggcaactgaaaaggggaaagagcaaattgatgaaattttggaagaagattttaactttcaagatttgcttggagaagagttaacagacgctgagaaagaggagttgaaaaaatatgccatatcttgcggatataaatcaggggctatgctatttggtggggtgaacgaagggaaactaagatgccttcagaaccgtaccgaggccaaaattgttagaaccctctccaaaagcattggcttgccgaagctggaaactgacttgtgccgttatcaacgacaccacatcgccggaagcttgctttatgctaacttcaaggtaacaaatatttttgttattttattactattattactatcttttaggtcgcgttctaacgaagatcattt

SEQ ID NO: 115165 - DNA, 1288 bp, Zea Mays
atggttttgaaacttgtttacgggatatagaagtcacccctatatgagtattcataagcatgcgaaatcgcctcaagtcgttgctgacttaaatcgaatgcttttgttagcagggcatagtggtcaccccgagttaagtaagcgcgagcatgttgcaccgtctcaagtcgttgccgacttaagccgattgctccgttagctgggcatagtggtcaccccgagtcaagtaagcgtgagcatgttgcaccgccttaagtcattgccgacttaagccgattgctccgttagcaaggcatagtggtcaccccgagtcaagtaagcgtgagcatgttgcaccgccttaagtcgttgccgacttaagctgattgctccgttagcagggcatagtggtcaccccgagtctagtaagcgtgagcatgttgcaccgccttaagtcgttgctgacttaagccgattgctccgttagctgggcatagtggtcaccctgagtcaagtaagcgtgagcatgttgcactgccttaagtcgttgccgacttaagctgattgctccgttagcagggcatagtggtcaccccgagtcaagtaagcgtgagcatgttgcaccgccttaagtcgttgccgacttaagtcgattgctccgttagcagggcatagtggtcaccccgagtcaagtaagcgcgagcatgttgcaccgcaataagtcgttgctgacttaagccgattgctccgttagcagggcatagtggtcaccccgagttaagtaagaatgcaagtcaatcatgaacaatctgagtatctttgaagccttttttattgatgatatatttcccattttacagagtacatcgccgtcctgatagcttttgaaatacagctagggataaaacttcctgaggtgttctatattccaggagttcccaatttctgtgccgtccatttgagtgagacgatatgatcccggccgagtgacttctgctactatgaatggtccttcccataagggcgataacttgtgtcgtccctcccccgttagaattcggcgggggacgagatctcccactgaaaaggatcattgccgcacgaccttgtcgtgatagcgtctcagaatctgctggtaccgtgccgattgaattactgcgttcagccgctcttcttcgagtacatcaacatcttcttgcctagttgcttcggcctctgctatgctttcgaagatcaacctcgtcgccccaaacttgagatcagcaggtagtactgcctctgaaccatagaccatgaagaaaggagtatt

SEQ ID NO: 115166 - DNA, 768 bp, Zea Mays
cgaatgagttcgaatttttaaattagtgtccattatgttacttttaaaaaccaacatatgaccatcatctgaggagtgttgtcagtcagctacagccagcgagtcccggtcaccagagggcaaaaccggaacgatcaatcagtggcaagctttacgagctagtttaagaaatgagtaatgacagagcgccatggcccacgaggagaggctaaacgcacacatgcgagccgagccgacactgcagggaataaaagaaacgcgggacgacagagcccttcctccctctttctgtcggtgggggcgaaaagagagagacacacagagagagggaagaaaattcgcacgctgagctgagacgaggcgagcgcgtgagcccggtccatcaaccaacgctgtagaccccatcgcccgtcgcgacggtaggtgctgcaacctggacgtaccaacaacccgtggcgaccatgcgagacattaacaacaataagtttttttactttattttattctttaattaatcggtatcggcatcaagatctccagctgtagtgtagtaccgtagtctgtgggccagctccaacaacccctgtgcatccctctgccatagcgcctagcgggagcaagaaacgagtgcagcttgcagccggggaaactgatgcatagtgggtggggcctgcatgttagcgagtggaaaggactgccggtggacagcttggttgcttaaacgtctgcatggctggatgtattaggagatatagcctgtgcatggtc

SEQ ID NO: 115167 - DNA, 477 bp, Zea Mays
aactggtgtgattctcgcctttgttgttcatgttcttggggatgtaggatggcactatatttggagcatatttctggcgaaatttgggttttgttaacagtagtaggcaaaggtttcactggttgcagtcttgtgtatgtgtaggatcgaccactttgtttgatttggatttcaatagagaatatgaagagtggctatccgaaattccaaatatatgggcttcgcgaagtgatttatgttttaatgttttaggttgttaaagacaaattgagtcaagtcacttatcgaaatattaggaggatccacattaataggaactgcatataagattgaacaattcttcacagtaattgtattggctaggaaaattaatggtaatatccacaaaaggcttatgagtgactgttgaaggatctcaagttccttttataccaagagtaaaagaagacaaaacctacaatcagtaaagttacatat

SEQ ID NO: 115168 - DNA, 392 bp, Zea Mays
gttcggcatcgtggagaggaccgcgtacaccgtcgtgccctccggcgtcagcaaggtgctggtcgagaacggcgactcgtcgtcgtcggtgtcgttccccgtcaagatcgatttgtccgtttagctcatgcttagtttctcgtccccatgttttaggagttatttagttaggatccgttttcgtctctagctgaaaaaatgggattagttgaatcagaattatcagttgttttcagtttcggaaaataaaataaagatgcccattgtttttcaaaacactagtgtactactgaaaatcaacaattagcagaggcagtttttgttaatcttttgattgacgtgacgacgccggccgacgatggcggcggcttgtgtgttcgggtactcttttt

SEQ ID NO: 115169 - DNA, 1565 bp, Zea Mays
aaagacctcatcgatggagaccgcgtcttcgccctgcaggccctcaacaaataccaagctcaaaccaaggcctagcgcgaccacacggtcgtcccaagagaattcaacgaaggagacctcgtactcatccggaccacccggacagagtcacggggcaaactagagccgaagtgggagggtctattcatcgtcaaatcgaaggtgtcccccaggcgtataggctgacaacgccatccggcgaagacctagagcattcctagaatattgacaatctccgcaatttttttgtttaaacccttagggcccacgcgcccttgtaatgcaccaaacaatactattccggcccgcactcttttcctcccgggggtgaggtttttaacgaggcggagccatgtaatatacctgcaaaaatcccccactaaaactcagacgcaacatgtcaaaaaagaccgcatcgacggtcttcggcattcgaccactccgaagtcaccgcgagaggcagcacagactaccctcgcgtgcgacactccacgcaaaagtcgcctaagggtgcagccagaatagcacaacaagtgcgttaatcgaagtcttttatttaaaagacactccgcgcaaaagtcgcctaagggtgcagctggaataacacaacaagtgcgttaatcgaagtcttttatttaaaagacactccacgcaaaagtcgtttaagggtgcagccagaatagcacatcaagtgcgttaatcgaagtcttttatttaaaagacactccgcgcaaaagtcacctaagggtgcagccggaatagcacaacaagtgcgttaatcgaagtcttttatttaaaagacactctgcgtaaaagtcgcctaagggtgcagccggaatagcacatcaagtgcgttaatcgaagtcttttatttaaaagacactcagtgcaaaagtcgcctaagggtgcagccggaatagcacaccaagcgcgttaatcgaagtctctcatcaaaaagacactccacgcaaattcgcccatgggcgcagccggaccaacacaggtgtacgaatacggcaaacagaccacattaccatacaaattacaattacatacacacggcgagggcatcacatattacatcggctcaacctttgggaagatacccatctccctgtaattaaacaacattatcctcaattcctcaccctcaaaaagcttccgaagatcccctcgcctatgctcgccccaatcggtgaggacaacaattctcgtttaccaacccggtctacttggagacggcaacgctccatccccatatgacgacgcctgccacttcgcgaaaattcacccacactatgttttcccatcacctttcgccgcctacacccagtactcgcactagggagatcctcgacaccctccacacgcggcgaagtctccgccgcagccacatccaacgcaacaaaataatccaagccttcatccgaggactcctctgtccaaggaaacgaactcccagattcaccatcagactcaaaacactcagacacagaaccaaacaaactatcataggtaggcactac

SEQ ID NO: 115170 - DNA, 355 bp, Zea Mays
aaagaaatgaattacaataatttacattttcgattcaaagctatacacatcaaatattacaatcttgttacaataaaggtacaatgtccattctagtgtttcatacattgaccatctcaaaatgcttttacaataagtgctattcctctttaaggactttctctgcaacttcgtgcagtaatttgttaataacttcatcaacaacggattcagccatgtttatattgtccagcgcttccttcatttctggatccgctaggggattgaatggttctggcggcggagataattcagctgaagtaggaaaagttaatcagtccgaagcaacaaaaataaatgccgaagctaaaagaca

SEQ ID NO: 115171 - DNA, 371 bp, Zea Mays
gcgatttcctgctcgagtgcctttgccttctcttcctcctccatgattagttgtctgatcccagtttgcatgttggttcattgccttttggctgcgaggacttccttttgcttctaaagatgattgttcttgatgcgaaggtgtgtagttttagttgaccctcagatgagattcccaagtcttcgccgtcttggaagttgtcctcgtcctcttggactaggtagggtcccatggatgcgaacccagtggtatgtcattgtgggtaagtccttggtgtatgtatgaatgttgtgggggtcttcggcgcaagggtgtatgttggctacagcagtcttatcggtctcggctgtagctggcaaagtgttgtctgc

SEQ ID NO: 115172 - DNA, 297 bp, Zea Mays
gatgcttttgcttcttccatcttttctgtcgatggcgcttcagtcagctctttggctcctggcagcggagttgattccttagcttcgggggccgaagacgtttcactgccgaattcaggcactgtggctagttcaatgtaacgtggccggtgtgtgagaactttcaccctttttctctttggcgctgtctcgctaggagcagctgaagcagtttctttcgcagaagccgtacctttccttttctgcccccgcactggataatggtagtcggggtacacgaacccaattgcatcaaaa

SEQ ID NO: 115173 - DNA, 791 bp, Zea Mays
tggggattggtcggcatgatccggcttcactgcggtgggctcctctacccaaaaaaaaattccagagctaaaacttccctcagtaactccatctaggcaaaaacagtaaggccgaagcagctaagcccaatttacgtgcctaaattaaatgaggctcgctatatacaaaggcccgcgcgcgttatggcccatatgtgaatggaagcactgcagtctcccctcgcccctgcaccctgcagtttttcgttgggagggagagagatgaagacgaaagcaaaaggagactattgttgtggaacgaaacgagcgctggtttcgtcgtgttgtgagcaggcgaaagctagcttgccgcatcggtctcatctcaatgctggatttggtaacgtacggcgtggatggcagtgccgttcgagactaccatctcatctagtccgctactagagtagactagtagagcaggtattatattcccctcccctcaaaaaatcatgatactaccggccggccaggcctaatctgtcgctcgaaatataatctcctctcttcgtttattattattcgatcgcattgggggggagtctggctgggatcattggatgcctttctttcttgaccccacttttgagcgctgttacgttcctccccatctaatctacctatctttctttcttttttttcagcccattttccatcgctgaaaaaatggtcatgtcatgtcgtggttttttttttctcccaccaccaccaccaccgtacgtaccacatgcacgcacggcgctgcacatcccttc

SEQ ID NO: 115174 - DNA, 486 bp, Zea Mays
gtctgaacagggcagcgacgtgagcagtggctggagcaacatcgtagggagggcgatggggagaatctgacatgacatagcataagttgtggagccttgtcaacgacccaggaaatccaaacagctctcggatctaggtagcatgcaaagtcacatcctctcgctcaaacctgaacctcagccactgatgatctggatctatccatactgtggcataaaatactctgaccaactcctcaatatatctaccaccgaaggtcagaagagagagtaaacctggcagataggagagatgatcctttgactctacaccggcgactgacagaaaggcgggaagatccaaaagccagtgcactcgcagggcaatctaagcaggcaactgcgccctgaagaaagactcatgggtcccggtgctgaagagtggcgtagctgctgggtccctctgagctggcaatcaagaatccaaagataggtgtctgaaccgac

SEQ ID NO: 115175 - DNA, 479 bp, Zea Mays
tggaagcaagtcaggtagcaggcaccgtttcacgtaacacgataccatttggactaaggtcaactgcttgggcgatatgattacaccccgcggtcatgtcaagttactactcgaggacagtcagctaaacgctcggcgtaccaagacgtcccttggttacacccattggggaggggacgtccaggaattttcaatagattttcccaagcagtcacatccatacagtatacgcaatgaatgtatcaagacagaagaaagatattgatggagatcggaggaaagccaaatatagctactgaagtacaagtctaatcaacagaagcattgaaacacaaagcgaaatgaagaccagccaagagccatctaccagacgtccaatctgtcgccgatcaaataaatttcaaacctaacaggacatgggcagatcacgctgttattctctaaaacaggaaacgaagacaacatgttgatctctaaag

SEQ ID NO: 115176 - DNA, 678 bp, Zea Mays
tatttttccatatcacctttcaggattaggtaatcgtaagctataccaaacaaaatgccactaaaaaggtgtgaatagcatgtatagctacatcagatactaagtgaaggaacagaacatatcttcattgacaatagcataatatgtttctaattcagaaggcatgtggaattgtggattacacaaatggcattgcgagatttgtcgttgccttaaactatagtgtgtatcacactatcacaaatgatagacagaactaatataaaagacaatctgtacgagaatccataaaacacattcgagtaaaccatatgctgttataaggaaaagtaagtcatatgttgtatgaaaacttgaattaccatgcataagctatctagataatcatgacccggtgaagaaagtaacaaacaagcaataaaacagcatggaaatgacttgaggaacaaactgattgcagaagcagacatcacaggaagagcattatcaaaacattattcagttactactttatctgcagcagcacagctcgatcgtcagcaaagtataacagccataaattagcaaataatctctatttttagaaagggaccgtggatcttttacactacctgatttcgggcaccagcgatcaaaacccacaggtggactgttccccgactgcttccaccaaacgtg

SEQ ID NO: 115177 - DNA, 441 bp, Zea Mays
tcttcatttttttatctgaattcagctgaaagattagaagaggggtacttccagacaagtgaggagtcagagcagttcagacgagagtacgagatgcggcgaatgaagcagacaggtcttcctttccctgccgcggagactgctatttctccttctgagttctgaccatgaaaattcgtaccagcttgtcatcagagttcagatgggatgtgcaggatgaagggctggacttcgtctcgcaaggtctggacacgctcaagaatctggccgaggacatgaaccaggttagctctgtcggtcgtaaatgcgcgctgcttctgttctctgtgacctgtgatccaaattcattccctggttgcatttggttaccccatgtacctctgcaggaactggataggcaggtccctctcatagatgagattgacaccaaggttgctcagc

SEQ ID NO: 115178 - DNA, 645 bp, Zea Mays
cctgcaccttcatgacacctcaagtaacatatttgccaaattgcacgcgaatcctatatcccaggcaccaattctctccaaattcccatttatagcaatcaattctgagccaagtgccacaaatccattttcttagactaaattcaaaccaagcgcacacttcactcatatttactcatataaacctactcgtgaagtatcagctcaattccaagtcattttatgcctcaattccaatttcaaacctcctatggcactattcctcgctcaaacgtcgttttcgcgtcgtttgacctctgtatctccaaatcacttagtttgtgtgtcataactctctgtgtatgtatttattcacatttcatatacttatgactatgtgactaatacgtgctcacctcttctgtcatttcagtgatctcgcctgcccgtgtgcatgtctcatgtcctatctggattctctctctcatgagatttctaggtacttatcacttcggctatgatcttttcaggtgctttccactcgtgcttagtttttcactctcctttgcagcccttaggtcaggatggtgcgcacgaagaatgtgtcagcaccagggggaggagacaacgaggaccctcctcgccccttcaggcaggtcaagggca

SEQ ID NO: 115179 - DNA, 528 bp, Zea Mays
cgagggcatgccttgctaggcaagtcattgggaggcccatcaagcgacccatggagcatttctgcgctcccgcccgaggtcagtctcgagcgagttgtgactgcatttcccacctagagctagcctcgggccagtcgtgattgcttcttccgcctagagctagcctcgggcgagacagaacaatgtttctgtgctcgtaaggacctgggggatatctatctcccacaggttaggcctagtgtttagtgaggtttacatacctcttactaattagtgcttgtgcgcatcattgtttatactcggagggacttgtagtcttacgagaccacaactatcatgtttatggtttgattaccattgtgtaccagagggaataaggaacttggcggtttggctagaagctcaataatgaagatgacagcgagcgatctaagggaggccaccttgaagacccacttgcatgtaagcctgaagagctattcatggagtacccaaacagaagcttggtgcttgcaagaggctctaata

SEQ ID NO: 115180 - DNA, 519 bp, Zea Mays
ggattatacagacttgttcttctgcctcttgaataacctcaggcccaagaactgcctttctccagtctgatcccaatatagaggagtcctgcactttctgccatataaagattcgaatggtgacatcttcagactggcctggtaactattattataagagaactcaacatatggtagactcttgtcccaactgcctccatgtttaagggcacaagctctcaacatatcctccagtacttggttagttctctcagtttggccatcaatttgaggatgataggccgaactaaaactcaacttagtatccatgttctcatgaaagcttttccaaaatcttgaggtaaattgtgatcctctatcagaaacgatcttcttcggtacaccgtgtaaacacacaatccgagccatatataactctgccaactgagaacctttataagtaaccttgaccagaatgaagtgagccactttggtcagcctatccacaatcacccatatcgaatcataaccctttgaggt

SEQ ID NO: 115181 - DNA, 2861 bp, Zea Mays
cttctgaataatttgatattggtccatagaactttgggcttaacttggtagtttgctgctgacactactactactacagtaagttgttgtaagcgcacacataccccaagtgccaacctcaaatgtgatctccctccttgacctgtcactgcagttgcttccttgtgatttgggattgtatcagcctctccttgatctcaccgatgaactcatccctatcccgcaactgtctgtctactgctgcaagttttgaagaacctgcgccatatgataataaggtgggtggttctcggccatacaaaactctgaacggggagcacttcggtgcagtttgataggaagcattatagcaaaattctacccacggcagccgctgcagccagctcttcggttcatcgcctactgaacatcggaggtacacaacaattaccctctttaccacttcggactggcctcctgattgaggatgaaaggctgaactgaggtttagtttgactcctgctagccaaaacaatgcaacccaaaatacactcgtgaagactgtgtcacgatggctgacaatggaacaggaaaacccatgaagacagacaatgtcctcaaagaatgctgccttaacaacggaggcagccgtgtacggatgaccaagaggaatgaaatgtgcgaacttagaaaaacaatccaccacagttagcaccactgtcttgccacccacttttggaaatccttgaatgaaatccatggctatatcactccaaatttcagagggaactggaagtggttgcagcagtccagccaggtgaagattttctgacttatagcgctggcaagttaaacacccctgaacaaattccttcaccttggctgcactggatggattgtagaatgatgccctccagcgatgtaatgttttatggataccctcatgtcacgtatcatgtgcttgagtgagcagctctttccaataatgacgatgcatccggcacaaaaaacttttcctttgaacaactgcaggccatcaacatcagcccacctgactggagctgagccggctgtcagctgctccttaatggacagcaccagcgggtcagtagcagattcaacccttagggtgtcaaacagctgaaaaattggtgctgaaatactatgcagtgctgctgaatcctcatcacgtcttgaaacggcatcagcggcaccatttaatttgccaggctgatactccaccaccatgtcatacccaaacagcttactcacccatgtatgctgtggaattgtggacaggcgttgatcaaggacgaatttcaagctatagtgatcagttcgtactttgaatgggcgcccctagagatatggcctccagttccactgctttcaccaatccaattaactctctttcatatgtcggcagtttcaaatggtgatgggctactggtttgctgaaaaatgccacagccccatctccttggtgcagaactgacctgaagccagcgcccgatgcgtcacagtccacaataaatggctggttgaaatcgggtagctgaagtagaggggctgagatgagggcctgtttgaacagaacaaaggctgctctaaatgcttcccgcttcagtagcttggttagaggcactgctacaccatatcctgcaataaacttgcggaagtatcctgttaagcccatgaaacctcgcaatgctcgtatggagcgagggcacggccatgcctctattgctgcaatttcatttgggtccatggcaactccagaaactgatataatgtggccgatataggccaccaatgtcttgccaaaagtgcatttggacttcttcagagccaatcggtgatccctaagtacttggaaaacaagtttccatagtttcacaggcgtcacctaggcatccatgcacccaaaaattttaggcgtcctcatcgcctagctaataatcagcaagaggggaaggggaagaacggaaggagatcaaccaataagcccagtagagacttaggggagcgagagcggcggtgcagagactcagggagcggtggcacaaagcatgggggagcaggagcggcggcgctaagacagggggcgagcgacacgcagagacaagatcaggtgcaaccctaaccaccaccaggggaaggatatatgggctggctggtgggctgggcaatttcttatacatctcctaccccttccttctttttccttgttctttttcttcatcatctatgttgttgttctgttgtttctctaattggtaaggtgtcgccttgctcgccttagtaagcatctaagcgttgcctaggcctccaggcagtggtccaacgccttgcctcgcgttaccgccttaagaaccatgcatgtttcatatggtgaaggtgtgctacccaagtggtactgaggaccagaatagcataaaaaccagaatggatttatgatgaagggcttgaggatgtcattcatcagtgactggaaggtggatggtgcattcgtgagaccggacggcattaccaagaactcatagtgtccgtgatgggtgcggaacgccgtcttgtcgatgtcgttcaggtgcattcgcacctagtggtagccgctgtgaaggtcaagcttggtggagaatgtggtgccgtgtagctcgttgatgacagggatcagaaacatgtcctcggctgtaatagcgttcagctagcggtagtcaatgcagaaacgtcacgagccgtctccagcaacaccggtgatgagaacgctgatgtgcactccctgatggtaccctgctgcaacatgttctcacattgccgttcaatttcattcttcaacagttgtgggtagtggtatggccacaccaccattggtgttgatccag

SEQ ID NO: 115182 - DNA, 312 bp, Zea Mays
gtagattctacctctacacttagaacaatcgatgaagagtgaagatattgcttcacaacgacatgtttagtattctatctatctttatctaatgttttgatgtagcttttgaactatgttacttccaattgtacttttgtcatattaaacttggcccggggcttcagagaatcctatatctaccactgatcatgaatatcttgttgtaaaacaaagccatccactagctcctagatttactgtgcttagagcatctcccacaattttcaacacattcacaatcttgattttgagcaaaattgcaaaaacaat

SEQ ID NO: 115183 - DNA, 548 bp, Zea Mays
tgcatttctgtccatttggactattctaaatattttatgaagtttgaaatttaagaatcttccgagacgtcgagttctgtactgtgcgaatcactcgagtgggtgaaaataaatttagaaagtgtctaaactttataattcgaccgcgtacgttattggagaaaatttatgtgcgaggtttatattttggatatagataacggataggaattcatctgactccagcatattcactaaataaaatcctatccgaatattgtggtcaatcttattttggatcgacccttttgtatatcttttagaacttaacttccgaaccccaaaatatttacatgtttattttgttaaagcttggagaagaaaaatcaaaattctccttaactccccaccgtatgtctcacctagcattatcccttgccgtatcctcatcctgagatcatttgattttttagaagctcctcccatacttgtgccatcgttgtgcttatctgctttctcttcaaatacacttagattgacgtgtagactcctccaattgagcacgtcac

SEQ ID NO: 115184 - DNA, 1311 bp, Zea Mays
cggtaatgtcccatcgtgccaacatggctcgatagtatcaggttggctcttcctttcagtaggggtgttgacctaagagctggctatcgtcttgctaggttgcttggcgggctggttgctcggcaagcccgcttagttaggttgctcgatgggtagtttggtcggcagtcccacctcactaggttgctcgatgggcaggttgctcggtagccccacctcgctgggttgctcggtgggcaggttgctcagcgggtatttgttcggtgggctggttgtccctagaaagccttttggacctttacgctaagctgtttggcaggtgggcggccagtttgtgggcagtatttgggaggcctttaggtcttctttgggtaccccgttctcagatactcgacagcagccctcgagcctttgtgtaactccttggagttgcatagaggtttttcttatgcgatttctcttttgggtgcgcgcaagtgcatctgttagatgtatcccccgagctcttgagtaatccatgtggatggctcggcggtttatgcagtgtaaggggcggaccctttcatacgatggtttgccatgcaccgggcgtgagtccatcggtctctcgggtgcgcgtgagcgtatatgctagatgtaatccttcagcccctgagtaatccatgtggattgcttggagatttatgcagtgtaaggggtggaccctttcctacgatggttcgccacgtaccaggcgtgagtccatcggcctctcgggtgcgcatgagtgcatctgctagatagtccttcagcccccgagtaatccatgtggattgctcggaggtttatgcagtgtaaggggcggaccctttcctacgatggttcgtcacgcaccaggcgtgagtccatcggcctctctggcgcatgtgatcgcatcggccaggtgtgcacggggagcagatcttcttctggtcttggtgtagatctcctggcctgtcgtgcccttgtctcgtataatcgaggcaaagcacaggaataggttgtggcatcggctgaagtgccactagccgtcgtgcccttgcctcgtctaatcggggcagagcacaggagtaggttgcggcgtagactgaagtgctactgtgtttagggacgctcaggtgacgtcatcctgtcttctccgcctatcacccttcgccttggtgactcgcacgttacagtggggccatgatggcatcagcccatgcggtgcagagagtcagatgtcccgcctctgtaacacgcaatccattgtgtcgtccgtgtacttcggtcgtagcgcccgccctggagtgg

SEQ ID NO: 115185 - DNA, 834 bp, Zea Mays
tggaattcatacaagatataatattcaggtttggaataccaaataacatcataaccgacctaggatccaacttcacaagctcagagttctttgacttctgcgagcaaaagggcattcagatcaaatatgcctcggtggcacacccaagagccaacgggcaggtagaaagagccaacggtatgatattggaggcgctcagaaagaaggttttcgacaaaaatgaaaagttcgcagaaaagtggatcagggaattgttgtacgtcgtttggagcctaagaagtcatcctagtcgagccctacatggaaacactcctttctttatggtctatggttcggaggcagtgctacctgctgatctcaagtttggggcaccaaggttgatctttgaaaacatagcagaagctgaggctactaggctggaggatgttgatgtactcaaagaagaatgactaaacacagtgattcaatcagcacggtatcagcaaactctgaggcgctatcaagataaggccatacgacatcgattgttcgcagtgggagatctcatcctccgccgaattctaacgggggaggggcggcacaaattgtcacctctatgggaaggaccattcatagtagctgaagtcactcggcctggatcatatcgtctcacacagatggatggcacagaagttgggaactcatggaacatagaacatctcaggaagttttatccttagctatatttcaaaagctactggggcggcaatgtattctgtaatccgggaaacgcatcatcaataaaaagacttcaggaattgttcgttgtcaattagcattcttgctcaaatcggg

SEQ ID NO: 115186 - DNA, 852 bp, Zea Mays
ccgggctcaaaaactccctccctgggctggctgctgttggatagagagaggggccaccctatggctcgtgccatgtctcctggttggtcgatcttggaggggaaaaagtagtctcgtctctgcatataattgcatcgcgtagtacgcaaacatacttacatgtctgttcgttggtgtgggttacgttaggggcatgcatgtgatgtgatatgaaccagtatgcactgagatcggcatcggtagttagtactccgtagtgtgccaccgaacgaacgggatgagttgacatgccaccaggaatccaccgcgcatgtgtcctcctccaaccactcttctttctttcttcctgattctgatgacccataagccataatccagcaaccaaccttagctgttagcttcctagcctgcatatacgtacccaactaaccagagacgctctcttccgatcttacccgttggtagtacaactgcacgcttctcgtcagccgtcaggtcaacgcagccagcagtgcaactgtttgcaacattgcgtttcagtccatgccatgcaatatcttttgagtcccagctcaacaatctagtagtctaaccttttttccccccgttccgtcagtcactgcacaagcactttcgctttgagtgcacaagctgccgctgccgcaccaaaaaaataaaaataaaaaacattggaggaaacgaatgaatcgccctgctcgttcgtttggacgagcaagaaacaaaataaaaatcgcttgccaacaaacaacaggcccttttgatgcagtggtgtgtttggttccactcaactaaagtttggaccctaccaccgtgtcgaatgataattacatg

SEQ ID NO: 115187 - DNA, 1185 bp, Zea Mays
catccacgaggatgcacctgtcgtcgacaagagatgtgtcggaaattgccgagttgatcgaagggcataacaaaatcagatgcgaatacactaatgggcggctcaagaaagatttgatagagcatgtgtggaatcgtcaaggtgaaatttgaaggtaggtcgctatgttgtatgcacaaacgatctttatgtttttgcatactgaatttgctgtgattttcaggcaaagggacggcgacgaccttgcagttattttgtagcagttccaaaggatggcagcagttattttgtagtgtcttctgccttttcaatgtactgcaaacaagtatttcttgtgcatgccttcaaacatctgtagtgcatcttttacctgtaagtttagattgattaaacccaccgttgtttacatggtaactaacatgtttgaaaaggatacgaattcgtataccttgtcgtcttcccttttgccactttgcttcaaccttatcactttgtcgtacgcagcacaaaacttcatagtgtccctttgaatgtcgctccacctgtgctccaaggagtgttgtgtcctagcattagctgtcttcttgtgttcattgtagtagtcgctgatgtgacgccaataagcctctcctaactgattcgttccaattgcaggatctttggacacgttcatgtaggcagataccagtatctcgtcctcggcctgagtgtagtttccaagcctccgagttgttgctttcttgagcttagggtcagttgcagttggagttgagtgctggctgtcttccatgttcatgctcttagtaaaggcaaagttcatgttgccttcgtcatcgatttctgttaaatctatgccttctgtgtatgtgcatggcacatagtctccaggggcttgtgaaggttggccgtagttgtagttctccattcttcggctgtcatggcaatttatagaagaattgtaattgaaggaagcaagacgaaataaatataataccaaatgactggatacagtataacacatagtctgaacaacacacatgaaacagttttacaataccagatgaaccataatttattacagtcaccaaaccctacaacaccgaacaaacttgtgcataccagtactacaaccctagagtgaaacctacgatactcatatcgtgttgtttaggactaaacatcaac

SEQ ID NO: 115188 - DNA, 507 bp, Zea Mays
ctcgggcgctgcatagcgctcataacctacgagcctcggacggtggcgcgttaatggcccgcgcgtcccttggcctgcgacgcacatatgacctatcaaactaggcttgagtgacaaacctctgacaaggcattacacgatggtccgtgttgagccctaggctacagaagccaggggtcagcgtagcccgaatgatggtgcctaggaccatcgccaccccacggcatccaacacgataaatacgcgacaactaggcagccccaggccccacgagtacgcgtcgccacacccaaggtaaaacactcgttttacccctgccttacgactccttcccagagaagccatcactggctgacccctctctctgcttataaaagggagagggtcatctcagggcagagcatcggatcgtgaggaacggaaggatgattggaggagagagctcttggataagaccggatgccttcagactcagacaagcccacaaggacgaataggaggaggagc

SEQ ID NO: 115189 - DNA, 627 bp, Zea Mays
agcgggtagtgataataagggtatacaaagtcgattgcatcaaataccttgttcaatcttttcttcccccggtccccgaaggctacggacaaggcatcatcttcgaccttggaatatgtcccgagtagatcgtcgctggtagcttcaatgcatttcaacctgtcatcatttggttcatcaaacttctctctaaatctgaaggtatacttcaatcgaactaagccattttcactggattcagcagtagtctccttcggcatatcccagatctccacaagtggccacacgctataggctatgtgctcctggactatatctcttgtgccaatgaaagcgcaaacattgctaaatgccttctagcatgcttcgacatcactttcaatagtgaccttcggccttcgaaggccgaagcgagaccagatggggcgctggataatctccttgatgtcttcccttttaattagatcatttttaacataaaaccactcctccattcaggccccgggccaccttttccggtacgtcggcaccgggtaacttgcatttgagcgggcaatgaacccgtaacaaccgaagttgttgtggtattgttctttgccgatagccttcgtctcgtataaaagctcg

SEQ ID NO: 115190 - DNA, 577 bp, Zea Mays
cggacccgtcgtcttcctccatcctacgacggcggctgacttcctctatggcggcaagctttctctctccctcggtctgtttgcaataccaggcgctgcgatgcgatggcacggggtcacgatgccaaacatttataggagcaggaggcgagtccgcaccgaggagatcggcgtagaatctgttagtggcgttatggtcagcccgatcccagcagtaccgagcgatgggcggggtttgttacgagcagcggccatatccttgactgtggagaagagaagtccgacgcttgggccccacatgtcattgtcgtggattttgggtgggatgttggcaaagttactgccagatgggacctggtcgtcagtgtggccacgcacgtacacaggatggtggacagggccggcgcgaggtggtaagtgcagatgggtcgaaaaaaaggatccgcaggcccaacagcgaattatggtctgttctcttttttttatttcttttctcaaattttcaaattcctatttcaaacaaaaacttgattcggatttcaaatttaaacatcaattagggtgcacaacacagaac

SEQ ID NO: 115191 - DNA, 355 bp, Zea Mays
ggagtgtactgggttaggtcagagtagtgtggagcgttcgattccgatcggacaggtggggaatgaatcgggattcattaaatctgtgcgctcgattctagatcgaacggatcggtgcacgaacgagatcgacatcgtcggattcggatcgaatggtgcttagcgcgtaccgattcgatgtattatagatctaatcgaggacgtagaattccaatcggacggccagtgtctgcccgtaccccttcgcgggtacgttttataaaagagaccctgccttttacatatatcaacccgccgtccacgccagagactctctgagacttaggaatttttgcaccgtagcccctgcacttct

SEQ ID NO: 115192 - DNA, 310 bp, Zea Mays
attaaatccatgggtaatgagattaaccgaacaagacctaactagtcttttggagataatcttacacacaataaagctccgaatcagaaggtggtggcagtgacgaggatacatacagccaccggatacgtccgtacaatagacatggatgggaacgattacgcactcagtttatattcagagcgcttgaacgatacctcatcaccccatgcgagcacacaatagataaagcatgacgtctaccggcggcgcggccgggccgaagcccagaaagtgaagttgcggtgacccttttggcgctagggacccg

SEQ ID NO: 115193 - DNA, 503 bp, Zea Mays
agccaacttcacagccgccccagtcgagcctgcttccactactacgactgacggacccgaccccactccttccaccacttggggtccgctcgagccagctcctgctgatactggaggagttgaagctgctgttgagggggaggccacttcctcaagggaagctccacaacatattcagcgccgtcacccacctcagcagatgatcagggagcttcacgagtgagtcactcgctctaggtcacaacacatttctcattttgctcactcaggttttgttgctacttttgagccccgagatgttggacatgctttatctgatcctaactgggttaatgctatgcatgaggagcttgaaaattttgaaagaaatcaggtttgggttttggtgccacctccttctaactatcatcccatcggtacaaaatgggttttcaaaaacaaacatagtgaggatggtttggtagtgagaaacaaggcgaggcgggttgcccaagggtattgcc

SEQ ID NO: 115194 - DNA, 706 bp, Zea Mays
atagaatcccggtacagaacacacacacacaccacttataaactaactaaggatcaccgactatcatggaggaaacacgacccacaacactgatctaagctagcaactcatcaacttggaggaaggacagagccttggctccagtcaaggaccatagcaccgcctcttccctggccactctaagggcagtgaccaggctgggattacaaccatcaaaaacgcatctattcctatgtttccaaatggtccaagcacctaggatcactagagaattaaaaccttttctcaaaaaatcagatgcccgagagctgctagacttccaccacgactcaaaggaatcctcatgagttggacatagaacctgcagccccactaaactaaggaactgaaaccagaactgcttggcaaaaacacatttgaccagcaaatgattcatggtttcagcctcttggtcgcacagggggcactgctcaggtcggtctagtcctctttttataagcctgtcagcagtccagcacctattatgttccacaagccatataaagaacttgcacttgccaggagcccaagatttccacacacgttctgctggttcgaactgaaccgaaccaaggaagagagctttataagcagaactagttgtatactcccctgaagtgctgaatttccataagtggcgatcccttattccaggttggagctcaac

SEQ ID NO: 115195 - DNA, 601 bp, Zea Mays
gatagggcagtcgaacaagttcattctttttcttttctcctttaagcttcggcatattccattcctttaacgtcggaaatactctattggctaagtattcctacaccaaatctctagtaccaatatgctcagacacaactcgaaattcacccacagctgttcggcatggtgacccttgcagcatgtcgcacagggacctagttaacccgaaggttagatccagtgggctctgaactatcttctccttccccccatcaaccttaacacaaaaccactcattcttccagccggttggccatttggtgcgatagctgatcactggagtcttcatgtctttgcggtaagcaaagttgtagcagccgaaattatcgtgcaacccatcttctctagccttcgtctgatagtgaagctcgtgcacccggcagaaagcttcggcaagcaggttcactccttggcttcggagggcccagataaagacgctgagcctaacgatggcgttaggagtcagctgatgaagataaatttcgaaatctttcaaaacatccccaatcatttcatgcaaaggaaacctcaatcctgctttaaagaagcttctgtaaac

SEQ ID NO: 115196 - DNA, 491 bp, Zea Mays
cggacgtgtcttttagtaaagacttcgcaccctttgggtgacgttgtgcagttattgtgcattcccgactgcacccttaggcagcttttgctcggacgtgtcttttggtaaagactttgcaccctgtgggtgacgtcgcgcacttattgtgcatgcccggatgcacccttaggcggcttttgctcggacgtgtcttttggtaaagacttcgcaccctgtgagtgacgtcgctcacttattgtgcatgcccggctgcacctttaggcagcctttgctcgaacttgtcttttggtaaagacttcgcaccctgtgggtgacgtcgcacacttattgtgcatgcccggctgcacccttaggaggcttttgctcggacgtgtcgcacgcgagggaagttaagctgcctcttgcggtgattgttttgtgcgtcgaatgtcgaagactgttgccgcggtctttttcgacacccatggccatgatgccagcgggattgc

SEQ ID NO: 115197 - DNA, 465 bp, Zea Mays
cacgatcccaatcctatgttcaagattttatgaaatgagaccaaacctaacccgtccgattagcagatcaacgatcaagatctcgtccgaaagggtacgctagagatcaaatcaagatcgttaaataacaatccaacggttcccacgctctcttcctcaccaggacacacacccggcggcgccacgaaatctggcggccggacctcgccggtgaacagcgatttggcgcactgatagagtattccccagcccaaatcattcatgcagactagtgcagaatgtcacacagactagtgcagaacatggcagaggacaaggcaaaactagaggagtactactcacctgctatggtgcagtggagaactcggcccacggtaaacagtgacagtgcggtgtatggacgactccagtgaggaacccccgtcgttccggtgaccttcaatgctcgagaggaccatgaccagg

SEQ ID NO: 115198 - DNA, 382 bp, Zea Mays
aacacattgtgcactacagataatgtttcgggtagttggagtcggtatgccactggtccacatctttcaagaataggaaacagaccaatgtatcggggtgcaagctttccttttacaccaaaacaggttacacccttcattggtgatactttcaggtacacataatcttcgacttgaaagtacaagggttggtgtcgtttgtctgcataactcttttgtcgagcttgcgcctctttcaatttatgtatgattcgttaaaccttttcttccatctctttcaccatatcaggcatgaaaaaccacctttctcctggttcagaccaattcaagggggtacagcaccgtcgtccatataatgcttcaaatggtgccatcttaatac

SEQ ID NO: 115199 - DNA, 1126 bp, Zea Mays
caattttataagaatgcaggggctaaaacataattttctgggctcgactgcaatttgttttggcttaggatggatggcgggttggtttctagaaagtgtaagggctcttttgcaagttgacgcggccgaaggggtacgggtgaatgcggaccgcccagattagatcctatggtgcagattagatctaggcgctttataaaccggtacgcaacgtcaaccgtacgatcagagatccacggtccacgaatgcccacgatccaatctactgcgagccacacgattaaaatccgatggctcagacttaaaatgacgaaggggtattctctcttctaatctggaccctccgctccctgatcaacggtccacaatcgcaccagccgaatcgttattgcgcaactaatcacaaccgtcgcagatcgatccaatggccatagacaacccacatccgaccgatacgcccatctaatctacgcccttcatcttggatccgatggctctctagcttcttctcccccccggtgttcttccacggaggagcatctcaaccccgcggtggcacacaaaaccggcgaccagatcgacgcccaagagccccaacagctaccccggatggtgctacgtgtattcgagacaaagaagaaactatggaagcaattcttaccaagcttagcggcgcggaatcctctggccacggcgaaaacggatctacggcggatttaacttcgatggcgagaaattcccaaggcgcgggccaaaatttgcgagcggcgcggccccgaggtcatccatcccagcgtctcgcgtttgagggagatccgcacagggcgttcttattctctctccctcggtctctcacatcttcttaggtgctggtgttcatcctccgatcggcaatggcggtcgaagcggccatcggttcctggtttaccgtgccatcttccacacaggttgcgcggagcccagaggagagggataaggggagggaaaacccacgccatggatttatagatgggtgaagtccgctatgctcgaaggaacggagccgcgattccgtcgcggaggttgggatcgtacctgagctgtgcgatagaggaaaacagggcatcgcgagttcaacggtggcgac

SEQ ID NO: 115200 - DNA, 754 bp, Zea Mays
cttaatgcaaaatgagaaagttattgcctatgcatctcgcttactcaagccacacgagcagaactaccccacccacgacttggagttggcagccatagtgcacaccctaaaaatatggaggcactacctgattgggaacaaatgccacatcttcactgatcacaaaagtctgaggtacatcttcactcagccagacctcaatctccatcaaagaagatggcttgaattaatcaaggactatgacctcgagatccattaccaccccgggaaggccaacatagtagcagacgccctcagccgaaaacctttcgggataaaggggaccaactttttagaagattggaagaaggaatcagctcagctaaatacatgtctgggagacaacggcagcctggaagtcaagccaatgctagaagatctcatatgcaaggctcaacgcctggacgcagagacaaccatacttatggaaaaagctcgcaaggagcaacttccggatcttaggacagatgatcaaggagttctttggttcaggaaccgtctgtgtgtatcgataggagaggcacgagaagtcttgctcaatgaagcccataactcagcttactccatccacccaggaaccaccaagatgtacctggacctcaaagccagatactggtggagagggatgaagaaggagatagcacagtatgtggcccagtgtgacacctatcagtggtcaaaggccgaacaccagaagcctgcaggcctactacaa

SEQ ID NO: 115201 - DNA, 339 bp, Zea Mays
ctggatacaagtagtagtaagtgcatatcataaaatatatgtcaatagggaggaaggagaagtcttggttcaacaaaagattcagagtttcagactgctgaagtgatctggagatatctggagggtgcacatggaatttctgcatagctgttagtagatagtgttgcctgtacatcatcttgtcatgttgtctgttcagtacgagcaagatgacatggctacatcatataataattgctagattcatcatgtgatcttcaccatcactcgaacgagtgatgatgtaacaaaaatatagaccagcaaaactacattttggtttccatgagcgcgttgaaa

SEQ ID NO: 115202 - DNA, 425 bp, Zea Mays
ctgaaacaagagtgactgctccaattgcgcagagcactgaagagccagttgtaatgccgaagttatcttctgttaagttggttgagacgaagactgataaggataaggctgaagggttgaaagttgaaaaaatgccagagattttgagcccgtcaacagagataacagtgccgaaagcacaaaatggttctgccgccactcctaagaggagaagaatggcaaatgtgttagatgttgtgctagaaacaacaaaatccttgagtcctgctccttcaggaaaaattgccaaagctgaaacgaagcaagcagaagccgaagctgcaaaaattcaagttgaaaccgaagctaggccttcagagcccgctgagacagagcccgccgcagttgaagaagaagcggtagaacaaattgcgtctgaaaaggtt

SEQ ID NO: 115203 - DNA, 377 bp, Zea Mays
agtatggagacttgtagccttataggactcaacatgtataaggttattagcaattcagaacaatgcttctttttcctgccattgtagtattttttgtcgcaaggactgaagctatcattaataatcatcgaatgtgtaaattaaaagaaaaaagaggtttccccttctgttagtagccactgtgtttatttcatccagcaatgtgatgcccatagcatatcatgaaaagtaacttggcaagcatgttgcaggacatatagttttcagtgaacctggatacttcatttgctattagaattgtactaaatagattaggagggaattttatgatctacattctgattaatgcacacattttcctgtctatcatatatgga

SEQ ID NO: 115204 - DNA, 444 bp, Zea Mays
ttcccaacacaaagagactagaaatactacggtggcttgcgagttgcggcaaatgatttgggctgccttgtccgagtcatagtcctcattactgatcttcaaaatcttcattcctaattcatcaacatcttaaatgttagggtggagagaatataagtgacttttctttttttacactgccccatgaataattttcacaatcaaattgtggtggttttcctaaaggtaccgaaagcaagggaatatgtttaggaatgcaaggataacaaaaaggaatttggttaacaggtttgcgctctttgcgcttggagtttgttgactcggtgccagatgtggaaggtgatgaagatgtgttggtctcgtagtagaccacctttcttatcctcttcttctttccatccttgttatgcgacttgaaggagccttgggattcttccttcttgc

SEQ ID NO: 115205 - DNA, 470 bp, Zea Mays
gctactggcctactgcttattatgcactgtaatgagtttatgatttttttttggaaaggagcataacaatgcttttagaaaacaatattggttacagaacggctggggttgctagcttgaacaaagtgtaaaggggtaacaagccaaagaccctaaccctattacaacaaagctaaatttcagaaatgccgtaatgagtttatcatacaacttacaagcaggcagcagcacatattggggttatggttcttggcatatgattgacaagtgtttatggttaatggatcatcgtcctgatataagaatagttctcttctttatatgatttgttttttaccaagtttacacttggaagagtcagatatgttactacctccagtgtttttgttattaaactcacaatgtagaaattattcgaaccatattaatttggacacaagatattttacaggctaggttatttggagaaa

SEQ ID NO: 115206 - DNA, 609 bp, Zea Mays
ctcggcgatgcctgtgaatatgatccattggccttagtcaaagcatatgttctgattgcagattcacgtggtctgtaataactctcctccgatgaactcgccatgctggtgatttgcctcacgaagaggttcatcttgatgatgaagttcctagcaatgcgcgcaatatcattgtgatgggaatacagaacaatggatctttcgttttgggaaatggcggagatcattattaaatgtgggagacaaatatgtcgacacctatcttgcctctatatattgcaatgggatccaaaacaaagccctaggcatgagtgcttgaagctctcttatctggtcattgataaatgcaatcgaggctgaaccaataatcgcaacatgaaagtcgcgagcttgaagttcggacatttatgggcactactgaaataatgtgtggtgaatgcgatggttcaagtggtcttgtgagagatccatcccacatatgtgttgaataaacacagatccgctatgtaatatatctggcaaatggcatgaattaaaatatgcagttaataggattctgaagatccgtcatgagatcctatgaaggactcatacctttgaattataaat

SEQ ID NO: 115207 - DNA, 448 bp, Zea Mays
aggcactgtcctccgacgtgttctaccatgtcatcggcacgccagccgtccgaagcccagagggcctccaaataaccaacgacaccgagggtcaccgcgtagtcatcatcatgaccgaggactggcgggcaccaataaccctgttcctgcagggatactaccagccaagcgatatcaacgaggccaagcgcctcaaacaccgaagccgggacttcgcactcattgagggacagctttacaagaagggggtcagtcaacccatgcttaaatgcgtcaccgagaccgaaggcgtccagatcctgcgcgatgtccacagcggaacttgcggctctcacgcagggcccagggccctagctgccaaagtgattcgttaaggcttttactggtctgctatgatttgcgccgcgaatcgggtgacgaggtcctgcgaagcctgtcagaaattttc

SEQ ID NO: 115208 - DNA, 1461 bp, Zea Mays
tgatatttgaaaatgggttgaagaagacttaaagaaaatgttgatttctccctttaagttccctaattgagcatccaatttggggctgttttagattcattttggggaaacttccttactatctttagtaggtattttggtaatcttcaacttgtataattagcccaactcatggtaatgttatcctcgttgtctttttacctgttttctgcattgcttcatatgtcccatgtgaatagacttaaggttttagaaactttcctctctgttatatgcaccataaggttaaggtaggcatcttaggataataaacactagctgaccatttggttgctaagttttggttattttaggcttaactaaaccacatgtgataatctatcaaaggggtgggtgtagagtagtaaccctgagtaacacctagggtgttacattcagcccctctccttgaaactgaatgtgttccattagctacaaatctcaaaactaatgactccaattgacaaaaacgtgcctaattactaacccaaacacatatcagaagatggcattggaacttgaagatataacgaggattttctctcgggtctgccactcagacaaaccaaacttagggatgacatttctccttatccctggcacaaaactcttcggacactgcaccgaaacgacagagtgtagagaggagaagaaatcatgtaaacggattttgcctaagttcgcttagatttgcaacctatgggcgttcgaaagtgactaaacatatcaggcccacctattcgaccgcagacctgagccgcagagcgcgctattggctgattcgcgcacaccaaactgtgctcgcgcctgtgccctacgacacagctggacatcgcagcgtcgtgcacgcgtccgtgcctataaagtcgacccgaccctcaattgcactctatgcgttttccccgagcccatagctaagcaccttcaccggagttttaccggagcagggagcatcgccgcccgccatcgtcgaccagagccggtcacgatgaaccgctgcacccagctacgttccaccctaaccaaacccgccaccggtttcccctgagtcccatagagctttccaaggctcgagctggagctctgcttcaccagaccagtgaaatcaccatcaccggagttcaagattccgccggtgaacatggacccacctccacaactcgccttggtccaattcctccggaggatcacctcaccaaccttctgtaaagcttgatgactggtggaatcgagctctaccaccgccaactagccagaacactcaccgccgtcaagctccgaccatcgggagacgtagactggtcaactccgaccatctccggccgacccaaaggtactggcatgttcgccgtaacctcctgcgttttccccaccctcttctagaaccgctatcaccgacgtcgagctgcatcgccgtgtctt

SEQ ID NO: 115209 - DNA, 1051 bp, Zea Mays
ctggaatggccgggggcagcatcagctggttgggggtgctagtttagagatgcgccgtgggaggaattctgattatcttgaaatccctctcaaggacagtattaagggatggcgcttggagtggtttatcgttgaaacccacggaaattctctcccccctcgctcggggagacagccggacgttcgtactccgagttggaccgagtcccccatagatcaggaggtggctgaggctggggctttgctagctgaagttggactgctgaaggagaggggtctgactgcagaggctacggttgctgattttgttttcaagaacattcagccgttgaaggacagggcttacccggcttatctgtaccgaggcctagctgactcaactcgggttaccaacagaaaaattccctccatagacttggtgaaccgacttgaaatgattcttagaggcaaggtatcaaatgttggtgctccagtggcatactcggcctggaacctgcctccttccaaagccttcactcattttgtttcgaatccacctgttgctgatggcagtttgggccttagagtgcgaccctctgctgaagaagttaacgctttggttgcctcgctcggggaaattcctgatgaagagcggcaagtccattttgaggtacctttggatcctagtgacgcagaaataagtgctatgcttgatttgctggctgaggactcttctgatgttgctcctgctgggacgttggtggtggcacctcccctagaaactgatacaaccttggatattcagaagcccgtcagtgctcgcccgagacgcccttcccgagccaatcaacttgatcctcctgctgaagagcagaaaaagaaaaagagacgtctccggcgagtatctagtttggatcgggatgttggtccttcggttcctgctgctgaagaagtgcttgttcctgaatttactgatgctgaccccaatgggggtgctccacctgctgctgaccccaatggaggtgctccacctgttgctgaccccaatgggtgtgctccatctgctgctgac

SEQ ID NO: 115210 - DNA, 722 bp, Zea Mays
gtgttcacattaggtatgagaagtacacaattgagtgagagtctaaatagtgagctgaagagacatttcaaatctgattttgatatcattcgatttcttaagcaatttgaaagggtggtggaagataagagaaaaaatgagctaaatgctgaatttgaatcaaggaagaaaataccaagaatcaaaatgaggacacctatgctaatccaagctagcaagttgtacacgccagttatattcgaggcttttcaaagtgagtatgaaaggtccatggtagcatgcacctcggcattggacgacaacaatagctatcttgtggcaattggcagtcttgatggaaattttacctttgagaaggagtacaaagtttttggtaattctttagagcaaactattacatgcagttgtgggttattcagtagaactggaatattgtgtggccatgctttaaaagtccttgatttgatgaatatcaaatctctgccatcacaatatgtactgaagcgatggacacgtgcagcacgttgtgggacagtacaagacaaccatggacgaaatattatagagaatccaagattaaatgagatggctcgctacaaagatatgacccgcaaatttctcaatttggcacttcgagctgctagccatcaaggatctaccttgttagtaaacaacacacttgacatcctgaacaaacaagttgaagaagaaataaatgcaag

SEQ ID NO: 115211 - DNA, 717 bp, Zea Mays
gattaaaactatgtgtaatgagattcttggaaattacacgaagaaagaggatcaattaatgactactgccttcggcacccggtcgaaatgaaggttaaatcgggtaatggacgctctgaacttcgagtacccggattatgagaggcttgacgaagaggccgggggagcgaaaagaaaaagagttgtcaacatcttgagcaggcaagctgtccggtctgtgaaggaagacgaagaagaagatgaaaacagcgccagagccgaaggcatcagctcctaagaaacggaaacttgacaagataccttctgccaaactgaaggtacatgatgcgccaaaaagaaccttgagccctctgtcaccttctactgccgaagcgttagaaattttgaaggtaatgactgaatccccaccattcaagctgctaagtcctctgggatcggaactgaccaaccttttacagaaaagggaaattccttcggctaccgatggaagagacgggggacagaaaaggcgacgtatgatgaacatactccattcaattgagaaaacccggcctctagcttcggcagtcaagactatcaaatctattgatgctgaggctgttgttgcaactgaaggcaaagacctcacagccaccatgtccgaagttgacaagattatatcagatgtggctgtggaaaaggaggtggccacagaagtgtcagacaaagggaagaagg

SEQ ID NO: 115212 - DNA, 677 bp, Zea Mays
aagcagaattgcaaatcgacagagaggatctggaagcaggaaagcaagaactagggcacggtatgtggagacgcggaacagtgcagtacatatagggttttcccgggccagatgtcatttccaaaaagtgcccagtcatcacccagcggttatttctaaaaacgctggcgtgccacgtcatcactcagctgctatttctaaaaaagccggcgtgccatgtcatcactcggccgttgattccaaaacggccaacacggcccaaattgactcagccgtggtttctaaaaacgctgacttcactcggctgttacttctaaaacgccgacgtcgccgtcagtcactcggtcgttgcctctaaaacgccgatgctgccaccagtcactcggtcgttgcctctaaaacgctgacgctgccgtcagtcactcggttgttacttctataacactggtatcaacagtaaccactcggccgttaattctaaaaacaccaacgtggccccgccatcattcggacactatttcagaagcgctaatgtcgtcgataataactcggccactgtttctaagacaccatcgtcgcaggaagcaaagaaattaacacagggagagactatatcattcttcatgaaagggaagttacagaacttacaaatcaactcgttatgagttgatacttcc

SEQ ID NO: 115213 - DNA, 962 bp, Zea Mays
gttattgtgtccatgggactccatactactacttgcttgcattggacctgaactacaactgtataaatatgagcaagctacaggttgtactaggctgctaggtggtgattcacatccgaatacacttgcattagtttgttagtgagcttcacggttacactatgtgtatcaacatcttcaacactaaactgaaagtgctcattccagataggattcagatcgttgttctataaagtagtatagggaacacgacacccagttatctgctacaaaaattagtgtattgccaaacctcaagagtgtctgaaatttcaggtacaacaaaaaattcgccactaatgatcttcagtctgaaatctagctttttctgacatagcgcatgatttgagaaaaataaatgagataactaggttcaggagtttataatgaacctctagaatctatatgatatccccatggacattggtttcattgggatgctgatgtcaattattatagttctcccacatttcttcatgttgcttgctatagatcaaaggattctgatcatgatgcacttggcataatttccctgactatagtccactcttataatgggattatctaatttctcaaattcatttgcaggtagccagattattatttcagtcgtgagtgcttcgaccaccgtccaacattgggagcatcgagtttgaggtgacctacctcgacgacgacacatgtgtcacccacccactcatagctctttgcagctggccatagttataggcgatggtctacacaccaccaaaacagcagcgcgagctgtcagaagcgtctatcagaagcaagtgctctgtcagaagctaccctcacacacccgcacagtttcaagcattccataataacagaattaagtatgtagtatatctgagtactgatgccttacacatatttttttgcaggctaaattcacctccttt

SEQ ID NO: 115214 - DNA, 896 bp, Zea Mays
catcggggagagagacatggtagatgctgtggattatttgattaattccatcatcaatattggaattttgctgacaagagcacatgccacacgtccatacaaacacaaccaaaaccacaaatgcaatactactgtaggatgagctcgatatgcaaacatgttaagatcgagcaacccaaccacaattgcaattaacgccattcatatatatgattctagcttcgattttttccccgtaacttataaacgcggatgagaatgataatatgtgctaccacaatacaacacgacctcaaattactactagcatatctataagcgtacaagccatggcacaggacagtgtgtatagtactatgagcaattatgatccttgatagcactagcggatattgtacagggcaggctatacgtggtgcgttagggctaataatagctagatttggtttgtattatgttccgtatggtgttgggtgctcacttattactcatgtttcttctaatggtacggtggtggcgtagcgagcgactatagatagcctatcttatactttgcacagaagcgagagggctgttcgctgtggccggattaaaatttaaaatcgttcagactactgcagctcaatctatagagataaggtggaataaaaccgtagcgaacagccttatgaacattcatcggttttaagaattacacaatgcaatctgcactccatgtctccatcctagtcgggaagaaaattaaatacaaacaagagggcattataagagcgtgacgtccactcccacgggaacgcactgcaacggaagcttccaaaaccttcgctgcagaacgcacaccgtcttgtccccctgactgttggaccacgctgctgctgctatatatacaatctgcg

SEQ ID NO: 115215 - DNA, 795 bp, Zea Mays
gcgtatctggaggcagcaagggtggggtgcaccgaaagggtttgaggagtcccacatgaaagccatcgtggatgtgcgccccttttggcaattcgagtctatacgccacaaagcccaccttttcaatcacacggaagggtcctgcatagcgtggtcccagttttcctttgggacggtcgactggtgactgagcctgtcgatgtagaagacggagccatacccaatcatcaacactgaactcgagctcgcggtgcttcccatcataaaacctgcatgcatgttcttgagcttgtagtagcctgtctcggagctccccaaggaacagatcgtgctcatggagcatctggtccacgacttgcgtagcagcagtcccaagctgatatgggatgagtggtggaggatctctaccataaactacacggaatggggttgttttgagagctgaatggtaggatgtattgtagcaatactctgcccaagctagcaagttcacccaagccctaggccgatcccctgtgatgcacctcagatacatggcaattgttttgttgactacctcagactgaccatatgtttggggatgaaatgttgtactcattctcagtgtgacccctgctagcttgaagagatccttccaaacatgtcctataaacaccgggtcccgatcactgactattgagcttgggaaaccgtgtagtctgactataccatcaaaaaatgctcgggctactgtagctgctgtgtacgggtgacttagtgcaattaagtgtgcatatttagagaaccggtctacca

SEQ ID NO: 115216 - DNA, 597 bp, Zea Mays
aacaaaaggtagtttctttatcctcatgtgaagctgagtatattgttgctgctacagctgcttgtcagggtgtgtggttgagcaggttgctcagtgatctgttgaatgagaagataagaaggttcaaggactcagtaaaaatcctgtgcatcatgatcgcagcaaacacatagatacaaggtaccattatattcgtgaatgtgtcagcaatggggtggtggatgtaaaccatgtgagcactgatagacagatagctgatgctctgaccaagccactcggcagaatgaagttctcagaactaagaaggcaattgggagttatcagaattcaagaatgacaagattaagggggtgatttgttgcatttttcaccagtttgtaatcctatcatagctaggtgcattagttagtctgcatatttcgttttcgcgtagaatccaggtgctctctggagactgcccagaccacgccgtgaccgcgtccaggcgtatctcccgccacgacacgcatgtcgtgcatgtcgcacgagcgcccgaaaatggtggcacatcgtacagctgcgaggcgtggcggggaactcggatcgtgccatggaacc

SEQ ID NO: 115217 - DNA, 421 bp, Zea Mays
caaatatcaaacccaaaggacaacgtgtggttcctcaaaatcacattaagttacatgtcaaggttcaaagcatctaaggatttcctaataaaatataaagtgaaataaagactacaagctaaagagggaaatagaatactaaaagagttgaccgaatgattcagctatccctcctatttatagagggttattcctttttcctaaactacctccaaatacatagagcatattcacttagtcgggggcaaaatggaccaactcttgatatggtgatttgacagccacaccctcttcacaaaagtagtttcgccttgacacatccgtcgcaatgacaccacgagacgcctctgattccctttagaactgtgccgctagattttgaggtctaaaccccacgaaacccgcgaactgtcgcacttgg

SEQ ID NO: 115218 - DNA, 629 bp, Zea Mays
gagaccccgctcggacaccctcgggggctgggtcatagcttgcgctacccacttgagccggatcgtctccggcaacaccctcgggggctgggtcgtggcttacgtttcccacccgagccgaatcatccccggcaacaccctcgggggctgggtaagtgtcaacaccatccttgagggccaagttctctgcggcagccgcctctaaggctgaagatccctctgttacttccatgggagcaagacgatccaagtcagtttcctgaccctcaagaccgcgctctaaggtcgatgaggcgcgagacgctgcccgggatgaccccaacccggcgtcgaacacatcagcacaaacatccatcgcgtcaccatccgctggctctgataacagatcctctggaaccatatcttcaagagtctgatcaaagttcgccagagacaattcttgtagaccaatgagggcagacagagcaggagaaggaactccactactttccccacttgcaacatattgccgactgttcttccgagtcaaagggacctcatcttcttcctccccctcgttttcatcagcaacacagacaacacccccattgggtttagcgacagatggagcacacccattgggatcagcg

SEQ ID NO: 115219 - DNA, 295 bp, Zea Mays
ctgggcatcgggtgcgcgcgtgtccacgtcggaagaagactctgcatcacccagcgaaggtgttggtgtggcgtccagttcccaggaaggtcgtcccggagaaagttcctctctgtgatatggaaggtgtttcgcgggtcggcggtgatggtgatggaatgaagaagatgaagcgcactcgccgtggacagaggcgtcgaaggatggaccgggaggacttgggcgcacctggtcgggtctcatcattggcttcttcttccttgccttcggtggtgcacccccctcgctcgcatat

SEQ ID NO: 115220 - DNA, 523 bp, Zea Mays
ggctggactagtagttgtttttataagagaactctgccaatgaaagacacttgtcccaattcttcccatagtgcaacacacatgccctcaacatgtcttcgagaatttgattcactctctcaggctgaccatctgtctgaggatggtatgctgagctcctaatcacagtggttccaagtgacttttggagctgctcccaaaagcgtgccacaaacagtgctcctctgtcagatacaatagtcttcagaattccatgcaaatgcactatttgatcaacatagatttctgcatatttctctgtcttgtgggtggtatgcactggcaagaaatgagctgtcttagtcaacctatccacaatgacccaaatggaatcgtggtgccaggaggtattgggcaatcctataataaaatccatgcaaatatcctcccatttccaagatggtatgggaaggggctgtaaggtgcctgccaccttcaaatgactggccttgactctttggcaagtgtcgcattcagatatata

SEQ ID NO: 115221 - DNA, 452 bp, Zea Mays
aatctgtgtaccagaaatcgagcacctacaccaacttatcttaagagaagctcatgattcggcttattttaatcaccctagaagtactaagatgtaccaggacctaaaataaaagtattggtggtacggtttgaaaagagatgtggctactcatgttgcactatgtgatgtgtgtcaacgagttaaagccgaacaccaaagaccagcaggattgttacaacctctcaaagtacaggaatggaaatgagaagaaatcgatatggatttcatagttggactaccccgtactcgtgacggctatgattcaatatgggttatagtggacagtttgactaaagtggcacactttatacctgtgaatacaacttacacttgagtccatttagcagagttatacatgtcaaggattgtttgtctgtatggagtaccaaagaatatcgtatcagatagag

SEQ ID NO: 115222 - DNA, 1213 bp, Zea Mays
gtgattcactcgtgccctgtggtgaaactgggtcttgcttagctggctgttggaggagggtgccttggaggcaggtgctaaaacattcttggggccattcaccgagttggagtaggtaggtacgaatgtcttcaactgaggacaattattcttgtagtgactggggtctccacagtgccaacaagcattggctggaggttggctgcttgcaacagatggggtgtggagggaactttgactcggctggctgaaatttgacggagcggaccctactggcttgctgaagctcggtgctttgggaggaaacccaaaagatcgaactctctggtgcctgtcttgctgctgagctcggagaacttgaaacttcctcttaaggtgaccttttcttcttctcgagctctttccacctggatggccttgtttgagaggtgcgagaaactgaggaaatcttggctggcgaggatgtttttgagttctggtctcatccccttcaagaaacgggccatcttcttggcttccatgctgacatcattaggcgcatagcgagcagttctgtgaatttgtgaacatattcattgacagatctccctccttgagtcaactcccgaaattcttcttccttgagctggacgatccctaggggcacatgatgctctcggaaagcggcttcaaattctacccaggtagcatctctgacgatagcgctgaaggtatcccaccaggatagggccatcccggagagttgatgagcaacaagatgaacacactggttttcagggcatccgatggcatctaacttcctttttactgtgcgcagccagtcttcagcgtcgagcgggttgctggatccggcaaatgtgggaggctggagccttaggaactctcccattctatcctgatgccttcctccattcgggcgctgttctcgaggcttctagtgaggacctcaatgagtcgggtttggttggccagaacttgggctaggtctaatggcagctccgaaggtgcggggaggtgggtctcactcccttctccaccgacttctccatcagcacctaggggagacctttctccaatccctgaggcggtaggcgtggttttatccgaggccatctgctagaggggagaaaggattactactatgcatatgccatattttttttctcaaacatgttattttattcagcactccagttcattacaagcatacaat

SEQ ID NO: 115223 - DNA, 978 bp, Zea Mays
ttcacgcttggggcggattgatagcatcatggggtaaggggatcctcgccgccggtgacctggaagccactccagccagccgtaatcccttcccctttgctcaccacccgtggataaggttctcaccgtcgccaaaccttcgccatagcccgccgcgtgtctctgtccatctaccgcgtcactgtgactccctaccaccgtcccatcgtcgtcggtgaggttgccccgacgttagccacggattcacgtgcgccagtgccttcttctacctccgaccgccgcgcgtccttcttaaaatttccggccaccgctccctctccctataaattgaagcccccaccagctccgcaaggtcatcacccacccagccaccgagaatcactagcaatcgtccaccagtgagctcgaatttaagatttcccccaaatcagtcgaagaacaccgtgaaactaatttcaccgtggtcagccctccacaggtcagcccctgtcctctgcttcctcatttgagcactctcacagctctgtgatgcttaccgaaccctcaatttgcacggagtagccttagatcgccgggaacaccttcatccgtccgccatgctctcggtcaccgtggccagagctcattagttaggggaaatactctttaggtcatggatttggtttagtccaaagctgagcaccggtcttggtcttctccggccggtctagctcgccggagttatgcctcccgtgtggagcaccgtcgaggacttcgtcgcgcgaaggaatagaagaccgagggcttttatgcaatctgtcagcgacttaagaaaacaataacagaacccacttcaagttatccaaaacgttgagggcctctacgcaaacctgccccgcgggcgcgggcgcgcttctgcgtggatttgggccgactgggctaggactggcctagtcctgttcaactttttcctttttctttttcagtaaagctttgaaa

SEQ ID NO: 115224 - DNA, 459 bp, Zea Mays
ggcgggcaccaataaccctgttcctgcaggggtactatcatccaaccgatatcaatgaggccaagtgcctcaaacatcgaagccggaacttcgcactaattgaaggccaactttacaagaagggggtcagtcaacccatgcttaaatgtgtcaccgagaccgaaggcgtccaaattctgcgcgaagtccacagcgggacttgcggctctcacgcagggccctagccgcaaaggtgatctgccaaggtttctattggcccgccatgatctgcgctgcaaatcgggtcacaaggtcctgcgaagcctgccagaaattttctccacgctcgggaagtccttcgcaattcacaaagctaagcacccacacgtggccccttcagcgctggggcctagacattgtcgggcccctacccacggccctggggaacctcaagttcaccttcgtcgccgtcgagtattt

SEQ ID NO: 115225 - DNA, 709 bp, Zea Mays
gatcccagtcatttcaagaacaactgtccccagctgaagccactaggacccgcctactccaactcggtgaatggccccaagaatacctcggcatccgcccccaaggcgccctcctccaacagccagcagaacaagacccagtatcaagggagggcacgagtgaatcacgtcgatgcccaggaagctcagcaagctccgggagtagtgctcggtgagttccttgttgaatttacttccgctaccgtacttttcgattctagagcatcccactctttcatagccactagttttgtggagaaacatggcattccctctactcctctagagattcctttggtcacccgaaccccagggtccgaccttctatgccagctcaaatgctcccaagtcagaatccttttaagtggggtagtattcttggcagacttaaccgtcttgccatccaaagggattgatgtgatcttagggatggattggttaactaaacacaagggtatcatcagttgtgcaagcaagacagtcctcctcaccgaccaccaaggaaagtcagtctcttgtcaggcccagccacccgccaatgacccaatgatgttcaatctaacaacagaaagcatatcagtggtcgaagaattcatggatgtgtttccagaagagttaccaggaatgccaccagaaagataagtggaattctacatagatctgatccctg

SEQ ID NO: 115226 - DNA, 293 bp, Zea Mays
taggttaatgttgtaaggcaccttttttccaccgtacaattgctaataagttggaatataaagaattcaaaacaatagatcaccttttataccactaatgacgtttccctgatgtcaagggcattgtaattgcacgtgagggtattagagtacaactagtggatgaagacgtcattgggctagcaaatgacattttgtgattcccggtttcctataatcccctctattcaaggcatacctagacggtgtttatgtccactcaagaaaaacaaaacacatcaatatgccacatt

SEQ ID NO: 115227 - DNA, 524 bp, Zea Mays
ttgccctaggatcaacatctgcaccaaaagatgaagtcgaggcaacctcacctcttaaagcttagaagcactttcgtttcttagtccccccgacatgatcttttcctcatatggttaagcgttagaatgaggattaggctccgataccaattgaaagttgcccagagggggggggtgaataggcaagcagaaatattttcaacaaaaaatagaaacaaactagataaaaccagctaagacggtgtcaaaactggttcaaccggtttgaacgagctcaacttaagaataagatataaaactgaattgatctcaaaattcacccagttaactttggaaatgatatgttctagacaatccacaatgttcaaagtagtagatctgagaagggcacttctcaaaatccacacaccaaaaagatataagcaaatcttccacggtatggtgagagaacgaagaacacaaatagacacaatgagcaagaacacaagatttatcctgaggttcgttcacaccacaaaaggtgc

SEQ ID NO: 115228 - DNA, 431 bp, Zea Mays
gccatgctcaagttttagttatagtaacaccaggggtgttacactgaatgcctttgaaaacaaaaactttattgatgatgaagtccccagattacagagtacaatgtttcttcgagaatttttgaggcctcgctaggggtagaactttctgaggtgctctatgttccatgagttccccacttccgtgtcatccatttgagtaagccggtatgatcctggccgagtgatctcatatatgatgaatggcccttcccatagcggtgacaacttgtgtcgtccttcctccgttagaattcggcgaaggaccaagtctcccactgcaaaggaccggtgtcgcacaaatttatcatgatagcgcctcaaggtctgctggtacctagccgactaaattactatgttcaatcgttcttcctccagcacatcgatatctt

SEQ ID NO: 115229 - DNA, 535 bp, Zea Mays
gaggctgctagtttactgaacaagacatacttcagtggaggtttgcacttagcaatgcactgcttttaagttttaatgttggtttctttgtttgttttcttattttttagtaaccttgtggaatacttatgacataggaacggtagctgcttcaattgctgacatcgactttgttcagaaaagaaaaggcattgagcaaactcttgaggatggaacaatctcattcttgagcatatcttctcttcgatatggctttaagataattgatatcctaactatctcagctattgcacggtactatcagagataggttttgctcttgttattccgtttatgatatacttctcatcggagttctcctgtaggcatactgcatctcttgctacttatgtgagaaacaaaatgctggaattgaagcatagcaatgagaaaaatgtttgcataatctatggacaagattttaaggtactattacccagtcacttcatgccttcaatttttctttgacctctagctctagggaattatcacaatt

SEQ ID NO: 115230 - DNA, 502 bp, Zea Mays
gcgataatggaggggaggattaatcataggagcagtagtgcatgaacgagaagcgaaagcagctagaactgtgttgctgcacccgcttgctagaacatgatggagctatcatcacttgtcgtgtcgttgtggcctgagtcttctgcactgctcatctcagagttgtctacatttacaacattcaattacattcaaatacactttagctacatcacatcaattgcaatccacaaactagagttcaaactaaactaaactttacttcagggtttagatcaccgagtcgctagataccaggtatacaattctaggtcttgtgctaatccaaatggacctacaagtatacaaaaatatgtagtcagaacaaatctttcaaaacagaaatgcaatacttaacacaaatgttataaaactgaagtgcacaagcacacaaatcaaactgaactgcaatattactacactgtaggtatgttgattgattacaacaacaacacaatgtccg

SEQ ID NO: 115231 - DNA, 386 bp, Zea Mays
gttctagtgcaaagaagctaatctttggtactgtctcgttaaaccataaggaaatgattgaaatgtaactcacctgagctgagaaaaaaggtaatgtgcatacagatcaatagatcattaatccaccaaacatatgctaggaaaatctctgttcctttttagctttccacttgataatggttcaaatgtgtgaacatttatttaggctaattgttgtagcctaatgtctggtgtaagtagtatctgggccctaagaatttggccacctcacaaacaagcatgagattattgttcttttaggacaaaacaatctatgaatgactccacggcatccttttgtagctttgttggacaatgtgatcatgttattgaaatccaaaagacca

SEQ ID NO: 115232 - DNA, 788 bp, Zea Mays
gaagataccagtcaaactattacaaactgcgcttgattttatttagagcagataatttactagacgaataaatctcagttatggatcctcggatatgatttcccagctaacgagcaaagacggaattattttgcactaaaaacttcagttgccgagttctgcttaatttgtccgggacatgaatcacaagactgagttacgataaattcatctgctaaccaaatactcggatcagggacaaaagcaaacagaccgaatcaagcagcatcagctttgatatttaggtcgtgtttgagtcgatcgaaatcagacaaacttcattcgttattgacccaagtactttactgctctgcctggcacaatcggttggggaccaaacaccattatcccttttgcgcacgaattcacagttacccacacagcccgaattataaatacaaatgctttcgaaattcgtcttctcttaatttataacctttaaacggacacacgactcgacctatcgcgaaataaatgcgcgatatcgatgcggcgtcgagagtgtgatccttccggaatcgacgtcacgcatcgcacatgtgggcgagaagttgtgcgcattgttcttatcagatagcgcggggctccaatttctacataaaatcagaagtcttctgattttcgtattcacttacgcgcatgatccgaacatttccaaattcgccagcgacaaagattcgataatccaaaagtttcatgaaccctttttaattgcgtagattatcgaaatgaaaatggcacccaacccg

SEQ ID NO: 115233 - DNA, 739 bp, Zea Mays
cctgttatttgtgggcttcaccgagggcgggaaacatttggtgacatcaaacgaccttcgggatggggacgtctgcgagcttgttaaggggccagacgatggtgagccggtgtactctgtccggatgtgtggtcacaaaatttaaagtcgccccggcttcatctgtgcgcttctcttctcttatgtcggctactaagatcacttagcaccccacctaagagaagagaagcacacacatgcagccggggcgactttaaattttgtgaccacacatccggacatagtacaccggcccaccatcgtctggccccttaacaagctcgcagacgtcttcagcccgaaggtcgtttgctatcaccaaatgtttccagccatcggtgaagcccacaaataacgggaagtgatagactacagggcttaatctcttcttggggtccttcagcattataacatcacagccatgccttctccgtctaactgcattggaaagtgcacttctatctgcgagcttgcttcccgacccgattcaggcattccgccgatgccattctccatataagtcccaaacagagaatagggatgaggtagtcaagattgtaggcgctagtgctcaactactagcatctatagatatggacacaagtccaaatttggtgctactcggcaccatcgatatcactagaaaaaaatacatcaaagagatccacttcccaatagtactcgaagatagttcattgac

SEQ ID NO: 115234 - DNA, 594 bp, Zea Mays
aagggctaaaacagaaagatgcactagcgtcagcttctatgggacacacggcacaatactactggttgaattcatgccgcacaaagagcacaacgtggcggcacacgagatctgatccacgccagatcccaaccttcacacacacgtgagaataggtgagctttatttcagctgtcggatcgctgatcaatggccgagaatcgatcccgcgaaccattatactgaagtctaatcgcaattgtccactcacgaatcaaggacctaggacgtctcttcctaaccaaagcgcccaaccggtggcgtcgagccctcctcaccggtaggctcgccggcacaacgccacaacccatccagcgctccaccgtgcaaatttacaatccaaacgacgctacacacagatacgtgtatggtgaacctctataaggcatcttaccagcgtttggcggcctcggtgatgtctgcccatggcgtggggtggggctacgacggagacgcttctccggtgaggaatccgcctggttttgcattgcaactgtgcctgacatcgctgtttacatcccctgaccacctaagcgaacctttgcgcctcccatc

SEQ ID NO: 115235 - DNA, 484 bp, Zea Mays
ttttgatgctcggctcaacgctacgatctcccagcctcgataccttacgagattgttgaatcgtagagcaccccagccagtattttaaggcgcaaggaggtaggattgaggcgagaaatccgcacttggcgacctccccagacgtccgcccaacctcacgcagacgatagcgattctgttacgttaggagtccgtccaggtgggagctcggccggctgttccaaggatcgcgagatcctagcaaagtcactcgaaggatctggccgttaccgcgacgattatgccaactgactttgagaagagcgcgggcttctgttttgtgctcgcttcggtgaagtagggacaccagccgatctagtcctaggcgtcagcggtggcaaggagattaagcgcgcatagcacttcgggtgatgtcaagggacgtgagctcaaatagagctgttaggaagacgtgccagctcaaataggttgcttccgcctcccc

SEQ ID NO: 115236 - DNA, 417 bp, Zea Mays
taggctgccttgcagtcatgagtcaacgaggtcccaacggtctttactggtaggtgagagatagtatccagtattgaaaagatgggttgagtcatcttacctggtctcggctcagtaatggtttggcctcggtgccacttcctacattgtgcggctttctccagatccgatcagtcaggcctgtggaccatgcatctccaggatgcttgttacgtttgtcccaaccatctacatcgaaaccggcgatacgacagttaccttctctcgttgcttacaggtgtatgtcctcggtcggacggctatagcttgtgggtcggttgtccttggcttgctttcttagggctctattcgcccctgtgtcgtcgtcgctctagttcgccaccacctttcgcgggtctccatggggttgaggagccg

SEQ ID NO: 115237 - DNA, 598 bp, Zea Mays
cttcccgagtctgagctcgtgatctctcgcttacacgtcttcttgcttgccgccgtgaaggagaaagatcatgttgatgctgccagctgagctgttgatgcttccgggagttctttgttaaaaaaaatagagagacggttgcattgaaacggccattgttcagttgttcctgtgaacagacaattcccgttgcaggctgcacagaaacctcagccgggtctgtcattattgtcgccttctactgtgaacaaaacagaggacagggcactgcttgttgttcgggcagctgaacagaaagctcagagagagatagagactgttgattcattagtgcctgaaaattggccgtgaacttgagaatatgccacggctattgctcccagagagaaaagcagcagggaggcagtaaaaaaatgaaaccacaaagcaaagctaagcgtcatgtgtcatcaccatccatcaggcctgcttcctggaagcttacaaacctgaggtcacaccactaacggtgatttttatacccaaacgcacagttaactagtaaactccttcctatacgcacgcagaagcatgttgtgttgcccccaatgtgtagcgc

SEQ ID NO: 115238 - DNA, 715 bp, Zea Mays
atgtgatcaaagatcccgtgaattagtaattgggaagaacaaattgttttgtataacaagagaggacattatttaactcgtttccagctagaagatgcgtactcttagtactgcaagggaggttgacttttgtcttaatgtattctaaggcctctaacaggcaaggtactgccctgcagggtacacttgtaagaatacacatatgtgagtttgactatgattcctataggtgaaaccatcttacacaagactagcaattcaaggctttgtccattgcaaagtcgtgaggaggtgaatcctgtactgcaaggtgtatctcaatccgtattgggcctgcactgtaaagctggtatatgaaagcgtagagattgagtcaattggagaccttggctttggtggggattgttggaattaggcccactagtgtgtggcccaattcaataaggaagccaaggtggtgtgtagagatgacacaggactttagtcccatattgcccatctagataggagagaaccagcttatatgtgggagtgttccctactcttcacatgagacaaataaagggttatggaggctgccacacgcgcgcgctcgctcgcgtttctcgttatttatcgtgtgactagtgatttgcgacgatgtgcgatcgcgtcgtgacgtgctctaaacggcagtttaatttttgcctttgtttatttgattatcaaatatcac

SEQ ID NO: 115239 - DNA, 796 bp, Zea Mays
atccatgcctatttcttcccacttccatttgggcactaggaggggttgcagtagacctgcaggcttctgatgctctgccttagttcgctggcaagtgtcacaccgggccacatactgagctatctcctttttcatccctctccaccagtatctggttttgaggtctaggtacatcttggtggtccctaggtggatagagtaggctgagttatgagcttcatcgagcaggattcctcgtgcctctccttttggtatacacaaacggtccctgaatcgaagggtcccttcttcatctatcttggggtccgggagttgttccttgcgagccttttctgcaagacttgtcgtctcgatgtccaggcgctgagccttgcgtatgaggtcttctagcattggcttaatttctaggctgccactgtctttcaaacaagcattcagttgagctgattctctcttccagtcttccaagaagttggttgctttctccccgaaaggttttcggctgagggcgtctgctacaacattggcctttccggggtggtagtggatctcaatgtcataattcttaatcaattccagccatcttcgctgacggagattgaggtctggctgagtgaaaatgtactttaggctcttgtgatctgtgaagatgtgacatttgtttccaatcaggtagtgcctccatatttttagggcgtgcactatggctgctaattccaaatcatgtgttggataattatgctcatgcggcttgagcagacgtgatgcataggcgatgactttctcattttgcata

SEQ ID NO: 115240 - DNA, 471 bp, Zea Mays
ttcaggaatagaggtgctcaactcctctaactcttcagcacgcagctcctttgaacatattgcattgaagtacctactaagctgaatcaatggaagagcaacattttctggcaaaacgttgcgaactgcaatgggtaatagattctgaaaaataacatgacagtcatgagtttttagaccagacaccttgcacttgttcacatccacactcctcttaatattagaggcataaccatcaggcatcttcacagcttctagaaatttgcataaccatgtcatctcatccttacctaatgtgtaaagtgctgatggcaatgtgtattttccattcccgaccacaacatgttgatccttcctgatgcctaaatgctccatgtcaagtcgagccttctcgctatcatttgacttcccttccatacctagcaaagtccccaatatactatcacaaatgtttttctcaatgtgcatcac

SEQ ID NO: 115241 - DNA, 479 bp, Zea Mays
atcgacctctaggagttcccttagggaaaacgtggacgacggcgagtcaatgagaatcacctccatgatggccgcgctcgccgcccttggaacgacctaggacgataacaccgctgccaccgggaaggaggacgacgcaccgcccgatgggacacacttatgagccagagggggcatacttccctgtggctgcaacccaaagtcctggggagatagaggcgtcgctctgaccaccaaggttgcgtccctcacggacttgtgtggcacatacacgttggctggaaagaaaggaaaggaggagtagacaatgaataaaagaccgaaagcaggaacacgagcaaattgatataacaggatgagcgcttcgtggtaatcaccttccctagcgcgatcgacgaaggaacaaaaaattgcgacgcgacccgacaagctgccaccacgtgactccctgcaggatccaaagatgtcacggtgcatgt

SEQ ID NO: 115242 - DNA, 310 bp, Zea Mays
ttcgaccgatgagttacaaccttcattttttggtttcggcgcagtagaagtggtagttggtgcaatcctcttattcgtcccttgctttcgaatcagaaagcagtaatcaggatagacaaaaccaataacatcaaaaactctgttcagtcttttcttcccgcgggcaccgaaggcagtattcatggctttgtcttcagcctccgtataaacccccaacaaactattagcggttgcctcaatagcctcgagccattcgtcatctggctgtcaaactaacttctgtagcggcatgtatattccaaataaacca

SEQ ID NO: 115243 - DNA, 344 bp, Zea Mays
gtactttcatgtgttacaattgccatcttatatattcagggttggcatgctatgtggtattttgaggaagaaaatcagggggtttaatttgattgggccacttgtaatgaccaagtttgtgagtacagtcatgcctcttacctaaaatatggtagtatgcatgaagcaaacaatgcattcaattcatatatgcatagtcaaggtgaagaagttggaaaaacagttctataagcatgttgctgcacccattagtaatcaagacaagtatggtttgtgtagttggaaggatgtagttatcattgtttagagtattgtaattcttgtgctcctttatttactgatgt

SEQ ID NO: 115244 - DNA, 506 bp, Zea Mays
caccatttcaaacaatatgtttgcataactactcactgggtgactcactgttgtcgatatcaactgcgtgttttttgaagttgttgtctcattccaatgaggagcgttacttccaaccttgttcctagatccaggcggtcgtcctctcttacgtctagcaaggctagccaatcgaactctattctcctccaatgacaaacatgttcgattgttgtgaccatcagcaattccacacttctcgcatttcctgttcttcttctttctaccttatgcgcccaatttaataaccttttgttcactccccttgattgttcttccctttggttttgcattatttggtcttgccaagcttatcccatcgacagcaaaatccagtttctgcagttcaaaagtacagttggttttcagcatataataatatgcagtcccacattcactttaataccactattacctttctagtatctacattttgtgtatggccaccactctcattcatatctgcg

SEQ ID NO: 115245 - DNA, 806 bp, Zea Mays
gtctttttgcttactaatataatcccaatttgtgatatcttctatgccaaaaaggctttgatgcattatattatatatcttcgggttacttcgggtaaaaatttatgcatgaggagagagcaaagaattaacttatctatgtgtttcattgtatttcgatttaatttcccagatttgatacaattgttatggccacttggcgatatatatatataaatatatgatgccacacaacacaatcaaataaaatatagagccaaacaaaaaaaattaggaaggttgtgcataatatgacttcagggccttgaacaactcaccacaatccacgcgagtacaagctctagcgtatctggcgtcaacgcgtgtccggccatcagggccacgacaacacaacaagcctttgtaataagcgcaacaggcacaattatggctcggtaatcggggtacacgataagtccacgcaacatgcgcaacaggcgcaattgtggcttaatgatcacgacagacagatagtgcttgcaaagagtgcctgcagggcatgcgaaaaatacgcgactcaccgatggcgattccactcaacgggagctgtccgattaaacgagagtgctacatagcaatcacatgacgcagccaagttcgtacgacacaaatactcgagtacccactatacaatttaatcgctcggcgtgagtctaaagctcaacagaacacaaatatttagagcgatttaagtatggacaatatagactttacatgcattttaataattttctgctaaatatctgctacgagaaataaaagcagaa

SEQ ID NO: 115246 - DNA, 1168 bp, Zea Mays
catatccagccctcagcatgagaagggccaggaaatcggaatagtctgcaattgttgcgccgacaaatgctgctacttggctaggaactgacaagcttcacacaaatgctgctacttggctaggaactgacaaacttcacacttctgaactaagtctgctgtgtccttcttggctgtcgcccagaagaaccgtgctctgaaagccttcccgaccgacgttcttgaggccgcatgaaccccacaccgttcagcttcatctcttccaacaagtgttcacccatagacgtgtcgatgcatctcgtaaaaacacatgtggctccacgtctgtacaggacattgccaataagtgtgtagttggcagactgccgggcgtggagctcgacaactgctttgtcatccgattcttcttcatttttgatatacttgatgatgggtatcctctagtcaatcgagtcttattctataaggtttatgttgtccttagtcgctttgcactcttctcccgagtcttgtggaatattgggatgatgtatttcttgcacaaaaacatttgaggagttggggctctaatggaaccaagctttgacagtgtatccgctgccacattgcggtccctcttcatgtggtggaactccgggccttcaaacatatcttcaatctggcgaactgcgacacaatacttggtcatgacctctgttgaacattcccaatctttgttgacctgacttatcacaactagagaatccccgtataccatcagccgcttgatcccaagggatacaacgatgtgcaacccatgtatcatggtctcatactcgactgcgttattcgacacagggaaaagaacttgtagcccgtacttgagttgttctcctttaggggcgatgaagaggatcctggctctagccccttgcagcttcaatgacccatcagagtacatcttccagacttccataggctcagggctcttagggacctgattttctgcccactctgagatgaaatcaactaaagcctatgttttgatagctgtgaggggccggaactcgatgtcatgagccaccagctcgtacgcccatttggctgtcttccctactttctcccggttattagtatgtctccgatcatgaaatcggtgaccgctttgactttgtggtcgccaaagtag

SEQ ID NO: 115247 - DNA, 334 bp, Zea Mays
tcgtaagtttcaattctcccatcctccctttttctattttgtttttatctatcctttctaaattggtggtgtctcctttccctctcagcgatccaccatggtgctacgagagtgtcatgcccctctgctcaggagcatggcggagaagggggtcgctcgtgcggtcgtgccaaggcagagcaatagaggaggtacaagcaggattgtgtcatcaaaaagtggcaccaggcccagcgctagatgcggagggaccacgataacaagacccgacaccatagacaaggaggatgacgatgaggaacgcacagggtcgacacattcaggtgcaatcctt

SEQ ID NO: 115248 - DNA, 532 bp, Zea Mays
tgtttgtttgctgagcgttgtactggataaagtatatctttgtcgagtgcccgtgtatagacactcgacaaaccacctaacactcaaacccactatttatctgtaccgtgtcttgggtccgattaaattggcatgactcatgacgggctcgagctgtggcggacctattggacgaaagtgttatgccctcacgaatgtgctccaaagtcagaagttctgacacggtcggaagaagtttcgacatagcaaaactcgtaagaaacctaaaaaaccttccttggtgcctcggattgtccccactccccagtgggataaaactgtcggagttttgacagaagtcgagacttctcacgaagctaaaaaaagaccttattcagaccggcctgcctgatctgttggattttgatcctaattattttatactcatgaaaatatgtcttgaaaaggttttctatcgcgataaggccacctcttttatatacactaaagaatcatgacccattgagtaatctaacgtccaatccctcttttt

SEQ ID NO: 115249 - DNA, 304 bp, Zea Mays
atcatcactatcaaccatttcatagtcaacaccatctgaaggcgcaagttcgtcattaatgtcattgccttcaaggattactaagtcattctcattttgcacctcatcatcctcctcatcaacaaccatttcaatatctacgtccattccgatagcttcggttaagtctatctcaaattgcccttctagtgcatcttcttggaagaactctccatcatatgtgtccgggtctaagttataatcttcatcgttaggaacaggcaatatctcgtgtggcgataccttatacacaacatcccaaccc

SEQ ID NO: 115250 - DNA, 390 bp, Zea Mays
ccccgctcagattctttccgccctttcagagagaccatcccgtttggatggccagaatgcgtgcaattgaagggcagcagctgcttgaggatgaccccatagtcatgtaccgcactgcatacctgctcaccctggatgcacagtatgatttcttggctcggcactaccgtcagatgattgcccgagcagaagatgcagagaagcgcaaccgtcagctccatgtggatctcacttagctcaagcccatgcaactgccttggaaagtcgtgaagtcattgctgttgaagccttgaagcaagccaaggatgagcatgtctagaagctaatggaggcctacttggtcacccacaaccaacgtagagccctgcggatccaagagcccgattcatc

SEQ ID NO: 115251 - DNA, 611 bp, Zea Mays
ctagagaagttgaaagagacattacttggtgaaacaagcacgatgccaatttcttgtccttcattgcaaaccgatccatcaaaatataaaatccagggagtaacagtgagatatgatatgtctagtttatgagtgtcatcaatctgatgttctacaaaaaaagtctgctacgacatggcctttcatagatttcaatggttcataagccaagtcatattctatgagtgcataagcccatttactaattctaccactcataatcgggttttgcaacatgtatttgatcacatcggtttgaccggaaacggtgcaatgattagacaacaaataacatctacacttggtgcatgcataaaacaggcataagcataacttctcgatgaaagtgtaccttatttcagaatccaccagcctctgacttagataggtcaccacatgctgctttcctctggtctcttgcgtcagaacagccctaataaccttatcttcagctgcaatctacaatctgaacggtactcctacttgcgttgcttttaacaccggagccgaagacaaatattttctgatgagatcaaacgcttcctgttgttctgcccccaggtgaattcggc

SEQ ID NO: 115252 - DNA, 607 bp, Zea Mays
atcaatttgggaagagggggcagaggcagcgcgaatttggacttcttctgagcttcactggtggagatgaaaacacctcgtcgtggctccttgctcaatttataggcacgacggcccaacagatgacccccggccacggatagcagcgcaagcgcatgcctaccacgtcggaaagagatacagtgagggagatggaggcatgggcgacaccgtggcaaaattcactggtcacggtggccgctagtgaagactccggctgggctagggcggtggcgccacgtatgggttatccctccctgacgttatccattccctactgcgcacgaacccggatggcggcggcacaaattttggcgcaaagaggtcgccggcggtgagatttttctgccgcggtgatctgatccccaatttagttactgtaccatagcgcaccttcatcagtcacctgaaccgaccacctccctcccacattatctccggatttttgttaataacaaggctgtcttccttaacagaatatgttcactatacatcaatctacaatcttactataggattcttggatcaacacctaacggattcaaagatatagcgtgtctaaattggc

SEQ ID NO: 115253 - DNA, 359 bp, Zea Mays
accaaccttcggcttagatatgtcaccacatgctccttcccctcagtttcttgtgtcagaacagcccaatgaccttatcttcagctgcaatgtataatcggaatggtactcctgctcgtggtgcttttaatacgggagccgaagataagtattttttgatgagatcaaatgcttcttgttgttctgccccccaagcgaattcgacatcattcttaagccgaagaataggggtgaacgcatcaatcttcctggctaggttagaaataaacattcgtaaataattcaccttgccgagaaacttctgtacctcgaccttacatgttggaggtcccacattccgaatagacttgattcggtca

SEQ ID NO: 115254 - DNA, 290 bp, Zea Mays
caggaaaggatgaagtggtagtcttcaaaagtttctttaaggctggcttaagatttcctttgaacaagatgattgctgatgtattgaagaagtttgggatctaccttcatcagctaactcccaaggctattgtccggcttagcgtttatatctgggctctccgaagccaaggggtggagccatttggcgaaggcttctgctgagtgcacgagcttcattatcagacgaaagctagaggagatgggctacatgaaaattttggctgttacaattttgcctatcgcaagaac

SEQ ID NO: 115255 - DNA, 447 bp, Zea Mays
tcaaagcatctctctttggaatcgtgaagctcctcaacatttttctccagcctagtgtttgaccattcacttatttcttgcttcacttttgcaagttcaaaattttcattagcttcggcaagctttttccgaaggtcttcaacttcggctttatgtgcttcggtttgagcgttatatttcgcttcgtctttcttcactttgtccaccaatgaaagtagaatcttatctttctccaaggcttcatttctcagcttgttaacttctgaccgaaggttgccgagggctatctgacagctttcatcttcagcattcttctgcgccctcaaagcgttgctaagaattaagccctacaaaaagataggatgagcacgagaatacaagacaagataatctatttttaagttcatcacttccgtaccttcagactgttgtacgcaaggctgtctg

SEQ ID NO: 115256 - DNA, 643 bp, Zea Mays
ctcttcgacagagtaccgataaccttcgctctggttcagtctcggagacaacctaagctttcatcgtcactaccgccgaagagtagcgcccctggttgatacccgcaggatatggcatagtctctcaactcttctttctcagcctttgacaattcttgtccaattaagttttgaaagttgaaattttcttcttccgaagtatcttcggccgtctccttctctttcccaggcactgtgccatggtctcttcggcggctgcagcagcttcttctgcggccatgtccagaagtattttatcaatattagagagtgtgctttctaaatttgcatcttcggccgttgcagcttcggcagttgcagtttcagtaggtgcagcttcgacagttgttgcgccctcgacagctggtgtctttgacgccgaagctggcggtggtgtttcttcaatggcttcagtcacagtaataattcttcgttttttcggcacagcagacttcttcgttgccgagggctccttcttcttctataaaagcttcgtcagatgtggccctagtggacttagcttgataggcaagattcaatcattacctttagaatttcttccacgttggcaccagaaggtgttgaaggagtttcttcttccata

SEQ ID NO: 115257 - DNA, 797 bp, Zea Mays
gttacaggcagattaacaagttgtcatgtaaaaatctgagatttgggccctgcaaattggtctgtctggtgctctgaatgaggattccattgtacagtagctgaaaagatctcaggattcagtccccctcgccgccggtgacctttgcgcaaggattcgcgctgatcgcggcgattcgtgctggattcgggcaggatagtaccgggagggtgaaaagatcagatgaggagcggattgggtcatggggtgaagtttattaaccgcgcctgtagctgtgcgacgtggttggaccgccggtgtcgtggtggaaactccgacaaccttagttatgccacgctgtgactcgttactacgcggtagtaaccgtggcacacctaggattacaatctctgaaccgctgcaccgatgaacgccacgactgagccaccagtgaccttcttcctctctggccgccagcgcgccattccaaattcaagagccaccgcccttgggttctataaattgagcatgccatcagctctgctaggtagtcacacacccaacacaccagcccgtgccttagatcgtccaccagaacgctccaatttgggatttcccccaaatcagtcaaaactccgccgtgagtgagctcaccgtggctagctctctacaggtctgttcatgtcttccttgctctcgtttcaacatccctgtgcgctatagatgcttaacggcccgaccaattgaactggactacgatagatcaccgggaacaccacagattgtcctcggtttgcgccatcaccgtggacagagtg

SEQ ID NO: 115258 - DNA, 825 bp, Zea Mays
ggctcggcaagggcgtctcggacgaacactgacaggtctctgaatatccaaggttgtaccagcttctgggagaggcgccaccaccaatgtcccaacaggagcagcatcagaagagtcctcagccagcatatcaagcatagcacttatctctacatcactaggatccaaaggcacctcaaagtggacctgtcgttcatcatcaggaatttccccgagcgaggcaaccaaagcgctaacttctttggcagagggtcgcactctaaggcccaaaccgccatcagcgacaggtggattcgacacaaaaagagtgaaggccttggaagggggcaggttccaagccttggaaggtggattcgacacaaaaagagtgaaggccttggaagtatgtcactggggcaccaacatttgataccttacctctaagaatcatttcaagtcggttcaccaaatctacagcgggaattcttctgttggtaacccgagttgagtcagctagccctcggtatagataagccgggtatgccctgtccttcaatggctgaatgttcttgaagacaaaatcagcaaccacagcctctgcagtcagacccctctccttcagcagtccaacttcagctagcaaagcccctgcctcagccacctcctgatccgtgggagactcggtccaactcggagtgcgaacatccggctgtctcctcgaccgtggggggagagaacttccatggttctcaacaataaaccactccaagcgccatcctttgatactatccttgagagggatttcaagatagtcagtcttcctcccacggcgcatctccaaactag

SEQ ID NO: 115259 - DNA, 867 bp, Zea Mays
caacgatcgcctcatccgcagcagcaccgagctggaccggatgcctcccgatgtcatcaacactggcgacgccgtaagggcgttcttgcacattgtcaagaaggtttgcacttcgctggagaatatactggtcagaggcgactttggctgctacccggatgagtactacttccatggcacagctcgtgttgcagagatgctaagccgatatgcaaagaagctgccagcggaatgcccaaggtgcagcgacgagaagtttctggcggaggagatgcgtgttcttgaggagaccatgagcatcaagctccccaacttcctcccaagatcggcgttccatgtcttgctcaagaagaaggtggagatggtcagcgacgtgccgcaagaccttgtcagcgaggtgtgggagtacgtggaggatctagtgatgaaagttctgcttcagcactcggaaaacttcccccaggtgcagtcgtcatgccgccgcgccatccagagcctgatggagaagacacgggcacggtccgcgcagcacgtcaaggagatgatagagatggagctggtggcaggctacacggcgagccctgactacatgaagacttgggaagccataatggtaggccagaagaagttcatgggttctgtggagaacaagtccgagccatctaaggttaccctggaatgcttcggggaagtgaacgtgggtcatcttaggacgcaccctgacttagcagcgcaggcattcgacttgagggcacggctgaccgcgtactggaagatcatagtgctcaggctcgtcgacggattggcactccatgtgctccgcggtgtcaagcggctggtggagaacgatctcgaggatgagctggc

SEQ ID NO: 115260 - DNA, 335 bp, Zea Mays
tagggcgacagaagatgtcatgacagcgtacctgcccattgccctggggcaggatgcactaaaatggcctagcatctacctcgacactgcatcaatgattgggatgacttcagccgccattttgtcgtgaactttcaatctctttccgacaaactggcacagccttgagacctcaagtccatcaagcgccagagcgacgagacactccgcccgttccttaggcattttcagaagatgaggaaccacatccctaatgtcatggaggtagctgtgatcaaggacttctaccgtggatccaatgactcagccttcatccgagccatcctctaaaaggc

SEQ ID NO: 115261 - DNA, 410 bp, Zea Mays
agaaaccctacctcagactccacatagtaggaaagggtcaccaactctccaagcaccatggccaccatggaggcaggtcccccactctcccaaacaggaggcacgggggtggggcctggaaactgcctggaagccttggtggggcgggacgaagcggcgacccaaggttgcaacttgaacgtgggtggcagcaacttttgggtccgctacaaaggaggaatgacccttagcctcacgatcaaacccaaacgtaagctgccaaaaaacagcgagaggagcaaactgagagcgctgaccccggcgaccttgaccgccgctaggtgttggaaggacaccgacagtgtagacgtcccgctgtctccacatagggtagacaccaactttctcttcttggaaatgactttcctcgc

SEQ ID NO: 115262 - DNA, 886 bp, Zea Mays
ggatgatggtgttacaagtgatgatgccaaagatgatgctgccgcaacaaatttccggaacatcattgtgcagcgtgtcctcagtgctcagccagagacctccgggcagcagcaccataatttgttctagcctttcttcgtcatcaaggatcgacgtgctcgtgttattattgatggaggaagttgtaacaatttggtgagttcagatttggtcaagaagcttagcttgcccacatgcccacgtccgcatccataccacattcaatggtttaatgataccggcaaggttaaggtaacacaaactgtacacgtgcatttttccattggtatatattctgattatgcggattgtgatgttgtacctatggaagcatgctctcttttgttggatagaccttgggaatatgataatgatgcacgtcacaatggtcggagtaatacatacactttcttgcatgagggccagaaaattactttgcttcctttgactcctgctaagattgtacaagctgacaaggatagagctgcaaatacaaataatgaaccacctgttaaatctgaaaatcagcaagccattcatttgaaagctccagtaatgcttgttacaaaatttgatcttgctgaaatacatgttgatgatacttgctgctatgctttagtgtgcacagacgctttattttccaatgatgatattgctagcactgtgcctgcgcctgtgactaaccttttgcaggaattcagcaatgtttttcccgctgagatacctcctagacttcctcccattcgcgggattgagcatcaaattgatttgattcctggagcaagtttgcccaatcgtgctgcatatcgggcaaaccccgaagagactaaggagattcagcgacag

SEQ ID NO: 115263 - DNA, 809 bp, Zea Mays
atcatccgaggggtgcaaaagtgtcataacaggagttgtgatgcacatgactataaacacattatttttacttcatagcagagtagacattacaaactgataggacaaaagatgatggccagaagaccatcatattactttgaataacaatccaacagttttatttcatacaatgggaaaaaaaagatacaagccacaacagtggccaaaaacaaaaataatccaaaagaaagaaaaaaaacgaaagaaccacaaactagaagttggatgttctccccctttttggcaacaagtaccaaaaacggagagagagagacaaggatacaagaatcagtatcctccaggaggaggatatgacggaggatacgatggaggatatgaagtgtagtcagggaaaaaagtcctcatcgcgtcctcctcaaaagtggagtcccgaggtggctcatcagccgcagaaaaaacagatgccgaagatgtacgataatcaggaggaggaggaggactcgactctccccaaggacgttcatttgattaccgccctttgggagaacggtcatccgggacaaggaattaaggtacctgtagtacctatgcatgttagcggttgtccagaactcccgctcagcagagacatgaatgaattccgtctcttcccgcctgggcagccgaatgccatgcactcgcatgttgctgcccagaatgtctgcatcagagaagcccagaatatgggcaaaacgacgataactgactctgtgccagttaccctagatgaagaaatacatgactgggtactcatacccatcagcttc

SEQ ID NO: 115264 - DNA, 425 bp, Zea Mays
taaggaacctcccctacctctccaattccttccctcactctctgcctcgtgtaattgctagtcagagttcccagcgccgccaccgaggcgcctcatcatggatctccaccctccggtgcccctactatggtctaacttctgccattgggttccccgcaccccaatcttctaggccatcacagtcgccttaagacccttggagtgcccgcacctctagtattcggcgagctcctcgccacggatgcgggcaccgtggcctctagtggacggaggaaaagtgcagaagccagctacccgatccccaccattcaccctgaatccaactgtctgattttaattaacccggtcctaatcctaaccatccgcttgaggtctgatgccccagccactatgcccgcacccgcgcccctacatctgggcacgat

SEQ ID NO: 115265 - DNA, 434 bp, Zea Mays
tctatgatgaggagtttgctgatttgggatggggaagaggcgaaaatgagattgaggatgtgtttatcgttgttttgtaggtgataagtgcttatcaattgctatgagctactagcttaccacttctcgtagtttaggtgtttgataaaatgcatatttaaggacagattagttattattcaattcttgggtaatggagtaccgttggttggtccctacatagcatggtattggttctgtagatctaaatgagtgtcaagacagacaagattgacctaaatcctttgttaaatctgaaaatagaggtgatccaaggtcctatgtgtctcggttgatagtcgtcgagtagggatggcaacgggtttaaaacccgcgggtacagagattacaaacccatacccgcgaggttaatgttaaacccgtacccgcacccg

SEQ ID NO: 115266 - DNA, 587 bp, Zea Mays
gcggagggttggtcgtgcttggttccattgtagccatgcttgagcaaccagctccatccttcaagttaggtgggttggtgaagtgagcttcatatccctgtccttcagcatttttcccttaagagattgctggtatagtgccactaaatgacaaggaatgaaacactttttagttggatggttgaagcatccacacttcttacacttctcttgcttggaagtgggggtgtctttcctcggagcctttgtattttgcttattcgtacgcttgttgcgtttgcgcttctttgaattatcagagttcttgggatggttttctagcataggagcagctccaacatgacattgcttatgattttttatcataagctcatcatgattttctgcctgaagtagatcaggatggaggtgatgtcttataatgtacaaagtattgtacttataagcatcatgtagtggttcaaccctctcgttgggagggagtaatgcactcagaatattttttgaggctaagctgatcttgatatccaacgcccaagtaggatagttgtgtccatcaagagcaagttcttcgaactcgtgggcca

SEQ ID NO: 115267 - DNA, 361 bp, Zea Mays
caagaatagcttggggtaagacagattatggtgagaagaactccgtgttggatggtaatgcatctgatgatcgagtttgacttctctatccttccttgatttgatgaggtcgatcatcttcgatcttcgttcttgaagttgttatccaaattagggacatgtagttaagtagtaggtggagcagttaggctatggttaaatgagatttgtctgaatctggtttggttgtttgattccagatgggtgggataggttatgtaacctattatgtaggtcaagtggttcatgtatggctgagttgatctaagtcaccaatttaggcataagtggattagtagcatggccttatccttgtaccggc

SEQ ID NO: 115268 - DNA, 467 bp, Zea Mays
ccaaacaagcttttcaagtggaggttcaatagggatttctgaaattcagatttctgaaattcagcccttgagccaaagaccgagcgtgttcaccttgatccctagctcaaatcctaatgaccccattgacaaaaatgtgcctaactaacccctctaccgcataccagaagatggcatcgggacgcgtgctctggacatgtcaaacctggaatcttctctctgtgtgcggcagtgagacaaacccgatttctcccctctctatctcttgatccattcagcaaaacctacaagcctccacacacaaacgacaaaggaatgtcaggggaagagatctctcaacgggatcatggccataatctcaaagatttggagctaatccgtgcttgaactcgacctctctctgcgctgcctcgtgctcgacgctgtgccaggtgccagagcgcgccctggcgtttgcccgcgcacgc

SEQ ID NO: 115269 - DNA, 801 bp, Zea Mays
aaagaatctaaactcacttttaatgtagtttcgtgttatttgatgacgttgagagcgatgacttaccaaaatttaagagtatcatagccagaatcgttgttaagttccctagacgtcatgacagccaacattttattctacaagacatcactgtaagtcactgggtcaaacattcaaacaaaaataagtgacgtcaacgtatttctcttactcatacgacgtgcattctgaaatgactaggggtcaaaaattgaagcaatttcataacgcgataatgtccaaagatttgacaccttactccaacaaggatctacatatacattatatggagtggcgttctgtgtaagctggggggcgtatctatttccgaattttggacataggctagaattgaccttggcaactcggactattgtggacccattccacttgccaattcagtccccgccgtatccaaaacatcttatgccatttcatgaggtcctccaacaacctcataagaggtttataggtatgtgcccgtctttctatacagagtataattataccgcactaaaccataaaaaatatactcgaaatttaatccctcacatatgaatgtctcagatgcaataggaattgttattcatttggcgccgttagagcacatcggtggaaggtcgtacagagaggccatactaatggattccaggtcattaatttatagctacaatcttttttaaactgcagacgtgttatgttttattcaaacaatacaagctttatttataggtgggatataatcgtcgtgggtatatggcc

SEQ ID NO: 115270 - DNA, 512 bp, Zea Mays
ctctcgctatatatttgcaagtatgtggatgaggttagagctacatgatcgatggtagtggagcccgttggtgagggcgactatgggtgagggtgggttcgcttaggcgtagatgcctagtctagtaaaggacaatatgcagagatggctcttcgttgggccatggtgagggaggctatttgatcgacaagttggtcccgcatgatagtaaccaatagatcaatcatcctatttatgtccatccctccaaccatataataaaatgaaaccattatattccttcaaccaaacatagatatggaaccattctatctttaacatctagaatgaaatcaccaggtcatatcttgctccccaaccaaacacacccttagactatgtcacttgcgattctcatactcaagtttccacaacctgaaccctaatacccatctatccttcttttttgaagtgttggagtgtgttccaatagtgtgacaaaatcgatagggtcatgaaaaaaatgatatcac

SEQ ID NO: 115271 - DNA, 452 bp, Zea Mays
gagaactccggatatgtagggatatagtatgtgataaagaagaagataagcagtaggaactcacaccatgtaatgggataactatctctggtcctatatataagaccgagagggacccctaccatttcatttcaccttatcccaccttacccacaactctcagcttgtaaccctcatatcaatatcaaaaccaccataggaagtagggtattacgcaactctacatggcccgaacctgtataagtctgcgagtcatcccaacgtgctatgacacgaaccatcgagtcgtgatcaacgatgtcgtcctacccaatagcatcacgcaggtaaccacgtggtgcacaatcggatcacaaacaccgacagctggcgttaggtagggtgtgacattgataaacgatgactccatggcaatcaccttcaagaccatgatcgccttcaatcccagagaa

SEQ ID NO: 115272 - DNA, 365 bp, Zea Mays
tggtatgatgtccgttctgcatcgaatgtgtccattgtgtgcagaaagtgagctttttccaaacatgcaatttggcttgtgggcttatgaatataaggtgtgagctcccatttgagtaggttaggattgaaaggatcaagatgccaaaaagggagtgagtattgtcaagcccaacttcacctcttctgcctaaaagcatctctctctatcaattaaaagttttgcatcataagttacaatccgtgaggtattggagagtcagcactccctgctagtttttattggagcacctacacaagggtgttgctcccccttgagccatgcaataaccaagtgctctctatgagatagttatttacctctct

SEQ ID NO: 115273 - DNA, 432 bp, Zea Mays
cttcattctagtccaccaatacaagggcttcagatcatggtacattttggtgcttcctggatgcatagagaatttggagagatgggcctcatccaagattttcttcttgagatccttgttcttaggaaccaccaatctgctttcaaaccataatataccctttccatcttggcgaaaacatttatacttcttagtcttctgatggaggttctgcttgataatttgcactcccttgtcactgagctgggccttgatgatctggtcttgcaaagctggctcaacggaaatgtgagacaaagcaccagaaggaatcacttcaatctgcatcttgctcaactcatcacacaaggtgttaatgcgagaatccatcagaacacaattgcattgcaacttccgactcaaggcatctgctaccacattggcctttcctag

SEQ ID NO: 115274 - DNA, 564 bp, Zea Mays
ggcgaggcgggagtgatgcatgcatacaagctttagacattttgtgggcaaagaagagtgaggctgatgcggagaagcaacaaaagaaagaggagtggtatgccaagacatttgctctagatcaagagaggcttcagttggaacaaaagaggcttgcaattgaagaaacaaaggaaattaatgaacaagagaggcttcacagacaaagaattgctgaagaagagagaattatgaacatagatatgagttgcatggctgagatgcaaaagaaatactacatgagcctacaagttgaagtcatggctcgtcgcattagcaactctggttgaatttaaaatattgcatttccttaatattttcattagttgaattatattgttggctaatgtgtgcttgtcatgaacacgctactcattacactattattgttggatattttacacttagtccatgagaataaaaaaatggtattatgtgtgatgggattattgctggtgaggtgtcaactatatatttgttgttgggtgaaattggcatgcagccatggagcgtaggtaccagcta

SEQ ID NO: 115275 - DNA, 485 bp, Zea Mays
gttgatttgtaagtatgatatcttccctttaatgaagaatgacattgccttctctgtgccgattgttctgcttcgtaatcagttaatttctgccgtgatatccattgctcatgatgctctatatctgttatgtttatagcataactcaaagttcttgaatcattcctccgcccaccttattcgtgaagttgattcccttggaatagtaagtaaataactcgggcatcatatcaacgcttttagaggtagctgccgagtgacttgtagacgatgtcagagttttagagataactgccgagcgactgaagacgatgtcggcgttttagaggtaaccgccgagcgactgaagacgacgtcggcgttttagagttaactgccgagcgactgaacacgacatcggagttttagaggtaactgccgagtgttttgaagacgacgtcagcgttttagagataaccgccgagtgacttgaagacaacgtcggc

SEQ ID NO: 115276 - DNA, 706 bp, Zea Mays
ggtgggtaattagaagtgaggaagggtgcgctaggcgcgtaactagaaggcagatcagggagagcctttaatttatagtagctacgtgagtgcttcgcgaatttgggacaagaagatctcatggccggaagggaggtgagtcactagagggcaactgtcgtggcgctcggtgaggtaaagcccctcgcggtaaatgggttgtccacaatgacctattctgacgtggtatccttgcggcgagcggcggacgccgatgaggacattctggtcggtcgcgaagcaagtggttatggtggccagctcacaaacttatccatagtcacgatcttttcacttgcccggtaatatccgcgttgatccgggcacgaatcttcatggcgagctcgaatcacggcacccgatcaccgatggtgaggtacactgcaccaggaatcttcttcagtgtactataccatggcaatgttcattcagcgcgcctgaccgagccatttgagagtcatttctcttcgacttttgttcaataacctaccaagccgaccatagcaaagttgttgtccatcatgccagctttaattttgttatagggttcttgatcatacctccactcgatcaagcacaattcagctctcaagttgatctaatgccactgtcagtctaaacttcaggccaacccccgactgacagcccaacttccaggccattttgc

SEQ ID NO: 115277 - DNA, 630 bp, Zea Mays
tctattagccaaatattcttgcaccaagtctctggtactgatctgcttagctaccactctaaattcaacttcggccagctgacagggcgaccccagttgcatgttgcataagggccaggtcattctgaagctcaagctcagaggactcatgaccattatcatcagcttctccctgtttttctcatcagccttcatataaaaccattcatttttccagccagttggccattttgtgcggtagctaaggactggtgcctttgtatcctttcgatacgcaaaattataacaaccaaaattttcgtgaagaccatctgccctggccttcgtctgatagtgcaactcatgcacgcggcagaaagctttagcatttgggctcatcccttggcttcgaagggcccagataaagactctacgcctaataatagcgttaggagtcagctgatgaagatatatttcgaagttctttaggacttcccctatcatctcattcaggggaaatcgcagccccgctctgaagaagctcttgaaacccacaacttcatccttcttcggcactggggtagtctctcctccggcaaatcaaacaagtttgctttcagcttctccaaaatagcccagtttcatcatcat

SEQ ID NO: 115278 - DNA, 556 bp, Zea Mays
gatgctctatattccatgaatttcccacttccgtgccatccatttgagtaagccggtatgatcctagccgagtgacctccgataccatgaatggcccttcccatagtggtgacaatttgtgccgtccttctcccgttagaattcggcgaaggaccaagtctcccactacaaaggatcaacgtcatatagccttatcatgatagcgcctcaaggtctgctggtatctggctaactaaattactgtgttcaatcgctcttcctccagcacatcaatatcctctagcctggtagattctacttcagctatgcttttgaagaccagcctcggtgccccgaacctgagatcggcaggtagcactgcctccgaaccgtagaccatgaagaagggggtgtttccatgcagagcttgactgggttgagttcttaggctccaaaccacataaggtaactctcttatccactttcctgcgaacttttcattcttgtcgaagactttcttcctaagtgcttccagtatcattccattagccctttccacctgaccattagctcttgg

SEQ ID NO: 115279 - DNA, 1216 bp, Zea Mays
cctgattctaaggagagattatctgatgcatatatattttcatttttatcttctatgatttttttggtgggatttacaagttcgttttgtttgagattcatgatgaaagggaaggcatcatttagctggcaatcatcttattcagttattatagcctagttactgtgaatgatatgccgttacgtcgccaatgtctgaatggatcgtcccttgagctgtgtgccatgtttgttgtactctgatcttgtctgattgtccatgtctatctgatcatctgtatgggccggtgagggggccggctggctggcgtttccatgaggtgcgaccaagctcaaagccccggtctgtagttccgcatgcatgttccttgctcactggggctccgccgctccgccccttcctcgcctacattgtttcgttcccctgtgctgcttgctgtcaccattgttttctgctcttcacggctgtcagtctccggcggtggcgagcatcggtgtttctggtcctcacgtttcgctgtttgtcaatttttttccatcgaatttcctggatgcattattctactgtttattgaagagaggcaatcgatcccgttacattggactttccaaacaaatcatgtaatcacttgatttctattggggatctattgaaagcttgtctctcattgctaacatgtatgaaggggtaaaaattcaaaattctgaagctgtttgaatgaatactacttgtgaaggtctcagcttcttgatacagtgcacgattgcttagcactttagttcttccattctcccctctcacggaaatgaatggaagaaggattatagtgcctcccgtatatccgaagaacattcaagtcataagcaaaaagtaacaccaaatgcttggattaatgtcacataaggcagtcgatattagcaaaacaacttaatatactctctccgttctaaaaaaacttcaatcactgtcctattcaaaacatttataaattattatctactttttttgttatttattttattgttaagattagtttaagcatgtattgtacttttacatgtttacattttttttgttaagaatagtttaagcatgtatgtcataacctggattaatgaataagttaatatttaaatgagcttcggcatcatattaccttcagaagctctcttttgatgaaggtgctacaggcacaagattacgaagtggccgatct

SEQ ID NO: 115280 - DNA, 1007 bp, Zea Mays
cttgcattgctcgactcgaggcgccccagcgctggtcgcctccgtgccttccgcggtgttcctgggcgcggctcctaggctcgctcattttacttctgctgctcctgtgctgcctcttggggggcgttcctttacggcccggagcagcgcctagctgcttccgccattgatccggcaaccccagctctaggtttgctttgctctcgtgtgtggtagcgattctggtgttgggggggtgccaccaacagttacaggttgtcgccacgccgagggtgtcgtcctgcgttccttttttttatcttctctccgtgatctctctagctgcatccttgcccccccttcgctccttgctttcttctctgcgctgcctttggtgtgttgccagatagctcccgggacttcaccggttcgctaaccggcaccggcccatagtctgcggacaaacaggggccagttcggcctatttcatttcacaaaagggggcaaagattaggcggcggaatcctgttctttcccgattccttttggacatactgctcgagaggaagtgaaagcgcgcaactttggaggttccgaggagggaggaacacatcccttgcagctgcatgaggaggcaggcattgatacaatgagagatgacggttcaagcaagaacaaggtaagcgtgtttccagatcggctgctccatcttcttcgtacccacgtctctgtgcccgtctctgatcctgtttcggtcgtgattggtgcgcaaaaaaagctgtcctggtccaagacccttgttaggaagtggttcaacatcaaaacaaaggcgaaggacttccattcggattatgcagctgaggaaggtacattaacattcatctagcagcaccccaccacgtcttttctcactatctgattctgatctaacagctaagagtctgcacataatattcggcatggtttctgttatcaaacgtcttgttttaccacagtaggttgcagtaggatcagaatgcctgttcttt

SEQ ID NO: 115281 - DNA, 533 bp, Zea Mays
agcacgggtaggtaaaaatcttggcataggatcaactcgagctcgattgcggctaagcttgtcgtaccccccagcttgtcggtcgatcggataactctcacctccgtcgagctgtcgccgttgcgcgccacgtgcttaagcgctggccctcatcatggtgaaccatggggtacatgtccggtgaaagccacctgtttcacacaccgagctctttttctcctccagccgccagcgctcctcgaccgaattgatcaccaccgctcaagtatcctataaattgaagcctcagcatgttctactaggtaatcgtgcgtccagtgaaccaactcgtagctccgatcgttccccacagctccccaatttgggatttcccccaaatcggttgaagaacgccgcgaaatccagctcgccgtggccagcccaaatcaggtccattctcgccatctgcgttcttgtttcggcattcttacttgctctggatgatcgtcgacccgtccaattaagctagaacctcgttaatcactgggaacgcg

SEQ ID NO: 115282 - DNA, 328 bp, Zea Mays
caccaatcctccactgttagtgatgattaacagcctagtggcgatgacaaccatatcattgaacaacaacattgaatctcagttccatctccccttatcagagcaagcttatcaagattgtcaagcccttcaagattacattcagacacttcaagtgcagccatatactaaagactcctgccattatatttggggaagcagaaactatacatcaacaaagttctacaattttcccttcaaaaatgtgcagccccaactccttttatctggatttgggggactaaatgttccaacaaacttagagtttttgcttggctacttcttatcg

SEQ ID NO: 115283 - DNA, 391 bp, Zea Mays
tgttcatttttttctgcattaataattatttcccgtagtaaataattagcagaaaattattaaaatgcatgtgaaggttatattgtgtatactcaaatcgctctaaatatttgtgttgcgttgagcttttgaactcacgtcgagcgattgaattgtatcgtgggtacccggacatgccgatcaggctaaattattaaacagctgagttttggcattggctgcgccctggcaacacgacgcagtatttgtgtcgtacgaacttggctgcgtcatgtgattgctatgtagcactctcgtttaatcggacaactcccgttgagtcgaaccgccatcgcggagtcgcgtatttttcgcatgccctgtaggaactttctgtctgccgtgatcatcg

SEQ ID NO: 115284 - DNA, 546 bp, Zea Mays
gaaatttgctctgtggtcttttcttttgttgccttttcttcaatttccgcaggctttttctcagcgggctctgaaggcccagcttcggtaccagcttgaattactgcagtttcaattttggcctgctctgtttcaacttcagtttgcgctttcgaagcttcgacaattttccttgaaggagtcgagttcaaagtctttattgtttctagaacatctagtacatttgccatccttctcctcttgggagttgtggcagaactcttttgtgccttcggcgttgttacctctgatgaggggcttaaaatttctgacacttttgtttctccaatatttgactcttcagccttacccttatcagtcttcgtcccagctagctcagctgagggtagcttcggcattgtagttggctcttcagtcctttgtgcaggaggagcagtttctcttaattcagcagctaaagaggcctccccaccaaactcaggcaccacgactggttcaatataacgtggccggtgggtaagtaccttcgtctttttgctcgcagcc

SEQ ID NO: 115285 - DNA, 380 bp, Zea Mays
agccggacaggtggagataagaaagattgtggcaaggaaaagaatttatccaaaatgtttaagtcttgatttgtcacgagattcgctttgactgttatatccttccttgtcgatgttgatcttttcttctccggtcttgatctcattgattcgatgttagtgtatattatcggaattagggaatatgggtgagatagactacatgatataggtcaaaattttatttgatgttaggtggggatagacagattatgcaatccatcataactctattggttgagttagctcttttgctcatgggtgagttggcttaatgtgctaagttaagttaacatctggttagtagggtccaagtaccactaatatcactgctctgctta

SEQ ID NO: 115286 - DNA, 311 bp, Zea Mays
gattgataatagcaacctgggatcacgtcgagatcttttgtttgctttctgtcccgttgaattggcctcttacgttcgtggggctgggataaattaaaccacacggaggaagttccatgggcgcaacaactcaatgataagaaaataaaccggccaatcatttggtcatgcatgcaatgcaaagcgccggtaactaacatacacatataattgtgccgcccatatggcccccctctcgagagggacttagggatatgtatacccggccctcttgtgtttgtttgggctggatttgttaggccagaaccaat

SEQ ID NO: 115287 - DNA, 305 bp, Zea Mays
gaaccaaaggtaggagggcgcgtgggatctacagaagcgcgtccacgacggatgttggtgcctgcgtcatgggtgatggaggtgacaagtaggagcaaaggattggggaaagtagagggagaccaacacgaatgcgagggcgacacgcctgtgaagaggaagagaggacgacggggcgtgcaccggtgtgttgaggcaagacacgagtggctatagctaggcctgggtggcacgtggcctcggtcaggggagaggatcggctggtgctgaagccatgcacatggatggtggcgtggccagaggcc

SEQ ID NO: 115288 - DNA, 600 bp, Zea Mays
gccggtactccgtatctatctcagatgagtatgcaaatgtagatatatctaggaaacaaaagttgattattcagaaaatctgaaacgacaatagattgcaaaaacaaaaggatgctctctgaaatctgatgttttttctttacaaccaccacctatgctgtcatagaagaattttgtttgaacatgaacctttcacctttttacatagaatagaagtcctgatacacctattttaaggaaactcgctaccaaaatatccagagtgtcatgtttacgaattacagtggtgtctaatccaaattaaaatcataggcaaggtaatctgattgatgttcagtgcatagaaacactttttaatgagaacaccactgaacttctattatttcaagggacacatcagaagttattagcatcataatatagtaagtcggaaaagatgtcccgggatgggactcacggactgtacatgttcctaaatttgaaacgctaaatgctcaccatctcttctgccaaaagcatttttgctactctcacatctgcagttgctggagcatccaacacctccctttattcaaccaaacatttaaaacataagtaaaa

SEQ ID NO: 115289 - DNA, 598 bp, Zea Mays
aagagtccaccttatgctgaattctcatataataatagttaccagtccagtctgaagatgtcaccgttcgaggctctacatggcaggaaatgcaggactcctctatattaggaccagaccggaggaagccagttctttggacctgaacttattcaagaggcagaagaacaagtctgtataatcagggaaaacttgagggtagctcagaccaggcaaaagagctacgatgataatagaagaagaccaccggagtttgaggaaggtgatcatgtgtacctcaaggtgtcaccacttcatggaatgaagagatttaaagtcaagggcaaattgtcccctcgctttattggaccattcatgatctttaggcgagttggggagatggcataccaactcgagctacctgataatctatttgatgtgcataatgtgttccacgtgtctcaacttaagaagtgtctctgtgtccctaaggaacaattaccaatggaagagcttagtgttcagagtgacttgacttaaatggaatatcctgtcaagattcttgatactttgactcgagttacaagaaataaggtgataaagatgtgcaaagtacaat

SEQ ID NO: 115290 - DNA, 423 bp, Zea Mays
gcatcgggctctgatgtcaaggcgtcgaactatagcctagtattattctcacataaacgtccgacctatattgttcactagagagcattggaatttaggtatatcatatggtaggtttgtcctctatacattgacgcatccgtcatcaccacaatcatatctgctatattggactgagttttctcctcaacatcgagagaggcaacagatctaaaattgatatctctgccctcttgtgtttgagagttgtggtgaaatcccttcatgaaggaggcaatttagcaataatgccactagccacaaacttgtcgggtaggttgatctttagcttctcaagctccattgtcatgcacggtatctcatgagctgataggtatcgtgttatattcggtactagggtggcccgatcttcacgacaatagg

SEQ ID NO: 115291 - DNA, 408 bp, Zea Mays
gtcgccggcggtgagttagctgcgctgtcggtctgatcttcagcgggcactgtaccatggcaagacttcatcagagcacctgacagtccatatttggggtcgattttctccaacttttgtgtggtgactaagccaaccttctgtaacaaagttgtaaagctatagttaatcttcaactttgccacaatgcttaccatcaaatagtcactgaatcccattcaaaatcgagctcaaagttcatctcatcacactgctgctgaaagtccagtccagaaataacctgacagcctgattttgagcagaattatctccaattttctcacaagaacatggtttgctctcttcagcaaaattgttctcctataattgggctacaattttgatgtggtgacctagggcaaaatctct

SEQ ID NO: 115292 - DNA, 488 bp, Zea Mays
ggtcgctgactttgttttcaagaacattcagccgctgaaagacagagcatatctggcctatctgtaccgaggcttggctgattcaacccgggtgaccaatagaagaattcctgctgtggacttggtgagccggctcgaaatgatactcagaggcaaggtgtcgaacatcggcgctcctgttgcatactcggcctggaatctgcctccttcccaggtctttaccagtttcgtgtcaaatcctcctgctggtgatagcggtttgggctttagagggcgacactctcccaaagaagttagtgccttggttgcctcactcggagaaattcctgacgacgagaggcaggttcattttgaggtgcctttgaatccaagtgatgcaaagataagtgctgtgtcggatatgttagctgaggattcttctgatgccgctcctgctgaaacactggtggtggcatccatccctgaggccggcaaagctttggatgctc

SEQ ID NO: 115293 - DNA, 672 bp, Zea Mays
cacccattcaattcagtttgtacaccaacagacttcattttttgatgttcgcgaactttcaacgttttaggttgataaaactgtaaaattgtattaaggttatagttccttcatagtagaattagttcttacattgtgtgggcgagattcagaggacatggtggcaagggtgacagagcaccaaaaggtcaacatgacttcatgcaaaattttagttcattagatctgctattataagcgagctcacatgaataatttgagggcttaacaaaaaatcacattaggttttatatatatagtacttggtaccatgcaagtgacgtacatccagttcagaaatatagatgaaaaaattgccttgatcaaatacctttgcatacaattctaaagattcagaggaagcatgaaccgtaaagaaaatctttatatttagatttatcaaaatatgttataaaaatagaaaaggttaaaatgataagaattaaactaatgtacttttggagatagtcaaatcaacgtaacaaaacttgaactaacgggtggctgaatgcgttgaccctggttcatatattttatatagtcattttgtcaaacacttgacatgcatacaacactacagttcatgtctgaagcaatacagcattacagttcatgtctgaagcaatagagttg

SEQ ID NO: 115294 - DNA, 1365 bp, Zea Mays
ggtttgctgtttatttattcattctcagttttggaggccgaaaattcgatcttggcgctggtctcagtgtttcgaggcctcgaggggttgctgtgaagaaccagaggaagataaaaaggtggttttctcgccggttttccttggttttggggtactgaattctgagattgttctgaggcaggggtctgtcttgctggagaatgaagatgtggaggtttgtgtgctctgcgcgtttgttttggtgaagacaactagctggagtaaaaggaagaaaaaaaagttccgcttcctttcttttgcgtgttctgatccttctgagatatcccttcctgccgcttcagagtttcatttgtttccgactcggcatcggcatctcgtataaaccgaggagacacggcaatttcaagggccttcgtttgggaccaacagaataacctgttcctgcctgcaattttttggttctgaagactcaaagattggattgagtgatctttgaaaccaaatcttccttcggtgttttttggcattttgggcactatctgtgaagtgtagcaggaccgcctctgcttttatgctcggtagacttctgtgatcaagtattcaagtactggtaaaaggtacttgccaaaaaccatgccctttggatgctccgaattgttatatttatctaattttagttggtgattatagttcttatgacttcttgtctcatatatttacacaaaggaaaatcatgcaggtagaacgtactttgagtacaaatgcttctggcatgagtatgtcgaaattggcatttgcataagtggggtccaactgttttcttgtctcctccctgtttgttttcttcttagacaactgtacttttgtgaaactagagtttgaaactgttcatcagagtttggaagatatgagcaaatatgagtagtggggacttgtgagtgcagaaaatgggaagcttttctgtgtttgtatttctaatctggatcctactacaacattattcttactcgcttcatgcatttcttgctttcagattataagcttgtctaaagcaagcccttagaaggaaagttatctgaccatgttctcagctatcatggcaaagaagaattacaaacagcattccaaatctgagaaaattcaggggggttgtatgtctgggctgattcgcatgcttgatttccgtcgcagtccaaaacttctttcagacgggagaggtgaggttttcaccaacattcagtttttatgtggataagatggaaatgttagctgcaatatagcagtataagctaattttaattgaaataatatgagattccttatttatgtggtcatgcagtcaaaagagataaaaaaggtcttgac

SEQ ID NO: 115295 - DNA, 352 bp, Zea Mays
attcttgggaagcactccaaagtacacactttccttgtcccaattacttccggatcgtcggacaaggaagtcaggaaatcttttttctatgatggtggagagtgaggctgccttgcgagtgcaggacatccgtgtggtgtgtgattatgtcgacgtgttcccaacggagctaccaggcattccaccagagcgtgatgcgtcttttgaaatcaagttgatttcgggtacgcaacctatttataatgccccgtatcggatggctccaaaggagcaggttgaattgaagcggcaattggacgatctgcttgctaagggtttcattaggcctcgtagggcaccatgggctttttcg

SEQ ID NO: 115296 - DNA, 760 bp, Zea Mays
gtgtaatgtaagtaatgtagtaatgtaatgtagtaaaaagggaaaaaggatgatttataatgggtcagcctttgagtttgtgaaaacttccctcctctatgtaatgaagaaccttggctggtctgaatgaatattgcctctttttataagtgtttgatagttcgcttttgcatatgacgttgctggcgttattggaaataatcaccgagcgataactgatgacactagcattttagaggtaacagctgagtcatgcttggcactgtcggtgttttagaagtaacggtcgagttatgtttgacactgtcggcgttttagagttaacgactgagtggtgcttgatgttgttggcgtttttagaggtaacagtcgagttatgtcggaagtctcgttttcccgagtgatgacttggcccttttcagaaatggcacccaatccgggaaaaccccatttatactcatgccgacgtgcacttttgatttctgagccctaacttcgcatttctgcctcgaaccactttttttgcttccctgaaattctgctccccttcgtcccggcggcgagattgcaatggcgccgaaacggaagaacctgagctctgctgcgacaatcattcctcccatcgaccctaacagtcagttgtcgttcgtaggtaaccacatgtctgttgtttcggaatcagatcttcttcatcttgttgatgttggggttcttcttccaaaagagctctgctttggcggatttatcgcggggtcactgt

SEQ ID NO: 115297 - DNA, 432 bp, Zea Mays
agctgagtcactgccatacccacttgtcgcgcggtcggtaaaatatcgtcgccggtgctcgccgtgatcgcagcaagggacacgtagtcgcctgattcaccacattgtcatgatcatggcatcccctagatagtgacggtcgcaaggtgaacgcatgcgctccacagtgagcctcggtgattgcctcaccagggagataagctccactctcctcccaaattcggagctgccgcctaaagcttctataaattgatgcctcactctttggataagcttaaaatgatatttagaaaccttgggtgaagtttgacttgatttggacaatgtttgatacctaaaccccaaaaccctaatcttctaggtaatggctgccctttgaaataaagatctgactccaaaaaccctagtttccttgagtaccgtgaaggaaaa

SEQ ID NO: 115298 - DNA, 560 bp, Zea Mays
ggcccaggtacgttggcagatggtatcagagccctaggcccgcatgtttaggaagatgggatgtcacaaaccatgtgtatcctgggttagtaccacctcgtttgcgggagggggccatggccggcttataagggtgagcttccttcctctctcagtctgggttttgagatgtgagtgtggggctcactgctgaaggccatcccatgagtgcatgaacgcccaaatgcatgtcgagtgtgggctttttggtggactagcgcaggtacgctgacaaggatggtgagagaggatggcccacaattcgtggttggagggaggagttcatgtcgtaggagtgtggcggccacgtcgtgcactgaggctcgtcttgcagaacttgaacacgagttgtaagaactccattctaggtacccgataccccactctgatttgtcataatgtagatagaattggaaataatccaaaaatgtccattacatatgtgcattgtagagaaattaattgcttaatatggaggaggctgtacaaaattataattgaattactgtaatagattagaa

SEQ ID NO: 115299 - DNA, 510 bp, Zea Mays
ataaaatgtgccacaaacaatgtttcatccaagccttggttatgcatcgcagttgcatacctcacctcatcgaactccttcagatattcctccaccgacctcttttggtaaactgtcatcaggttgttcatcgcctgtgaatattcatccaccccaaacttcttcatcacagcatccacaaattcctcccacatccctaatccatactgcaacttaaaaatctgaaaccatcgcaatgcattctcgtccatatgtagtgaggctgatgtcacccagacagcttcaggaacacgatacatcgcaaaataatcagcacacttcctcaaacagatcttcggctccaatccatcaaaccttgggaaggtccactttggtataggcataggtggatactccttcgcatctccaccaccattcccacatcctcgattgcgaataggagaagaactgcgataacttcgattggcgttcgactcgtgatgtcgaggttccccgcgagctcgctcctcc

SEQ ID NO: 115300 - DNA, 505 bp, Zea Mays
gtgccttttggcatttctacccctatttttaagtgaaacggtaattttgcccatacttctttgagtttggtgattttacctctgtgattttaaaacgaaaggacactttactgctactgtatgaaatgcacctaacgatgttttgaataactggacaattttgccatatatttttgcccctgttgtattatgatcattgtgtttttatccctatttttagacaggcagtttgataattttgatacagagttagacaatccaatattatttcaactaacaatacatataaacacaaattcatatgacataactaattaacatcacacatatcacagtcctcagcagcttttgcacatcgacccagctttggcaagcatgatatgatgaccggttgcagttgatttgagggctcatatttcagccattcaccgtaggctatgcatcagcaaacttgcctgctttagtcattctcttgggctcgagccatcgctaatctcaagttatt

SEQ ID NO: 115301 - DNA, 473 bp, Zea Mays
acaagtccccaacaggcactaacaaagatgatttcctatactatctcccggacaacaaagaaatatccgtttgctgggagatagctaaaagtatgggatttccgaagcttgaggaaggcctttcggctatgtcgaaggatgatcttgctgatagccttgcatacaacagtataaaggtataggagttaactttaaagttggaaatgaattatttcattgtcacgcttaattctttctatttctttgcagggcttgattcttagcaatgccttaagggcacaaaagagcgtcaaagacgaaagttgtacaatagctcttagcaacctttgctcagaggtaattgagctgagaaacgaaggtctagagaaagacaaaattttaatttcattggtgaataaaatgaaagaagacgaagctaagtacaatgcttaggcaagcccaaaaagccgaggttgaagacctttagaaacaac

SEQ ID NO: 115302 - DNA, 593 bp, Zea Mays
tagctccttcttcttcacctattttctcatttcacttcccatgccattggttgcccattaggtcaggggctaggagtgaagggtttaatactttaggttgtcaggtttatagttcaatggccaataactttgaagctatgggtaaaaggatgtcttgatgttgtcgtacgggacactaagacaccattgtttggggtggaagatgtattcttcttctaggtatgactgagttagaggtgggtgtgacacaggacgagcgataaaatggcaacatatcgtcgttgtcagtcctatgtgacaaaagtggtgacaacacctagtcatgagtatgtggctttatggaaacattggcacctaggcgagatatggtgcataaggatcaaattggatcgaggtaagcaaaaatcaagaattagaactagatggatgacgattggtaggtcgttattttgtctaaaaagtattttgttttctactaccaatgatggactctatctaggtttccttttaaactctaaatcgaataacttgcctccctcagctctcaaaactaattaagttacctttgcacccctattagaagtggattttaa

SEQ ID NO: 115303 - DNA, 387 bp, Zea Mays
aagagaacctaaacctcctaactgaacaacttgtctatacataggaagatagaagcttcatttcgagagaagttgaaccatcttcctaacagtgtgtcacaacttggagaagctactatagcagtattggacactgaacatcaagcacataaattgaaatggcatactggaaatgaaacttcaacgaacagctatattaatcaagcacactgagtttatgtattgcaatgtcttatgtattgaaatcaagcaaacctttgtactatacataaacaaatctctgaatacagtgacacttgaacatgcatgccactttcaagtaaaataaagatttttcagtactgtaggttggtacaaaaacaaataaatgccagtctaggaaaattg

SEQ ID NO: 115304 - DNA, 454 bp, Zea Mays
ccacttccataactattgcttccatattattgagcatacgaaggttgagttattccatttcccagcacatttcttgtgacatcaaatgagtagtgatgctgttcacttgacctttacggctcaaagcatctgccactacatttgcttttcgtgggtgatattgtatttctaaatcatagtctttgattaactcaagccatcttctctgtcttaggttgagttctttctgtgtgaagatatatttcaagcttttgtgatcagtgaagattttacacttgtttccaatcatgtagtgcctccaaatcttcaaagcatgcactacgacagctaattccagatcatgcgtaggataattcttttcatgcttccgtaactccctttataggcaatcacttttccttcttgcattaacacacatccaagtcttagatgtgatgcatcgcaatacacatta

SEQ ID NO: 115305 - DNA, 621 bp, Zea Mays
ttacttcgggtaaaactttatgtttgaggagagagcagagattatttatttgtgtttcataggtatttcattaacttcccagatcttacaagcaccatagagcttgtcaaagttgttatggccacttggcgatatatataaatatattaagccacacaacacatgtcaaacaaaatatagagctaaacgaaattatttacgaaggttgcactatgctgtgacttcaggggcttggataacccaccacattccgcgagtacaagctccagcgtatctggcggcaacacggttgcggccatcagggctacgacaatatagcaagccttcgtaataagcgcaacaggcacagttatggctcggtaattggggtacacgataaatccacgcaacgtgcgcaacaggcgcaattttggcttgcgtcagacagacagtgcctacaaggcatgcaaaaaatacgcgactcagcgatgacggtctaactcaccgggagcgatccgattaatggagagcgcgacatagcaatcacatgacgcagccaagttcgaacgtcacaaatattgcgtcgtgttgccagggcgcagtcaatattcaactaatgtcataactcagccgattaccaac

SEQ ID NO: 115306 - DNA, 475 bp, Zea Mays
gccagagcagcatggctagtacacgtggctctcatgcccaagcaccaaactagccacaagcacaaccaactttgaacctgggctggttatatgggcaaggcaagcagataagcttgcatttattaataggtatgcaacagtccagctgatatttcctacaacaaaaacttgacctctagaacccttgttgcccattttattccctcaaataaccagcaaacaaactttaatgcccccaacacacaaatatcacttggtccaaatctataagtagtagacaaaatcacaaaatagatatgatctcttctgttcacagctcccaaacagtacaaaactagatattttggagcagagttgaggtcaccaaatccctggttttgtaccccatccatatcccaactcgagcacaccagtggagtacatcaaagggagaaaaaccttcttcagtttcctatcccaaacactgaatcaactt

SEQ ID NO: 115307 - DNA, 562 bp, Zea Mays
atttgctatacactcttgttactgaaaagcacaattgagaatccatccagtttgagattaagtcgcttagtaatatgttataatcaatgtgcagtgttctttttagattgaattttcaattgttgataggaatagaaataatatgttatatttagtgtgcagtgttctttctagattgaattttgaattgttgacatagaaataaaacaccaaaagataagttttattcagtttttgttacaaaagactctgaaaggcttcttagtatttttggttacaatggaaagatttattactgtagtctagcataagagcggtgcaatttcatgtgtgtatttaccttttaatgttttggtgaatgttcttctattagaaagttacagcagcctctggtgacatgagaaaaactctaggcgattgcaggtacgacactcttgttttttggtgaaataatcattttctctgttcttagcctccactgccagagctgataggtgtatcaaacaactagaactgaaggaactgtgaaccattttgatatgcatggaaaccaaggttatta

SEQ ID NO: 115308 - DNA, 434 bp, Zea Mays
ggtttaaatgttaaatatgacctacagttggatcgtgatttaaagacctaagagactcggttgtacactttgtacctaaggcttgcttgcacatcaattttggtatgaataacgtgctttttaccatagctctatgatttagttggtagttggtgtagccttttgtacttaatagtgttttataatacacttcatatatacgaacttggttatagaatcaatgcacatatcatacagtaagctcaagtaacttatattagatgtggtgttaaggtaattgattgactagtaatgcaacccaaacttggttcgtgtggttatgacttgatgaaatatgtgtgtttgaataatagggatggagagatccatgttgtaggaccaggctcggggatgcagtaacaaagggactaaggctatccgcactcatattactc

SEQ ID NO: 115309 - DNA, 633 bp, Zea Mays
tactattcttggaacatgctccttgaacgttgctacttgccgaaactaaactgcagtcaacgtgtgtgggggtccatgggtaaggagctgaggcgagcgtctggctgaaagggcatctggttacgtttggttgtgcgatgcgtgcagcggcagacattcgtgggagagagagttgtatggtcgcggtctcacggagttgtgcggagctggttttggaggctctagccatccaaattagctccggctctctatgcagagctggtggtttgggagggctcagacaagaagccagagccggagccactcataagccctcctaaacaggcacttagtatcatcctttgtacactggtgcaggtttccactaaaatccaaaaaaactcatctcccacaatatcacatttttgaaactattgtagtttaactgttcaagtgtgcataggctactcatttggaaaaaattgactttctattgtttaaattgtttatatgcatgaagaatgtgaaaaccactaggttctatgatgaggtgtttgttgatttgggatggagaagaggcgaaaatgagattgaggatgtgtttattgttttttgtaggtgagaagtgcttatcaatagtgatgagctactagc

SEQ ID NO: 115310 - DNA, 707 bp, Zea Mays
acaatcataagcaagaagaagcaagaaggaagagagagagagaatgtgaatcaggatcaccacggtggatggcctagctcaggttctcctgcttctcgtgccctcctccccggtcttcttgtttttctgcaatggatttctctctcctggactttcggccaggcttggccttcgcggactccctctgggatgccctggaagcttcagtttgtcctgcccgcccctgtttgcggtcgtccttctggttggtggtctcctttggcagatgcatcttcaagttgaattcggtctcggtcggtcatcttctccaggctgctcttggtgggctcgccgcggattttgaagtgcttcagctggctgaccgcgtttttcggttttcggtttcttcgatggcggtgggttttcacatttataacttgggttccattgagcgtaaggagttcagagccttcttcaacctctggaatcgtggtggacctaattggaagcatgaattcaggctttttttggatgaggaagctgcctcctggttgaaggtccggggcaggaaaaatctgtcatatgcggacgtggttaagctccctctcaccggtgccaatgctgtttcgattcgaaatcctaccaggtcacctggtggtgctcagcatgctgctcgggctagttcttcggttttcaatcgtttgggccatcctttcactaatcgtgcc

SEQ ID NO: 115311 - DNA, 632 bp, Zea Mays
ctcaaccaagtcattcttaacataaaaccactgcttcatccaggatcctagctattttttccgaaatgttggaacagggtgtcttgcatcagagcgatatgcgaaggagtagcaaccaaaattgttgtgatattgttccttcccaactgccttggtctggtaagataattcgtggatattgcagaagcaatcagcatttgggtccagcccttggctcctcatcgcctagatgaaaactccaactttaatcaaagcttcgggagtacgctgatgaagggatatctcaaatctctttagcacttcgactaacattttgtgcaaaggaaagcgaagcccagccttcattaaactttggaatcccatcacttcgtctacctcaggaagaggaacaatgttctctccttcggccctcactatggatatatcatgaaaatatttgcccttcattgcctcaatttgccctttcttgacagtgaattttctgaagacaacatggcttggcctccatggtcaatcttcagcatcttctgcaccactgtcaaaatcaaagtcatcgttgccctcagaatcttcagataatccagtaagaattttgctggttatttttttagtgttggtcctctccatatctt

SEQ ID NO: 115312 - DNA, 302 bp, Zea Mays
attctgagcatttcatatttggtagggttcagaagtgtgccaagtgtacaaacaatctgtcagtttacctgacttcctccggatcatttactaaatataggcatgcacgtattgcaatatattgacttttcatgtggattttcagttcatctatgattttgtattgaaaaggtgttttttattagtactcatttagaaatagtgaggtatagctgtatagttctcttagatctttgaatagtgcttgtcgcggaatagtgaggtatatttgtttatacgacccttaggtctttgcactttat

SEQ ID NO: 115313 - DNA, 693 bp, Zea Mays
ttgaattttgaatttaggttgaaaactaaaatagaaaataaaaggaaaaaaaggagaagcttcacctgcgtccctgggccgaaaccatagccctagcccacttgccactcgttttcctacccgccgcccaccttcgcacctggtcagccccacacgcttgcgcatacggtcactgacgaacgagcccgcttagtcgatagtcagccctcacgtgcctaggttggtcggtcacttacatgtggggtcggggcgtcagaatcgtccctatccacgggatatcaatcctaccgaactgttgcggtgcgaaagtcgtctgaaccacatttgcgcggattttgttggtcgtgaggtataaaaccgggggccctgcgtccctcatccatcttgtccaagcgccacggaactgtgaggggaggggattatagcggcgacgaaagagagcaatcgtggaccgccaacgtgattctctgccctcgacagggtttggagcacgagatcgtgcccatgtgttctccgagacatgcaggacctgtgcgaggaggagtcccagcatcccggggtaggcggtggccggaattcctcaccggtggacgggcacagccgcggatccgctcaattgcgatgatagacgccctgcaacacgactctcagtaagatcttaccccagactcttaccttggctctgaatcgtgt

SEQ ID NO: 115314 - DNA, 463 bp, Zea Mays
atccgtcacgcgacgaatgggatgctcccacgtgaacgagcatggcgctttgcctcacttgctctctggtcaagattatcatgccagcgacggttcgattcctccaatctgacgattcacttcctccacgtagccgggctccgtgcctttcctgccctggatctgtttctccgaaaggcccccgtgtttataagtacagcatcagccttcatttgatcagatgagaggccacactccgaaagagagccactccttcctgtatcctgcaagtgggaacacacagcatcagaaagggagacggttttgaaatcacaggaataaaatgggattccatgcaagaacaattgtagtagttaatccttatctatctatctatctccccccgcttcacgtccctcccctcctccctcttttacctcaagcccatcaagtccgcagagacatattcttgctatgatagaaa

SEQ ID NO: 115315 - DNA, 460 bp, Zea Mays
gccatacggatgcctgtgtgacgcgcagtcgtcctagacctgagcgataggaggaagatgatctttggcgcgttggatgggttatacacggcggggattagatgtgggttgtccaccgctggatctttggcgaacgggtcggattggaggttgtcgtgggcagattctggcccttgatcggtaatccaagggttcgcgtagaattacaggttctgacgtctatggatctaatccataccgcccaccattgatcgaacgaccatgattggcccataccccttcgacctaggcattttgcgtaaaagaccccgtgaaatatctgaatcaacccgccgtccactgtagggtttggctgagtctgtggattacttatgttttcgcccctgcacttctgtttatttagcgcacagtccagacacctattaaaaccaggaaattcatttagaaaatggtttttcag

SEQ ID NO: 115316 - DNA, 427 bp, Zea Mays
tggctccattagtagttgttcagtttgtcaggggtgttccgtcattcttgctgatgaggtcttttcggccaatctggtagtgatttccttggggcattcgatgttatcttgggtatggattggttatcccagtatcgcgcagttatatcttgtttttggaagacagtgttattgcaggcgccgtcgggtaaggaggtggtattcttgggaagttccccaaagttcatgttatccttgctagcgcaattgcttccagatcgtcggtcaaggaagtcggggatctttttctccctggtggtggagagtgaggctgccttgcgggtgcaggacatccgggtggtgtgtgactttgctgacatgtttctggcagagcttccaggcattcctctggagcgcgatgtagcttttgagattaagctgattccgg

SEQ ID NO: 115317 - DNA, 325 bp, Zea Mays
acccacactagccccagccggcgaggacaacaattcccgcttaccagtcccgtccacgcgaagacggccactctccatctcaccacaatgacgcctgttacttcgcgacaattcactcactctccgtttcgccaccgcccttcgccgcctacacccagtactcgcacccggaagatcctcagcacccaccacacgcggcgaagtctccgccgcagccacgtccaatgccgcaaaataatctaagtcatcatctaaagactcctccgtccacacaatcgaactcccagaatcattagactcaaaacacttagacacagagccaaac

SEQ ID NO: 115318 - DNA, 858 bp, Zea Mays
ggctggtgtgtttccgttgtggtgatgtgcatcaccgtgcagagtgccagtggagtggcaggtgttctatctgcaatcaggaccacaaggatgtggtgtgtaggaggaattctaatgggaagctcagatgggagccggtgacttcctcctcttctcagggcactatcaacatgatgtcaagtgctgagcagcagttttcagttccacttcctctgcaatagttttatgtgcctgggacttctcagttcgtgccgatgcagggttttcctcagtatctggctgcgcctactcctgcaccgactactcctatgccgtctcagtttggagctccgcgtctgcctcaccgacggctcagtggggttcttctattaatttcactctaggagcttcctcttctgcgggtatttccggggcttatgtgctacccgctacggatggcagagagaaaggagacgtggtgataggtacaatttcagttgattcatttgtggccatgctctttttgactttgcgctagctattcgtttgtttcggaggattttgtgtcgcgggctagtctttcggtgcagagattgggtcacccaattttggttagttctgctaatggctccattagtagctgttcagtttgtcaggggtgttccatcattcttgttgatgaggtcttttcggccaatctggttgtgatttccttggggcattcgatgttatcttgggtatggattggttatcccagtatcgtgcagttatatcctgtttttggaagacagtgttattgcaggcgccgtcaggtagggaggtggtattcttgggaagttcctctaagttcacgttatccttgttggcgcaattgcttcc

SEQ ID NO: 115319 - DNA, 595 bp, Zea Mays
ttgtgaaccacaggcccatcgcaaacggcttccgctatgctcgccaggtgcctacaaagacgccgaaagctgaagccataagcaaggacttgatgcgccgagggttccagtgcgttggccctacaacgatctactccttcatgcaggttgccgggatcgttaacgaccatctgtcatgttgcttcagatttcaggcttgcagccagcacaaggccagtgaaaagtgaaaacggtgcgagggcagagccagcattgcctgatagaaggttgggctcggcagcttcggagggttcagatatcagggaggtgtagcaagtctactagagtgaacctgagctgttttttttaatctgtgattgtcaggacagtttgacagtgcattgggatgctactgagcaagtggttcatactgtatatgcgttgtataagatcgtgcagctttctggcggtgtggagtgcttttctcacatgtatcatatttgtattgcagagtgcactttgattgggctagatgtaaaggcaactcccgctgttgttttctgaatgtacggtatctggccgtgcatgtacagacaatgcagctcacagtgttcta

SEQ ID NO: 115320 - DNA, 336 bp, Zea Mays
gggttatccagcgatcttgagttggtcaacacagtctttgcttgagttggtcaacatatgtcatcgttatcctcgactactcgatcaccaagtcctcatgcgcctttgcttaatttggtcaactgccatcttgagttggtccacacagtctactccttcacatctacatttacttgttgatatcctcaagtattagccatccacgatctgtctttcaagcacgttggtccctcggtcaaaggcacaagtccttcaccgcttctagccaacgatatggcatgtctctgcttgatcttctccatggctatcgaatgtatgcacatcaacacaaccaag

SEQ ID NO: 115321 - DNA, 311 bp, Zea Mays
gctatctttcctggattgctattccggataccatcagattagcttggcgaaggaagacgaggaaaaaacagcgttcatcactccgtttggtgctttttgttacacctccatgtcgtttggcctcaaaaacgctggagcgacttatcagagagccattcaaacatgcttagccgatcactggggcaagcgtgtggaagcctacgtagatgatgtggtaatcaaaacggagaactcggaaaacttcattgaagacttacaactagttttcaacactctacgcagtagcttggacaatatatgggaaagtactg

SEQ ID NO: 115322 - DNA, 453 bp, Zea Mays
gagacggacgctactgccccggatgggttatagggaggctaccactcatatccaactctggctacttggagccctgatctcacatttagagtttgatgttgttgacttccttatatgtgagatcgaggccacgatattggatggtcttcgtgcccagcgacagctgccatatgctcactatctctgccacatcttcgcacagctgatccggccaccgcagttctagggcactcttgaggcctctcacctcctctttggctcctaccatccagcccctgaggacccagtgctagtacctgatccagtgatcgacactcaggtagaggatacaactttccatcagttcgagactcagggcacaacggttcctgatgatgatgatgatgattttgggattccgcctccgcctcctgtgcctccacgctctcatgaccatgaggtcgagagttcctg

SEQ ID NO: 115323 - DNA, 344 bp, Zea Mays
cttggtcgtctcagattagcaggttctgcatccttcccttccacgctgttccctggatcgttttgtggacaaggcgggtgcgatacagtggcggcagcggcgataatgccactccagtggcctctgggcggctgtccaagctgttttggccggctcggatgcacgtggctgacgttattgggcgagttctggaacgggggcagtcgttggattcggtggagctggagctggagaggctccatgtcgacctggacccctttgttgtcaaccgggtgctccggagcatctcggactcggagatggcagtgcggttctactggtgggcagagtccaggcctgggttt

SEQ ID NO: 115324 - DNA, 444 bp, Zea Mays
gttgaatttgtttctgaacattagaccattaacctaagttgtgaatatcattttttgcttgggaaatcagaaagtctacgatgtagatgatgttgcctttaactggtttctaaccattgctagaaggaaatggaagggttttaagtcaaccctaaaggcgcaatattttaatgagaatttaacataagaggacctaaaggacaaacatagtcgaagggttaatgatgaggattggaagtttctttctaaatattgggtgtctcctgaatgtgaagaaaggacaaaaaattcaaatttagtcgttcaaaggttgggggtacttcatacatcaagcaacaagagttttgcacgctctgtccatgaaatggtatttgaagcaatttgattgttgaatttacattatgatttatcattttcaactataaacattaacacattttgcag

SEQ ID NO: 115325 - DNA, 366 bp, Zea Mays
gtccagagccgcggatcgactcacggacaacccagattaggtcgcgcgtaccctttcgcgcaatcgacatctggatcgtacaattttaatccaagggagggaacacgtttcacatcctagctgatctgaaccgtagatttgtgacccgatgaatccggttgtgtaccgctttggttggagtagtgatctaatctgtgccatccgatggagatccaacggccgaagtaatcctataccccttcgtcgtggcacttttgcgtaagaaaccccgcgaaagataggaaacaacccgcggtccacaaggactgttcacaaagtcttaggaagcttgcgcagaggcccctgcctttccattttttgagattt

SEQ ID NO: 115326 - DNA, 283 bp, Zea Mays
tttgatggtcgtggatcccttgatggctgtggagaaggtggatccctgaagggcgatgtatgtggcggagacggtgggccaccatgaggatgaggagaaggagggtcaaaaagaggatgaggagcagcgtgaagtttgaggaggtgatgatggatgtacaataggaacagcaatttgagaaggcggagacggtttggcctgcgacgacgactgtagtggtggatcaaccaattcgacatcccttcgaggccaaaggataaaattcttgatagcttgtccaagt

SEQ ID NO: 115327 - DNA, 520 bp, Zea Mays
gcaaataaagtaatcttggcattaatcaacacttgatagaactagtgttcatcataactgggaaaaaatgacaaatactgaataaactccagcggaacccccccccatgttctgcgtatatacaatgattgcgactccgtttgtttaaccccaacagaactgagggcaggtgttaataatagctaacttacatacccagtccaacatatagagcttgaaaagcttggcattttgttccaatgtcttatcccattgaaagtagcgatcagataaggcagaaacatcctaggcgtgctgcttagtccaaaagagtatggaacttttgctcaataccttcgcaagcatgtcgagaagcaccacagctcgacgaaccctccactggaacattttacggaacatatcctgatgctctctaaaatgcacctacgccaagatcaatcctagttcgagctatacgctaatccaacccacgtctcctctttccggagcccaacttgcggattgaaaaaattatcaaagg

SEQ ID NO: 115328 - DNA, 273 bp, Zea Mays
gttagaagtgaggttagacaccatcagcccctagatgcttgtgtgaaccattgtaatagttgtatcaggagaggctatagtcttgcgagatcacatcagttgcacttgaggcgtggccaccaccatgttcttgataggacaaggcctatggcgttcaaccaaaagcttgatagtagagatggtggggagcatgctagagaggctagaactggagcaccatttgcacatggaaaatccctaggctatctatagagttacctgactaggagtttg

SEQ ID NO: 115329 - DNA, 402 bp, Zea Mays
agccaaagagcctagattattttttgttgttgagttgtatagtttagctaccagaatatcctgagctttggatattgaatctctagaacgccccaacattaattttttctttgcagccaatctaacactatatctcttgccggaggtggaagcttggccaggcctatttatatgctgttggggcgaaacccaaattgcatttgctgtgttgggtaaattgttgtgtggaagggtttgaatcagagggggttctggtggcatggttatatttgcgatgaagttgtgcaactgcgagttgttagtgtcgcttggctgagggtccgctggtaaactacaaacctcctgactatgtcgattaactgccgcagcaattgagggtactggagtttcatcctgtagaac

SEQ ID NO: 115330 - DNA, 532 bp, Zea Mays
gcagcgtagcgatgggttcattgtggcctctgagtctctacccaggggttgctttgtccttgcgcctccagctcagcagttcgctgtggcttccttgcctaggaggaggcgacctccttgctccgcatctctgccatgcaggagaggagggcaagcgtggtggaggtggcgatttagtagcaggagatgaggagacggaggactagcgctggaggcctgggaggttgggagcgacggtgattatgtctcttcagcaccccagcagaggggaagagcaggggacatcggagggtagcgagaggagagagatgagcatggcagcaggagcagaggcggaggaattgtgcaggttcccgatgatccacgagcgcatgagttttacggatcaatgagcgatagacctgctatggcccagatcgaacagtctacatggtgtccttactgcatctgacggttaacagcgacgtggattgatccactacccaaaccttggctcttgattagtattatagagatgaataagagttctatc

SEQ ID NO: 115331 - DNA, 578 bp, Zea Mays
cgggataattagcctcttcggatggtcggatgctcggataatatctgtaccgtttacacccctatgagccacagggtgggcaccaatctgctccccactcatgacctacatacccctcaggccgcatagcgctcatgacctatgagcccccagattgcggcactttaatggcccacgcgcagacctcccacagggcactacacgaagggtcacgctgagccctaggctacggaagccaggggtcagcgtagccagaatgatggcgcctaggaccatcaccacccccacgtcatccaccacaataaatacgcaatagccaagcagccttgggcacgacaagtacgtgtggtctcacctagggtaaaacactagttttaccctgccttacgactccttcccaggaaaaccacaactggctgacccctatcccggtctataagaggaacggaaggacgaaccgaagaagagagctctcggacgcaaccgggcgccttcagatagagacgaacccacaaggatgaacaggaggaggagcgccgacgaggaccaggaggtcagagccctgccaagttgtagga

SEQ ID NO: 115332 - DNA, 544 bp, Zea Mays
gttttccttgtatgaactgcatagacagttttttgcggaacggcctcgagaagtcttggaggtaaaggtttgcttcggcgaaaagaagagggtatacactctctgttgaagagagcgaactcgctgcatcgtacaagccaagtagcaataaaatccgcaaagcgttcttgttcgatgatcaacacacacgccaaacgttctccgtcacatcgaaggctagcgatcctcctgtaggggatctggcaacaggtgaagatgcagaggcaatcgatgctcctgtaggaggggatctggcaattttctccattcagcaactcgtcttttccatgtgcccccccacacccccccccccccccccccaactcaaacagacagttccttccactcacaaggtgtcccctgtagctaatgctattgatgatcttcacataccagatcgagttctttagaatggcgtcttcttcaagagcatatctgttgctccccaattcttggttcagtggtcgggcatgccgtgtgcaatgtctacatggaaatacttgga

SEQ ID NO: 115333 - DNA, 994 bp, Zea Mays
accattgtctggtgaacacttcttattaatagagattaacctgttcttaacaagaatcaagagaaagaggggattgaaggaggtcggttcagtggagcaacgaagatcagtggctcaggaaatatctgaagaaaagatctgcattactgtggattcagatgtgtccaagcgaactagagatagagacggccgtggcgggatacttgagccaattcatggtcttgcggattaggtcggggtctgggtggagatatttcaccggtggtcaccgtggctctgtactttcgtcgccatgtcactcgctcctcaactctacctcactgtgctccttcgttacgtggtcgtgatgcgctatcgatgtgcttcgtgaccacggatagttagccaggtcgtcgttcctttaaatagtgccataaaccacggtgaggtcttcactgtcttccggtgtgctcggtcgaagccaaaattcacactgtcttctcttcctcgccccaaattcgtagtgcatggtgaattagtagtcctttacggccgtatagccccagtgtggctgcctgttgccatcggaatttgccgcgacgcccatttcccctcatcggaccctgtagagcacactcttctccgcgctccatggtcgggcgaacctggtatggttccatgcatttgaattgatgtttaagcatccatgtgtgcccatgaagctcactgtggcggtcgtttggccattactggcatggttttgttgaaacacgggctcgacgtcgtgtgctctaccgagtacgacgcttacgtcgaccaactaggattctgttggaccgacgctgatttaagggagcaccatgacctacatgaccccctgatgctcttcgttcccttaatttgcaattcccatggcgaataccccatgaacgtgcgccgcggaaccggcacaccgtcgtggccatgggtaggtctctagggggtttgtgaactggattcgtgtccaagacggttc

SEQ ID NO: 115334 - DNA, 310 bp, Zea Mays
gaaatattatatatggacatcttagtatgtaccactataaggtaatgaactagctatggtagataaaatgttaaactgcttagctaataaatcccccaaagtaacctgattcgtaactactgccttgtctactattctcttaccatatgtatctaactcagatggtcaataccaggaggggtggtggaattgatttgcctcctaatcgacacactcagaggatatatagacaacctcagccacagctagcagagatgaatcctcctaatcctccaccaggcggtgttgatccactgattgcagctcagat

SEQ ID NO: 115335 - DNA, 524 bp, Zea Mays
gctcggccaaatcaacagtacgtgacgtgaggtcccgtccaatccctttcaaaaatcaagctgtgccagcagtagtagctttactcttctttttctcgaatgtggacaccaattttggtagagggaatttagatttctttgattgtcgtgaatcctttgatggctgtggagaaggtggtggtgtcctaaatgttgatgcttgtggcagagacggtggattagaaagagaatgaggagcagcatgggaagattgtggaggtgatgatggatgtaaaggtactaaagtttgaggaggcggagatggttggggatgagatgatgatggcgttggtggatgaaccaatttgacatcccttcgaggccaaaggatgaaatttttgatggcttgtccaagtgtctcgattccttcgggcccagggatgtctagcatgtcgtcctcagatccttggatgaccattgccacttctaccctgcaataatcatctggtatgtcgcttccatgaaacttatgtcctgggatcgca

SEQ ID NO: 115336 - DNA, 317 bp, Zea Mays
aggaattgtcctgacaaagctctctgcattgaggtcttcggtcctggtcatcttgagtgagatgaggcatttcctcagcggccttatcgatcttcttctaaagatcggcaagatgaagcatcttctccttcttcctctggacatgttgatggatggcttcgaggtccttgatttcttggtccaactcctcctcctgaggcgttggacttgtagccttccttttttggcttctagcttcgcgtagtgtttcctggttgacgtccagtggctgcaatgcagcccctagcgctgaagatttcttcggcggcatgacgaag

SEQ ID NO: 115337 - DNA, 691 bp, Zea Mays
aaggctagctagggacatatcctcgacgtcggacaaattctctatcctggagagaggtggagctggaggggctttcttcttccgctcagtctaacatccttggctcttggtcttcttttggattttcttcgtgggggcgagcttcttcagcttcttatcgtaatccatctttagggttcggtaggcttcacgagtgttggcctcttcgccttctgctatatcgagacactcttggagggacgccttctcctttttaagttccttgacctgctgctctaagctttccactcgggagtttaggtgggtgcagtgggaggaaaggtcatcgcagtggttatcgagagtgtggagatatccggccatgtagacgatggtggggtcatcctcggtaggatctcttcctgacagggcctgaagtcttttcctccaggtaggggtatttttattgctaggcgggaagtaacgaagggggtttcaaaaacctctttgctgtagttttggcatagctgtcggagggcttttcgggcaacattttggcaagtgtctgggaagtggtgtccagtgaaggtaacttggaaaggagggtggtttgggttgcttcggctttctcccaagtagactgccatagagcacttctcaattccgttttcgcggtattccttccagacatactccggcttcttgcggatcc

SEQ ID NO: 115338 - DNA, 427 bp, Zea Mays
tgacttcgatatgaggttcacatttgtggttacaggatggccaggttccgtacatgacagacgagtactacatgatactttaattacttatgcggacaggttcccccatccaccggaaggtataaaaatattttgttcattagtatagtacagtaatattttatggcatatgtccttaacatttgtattttgattgtatgcaggtaaatactatcttgtcgattcgggttatccaaatagaaaggggtaccttgcaccttataagggtcagaagtaccacgttacggaatggcaaaatgcgaggcaacctattgggagtaaagaagttttcaactatgcgcactcatcgctgcgaaatgttattgagcgatcatttggggtgctaaaaatgaagtggagaattctattaagtctcccttcattttcg

SEQ ID NO: 115339 - DNA, 446 bp, Zea Mays
gttgggggtgccagcttggagatgcgccgcgggaggaagactgagtatctcgagatccctctcaaagacagtatcaagggatggcgcttggagtggttcatagttgagaattatggaaactctctccccctcggtcgggaaggcagccagatgttcgcaccccaagctggaccgagtcccccacatatcaggaggtagctgaggcaggtgctttgctggctgaagttggattgctgaaggagaggggtctgactgttgaagctgttgttgttgattttgtcttcaagaatattcagccgctgaaagacagggcgcacccggcttatttgtatcgaggcctagccgactcaactcgggttaccaacagaagaattccctctgcggacttggtgagccgacttgagatgatccttagaggcaaggtgtcaaatgttggtaccccagtg

SEQ ID NO: 115340 - DNA, 490 bp, Zea Mays
caccgaagccacatctcctccgtttgtttttttattgtttcctagtcgtgcttgtgtcaccacgaaccaggtattgttgatatcagccatgcacacacacgcgacatagaaatgaaagtatggaactcgtctacgccacggtctctggcagtgcgcgcccgtgttgatttagcactggccagtaggtcccctggcgcggtcgttcccccaccgaaccgaatctagttgcgcaatcgtagggcaccaaacctttcgtcgaggacgttacaacaaccaagccatctagataaggctaatcctctccttcggagtataaaagcaaagcaacgtgacccttgtccatcatcagaggaagcacaaagcaccaccatcgccatgagatgagagccaagcagagtagtagagagagaagaacaggggttagccgcgtcgtcgtgcgaactctggtcgtgcatgcagaagatgtccatggccttttcgtgagcaaaca

SEQ ID NO: 115341 - DNA, 1387 bp, Zea Mays
atggaatcttggggccattcactgagttggagtaggttggtccagatgctttcaactgagggcaattgttcttgaagtgactggggtctccacagtgccaacaggcgtttgctggcggctggttgctcgcaacggagggtgcctgaagggacctctgactctgctgactgtagcgtgatggagtgggtccagattgtttattgaagcttggacccctgggtggaagcccaaggggtcgagctctctggtgacgctcttgctgttgtgctcggaggacttggaatttcctcttgatgtgccctttttcttcctcttttgccctttccacttggatagctttgttggagaggtgagagaagctgtggaagtcttggctggcgaggatggtcttaagctcgggtcttaatcctctcagaaaacaggccatttttctggcctcggtgctgacatcctcgggcgcgtagcgggccagttctgtgaacttgtgcacatactcactgactgtccttccgccttgagttaactcccggaattcatcctccttgagttgaactatcccctggggtacgtggtgttcacggaaagttgcttcgaattctgcccaggtagcatctctgacggcttcactgaaagtgtcccaccatgctaaagccattcctgaaagctgatgagctaccagttgaacacgctgattctcggggcaagcgatggcttctaacttcctcttgatcgtgcgaagccaatcatctgcatcgaggggattgctggaccccgcgaatgtgggaggcttgagtctcaaaaattcccccatcctgtcctgtggccttccaccgcctgggcgctggttttccagacttcgagtgaggacttcaatgagtcgggtttgattggccagaacttgggctaggtctaatggtagctccggaggtgcggggaggtgggtctcacccccttctccgccagcctctccttcagctcctagaggaagtcttgctccaatcccggaggcggtaggcgtggttctatccgaagccatctgccatgggaagagagtcactattatgcacatgccatttttttaactggttattttattcattacatcaagccattacatgacacaacaccctgctaccataagttcaacacacacgggtgctatctagggtactcccgaactccttctctaaggtgtccccaaattccttgagaaggtcatcaaggctggccagggacatctcttcggtgtcggatgggttccttggagggttttcttccttctgctcagtctgacatccttgacttttggtcttcttgcggattttccttgcgggggcgagcttcttcagtttcttgtcatagtccaattttagggtgcggtaggctt

SEQ ID NO: 115342 - DNA, 307 bp, Zea Mays
aggcgacctaaagttcatcttgaacatttcttcttttctttgaattgtgtttctttgagagcatttctatgtattagacaatcatttctaatgactgcccaactagtctaagttatagatcttcacttctttaattcttccaacttagatttttgttctagatcaacctttgctcaaaaagcacctttttaaaattatgacctctcaatccctctaaggtgcccaaaaacatttctgagggcatttagaacttatccaagtatatagaccacccatagtataccttatcaaaaaagggaaattagat

SEQ ID NO: 115343 - DNA, 513 bp, Zea Mays
ctgcgggcactatttctttgaaatccgggggtctaacttgtaaatttcagggcctagttgtagtttctgttgaactaaggtggactgcaggtttattttgataaaacacatgggctcataggtaagactgactggccgaaaggggtaatggacgacctgagccatccgatccagacctaagggcctagattagaaatctagccacgatgaaccggtacgacacaatgaccacatgatctaagatctatggccccaacacacccacgccatgacgaacccccagccctcggatataaccttgacgtctctgatttaatcaagccaaaggggtaagctgcttctaattgtggccgcccaacggccgatcgacggcacaagtgcactcttcttctcaaccctcaatcccaagatcgacggtcgagcccccgtcttcttcctacccgtcgaccggtgatggagacgctttccatgccccgacgaggacgccgacaagttggcgaccccgtgccccaa

SEQ ID NO: 115344 - DNA, 843 bp, Zea Mays
gcctaattggtcgagccgacgagcatcacaagcatgcgagagtgctgaaacacggacagggaggacgagtgcagacctgagagcggctggctacggtggggtgacatacggtggcgtagacgaccgatttgggggaagaacgaaattctccggctatggtggctaatcgagccgacgagcatcacaagcatgcgagagtgctgaaacacggatagggaggacgagtgcagacctgagagcggctggctacggtggggtgacatacggtggcgcagacgaccgatttgggggaagaacgaaattctccggctatggtggctaatcagaggcgggagtgggtgctctgggttcgtgataagctaacggagctgactgtgcactcaatttatagcagctggccacggttgtctggaatttgaaggagatttggatcacggtggtgataggatgttgcactggtgagctcgtcgtggcgttcaatggcactatgactcaagggcggtaactcttagcttgccacggcttcgggtacgtggtgaaaggacttcgacatggcgcaatcacggtgaacggtgatctccacggcgatgaccgcccgaccacgtcgctgcgcaagtgggtacaacaactgggtagtaacagtgccccgacttcatcccctgcgcgagatctttcactttacgtaggtatccacatgccattgggcacgaatcgcaacgccggcaaggatcatgatgagggatcaccggcggcaatgcactgaacctgtcgatctttatcacgttactgtaccatgcgaattcctttcattacgcctgacaaagcagattaagaagctccatt

SEQ ID NO: 115345 - DNA, 409 bp, Zea Mays
cagtggaaaatgcctcaaaaccttatgtggaaacccgcttcgaaccaatttcatctttccatctagactccgtgcatactgggcactcatttaatttagcattaacattccgaaaacaacacacaattgttcttgcacacatggatgttttcgtatccaaggcccaattctttaagatatttcatggcctcattatatgattttggcaactcactgttagggtatccatcggacatcagcttcatcattgctgaaaatgttgtattgctgattcgataacgagacttcatataaaacatcctcaccataaaagaaaattttgaatggctagaacccggactaagtgccttctttgaatctccaagaactcctgcaaatcttggctcttctccatcagcctctgccgctg

SEQ ID NO: 115346 - DNA, 338 bp, Zea Mays
tgggaatcggataactcagatcagtgtctttgcataggagactgccctccaaggttgacgatgcgcgagacaccaatcttgttacctcttgcccggcagaaccaagcaatgaaaacccaccatctaggacctctgaacacacggctgggatatcagcttcaggacgctccgatagtatgtcttcaggaatgacctgctctagtgcttgatcaaaatctgatatcgaaagcccctaaagactgacaagtgtcgacagagctagagagggaatatcgatacccctcgccgcctctatagaaacgattgttcttgcggatcagtgggatttcttcttcttc

SEQ ID NO: 115347 - DNA, 385 bp, Zea Mays
gcacgagaaagctacacatcattataataagaggaagaaggatccaaaatagaccaacaactgcagacacaatataagccttcttacggaggacagaaacaaaaatacataaaaactttcataaggtagaactagcctacaactactcctattgaggccaaatgtctgccaacccagcggctcctgctagagaccatctaacggcgtcatcccggatgaactgcaacaatgctgggcacacacaaactgcccctcgaacacacaagtgttccaatgtttctacagccacctagcgactaagattacagttcaattgaaacatctgcgctgacttttatccacctactatcacacattcctccaccggtcttggaaaacatgaggt

SEQ ID NO: 115348 - DNA, 385 bp, Zea Mays
gaaaagtgtggatcccaaactcactggcttctacgaagccatggaaaggactaacatagaaaaaatcaccaatgaaatgttagctggactatctggtgattcaagcgacagcgaaagcttcgatgttgagagtgagaacgaggatgccgaagatcgaccgtggagaccaagccacgttgtttttgggaaatcaactatcaaacaagggcaaattgaagcgatgaaaggcaaatattttcatgatgtgtccatagtgagggatggggcagaagacatcgttcccctccctgaaggtgatgaagtggtaaccttcaggagcttcatgaaagttgggctttgctttccgctccacaaaatgttggtcgaagttttgaagacatttgag

SEQ ID NO: 115349 - DNA, 746 bp, Zea Mays
acgccaacgtgtccacgtatctccaaatgttgtccgccgttcgattcaagatatacgaccagcagaggttctagccaatgcaaattcttatataatagagcggggagcaaaggagcaacaccagcgtgtccacgtatcaccaaatgttgtccgccgttcgatttaagatatacgaccagcagaggctctggccaaaccagaagggaggttacagtggagatcgctggagacttccagctacggcggccaataaggcagaaaggtgggggtacagtcacgaagaggtgtcctcctcgcccccaatctccgttgagtgcgcacgctgttgtgagggggaaaagagagagagtcgtcatcatcgtcgtctccctcagtgagcgcgccatcagtcgactacttctgcatggtgcgccatcgactcccacgagtcctacgtcaagttgtccgtctggtctccttgtcggggcagccaatcctcatcgtcacgccgattcactgaggtatgaatacctttctacctgtgtccctcgccgttacgatttcatctagcctcttgcttcccccaccacaatcccactccaattcatcgacgtgcagatgcgggattcttcgaaatgtatgtccttcgtactagggtagcaatataagttacctgaatatttgtttcaatgccaaccattgtgaaacagactccatctagagcactacatgttttccttcatacccatttatttatgcatatagat

SEQ ID NO: 115350 - DNA, 699 bp, Zea Mays
cgatgagtaagactttcggggacctgattagggatagggtagaggtgtacgttgatgacatcatggtcaagactaagagagggtcggccctagtggaagacttaaccctagtcttcgacaagctgcgggcaacacgcacgaagctgaacccggacaagtgtgtctttggtgtctccgcggggaagttgctgggattcttggtttcgcatcgaggcattgaagcaaacccagagaagatcaaggcaattgaggcaatgaggcctccggcccgcatcaaggacgtctagaagcttacggggtcactggccgcccttagccgcttcatctcaagactggctgagagggcgctacccttcttcaggctattgcggaagtccggtccattctcttggaccaaagaggccgaacgagcctttcaagagctgaagcagcaccttgtgtccttgccgatactggtagctctagagccaggtgagccgttgtacttatacattgcagcggcttcagaggcggtgagcatggtgctggtcgccgaaaggacgacacaacatccctagggaagtcagaaagttcctctaggagaaggttgtgatccgaccaccatgatgttgacggaaggccaggagttttcgggaccgactccgagggttcgaaccatccagaagccgatctactacgtcagcgaggtcctccatgagg

SEQ ID NO: 115351 - DNA, 521 bp, Zea Mays
tagaaataaaaaatgagtgaccaatagaagatatttagctaatcatggtaccaatgtttatttatggtttcaaaaaccatggttattactactatagggtattacttactttcgaggttcgtgttcgcatgtgattgtgtcaaagtattggatgcctatcataactaaattctaccatgtcataggtttaccacttaaaccacatgttcataccccacatgcaaaccctttccaaaaccaaccctacccccacccctattagcaccaagaatttgtatgacttcatctttatttgactgtatcatgtaacatacagtcaagtgtacctaacccagccaaattggattccctctatcttcttcccacacattacaaactgaaagtgcatctaacccttttgtggattttggtgatttggataacaacactcttaaaggactaattagtttgataagtgttgatcagaaaagtagaaaaggcaatcatgattgaaaacaacccaagagacaaggattggtatg

SEQ ID NO: 115352 - DNA, 595 bp, Zea Mays
gtttgtgatgattcaaacagacacaacaactcagactcagacttcgattactcgaggtctcattttgtgatcatagaaaactctaggcgacgggagaatcttccctctaaggagaaaggtgacaacaatggccccacgacaaggagggttcaggaggaactatgacagagtggccgagatgcccacaaccaaattcaaatgatcgacttttaacgccatcaagtctacaccaccccgacacaaaaacactatgacagccaagctactactacacaagattactccactactttcgtaggacaatgtggaagctcacaacgacctgtggatgattcacaacatggagtatacagcggttgatgcagatgctacaccggctttggataacaccgaggcatccgatgattcaaactagaaggaaaggtctagaaatacctcttcccatccccacagataaggaacttgagacatctctcttcattcctgccgagatggatcacaagatttttcaccttgactccatcaagatgaaactcggtagccgtctctgtctaataggactcaacaacgaaaggcacaagttgagcaataaaat

SEQ ID NO: 115353 - DNA, 714 bp, Zea Mays
ctgggctcgttagccaacccctccttttatagaacaaggaggggatgccattacaatgaattctcttggaagggagggctaaaaggtaaaaactattcacccttggttaaatcttgcagtatgccaatatccttctacgcgtgagtctttagttctgttcggtggcgtgagcctcgggtgctcatcagtacggatttttgtttgtttcctcctacgccgacctccctttcctgtccataggtcctttccctacttcctgtatgggatagcaaggcctcttggtagactcaaacctaccgatcgtaggtcatgagtggaagaggggcgtgctctgcccgcgataaaccatgtcaggcgacgtgatgatggtgagcgcacaaatctagtggcgttgttggcttacgtacgcaaaatgcactcgagtggattttgtccagttcatctgaccctttagtggttctctgcctcgtccgaccccctgttagttttccgtctcgtccaacccccacggttcgacccgcagagcgttctgcgggagaagcggagtttaacagcttgtaagttgtcgcttaggcccatattttatcctcctaacaagtgggcccaagggtttggggtcttataccccgacacttacaaattacaattatttcaacttagtaatagtttcacactcccacaaatctagaatacacaaataaaaaatcactgaaa

SEQ ID NO: 115354 - DNA, 386 bp, Zea Mays
cacctccttcacccgatcaatgtcgagccgcaccagtttcactgcctcccacgcctccttcacggtcgaccgagcaccaagcgtttgccacatttccttcggtactgagcgcaggagcgcgctcatggcttgacgatcttgcgaccgcttggtgttgattccatgatcaatcacaccccaaatcaacatcgaccactcggcataattatcgcgcatgaggagaggccacttcagagagctctctttcacgccagccccggaggtcgatgcatcactcatggtgatcgacacttgacgacggggaatgacacgcttcttctttggcggttcttgtgggggactcaccgacccgtcgtattgcatacaaccacggctctgataccaga

SEQ ID NO: 115355 - DNA, 476 bp, Zea Mays
gggcaaaccattgggaagcccatcaggcggcccaagatacgttttagtgtccgtgaggacccgggggatatctatcccccacaagccctcgaggctcaagccaacttttaagagtagttggctcgagactctaaggaggaatgatgccctttgttttttcttagctttttgaaggcagttttgttccatctctatatccattgggtgtagccctcgagctctgaattgatttgaatatcaatcaactcaaaggtctccataatctgcttttgaatttagcgatttctttgtccttgtatccattgggtgcacatgtagccctcgagctttgaattgatttgagtatcaatcaactcaaaggtcttaataatccgcttttgagttcagcgtttgctttttcattatatccattgggtgcatcgtaggtgcgcccaaagggtgttcccccgggctttgaattgatttgagcatcaatc

SEQ ID NO: 115356 - DNA, 479 bp, Zea Mays
agggtgtattatgttcaaaatagccccccttgagaatgaggacgagcttaaggttatgtttggacccattgtctgcaccaatgaaacaacccttgttcctggagttgaggatgcaaattcttcatctgatgaccacgtgcaagccaatttaggtgggggtgaaaacagcacaccagacccctgctcaaatgcgatagggaagcgtaaggtgctgcatgattctcctaaacctaagaagaaaaaatatacgaaggatgaatacatgaaacgccttgtggaggcttttgagtcgcgttccatgaacactaacaagtccatagcatcttttgagaccgacctagtacgtgtagaggttgctgctcagttgcaacaagtaattgaagatggatcagaggaaggcagcgacttacgtttctttgccactcacttgttgatggagaaacggtatagagatgtatttgcaatcctgaagaccaaag

SEQ ID NO: 115357 - DNA, 965 bp, Zea Mays
tcctccggaaagcttcccgtctgttaacaaactgtacctccgacagcagtccgcccatccggtgcacagctgtgatcgggctgtggaacggcgtattttaacaaagacagacagcccccaaagctaccgataccgccacagagaacaaatcacagggacacgccaaccgagccttctccccactctaaaaatatgatgagcagagcatgcttggagttggaatgcacacccctgtggatccagcttatggacttaccctcgaagaccccaactctacatagttatactaccattgcagttgcaggcccccagtacactccctaagaggcttaccactgtgctactctaattcttcattaagtagcacttttggtttttgtctaatttgattaggttggcacagtaagttcaacagcagcagcgcgctaagctgcttcgtgatgattggagtcctttcagcttttattgccctcaaatctgttaatcgataaatgacttcaatgctcttcccattaagttagctgcatccactgacatgcacagtgcaggaagcaaagcaagattggaacaagtttttcactatcataacttctagtggggcttgacccaacaacgtggtccaatctggaaaaggaacgcacaaataagacactgtatgtttggagatcccagatttgaagaaaagtaaacagatagctgctagcgttacatattctgcatattgctagcgtttgtacgatttgataaagagcaaatacatgtgctaatcatgaaacttccaatagttatccaaaaaaagttctgtatcctaaaattctcaagaagttcacagttaacacaagctaggctaataggataatgaatccaatgatcactggatagggacggggagagaaagaaaaaggcatgtttgatgctattgctaattcagtgaattcttatgtacttgctatttgctaaaaggt

SEQ ID NO: 115358 - DNA, 327 bp, Zea Mays
ctcgattggcagtgcaaattattgcgggccagtaaaatccctgatgaatcactttggctacgagggctctagttcctgagtgtgagccgcaggttccactgtggactttgaggaggagttctatgccttcggtttcagttatgcatttcagtataggctcgctaatcccctttttgtatagctgaccttcgactattgcgaagttcctgctcctgtgcttcagtcgcttggcctcattgtgatttgttggatggtagtggccttgcaggtatagtgttattggggcccgccagtcttcggccatgatgaggttgacaatgcggtggc

SEQ ID NO: 115359 - DNA, 409 bp, Zea Mays
cggccaaggacccggagtaggctagcaacgagcctctagcaaagggttcagggctgaccaaccattgaccccttccaacatcaaactcgcaagggctcatgggttgactaacgttgacgtcgcctgatacctaagtcatggaggctgaggctaacctaattgtagagctcaatcttcttaccatttataggacccatgttgggcgtctccttctttcgaaggtcctcaaaacatagtaactattctgtttttctaacaaatgtaccacatgactaaatgccaaagggggagagccaaaggtaggtatcgagcaaggagcgcaccaaggcttcagcgatcattgtgaacatgcttcggacgaagctaattccgaaggtcctttgggggagagtcaaaaggaatagaagga

SEQ ID NO: 115360 - DNA, 726 bp, Zea Mays
tgggacccggctccgcccacgatggagaagatggctctagagaaacccaggggaggtcagcgcacggcagctatgtggacgcccagcctttattccccgagacctcgatggggggacgtggtctacgcgcgcgaaacaagggggagctctgcgcacaacgtccgggttgttgacgcggataggaacagacacagcgaagaagggggaagagatagagatgacaggtagggcccactggtaagccaaacaaggtgtggccgcggggatccctggtgagcgggtcccgcgagtcagggttgtgtggctgcacatggcgtggggttgagtgggctgcgcgggaggattttcctggtgggccgaaatgaagaatagtggcacagctggcttttctttctcttttatgtgtctctttttcctttcatttttaaatttccaattgaattcaaatatgaatgtgaactttgtacttaagtcaaatatacaaaataaacatactagtattgtagtattttattgatccatatttttttgttttgtatagtatttattatctccaattttccccaatttgcacttttggtattaaatccaattctcttctcattattatgtttccatgttattattattatatttttttgtcacaaaatgcacaccaaataaagtccagcatgatgcacaggttatttttgtgttcttgattctatttatccacttttaactagt

SEQ ID NO: 115361 - DNA, 1432 bp, Zea Mays
gctggttcccgttcccctagttttttttatgataagttactgcaggggatacctacagtatttttattaattcttggcaaagtatgaacaatttacaaggtgagaacagagccactacgatacagagtgttgaatccaacttctaattgtatcacctatctctgacttaactcgatagcaaacaagactcatttctcttttgaacatctcccgacaagcatccacagtgggcgggatctcgttgaatatctagttgttcctgctttttcaaatacaccaggacatgacgatgataatttccattctccatgatactttcaatctcattctgatcctcaatagattattgattaggtccaatgttcttggctgtgtgatgcctattataagccaacatcttctagcaaaattgcatctaagaaataaatggagtaccgtctcttcgagttggagaatacagttgtcgcaagtgtaagaatctagttgcatagatcgatgtctgaggaatgaacggtttctgctgtaatttatgtcgaaatccataggagaatgagtcaaatgtgtaggattttatttagatgtgtggtgattctagtaattcgagggtagactgctgcaaaagtgttatcctgggttggattttatgggtttcacaattgttgtttagtgtgctagcgcagattgataatgaacggggtattcctcctatggcctgcttcattttgtaccccatgaaaaaaacgtcgccttggaatggacgcatgacaaccaccagtagcgtttttttacagttaaggaaaacaaaatgctgcatatgaataagctcccttttatttagttcaatcgtagtgctggagaagtgatgtcctcgtttagatttcttgagtctctgcaattttcttattgtgaaaacctgaaactttaagagagtattctgtattcctcagattggttggtcgattttgctggattcagtgtaaaatgttacttctagacttgggaataggaaaattgagatcttgcatgctgaaaataaattgttgttttcatcctttcccaatctgccattcatgtcttgtgtaggtgaagcctgtagttggtatatgaggaaggcaaatctgtcatgttacttgtctgttgctttattattgccatcaaatcaaggcacttctagcctttcacttgtttgttgccagtaattggcctacataactaaaaaatggtccttattgaaaataatatgcagttatcaacttatatgcatctatggaaggtttgtgtagacatcgttgtgacagattaggtgcttatatttttatggttatgttgtgtcagtgcattcagttggtaaaagctgcaatagttgtggggctggatttgatttgggagttcactttccttgtgaactgtttcaaagcctttactatattaa

SEQ ID NO: 115362 - DNA, 590 bp, Zea Mays
gaaggagagcatagaacaaccggcagtcgagtcaactacctcatctattcagggagcccgaagggatccttcggacaatgcttgttgagatcagtatagtcgacgcacatgcgccaatccactttattctttttgagtacaagaacaggattcactagccacctggggtacagtacttccctaatgaaccctgcagacactaagcgagctaactcggtgcgaatagcttctcttttgtcaggcgtgaaacgacgcagcttctgtcgaatcggccttgattgaggatagaccttcaatttgtgctcggccagttctctcggaactcccggcatatctgcaggttgccatgcgaatacgtctcggttatcttgcaggaaccgaacgagcacgctttcctatttatcatcgaggctggaactgatgatggcggtcttgccctcagcagcaaatcctaggttgatcctcttagtctctttagtcggccgtatagaggtcacagcctgagcttcactggtgggtatcgtgagaccctcttcctccagtttggtgtttgcctacgtgaggggagccatcgggggcccagcagtgag

SEQ ID NO: 115363 - DNA, 548 bp, Zea Mays
cgggggtaatctgatgaagaaaaatctcaaaggtctttagcacttcaactagaaatttactcaacggaaaccgaagccctgccttcatgaagctcctgtaaacaacaactttgtctacttcgggcataggggcgacactgtccccccagttctcataatggaaatgtcacggaaatatctccctttcatagcatcaatctgactttgcttgatggacgactttccgaagatggtatgactcggccgccagggccgatcttcggcatcttcgtttccactttccaaatcaaagctttcgctatcgccagaatcttcagacaacccagctagcatttcattggtaatcttctctgtgttcatcctctccatagcctcgtaaaacccagctagtgcagggtcaacaaccttcttctcttcagccatctagtaagcacttgtgcgaatcctgaagctcacaaatcaaacaaaatctggcagagcaagaaaatccaagcgtcaaaaaatggcacaagcgattgagatggcacatcaaatgctatcaatacggg

SEQ ID NO: 115364 - DNA, 567 bp, Zea Mays
cgataaaaattccttcttctttagcttcattattcccgagggaatgtgatgagcacggaagtcgtcccaaaattcctacgaagtaatagtgttcgcatctgcatgtgctgcggtgtatgcatcccaccagtcagatgcagctccctcaagtcttctagaagcatacaagactctttctgtatcggtgcactgagtgatatccaacttcttgcttattaccttaagccagtcatcacgttcaagggatcaatcgagtgagagaaggttggagggtggtggctcatgaattctctgtgcttgtccctggcttggggtgcattctggtgttggttatgttgattttgttggttctactggagttgttgtattgaagcagtgagaccttgtagtaaccgcatctgtttagcgatgaactgttccattgttgggttaggtggtggtggtggcaactgtttaccagagtgttgaccttgatttgtcttgcacctgagcgggtatttaccatctggttgattagagagtgaattatattagataagagaagagtagagaaagattctagggaaa

SEQ ID NO: 115365 - DNA, 563 bp, Zea Mays
cttggctgaagttaaagaagcaataagtttgtatctatccatttggtgaatttgtcgatggtgaccaacacgtgagtatagtcttcctgagctttcttgaagggtccgatcatgtccaatccccagcacgcaaatggccatgttacaggtatggtctgcagctgctgtgctggtaaatgttgttgctttgacaagaattggcaagcttcacatctctggactaactcggttgcgtcactctttgctgttggacaatagaaaccagacctaaaaactttcccaaccagagttctggatgctgcgtgtattccacactgtccggcgtggatctcatctaatagttgttgcccagtgaccgaggaaatgcacttgatgaggactcctgtcgcaccccttctatacagtacgccccctatgagggtgtagtgggctgactgtctcgcgatgcgttctgctgcagccttatcatccagttcttcttcattccttatatacctgatgataggctctctccagacattagggtccgattctagttggctcagggtgttgcactcttccgc

SEQ ID NO: 115366 - DNA, 476 bp, Zea Mays
gaagcctcggagacagtccatcgagcggtaggatttcatccgtaaggaggtccggaagctgctggacgctggcttcatcgaagaggtccatcacccagtatggctggccagtctagtcatcgttcccaaggctaatgggaagcttcggatgtgcatcgactacaccaacctcaataaggcatgtcccaaggacccatatccacttccacgaatagatcaaatcgtggattctacctccaggtgcgacctcttgtccttactggatgcttactctggtttccatcagatccagatgtctaggcaagataggaggcataccacttttgtaattgtggatgggctttactgttatgttgtaatgccttacggtctgaaaaacgccttgccaacatttgtacaggcgacgagtaagacttttggtgacctgattagggacaggttagaggtatacatcgatgacatcatggtcaagacta

SEQ ID NO: 115367 - DNA, 363 bp, Zea Mays
ctttcgcgctcgacggcctcttcagcttttcttacttcttatgaggcaagatgagactcttcttcatttcgcctaatggcttcgtctactatttatcgatcgtcgttcatccacacttcataatagaattttccactaagggcagtagctttgactgaaggctctttgatgttagtcgctgaaactgagaagtctggctgaattacagccttaccatgttcacatccacctttttctaacagtgatacagccccccgagcccccacgcatgcacaaaaatctcccctgccagttagaacttcgtcaaatgcttcgacttcgctctcaatccatttgatcacaccctcggaatcaccatggatg

SEQ ID NO: 115368 - DNA, 309 bp, Zea Mays
ggctgaagctgctttggatttatgcccattcatttgaaggtgtggaggaatatgatattagtctgactgccattatccatgagggccttgcgaatttcccagcctggtacattgcagctgatgaccatggcatcagtgtgaggggcgttgcgaagattgacatcgtttgagtcgaacgtaagtgggatgtgtgaccactttgtctggatgaccagttcgttgacagtaacatggtttatgctttggtaatattctctcctctgcctctttgtattgaagtctatgctcgagtctccactgatcacgttt

SEQ ID NO: 115369 - DNA, 689 bp, Zea Mays
ctgcatcttatatcatatgtcataggcaccagtggcctatgctcttgcatatatgctccagatatatgcatgatcgtcagatgggagatcgagctagctagctagggacgagaggggagagattaataacgacgagcacacagttattagttgtttaaactatattatatatacataaatactatacggtgatcaagcgagcatcacatcatttctttcgcagccagacattcttcccgtccatgttagtaaactgtaaaggcatggggggaaaagcagtattccgggcactattcttataggccccagatctttttatggatctcactgtttggtgcattgtacatgtatttattccatctctcgcgcgcgcctagaattttcctcccattggcattgagcccccttttttttctctaaatcctgcggctctgaattgttgcactggccgctgctttaacctgcatgcttaaatgttccatctgctgcacaagatctaagatgttcattgctgtgtactgttgggttccttagcttgtggatctcatcgagttttgcacttcctttttagttctgcccgtagtatatattgaagtgtgtgtacccttcttgcattgatgccactgttggtccccgtttaacctaaccatacctagttcgattccatgcattgctcgagtgagttttct

SEQ ID NO: 115370 - DNA, 982 bp, Zea Mays
gtgccaacattctgtaaaagatggcctggggcctggatggatgagtgttttacataaaaaatgatttggttaaaagagaagacgtcaagggaattatccagcgccccatctggtctcgctttggcctccgaaggccgaaggtggatattgatgacaatgttgaagcatgtcagaaggcctttagtactgtgtgtgccttcattggtacaagggatttaattcaagagcacataaccttcagggtatgaccacttgtggagaattgggaaatgccgaaggatactgttgctgaattgagtgaaggtggcctggttcgattaaagtatacttttagatttagggagaagtttgatgagccatatgatgactgactgaaatgtattaaagctaccagtgacaagctgcttaggacatactcccgggccgaagatgatgccctttccgcagccttcgggggccgggggaagaaaagactgaacagggtatttgatgcgattgactttgtaaaccctgattaccgctacccgctgcgagggcaaggaacaaagagaaagactaccgcttcggccaccacagttgtgccgaagggcaaataggtgaaggttctgacccaccggccgcgttatattgaactggctgtggtgcctgaatttggcgaaggagcctcttcaactgccgaagcaagacaagctgctccgattgtgcatggcgttgaagagccaactgtagtgccaaagttgcctacagtcgggccgatcaaagctaaggatgataaggccaaagagccaaaggtggaggaaacaatgaaaatgccagaaattctgagccctccagcagaggcgaaattgccgaaggtgcaaaaagctcctgccacaactcccaagaggaggaggatggccagtgtactagacgctgtcatagagaccatgaagaccttaactcctgctcctaccaagaaagctgccgaagctgccaaaaacca

SEQ ID NO: 115371 - DNA, 575 bp, Zea Mays
tgcgatagatgccggttctgggtcatgatcaatgatcgaggcaactttctttgcgaaatatatgtctatgttggttgttgctctattcatgcattctccagttaatacatagtttatggccatttcatcatgggatgcttcttgcatttcttcttgcatttccctactgcttcttgttgcgggagcgagttcctttagtttttcatcgcctttgtgtgcgcacatgtttgggttggcggtttcttcaacgggaaggttcaagtccagaattcttttcttcatgtgttccttcctggtgccaggtctcatctggctccccttcttgctttgggacattttcgtgactggctgtggtaagtcctctcgccctcttttcccgggacgtctccaagtacttggggtttgagaagccagagttcctgtccttttgttatgaggcctcttaacatgatcggatataccttcaatttttctttggtatttcaaccctctggtgcattccgtgcgagaacatgcgacttaaccatgctcttcaaatcacaaaaatggtcaggcagttcatttgctaagttttg

SEQ ID NO: 115372 - DNA, 480 bp, Zea Mays
gtttggcactaccggggaggggaagtagaacgaccacaaagttgatgaaccaaaatagccagataacaaaaacagatttcttcattggattcgtctgtcaactggcctccaaccatgagtcttgctgtagatctcacacgccatctttttgattttgagacttccgagctccaccagttttcttgccttctttttttgacgaatagcccaagtatcaagccaaaaacaacaagagaaaatcacattagtcggatcatcaattcggtcagtcccaaagcaacaattattgcgacaacgccagatcgcccaaatgacagctccacagccgaacagtaccagatttttttcagtcttgttaaaactgttaatccaagtaccaaacaaatcatccacattatcaggaatagaaattagtccaagagctgattagactattctccaagtaaatctagcaaccggacactgaaaaaacaaatggtc

SEQ ID NO: 115373 - DNA, 301 bp, Zea Mays
ataccttcgtaattgaacatatgccaatatattgagtagtctcatcttcatagtggatatgttctaggatgtggttcaaagctctctctcttaactttttaagtggccaatagttcaacactggctccacaaacatgttcaaacatgttgaaataaatttgaatattcctgaaggtttattgcgcatatcctcctaatgaaaaggcaagagtgaaattagtacatggttaatgttcttaattctaggcattatttggcgcttataagctttgtttctgcatgagtgctaaagtcctgaata

SEQ ID NO: 115374 - DNA, 660 bp, Zea Mays
aaagtagccacaggccttgcgatactaggacacaaattccatggaaacgacattccataacattattgcatggtagaagtgatgacgattgtccaaggatccgaggataacatgctagacatccttgggccccgaaggtattgagacacttggacatgctatcaagaatttcatcctttagcctcgacggggtatctaattggctgatccaccaccgtcaccgtctcatgcccaacccctaacacaagagtaatcaccttctattccttttcacctaccatcgccacttcctcatcctctttttgacacaccgtctccgccacaaagcatgtccattaagggctccaccaccttctccacccctactcatcctctctgtgacccattgtctccgccaccagcatcgccatcaagggctactcctccacagtcaaagaagcctaaattttgtataccaaaaattggttttcctgttcgagaaaaagaagaataaaactattgctggcatagcgagatttttgtcaagtattgcacggagccacacttcacatactattgatttgttcaagcacgagaactctgcaaaaaaagactaaaataatggccataaagataaagaagccaactaaggcggattataaaaatgtgcctaaaaagctg

SEQ ID NO: 115375 - DNA, 576 bp, Zea Mays
gtcattggttactgcgagggaggggacatgtatgtcgacttctgaaacttcatcccctcaactgacctgaactacaattctgaccagtgtttgtcatttgttttgtgcaggtcagaggccattaagaaggctaacagtaaccatttctcagaagaggtagctcactagactgtcatctgtacagcatgttctgtgccctcacattctgctcactgcattttgcccctctggggtatccactcttcactgcatgcagaaactttgtgtgtggcttgtgcagctcctgacggcacttgattacttgcatgccaatcatatccttcatcgtgatgttaaggttgctagattcatagcctttttgttaccttacactcgcaaagtacccatgctgcttgagtggtactgatactcatcatgccttgtcactgtttcagtgctcaaacatatttctcacaaaggatcaaaacataaggcttggtaagcatcctgttgtcaagtatgcttttgggaaaatttccatgtacctataaagtcgatcagataaatgattcagttatcacacccttttgttccaaa

SEQ ID NO: 115376 - DNA, 701 bp, Zea Mays
ggagttgttcggttcggtgtctctagaaagctcagcctgagatacattggaccgttcactatcttggcccaagtgggcatcctggcttatcgcttgctactgccggattccatggcaggggtacacccggtttttcatgtctctatgttgaggaagttcttgcgggatctggaccatcagattgagatggaaccaattgctgtgcaacaggatctgactttggagtgtcgtccagtgcgtatattggaattctcggagcgtgtattgaggaagagatcaattaagtatgtcaaggtcttatggactaatcagtctgagtgcgaggctacatgggaacttgaggagctgatgcggcagaagtatccagaactttttgttgtgggtaagtgttgttgattcattaatctttccttttgttgtttcgatagaagcgtctgaattcgaggtcgaatttttttaaggggggtagagtgtgatacccggtttgcaaagagaagttggaggttattctttttgtttttttctcattcagttgttgtgttttggggatttggaatttgtggaaaatcattcaccagtagggcagtagaatttgtttggttaggcgcttgcgacggggtcgggagctgtcgcgtgggcgagttgggccgcaattcgtgattcggcccactaaccttccctaaccctagccgcccttttcc

SEQ ID NO: 115377 - DNA, 1291 bp, Zea Mays
ccgatctctacccggcggaattccgtagacctcgccgtcggccaccgcccgtgcaatttggagttgagggaagttcaccggaaggcagcacgatggttcagaagaagaagaaagcggccgcggcgcccaaactccgcaagcttccgaagcgcgacgcggtagctagctacgctccatttccgcaacctccgcgcttggattggatcctctccgggggaaggagtgtctaacttcctttttctcggtctcggttctctcgcaggataagaagctcgggaagaagggtgacatggcagagttcagggcgcagctggactcccttgggctgaagatagtccaagtcacggcagatgggaactgcttcttcaggttcaggactggcttcttttggcttctaatgtgcatgtccttgtcgatgagaagaagaaacatttgattttgaacaaaatgagttttgtttttcccgaaagcaattctcaggagcttatgccttttcaaatttttaagcaggagagaagtgttaaaaaacgttttaagagtttttgaacaaaacgctagggcgccttttgagttatatgactactcattgtagtatgcagggcaatgggtgaccagcttgagggcgatgaggaagagcacatgaagtaccgagatatggttgtggattacattgtggtatgtgggataactttttgtaattggtgaactgtagttgtcctcatgatgtcatgaattagaggagggctttagattttaattcaacatgctaaaattgttggtgctccatgaaggcattggactatctatgcttttctaatccttcttgtgcacatctgcagaaacaccgtgaggagtttgagccatttatcgaggatgaagttccgtttgaagaatattgcaactctatgctaaaggatgggacttgggctggccacatggagctgcaagccgcttctctgctgacaagaagaaatatatgcattcacatggtgagttagcgatgcaagcctagattttttgtttatttgatttatttgtactagcacacttcatgcagttaagaacaccatgtcttgtatggattatgttgctaacagaacagttgatgctccgtggttctggttatcattgactgcatattgcaaatattattagcagctgtgcttctgatctactatttgatttgcagcttaattcaccacgttggtacataaacaacttttctggccgtgaagctactaacatggttcacttgtaagttagagtatcctttaactgtttgtacaagtcg

SEQ ID NO: 115378 - DNA, 353 bp, Zea Mays
caagaacttggcaagatgcttcgggagtaggaatagtagtttttgcagactgaatttgctctgtagtttctttttctgtttcctcttttctggtttccaaggatttctccttgacgggctctgaaggcccagcttcggtctcggtctggctctttgcagcttcggcttcggatagttttgtctcaatttgcgtttttgacgcttcgacagttttcctcggagtggtgcttgaagactttattgtctccagcacatctagtacattgaccatcctttttcttttgggagtcgccgtgagatctttttgtgccttcggcactgtcattcctgccgaagggcttataacttctaat

SEQ ID NO: 115379 - DNA, 330 bp, Zea Mays
tcctgtttcctctcatctttagccacttcatctggtgcatatcttgagagctgaatgaatctgtcgcggtactcgctaactgatatgctccctgcttcagcgacagaaactccttctttatcttcatcagtccaacaggtatatgatagctcctgaactgagtagcaaattccgcccatgtgatagtatcaacagcatcgtgggcagcagtgtaagaatcccaccaatcagcagcaggaccagtaagacgaccagaagcatagagaaccttctcccggttagagcactgtgcaataatcaacatcttttccacagacttcagccaatcac

SEQ ID NO: 115380 - DNA, 594 bp, Zea Mays
acagaccacattacaatacaagtcacagattacatacacacagcgaagggtcaccagacaagcacagtaatgtgcgacacgaagtctttcccacaagacaaccccgtgcaaaagtcgcccaagggtgccgccgggcaattacaacatcacactggcaagcgaagggcaacatgccacattacaatacaagtcacagattacatacacacagcgaagggtcaccagacgcaccgcacaaataaatacaattgcaccctctactaccgcacggcaagtgtgggcatcacacatactacatcggctcaaccttatggataatgcccgcctcccgataattaaacaacatcattttcaattcctcaccctcaaacaagttccgcagatccccctcaacaatactcgccccaaacaacgaggacatcaagtcgcgttggacacctcgatctatacgaagacgggttcactccagccccatccgacggtgcctaccacttcacgaactctcgccaacactatgcttcgccacccgacggcgttcgatccttgcaccagccggaggatccaacgcttcgcccatctccagccgcggcgaag

SEQ ID NO: 115381 - DNA, 331 bp, Zea Mays
tacacaattaatcaacgtattcaccacaatcatcaaatccggcatatatgtatatcgaaatgcttttcacccactagttcgtattttagcttagataccacataagcactacaaaattttttacccgtgatcataaccatacgcatttagaccatagcaagcaattcccatgactatgagcttaaccaaagccatctaacaagttggttaacgagagcaacaacttaggccgctatacaacatacacgtcggcttgcctgttattatcgcaatccgagacagaacctatatatcaaaatcacttacgcaatcgactcctacttaacatgag

SEQ ID NO: 115382 - DNA, 581 bp, Zea Mays
tttttgtagcttcggcttcggtcagctttgtctgagtctgcgcttttgaagcctcggcagttttccctggagtagagcttgaagtttttaatctctccagcacatctagtacactggccatccttttcatcttgggggtcgctgtaagacctttttgtgcctttggcactgtcacttttgccgaagggcttagaacttctaatattttcgttccctcgactcctatctcttcaatattatcggccttcggctcagctaatttggctaaggatgccttcggcattgcagccgtctcttcaatcctctgtgtaagcgcaggttctttggcttcagtagccgaagaggtctcaccgccaaattcaggcactgtggccggttcaatatagcgcggtcggtgagtaagaaccttcaccattttcctcttcggcgcgggctcgcttggagcagctgaagcaacatccttcccagaagttgcactctttctcttctgcccccatggcgggtagcggtagtcagggtacataaatccaatagcatcaaaaactctatttagcctcttcttttttcggctcccgaaggcc

SEQ ID NO: 115383 - DNA, 352 bp, Zea Mays
agcttttaactttattgtttatttttgtgacttcgaacttatttacgttttctaccgcagccgaactatctactcccccagagcccttcgagtcattggtcgatccagaggcaaaggaatcagtagaaattattaatatggccgaaagcattatggacgaagtcgttactcaactgctgaccgaagctgcagacaaagttttgaaagaagaagaatagatattgtaaaaatattgctagaatattaatgtaacatttgctggactatgtttgtaatttttgctgctcatggattttgaatgtaatatataagtagttttgtaattcatttctttgcgatgcatgaaattttt

SEQ ID NO: 115384 - DNA, 560 bp, Zea Mays
atgtggccctatggtcaaacccaaagattgcgagcaattccgggctcccccgcacggataacgcacacccacgcgcggcgatcgatggtgacaagtccgaccacaccaatatcgcactggctcatgggtagccctcgcctccctcgttttctctctctaaatactttcttttctgtgttatccggtcgatgctctcagcccaagcttctttgactacacgatagatgggatcaaggtgggggggctcggcttatataggtgggtttgttaagattctcaaccaatgcctagatccatggaggggttcttgcgtgaccggcacgcgagattccccaattcggactcaaggttagtggcaatactgactattgggtcccaccaagaaggctcattgcagtggaggagggaggctagttgagcggtccgcatgtcagtgaccgcgccaggaggaaagatgggccagcttgagaggtccacgagcgcccgacaacatgagtgagatgggccaagaggagagaattcggcccaagtggcatttttgggttttctttcctattttc

SEQ ID NO: 115385 - DNA, 520 bp, Zea Mays
gtctggacagcgcacaacctctcgcccacgtgaaagttgcgtgacgtcgattccgaaaggatcacaatttcgatgccgcatcgatctcgcgtatttactccgcaaaatgtcgagtcttgtgtatgtttaaaatttatggattaagagaacatgaatttggaatcccgatcccctcttgtattttggcccaagtaaatattattagaactccacgatagaagtgctgcaaaattaaatcggaccgagataactagaaccgaaatgagtattcgtaattaatatgtttcattgtctatagccgtagaacaattaggcgttcgatttttataaattggattgcgcacgttaccaaagagaatcagatgcaagggtaataatcggattaattctccagtatgttatacatgatagaggaattcaagtgttcgaatttgtataaatatggaaatttgtctgatctcgaaaatacctaccagtgttagtgtagtccaaaaatattaaaattgatattgttttgaat

SEQ ID NO: 115386 - DNA, 1102 bp, Zea Mays
ccttgtccgcttttcagacccctgagatgatccttcacccgcatatctcttcgtttttacttggcccgaattcttggcttcaactgacagtgatgtgcttacaaccctgctataggtgagatctagacacgtggccatcttgcgctggagtctgtcattcaaccctctcataaagcattttttctttttttaagtccatgtccacttgatcgatagcatattgggagaggtgattaaacttgttgagataatgcattatagaatctcccccttgcttcagacgtatcaactactccagcttcatctgtagcaccacttctagaatgtaatgttccctggacgcctgtttaaattttgcccatgtgaccagatgtccagcaggctaaacggctgaaaaaatttgcccaccaagtgctggcaggacccctcaactgttgggcagcgaataggggcttctgtgttttagtacatcggatcagcccgaacttttgctccataacctgtacccattcatctgcttccagtggttcttcagctttaacaaagagcggtggacgggtttcagagaactttagatatgtggtgtctcgtggtccttgaggttgacctctgcctccaagttgctgaaattgatttcttgcgaattcacgcaggaaacgcgtgttgtcagtggtagcattgactaaggcagcgataacctcagccagtgtaggaggtacaggtggcgggtttggagtttcctccctgccatgggaagttcctgccctgtcatgagcacgagttcttaatggcatctgaggaagaaaaacatcctagattattacatgccaaacgtacaccatctttattacattgtgctgaactgtaataattatacatacccattagtacaactcaacttccttatttactttacataaggacactacttaaactacactactctaattatcttcgtccttggccgcaccattgccagcatcgggagaatgttcatctgcgaggttcatggaaggaggggctccaaaaaggtccaactccccatcaggtcctccattagctactccagatggtccggctcctatagctgcaacttctggtg

SEQ ID NO: 115387 - DNA, 824 bp, Zea Mays
ctcacatcttctgtcattttagtgatttcacctgctcgcctacgcgtctcctatcctgcctggttcctctctctctctctctctctctctctcgagaagttcctaggtagctatcactctattcaagctttacctactgatctctactctcgcttatcttttctccttatcttgcagcagtcaatttaggatagtgaggacgaagaatgtcacaccgtgtgggggaggagatgacgaggaccttcctcgccccttcagacaggtcaagggcatgactgtctaccttgagtagcaagagggaagaaagaaaaggcatcttgacagagccactcgtgcagtgattgcagcagtagatcaggtagagcagggaggccagttacggatttcttctgatcagattgccttctgagttcgtcgccttgggtctcggactcgctcctccactgcttgctccactccttccgacccagtctccactccacctcccacttcgctagctcctgccgctctcgagccgtccactactcccgctgcttccaccacctccaccactctagcttccactgctcccgcttatgctccacctattcctccacctcgcctccgggagcgtgatgagatcgagctacgaccgcttgctgatgatcctcgtctgcttgatctttagcgagccacggctgcccgggtacgttggttcagacatgtactcgtgaattcttggttgccatctcagagggacccaacagctgcgccactcttcagcaccaggacccaggagtccttcttcagggcatagctgtctgctcagattgccttaagagcac

SEQ ID NO: 115388 - DNA, 382 bp, Zea Mays
cccatgctttaattcttgcggggtcatggcctccgatccgtataaaaggcggaaaggagtgaacccggtcgccctgcactcagttgtgtttagcgcccagactgcctcgggtaataaattggtccatttgcctttttttcgtcgaggagcattttcttgacggctgtgaagattttcccgttggcgcgctccacgaccccgttggactgcggatgatagacggaggcgaaggcaagcttggtgccgatggaaaaacagaaatccttgaaatcttggttgtcaaactgcttgccgttgtcaactgttagctcggacggtactccgaagcggcaaacgatgttttgccagaagaatttctgggcagtctttgatgttattgtgg

SEQ ID NO: 115389 - DNA, 514 bp, Zea Mays
gtgcgtgcgtgcgtgcatgtcaactgcgaaaaaggagacattgtcaccgctgttcaatggggggactataggggagattcaatcattcatgttcttgggtccattgctcccccccaccatgtgagtaagaagcaaaagcaacgaacgtctatcgtgtctgcaggcagcacgcaggtgacaccgattggggagatgcatggcaggtggcagcatagctcttgtttttggttggcatagcggtatagcacagaagggtgacactatgggtctgggacagagtggttgaagtaaaaagtctgcatgtgggggcttgtatgtaggtggcgctgtctatgatcaaatcttttgactcacaccgacgttccgcgcgtagccatctcttgagtttgaagtcgaagttaagccgcgtcttgcagcactggtggaacgtgctttagcatcttcctaaattaaaatcaatcaactccatggctggctgggaagtcacaccaatccctatacatataataatgac

SEQ ID NO: 115390 - DNA, 382 bp, Zea Mays
gactgtctggccgtccctagttgccacaatgatgctcaacacatgcccatgccttttggggaagctaagcaaaccaaaagcacctggtacaggctattaccaactcgatgtaagaacatcaattttctaagcatgttgtcatacactgggatgatattacttcatgaaacaatcattcaaagccttcggtagttcataaccttgcaaagtctgcaacatatatgcattaccagatatcacctgcataatcatgtaagatcctttccaggttggtgaccatttgccaaacctatggtcccaactccttactggaaagattgtcttccaaacaagacctccaacctggaatgatttagcctttaccttcttgttataggctttg

SEQ ID NO: 115391 - DNA, 645 bp, Zea Mays
ttaagatccgcattgagcttaaggatcagaggacaatggtcggagactccagaggcactgctatagagaaaacaatccgggaaagcctcctcccaacatgcagtgcaaaaaacatggtccagcttaacaagggtgggaactatcctctgattggaccaggtaaatcttctaccattcaaatgtatctctttcagatccaaggagccaataagacctctgaaatggcctaaaagagacctgttaatattagaattattcttgtcttctgacttgtaaatttgattaaaatcaccagccaccatccatggccccacacatgtattcctgatatcccttaattcctaaagaaaggcagatttcaaattgtcttgatgaggcccatacgcccccgtgaaccaccactgaagaccatcatcaccttgcaactgaaccgaaacagaattgtccttgattattgaggctgctgaaacaaaggaaccatcacgccaagcaactaaaatacctcctctggacccatgggcaggactaaaaacaaaattactgaatccggacccaagaatagaaagaatgttgaagtctgagatggagaccattttggtttcttgaagacatacaacagcaggtctgaggcttacaaccaacgac

SEQ ID NO: 115392 - DNA, 508 bp, Zea Mays
gattcgaagcaaaatgagtgaaggctttggaaggaggtaggttctaggccgagtatgccactagggcaccaacgtttgataccttgcctctaagaatcatctcaagtcggttcaccaagtctacggagggaattcttctgttggtaacccgagttgagtcagctaggcctcggtacagataagccgggtaagccctgtcctttaacggctgaatgttcttgaaaacaaaatcagcaaccacagcctctatagtcagacccctctcctttagcagtccaacttcagctagcaaagccccagcctcagccacttcctgatctgtgggggactcggtccaactcggagtacgaacgtccggctgtctccctgaacgtgggggaagagaatttccgtggttttcaacgataaaccactccaagcgccatcccttaatactgtccttgagagggatttcaagataatcagacttcctcccacggtgcatctctaaactagcacccctaaccag

SEQ ID NO: 115393 - DNA, 727 bp, Zea Mays
gagctatcataccatcgatgaatgtcccatccttgcacactacttcggttcgaacctaatattcggaccgtacatatacatatcttgcaaggtcgccttcattatgctttgttcgagtttatgtatttagacaagtttcttatccataggtttatgatgcgtcaccatgtttttgaacggatcctatacacaagccaacaattcgatgtttacttcagtagccgcgcgcggactgtagtggacttgttggccttggtcctcatcaaaagctatgtgccaccttctccatactagcttacggtttgcagagcgatgttgtcgacgagtacatatatataggcgagtctaccgtcagggaatgccttgttcgattttgtcgcacactgatagctatatttgagtcttgctacataggttccccaaacaagctgacattgctcgacttcagcatatcaatgagtggttggtgtcattgcttttgtctggcattccatgttatgcaacaaagatcacaaatttagcatcgagaacaaacattcaattgtttttaaagggtgaaagcagatcacacatgaaaattgtgttgaaacttgcataacggaaaataggttgcaaatactaggtccacgaacaataatatattgaagatacataagttgcagtacacaaataattatttggtccatgcataagtgccgaaacctacgacaagagcagacaggcaaca

SEQ ID NO: 115394 - DNA, 487 bp, Zea Mays
attatggatgagaagtctttgataaagaagtaccagaatgaaatttgccaattaaaggaagagctagaccaactgaaaaggggtatactttctggcactccttcgaaagatgccacagaagacaatgtcattctttggaaacagaaggtgactggtttgtcatgcattgtatttttgcattcttttcgctttcactttatttctagtttctgaaggaagtattaccttatcttttacaaaatctgggtgcatttttcctttagaattagttagcactattacctaaaaccttatcttcacttcattgcctcattggtggatcctaagattctaacgaaaattcctcatcacttgaaaagctagaagatggtaatgtcaagctccagtctagactggaacaagaagaggcagctaaagctgctttgcttgcaaggatacaacgtctaacaaagctaatcctggtttccacaaaagcaactcagactcc

SEQ ID NO: 115395 - DNA, 509 bp, Zea Mays
gatgcagagataagtgccatgctggatatgttggctaaagattcctctgatgcagctcctgctgaaacactggctgtagcacccatcccagaggctggcaaagctttggatatttagaggtctgatagtgttcgaccgaagcgtcctcgccgagccactcaaccaacttctcctactgaggggaagaaaaagaaaaagagacgtcttcaccaagtgtcatgcttggatcaggatgccggtccttctgctcctgctgctaaggaagtgccggtgccagtttttgctgaagctgatcctaatgggtgtgacccgactgatgctgatctcaatgtgtgtgaccttgatgatgctgaacccaattggtgtaatctggccacatctgatcccaacgggtgtaccatccgcattattgatgaagatgaggaagaggagaatgaagtccctctaattcggaagaacagccggcgctacatagctagcggggaaagtagtggtgttccttctccagc

SEQ ID NO: 115396 - DNA, 643 bp, Zea Mays
ttctcaccattcgccccgacagaggtcccgagcagttccctaaccttgctcgcggttgactttggggtgaggagcgaggccccgagttgttccctggtcatcccagacatggtgggacttgggaactgaggagcgacgaagggtggaagaagatgaacagacggagggcacgggcgctggaagactcgaaggctcagaggctggaaggcaagaaggcataaagcattgagagggtgggggcgtgcagatttatacccgccccttccttgtcactttctctcaaatttttctctccaacaaaaccgccagtcacggttactgaaattgtgcccttaatgggcgcgtgcgacagctgaagagatgcgccgccctcgcgcagggcgtcattaattgaagcatgccctctcccgtgcgcattgtgcccgagggcgcctcgggtcaggctctgcaaaacattccatgaccacgagatgatatcggctgcagaaaaagatttgggcccaccgtgcagtataactccacggtggacccaggggcctctgtcagcgccccgtgggtcatatacccctgagtcgcatcctaaagcgcctctttgtctctaaaaaatacccacgaggccctcagcttacgtcagctaggggcc

SEQ ID NO: 115397 - DNA, 434 bp, Zea Mays
gagcgatccgattaagcgagagcgcgacatagcaatcacatgacgcagccaagttcgaacggcacaaatactgcgtcgtgttgccagggcgcagccaatattcagctaatgccataactcagctgattaccaacacaacctgatcagcgtgtccgagtacccactatacaatttaatcgctcagcgtgagtccgaaagctcaacacaacacaaatatttagagcgatttaagtatactcaatataaccttcacatgtattttaataatttctgctatttatttacagtggggataaaagcagaaaaaataacaaatttaatgcatgaacatgacacatcaggtgtaaaagacatttttttcatatttaagcatgcattttctactaattatttactacaggaaataattaattaaagtagaaactgcaaaaatg

SEQ ID NO: 115398 - DNA, 1137 bp, Zea Mays
aacggggaaacacgccctcgctggcgactttccgcagaggcccccagccttttaaataactgctaaagaatctgcggcactattcatgtgtctccctgacattcgcgcaaaacccctcgcacttctatctcttcatgactcaagtccccgaccacgcacaggtcgaacacctggccggaactgagtgcacttgccagtggggacccattccgatgacatcaagcgtacgagatcaatcatagatgctaatcgaacccctttctatacttaatttggttagtccgtcacttaatcaggtctgtccgcgataaccgcgacgcaaatgcttcggcgagctcgtcctaggttacaagagtcagtagtgttcaatcaagtgactagggaagaatcagtggacaactaggactaccaagcttccgtaaacttggatgaagaccacctagaacgaccggtctacggaagccatgtccgcggcggcgttcccggacaataccgtaatgttcacaatgctacgaacgatgagccgatgagcatcacaaacgcaagagggtgtagaaacacgaacgagaaggactcaaacggatctatgggtggctggccacggcgcggtgtctcacggcggcgcaactgaccaatttggggtaaatccgatgactggggctacggtgcacgagagtggctaactggggtggaatgaaggcttaacagagaggtggagcgagggcagcactcaatttaaagggatcggctacgcgtcacgccaattttggccgaagatgaacacgatggcggtgggatatttcacttgcaagttcgtcgtggcgcctgccggtgcaagggctcaaagatggtaattccagtcatgccatggttatagctatgtggtgaaagggtcacggcatggcgcaatcgcaaggaacaacatccacctcggtgatggccactgggccatgtggccggcaagtgggtacggcgactgagcaagatcagtaccccaagttcatcctccgcgcgagatctttcacctcacgtagatatccgcgcaccactgggcacgaatcacagcaccggcgtggatcgcggcgcaggttcaccggcggcgagatgcgctgatcctagatccttgttcagttcaca

SEQ ID NO: 115399 - DNA, 400 bp, Zea Mays
gtcaactgcttggacgatatgattacatccagcggtcacgtcaagttactactcaagggcagtttgctaaacgctcagcgcaccaagccgtcccttggctacacccattggggggacgtccaagaattttcaatagattttcctaagcagtcacatccatacagtatacgcaatgaatgtatcaagacagaaggaagatatcgatagagatcggaggaaagccaaaaatagctactgaagtacaagtctaatcaacagaagcattgaagcacgaagcgaaatgaagaccagccaagagccatctaccagacatccaatctgtcaccgatcaaataaatttcaaacctaacaggacatgagtagatcgcgttgttgatctctaaagcaggagttaaagaca

SEQ ID NO: 115400 - DNA, 272 bp, Zea Mays
ttcattgagttaaacttttaggaagtggcatctagtggcattactaggatttaaaaaaggtggattaacacttaaattatttcctaatggttttttgtgacttagggaggttgctggtatcttttaacttagtttggttaacccttgctttctctctttttcctttttcctattgagcttgtaatggtggtttgaactacacttatgatttagaattttccaaaagttccacaaaaattatagtagcttcctactgattaaattaagttgtc

SEQ ID NO: 115401 - DNA, 529 bp, Zea Mays
ctcaattggtttaatgaattttgcatccaggagccgctggaccttggctttggctgtctttgtcttctcgtctgacattttgcggaggtggtgcttcttgtggcggacggaggggttgatgtgcagtctgtgctcgatgatactttggctaactccaaccaggtcgaatgataaccaggcaaagacgtcattatttcgacgtaggcagtcgagcaagctggcctcctcctgcagggctaagccttcgccgattaacacaacatgattgggtagggccgtgtcgaggggtaatttcttagccccctcgtcgctttggatcgggttctgttgtctgtcagtcttcgctgatgtatctagattgtgggctggtgtgtgggcatccaagcaatggacattccgctgcccgaggatgaggtctctttctatgttacaggccacttgttgatcgccgaaaattgtaatgactatgttgggtcctaggatcttcatgcataagtacaacctatgaattgccgcctcgaaggcattg

SEQ ID NO: 115402 - DNA, 509 bp, Zea Mays
tgaatttcagtgggattggctctactttggggctctatatctcctaagttataaagtgtttgccctagatcaacacatcaaacctatagagctatgaaaggagaacaattcttattaagtgaccaagcactgatgctgtgtaaattttggagaagactagacccaaagatgggctgtcagactgcttggagtctgaattcagactgacagaggaattgcatgaacttagggcttgaattcaatcatgatccaataagaattggactagggatgctatagcaaaggtgaagatggtttgtagtgctacaactttgctgcagagcattggttatgttgccatggcaaatttggagaaaacctgccccaaacatcgactgtcaggctgactgaataggattctgatggtacagtgaaccggataggatcaaattcagatcacatcaccgccgacgagctatgcacttggattcgtgctcgccgttggcgattcacactcggatcggttggat

SEQ ID NO: 115403 - DNA, 658 bp, Zea Mays
agcgtcagaagagcctcttcacgggcacactgacgtgaccgtcctcgaattcgtgacccgactgatgtcaattaagtccaagtttgcattctcaattaattgttataaggagcttgtggatttgattagcgaggttcttcctacgggtcacaagatgcccaaagacatgtaccagtccaagaaattgattgaaggtcttggtatggagtatgagaaaattgatgtttgccaggacaactatatgcttttttggaaggaacatgacagagagcagaaatgcttaaaatgtgggaagtcgaggtacgtggagcttgtaaatgaagaaggggagaaggtggtgacaaaggttgcacataaacagcttcggtacatgcctctcactcctagagtgaaacgtttgtttctctcgaggaagaccgccatgcacatgaggtggcataaagattgtacagacagacaagatgggttaatggtgcacccgtcagatggtgatgcatggaaggctcttgacaactttgatccagattttgccagcgatgcaagaaacattcgtatcggcttggcaactgatggtttcacacctttcaatatgaccgctacgtcgtattcatgttggcctgtcattgccataccgtacaaccttccacctgctctttgc

SEQ ID NO: 115404 - DNA, 814 bp, Zea Mays
ggaatttgtgagctctggtgggtaattggaagtgagaaagggtgcgctaggagcgtaaccagaaggcggagcagggagggcctttaatttatagtagctacgtgagtgtgtcgtgaatttgggatcagatgatctcacggccggaagggggtgagtcaccggagcgcaactgtcgtggcgctcggtgaggtaaggctccaaacggtaaatggactatccacaacgacctattgcgacgtggtaatgtctccaagcacgtggcatcctcgcggcgagcggcggacgccaacgatgacatcccggccggtggcgaagcaagtggttatggtggccagctcacaagtttatccgtagtcatgatcttttcacttccccggtaatatccgcgttgatccatgcacgaatcttcacggcgagctcgaatcgcagcgctcgatcaccggcgatgaggtacactgcacctaggatcttcttcagtgcactataccatggcgatgttcattcagcgcgcctgatagagcgatttgagagtcatttatcttcgaatttcattcaacaaactaccaagccgactacagaaaagttgttgtccatcataccagctacaattttgttatagggttcttgttcatacctccactcgatcaagcacaattcagctctaaagttgatatgatgccattgtcagcctaaccttcaggccaacatacaactgataactcaacttccaggccattttactccaatttttgtacaactatagggctcactcccttaatcaaacttggactactttaatagctctacaaatttg

SEQ ID NO: 115405 - DNA, 411 bp, Zea Mays
ttgagaaagtcaaaccgcatgtttcttgaccatccaaagctttttttacaaacttctactagcattacaagccaacgacatgtgcggtagcaaaatgttgaccaaaaaaaagggcaaccgcaagcacctggctaggaataatatgggtgtcaatgtcaaacctcgaggaggggttggtgggctaaacaaaccttcttagtcctaccttctctctgggcccaatcgatacatcattgatcattgtgtggttttctgcgtgaaagcagcgaacagaggagaaaaagcgactgctttgggagattgggtgggaaaaggcaattgtcttttctagctcgaatcaatcacccttcatatagtcttcagtatattaaatcctttcttagggtagtcttctaaatattctgatctgcc

SEQ ID NO: 115406 - DNA, 469 bp, Zea Mays
ctatccatttagtgaatttgtcaattgctaccagtatatgagtgtatcctccttgagctttcttgaaaggtccaatcatatccagtccccagcatgtgaacgaccaagttactggtatgacctgcagttgctgcgctggtagatgttgttttgacaagtactggcaggcttcgcacctctgaactaactcgactgcatcattttttgctgttggccagtagaatcccgacctgaagactttcccgaccagtgtcctggatgctgcgtgcactccacattgtcccgcatggacctcattcagaagttgctttccagtagttgagagaatacatttcatgaggactcctgatgcgcctcttctgtatagtgtttccccgacgagtgtgtagtgagctgacggtctagcaatgcgcttggctgcatttttgtcatctggttcctcttcattctttatatatctgatgatcga

SEQ ID NO: 115407 - DNA, 573 bp, Zea Mays
aaaaactctacttggggctacatgccagtcgccccgtaagaacgcctcgttgtgggtcgggcaaagataacggtggaaatgggccgaccaaggaaggcgatgtgccctcacccggattactcgtggcttgggcgtgatcccgctgaagctgttcgtttttctcgcgcctgatatcctcgaacgccggggacagcttggagcgcaggcgtcgggttttcctcgggataagcgaagtttgttcgctattagctaggagataagctggaagagtgtgatcagcatgtacgcgggaagtgccctacggtcgtgtatataaggccaagggggatccccatcattttcatctcattagcacctcaccattcggtaggcaccacttgtaaacacctaccacatacaaagtcatcccagaaaatagggtattacactcctcaagcggcccgaacctgctgaaaatcgctcgactctctctttctcgtgcccccggcacgaaccatcaagttagaatccacgacactgtcctacccaaaagcaccacgagcgtacccccgggtgtgcggtcggacactaaac

SEQ ID NO: 115408 - DNA, 468 bp, Zea Mays
ttaggcgccctgctggattgttgggatcaatccagaaaggggtatatgattgatgtcttgtacctttatcaaatttaaactgggtcacaacctcaatcatcttcatgataaaaggagcatgaagacatcccttcaatggaaagcagacagcatgaatgatttcctgccaaatcatatcaaagacatttatactctctgagctgctaggtttcatgaatgagagcaagaccttgctctctccaagaatgttcatctgattacccccttttggaatgagggtcatcctgcagagggagttgatgtatcgataatacttatgcatgtttgtagactcccaatatttcccagactcagagagatgaaggtctttggcttcatctctagaaggctggcggaaatcgtggatcttgatcttgtcaccagagatatcattgtcagtgacaccaagaatgtgagcaaaccgacggt

SEQ ID NO: 115409 - DNA, 667 bp, Zea Mays
ttcgatatctcacaaattatgtcaaaaccaatctctactataaagcatcggtttgcaaatgctttgttggaactctaaagtctgttgcacaatcagaataacatgacctaaagtccaattcttatggtggctgatggtacaaagctacaaaagagaatcaaatgcaggtacaatctcaaaaagaaagcaatctttgaagatgacatctagtctatctgtgcagtagctcagaagataattgtggcatgatcctgagctgccctttggcatttgaagcagtgcatgcggaagatggggcacacgccttcataggtctcaaaaagaatgcagtgttttggttttaccagttctctgaaccgtttgtgcctagcatgatagcactggtggctatgatgttgacccagggcatgcggaagatggggcacacgccacgaagagcatgagagcaaacatagatctgccatgcacagcagctggaacaccaggtctatgtcaccgagtagaggccggtggaggacagcactgcgcccacctccatcacttgagctaatgcccaacgatcttgcgtgcgtaggcgtacatgttagttaacagtatggtaatgagcatagttgtagtttattggccaaatggctaatgatacaaggaagcaaagctattttttaac

SEQ ID NO: 115410 - DNA, 577 bp, Zea Mays
ctggttgaacagatcttctattctaggcaaggggtacttgttcttaatcgtgacctcattcagagctcgataatcgatacacatccttctggtgccatctttcttctccacgaacaggacaggggcggcccaaggcgaggtgcttggccggatgtaacctttctctgatagctcatcaatctgcttcttgagttcaaccaactctggtccagatactctgtaggctcttttagaaatgggggcggtgccaggaagaagctctatagcaaactcaactttccgctcaggtggcatgcctggtaaatcttccggaaacacatctggaaattctgacacaaccttgataatctcgagtggatctgctcactactatcaacagccatctcatgacaacttcctttccttggctcaggtgagactaactcggtgaccacttcctctcctagtggagacatcacttaattgtcctcttatcacagctgataattacttggtacttatctagccaattcatccctaggatgacatctattccctgagtacccattactatgagattagtgcgaaatgctatccc

SEQ ID NO: 115411 - DNA, 622 bp, Zea Mays
ctcagaatgattagtccacaagactttaacatacttaattgatctccttctcatgacacgctccgaggactccaagatacgcaccggacgacactccagagtcagatcatgctgcacagcaatcggttccaactcgatttgatggtccggatcctgcaaaaactttctcaacatagagacatgaaataccgggtgtacccctgccatggaatccggcaattgcaagcgataagccaagctaccaacccgggccaagatagtgaatggtccaatgtatctcaggctaagctttccggagacaccgaaccgaacaactcctttagtaggtgataccctgagaaggacttgatcacccactgcaaattccaagtcccgcctcctcacattagcataactcttctaacggctctgagcggccaaaatattctgacgaatttcctgaaccttctcagatgtctgctgaacccaatcaggaccaactagagatctctctcccaaagtctcccagcacaaaggggagatacatcgcctgccatataaggcctcatatggtgccatcttgatgctagcctggtagctgttgttataagcgaactcggccaaggcgagatgatcatcccag

SEQ ID NO: 115412 - DNA, 468 bp, Zea Mays
ggtgcacggatacactcgttggggtcagttggtgcacggtcacacccattggggtcaacttcagcaggtacaccaccagtggggtcaacttcagtaaagacctctgttggtacttcttcgcaaacaggagcagaaggttcagcatcctggtccaagcacgacagtcaccgaagccgtctctttttcttcttctcctcaacaggcgcagctgggcggctgacttggcgaagatgctttaggcgagtaccctcaggcttctgggtatctactgttttgatagtctctggtataactgcaacaaccattgtttcagcaggggccgagtcagatgattctccagccaacatatcaagtacaacatttatttctgcatcatctgggctcgttggcatctcaaaatgaacttgcctctcatcattgggaagatcacaaagagaagcaaccaagacttcaatgtcttcaggagag

SEQ ID NO: 115413 - DNA, 345 bp, Zea Mays
aaaaaacaaataaaacgggttgctcagtagcaccggacatgtctactacaacactagataaatcaccagataagagaggcctctatactaaagaaagggttggaaatcaaaggacatctgacatgcgagtgtgctttgggtctagcaccagatagagcaccagatatgacacttagagagatctgtaccatgttttggacagtccataatgcacaggacatgtctgacgtaatgccggataccgcaccgaaaagggtacttagagaagttacaaaacaaccagagcaaggttacaacacattagacgtttccgatgtcacaccagtgatcacactaaatacctcg

SEQ ID NO: 115414 - DNA, 337 bp, Zea Mays
ttatgattttgcaccatgcgtctgagcaacacaagtggtgatgtttcttattgtattagctacatgcaatgttttttgtttggattcatcatagtttgcatcctgttggaggagaaatccaagaataatgatctttataggatggagtaattttttacttgcttttactgactatcacatctcagtttggattcgtgagtgttgtaatgtacctatcgtaggccaatttatttatgcgaaatgcttttctggctgcgaattgcttccacgaaacagatcttggtttctgaccaagactgctgtagtccttggtttctggcattggctatagtccttg

SEQ ID NO: 115415 - DNA, 875 bp, Zea Mays
tgttttttgcctgctatttcattgtcattgttgtttgtaccattgaatatgttcacaacaatataatcaatcgataatcaaatacaacgactggacttacatgtgaacgcagtatctgtggcgtatccatctccctggagctaatattggacataggaggtcgaaccctttgttctccttcttcccctatgctcatctcggcgatcgcaggacccattagagcaggcggtggtgtcaccagtgagttaccaccaactcctccctctgtctctggatcaagacgaacgccatctccttccatcgtcggcgaccctccagagccggccatctccaactccgattagttatgcagtcttagtggtctttttttctgaatgaaagcaaatctcggatactataaaagtaaccgcatccacgtttacagggtctccccattattttcggaaaccgtcccgatattatggcgacgtctttgtcaaactaaaattcataatataaaatttacgcacaataacacaacattttacgccattcggtatataatgtttatgcatctattatgccgcttcggttttatgccatatctttcaacatcttatgcttcatgtttttttaccttccgcacattacttaccatgcaagatccataatttacgcgcccacgtatcccagtaatcacgtttgcatgtgacatatattccctttaattccgcgcaatttccttaccattcaaacaaccgcgtcacggcgccgtctgtcctgcatgcctgctctcagccccacgttaaaacacaggcgcgcctgttccatcggccagacctcgggaaccgacctgggcttcctttaatatccgaagcccagggctcccgttatac

SEQ ID NO: 115416 - DNA, 642 bp, Zea Mays
gcggaaatcgaagaactctgagcttgtgaaattggatcccaggtcggttatgatactattcggtatcccaaacctgaatattatgtcttgtatgaattccactgccttagctgaagttagagaagcaatgggtttgaactctatccatttagtgaatttgtcgatagcaaccagtacatgagtgtatcctccttgagctttcttgaagggtccaatcatatccagtccccagcacgcgaacggccaggttacaggtatgatttgcagttgctgtgctggtagatgctgctgttttgataagtattgataggcttcgcacctctggactaactcggctgcatcactcttcgccgttggccagtagaaaccagacctgaagaccttcccaaccagagtccttgatgttgcgtgtatcccgcattgcccagcatggacctcttctagcagttgtttccgtgtagccgaaagaatgcatttcatgaggactcctgatgcgccccttctatatagtgtttccccaatgagagtataatgagttgactgccttgcaatgcgttctgctgtatttttgtcatccgactcttcctcattctttatgtacctgatgatcggctccctccagtcatcaggatctgactctgg

SEQ ID NO: 115417 - DNA, 405 bp, Zea Mays
ctaagtggtgctggaatattatgcaggatgttccaccactgcatctaactgaaattgtgacatatctggttcggcaatctgggccatttttagatcaacttggcatacagagaggtttgaaacatcattgtttgtttggaatctccagtcttggtacttgttgctgaccatcttattcttactaatgttatggtgcagacctttgtgacaaactagtggagatgttatgcagtaaacgaaatggtcggctcatgtatcattctctttcacaggacagacccttagctgagaacatatctgacgagcttgatctaagaatagctagggtattagaaagtactggttatcacacagatgaaggtttttggaatgaccctgcaaagtacaagatctcagacaacagac

SEQ ID NO: 115418 - DNA, 349 bp, Zea Mays
tggtgtaaagcagacttgacaccagccttctagtttctgtagccatcttgtcgtcagcggtttttgtgagagggtgttcttctattgatgttgttggccgaggccatgttcgggcagacggagacttctcccgaggccgaggtcgggtctatgcatgggtacacagtcgtgaggcgccactgccagggcagttggtgagactgagcttgggcgaggcgtagtttcctctcgaggctgaggccgacctcgggcgaggtggagtttcctctcgaggctgagcctatgtccagtcgtcgtatgtcatgtccgaagttgttgaagatagtgaccggagcgagggaatagtgtc

SEQ ID NO: 115419 - DNA, 570 bp, Zea Mays
acaagattgaaaggccttcttcaagcttaggaaatcccatactcttagctatctcccggcaaacggataattctttgttgtccgggagacagtataggaaatcatcttcgtcagtgccgttaaacactagagctcccttcggatattttaatttttgggcatagtgtctggcttcaaggatttcttcttcagataatttcttcggctggggcttcaagggcaggggattttgctttttctgccatgctggtatccgaagtttgttgatcagctttgtcttcaggcgcgacagcctttgcctcaatgggcgctgaaggcccagcttcggcctcgtcttggactttgacagcttcagcatttttcttagtaggtccagggctcaaggccttcatggtctccaagacagcgtccagcacgctggccattctccttctcatgggagttgcggcaggagctttttgcaccttcgtcaattttgcctcagctggtgggctcagaatttcaggcattttctctattttttccacctgtggctcttcggctttatcattcttagcttcggctggcccg

SEQ ID NO: 115420 - DNA, 424 bp, Zea Mays
gtgcctcagcggcagccccaagaacctgcctccgctgctgaggccgacgaccaggctaccgagcccgacgacaagatgggcgaggagtggatttttgagacgtggttgacagcaatggatagtaggttgccattttccttgactaccgatgaaggtaagggaatagcagctgctgttgcaaaagtatttcctcagtgtttccattgtctttgcagatggcacatcttgtctagatgcaagcagagactgactgatgcctgcataaggtttcctgggttacatgaggagctcaagagatgtgtcaatgggtgtgataccacggttatttttgacatgctctagggctccattcttgacaagtatggcctgagagaccataattggctgcagtcactgtatgaaataaggcacaaatgggttcctg

SEQ ID NO: 115421 - DNA, 464 bp, Zea Mays
tccgagttggactgagtctcccacagatcaggaagtggccgaggcaggcgtattgcttactgaagtcggattattgaaagaaagaggtctgactgccgaagctgtggtcacagatttttttttaagaacattcagccgttgaaagacagggcctatccggcatatctgtatcgagggctggccgactcaacccgggttaccaataggagaattccctctgctgacttggtaagccgtcttgagatgatcctcaggggtaaagtttcaaatgttggtgctccagtggcatactcggcttggaatctacctcctcccaaagctttcaccctttttgtgtccaatccgcccgtgaccgatagcaatttgggtcttagagtgcgaccctctgctgaagaagtctgtactttggttgcttcgctcggggagattcctgacgatgaacggcaggtttattttgaagttcc

SEQ ID NO: 115422 - DNA, 408 bp, Zea Mays
actccaaggccgaagataatgctttgtccacaactttgggggtcggggcaagaaaagattgaatagggtatttgatgctattggcttcgtataccctgattatcgctacccgctgcgagggcaagggaaaaatagaaaacctgcctcttcggtcaccccagctgagccaaagagcaaaaaggtgaaggttctgacccaccggtcgcgttatattgaaccggccgtagtacctgaatttggcgtaggaacctcttcagctgccgaagcaaaacaaactgctccgattgtgcaaagcgctgaagagccaactatagtgtcgaaggtgcctacagtcgggccaaccatagctaaagatgataaggccaaagagccacaggtggaagaaacaatgaaaatgccagaaattct

SEQ ID NO: 115423 - DNA, 639 bp, Zea Mays
tcgacggcgacgaaggtgaacttgaggttcccttgggccgtgggtagtggcccgacaatgtccaggccccagcgctgaaggggccatgtgtggccgattagctttgtgaattgcgaagggcttcccgagcatggagaaaacttctggcaggcttcgcatgaccttgtgacccgatttgcggcgcatatcatggcgggccagtagaagccttgacggatcacctttgcagctagggccctaggccctgcgtgagagccgcaagtcccgctgtggacttcgcgcaggatttggacgccttcgattttggtgacacatttaaccatgggttggctgattcccttcttgtaaagctggccttcgatgagtgcgaagtcctggctttggtgtttgaggcgcttggcctcgttgatgtcggttggatgatagtacccctgcaggaacagggttattggtgcccgccagttttcggtcataatgaggttgactatgcggtggccctctctgtcattggttatttggaggccctctgggctgcggacggctggcgtgccgatgacatggtagaatatgtcggagggcagggcctcgcctctagcggctgccttggccaatgcgttggcctcctcattcttggctcgg

SEQ ID NO: 115424 - DNA, 611 bp, Zea Mays
acatgatacttgatgaactctcaatagttgcttcaactcaatcacccctacctatggggacaatccctaaactggtcgcttagcccaccaaattgagcgaggagagccctactagtacgagagatgttagtggctatgagtatctctacatagccattgaaaagttcacaaagtaattagagttagtggctatcaccaagattgatcagctttactatcaattttcttcggggcattatatcccactccaggttttcgaatagggtgattaccaaaaaggtacctagttcaccggcggtctcttcggtaagtattacaaagacatgggcatcaagtttagctttgcctcaccgcatcatccttatagcaacaggtagatcgagcacgcgaatgcaaaaactctctagggcctgaagacttagacatatgactgtctcaagaagaatggttccaggtggaccgggtatctcgagtggtcctctaggaaaatcatatcactctaaatcatgccattggagagacttccttctatttagtttatagggttgaagttatacttcccctagaaattactaaggactctacactggtcaaagcctatgattattttt

SEQ ID NO: 115425 - DNA, 786 bp, Zea Mays
cgtctacagtgacatcgagtgaagtcgtcccaaggccaaaaagcctcaggcgaggaaggtatgtgtcatggtttccgaaaccaagggataatgatgtttgtgtaaggtaggggatgctagcgtggagccactccgaatggtgaatctctgggactcgttgagggatctgagacacagggttatactagttcgggttcgcaccctactccagtgttgtgcttatcgtagtattgctttgggcatgttataacatgtgtgcttatgtgtgagaggaagaggggccttcccttttgtatctcaaggggcatgccttacatcgatgcctctctttaagagagatatagatagagagagtccttttgttgtcatggtcggacttcctcctctgggtcgtgcaaagtagtgcttctggtatggtgtcatacgtcacacctgttcttgcagtgggtttgtggctgacgtccctacaatgacacacaacaagtcccatggttcaacctcggcacttgatccatacggaatggctttctcctgtcaccatgggccctacgtcgtccttccgtgagcacggattcgcctatccggtatggtgccccatcctgtcgcttccgacatacgggcaggtggcctcatagcctcaatcgtcctaatctagtttatgtttgccttgataccccggtgagaaaccaggaatcccagcaacttcctggcagagacgctaaagtcacacttctcagggttcagctttgtgtgcgtggcgcatagcttgtcaaagaccagggtcag

SEQ ID NO: 115426 - DNA, 501 bp, Zea Mays
actgcttcggtgaccgagggaaatgagggtgttccgaagaaacaacatatgatggctgtgacgagggctccttaagaccctacccccagtcgcgacagaaaaaattgttgccaccaccgaggtaggagctgatgaaatggccgctgaagctgaaaatagcggaggccctttggaaccacaatgtcggagatggacaggattatagctgatgtggttcccgagagggaaatagatgaagttaccgctggtaaggctacacccttaaatatgaaagaattggaaggagcttcttcggagagcaaggatttggacctacgacacttgggtggccaggaactctccgaagaagataactttgaactaaaagagtttgctattgtcggtggctacaagactagatccgtgctctttggtggtgttgatgaagaaattctaggatgcattcctgattgtgctgcagcaaagattgtcgccactatatcaaagagcatcagattcccg

SEQ ID NO: 115427 - DNA, 624 bp, Zea Mays
ctcacaagtctcttatgcggaggaagtggagctgagggctacagagctggagtcatgtctaagtcttggcatagcgacagggctccagtctccgggtcttcgtcgatgcctctttcctttcgttggtctgttcgtttgtcttctgtgtgtgcgtgtgtctgtcccctcggctggtggtcgacttcctccttttataggccaatgagggggtcggccatcggtggcttcctcgagaagtagtcactgggcgatggtaaaaccgagcgttctaccccggtgaagttgtgtgcatgcgtgagcatctgggtcacctggtcatcttgtattctttatggaagacggtgcgggaaacatggggcccaagtgccattacttgagctacgccgacccctagccttcgtagcctgggtcttagcgcggcttgtattgttgtgccctacaggcggcctgcgcactcaggcctagccctgataggtcatgagtgtgtcgcagtccaggggcggcgggtcataaatgcaccacaatctaaggggttcataggtcataagtacgctgcagcccaaagggctcataggccatgaatgggaggcggaccagcacctctgcctcggctcggcgccaggc

SEQ ID NO: 115428 - DNA, 570 bp, Zea Mays
ccggtgttgaacttgtgctgctccgtggtttggattggtgtgccggttgatccggcggagggataggcgcgggttcggatttgtggagggaggcggcgggggatggactgacggtaacatcgagttgtcgcgtactcacgaagtagatctcaaactgattggagctgcagccgatgggttccaacgcgcagcctgtctctatcactgtttgcctgcttatcctcccctgcagcaacgacatattggtactcgtatatattgggccttgggggtggaggtttgcagttttgcacaattgttgtctccgtgcttgctcaccaaacatttactggggactgctagcagataattgcaaacaattggcctttggcttcggtcataaacttctaatctagatgactagttctggtgggcaggttccagtcggagtcctgaaacagcagaaagtagctacattgcttttttgttgcagttcactcagttttttctgactgttcttaggtcacttccaatgataaaagtgtttaggaattattttagagggcattatgctcttaacagtttttatct

SEQ ID NO: 115429 - DNA, 341 bp, Zea Mays
aactataacatttgtttctgttgtcaggatgtaacaatcatcttgaacgattgcggaagtaaatgtggcatgctggtttttgagttttttcccgacttatgccaatggcttggctggtaaggcgtagtggttgccctaagatgagtagatgtgagcatgtcgcaccgccttaagacattgccgacttaagtcgattgctccgttagtagggtatagtggtcgccctaagtcgagtaagcgcgagcatgttgcaccgtcttaagtcattgccgacttaagccaattgctccgttagtagggtatagtggtcaccctaagtcgagtaagcgcgagcatgttgc

SEQ ID NO: 115430 - DNA, 1135 bp, Zea Mays
cttcgcgacccatctgtgaaaggaggtctgaacagggccgcggcgtgagctgtggccggtgcaactctaccgtgagggcgacgaggagggtctaaggtaccatagcatagactatggagccgaatcgatgactctggaaatccaaagagccggcatatctggctagcatgcagagtgacatcctctctctcgaagcggaacatcatccactgatgatctatgacaatccacactgtagcataaaacactctgacccactcctcaatatatctgccactcgcggtcagtagagaaagtagtcctggcagataggagagatgcacctctgaatcagcacctgctgcgagcagaaaagcaggtagatccaatagccggtgcgctcgcagggcaatctgcgctgacaaaagtgcccgaaagaaggacttctgagtcctggtactgaagagagttgccgctgcagggtccctctgagcaggaaaccaggactccacggatacgtgtctgaaccgacgtacccggctgcagtggcacgctgaagatcaagcagtcgaggatcagcagctaggggtcgcacctcagtctcgtcacgctccctaaagcaaggtggaggaatgggcgaagcgaaaatgggagcgagagggggaacagtggaagctggagtggtggagggggtgggtatggcagaagttgtggatggctctggagcgacgggagctggtgaagtgagaggtggagtagaagttgtggcggagggagcagaggagcgaggctaagatgcgaggcgacgaactctgtaagcaatctggtcggaggaaatctgcaactgtcctccccgctctacctgctctgctgctggtgccgctacaagtgctgcacgggcagctctgtccatacaccgcttcttctggccttcttgctgctcaaggtacattgtcttccccttgacctgcctgaaggggcgaggagggtcctcgttgtctcctccctctggcgctgagacattcttcgtccgcaccatcctgacctgagtgctgcatgagtgagtgaaaaattaagcacgagtagatagcagctgataagattaggaatgaaaggatggctacctggaaacctcacgagaaagagagaatccagg

SEQ ID NO: 115431 - DNA, 1426 bp, Zea Mays
aagaatttattgcttgcggggtgtggccattggcgcatggctgggggtggacaaggtgaaaccacgctcgatgcctttaaattggaaggtgttgagtctagccttcaccattaatctgcgtggccggaatggtgcaaccttcgttagagagacagtggttgaggcagtaaaaattgttggtaaatattcagcgaagactgagacaccaaaaatttaggatatacatggttcaaatgttagactaaatcgtgtatttgagctgaacaacgtccggtacggaccgtatcttgaggaaggatcctcttatgttggggatgtagaggggtggaaaaagaaaggtggaatcagacatggtggggtgaatgaaggatgctccgagggtaaggctgagatgccgccggtgacaaagaggaggaaagtggaagcaagagcaaaggggccgtcgagggcacctaggatgacggaggtgtccgacgggtttgctaaggagctggacgagacacacgctgagctgggagaggtcatatcttcgcccgctttgcggaaagcatttgctcggatgctgaaagtgatggggtgagtggtgtagggatgatcgcattcttatggctttcggcgaggacgattctacgtcttttcaggcttggtatctctgagtttttccttatgggaggaatgttggcgttgttgtaacagttgtgatagacagggaccgtcgggagtcttaaaagaagcggaaggctccgctgcagctggagaaccgatgtccagagatgtgaggactgcggctgcctctgtggtgatgcctccgcccgtggctttggttactgtggctatggggatgcccctgcctggcagggctagacaggatacgatgccgatgggtactgaggtgggcgtagctggcggagtggtcccttatgtttctatcggggactacctgctcgagggcgtcaatgaattcgacgcccacaccggtttggcggccagtgataagtgcttgtgcatgtctgcgtgctcattttgagtttccttgtgtttactaatgaggtttttgggagcaggttcgaggtctggcgatctggttatggcctaggcgaagcctgtggttggggcggtcaccgatccatgggtgcaattctgcgttaatgttgatagaggtggggtggtcgccaaagcgtctacctctcgcagcgtcatggtggctattgagaagcagctgcgctatgtgagttttatcagatgcaattctgtttggggcaaattactgctttttttgatcaagtggtgtctggagcgctcgcgaaggccgcggttgcgtagctgcgcactaagaagaagcgtttgaagagtcaagttgggcacctttggacatagaatatcgaggccatcagggacgagtctgtggcggagaacaaaagtcgaa

SEQ ID NO: 115432 - DNA, 338 bp, Zea Mays
cctcaatgtgatgcttcaaccactgattgaagagttaaagaagctatggcaaggagtggaagcctatgactgcttcaagaagtagaaattcaatctccgtgttgcgtatctgttatcggttcatgattttatggcgtatggtattttctctggatggagcgtgcatggtagattgacgtgtccttattctgctaaagatacattttgtttttgtcttagtgctggtggcaagatatgttactttgattgccatagatgttttctacccttcaatcaccccttcagaaggcagcgaaaggagtttaggaagggcaccatcgtcacgaagggaccgccca

SEQ ID NO: 115433 - DNA, 550 bp, Zea Mays
ctgaactaagcattattacagactccgaatttgtcaatctagggatccaaatctattcgagtcctacagtctggggtaccatagtcgaatcgaccacggggcggtgaacggtaagggtgctgaatcccgacaggggcgggggaaccaccatccagatagtgccgtgttgcgcactcagcacgtaattccgcaacctccacccaaaccttgcccaactcatcgagggcatggtccaactctgtgttgagcacgcatgctgttcaacctgggattgccctcaccaactggcgaggcaatcacacctccagcactgccggtcaaacgatgagggtagtacttcaggtcaagaccatcagctaccccgctgaacaacgagcaatactgagaaagtgtccgtcatgctgcatcttgcatggctgcctcggcagtatccctcttagtaatagaatagtgctctaagaaggcttctgcaccctagagatcatcgtccggacgacgcaccaagcaagtagcctcccactggtccgagtataacccgcgacaaggctgg

SEQ ID NO: 115434 - DNA, 737 bp, Zea Mays
aaaaataatctcgacctcgagattatgatgaactagggaagaggtggggaaattatattcgtagctcttcttctctctcccaagtagcttcttcttcaccatgatgactccatttcactttgcacatttttatcaccttatttcttgtaacatgagtcgaagtgtccaggatcttgataggatgctcagtgtaggttaggtctccttgcacactaagttcttccattggcagttgttcttccgggacacggagacacttcttgagttgagatacgtggaacacatcatgtacatcagatagatgatctggtagctcaagctggtaggccatctccccaactcgcttaaggattttgaagggtccaataaaacgaggggataacttgcctttaacattaaacctcctcattccacgaattggtgacacctttaagtatacgtgatcaccctcttcgaattctagtggtcttcttctgttgttagcataactcttttgtcgagtctgtgctatcctcaagttctcctggatcatacagacttgttcttctgcctcttgaatcatttcaggcccaaagaactgtctttcaccagtctgatcccaatacagaggggttctacacttcctgccatataaagcttcatatggagacatcttgagactgcctgataactgttgttgtaagagaactctgcatatggtagactcttgtcccaactgccaccatgcttcagaccac

SEQ ID NO: 115435 - DNA, 673 bp, Zea Mays
gggtggtatgcactggcaagaaatgagcagtcttagtcaatctgtccacaataacccaaatggaatcatggtgcctggaggtattgggcaatcctacgataaaatccatgcaaatgtcctcccattttcaagatggtatgggaaggggttgcaaagggcccgttgccttcaagtgactagcttttatcctctggcaagtgtcacactcggatatgtacttggcaatttccctcttcattctggtccaccaatataaagatctgagatcatggtacatcttgttgctaccagggtgcatggagaatttggaaaggtgagcttcatctagtatcttctttctgagctcagggtccttgggaacaactaatcgatctccaaaccatagaattcccttgctgtcctgccggaagcacttgtatttctctgccttctgcttgatcatttccttgataatctgaacacccttatcctcaatctgtgccctgactatctgctcttgcaatgtgggctctaccgagatataacttaagtcacccgaagaaacaacttccatgttcagcttgctcaattcatcgcacagggtggtaactcttgcatccatgctcatacaattgcactgggcctttctgctcaaagcatctgccacaacattggctttactaagatggtaatg

SEQ ID NO: 115436 - DNA, 392 bp, Zea Mays
aattttaaaaaatacgccagttgttggagctatttttgtcgacaaatgctttataattcaatatacaacatttgtataggacactgttagagatgctcttacatcagatttgactataacgtaacagtgtcatattacggtggaacaaaagtaaaaaacacacttaagtctacgaaaatatcaagatgtcaagagagaggttaaattgaactaatccaaaaattatcgtgacaattaagacctatagcttaactcattttacctcttatgatgaatatttttctatccctgcgtataaaattttgcaacctagttctaattctacaatagcatgattataagaaaaatggattgatgcccatttataataatgttctagtatttgacgatcg

SEQ ID NO: 115437 - DNA, 805 bp, Zea Mays
aatataatggacaaaaaagtaaagagtacattaggtatgagaattctctaattaagtccctgtgtgacttcagtaaatgtgccttaactcgggcacagtgctattaactgtgtgagcttcagattcttcacgtgtgtcgtgttgttgctgtggctggcgatgcccttctagctgctggttatgagccagggtaggtgctaattgcggtggtggcggtaactgagcccatgccacttgagaatgacttgccgaagcaactgatgtcgtgggttgctggttgcccacatattcagggatatatcgcgaatagcacgaggtagtatgtaagacctgcttcggctgattctgtcgtgctttggcttcattgatctccttctacttttggatcgtgacttggcacgtccttgttgtgtgttctttatcctccccacagaataagcagaacaatctcctaggttgcgtgctgaaccttccttcgaaacttcttccccctctacctcttggagctgtggccagtaagaggtttgatgcattcccaaagattgtgaatttgctagctgccttgggtgtgatttgttctgtcatcatttgtgttgggattgtagattgttctgacatgcctggtgtgacaccccagtgtcacttagggttcttctcagtactagctcaagtaccatcatttcatgtaagcaaatttgagcaagaagcatcaaattaacttaagaataaaagatccactaagtttatatctaaaagaatcatgttcaaaacaattgaggttttcaaaaagggaaaatgttgaaac

SEQ ID NO: 115438 - DNA, 591 bp, Zea Mays
aagaagctgacctcagcgataaatcttcctcgactacagcttttgttgcttcctccatcaacaagcccaagcaaactccttcaggcttcaccacagggaacacctcttctggtagctcttggcacaagaagaacaaggcgcacaacaagtcttcgggcggccacaacagcaacactcctcatcccgaagctacatcccatggactgacaccttccagatgtggccaatggcggccacaccccgtcctggctctctcaagggcattattggccccacgtcatgataatgcctgctgctgcatctgctgcaccaggggaatcttcagcgccatcttgggatcaagcttctctcatccaagcgatgaatgctgttatgaccggaaaggccagggcccagccaaccgatcccaataaggaatcagtttagtattagataaggcagatcaaattagggagaagaaataggaggtctagttagagatagattggataagtattggagtaaaaaaataggattagataaggcagatcagattggggagaagaaataggagatctagttaaagatagattggataagtattggagtaaa

SEQ ID NO: 115439 - DNA, 422 bp, Zea Mays
ggggttcttgctgaggcacattatttctagaatgtcatgtgtgtgggtttcagattcagatccacattggtatgtgtttctttatatgcagaacttttattgtccttctgcaagagatgaagtagtcctttttggcttgcacttattcatgctgtcagcaatcagcatgtgtgctttcttatgcaatcattgtggctttgtttgagttgttcaacttctatttagaaatttcaattagaatttagatcagcataaaaaggctaggatagttcttttgtagtagaaagaagcatcatctgtcaggttgtgttgacctcatagtttgtttcccatttattgctcactgttgattaaagatcaagagtagaaatccactttgttgccttttgttgtctagacttccctatgctttatagtcctgc

SEQ ID NO: 115440 - DNA, 469 bp, Zea Mays
ttggtgtacaccaagctcaaagaagtaggcattgaggtgtgactcgttgaattcgccctctcgatcggcatgaacggcgccaaaaaggttcccgcttttcctctctactatggcctagatccacttgattgtagctggtgcctcgtacttgggcatagcagtgcaatccacatagagcgagaatagtcatcaacgagcagtaagaagtagtgattgccacttagagtggttggcatgatagtcccacacatgtccctatggatgagttccagggacctcgttgcatgccactgtgcttgatggggaaatggcgcacgccgatgtttgccggtgaggcaagcttctcagagttgatcaatgtgttcaagttcgagtagtccatgcaccaatgtctccttgcccatcttccatagcaatccaaggatgaaattttttaatcgggcatgccaacgccaagcatattctccta

SEQ ID NO: 115441 - DNA, 437 bp, Zea Mays
aactgaaaaccaacttgatctaaattagatgttagcacaaaagtatatcaagttagagtgagaaggaagcgaagttatttcacttgctcttttagatgcggaattaatttagagcaatatcacaagtgaactcaagaacttagaacgagagagaaagaataaattgcaaaagttcaagcacatagggcaagacggttttcctgtggattggtcaagcctcaaatgattgcctacttcatgctgtggtgtcccaaaaaataagggttacactagaccgattcaatccaccaccagacgatcacatgtaagttgcttgttggagccgaagtagtcgttagaactgaggtccggtgcagcactggaccatgaatagttaggcctggacaaattaaactgaaaccgaaaactcaaacccaaataatcggaaccgaaaccga

SEQ ID NO: 115442 - DNA, 585 bp, Zea Mays
ctttgctgcctcaaggatggagttgtcttgttccttcatcttcgtcacatcatcattatgagctttttctgcttgttcttgctccttttagcttcggctcatttctctttagacgcttgaagtggcggagtgttgttgttatagtgtcagatgttgtcgctggagttggtgtcgttgttgcctttagtggtgctgggagtccaggcttgggcgccatcacattattgctttccacgatgattgctagacatcgttcgtacgcccgggcaagcgacatggtcgtctccatgtcctttgcatctagcatctcgacgtccattttagcggttgcagtagtccgttggtgtagatattgacttgttgtcactcgttgaggtagccgacgtgtgccacatgcgctagaagcgctctgtttagtcgttaatggtgctcgtcttccttagggaagccaattcttccaaggggttatgcctggttaggggtccaaagtgctcgttgacgcaccaagcaaagtacgccagtctgtcacctcgttgtcctacgagagtctcatgtaccactgttgtgcagtacccgttagatggt

SEQ ID NO: 115443 - DNA, 870 bp, Zea Mays
aaaaaaggatatgcttacaagaatgacgatggaacatccataaatggttgtagaaacgtttgtaacgctcctagtatgccacttcttggcggcttggcataaatcattgaaaataagctggcaccagtccatctggtggaaacgatccatctcctcagttaaaagaacctcatggttggttattccccagctggcagtagggaacaacaacctattgaacagtatcaggaagaaggatctgatggttagatcatcgtcagaccctttcctcagacgatcttgaagagctataaccccaaaatcttctttcgataaaccaagtttagcccttaaattgttggcagcaacagcttcatcaatgcccaaggccgtccgcccgtccctccaccagcatttggtaaccccaaaataaagtgcactgtatcctttgtaattttgagctccttccctgggccggctcgaattgtcatgtcattatggtcaagcttttccatcagccaagctaaatgagatctactgccgagtgcgtcaactctcatatcaagaatactggagaacccccttcgtgcaatagctaggcgctgtctgtcatttaatatctggatgcttactaatacgtcttggggattgcatctcacattaagcctctgctgaaaaaatgtatacaatgaatagcgtaaacatttacatctgcataatcgcaactcaatgtttaaatcaaacctcaacacaacataatttcacgcataaaaataaaatattgccattgaccataaattctaacctgtcgtggggggtccactactttcctccgctttgtaactatcttcttcaagacttttcgagaactgtcatcagagttacgcttct

SEQ ID NO: 115444 - DNA, 563 bp, Zea Mays
atcaccattaatgaacttgagtgacatccaaaccctagaagtgccagaaaccctaaaaagaccactgaaagccccaaattgaaaccctagggggttatatgtaaattttgcacacttttggatctaagtgcaaaaatcaaggtattagggtacctcaaaacatatgcttcacacatttgaggatttccaagtcaaagaatgagaattgggtttatttgcaaaaagccactctacaacctctcacgtgactaagtctgaaaaccagagaacagggctgactttggagctctgtagttctaaaaatacaaagagtttgcctaggctcaacacatcaaaagtctagagctactataggagcacaactttgcttaagtgattaagcattgttgacatacaaaaattggagataatcagccctgaagtctggctgtcagactaagactccattatattcagagaaggcagtagattggatcaactttgggaccttgtggagcttgatttgatggatgtttaaccaaaacctctatgacaaagttaaagctggtttgttaggctacaac

SEQ ID NO: 115445 - DNA, 377 bp, Zea Mays
cacaagtcctcccgacaaataccgcacattccatccaagcaggcggtataccatttcgagcactcactcaatctgggcgtgctcgggatgaggtcacaaggccatggcaaactacggcaacacgaagcaaaaaccttgaaggcaaaggggtacagagagctcgaaggcgaaaaggcaccgcgagagggagagaagctagacatggctgctacttgaggggtgaacccctttttaaaggcagatttccccgctcgcgccccgaagcgtcacgggcaaggtatcccctaatgcgcaccagggttcccatcctatgacatgggggccaggcctcacatgtcatacaagctggcccaaagcgcgaagaaggcaaatcgtcg

SEQ ID NO: 115446 - DNA, 626 bp, Zea Mays
cttcaactaaatcacggtcgctgctcaaccgggctgcgtcacgaagggcctcctcgtttttatcccccttcttcactttaaattgtgggaaggccacataacaatgtgagcacaagatggacgggggcaaaccagacaacctttcgacatcccccggcgccacataaaaccaaaaatcccaccaattaccccacttattcttggcataaggaacaatctcaactacttcgaccgaagtctttctaatcctcggcgtgaatgtgcaggacccaaattgcgcaatcagtacacctatctttttcttctgccaatgcaagcaataattctttgtgaagacctcaacagaaggctctccgccataggaagtcaccgcccaaacatacttcaccaatgccaccatagtgtttggcgtcaaatgatgaatctgaattttgaatacccgtagaacttccactacaaatcgatgcgtcggcaagcggagtctagcaatgaaaaaggactcaaacacaaccaactccccctccggctcggggacatctttagctcctggcgccggcccaactccattccaaaaataacccaaacgctacatctcgtgcacgcggcctgagtaaatcctcgatgaa

SEQ ID NO: 115447 - DNA, 335 bp, Zea Mays
aggaagagctagggaagagatgggggaagtctatacgaagctcttcttctctttcccacgtagcttcatcttctccgtgatgactccattgtaccttacacatctttatcaccttatttcttgtaactcgagtcagggtgtccagaatcttgattgggtactcagcataagtcagatcatcttgaacactgaggtcctccattggtagttgctcctcacggacacggaggcacttctttagtcgagacacatggaacacattatgcacatccgatagattatcaggtagctcgagttgataggccatctctccaactcgcctaaaaactccgaat

SEQ ID NO: 115448 - DNA, 561 bp, Zea Mays
tgcatctgtcaaggaagaataatacatcatttagctagaagaaggagtatgtctcacgaagaaaaaaatgtcaaggtgttgcccctttcaagatttgtacttgtgctaagtgatatctgaataaatttggagaatctttcgcacctattgtgttttgcctctttataaagagaataaagtgtggtatcatatgctttatgcaaacaatatgatgttctattctagttgccctaaagtcccgctcaagtctttctctcaacgctcaagtctttctctcaatttgtgctcaaagaaatactattggatcagaaaattatttggatatcatgctctgaaatctataaggttcaaaagatctttgttaaggaatataacacttgtaagcactcaaagtatgatgaagctagtagaaatatgaaaccatccttgttccttaactaatcttatattggaaatcaacacgttgtgttagctctttatcttaatgtcatgcaagcctcttatgcagtctatctcactaacttttttaccctctgactagatgatgaaccccaatggaaa

SEQ ID NO: 115449 - DNA, 486 bp, Zea Mays
ctttaataggcgcaataccctacttcctgtggcggttttctgtattgtggtcattttacaagctgtgactacgagaatggtaggatgaggatgagatgaaaatggtaggggtgcctcctagcattatatacacaaccagagagagctcccccgcataggtgttgattacaacctcattgcttatcttctaatttgtagcgaacagtcttcctttatcttgggggaatcttgcgctcccgcgcccgagttatcgccggtggttcagtctgtcgggtgggcgcaacaaacccggcccgatatacccgcgctcgtgcagcagctaacttggacaagggcctctttcgtatttggaccagctcgcctctgctggtttcctttatccggcccatagcaggacgcctcaggagggcgcctgttatgtggccccagacgtattttcgtgctcccgtggacgcgggggatatccacccccacagtgtttttaag

SEQ ID NO: 115450 - DNA, 662 bp, Zea Mays
gggggacgagcctccagtacgtccatgcatgtaacaagttcatcaactcgtcgatcaaactgctcataggatgtgccgcagagtcttggtactttttaaaagcttcagtcatcgcacacatcatctccttcaattccatctgagagacacactcatcgtcgttaagcttaggcccttgtccttgtccatttgattctttggtcctgtcattgttagcataaaacagagacaaaaaggcaacaaacaatgtgaaccctacaactatctctcaggttggtggtggaggtggtggaatacaaattatgaagagtcttaccccgctcttacaacgttcttaccagcactgcaggtggcaaacggtgaccggtgtgactgtccaacgagcgtgggtgtgattgcaaaggagtacctgttctgctcgagagaaagctggagttctaggaaggctgactaaatatatatatgtggcacacaagtcagtaacagatagcaatgctgaataagtgttccaagtactcgtcctagttgctggcctagaaaatataatagaacagttggaccaaagcacaagaaaagaggtacaagtatctagtgggaatgacagttctgtaaatagagcagatttttcagcactagtagaaatcaaaggcgcgtttccaaag

SEQ ID NO: 115451 - DNA, 514 bp, Zea Mays
cgacaattaccacgccacgacgatcaccggcgagaagtctccagccaggcgccgactgggctcgcagaaccgtgaatcagttcgtcattatcttgccgcggtcgatcctatctccaatccatctgattccatccaaatctacagtaccactgatatttcgtgagccatggatcttcaccgttccactgaaccgacctcctttctttcccctttctgttgattcttattaagaacaggttaacctctattaataagagttattcaccagataatggtcttcatctttactataggatttatggatcaaaactgcctggattctaagatacagtgctcgcaatctggccatatttcactgtgaccatttcgttttggaattcagtttacagtgacattataatcagtgtgactaagttctgacagaacaactttgcatcactggttcttcaatttctgttcaacaacctagaaagatgactgtaccaaaattactcccctacataccagttctaac

SEQ ID NO: 115452 - DNA, 284 bp, Zea Mays
tggtgatgtatgtagcttcacgaaacaaagcgggacagcaaagttgctacaaaaagcatcgctcattatctgggacgaggcatcgatgactaagagacaagcaattgaggcgctagacaatagcatgtgtgatataatgggacagcctgggctgccctttggttggaggactgttgtgttcgggggtgatttcagacaagtactccctgttgtacgcaaggggtcaagggctcagatagttgctgcctctctacagagttcttacctctgggaatccatgtacc

SEQ ID NO: 115453 - DNA, 300 bp, Zea Mays
caaaggtgcacccgcacggaggagccgaggcgaagaaggcgatgcaggtgcttcttattacacgccttgcattttcatttccctcccacctcctgttcgaatccgcgtcgggccgccacatcccagctccacctcccccttaggacaccgcatcctagctgcctctcttttagggtttagggtttagggttttctcatcaatggacgcagtttcttcttagtctgccttcgcctggaatgttccagtaaggcgtatatgaatacttcgcctccatcgtctcccaaagggccatgaccgcc

SEQ ID NO: 115454 - DNA, 773 bp, Zea Mays
gtccatcttctacaataatctctcaagagagtgtggaggttttcttgcaaagtattgggctactggccctagtctaagccctttgaccatggcctcgatgacaatgtcgtcctagactgctggtgcctgggttaaaagacgaataaatctttggatgaatgaatggaggtactcatctatgtcctaggtacactagaacaaagcatgtgcagtgactagctttgaatggaagctggtgaggaacatctccttcaacttttggcatgaatttacagttcttggtcgaagcgacgagtgccaggtctgagccacattcctaactgccatgacgaaggacttcgccatgactactgaattaccaccatacgaagatatggtaccttcgtaattcataaggaattgctttggatcggttagtccatcatacattggcaatgtaggggtctatatagtggtggcccgggtgtcacctgtagctctggtgttagtggggatgcttcgtcatagaggaaatcttggaagttgactagtgcatgacgaagattctcttggttgaagtccttgtaattttggtccctgtagttgttctggtcctgcgcttcaatgttgtgcatttgtttagttgcttcgtcaatctttttctgaagctcataaagacgaagcaccttctctctgcgcttctccaattgttggtggattccttcaagattgttgatctcttggttaagcgcttggtcttgtggttctaggctgatggagagcttcatcttttg

SEQ ID NO: 115455 - DNA, 784 bp, Zea Mays
ggggagaagacaatgccatggcggggatcctgaacttcgggcggatccagtccttgcagtagggcttccagggctgcaatcctggcatgggcattctccagctccaggtgcacgctgtagagatccagggtggcactgtccaggtcggtgttgagaccggccactacaccagctagggtgttgaggcgatcctcaccggcttctcctggaacgatgctggtctgacttcctccacgcagacgctgaggaaggtgcctgaaccttgtgttctgcagctgctgccggtaggtgtggctgagcgaccacagggtccgacgggcagcatcgctgaccgaggcagcgtaggtggacagtggtgtcagggactcgtgagtagacagagtcctgaatcccctgtcccctgcatccatcaccctgacgtggatgcgggtgatgtagtagcaagcccggggaggctcgctcactcgccttgtttcgtacagggggcggacgtaggtgcctagcgcgtgcagcacttcttgcagcaggttggggaagtgcgccgtctcgaacattgatgtataatgttcgacaacagaaccaaaccccatgaagttgtcctgctaggcgtagtcagcttcctcgttgatgtgttcgtctccaccttcttcgtcgtcgtcatcctcgtcatcgtcgtcttcggagttgtcggggtcgtcgcctctgggtgcaggtgcttggaaggctggtacatacggtgctgacgtcgatgacctagctgcgaaggccagggactctactaaca

SEQ ID NO: 115456 - DNA, 646 bp, Zea Mays
gcaagcgtactttacagtcactgcataagagaccccccttccaacctccaagagttatactagctcttcaaaaaatatgcctgttcacaggacctcaaccaaaggaaagtcgagtcacaactaaagccaaggtttcgcgatccagcaggatgtggatcagggccccatagcaataccccccgccaagagtgtggccagcaactccaagtccataatatcgcaaaccaacaacaaccagcgaaggccacccccagtgccaaaactacccttcacaacaaggccgcaccggcaacgcaccaagaggcagaggtagaggcccctagcagcaaaggaagttttactgcatcttccatgatgaagactcagagcacccaaccaaagattgctcggaaacaaaggaaaccaaagatcggatggccagagccgctccggcaaacaacgagagagccatcgctcacacctaccaaccaccccctccacaaccacacccataccaccgctcgcactatcaaaacgaacacccacactacccctagcaccaacagaactacaatgatgctttcccccagcggccacacctacaacaccaagaaagactagccctaccaccccctcagccataacaagcaaaccaacaacaccacca

SEQ ID NO: 115457 - DNA, 1324 bp, Zea Mays
aatatctaataatatgggtgtgctccttcaagtgtttcatctattaggcttttgtgctctgagcaacatctttgttgcacttaaaagaatacatatgtagtagcaagttctactccaacctgtagctttatgatctttccagtctcatgtacacaagcctaataaaatatcaactatttcttacatttccattttgttatgtctattttaggctaagttcaagctaacacttgaagtaaatgttgggatggtggcattgtccaatatgccaatagctaatcagacagttgctggtcctatcaggactgttcactatgtggaatcacctcttatgtctacttatttagtggctatagttattggtttgtttgaatatatagagggtgtaacaccagaaggtatcaactctacttttcttgcattactttgacatgtatcatctttttgttaaggaacattaggggtgagctcctactgataaatattctcacatgtacgacaccatcacacgaaggtaccaaggtaccatataaatacgtagagttatagagatagaggggcgtacattagaggttgttggatcagggcactggcacgacaacaagcacacaaacgatttatagaggttcaggccacgcaaacgtgataccctacatcctttttatggtggatgaattgatagaagcagaggcaaagattacatgcttagatactatctaagctaaagggccgcttagcttccttcactttggttctagcgagagttctcgtctatgtcccaaaaagggcaaaagtcaaagaaagttcggacctcggactttctatctaaacactaggacctttggacctttcagatcctccgctacactgcactactccctttttatagctcaagggaggaaagagctacatctctgcgtctgcgtgaatggtgggccctgtcaggggcggagctagaattatgacataaggggtccgaccaattcatcaacactatatggtgaaaaaataccgtatgatgttatcaagctttttcgtagatttgaccacatcaagcactcgacatggaataagaactctagttctttacaaattgtcctagtctatgagttcattttctagctaattgatttgttgaactaaaattgtggcacagtaacaatatcaaaataataaagaagacatctagatgaatgtccgattgatgagattaaacttttatataatgactctagtattcatgaggcaactatcaaaattttagtagaattcaaaattcaactagcctcgaggatccatgaaaatttgtcaacttgcacaggta

SEQ ID NO: 115458 - DNA, 330 bp, Zea Mays
aggacgacttgctgggagaggacttggttgactacgaagcctctctagagcgtccaggtatggatgtaaatgttattacattttgtgccgactgtactattgtcggcgacgatgaacctgtcgttgcccaatttgattttggtcctaaagaagccgccttcactaaaccaaaagaatcggtaaatcatttgaagccgctcttcgtgcacggccacattgatgggataccgattgctaaaatgttggtagacgggggcggttgtaaatctaatgtcttattcattgtatagaaaattaggtaagcaagatgacgaactggtcaagaccaac

SEQ ID NO: 115459 - DNA, 632 bp, Zea Mays
agacaattgactcacctgaaggttagagaagaacaatggcaaacccaagtcagaaggagcagtatcatggcccagcgaaggaatatcaacaggaacaatctgaagaacgttgtcaggggtgagctcagccccaccagcagatactaaaccccttgcatctagttcaccggcctccaaggcgattggttgattcgaagccacaaaagcatgcatcatcatcgccccatcggatcgtggcggagacaacccaacgtggacgtccatggaggtgtgggaagaagaattcactcgaacaccctcgggggctgggttgcagctcgcgtcacccacttaagccagatcattaccggcaacacccttgggagttgagttgcagctcacatcacccacctgggccggatcactaccggcaacaccctcgggggctgggttcttggcagcagtcatctctaagtctaaaggatcttctgtcacctccatgtgagtcagacaatcctgaccaacgtcttgacatcgaagactgccttctaaagtcgacgatgcacgagacactgctcgggatacctctaatcccatgttgggaatttctgaagagacagtcataatgtcatcagcagttggcttcgatagca

SEQ ID NO: 115460 - DNA, 709 bp, Zea Mays
aaatttgccagttgtttggattcaccaagtcatcgactcgccttcacagcttgtgttatggtacttctgatcctcctcggcgccctcacgacggagttgctccagctacagctcatgtcgcggctttgttcggaccgcccttctcagatgggtcgcgacgctcaccggcagatttcactctagcggcccagtacttatatcagctcatgagacggacgctactgcctcggatgggttatagagagcctaccactcatatccagctctagctacttggagccctgatctcgcattcagagtttgatgttgttgacttccttatatgtgagatcgaggacacgatattggatggtcttcatgttcggcgacagatgtcatatggtcactatctctaccacatcttcgcacaactgatccgcccaccgcagttccagggcacccttgaggcctcatgcctccactttggctcctaccgtctagcccctaaggacccagtgccggtacctgatccagtgattgacactcaggtagaggatacgacctaccatcagttcgagactcagggcacaacggttcctgatgataatgatgatgatgatgattttgggattccacctccgcctctgtgcctccacgctcccatgaccatgaggctgggagttcctgtgttgcccctgctacccctcctgccattgaacctgctctggct

SEQ ID NO: 115461 - DNA, 626 bp, Zea Mays
attgaacacagtaattcagtcagccagataccagcagaccttgaggcactatcatgataaagtcgtatgacaccgatcctttgtagtgggagacttggtccttcgccgaattctaacggaggaaggacgacacaagttgtcaccactatgggaagggtcattcattgtatcagaggtcaaacggccaggatcataccggcttactcaaatggacggcacgaaagtggggaattcatggaacatagagcatcttagaaagttttacccttagcaaggcctcaaaggctatcggagcaacattgtactctgtaattggagaatccatcatcaataaagttttcattctcaaaggcattcaaactcttgactatcagctgacttcgattcgattggactcggaatcaacatgcttactcgacttagggtgaccactataccctactaacgaagcaatcggcttaagtcggcgacgacttaagacggtgcgacatgctcacactcactcgacttagggtgaccactataccctactaacggagcaatcggcttaagtcggcgacgacttaagacggtgaaacatgctcacgctcaagcgacttagggtgaccactataccctactaacgg

SEQ ID NO: 115462 - DNA, 370 bp, Zea Mays
caggtgcggttgatggagatttgacttgttgtgcagttttagcagccctactaagatcatctttcagaatttggttagggggtcattggatgtataactattttctggcctttaaacatgaaagaataatgattcgaacgaccatgatgtaaactatcagtatcatattgccaaggtcgacccaataacaaagagcatgcttccatagggataacatcacaatcagcataatcagaataagaccccagcgaaaaggggatacgcatcaagcgtgttacctttaccaccatcattaagccattgaatgtgatacagatgtgggtgtgtgcgagtgggtaaggataatttctccaccaaagctgtacttgcc

SEQ ID NO: 115463 - DNA, 762 bp, Zea Mays
ctcatttaattgagccgacaagcatcacaagcatgcgagggtgctaaaacatgaataaggagggtgagtgcggacctgagagcggctagccccgacggggtgattcacggcggcgcatatgatcaatttgggggaaaacccaaattctacggctatggtggctaattggagatgagagttagtgtcctgggttcgtaataacttggcgaactagagtggggcatcaatttatagaagctttaggcgacggctccaaatttgggaggagagtggtgcttatctccctggtgaggcaatcaccgaggctaccatggagcgcctgtgttcaccttgcgcctgtcactatctcggggatgccacaatcacggcaatgtggtgaatcaggcgactacgtgtcccttgctgcgatcacggcgagcaccggcggagatattctaccgaccgcgcgggcaagtgggtacgacggtgactcagccccggcgaagaccttcttccccgagatctttttaaccctcacggttatctactccttattagcatgaatcgtggcatcagcgtgaatcgcagtgtggaggtcaccagcgacgaggtacccagaacttggcgatctgatccaatcactgtaccatcgcgctagtcattagtggttctgacagagcgatttgtagtgcttcgttcttcaatttttatgtaacaacttgatcttcggccagcagggaaattgttgccctataatccctttctaactttgttatagtgtcc

SEQ ID NO: 115464 - DNA, 324 bp, Zea Mays
agaaaatgttgtgtggtaagtcaaaagattgaagagagttgttgtagcattttttgtattcatgaaacaaaattggaggtaatcactgcttcgttcctaaaaaagcttgctcccaaacgcttcagcaaatttgcttttagcccctctagaggggcttcgggtgccattttgattggcaggaatgagtccttgtttcaaggaacgattcgtgagattaatgcctttttctattactgtggaatttgtctctcgattatcggccaaaggatggattctttctgcttctatggtccttgccatggtcttcatcgtgtggccttcatt

SEQ ID NO: 115465 - DNA, 492 bp, Zea Mays
caccggtagcttcccaaggaaggagctactgcagtgttgtaaaacgaggtgttctaccctggtaatgttgtgtttgtccatatgtgcctcagtcatctaggcttgcctagtcgtgctctttatggcgagtgacatgggaggtgaagagcactgacaccatcattgatgtctctgtaccacgtcgacccttggccatagtagcctaggtctcgatttgtcccaatgtgatgctggccttgtaggcgacaagtgcactcaggcctaggctcgataggtcatgagtgggtcgtaggcttaggggcccataggtcatgagtggaaggtggatcaactcccccactgcagctctatgccaggcatagttaatgcagtcggtcacttatgatgggtcagtcctgggtcagacgtggaatccactcaagtggcttcctcttgatccacctaacccccttttggctctgcctcactcaaccctgggctcggtgcctcagg

SEQ ID NO: 115466 - DNA, 300 bp, Zea Mays
gcttggatctgttgttggaggatattggcaagatcaaggagttcaacacttgtatcaatatggcaaagaaggtttcgaggttcctatacaagcatgggcgacttcacagcctaatgagagaaaagctaggcgaggaccttgttaggcctggtgtcactagatttgcaacatcattcttgactttggcaagcatgtacaagcctaagaatagattacaaggcttgtttgttagtgatgaatggaatggctctaagttttccctacttcaggaaggtgtacaagctgaaaatattgtccttt

SEQ ID NO: 115467 - DNA, 298 bp, Zea Mays
ttcggataaaaacttcaagaacgaagatcgaagatgatcgagctcatcaaatcaaggaaggataagattcaagctagatcttcaaaagtaatcaagatccacaatcttggatagattctttcctagccctaccctttcataactaaaactatctatgctctaaagacatcttctatcctacataataaagtggacatacatatatatacgcatgctctcctaatcactcactgatgaaaaaaagagagactcttgatttttaaactaattagaaactaaaagctaaattacaaatcac

SEQ ID NO: 115468 - DNA, 280 bp, Zea Mays
accaagctcctttggagacaaactttgaaccaagcacaagacaatggccacctctagcgtccttccttctacgccaaagaagcccttgtttaatcttgtcaattgccttaatcacctaggttggattaatggccatggccagatacgccaacatggatgtggaaattatagtatcagtttacttaacacttagtgttttacgggggcaaaaaattagaattgtggaatgtttgtgctcctctacttgtctctggcagtggctcctgatgcagtatttgac

SEQ ID NO: 115469 - DNA, 463 bp, Zea Mays
agccacgacaagagcactttggcggcagaacctacggattccaggcgagccaaccattttccctacctaagactaaaatctatatggcttattaaagttgtaagggtagcctgtcattccatgtcctgtcaccgttcccatttcttattctgtctttcccattctcatctccatattctgtcattttcattccttgttctgtcattccaattccccatcctgtaaagcacattcccattctcattccccgtgcagcccacgtctagctaaaaaacacaaatgccccaataggattcgaacccgcaacccgtgatttcggacgagccaaccattttccctacctaagactaaaatctctacggcttatttaagctgcaagggtagcatgtcattctatgtcctgccaccattctcatttcttgttctgccttttccattcccctctccatattctgcccttttc

SEQ ID NO: 115470 - DNA, 401 bp, Zea Mays
cacctaactagtatgtatgtgtgtgtgtgcgcacacacagctagaactgattacgccttatatatgtaatatgtcaacaagcaatggaatcatgaggccataccgtacccattgctaatacaaacgataataggaaaggtacataaagccggatcataatgaaaagacaagaaccatgggtacctgtcccaagtgcagcatcataatgtcccttgccaattgaagctaacatgcgcaggaaatagtggttgcaatacgatcctaacacgttcaagtcacaacatcagaaaaaatagaaaacaagtaatatctaaaacataacttgacaaactacacaagaaagagtaaaacataatttgattcacaagttacaaatcacagagttaacagtcctattaaat

SEQ ID NO: 115471 - DNA, 483 bp, Zea Mays
attgtgaggctctttgaacagtgagggacgatgggttgttttatccaatcccgagggactcttttgcattaccactaggccgaaggggtatcggcgcacgacagacgtccgatctgaactcaacgccccagattagattcccaaaaccattgaactggtattcaaccatggccacataatctccatttaagggtccttgtctaatgaagcgatgtgataaccgctgaccgcccgttgtgagatcgacgatccagattgcacccaaacaaagagttatcacgtcctaatctccatcgcccctgacctaatcaacggtcaccacccctccttcctccactagcggtcggacacggcggcaccatggccagtaatcccgcgcagagattctggttcttcatactcaaaattaatcggtgctacacgacgtgagggctaaggcgaacactagagctacatgcaacaccttggccaccattgtacata

SEQ ID NO: 115472 - DNA, 590 bp, Zea Mays
agcctggtcccgtaccgtaagcctacacgctccaccactctgcgatgggtgtcctagtatctggaactgtgattcagggggtccgagcacacggcttggcttccctggccaagtcctgccggtcctattgcgtaaatcaaaggataaaagataccagctagtgggtcctatgggtgcgctactaaaacttcctagccaaggctgtgtgcaggtccgggtcccagtcgagattacctcctgggggctatgtcaccaattccttcttacaaatactggcatccagcctcgacacgttgagcccacatcccagggggccaagtaccagggaagaagttggtaacgacgcacacagcaaaggaaaagtagcatgcagataagttgtaatattgcttgataagtagttcttaaaagtatcttacaaaatcaaattatattacaagccccttcccagcgggacccttgctttctccctgcagacctagctactcatcatcagcgggatcccgctggaagcgctcggccaccgcatccacaacatcttgtacgccctcccgggcggcgtcttcggtgtcggccaccggacctgcgat

SEQ ID NO: 115473 - DNA, 364 bp, Zea Mays
tgtttcggtggggatttgttgccaccaatacaccttgagagcctcaagctggaaggcaagctggtcagaataaatgagtggatccataagcttcagaatctatccaagttgcagctgtataataccaaaattgactcagctgatcccatgcaagctattggacagctaccaaatcttacaatgctgactctgtgtcatggttcttttatggacaacagcgagctccttttccatggtccatcttctttcccggagctcatggtgctgaagctcaaagacgtagattgcgagatagtatcttttaaagaacaggcaatgccgaagctcgagctgatacacgctgattttcaggggggaatttgtg

SEQ ID NO: 115474 - DNA, 599 bp, Zea Mays
ctttgaaaaattgcataaacgaggaagcaacagagtataaacagatacatctatccacgtcatcttacaaattcacttgagttctaccagtctcaagatttcatatacagtacaacattgcctttgctctatagagacaaaccaattgtatactaagatcaagttagcaagtagacacactagccaaaaaggggtgaggcacaaagcattgcatccatggaaatattacattgataagttgggttataacccaatagtcaatcaaactcaacaacaccataaaactacattatatagtgttttcacaccacaccaagtcggattagacccactatacacaagctcattaaataatcggtcctacaagtactagaaccaaaaaatccttttgaaaaaaacatccacagtcaagcatatagaaatatatgatagtaatagctcagagaattcaaaacattgcatccaaaaaaacatcatgacgatatgtatataaaacaagtacataagtagcttcacttgcataataacttcaataacaaccacatcaagaaaccaatattaaatagtagtaacatatcatatcaagcattaagtcgtta

SEQ ID NO: 115475 - DNA, 509 bp, Zea Mays
ttcagatgtagcatctagtgctggatagtaacgtcgaagagatcttcgtttccgatgtcttgtgtgactgaaatagttccttctcggctgcagctcattaccatgtaaaaacctattgggctattacaagcagcgtaccacgttactttacctcattttctacgtcgttctcgttgatctgcgaactttgtgactacgttcataatccctgagaatttggttggtggactcgcatagtgtgtgcgcagcctgaacactgacagccttattgattacgcactaatatcgttgataagttcattgaaacataatgtggctgtagtttagtggtgagaattccacgttgtggccgtggagacctgggctcgaatcccagcagccacaaaatttttttatttttttttattttgtcttagaaacgcaacgcccttggcccatttatctctttttttttaatgtatgtcttgcagagttactgttttcttagattgctagctagactattttag

SEQ ID NO: 115476 - DNA, 446 bp, Zea Mays
atagccaaaaagatttggagtttggctcaaaagagcccaacttacactgatctaggttgcaccggaccgattcagtggtgcatcgatctaggtccgtgtgatccagtcatactgctcgatttcaggaattttagttataaaattcaccggaccgatccggtgtgtatcagctgtgataagttgtgataaaggaccgtttgggtttggtccgttgggcacccgagtacctcagtcccactttctggcgttgggtcgctggttacgtttggattcggctgaagttttccttttcactagttgggcttgggccacgccaaatccttttccagacgacggtggtggagatggtttttacgccgagcaggcctgtccatcaccagataggtagcctggcccgtggaaaaaaaaaccctagccaccggtgaagccccaccgtatagaaatca

SEQ ID NO: 115477 - DNA, 402 bp, Zea Mays
tggttagggttcttggggaggtctgtggtctaaaggactccataaggctaattacaatcgttttccctcttttctccccgtatttgtaatctctattcattttaaattcatatcttccttcattgctccctctatttcttctcctctcaaattattttcctatatattcagctgattctttacactttaactgagttatttgaattttatatatcattttttggagttcaaaaaattgtacaatgtttatagtacgataatacacaacgctaactgctaatcaaacttaaaaaatcgcagctaatactagtaccactgattagcgaggggaggagtcattcatgatagcaacgaatcggattcggatcggatattgcaaatatctgcccgcaaccatatccg

SEQ ID NO: 115478 - DNA, 739 bp, Zea Mays
gattaatatactatacataggataaataagtatctaattataaaccatgtggtatgtctagttaatgtgtgttaatacatagtaaatatttatatgaaactaatccaacttgaatgggccaaattagagttaaaatggagaatctataaactatacaagtttttggatttatttttctactaaaatcattttcggattaaacttctggtgttcctaggactatgaccataatttcttgaaaggacagggttcaatctgtaagaagaatgatctatgcgtagtgatctttatgtgagagtggatggtgggttgattgtgttagaatctaggggcttttctgtaaaacgtgcacggatgcggcagtgtggacgcgccataaccgtccgatccagaatctaggaaccgaattagatcaaagccccacgaaccagtatgtcatgaggaccgttgattccaggatctatggcccgaaagtcgttctacctatgatccaagtcgagtcgcacgatcccgattcagtggcctggattttattaaactggatctaatcctaatcgctcattcctcatccgacgcacctgattatatcacctgaattgttacctgatcccctaatctgagccctttgttgatgataccactgtttgcacccattctacctatccgagagaagacaacggccagggacggtgacgcagttagcccgcatggcggcgcatcgacactgtgcaccgcattc

SEQ ID NO: 115479 - DNA, 454 bp, Zea Mays
aagggatttggaggtgaaaggtcaaatcaagggtctgagaagagaaccaggttggtgatccgaccttttaatcaaaatcgtcttcgcctcgcccaccttcctacccattcaagcagcctatttttattcatcccactactgcccccgctcctaccaatcagctgagtgccctggtactcgttttcctgctttcccctgttcttccacgggttgcttcaactgtgggaagtccagacacttcatcaaggactgcccatacccgaagcaaaataaaaccaatttccaacagaactctgggaactccaaccaaggaaaggggaacacgactaataatccaacatgcaagaattttgacaaaacatgacagatttattatacccaagtggctacaacaccggatggtgagccggtaatgatgggtacgttccttgttgctaattacccagcagttatt

SEQ ID NO: 115480 - DNA, 646 bp, Zea Mays
gctctttctacttgcccgttggctcttgggtgcgccaccgaggcatatttgatctgaatgcttttttgttcacagaaatcgaagaactctgagcttgtgaaattggatcccaggtcggttatgatactattcggtatcccgaacctgaatattatgtcttgtatgaattccactgctttagctgaagttagagaagcaatgggtttgaactctatccatttagtgaatttgtcgctagcaaccagtacatgagtgtatcctccttgagctttcttgaagggtccaatcatatccagtccccagcacgcgaatggccaggttacatgtatggtttgcagttgctgtgctggtagatgctgctgttttgataagtactgacagacttcgcacctctggactaactcggctgcatcactcttcgccgttggccagtagaaaccagacatgaagaccttcccaaccagagtccttgatgctgcgtgtatcccgcattgcccagcgtggacctcttatagcagttgcttccctgtagccgaaagtatgcatttcatgaggactcctgatgcgccccttctgtatagtgtttccccaatgagagtataatgagctgactgccttgcaatgcgctctgttgtatttttgtcat

SEQ ID NO: 115481 - DNA, 501 bp, Zea Mays
gtcgtcgttttgatgaataaaaactgttactgtggttggagtatttgtgccagaattggcgcatgactgcttaacttgcagccaaattattttgatactagaaagttgcaccattgcgtctgctaattaagtttgttcagttgaggcggagagagaaacaaggactgatagaaattagccacgtgctaggagtatccaggggaggacccaatgggaggagagaagccacatccatacatgaataatgtagtgtgggcgtcaggcgctaccacggctacacctcgcatccccctgaccgtacaatcatcttcctcaaagaaacgtccatggatttgcatcgtgtggcatccttctcagatctcctccactcccgtcaacccgagtctgtaacacccctggtgttaccaaactaaaacttgggcattgcatcatatgcattgacatttcattatgtatgttacacctagagtgcatccactaggctaaaatctcaaaacaagt

SEQ ID NO: 115482 - DNA, 378 bp, Zea Mays
gttaaacaaaattttcgaaggttgtcaatgtttcaggggtgctctaagtcttcgccggaaggcgttactagcctgtacgcgctgggggatgccttcgacttgacgatgaatggaccctcccatttcggctccagcttgccccgtgattctatccgggtggtccggacgagtacgaggtcttctttgttgaactctcttgggacaaccgcgttgtcgcgccaggccttggtttgagcttgatatttgttgagggcctatagggcgaggacgcagtctccgtcgatgagatctttggacgttggtttgtcgacatcgggaactgctgatgtgcttgttcgggcgacccatgctttatctcttgcagcgtcatggcctcgg

SEQ ID NO: 115483 - DNA, 573 bp, Zea Mays
ttagtaacacaagggagtatataatgaaggatgatttcttttagataggaaataagcataattcatcatccataagtcacacagacatgaagtaaaatcctcaacattagtgcacttatacttgaaaagaggaacatgcactatttaacaatttgatcactcataggaatttacttcttcatattgaactttattatcatgacttagaggcgcatcaatatgagaatggatatagcaaaggcatgaattagattctaatggacaaacgcatttatgaatatgatattgaatgcacacttagttattttaggtccaataaagaatctattcctcacaagggtagaatatgatagtttagattaaatactcattgagatgggaaccaaacttaattaagaagatgagttcccatacctttgcttttacctttcttcctttgggtgaagatcaacccatgaggcttgtgcactttctctcttgtagattttcataattgaactcaagagaaatgttagtagcaacataagcactagtttccctcttttgtaatcattttttaatgaggaatgaaac

SEQ ID NO: 115484 - DNA, 316 bp, Zea Mays
ttaagtctattcggaatgtgggacctccgacctgtaaggtcgaagtgcagaagtttctcggcaaggtgaattatttacgaaggtttatttctaacctagccggaaacattgatgccttcacccctatccttcggctttagcatgatgtcgaattcgcttggggggcagagcagcaggaagcatttgatctcattaaaaatacttgtcttcggctcccgtattaaaagcaccacaagcaggagtaccattccgattatacattgcagctgaagataaggtcattggggctgttttgacacaagaaactgaaggaaag

SEQ ID NO: 115485 - DNA, 527 bp, Zea Mays
gttcaatagaggtctaaccactactcctatcttgtcatagttgcaaagtcgtatgtggagcatgccttggtcgtgctagtgttgagcatgtcgtgctgcagtggtcggtaggtgtgtccatgccattgagtacaacatagttggtagacagtataacaacttgtactttataatacctttgggtacacccaccaccataggcgtgattacaatgacacctgcacctgcacatctaatatagtggtattggttcgcttgcgccacgagcattgatgccttttgaccataacatcgaccataacattgctttaaatatgatgtacaagagccttctctcaacagctaggagtcacgtgattgatcgggtcagagtcgcacgaggcaccggtgtcgtcacacgacactgggctgtacaacatgtggccttcctgcctcgtgggtgtcttggagagttggaggatcctggcgtgagggcctccggtcctgcagggctccaggatctgccgcttctagggcttggcctaatg

SEQ ID NO: 115486 - DNA, 307 bp, Zea Mays
tgcttgcacaccattcccaagtgcaatgagtggcctcctaatgccaaagcgagaccatatagggcattgaataatccctttcacatcctccctctgactcaagtcattcctcacgtaaaaccattcatgcatccaagagcctggccattttttctgaaatgtaggcacaggataactgcccttagagcggggcacgaagctatagcagccaaagttgttgtggtattgctctttccgagtcgctttcatatgataagataactcatgaatattgcaaaagcatcttgcatctggatctagtccttgg

SEQ ID NO: 115487 - DNA, 648 bp, Zea Mays
tcccggactgcgagtcattttctgtaaagtacaggggccaatcaataaaaatccctagacacagagggcacccgcgcaggatggcgggttggttcctgtataaacgaggggctgttccgcaaaatgcgcacggcgaaaggatacgaggtgatatcggtcgtctgatctaaggcttgcgactgcgattagattttatcacgctatgaatcagtgtgtgactggcctcgtcagatcggaatccaatggttatgattttatgaagtctgaatcgcttcaaaccgtccgatcagaaccatacggtcccgattgactcgccaaggggaaagcaagattgaatccccaccgtgcattcacgatcccacggctaccaatcctaccgcacttcacctaatctcggccacccatcaagaaatcgacggcccgcgccatctcttctccgcgctcgcctgggtacggcgactccactatgccggcgacgaacaccggcgaaccgcggcctagcgctttaaaaccccaaccctgagcccgatagcctcaacacaatgcggaactaatggtgaacacgtggatgggtaatttacctgcagtggcgcagaagaattctccagccacggaaccgagctgactgcggcggaggagatagcggag

SEQ ID NO: 115488 - DNA, 461 bp, Zea Mays
gtcgagccacttgcgcttccgagttggcctcgaaatatgctaaggttcgattcattatcgccatcattgtaacgagggggtggattatgcacgctcggcagtttgtcaccataataagttgttgtgaagtttgacacctcctctagaatgtatgcctctgcaatggaagcctcgattttgcatttatttctacatttcttttgaatagtctttagacatctctcgattggatagcaccaacgtccctgcacgggaccccccattcgtgcctcataggggagatctagaatcaaatgctgcattggattgaagaagccgggtggaaatatcttctcaagcttacacagtaacacgggtgccaatatttccaagtctgcaaccacggtccgagataactcttttgaacaaagctgatggaagaaatagctcaactctaaaagcgatagccagacatgctcagg

SEQ ID NO: 115489 - DNA, 491 bp, Zea Mays
ctatcttacaccggaccgtccggatatggaatgaaccgaccgacgtattatgccagaccgtccaactctacacgagtccacgcgcagaccacccaagtcgtgacatatatgaccaaatcatgcgggtacaaccctggaccattcagcccgatcgcaaaccgtccagccctttacgacggatagtccgggtacgagactacccaggcagcaccatatacatctggacagtccgggcacaccttcggattgtttggcccggttgcggaccatccggccccttacgccggaccgtccgggtatgcgtacgtagaaccaagagctgcacaatcgttcccacactcatcgcaacaataatatggtgccccactagcaacacattataaccatgccatgccacctcatggatactgttctgccactagagagcctgagagatatagggcaggagctggtgacattaataggacatctaacacacacctcaaacatcc

SEQ ID NO: 115490 - DNA, 523 bp, Zea Mays
atctaaccctgattggtagaggcaacattggacgcaggtgtagggggcactccggagggagccacgttcggaccgaaagctggctctatttcctcaggatcctcctctccctcactgcctgcctctttatcgctcatgtcttggtggtgcatttctaggtgaacgttggccccctcaagctcctcctgcacatcatggagctggttttctaggatctcgatggtgttgtcctggatttccacctgctgctccaatgcttggatgcgattgctcatctgttccacctgtagatctttctccaccaagtccgaagacaagtagaccacgaagtcctccctatcgtcgagggtgatctttgcagcttgagcgagcccagtgaggtgcgtcatggcgtcgcttggaaaggcctataggcagtacagtgcactcatgcactggacggtgattctcctaacctggtcgggatgcatggcccacacatccttcacatggctcactctgttacaccacatcgggtcatccc

SEQ ID NO: 115491 - DNA, 373 bp, Zea Mays
gtgagaagtaacaagtggacttactaatttttatacaagttatttcgcgctctagaaccaccatacacaattaatcaacgcattcaccacaatcatcaaatccggcatatatgtatatcgaagcgcttttcacccactagttcgcattttaacttagacaccacatgagcactactaatttttacccgtgtcatttagtgcactaaaattaccacatacattcaacaaacacattcaccacgtaaatagcatcatcacacatgacctcgacttaaccgcagaggaagcgatgactacttcggcatgtcaccacctctctacagtccaatcaatattaactacatcgatcgaacctcatattgcgcaactatta

SEQ ID NO: 115492 - DNA, 296 bp, Zea Mays
gctggtagcgcaagctaccgatgaccggatgtagggacattctgcccgaactagtataaatcttgagaagcccagacatgcacacagaaatatacttgtcggagcgaggttcaaaataccgacaaacttcctttcacaagttagcatcaagagctgaatatgcatcttctatagttttggagtatcataaggtatataatataatcatcaccaaaagactttgtggtcctctgtaacttacttttttgagtgactatagtagtatcctcctctagattttccacatgggtttcaaa

SEQ ID NO: 115493 - DNA, 415 bp, Zea Mays
atcggttctagtcggcctctggtcatccctagtcgtcctatgtatattcctaggcatataagtcatgtcaacagatagaggtcaagtcactactgggcactagatatgtgctactgctagactgatggaaactggtaagaataagatcattggtgctgctggactggtgggataaactggtcgctgctatgaagctaagaactatctaagtaaggcaatagaacatagaagtatagaacactagatgagcagggccagggcagactgcaaacaaatgggtactgctgcgcagaatgcaaaactgtagagtgcatacaagggggaaggaggggagcagggatgaccttcggatgacgagctcatcttgtgccttgtagatgagcagggggcagggatgacctttaaggatgagctg

SEQ ID NO: 115494 - DNA, 761 bp, Zea Mays
ctcagagccatcgtagctccttaaggctaaaaatgcccagaccttcaaactcaactagcctacacaatcttccccaagccaccaggcagtgtccccgtttggcttcttttcttacatgccaaaggaatccatttctaattttatcaatatccttgagagctcttggaggtaagtccaccgccattgcaaggtagatgaccattcctgtcataacatattgaacttgcatttttcttccagctcgagtcatcaagtcagccttccagccagggagttggtcggctatcctgtcaattatgccttgagtttgatttctggatagcttgctcagagacagaggcagaccaagatatttacaggggaaagaagagatctcacatgggagtagatcttgaagggttaccacttcttcttcctcacatctaattggatacacattgcttttttgaatgttggttttcagccctgaagcttctccaaaaatctctaagatttttagaacaatttggatgcaagaacatgatcacatcatcaacatacaatgacactctatgttgcaaaggtctagaggacaagggttgcagcagattttccagttcagcttttgagattaaccagcctagcacgtccatgactaatatgaacaacatagatgagagggggtctccttgtcttaaaccctttttaagctgaattttttcaccagctactccattaagcatcacttgtgtggacgtggtagatagcagtccactcaaaac

SEQ ID NO: 115495 - DNA, 503 bp, Zea Mays
aattaagttcaaagtcgagctgtcaggctacccctggactgaattttcagtaacagtgtgatggggtgaactttgagcccgattttgaatgagattcagtgactatttgatggtaagcattgtggcaaagttgaagatggattataggtgtgtaactttgctgcagaaagttagttgagttgccatttgaagttgagagaaaaattgccttcaaccgggactgacaggctgtctgaatgagttagtcgccatggtacagtgctccatatggattagactgccagcgctgctcgctcatcgccggtgagctgtcgccggtggtcgatcttttgctgcgattcgtgcactgtgtgcagtagataggctcgacctggtaaaaatccggcaccgggttaagctacggctaaggccgccgtacttcattcccccagctcatcgtcggttggatagcctcgtcgccgataagctaccgccgttgcgcaccacgtgtctcagcgcgggac

SEQ ID NO: 115496 - DNA, 377 bp, Zea Mays
tttcatgcaaagctacaggagttaaagcataggctgactaaacaggatattcttggtaaggtccgagcctacgtctatgtcgtggagtttcagaagcggggtttgccgcatgcccattttctactcataatgcagaggaagtacaagctcacatgccctaagcagtatgaccttttgatctcagctgagatcccaagcaacaagtaccctgaactacgaaagatggttatcaagcatatgatgcatggcccgtgtgggtcgctaaaccctaactgcccatgcactaagggtcgtaaatcgtgcaagaatcattaccctcggaatttcagtgacacaaccttgcaagggaaggattcgtaccctgtttacagacgtcg

SEQ ID NO: 115497 - DNA, 4478 bp, Zea Mays
atcgggctccgcgcgggtggcgggtcgcgcgccgtggcggtggcgggggcggcagtgctctgcgcggccagcgtggcgggagcagctgcggtgaactccgtggtcccagaggtcgccgccgtggggctgcacaattacgtcgcgggccacgacgaccccaccaacctggacaacggcgaggtggaggcaatcgcgaagaagtgagtagctctcgtgtcttgttgcagcattgagtttattggtgaaatggttcgagctactgctgtgttgcctcctggtagtcttgttgcagcattgacgttattcttatatttggtagtgagctacctggatccaatgaagtgccccttagttgaggtttttattttgctcatgaactaaatattagtacttgcagacataatatagtactgtgattagctcagccttttattgtgatacgcacttgtctccccactccatttccaataattcttgcacgcttgtttatttggttcccccatagtcccattgattgttggaatgcaagtaaattttggtttagctagttacatgtatgttaaaagaagttatatacaatttccatatttgtaagtttttttttggtttcttgggaatctaaattgcataatcagttcccgttatctcttttggaggctaattattgatgttgctgttgctcctcttcatatattcttataatgtgcaattttaattttagatatggagttagcacacaggatgacgccttcaaagcagagctctgtgacttgtatgccaggtgtgcttctcggtgctcttgttttttccccagctggcacatgtgcttgtgtgcattaagttttcttaaattcttaaggtgtcacctcacctcacgctttagtcgcttataagcgtaaggtggtagtaaatctcaatcgccccgcttcgtcctaccaacttgataaccatgggcataactagtgttgtgctactcactactcactacctgttgccccctgcatactacactagttggaggcacgaaggtttctgcaaacaattgcaggaaaaaggaataaccataatcctctagatgtaatcatactattgactatatattaagaagcaattggtctctgtttttttaatctatattaagggacccaggcaagcaaataaattattgctattaggcgcagtcagccggccactcagtttatttggtgttttgggtttgtatatttggtgagcaaaatttcagttttctgaatagaaaacccagagtttttgcctcaaaccagaacatacactttgttgttcggtgtcttcttgtgtttactgaagaaacggcatggtaaccagggacagatcgcaaggggtaggaacagtggctagtttggcggacttcatcaccacggctggcagcttgccgagccacgatgaccgaggtagtcctgccgaactccagggagacttcattcctcgatgatctcctaatacaaactagggtctgcctttatagtatgaggcagccacaaaaataggaactgaataacttattttggaagtaaactaatgcatatctccctagaataaaactttccaactaactcgatttctagccacgttgttggtcactttcctgttttccgcctgctgccccttgattactttcctgtcttgcgcctgctacttcttgggctggatcctggcgccgacgcttttgatattggcagcccacaaaagcgtcagtaacagcttgtcattgtcagtgcactacaatgttatcaagtcatctagttgatcttagtcgccatgggaccaaccaggtgactagttggtcctagtcgtcctatatatatcaggactaaactaatataccaaatatgtactgatgtactatatgtctggagtataaatcaagcaggaagataactctagggtggtggctgcatgtaggcctgcaaattgggttaaacaatacgggccttagtgaattatgctatcccagttgcagcctatgtcctaagctgtttggcaattccattatgtttctggtcatccacctcttagtcagatgactaatcggatgacaagaaaactacttgacctaaatgagtcgtagcccctagtcaagtccaggatactgattgggatgactaatcggatgggttgataacactggtgcactagctgaggctagcataccagtgagtggtggttgtcaagtcatgcgctcgtcacggccacctgcatgtccatgtgccatcatgcccatgttgtggcagctagctttcttgtttgcctgggtcagttaggggaaggagcggggagggataagtggatagtaacacaatgtggggtcagctggtccggttagggaacaaactgttgttctctgtacagggcaattcacatgcctagtgagctacctactaacgaaccatcaatccaacatattcctcataaattgccttctgtggccagagctaatatgcacaacacaagcaaataccaagcttgtttggtggtgttggttgtggaatttgtatttgtgcatttgggtggtgtctccaacttttaatgacagcctttcagtttcgtggatggatgtcaacaatcttgcctgggtacaactgaactcatgtatacaatactcatgtagtcatgtattagcatctagatcagatgggcagttatttggtcatccttttcctgaccatgcttttatgcaggtatctttactcagtacttcctccaggagatgaagatctcaaaggtacagaggttcaggcaattataaaatttaaaagtgctcttgggcttgatgatgtagatgctgctaacatgcacatggaggtattgcctcccgatctatctcctatgctcttattgttttcgtctttgtttcccacattctctatgttttatgccaataaggtacattttcctctttgattgttgtactagattggtagacgcatatacagagagaggttggaaacgagtgatcgtgatgctgacatggaacaaagacgggcaagtgtctatgctttgatatatgaatgagatgtttggaacttcctgttggcccatgttataaccatgtcgaattttttgcaggcatttcagaagttaatttatgtgtccaatcttgtctttggagatgcatctgtattcctacttccttggaaacgtctgtttggggtgactgattctcaggtaattaattataaaaatgcttgttaattttttgcatgccttctctcagttttatgctttgatctcacagagttatttgttctgtattttgaagttcagttcgttttttctggcaacgttgctctttgcatagttgttatgctgcttttgatgcagttgatatttcgaagagtttggacaaatgttcatcaagtgttaatgccactactcacagtccaaataagaatgtctttctttacttaccatggtattaagtatcatttgacattatgtttctagattgacattgctatgagggaaaatgccaagaatttatactcggtgcagctcaagtctattggaagaggtaatgctagaacacagttttgtttaggtgttagttcaattataaagtcatagtgtcatattattcataagttttgctttatcaagtaaatcatatagtgtgctgtaaagacagcaatatcaattttgttgttgttatatttattgtttgatatatctcttattgcatctcaagaacattctgaaatcacaaaatgctctcggtttaggtcttgacataggcacactcattgaagtaaggagagcacaacttgcatataaactttctgatgaggtaactcttttctcaactctgttgctgcttatttgttttttcttcatttgggatgaaatctacatcagtacttatagaacaatgtcattttatatccatgctatgatgcatatacactagctgagagtttagacaaaaataaaaggtcaattatcattggtgcttggaaaagataatagagtcaatgtaagcatgtttttgtttttaagtgacattctaaatttcttgcagattgctgctgagatgttccgtgagcacgcgaagcagctagttcaagaaaacatttcatcagcattagacatcttgaagtcacgtattccgtatggaacctacttaccctttgagaagcatgctaccagatttaattattagatgttgtgcatagaaacctgagtgatgttctaagctagatagcctgtggttcgaaggaaataacatagccagttttctaaatccggatatattggcttgcaattttgtagatatttcgttatataatggagaaaaatatatcttataagtagcaatgggtaataatccatcttttacccatgtttaaaacacgagacgatccatcattcatctatgtgccaacctttctcacacatggccctgccatattacgttcgcagcattgtcttgtctatcataagca

SEQ ID NO: 115498 - DNA, 348 bp, Zea Mays
agaggaacccagttcacatccaaattctggacaagccttcagaaagccatgggcaccaagctagatttcagtaccgcttatcaccctcagacagatgggcagacagagagagtcaacaaagtccttgaagatctgttaagagcatgtgtgttagcttttgatagaagttgggaatctagtctaccctacgcagaattctcatacaacaatagttgtcaggccagcatcaagatgtcgccattcgaagcactgtatggacgaaaatgccagacccctctcatgtggtccaacgtgggggaaaagcactagaaggacctgcctttgtcaaagaggcggaggagaaagttg

SEQ ID NO: 115499 - DNA, 396 bp, Zea Mays
tggaggtttacaatgagggctagggtttagatgtttgatgagagagcagggcgtgtataagattggattccctcagatctaccttgggagggatccctagctcgccttatataatccggcgtggcttgggttacaagtcagtttccttatatatctcctagacgatttagattacaatagagtccttgtcttgtgcgtcaagtttgttcagttcgttggcctcgggcctgagttagtcggtcagcgcatgtagaatacgcctcatttggacccaggggatatccacccccacacgtcagtctcctgcaatacaatatgaaggttcaacacaaatgtaatttatagctatatggcaaaaaaacattaatcctaataacagctaaccatacgctcaac

SEQ ID NO: 115500 - DNA, 438 bp, Zea Mays
tccgaacatcagagagcatccttctcagtatgcatttgaaaaaggcacccaccatcatgcatggatgcaaaccttctcattccaaaccctaaatttagagccgtcactcctaaagagttcgaagaaggagacctcgtcctcatcaggatcgatagaacgaaatccaaagacaaactcgagccgaagtggaaaggatccttcatcgtcaaaaataaaacgtccccgaatgcatacatgcttgcaaatcaaacatgcggagacctcgaacattcttggaacatagaaaatttgagaaaactctatctgtaagacgacacatagtcagggccttcacatccttgtaataatttttgatacatcgctccatttaggcccacactcttttcctcgcagaggggtgaggtttttaatgaggtagcaccatgtaataaaataaac

SEQ ID NO: 115501 - DNA, 389 bp, Zea Mays
ggatctaagtatcgtggggattacgtccggaagaagatgaatatgtcgtagggtttaggatctaggaagtgaaagatttctctaatcaggacgactcggtcgattgtgtgctcacgttgattttggactattttcatcaaagtgattctctcacaagcaagctaaaaagttaggagtttggtagtcccccgcagcttttgttgaccagaatatggatttaagctgaaacaaatgggtcataatttgtagcaagcgacgtttgggccatggtctcgccacggcctgtgccatagcagcagacctatgatcatatgtgcaggcgtcaaggtgtgcaacttgtgttttatccaatacaaatgataggatacgggtctatcgagccattgtca

SEQ ID NO: 115502 - DNA, 621 bp, Zea Mays
aagaatctttctaagtcaacagcatagttgactagggttcatctagttttactaggctcaattagcgatgatcaaggatgttgattaatgaatttggagtctttgtcctatagggagtggaacaagggcttgaatggatgtgatgtggtcacaccttgcacaagaggtgattttagggatacgatctagagttccttggtagatgagtttgaagctccaaacagttgatacgagagttcaagggcttaggttgagatctcaagggggtcttcaaaattcaaagtatgtgtgtgtgaaaagttttagttgaaataaccatcgagtcgtggcactaagctagttggtaggattagaacttaggttacataactcttctaacgtagaaatagtaacacacctaacaaattaaaatcttagttgcatatgtagatagatttttttattgcacaggttttaactaccttaatagtagaggtcatagttttagaagatcttaagttgcctaatttaatccttgtcttatgcgtcattggtccctttagtccggtccatcgatgtcaagccctttactcgcgcttcaccatctcgatggtctggtctactaatccgagcccccttaat

SEQ ID NO: 115503 - DNA, 605 bp, Zea Mays
aaaagaaagttgatgaaggtgctgaaaaatttgaagtcgaagcagtgaagcatgaaatttgcgagatcgaaaggtctagagctcaaaagaactatgatgagcttcgtgcttcaaaagagaaatgttatgaaatatccttggaatgcgccaagaaattgaaggacatctttgctagagttggggcatattcttctgagcaaaaattcatccgtggcgaccctgatggaatcgtccagtggattagcggagaagtcgaagcctttgacaaaattttaagtgaccgaggagacttttgcgccttcgctggtgcacaaggggccacgtcgatcttagagaaagctggctacaaacatgctaaggctatagttcagccaggatttgttttctcgtgggtgacatcaaagacccttcagccgaagcttctgcgctaggcgggagattttactccgaggtgtggatgaagggtggccatgagatagatgatgaagcgattagaaaaaaacgaaaaagaatctcacgacgcacaagaagaagctaaacgagctgaagaagctgccgagcgtgcaaggtttataggtacctttactgaggtttagctttggaat

SEQ ID NO: 115504 - DNA, 398 bp, Zea Mays
gttatggctaaaattaatcttgtatgttatggctaaaactaatcttgtatgttatggctaaaattaagtttatgtttgattaataatatggtgggtgaggaccttcgatgaaaattaatcttgtatgttatggctaaaattaatcttgtatgttatggctaaaattaagtttatgtttgattaataatatggtggctaaccgccgcatatagttaggttaattaagcttatcgtgaaaatttataaatcacgtgttattttattttagcatcaaatatggtgggtgaggaccgtcgatggatgtatgaaggttgacgtatgaatcatccctcgatggagtggataagaaagacagagaattttattgatcgtgcttttgctttgtcaagaggcacgga

SEQ ID NO: 115505 - DNA, 586 bp, Zea Mays
gtccgcagctattgcgagaagacggaggcctccatccgtgccgaagttgagcgggcgcacacgctttttgtggaagcgtaccgtgagctcggcgcatagactgctccatttgataaatctagggaggaggtgggtctccgcttccttgggtggctgcaggaggagctggagtcacacccatccattgtgacattcctcatgtcctacgcatctcttgttacctgcgagggggcggtgaatgccttgtcccgagaaggatgtaggcacttcgaagtcttcgactgggtgaacgaggacttcgatctcggaattttacaggttgaagatggtgtgctaaagtggtccactggggtgctttatgatagaatgtggggtcctcatggtcgtggcatcgtccgggagagggccgaccgagcgctggcccatgtattttttttatttttttacttagttgtaaaatgttgtgttgtctttgcagatgatgaatgaagaagaagttgatgacctcgtcggtcttgaaagctcgatgacccggatggatggcacagtggaggctggagttgaagggctctcagcacctctgggc

SEQ ID NO: 115506 - DNA, 463 bp, Zea Mays
ggaaatcgaagtaacatatattctcactagcaccaagacgaaaacaatttgtaactttaccaaaaataggacatgtcaatcttccatgcacactccacctaacaaaatgtcgtaagccatgaaatcatgtattgaggacaaatacccaacctagagattgattttttgcttcttgaagcagtcataggattccactccttcccataacttcttcaactcttcaatcaatggtagaagcatcacattgatgcgtatgccaggatgctcaggcccaagtataacaatacataggaacataaacttatatttcatgcaaatagaaggtggaaggtacaggatggcaaagataggccaacatgagtttgacacaactatcattttaaaaggctcaaaccatcaattgctaagccaatatgaacattccttgcaacactagcaaactctgtatcaaaggtggcaagag

SEQ ID NO: 115507 - DNA, 551 bp, Zea Mays
acagggactaactcgcaagaatttccaagacccaggattcctacaatgtggaataagggttgaatacctaattcatcgggggttcttatgaaaaatgtgctcacgaaggggtatgaatcaaatctgaccgtctgattagaaatcaagcgctagcacctaaaacgaaatggtacgctagtggtgtcattggatttgcatcctatggttcagatctaatgcacccaagctctaatctcgtgcatccgatccgaattggacgaccctcgttaccttgacccaatcgatatgtggctgctcaatcctgagcgttacactggaatccaatggctccaaacatccaattctctcttctatttgtggcctttaatcacgagatcaacggcccagggacgtcttctaccctcgacaccctctctcctcaactccaaccggtctaacaccagggcggcgccatttgcagcacacagcccaaaggtgctatggtttctacccatgaagcctccctagatccgcgctgcgagggttaaaacaaaccgaggtcatgagcttac

SEQ ID NO: 115508 - DNA, 313 bp, Zea Mays
gaagcctaaaggtgctcgcccaaagcgtccacgccgagttagccgcccgactgcacctgttggggaaaagaagaagaggcggcttcggcgactgtcatgcttggaccaaggcgtaggtccttctgctccggttccagatgagatactggcagatgcccttcctaaagttgacgccgagggtagtgatcgtgcacaagctgttgtcttcatattcgatgaagacgaataggaagaagaagaataagtcccgctgatccgtaagaacagccgacattatagaggtagcgaggggggagcgatattccttctccag

SEQ ID NO: 115509 - DNA, 1111 bp, Zea Mays
ttcaaacactcatgtggaagctcttgaggatgatgtccttaatgctaatgaagatgagagaatgtttcctgagtttgttgaaaatggtcatgcacgtgggtatgacatgcttgcacaattcgaggataccgatgatgaagagagggaggagaaccttaccatgggtgtgcctgatgatgtagaagatgaggatagactgattgttgattgggatagagaaaatccaagtctagaagaaggcaatacttttccaaccatgagagattgtaggaatgcactcgcaacctattgcatcagaggggaatacgactttatcattgacaagagttcgcccaagagatacattgtgcattgttggtttgagcggtgtaagtggaggatgcatgcctccactatgaggaataacactattgttcaagttatggtcaacccttttccgcacacatgcccaagtgccgaaagaaaagtgacgcagagggcagccaagagcaggtggtgctgtgatgcagtgttacagtgggtgacagaaaatccttttattggtccaaccgcacttattaagaagattcatgagaagcataacattcaagtgccttacatgagggtcttctatgggaaacaaatggctcttgataaaatctatggtccatggaaggaaagttttcaactattgtactcatttaaatccgaagtggagaaggcttgtcctggaagtgttgtgcagattgacaagcacaaagtagtgtacaatgtgaaaggtaaaactatggagaaggaatgctttcggagagtatttgtttcattcaaggcttgttggaagggttttttggatggttgtaggccatacttggcggtggatgcaactgttttgaccggcaaattcacaggacagttagtggctgcttgtgctatagatgggcaaaattggttgtatccagttgcttatggtgtcttggaggttgaatcatcagagagctggacatggtttatggagaatctgcgacatgtcattgggtttcctaatggattggtcatacacacagatgcttgcaaaggtttggaggttgcagtggatcatgtgttccctggagtggagtacagggaatgcatg

SEQ ID NO: 115510 - DNA, 741 bp, Zea Mays
gatggttgtaaatcaccaaaacaagtgtagaaatagttttagggcctatttccctttcaggaacgtctagaaggagcacagtagaaggaccttccaactttacttcccttgtgtgtggttgtttcgttgttttttcaatggccaaatagggtgttcttgattcaatttgtatgcgttcaacctaggatgccaattttactcgcgggtttgggtatccctcgggtatccgacccatcgggtttggccacgaaatttgactcatgggtctcacccacacattatttgtaaaaaatgggttgaatatgtgatgtatctctcattgtcccctgttgaatatccgaaaatgttcaatgtgtatttttagcccactaggagccaacccaatggctcatcagtgttaactaaccaattagccctagccccacttggccactcgcacccccagctgccaagagccacccgcgaggccgtgaaccccaagtatagatcgaccgtcgatccccaatctcctccttggctccccagctcccctcaccacacgaccacaaacaactcgctagccctctagcaaggcagcaaaccatcagcctccgattgccagccctaaccaaaagccaccttaatccatcgggactagcagtgggagctcaagtcagagccagaggattagtaggtcatcggggcatgcagacatcatccagaacgcagggagctccgtgaccgacgagtgaggcacaaggt

SEQ ID NO: 115511 - DNA, 561 bp, Zea Mays
ttttggagttgctctaacggacgttgtttcgtcgctagataacaacgtgagcccaacagtactcgtggatttttttacctttgtcggctctcgcctctcacgtaagcactcatcaagcagcaaaaacatattctctttcttttcctttgaagaggcgctccttcaacgatatcctctatgtgcgtagatgcatgcagtcacatttatgaattatacaccacttgcctgcacattttacatggacaaagaaatctactgtatcaaaaatggttaatgtattattgttagtatgactaatatatagctcatgctaacgctatgatcctaggaagggggtcgacagtggcggtggcgatggcggtgcgaggggcgacgacgacaagtctgaggggaggggcagcgggaacacagggtgaagggaagagggcgcgaggaggggaggatgcagataaataatattgtccattagattttagtaagtgagatggttattcaacgatctgaattaatattgtgttaagtttaggtgcaatttatttgttggatttaatgaaggttttg

SEQ ID NO: 115512 - DNA, 485 bp, Zea Mays
gcgagccttaagaataatcaggaatcttttgcaacattaaattgtcttatttcatgattgtagatcctattcaaacaaacacgtgagcagatttgcaagatataaagaaacaaaatgacatgactagccaatcatacattttgtgcaccagcttgttcagaagaagctccattggagggcacagatcctttcagtgtaacctcatcatcctcagatacagcctttgtatgatcttttgcattactctttgctttacgcttcagcatatttaactccctggcacttaatcgtctagagcgaaaattagaatgcttgggatacctggggaccatggtagaaaccaactgctgaatattatgacctgaattaaatgaatggaatccattattctgtacatgtgaaccccaataatttttttgggcaagaagatcctcgtctttgataacgtcattaacatccataaactgctcacataaatccagtcc

SEQ ID NO: 115513 - DNA, 314 bp, Zea Mays
ggttgctggattagatttgttttggttcagtttgattgtatccatccgcttccatcctacaaaaccgaccctatctacaaaacagatcctatctctacaaccgaccctatccacaaaacagatccaatctctacaaccgatcctattcacaaaatagatcatatctctacaaccgacaatatccacaaaacatatcctatctctaaaaccgaccatatccacaaaacagatcctatatctaaaccgaccatatccagaaaacaaatcctatctctaaaactgaccctgtgctccatagtcgtcgcttcggttcc

SEQ ID NO: 115514 - DNA, 494 bp, Zea Mays
gttttgtgaaatttaggcgttgtcatatgcgctggttcacttatgccacaagtacaggataaaaacgagataaaatatcttcttggtacaattttcttgctccaaatgatgtataaaacaacatgcgctatctagatatgctatatacatagcatgcgatatatctacatgtaacgtatggtttcggcatcatggatgttagggctaaaggttaagcacgtagacggctaacgtagctgttttatctctgaaacggagacagagtgcactagtaaatcacaaagtaacgctcgaggtcacagagagcgactggccacaggggatcctttgtgggacccgcccattaaccgcgcctctcgtttcgactttcgaatggccgaagggcacaaacccgaacctgtcgcctgttgcagggcccgactctgtccccgcccctctcctgttcctgatggccccgcctctatgggccccgccccacagagaagtggataggg

SEQ ID NO: 115515 - DNA, 368 bp, Zea Mays
tgaagatatattttgaaatttttcaagacttcccctatcatctcattcagaggaagtcgcagtcctgctctgaaaaagctcttgaaaaccactacttcatcattcttcggtgctggggtggtctcttcttcggcaaatcggacaagtttcctttcagcttccccaaagtaacccagcttcatcatcatgggcatgtcaacttcagacacaatagatttctcaaaatctagatggctgggttttgatgggatcaaaatactataatcttcttcatcctcttcaatatcttcttcttcagcaacggtctgttcagcttcggtaacaggggtaccttcgtcagtcacaactagacctgattgtttcatgac

SEQ ID NO: 115516 - DNA, 303 bp, Zea Mays
attttctttattttaaaattgttttctctctactagttttagcaactaatgtttaatttcttttaagttttaattgatggatttgaggtgttacatattctatatatcggggagaatgcatgtaacttgtattatccattggtaggtcctcaatttgcttccaccatttgattcacctaaaaggccaccacccaccagtagccgagcctcagctttttctggagctggcaagcagccctcatggacctcatgtgatttatattcacccaaaaaaagtttttcagaaaagaatttgtatatatt

SEQ ID NO: 115517 - DNA, 623 bp, Zea Mays
ctaatacaccagtatggattgcttcagaagtggtacaacctcaggtgtcactaccagttttagctctcgggccttcgtatatagaggatatcattagtgcccgatgttatcgacgaccactgctagtgttaagttattagtaacgattgaagactcgttagaatatagattgaccgaataaagttgcatggctagggatgtaggccgcacatgtctttgatcattatgtcaacccaaagcttactaaaataatttagaacggcatgccacttaattattttgaggggaaaatattgaacaacacttctatatataccgagtaaaccaaccaaaaacgcaataggatggttactacagcctaggatgtttacagagcaatatagtctaggagacaggtcatactttggtatatatatacacaacttgtatctacagtacatcaccttagaaagtcaagagagaccatcattttggtttgcggcaaatgcatgctgatgccattttgtgcgtacagatactgtcatcattacttgttattaatctgaagcagatgcaatagtactactacacagtacaggccacctacttccactagtcaaaacatgaattgactcatattaaag

SEQ ID NO: 115518 - DNA, 342 bp, Zea Mays
acatttctcttgtagatggttcgtactctccaaaccacccgagtcaacaccaactacgcccctccgccacggcaagctcctgtctacccagtggtagtggaggaaattccggtggatctccctcgcattcgagtggagcatggagtcatcttggaggacagctcggaggaacttctgtcggcgcccaccacgttagcagagtcactggccttcgcagctaggtcatcaacctcagcaccgcctgcaccagccattcaagctcctgcacctggaggcaacgacccggatgactctggggatgatgatgaagatgacgacgacgatgaggatgacgaggaaaac

SEQ ID NO: 115519 - DNA, 469 bp, Zea Mays
gtagaacttcctgagatgttctatgttccatgagttcccaatttctgtttcgtccatctgagtgagacgatatgatcccgaccgagtgacttctgctactatgaagggtccttcccatagaggtgacaatttatgccatccctcccccgttagaattcggcggaggacgagatctcccatcgcgaaggatcgatgccgtatggccttatcatgatagcgcctcagagtttgctggtatcgcgctgattgaatcaccgtattcagtcgctcttcttcgagtacgtcaacgtcttccagcctagtagcttcagcttctgctatgttatcaaagattaaccttggtgccccgaacttgagatcggcaggtagcactgcctccgaaccataaaccataaagaagggggtatttccatgcagagctcggctgggttgagttctcaggctccagactacatatggcaattatctg

SEQ ID NO: 115520 - DNA, 500 bp, Zea Mays
tgtagccatcgttgcgctggcagtaacaattgctttgcgacgacgcagggattccaagaacaaggccggggcaacaaggagctggtgaggctggaggagatcgggacagccatgataagcctggaggagtgctgctgggagatgcagctgcagcagcacgaccaccagctggtggctgtccccgtcagggtcaggaaggacggatgggcaagcgatgccatgctttatgtaagcgcgatctttcaactgcattgccggccatttgcagttttagtggcactgctttggattaggataataatagacgtggatggcaaatgtttgatggaaatgacatgtgtaactgatagaattgggtgtggttaactgttcaggtggacgtggagctcgtggacgcgaacacacgcccggacgtcgatagggcagtctcgttcagggagaagccgagaacgtacatggcgcctccgccgacaatgcgaggtagccgcaagagcttggag

SEQ ID NO: 115521 - DNA, 352 bp, Zea Mays
cggctattaaacaaggcgtccaaaacgtgccgttagcacgtgtagcttgaaaactcagggctacctgcagactagcagagagggtctcgcatcgtacaccgatcagaacccatttgccatgatttcgacagaacatctcgcactcgctaccaaaagcaatcaagttcagtacagtcacagcaacacacgctctttttaggtgcgttgccgacacaatttctctaatcaaatgtttcagtgtattcagtctgcagaaataatcctgaatatttctttcgggtgtttaaaagtgtgcagcaaatttgcaatgctctagtccagtggaagttacagaacgggtgcgcagaggaac

SEQ ID NO: 115522 - DNA, 576 bp, Zea Mays
gagttatctcggaccgtagttgcagacttggatagattggcacccgtgttgttgcgtaagcttgagaagatatttccacccggcttcttcaatccaatgcagcatttgattcttcatctcccctatgaggcacgaatgggggggcgtgcagggacgttggtgctatccaatcagaagatgtctaaagacttcgaaagaaatgtagaaataaatgcaaaatcgaggcttccattgcagaggcatacattctagaggaggtctcaaacttcacaacaacttattatggtgacaaactgtcgagtgtgcataatcctccccctcgttacaatgatggcaacaatgaatcgaaccttagcatatttcgaggccaactagaaagcgcaagtggctcgaccaccaagaccctgacacatgaagagtggcggcatatcatgctatatgtattgaccaaccttgaagaggtgacaccatacatggaacaatttcttcatgaattctggcatcgatcaagggaccccactccacaggaatatgacactcttcttagaaagggtgcgagaaatgggttgcccgatt

SEQ ID NO: 115523 - DNA, 737 bp, Zea Mays
atgtaatataggtacaacattacaaaaagtatgtacgaaactaatattatcatatttgagagaacttacatggctttgaagaatatgaggtgtgtcatgttcatgcgccccaatatgtctcatggggatgtgtttatctgctcctaccacgtctgccgatcttgtgttctcatcaatatgtccaggtgccctcaatgccgccgggggagtaacagatacaccctctgtgtaaccggtgatcgcagacgctacaggatgcatgtccattgaagtagacgtacctattgatctatgcacagacgctacaggttgcatgtcatcaccagcaccggtgttggacattccctcgccgttaatcgccgccaaaacacgcccggtgttgtcccttccgccgccgttaaccgtcgccaataacacacagatacgaacgtggatctactgcggctgtaaattaaaattgattttcttgtactaatgctcctcaaaccgtaactatcccttattttcgcgattgtgcagccatctttccttatctcaaaccgatcaagatttatatattgcatggtttatgctatcaagttacacatctttatgcagtcgtaaacggtgtgcacatggtaatattcgttccccgtgattcgtgatacaaaagattccttctatgcatgatttatgcacattactccatatatttatgcgttcgtatattgcctgacgcgtatcatctaggattcgtg

SEQ ID NO: 115524 - DNA, 589 bp, Zea Mays
ggaatctgctatggctagatttttgggcaggttaaataagagaaatttaggacatccttgcttataaagattatgctaacgtaacccgattgtttcatcttgcttgcaaagctgaaagggaagtgcacggacgacgtgctagtgcaaggtctaatgcttctgcaggaaaatctacaccatggcagcagcgcaccactacgtccatgactggccgtacaccagcaccaactccctcgtttagtcgaccagcaacaccgccttcctccagcgacaaaccatgtgcatctttcacaaattcagcaaccaaatctgccaagaaactagcaggtagtgcctctttagtagcctccacgggtagaacaagagatgttcagtgttatcgatgcaagggctatggacatgtgcagcgtgattgtcctaatcagcgtgtttttgtggtaaaatataatggtgggtattcctctactagtgatttggatgaagctacacttgctttgcttgtggctaatgatgcagtcactaaggaaccacccaaagaacagattggtgcagatgatgcagagcattatgagagcctcattgtgcagcg

SEQ ID NO: 115525 - DNA, 570 bp, Zea Mays
aaaaggaacaaataactgaaagtaaaacagcatctattcatgctcaaactaaaagcatatgtgtactttactatcttatcttggttcatgtgtcttattgggtttcaatcttagctaccataagtttgcttcagcccaaatgatcttggttaagctaaggataactggataaagggcgttttgggcacccttacaaaataactgaacacagcctgagttatccagcacgtgaaaaaatgggctttctggtgatagtttccatttgagttgtcgcctgtcgaaactctcaattaggccacaaagaattctatgaagacaaacacatcagttgatacggctgggatccctaccggagatgcttcggagattgtacggatgagacacggagggctgaggcggtgcacggcacaggggcaccgtggctgatctcgagagagatgagagagagagagagagagagttggtggctagggttcgccctgcttcctgagggaagcgggcaatggtaattgcttctgcttaattccattggatagcatttacaagtatttatttcccctactaatcctt

SEQ ID NO: 115526 - DNA, 482 bp, Zea Mays
ctggtaccaaacatgtattttgaagtttgtctttgtagctcggttgtatgtccataccccttcctcctaagcacgaaccaattcatcattcacaggctccatgtacacgcctgttggggaggagaccaaacacaacctcgattgtagcgaagaccatgttgggcgtactctaaactcgaccgatttcttaagaaaaccgcttatagaaatcacatttctacagtgattccttaagaaacagccactaaaatcattttaatcctaatttttttgtgtttttcaaatgacctcgtatgaaaaacaccaaaaataaaactgtagatctctaaaatttatgaaaatttgtagttgacaacttttttatttgaaatcatttcggctctcaatacattgcatctaaatgtgtcaaatttaaaatgcaaattttgcaaacgacctagggggaacaccaaaacaaaagttatagaacttcaaaagttaat

SEQ ID NO: 115527 - DNA, 434 bp, Zea Mays
ctacaaccgagtcgaccgaagcgctgaaacatgctgccggagtcagaggaaaggcagtcgaagagccagagcgagagaaaactgtagggctaccaaaaatcttgagtccgccaccagagccagaattgccgaaggtatcgaaaacccctgcaataactcccaagaggaggaggatggctagcgtgctggacgctgtcatggagtcgacaagggcatcaactcctactcttacaaaggagactgccgaagctgctacagctcgtgctgaacccgaagctgggccctcagtgcccattgaaacagagcctgctgggactgagcggagtgttgaacaaggaccctcggacatcggtcttgttccggagaaagaggacacgcccaagaagattgaatctcctactcccgaagcaccttctgaaggacttgactttatt

SEQ ID NO: 115528 - DNA, 957 bp, Zea Mays
tttgacttgacgatgaatggaccctcccatttcggctccagcttgccccatgattctgtccgggtggtccagacgagtacgaggtctcctttgttgaaatctcttgggacaaccgcgttgtagcaccaggccttggtttgagcctgatatttgttgagggcctgtagggcgaggacacggtctctgtcgatgagatctttggacgttggttcatcgacatcggggactgctgacgtgcttgttcggggtgacccatgctttatctcttgcggcgtcatggcctcggatccatacaatagacgaaaaggtgtgaatccggttgcctgacattctgtcgtgtttagggccctgaccacttcaggtagttggtcgacccatttgcccttcttgtcatcgagaagtcttttcttgatggcagtgaaaatcttgccgttggcacgctcgatgacgtagttggattgcgggtggtataccgaggcgaagacaggcttggtgccgatggagaaacagaaatccctgaagtcttggctgtcaaactgtttgccgttgtcgactgtgagttcggacgggactccgaatcgacagacaatgttttgctagaagaacttttgggctgtcttcgacgttattgtggatactgctctggccttgatccacttggtgaagtactcgacggcaacaaaggtgaatttgaggttcccttgagccgtaggcagtggtccgacaatatccagcccccagcattgaagtggccatgtgtgggtgatcagcttggtgaactgtgaagggttgctcgagcggggggggggggggggggaacttctagcatgcttcgcaagaccttgtgacttgattcgcagtacagattatcgcgggccagtaaaatccttgacggatcaccttggcagtgagggccctgggtcctgagtgggagccgcaagttccactgtggacttc

SEQ ID NO: 115529 - DNA, 446 bp, Zea Mays
cagaaggcctttagcaccgtgtgtgctttcattggcatgagggatttgattcaagagcatatagccttcagggtatggcccttgtggagagctaggatatgccaaaggagaccactgccgattccagtgagggtggtctggtccgattgaagtataccttcagatttagggagaagtttgatgagccagacgatgactggctgaagtgtattgaagctaccagtgatgagctactcagggcatactccaaggccgaagataatgctttgtccacaactttcaggggtcggggcaagaaaagattgaacagggtatttgatgcgattggcttcgtataccctgactaccactacccactacgagggcaagggaaaaagggaaagactgtcgcttcggccaccccagctaagccaaagagcaaaaaggtgaaggttctgacccaccgg

SEQ ID NO: 115530 - DNA, 955 bp, Zea Mays
tggagttgttccgcttcggatatgggcagtccttgatgaaatgtccagacttcccacaattgaagcagacagttgatgaactcgggagtgcacggaaatgagcaccaggggcactcggctgagttgttgaagtaggggcaatagcagggcggatgaatacaggttgtttaaagggataggagggtggacaaggtgaagaacggttttgattgaaaggtcggatcaccaacctttgtcgcttttcaggcccttggttggacctgtcacctccatagccctttaacttgcctgggcctgcatacttagcttcatctgccagcgctgtgctgacgaccctgctgtaggagaggtcgaggcaggtggccatcttccattgcagtcggtcattaaggcctctcataaaacaattcctcttttcaggtcagtgttgacctgatcaatgacgtactgggacaaatgattgaacttgttgagatgttgtgtaacagtatctccaccttgcttaagcttcatgaattcttcttgcttcatatggagcactccttctggaatgtagtgctcccgaaatgccaatttaaattcgtcccaggtgacttgatgtccggcaagctgaatgtccacataatttccccaccaggtgctggcagggccctcttaactgctgagctgcaaacaatggcttctgggtctctgtgcattggatgagtccaaacttctactcaatgacccaaatccattcgtcagcttcgaggggatcttcagctttgacgaatagtgggggatgagtttccgagaaatccaaatacgaagtttcacggggtccttgcggataagcactcccgccctgttgctgaagctgctgccccgccatttcacgaaggaagcgagtgttgtcagtggtcgcggtgaccaaggcagcaatagcctcggccagcgtgggtggtactggcggtgg

SEQ ID NO: 115531 - DNA, 320 bp, Zea Mays
ataccagatgtaattctcaaacacaaaggggaggaaggatccgacaagaacgtggctatagagggagcgataatgtggtagacaaagtaacatgtgggggatctacgagagggaggcaacgcctcaccttgacaaactgcagatgtgcctcctttgttcgccagctctaggcacaccgaagaagcccgacggtgcggctatggaggtggaggggatggggattcctagcgaagtagaaggggagggggtggggatgacactatggccagcgccagcgtggtggttcaccctcggattcggccgaggcgggcacagttgtt

SEQ ID NO: 115532 - DNA, 398 bp, Zea Mays
ctggactcgaacgactacttcctgaattgttctaatcaggaagaacggcacaaggctgtctttgccaaaatcccaatcattgatgcagccttccagaaagtttccaacctcaagttacccagagttagcaagtggaggcgaccttttattgatgtgccaaagcaagcaggtcatagcgattgtcttttttgtatggaagtacatggaatattatgacgacgacaaaatgaccaaggaaatcaatccggtgagccatgctgttaactgattttctatctgtttggtgcttttttgcgtgttttctatgtgtgcatcataatatagtcactgaccattatgttttttatgccattgcagttcaagggcccgatatacagatgtgagttgttgcattacca

SEQ ID NO: 115533 - DNA, 436 bp, Zea Mays
tgtgatgttatctgcttgcaggaaaccaagaaggagtactttgataaggctgacctcaaaattttttgccccagttcctttgattttttttgcttttgtccctcggtgggaaattcgggtggatccattactgtttggaatagctcgaaattggtgggcaacgttatctatcagaacgaatatgctctttcggtcgaatttttctctaattcatcgaatgaatcctggattatcacaaacatttacgcgccctgtactccgcatgggaaattgaattcatcagttggttttccaatataaatatgccctctgataagctttggttgattgttggggacttcaatcttactcgtaggccggaaaacagaaatatagctgggggagaccttaacctgatgttgaaatttaacgaggcaattaaccagctaaacctgat

SEQ ID NO: 115534 - DNA, 360 bp, Zea Mays
gccaaacaattcgtttttttagaaagttcatatggtaaactattggagggggtaaattaaggttggtgcttattttgttaacttgtctctggtttagcaagtaaattatacatcagagtcctggagattctctaattactaaaaactactggagaggaagataaacatagagctctctatttattttgttcatcgatcacttggcataatcatgcattgacttcccaaatgatttttaaggaggtttttggagatgttctgagtgtatgcatatatagagatatatttggtggaatttagattttaaactgctacgtggtgcttgctaaaaaacaaaagaaaacaaaaatggcatgtcct

SEQ ID NO: 115535 - DNA, 572 bp, Zea Mays
cgcctgtgatctccaccgctgtacgcacttgggtcaggttagatctgcgtttggtggcccgtccccatcctcatactcttctgtgcgcccacgcccgcttcttcatcccctcccactcctgcggtacgatgtggtggtgtgcctggacatactacttcatccccgtccacttcatcaagaggaggccactgcacttgggtagtatgatgtgctggtgtccctggatttttatttgtgtgtggtcgagctgttcccaggcccgttcaaggccatgcgtgcctatctgtgtgccgagggtaacatggagaacaccgtccgccaggctggctggcaagtcgtccccgtagcttcatctccattaaggggattgggaacaagaggaggccactgcacttgggacttcgaatagatagttatgtaagtttctaattgcttatttgtttaatttctaattgatatactataatcttctactgttgattcatacaacacagggaacctgagagtcatggggcttcaccttctatccgtgtttttactaaacacagttggacatacttggtgtctatttt

SEQ ID NO: 115536 - DNA, 322 bp, Zea Mays
cgacggtgatgatccaggtccgacatagtgaagtagtggctcctctccaagatggctaaggagttactagcatcatggtataacctgtccagattgtcatgagaggccgcgagtgctcgtttctcctcctacgaacaagaagcaacctttagcatccagtaaacagtaagcacgacgaagtcaaccaaggaggcttacctcatgtgctgtcctttcagagtcaagttgagaattgagggaagaattcaaagatcacgtgtcatccaatgcagtagaagtttgggccaggtcggcttggctctgagaatacttctccttgagg

SEQ ID NO: 115537 - DNA, 588 bp, Zea Mays
ggctgacacacatagacctcttctgccagatcaccattcaggaaggcagacttcacatccatatggtgaacactccagttcagatgtgctgcaagaataagtatgactctgacagactccattctggcaactggagcaaagacttcatcaaaatctactccatgcctttgaacatacccttttgccaccaatctggccttatacttcacaatgtcacccctttcatcatgcttcagcttgtaaacccattttaaacctattggtcgatgtccctttggcaaagtcacaagtgaccaggtcttgttctccttgatggactgcagttcctccagcatagctgcacgccaaagtgggttctggacagcttcttcacttgtagcaggctcattccccatgacagccaagagctcctcaacaagtcccatgtcattttgcacttgtacattgcctgaattcataatgctttcaagagttctgtaacgacatggtgcatcaccatgatctgcatcaaggtcgggggtcactgttggtggtgttgcaaactccacagttctggtactgctggggtctgcattgactgtgtaccac

SEQ ID NO: 115538 - DNA, 301 bp, Zea Mays
ccgcaaggggttaggatacaagacttctccaaattttccggtgaaggcgggaagagctcagatgagcacataagccagtacttagcacacctaggagaattggctgataggaaagcctaccgtgttcgtaaattcttgctatctctgactggtaccgcattcgcgtggtacgcaaccctgccacctaactctatcaattcttgggaggaattcgaacagaaatttcatgaacacttcttcttgggagaacatgagttagaattagctggtttagcttcagttttacaagggcctgaagaat

SEQ ID NO: 115539 - DNA, 379 bp, Zea Mays
tgcacgtgtctttttttgttttgctgattagtgcggctttttttatgcactcgccttttgctttctcttctttttggttgaattgcagcaagaggtctaaactggtgattgaaacaaggtggcacgaactcgaaactctagcggtaagaaaactttagaccagcaactcgacccaaatgcagcaaccgtgaattcaacaagtcgaaaactaagtagtaaagcaaaggctcaaactttttttaggtgaatttctgatctaaatatatctttgggcaaaagtggactgtaggtaaataaaacaaagaaagattgagttctctcaccgagcaacctgagctttgataccacttgataaacccaacgggtagaagggtgcccg

SEQ ID NO: 115540 - DNA, 454 bp, Zea Mays
accgaagaccctgcggcgtcggccggcccttcgcaggtggtggggtaggggctagggctatcgggtgtaagattttgtttttgtgatactgaaactcggttgttgtgcaggttccgaagtatgggcctgcagcaaccgctgctgacgatactaattttgtggcagccgcaacgcgtagtgccctgccaatgacaatttatctcgttctggatgtgggtttttttcgtctgatggtgagtctggtagtccgttttcctggaccgaagagtcttcagatgaagacttggattaatttgctgcgtagatgtggccgcgacggagtcctcgccgcgggtggaggttggcgaggtggctgatcttcctagtgcgaggaccaagtgccggcgacgaagggtggtgttgaagcatagcgtgggcgaggtttcgcaaagtggtaggcaccgtcgaatgggga

SEQ ID NO: 115541 - DNA, 840 bp, Zea Mays
tctaaccttatacctcttttcaaacttcagcgtgttcaaaataaataatcttcaaatcacattgccccaattacaaaaattgtagagaactacttagggcacgccctgtaaaaagttggtaaacttttgaatccgtttgacatgttttgacatgattagacggtcggtttccactgttttgtgcagtgctgacaaactcaagtttggagagctataattcgaaatctaaccactgaatcaccctaacccctatagcaaagttgtagccggtagagaggggagcaaattggttgaagctgggcgacgctttgtgctccccatttgtctcattcacgcttgtgagtgtcgcagatcgcgttcacaatgtggcacgcgtctggacgcgtggagctcgcgtctcatcgtgtgcatgcctcatccgcgtcgcgcctggctgttaggccaaagtgaagagcatcttgcctcttcaacgctaattttctccactctcactcgctctcgtctcatcttccacctgacccgttcgccatggtcgtcgcgagctagctcgcgctcatgcctccactgaccaccgtagtccacgaactgtaacgccccaaatttcgagttgaattttttctttctctatcgcttgctaaattcgggcgttacctctctttccccatttctttcgctaaaaccctacctattttcaaaactccaagtcgtatactaataataaaccctagaaatattttatttagttgttgcatcatgccggaccttgcagtttttgctgtttgattgagagagtttgtgaatcatgcattttagtggtgaattatggctagaatagaaaaa

SEQ ID NO: 115542 - DNA, 796 bp, Zea Mays
ttgacagaagtggaatgcattaaaaaatttctcatgacagtaaattgagcatgtgagccatccagtagcgtcaaagatgcttctgcagcaaaaacagcaataatggaaggtatcttctgccactgttcggatatcccattctgaaggtatgtcagaagcagctgaagctgccaggtttccttacttctctgagcatactgtaaatatgtaaaagtacattttaagtggttggatttttcaagaaaataacagacacgtttcccacagaaggataaaagattacaaatacagaataccatacaagtgctttttgcactcagatctatatgtcataggaatgcccccagaatgtcaataggcataattttatgctgccattcaagtcaataggcataaaagccatcacaagtggatatcattaacaaataaaaaaatgtaaactacaggaatttcaacatacttaaataagcacataaacattttaacaaatgctagaatttgaacatactgatacaagcatacacattaaccaacaatatgttcgcccagcgaagataagttgtaatacagaaaatccaatataagcagctagaagttgataagaatataataaaccaggtaaaatttagagattcatgaaacagcaggtacctcaagggattttttgaatgttcctaggcactcatagcccaacatccttaattcattatcaggagatgctatactaacaagtgtgattgcaagaagccctagtcgggcaaattcagcaggttcaatgtaacccatgtgaagagta

SEQ ID NO: 115543 - DNA, 473 bp, Zea Mays
tttccgcgagcgccaaaggcagtggtcatggcttcgtcctctgccttcgtgtaagcacccaacaactcgtcactggtagctttgatagcctcaagccagtcctcattcgactcatcaaactgatttctgtagggataggtgtatctcaggtaaaccagaccaccttcgctagaaccaacagcagtctccttcaacatctcccagtcattaacgagcgaccacatcttataagcaatatgctcctgaactaaatccctggtaccgatgtaagtacacaccatgttgaaagccatcaaacacgcttgcaccttgttcccacttgcaatcgacagcctcctgaagccaaaacgtgaccgtatggggcgctggattatacccctcacatcttccctcttgctcaaatcatttttgacataaaaccattgtttcattcaatagtctggccattgtttttggaacgttggcacgggaca

SEQ ID NO: 115544 - DNA, 599 bp, Zea Mays
ggtatacggagattcactagtggtcataagccagataaataaagattaggattgctcgactgattctatgggcaagtactgtgtagtcgtccgaaaattagaagacagatttgaagggttggaattccaccacgtggaaagagaccgcaacgcagcagcagacgcgttgtcgaagctgggatccagtcgggcccaggtcccacccgggatcttcgtccaagaagtgtcacgcccgagtattctctcatatcaggcagaagaatgcaacaccttgagccaaccatagtcgaaccccaatgactggagagagcctatcatcaggtacataaagaatgaagaagaaccagatgataaggctgcgacagaacgcgtcgcaagacagtcggcccactacaccctcatagggggcgcactgtacagaaggggtgcgactggagtcctcatgaagtgcatttcctcagctactgggaagcaactactggatgaaagccatgccggacagtgcggagtgcacacaacatccagaactctggtcgggaaagttttcagatctggtttctattggcccatagcaaagagtgatgccgccgagttagtcc

SEQ ID NO: 115545 - DNA, 450 bp, Zea Mays
atgaaatatatcagaagacaatcccaaaatggacggtagcgaactaaacactaattagtaagacactacaacaactatacgcaagcgctagttatctatacatcattgggcacaacaagtcaacattattggaaagacgacgaacatttcctatatttaaccaacacaaacacgacatcacaagtacaagcatttactatgttcactttaatcatttattagttacttatgattaaactagttaagtacacataaatttacgatgacttacacatagacacacttagttcaaaaggaaaagttacttaatcgggttttacaatcattcacagcattctactgcaagcatacaccctagagaacacatatgaggagatagtttaatcacaattacaaattatactactttaatgaggttggttatttattgcattagcatcgcaagtatta

SEQ ID NO: 115546 - DNA, 333 bp, Zea Mays
catgacttccacataattatggaaagactcattcctataatgtttcgtgaatacattacccatgatgtgtgtaaaacattagctgaatttaggtttttctataggtagctatgtggtaaataagtcagaggagatatgatggaagaactggagaaagaggcactagtgcttatgtgaaaattggaaaaaatatccccatagagtttcttcaatcctatcttgtatcttcttaaacatcttccataaaaagtaaatgttggtggtcttgtttagtataggtggatatttcatatagaaagtgcattgaagaagcttaaaccaatgataggaaat

SEQ ID NO: 115547 - DNA, 388 bp, Zea Mays
ggatgaagaaaattagaatagtatagtttaagtaatgtacttatgtaaaataagtaaggaagtcgagttgtataatggagtatgtataattattacagttcagcagtgtaataaagacggtgtatgtttggcatgttatatttccaaatgtttcttttgcctcagatgccatcccggactcgtgctcatgatggggcgggtacatcccgtggcggggaggacactcccaatccgccacctgtacctcctactcgggtcgaggctatcgctgtcttggtcaacgctaccgccgacaacacgtgctttctgcgtgaaatggcgggaaatcaatttcaacagcacggaggaaggggtccctctcaaggaccacaggacaccacctatctgg

SEQ ID NO: 115548 - DNA, 952 bp, Zea Mays
tttgtgtgcagtggggaacggataacgtcggggagggacaaccttacgtggcgccatcgccctagccctgccggagccttcaccggcggccaccatgacctgtgaattttgccgcggtgtcacccatgcctccatctccctcactgtatctctttccgacgtggtaggcatgcgcttgcgctgctatccgtggtcgggggtcgtctgttgggccgccatgcctataaatggagctaggagtcacggcgaggcgctcgctgttcttcaagtgagctcggaaacaaccagaaattcgtactgccctttccatcttctcccaaattgagtatgcacggtgaagctatagtttcttacggccgtgtagcctcaatccccgcccccaatttcacccagagccgccgtaacgccatttttccctaattcggtcgactgcgtcgccgtgaaccgcctgcttgcggccaactgattccaggtccgtcctcgcccttgttgctcgtgttttagcgcccctatgtgcttgggattgttatccacgcaacccagggagctttaccttacgtatgaaaccggaacgtattgatcaatgcttggtgtccgccatcaccgtggtcaagcgcatcctggtccgggttagtcacattggagcttgttctatgattgcctcaggtcggtgatgctcacccagcagctggtttgggtatccgccgtagtttttggccggaccgagcgacgggatggtcgacggcgagcacgtcgtggtcagggtcgtagttggggaagaaataaaagtttagggtcatttcggcaatatgtcagcgactaagtgtaatagtagatgaacctacttcgaattagctgataaaccgaggccctttgtgcaaaatagccagagcgtgcgggcgcgcgcaggcacgcgccccggtttcatgtgctgttgggcctcctagtgtga

SEQ ID NO: 115549 - DNA, 530 bp, Zea Mays
cgagagaggtaggagaggctcccaagactcttatcggggtggaagtggagctaagagctacagactggagtcctagctaagtcttggcttagcggcggggctctggcctcttggtcctcatcggtgctcctcctcatgttcgtcagttcatctgggactcgtccttctgggtgtgtatccaagtgaactcaacccttttcttggggaccaacccctcccttttataggccgagagagagggcgacaagcagtggcttccttaggaaggatctttaaggcaatggtaaaaccagacgttcttacccagggtaaagccacacgtactagtgggccccagggttgcctggctatcttgtatttactatggtggatgacgcgtggctgcgtgggtcctaggcgccatcattttggctatgccgacccctggtctttgtatcctggggctcggcacggctcatcgcgttgcgcctgccaatggtgtgcacactcaggcctagtcccgataggtcatgagtgcgccgcaagccgag

SEQ ID NO: 115550 - DNA, 460 bp, Zea Mays
ttgagaatgaagtctttttattgatggtgtattttccaattacagaatacaatgctgccccgatagcttttgaaatctagctaagggtaaaacttcctgagatgttctatattctttgagttccctatttctgtgccatccatttgagtaagtcgatatgatccaggccgagtgacttctgctactatgaatggtccttcccatggtggcgacaatttgtgccgtccttcccctgttagaattcggcaaaggaccaagtctcccactacgaaagatcgatgtcttatggctttatcgtgatagcgcctcagagtttgctggtacctagctgactgaattactgtattcaatcgttcttcttccaatatatcaatatcctgcaatctagtggcttctgctttggctatgttttcaaaaatcagccttggtgccccaaacttgacatcagctggtagcactg

SEQ ID NO: 115551 - DNA, 587 bp, Zea Mays
tcaaaaaagctcaagggggatatactcacatactagtcaccattggtaagttcacaaaatggatagagtacaatcccatcgcctctttgacctcatcaaaagtggtgcaattcattcaagaaataatgtttaggttcgggatacctaacaacattatcacagacctgggatctaacttcactagctcagagttctttgatttctgtgagcaaaggagcatccagatcaagtacgcatcaatggcacacccaagactaatgggcaggtggaaagagccaatggaatgatacttgatgcactcaggaaaaaggtgttcgacaagagcgaaaagcttgcaggaaaatggatcagaaaactaccgtatgtggtctggagcctgcgaacccagccaagctgggccttgcatggaaacaccccattcttcatggtatatggatcggaggcagtattatcaacggatttgatctttggagcacccaggctaacatttaaaagcatagctgaggcagaagcaaccaggctagaagatgttgatatattagaggaagaacatctgaatgtggtgatttagtcggccagataccaac

SEQ ID NO: 115552 - DNA, 403 bp, Zea Mays
gccacactatgaaccatggctggttatggttacctatataggaccaagcaatttgttacaactaaaagtagagataagattctaactactaaaatagcgataagatagaatataagatgccaaagtaccaaataagatgctgacttaggaacatgacttatcctatcaatctcccccaagtcatgtgtggcgccactggacggatttgaaccatcaaagttttggtgcgaagctcctgaaacttgaccctcccaagtgacttggtgaggaaattagtgagctggtcttgagtgctaatgtagttgtccttggcactcccctcatctaagcagctcctgatgaagtggcacttggcacgaatgtgcttgtcgcgctcatggaagacgagatttttcgccaaggc

SEQ ID NO: 115553 - DNA, 965 bp, Zea Mays
gtttcattctctttttttacaaaagatgttgtccaactgtatcagtattttatcagtattttgtatagttttttactctgtgcattcttttggtaatattgtccaactgtatttcaggttaactttgatcatgatgctacgcttatcacgcttttgatagactgttgaccaacgtgaatgcatcgcacttagaatcgtgcctgttacctttcctcccctgatgttcatccttagcgacttgtactatgtagtggcagaagaaaaacctactcttttgtatatatcgactgcccgttgttaaaccttttactacatcgcatagctgcaaactgtgttctacttatttgtatggctaaagtcttttgccaacccagaaatgcattttattccgtgactcacttatatgttgccagtgtcgatttattgcctgttgctacattttacaactcatatgcctcccgttctacctgttgtgcttcagtgctcagcacgagcacttgttttctttgcagtgcttctgttcttgtgctagatatttattttatagagtagctctggttgacaagtgccagtcaatgccttcctgttttctgattggtgcacattaactttctaatcagtcataatctctattcacatggttgctttaatttgttctgctgaataacttcaaattgtgtgaggctgattttggtccaggccatgctgtgtttaaagaggaaggaataataactgttgttcgctttaatgtcggcatgtcagatcgtagtgagatgcagaaatgtacgacctgatcactgtcttatcacttttacataaggtttatgcaaacgatagcttaagcattttccattaactcattgtgaaacttgtgccgcacaaggaatttgtatggcgcccgatagggcgctgctggttctagtataatatataaccacccactgtcccgctcgctcgtaggctcg

SEQ ID NO: 115554 - DNA, 586 bp, Zea Mays
gaaagagatagtaaggccaggagtgactaggtttgcttcaaactatctaactttggacagcatacaagagaagaaggaccagctaagaaacatggtggttcatagtaggtgggactcactgaaggatgtgaaatcaaagaagggaaaaaatgccacagcaactataatgaatccaagcttttggaaggatgtgaagttgacattggcagtttttgcgccattgttcaaagttctccgtttggttgatggagatgtgaagccatccatgggctttgtatatggagaactattgaaggcaaagagacatgtcaaagaggcccttggcaatgttgagaaccgtttcatggatgttgttgctgttattgagaagaagatggctggaagacttgattctccattgcatttgacagcttatttgctgaatccacactacagttatgttgacccatcaatctttgatgttcccaaaataacagaaggttttatcaattgtgtggagactttttattatcatgacgacgaaatgcaagaacaagcagccaacatcgaactccagaagtttcagaatagagaaggcccatttagc

SEQ ID NO: 115555 - DNA, 432 bp, Zea Mays
tagagattgagccttggtcacatgaaaaatttggagtaaaataggcccaaagttgggctgtcagtctgcctaaaacctgaattatgatattcagtggcataggatgaactttgggggccattttgaagatgatcccgtggatgtttgagcatggttaccacagtcggtttatagccaaatcatagggctataggtttgctacaaacggattagtaagttcttacgcgaaaattcaagattttggcgtcacaaatctgtgtgtcagactgactgaagaagatcgtgatggtacagtaacaaaaaaatcagcagattcagtgaactggccaccggtgacccttcgctgggattagtgctgctcatcgtgattcgtgcgtctggtctgtggattgagttcgccggtgaaaagatcatgtcgcggatgggtttcac

SEQ ID NO: 115556 - DNA, 726 bp, Zea Mays
ggtttatatgtgcaatagctaatcatttcatcaataagtggcctcgacctccaacctgcacaataaagaaaaggagcgaaaaaatcatatgtaaaaacaaacataacataaaagaaatttagtagggtttatgtgcgcgatatttgatcatttcatcaggaaatagcatggacctccagtctacattttgatatattctctccatctgtcgaacattgaagcctggtattattgaccctaatttacaaaaacttgtcctgtgtcaaaaaagataaagtgcttatatgtgcaaacgaaagataaaaaaacaacatttcatttaaaacatttctaagcttcgagaaagacgaaggaaggaaaggcgcacagtttcagaaatattacacaaagagcaagaatgttattttaggacattaaaataaacatgtactttattgctaaaagtttttctcctagagtgaatatggtgccgaagcatcagggatgttcaggtggatgaagatttataaactttcttaccccttgaaagcattaggtagtttgtttggcccctattgcattgtagcttggcaagagtttggtatgaacccatagtgcgcatcttgttcagtttattatttaatctatacctccttattgttgtattagtataccgatgaaagtgtgatgttattttcaacactggacaacatccatcaggcaagtaattttagaactggacatgaa

SEQ ID NO: 115557 - DNA, 415 bp, Zea Mays
ctattttcaagactactagaatatcatcatgagaccaacatccatgggaagttgttgctttaagttgaattggctaaccttttgatttaatttttgtaacaggtgccattatttcctaagtgtgcatccatatcagttcaaaagagtatgaaaagtcatgcccaggttgtattccattaaatttcattttgaaaagcaccaagttatatagtatgacttatgttatgatagcaatgacactaagttgttgtgactgacacaatttctatggcatgactttgtctgttagaagcatataaaacatcaatcgggtaccaactggacccataagactgccaatttaaaatcaaagttagcttcatgaactatgatagcacgaagaaacaacacgcaggtgcagaacttgaccacccaa

SEQ ID NO: 115558 - DNA, 289 bp, Zea Mays
ggatgcaaaagtgcacgagggcactaacgtgatcgtactttaggtcataatacgacttatggtgatcaagtcaaagtacaacttctcaaataactgctacaacgatatcgtgaagctgattattgatctcctcccggctaaccaaaagatgttagagaacttgtatgagtctaaaaagattgtctcgggtctcggcatgaactatgagaaggttgatgcgtgcgaaaataattgcatgttgttctggagggatcacgagaatgacacccattgcatggactacaacaag

SEQ ID NO: 115559 - DNA, 503 bp, Zea Mays
aaataattgagttatagtacatagggagaattgaataggggaaattgttgggagaagaaggaatagggaaagaatctcttagggatattaaaatatgaatagatggtacgaatagggaaatttgagaggaagaaccattggagtcagtctaagaccgcccctccccctcactctccaccgacaacctcctccgccaccaaagaacatgtctccatattcatcagtcttttccaactccgatttaatacaccattgtaggtcaccatgtcgctcgatgaggagcactgcacactccaccagccatgctcaccccacatgtgtcccacctccgtgcaactactcatctccccctatactagatctaaccagactttgtttggcccccctacgttcaagggtcatatcttgtcctcatgacgggattgtgcagatggtatacatatagaatttggccctcttatactaaatccaatggtctaaacctattttgtaaaaaacacctc

SEQ ID NO: 115560 - DNA, 865 bp, Zea Mays
aaacgaattaatccaccttgactggacccgacagcagtctccttcggcatctcccagttattcacaagtggccataccctgtaggctatgtgctcttggatcaggtctcttgtaccaatgaaagcacagacattgctgaaagccttctgacatgctttggcatcattttcaatcgccactgtcggcctttgaaggctgaagcgagatcagatggggcattggataatcacctttatgtcctccctttcaatcatattattcttaacataaaaccattcctccatccaggacctgggccaccttttctgaaatgttggaaccaggtagcttgcattagaacgagcaatgaatccataacaaccgaagttgttgtgatactgctctttgccagtggccttcgtctcgtacaacagttcgtgcatattgcaaaaacactttgcgctcggttctagcacttggcttcccacagcccaaacaaacaaacccattctgattatagcttcgagagtaatttgatgaagaaagatctgaaatatcttcaacacttcaaccaaaaatttgctcaatgggaaccgaagacccgccttcataaagcttctgtagacaacaacctcattttcttttggggcaggggcggtgctgtcccctccaaccctcacaatagacatgtcatgaaagtatcttcccttcatggcatcaatttgactttgtttaatggtcgactttccgaagatggtatggcttggccgccagggccggtcttcagaatcttcatcccactttccacatcatagtcatcgctatcgtcagaatctacaaacaaatccgccattatttccgttgtaatcttctctgtatttgtttt

SEQ ID NO: 115561 - DNA, 637 bp, Zea Mays
cactaagtagaaccaaggtacaccctgttggaaataatcatgtccaggtgcatgttagtgtctaggttcataatatttactttagctaaatttcagcatggagtaataggtaataataggctgattagttgggtaatattctgcatttattaggggccatcacagcctgatttgtagctcacattagctatatttattaatagaagagaaaaccagaaaaggttaagtcatcctagccaccaaaacacttgtgctcttgtgtgatactctgttcctgtgtcctgttgaaggctttaggcctatcacaccctccaaattgaatataagtcattttatattttcatactttttaagtgtaaatcatcagagtttccaggcaactggccataattttattctccacgcttatgccatttttttcttgaacatataggaaagctacatatcatttcattaaaagaaaagtagagtagagtacaaatgaagtataacgcacacctcagtcccaccaccaacaaagctacatattacagtaactcaggatacaagagaagaacgacctcaggtaaagggattaagtcaccccctcatcatattgcctatatcaagggcacgcttatgcctttgctaactgaat

SEQ ID NO: 115562 - DNA, 377 bp, Zea Mays
ggtttgttccaatgatgatgacacattccctttctcagccgccatgctatggacagcttagtgcaagaatggaagggattttttccccaacaatagagaaacccagcttgatgtttagttgttgtcgagcaatcaactcagtattggtctgaactcactatcaaactgaagccaccaacctatcactgtcaatgctgcattcaattagctggcagtggttgctcattccagattaggagctcactacacaagattgtagatcatgcaagttgccttcgcatttggagttcacgttcaactcttactacactgaagtgctgcagctgaggtgtagaagcgttacaaagttcacgatgaaaccaaaggggaaaaaaagc

SEQ ID NO: 115563 - DNA, 462 bp, Zea Mays
ttttccggcctcacctgggtgaatcgtcgatcgaacctgctgggaatttctcgccgcacttgttcctctgtcgcggctccgctattccttcgcgaccaacaccctgcgctacaaatatctcgggtacgattactttatcaagttcattgtggccccgtatcacgtaggagcgggcgaattggaagctagggcgctcgtgcactgggtttgggcttctccgacgaagttccaccgtgaaccgagggcggcgccgccatcgggagcccagggttggcaagataaccaggaaccgtcgatctcctggtgaatggatgagattagttccgagggagcgattcgatctggaccgtatattggatcgagcggttgagatgcgctaggcttcataaaatctaaaccctagaattccgatccgacggtggtgatcgtgtaacgtttcaggccactctagatctaatctga

SEQ ID NO: 115564 - DNA, 362 bp, Zea Mays
ccctgttcctcctgaatgaagcaacgcacgcacgtagagcgagaaagcaacacaaccgtccggaaacatcttgtgtttttctatgtagtatcctcttgaacaaaaggagacgccaccagagcattcgattcctgccctggggcgacatttacgcctttatttggcatgacaatttggcctgatttctatttgccatgagggcataagctaggctaatccctccccaactaacactgatgcttcgagtgacccctcccccaactaactctggacaggtgcgcgggtggtgatgagtgtcgcgagtgcgagaagacaagtgacgcaggtcccactacccagcccactagcaacaacagagagat

SEQ ID NO: 115565 - DNA, 385 bp, Zea Mays
ctcctactaagaaggatcgttgccgcacggccttgtcgtgatagcgccttagagtctgctggtatcgtgctgattggattactgcattcagccgttcttcctcgagtacatcaatgtcctccatcctagtagcttcggcttctgctttgctttcgaagatcaaccttggcgccccgaacttgagatcggcgggtaacacggcctctgacccatagaccatgaagaaaggagtgtttccatgcagggcacggctaggttgggttcttaggctccagacgacatagggcaattcccttatccattttcctgcgaacttttcattcttatcgaggacctttttcctgagtgcctccaatatcaccccgttggctcgctcaacttgccc

SEQ ID NO: 115566 - DNA, 718 bp, Zea Mays
cccaaagatccttgcacgccctactaggctgattgcaacagaggagtagaaatggaggctaatttcccttaggctcccaatcgaacatctacagtgcggttgtagattgtcccaaaaacaagaccaattcctctactttgttcgccagatggctaaccttggtacggagatttccaactcctgagtcgatttgtggtttccacgccaccaattcacgaaccgatgctatgttgtcttccagggattacttcattgattcactctgaatttgcatattttgtaagagcgcggataagtcggcgatgttcttctccatcccttccgcttgcagctgacctcaagttcgatactatgatcgacacggatatggtggaggtaccgatggtaactacaccaagggacactagacgcggatatgatcgcgagcaccgctcccggctccctccaccactcacgaagtatctatagatcactagaattctagggttttggagttacagaggaagaacccttgcctctagacgcagccggcctcaacgtgtgttcccagccaagcttacagacatcagcccctccccccttccttaagtacctactgccaacaaaaaaggattaatgggtccaatctggtctatagacatagctggcccatagacatggctatggtcgaccactccgcttgttacccctcttatcttctcttctatgttgttgtcac

SEQ ID NO: 115567 - DNA, 630 bp, Zea Mays
catcccatttaggactaccgttacagtaatctttaccggctgtttggtttggggagtcaccccgtctggcatcagtgcgtcctgcatgtgttagtccgattatttctagaggaatgagtggatgccgtgaatatactggaggagggtgtaatcttatggcagacaggttggttccctttagcaaaccaaacaatctatcgaggttcggacgcaggattggatgactcctcacggtgccattccgtgaaccaaacacgttgtacattaccatgttttgttactaactcatatacttcatgtgctcaggcggagtacatgaggatcgacaccgacagctacacgatggcctgacatatggaggcgtacctgttgtggctcttcgggtgggtcatgttcactagtactcacggtaactccgtgaggaaggacatgatccactacgcgagggcgatcacgaatgcctcccttagccaggtttcccagtactggggtaatgtcgtgctaggcgcgacgtatcggggcctctatgatggctgcataaagaccgatcctttggccatcttcaccggctgccctttactagtacagctctagtcatatgagaggtttttagattggacagcccgcgat

SEQ ID NO: 115568 - DNA, 311 bp, Zea Mays
ttgcatactcttatttttatatgcttaccttcataccccgatgactgttcaagacatttcagttaacatgcccttgaccacccttgcttgttaatgatccatgatcggtcattttattttgcacatccttgatgatctcgttaattctttgtaacttccttcggtaatttttttcactttaacccttctgttggaaccttacctatcttacccttgattgttttctccactttgtcacttcgtgagtcttgccttaactctatccttggttatgcttttcactattttcatccttaccattgtcacattta

SEQ ID NO: 115569 - DNA, 499 bp, Zea Mays
cactcaggtgggaacaaatttaggaccttttacaatcaggtgggaacaaatttgcattttgcttcagttagacatatggattagttgaaatagaaaattgcataatccttacgagaactatgatgtctctggttggattgccgatgggaaagtggctagaagggctaatcaaagtagtgtggaaccaccacacttcagtgtcaagatccactagactcacaccctttaagcttatgtacgaagacaaagcaatatctccaaaagagcaaagctcgggtcaacacgaattgttgtttcgactgaaggcgaagacagttagaaaaattcaaaagatccgatagatggaatcagacttcaagcaacttaccacgttaataagtatcaagccgaaacaataaggtggcaatacagaaagataaaattaaaaaatataaaaccaggccatctcgtgctccaaaggatagctaaccccaatataggaggaaagcatcaagttaag

SEQ ID NO: 115570 - DNA, 1228 bp, Zea Mays
ggaacatattgcttcgtgcagatgcccgaaggcttgaagaatgtagggtccacgttctctcacctaacataattcatattgaaggatcatgttgcccacaacatattcacttatgtcgatgacattgtcgttgcaagcaagaacaagaccgatcacctagcagacctcaccgaaacgtttgccaacatatgagagaagtcaaacttcatctgaatccagacaaatgtgtcttcaacattcataagggcaaggtcttaggttacctcgtatcaagaaagggtatcgaggccaatcttgacaaaatcagagccttaacagaaatacacccgccacaaaccatcagggaagtccaaaaactaacatgtcgcattgtagccctcaacaggtttatcttgaagtcagctgaacacaacctccccttcctgaaatccctacaaggtgccaaggacttcgtctaggatccaaagcaagcaccaacttttgagtcccttagatcatatctgatagagctcgccaccctctccatcccaactccaaaatcagacttgttactgtacttagcagcctcccacagtgcagtgaccgcagtcctcgtcaaggaaaagcagtccgatggcaaacttgtgcagtcctcttattgattagtaaaatgttcgatataaataattgtggtggtattatatgtttgatgaaatgccctagttgtgtgcagtgatatggttgctgtcgtgattagaaaacagacatgttgcgtgatatgaggtttatgtttaaaatgcaagttatgtgaagtgattgtgttcacgattgtgaagtagacatagtttatatgtatgatcatggtttctatgtatgcggaggatggtgtattggttgggatagtgttttgggaggcgagttggtgaggtggttagattaataatgcaatgtgatcccttgctttaattgtcattgcactatatgttctgtaaataagttaaataacttagaagaatgtgatgctctgttttagtctttatattctaggtttagtggtggatgaaatatcatagattgatgttgctttcttatccgagtatttgggagcaagtaaactcgataagtttgtttttgtgaaaacttgagacttgttggtcgatggtgcacataagcgctatagatctttgattgttagaaaaatacttcctagaactctatactgtataataatgctctatttgttagaaaa

SEQ ID NO: 115571 - DNA, 428 bp, Zea Mays
aagattcttgactcagcagtctgaaagacccgcaactcagaagtaagactctgtaaggttcagtggagcagagaaggagaagaggaagctacctgggaaagtgaggactctctgaggagggaatacccttacctcttctcgagccccgtctgaatctcgagggcgagattcctttaagtggggtaggtttgtaacatcccaattttcaacccaggtttgaaaccctaatctaaccccccttcctattatctaccccaaacctccctagattttctcatcatatgcataaactttgtgtgattagaagcacctcacttaaaattttattttctagcacctaagattatctattaaattaattgttcaaaggaaaaaggatataaaaagggatatagaaattggaaaataaaaagaaaaagagaaaccct

SEQ ID NO: 115572 - DNA, 862 bp, Zea Mays
gtctgaattgacagggcgcggaccgtccgtagaccccacgcggatcgtccgtgacaagcagataaatcgggcagaggcagtcagattgtcactttcaacacaccaatggtgattcttgtcgtttgtgagcagacagtgaaccgaaattgtgcacggactgtccgagagattgtttggagttcatcaaccatgtcttcatcttggtatctctaaatcttatggaatttgtctgatttattcaaatttggggattcatagggttttctctctgatctagaattgggcagtggaattacaattttgattggtggaattgctcgtgttactcattgtgaatatggtgcaaaattttgaatggatatggatggttattttctgtcgaatcgatgattggatggatggggcggctagggttctagaaatcgcctctggacggtcgcggaccatccaccaggatggcgtggacagtccggcccctggcgcggacagttcgatccctgacaaaaacttacacttcctttctctgtgttgtgacatcatcaactattaaccagtggatattcctcatatatattgcagtggtctgggtggtcttaagaagaagcttgcaggtcgttttaagtcaaagcgccatcgtgcagatgatgtagattataatccagcttcagactctgaggcccaatcatcagctgggggcagcattcctatggacacagaggatgttccacacgctcatccagattatccaattgatgtcacaggatggacctatcccaagagaagattatctatggctgagtactgctccaggaggatagttaatcagtatgatctgccctctaacacaaacattcaatttttt

SEQ ID NO: 115573 - DNA, 312 bp, Zea Mays
gtggatctgacatgcgcttggggtgtgcgcgctctggcgcctgggcacggcgtcgagcacgaggcagcgcagagagaggtcaagttcaagcttggattggctccaaatcttcgcgattatggccatgatcccgttgagagatctcttcccctaacattcctttgtcgtttgtgtgtggaggcttatgggttttgctgactggatcacaagatatggagggatgaagttgggtttgtctcgctgctgaactccaagaggaaatccagggtttgacgtgtctagggcacgaatctcaatgccatcttcacaaac

SEQ ID NO: 115574 - DNA, 439 bp, Zea Mays
ttgtgacccaaaagatcgtgacctaaaagtcgagtattccatattttctcatttgtcttatctgcaaatctatcttaccctatgcatctaacctagatggccaataccaggaagggaggtgccgatgtacctacacgcattcaccgaaggagggcagtagctaaaccagaaccggagatgaattgcccaaatcctctgtctgctgggtcagaggcctttttcaccacccaaatccagttgttgcaacaaatgtccaacaccatggcccacatgcaagcttagctccaccataatcagcagcatccatcaccaccaccaccacctagggataagtatcgtgacttcatgagtcataagccacccactttctccagctcaccagaaccacttcaagatgatgattggtttaagtcagtggagaagatgctcaatatttccc

SEQ ID NO: 115575 - DNA, 856 bp, Zea Mays
agaggacaaattcgaagggttggagttccatcacgtggaaagagaccacaacgcggcagcagacgtgttgtcgaagctaggatctagttgggcccaggttccacccgggatcttcgtccaagaaatatcacccccgagcattctcttagatcagacggaagagtgcaacaccttgagccaaccagagtcggatgcaatgactggagagagcctatcatcaggtacataagaaatgaagaagaaccggatgacaaggcggcagcggaacgcatcgcaaggcagttagcccgctacatcctcatagggggcacactgtacagaagaggtgcgacaggagtcctcatgaagtgcattcactcggctattgggaagcaactgttagatgaaatctatgccgggcagtgcggagtacatgcagcatccagaactctggtcgggaaggttttcagatctggtttctattggccaacaacgaagagtgatgctgctgagttagtccagagatgtgaagcttgccaattcttatcacagcaacaacatttacctgcacagcagttgcagaccattcctgtaacatggccatttgcatgctaggggctggacatgatcgaacccttcaagaaagcttagggaggctatactcacgtgctagttgccattgacaaactcacaaaatagatagagtataagcccattgcctctttaacctcagccaaggcagtagaattcatacaagacataatattcaggtttgggataccaaatagcatcataaccgacctaggatccaacttcaccagctctaaattcttcgacttctgcgagcagcggagcatccagattaagtatgtatcag

SEQ ID NO: 115576 - DNA, 678 bp, Zea Mays
cccgccgtcgctgctgggtcaccatccgccgtggccagggggctccatgcgatgatttctggtgaggcttcctctcccaggatcgatttcttctcctctacattgaccatagttgaatcgagctcttgtgcctgggagtcgaggcaaggcagtgcgacaatggcgccatggcggtgcacgctcgccgtcgtggcgtgggatactggatgaaagggagtaacggcttgtccgttggattcgagacatagggatgtgattggatctgggaaatgatggctccgggtcgttggatctttgtatctgtggctccgattgggtgaaggatgctccctccgcgtaattaaatcatgaccgttggtctcttgatggacagatctgagtagttatcgagtgttgggggcactgaggtctaattacgaccgtatgattcagatcgggcggctcatagtgaacgataccccttcggctgtgtggattcgcataagaacccctgctctttttgtaaattaacccaccgtcctagaactatagcagagagtttaatataggtccctggtatttatagtttgaaccccagctttctcagtaatcacggccgcagtccaatccactggtaaattaatttaattagatgcagaattcatgtttagtataaaaataatgtcttaatcttggaaa

SEQ ID NO: 115577 - DNA, 460 bp, Zea Mays
cagccgccaacacatcctcgtgaaattggacgccaccgccgttggaagctataaattgccgccccgtccgctctgctaggtaattgtgcaaccagtgaatcaacccgtgcctcaaatcctcccctagaactccccaatttgggatttcccccaaatccctcaagaacaccgtgccttgggacctcgccgtggccagtccaattcaggtccgatcctgccctctgctttcttgtttctgcacccttgcttgttcctgatgctcactgacccgttcaattgggctgagctgccgtagatcgccgggaacgcattagaatgtctgttgtccatacggtcaccatggtcagggcgtgttagtgcgccattagtgaaattagttgaggggaaacttcggttaaggcttgaattaggtgccagtcgacggagagtgctggtctttgcgtaatctggtcggtacaag

SEQ ID NO: 115578 - DNA, 608 bp, Zea Mays
gctttttccagcagaatttgttctacagcttctttttctgctgccttttctccggtttccaaggatttctccttggtgggctctgaaggcccagcttcggcgtcggctcggctctttgtagcttcggcttcggtcagctttgtctcggtttcaatctgcgcttttgaatccttggcagttttccctggagtagagcttgaagcttttattgtctccagcgcatctagtacactggccatcctttttctcttgggggtcactgtaagatctttttgtgcctttggcactgtcacttctgtagaagggcttagaacttctaatatttttgtcccttcgactcttgtctcttcaatattatcggccttcggctcaggtaatttggctgaggatgccttcggaattgcagccggctcttcaatcttttgcgtgggaggagcaggttctttcgcttcagtagctgacgaagtctcaccgccaaattcgggcactatggccggttcaatgtagcgcggtcggtgggtaaggaccttcagcttttttctcttcggcgcaggctcgcttggagtagccgaagcagcagccttcccagaagttgcaccctttttttc

SEQ ID NO: 115579 - DNA, 364 bp, Zea Mays
tagcactgggcactatcagtcctacagttaataactctgtcacttgcctttctatttctgtcttgtggaaaggtgaatacctataaggcctggaattcaccggaatagaccctgggagcaatgatatatgatggtcatacatcctaatcggaggtagtccagtgggcacaacaaacacatcttcaaactccttaagtatctgcctcagtggttcctattccttttcagcaccttcctcctgcattgcatccaacatcaccaaagcccacacttcatttcccttcatccacctgctcagctgtacagctgacacttgcaacacttctgtacttcctacaccatcccccttcagctgcactctgac

SEQ ID NO: 115580 - DNA, 337 bp, Zea Mays
atgacaaagatgctcatcatgtgatctagtacatgggatagtggcactacgagtaagctgcatcaaggcatcgcgttcggggtgaccaagttgacgatgccaggtggtagaagacgtggtggcagcaaaaacagcagctgtggcaggtgacgaagacgaagaagatgtggcgtgcggaaaccgaagggtgtagagggggccggtgctgtcacatcggaggagggggcgccgagttgccgagtccttcacagtgagaccagaagagtcaaactcgacagaacaagaattatcagctgtaaaacgacaaatagaaagaagattgtggacaaaagaagga

SEQ ID NO: 115581 - DNA, 367 bp, Zea Mays
cgagccctcggccctggcctcggctctcggcagaaatagggcgggcacaagtcaacaacaagtacaagccccatgctccgagctataccgtctacaggggctcggctacgcctcctcaccgtacgcggccaactacggtactccaggcagtcctccttgaagctataaatagggtagtctacggcttcaagggggaggcagacacttcacggtgttcaccctcaccatgatattggcactttcctcaatcaaccctagggacttgggatccttccctctcccgatcagtttgtactccctactacaagcacttaggcgcaagtaatataagtctcatcccctccgctggaagtagagccttctctcg

SEQ ID NO: 115582 - DNA, 284 bp, Zea Mays
caggttccaggccgagtatgcaacaggggcgccaacatttgataccttgcctctaagtatcatttcaagccggttcaccaagtctacagcaggaattcttctgttggcgacccgggttgagtcagctagaccttggtagaggtaggccgggtatgccctatccttcaacggctgaacgttcttgaaaacaaaatcagcaaccacaacttctgcagtcagacccctctccttcagcagtccaacctcagccagcaaagcccctgcctcagccacctcctggtccg

SEQ ID NO: 115583 - DNA, 480 bp, Zea Mays
aggcagaccagaatctacagctattcctttttgaagcaaaatgtcccctagttgggattcgaaatttacacaccggcaaattcagccacaagcttgatgtgttagaaagggtgacagtgtgcatgcacaaagtcatccaaacatcagcaaattaactttaacaacagataaaacgtacagctgctatggccctaatacctaagcttgggacatgaagagttctttctctgacatcatacccagcatcatgcaccagcagtcatctcaacacaaaaaaattaagaggtttttaaacatagagattctactgtttgaatttagatcacagtctccatgtcccttggctctgaaaccagccaaccttattctcctcagccacctttaacctacaatcgtgattccatgcaacttacagctcacacacaaagcaggcaaccccagggcttataaatagcagaccttgtgacaagagataccaaa

SEQ ID NO: 115584 - DNA, 601 bp, Zea Mays
cctcaatccgatcgcacaccggccaccatgtcgtatctagcctcacctcctcctccccatttcccccttatctttccctgccttcacatctaggcaatggtggtcgccgctccgcccccgatctagctcctccgtgtttccccgttctccttcgggtcatgccatcacctcctcgtcaccgtatcagccctacatttcgcccaaatccaatcaatggtggcacatcgctccacccctgatctggctcctccccatttccccacctcgttcgaccgcgccctcaccttctcctcctctccgcacgtggcccacatccgacaacagtggtagtcctcaatgtggctcctttttatttccccattctcttttggctgcaccatcgcctcctctctacatccatcccgcatccgaccggcactagttcatccctgatccatccgcacctccaccaccacgcctttgatcaagtcgtacccctgccaccatggcgcatcgagcctcgcctcgcctcctcctcgtttcacacttctccttcatcgcttgcacattcattcaccatggatcctctcccaccgctcaagccaccctcccctactccacg

SEQ ID NO: 115585 - DNA, 391 bp, Zea Mays
gttccggcgtgttgcgcgaccgtggatgggcggcgccgccgtgtagagacgtccgaggacgaagacgcgctcgggccgttagattggcattggacgattacgattagtcctcccaggaaatgagtctggatggttagatcgggatcgggcgacccagattaagtccagcgtacctcttcgtccaactggatcttggccgtagatttataatccgatgcatgtgaatgaatcccgataatatagaattcaagccattgatcttgatcctgcagctcaaatttaataccagcccaacctccccttgatctgttctggaccgtacagatctaatccaacagcccatatccaccgataccctttcgcggcacatttttcttaaagagaccctggg

SEQ ID NO: 115586 - DNA, 294 bp, Zea Mays
tgcttgtgcacagagtatgctgttgagtaaagctttgagaatgcaacaagatcttgaagataagaaacataaatttataattgagggttttgaaagcaaattaaaagatcaagcagctgctcttgaaaagaaggatttcgagcttcagacaacagaaggtttattggcagaagctgaagctaaaattgcaaagttaaatacggagcttctctcgaagtcagaaagcttcgaacaggagaagcagaagttaaatgccaaatttaagactgaggtcgagaaaagtctggagttcag

SEQ ID NO: 115587 - DNA, 297 bp, Zea Mays
gtcgaaacatcccgagattacgcgtaacatgcttgtccggatcaagatgctgctgtcatggaaggtgatgctttgtacccgtaatgccagccatgccagccacacgaaacatccaggtgttagatgtcgcgggcggtagctgcatgtgctctttcaatctgttctattatattctagaacagtgtgttgccccgtttgcaccctgtttgcattgtgatttgcagttcatcagtacttgtctaaacttctcgctttgattcctggaaattccgtttttttttctttggcggatctggt

SEQ ID NO: 115588 - DNA, 282 bp, Zea Mays
tcgggggttaactcactgatcgacgatcggggcgtcggcgggggaggggatctccaccgtgggccgcggctcggtgttcacggagtcggggggaggaagagaactccatggccgttgatctttgcgtggacgggcaagatcaaaacccgcgtaccgttttggtgtgggggtgcatctggccgttgatccgtgatccggtggtcgtggtcggttatgtgttatgatgtgatctagagcgttggcgctagatcggacggtccgagttgcatacccgttcggatt

SEQ ID NO: 115589 - DNA, 364 bp, Zea Mays
tgtttcgatatggatccaatgtggtgtcctaactttgatacctccacaacatcttaagacccctcctgctctaggacatgtcttctttgataatctttctctagtacatcatcagcgggaggatgttcttgctcatccccgtccacttaatctacaacctctatttctatatcccctccgtatccatatgatcatcggttgatgtccatcctcctaccactacgtctcctaccatcgacacacattctcatatcactaaagtccctaccattgatgctccttcttcgtagcatttttcttatcaataccctcatccatacgcgtacaattatccacatgacgatcctccttgtagatcttatgg

SEQ ID NO: 115590 - DNA, 657 bp, Zea Mays
aaagaagaggatatagccaagggtgaggtaagtaaaacactgctctcacattgagataggagattggagattttagagaacggacatagtgcaattaccaaggtaagatcaagaggtgagaaaggtaaaggtaatacccaactggagcacgacaagggatggagttaaaaactcgcaagcgacaaggaagagaatacgaccaagggaaaataggtaaaatacaactataaaattgagatggaagagagaaggttttaaaggacgggtataatataaaaatcaagttaagatatagaggcgacaagggtaaagatgatgatcgtgaaatcataaccaaggatagagttaaggcaagactctcgaagtggcaaagttgataagacaatcaagggtgagataggtaaggtcccaacataatggttgaagtaacagaaattattaccgagggaagttatgaggaaacggtgagatcaccaaggatgtgcgaaatagaatggtcgctcatggaccatcaagaagcaagggtgatcaagggcatattaactgaaaggttttgaacagtcattgggatatgaaggtaagaatatataaaaatattagtatgcaagattccagtagtacgagtgtaccaagaccaagggaatagaataggctaaa

SEQ ID NO: 115591 - DNA, 408 bp, Zea Mays
ggaaaatgtgttgtggcatgatttctacagtactacataaagacaagtaatataacaatattcaacccatctaaagacgaatcctctaaaagcaggcagagcaactgaagttgtacgcatcaaattcaaggtttccttacatagaccatgaggcaaccatgtaatttttattggagagcatctcgcaacatttagatcaaacaatcagtgccatcttttgcatagatcaaacaactgtgttagtttgttcaagcaaactgttaactaatatgaatctacatgtgaggttctcaactacatagttttgtggactggggacatgctcagttgggcgaaccatcgtgataatgttaatgtcgatagaattcaccatagctcagttgacagatgagacaaagtacaatccca

SEQ ID NO: 115592 - DNA, 616 bp, Zea Mays
gttccacctctagatgcatcgactagtcatacaaatatagaaccttgccctaccctcataccatttatgcggcgcccctatcattggatccactggcaagattcatagttgtgctaatccctatgccatgtcatcggtggagagatttgaagatacacttacccccgcaccaacctgctaccacgtttgaggtgtctcttgccaccgaatccaacgacgaaattcacatataaactaatccccaacgcaccctcctgtcacatatctaatggatcccacaactagatccatcgatgccatcagttcacttgacaaccaatcagatttagtcccctacctctacctcacccaactatatttctctacctctagcagcttgtggtcaccattgcccaaacaccctgcccaccaaccacttcatctaccaatccaactagttgttgtcgacctccctttacgttcaacaaacttcaataggcctaatcccaaaccttacacccttaactgaacccagaaaacctaagtttattaagtccactagatttagtgatgatgcacaatcaaatgctaagaaggagctaactcgctagagttggcaacacaatttgtttctcta

SEQ ID NO: 115593 - DNA, 445 bp, Zea Mays
caccgttggatcacatagggttggtccagattagatgttggaatgatgcgccaggagtcgtatgttttggatcggatggtgggggatgcagttgaataccgattcgttatattatatccagatcgttgattgaccgatggacggatcagatctgatcgtagtatggtgtcccgtgggtcgtaggatagtaatccaaaggcatatataacttactgtatcatctggtgcacgatttaatctcgcccggtggtttgggatccaacggctcatctccactgataatccttcgcgctgtcacttttgttaaagagccctcgggttttaatgaaaacaacccgccatccgcgcggggttagttctgagtcttcagataaattaccccgagccccctgcactctctaaaaatagtgcgcccagtccagaacgtgtttaaaatgtataaatg

SEQ ID NO: 115594 - DNA, 978 bp, Zea Mays
gtcgatgcaaagaccaagtgttcactacaagctggttcttcagtgctcctgcatggtgaaccccttacaaccatatgcaagtcccgagtcaggccaaccacaagctctctatgatcaccacactcccaattgtcactagtcatataggtagcaccgatcaccaagattaactagcattagactcacttgaccatgctaagtctaatgagggcgatggttgcacacatgtcactctctatgcactaattaggtcactaatcgcacgattatcacttctctagtcttcccgctatgcaaaagggtcttcctcactctcaagtggatgctttagctattgaaaggatcaatacctctcatgaagctgagtaatagcccaagggatggtactagccattataaacccgctcaatagttttgggacatcgagcgtgactagtgccaacttttccgctgcatcgaacacgttggtgcctctgtaatggctagtttataaactagtcgttagtgcacatggcatttagtgttagcaccagtgtcgcattggtcccattcagtgagtatagtcctcgaatgcatagtcgcagacctctcttagaaccatgtttggtgtcatgtccagtggcatacttaacacatctagtgagtactcgacctctcgacacattttacatgctctatggtgtacttttctaatgctttgtccgatggcacaatgaagacgtcgattagtgtaactgtctaaggacactcttcgcgagctctctaggtgccctgtctagtgcaccatactcgatgtacacatgacatgctgggtaactctgaaacactagatgacactcttccatccggtgatacatatggtgaagcactggacacatctagtgtaccgcagactaaccaacttgctcttttcaattgtgtgtttgagttgggttttctttcaaacattttgtgggctctcttgggtttacctaacac

SEQ ID NO: 115595 - DNA, 765 bp, Zea Mays
gtccgcatacataagagcaatttcatggtctgtcaggtttctctcatcatgaatctcactgaagctcctatcatcagagccaaaacccaacagacgagcaaaggtgacatagtccagcctatagtgccttccttcagtcattcaatgcatcacatcacaggatgtctcacagtagtaggtagctgagaactgatacataatctcaatgttccaattgtgctggaatcccatgatgtcatagaggccaaatctcttgcaggcattcacaatgttcttcaatactttatctgacttgctatcaatgtgctcccaatcaacatacttcactcaaagcactatgtcatgctttgcattgtagggcacagagagatagaaatatgagtgaaatccattccagaagcgataatcaatgcttctttccctgggcacaacataaggcatcctcatacgagcttatctgacagtacagaactgattctgatagatcaccctatgtctgtcctgggtgtcatgtggccttctttcttggacttcctcactataatgaaccatataagaggagtcatactcattgatactcgctggagtgccaggacaagcatcctcctggatcaatcgcccatacatctcaattcacatctcttgctgagcctgctctcggagctttgccactgcccactgttgcttctcccaccatgacgggcaggctgcttcatccatccacggtgctctgtccacatcttggtgcggtgctctccatcatct

SEQ ID NO: 115596 - DNA, 369 bp, Zea Mays
aatagccacttggaatctcaaacttcaaatctatgcaatcctgccactttattgagttccaatatattgatatggtcatcgaaaacctttctaacactggaatcacctgaagtctaattccttctcaaattcttacttttggctcgtttgatcaaagtttgcacaacaagtgagccctttctggttctgtctttgatatcttctgcttgagcttgtgaccatgctttttgcataacctcttgagccttatgacttgaaccatctcatcacatatgagttaaatcgatgacttcaaatcatgtattctaatattgtgatctccaacacaacatatctcttcaacaatctgatcaaatctttgactttttg

SEQ ID NO: 115597 - DNA, 539 bp, Zea Mays
ccgagacggacgtcaacgacgcaatgacggcgatggcagcagtcgcatccgtagtggcctccatgcagtcggcgtcctagcgcgagagcgcatcagccatcgtgttgatgcatctgggccagtatttgactatgaagtcgtatccgaacaacatcgatatgatggagatgatccgaccatgaatcattgtagattagtatatcatcaatgaaaactagcatgaacctgtagagaaaggggcacagggcgtcgttcatgaggctttggaatgtcgctggtgcattggtgagcccgaacgccatcaaactcaaagtggctgtgatgagtgaggaacgccgtcttcttaatgtcattcacatgcatgtggacctaatgatagccggagtggaggtcaagcttggtgaaaaatcgagtgtcgtggggctcatcgaggagctcgtcaacgatcgggatggggaagttgtcttttggcgtggcatcattaagggcacgattttcaatgcagaagcaccatgatgagtcatgcttcactaatttaa

SEQ ID NO: 115598 - DNA, 276 bp, Zea Mays
gttcatgtttgcgaggtccccgggtgtccggatacagctaggaaatgtatcgatcatccacaacagtaaacgacaaaatttccgatggtcaaaattgtggtacataagccttaagctatcgaaaatagtttatttccaacaatcaaatggttatgtccgacaacatctgtccctcggttgtaacggatcgtaaataaggttatttttgacggtggtcgtcgaaaatagcttatgaccaactatcgcaaagggtcatcgacatttaacttagataac

SEQ ID NO: 115599 - DNA, 631 bp, Zea Mays
gagaaagagtacaacttctggaaaagtcgctacttcggctgctccaagcgagcctgcgccgaagaggaaaaagctgaaggtccttacccaccgactgcgctacattgaaccagccaaagtgcctgaatttggcggtgagacttcttcagctacgaaagccaaaggacctgctcttacgcagaggattgaagagccggctgtaatgccgaaggctgacaaaattgaagaaccgataaccgaagggacaaaaacatctagacaaagctcttcggcaggagtcgaggcgccaaagacacaaaaagatctagcaacaacccccaatagaaaaaggatggctagtgtattagatgtgctggagacgataaaaacttcaagctctactccaggaaaaattgccaaaacttcgaaaatatagattgaaaccgagacaaagctgaccgaagccgaagctatactgggccaggctgacttcaaagctgggccttcagtgcccgccaaggagaaatcctcggaaactggagaaaaggcagcggaagaagagggtatagaacagattttgcctgaaaaagctgccgctcctgctcccgaagcgtcttccgaggaccttgattatattattcaacacacttcg

SEQ ID NO: 115600 - DNA, 462 bp, Zea Mays
aacgatggtgttaggcgttagttgatgaagataaatcccaaacttcttcaaaacatcagcaatcattccattcaaaggaaatcttagtcctgccttaaagaaacctttgaagaccactacttcatcctttcctggcttcggggtaatctcctccccgccgaaacgaaccagctccttctttgcttcactaaaatatcccaaattcatcagtttagacatatcaccttcggtaacggtggatttcccaaactccaagtggctcggtttagttggcacggcgttgtaatcatcttcagattcaaattcctcagcatcgacctgctcaacttcagcggcaggggcatcctccgatactaccagccctgaccgttacatcacttcagagattggagcggttttggcaccttcggcttcctctccgtcgtgagtaaccctagctgttgagcgtaccctagccatctg

SEQ ID NO: 115601 - DNA, 276 bp, Zea Mays
ccacgatatagacatcgtctcctggtaaggtggaatcctgtcgaatttcgactatcacaagattagaatgtgttcgtcttgtcacttcggggtcaaaccaatgacatttgaatatcactagagtaagaggtttggaaccatgaaaattgagttcatatatttctttgattcgtccaaaatactcgacctcgtcaagcccgggcgtaaagactccagaacacgtgtttttcgattgggccgactttggtcgtagcttgttgtgcgaaaacggtatcc

SEQ ID NO: 115602 - DNA, 578 bp, Zea Mays
tctacaatggaaagcgaaacccaacctttataaaacttttgaataccaccacttcatctgcctcaggaagaggaatagtattgtcacctcctgccctcactacggatatatcatggaaatatttgcccttcatcacttcaatatgccatgcttgacagtggattttccaaaaacaacatgacttggcctccatggacttttttcggcatctttgttctcactctcaacataaaaactttcgctatcacttgagtctctagacagccccgctagcatctcatgagtaatcttctcaacattggtcctttccatggctttgtagaaaccaacaagtgcaggatccatgcttttcttctcttcggccatttcagcgatatttacagcaaaaagctgaagctcaaaaaacaattgcggtcgtagagatggaaagctaaaacgacaaacacatcacaaagcttgatagcacaaaaaacattttcaacgcaagccctcatatatatacgcaaagcaccactaagcggtgggacccataatacagaatgtctcgctaatctagtgaagggaaggtgttttttcga

SEQ ID NO: 115603 - DNA, 608 bp, Zea Mays
gtaactttaatgtaatccggtaagtagctcaccacatagaaattgaataaaaacacccctgaatatgcagactcaggcgaactgaataggattgtgatggtacagtgtctgaaaatatcagtgacgtagtgcacctcgccgccggtgatcttcgcgcgtggattcgcgccagccgccgtgtttcgtgctctgtgagaagtggataacgtcgggaaggggtgaaaagatccagggaggagtgaacccagtcactggctggttcggccgtcgtgcctcccccttaccctgtcgtggttggtcgtgttggcatcaccggagttcaccatttccccagctatgacacgtagtgattcgtcctccacattgtaaaggtcatggtaagcaaccggttaccatccctgaaccatttccctctcgcgctccacggtgagcaggccattgtaaaaatatccaggccgcgatgaactcaatcccaatccaaaattcatgataagctcagccggggtctttaaattgaaggcaccccctgctccgcctccctattacgcgtccaacccacccccagttagcctctctcgtgcaccgtagccccagtcacagagttttcc

SEQ ID NO: 115604 - DNA, 552 bp, Zea Mays
tgagtaagtaaataagtaaataaaattggcatagcatctcttcaaataatgtcaaactagcactgacagttcataatatatcaatagtaaagcaagaaacccatcctatatgtgcagtgtgtcaatttatcattatttcacttgctaggacctacaacctatccctttgataccaactataacaccccattgctcccacacaatgggtgttaccaaaaacccttcccacaaattagaaagcataaaaagatggagacagaaagaaaaaattcggcagcacctcccttgaaagttgcataacgagagaaacacatagtttatacatgatgcaatagaaaggtaatccacagtgtataatcaagatgcaaaagaagaaataaacattcaggacaaaattaattcagccaaccaaaagaaatacgaccaccataaagactagaacataatagaccactggcacacactatttcataataatcaacctccttgacccaaaacccctgtttaacatcattactaagcagtggtataattgtttaggagtgtagtgat

SEQ ID NO: 115605 - DNA, 519 bp, Zea Mays
gtttgatgtaacctttctctaacaactcatcaatctgcttcttgagttccaccaacttcggtccggacactcgataagctctcttggaaataggggcagtgtctgggataagctctatggcaaattcaactttcctttcaggtggcatgcctggtaactctttagggaatacattggggaattctgacacaatcctaattgtttcaatcggattggactccttgtcatctactgataaatggtgacaggctccttcttctagttcaggtaagtatagcttggttactacctccttttcggatggggacaccaacttaactgttctcttgtcacaactgacagtggcttggtttttgtgtagccaattcatccctaggatgacatctaacccttgagttcccattactactaggctagcggggaaggttatcccccttatttcaatccttagattcggacaaatcctatcggactaaacttttcccccaactaaatttactctcaaaggtgggatcattg

SEQ ID NO: 115606 - DNA, 677 bp, Zea Mays
ggttaattcacaagaaccagtatggtttcatcaaagggaggtctattcaagactgcttggcctgggcctttgaatacattcacttatgccactcctcaaaaaaagagatcattgtgctcaagctagacttcgaaaaagcttttgacattgttgagtatgaactgattatccaggttctgatccacaaaggtttcggtcctagatggatcaactggattcggagcatccttctctctggcacgtcttcggtgttactcaatggtgttcctggtaagctctttcattgcaagagaggtgttaggcagggtgatcctctttcgcctctgttgtttgtcttggcagctgaccttcttcagagcatcatcaataaagctaggctgtggaatcttcttaagctccctttaccgaatattggtgaccaggactacccgattgttcagtatgtagatgacactcttttgattttggaggcatgccctaagcaacttttcttcctcaaggcaatcctcaactcttttgcttcttctactggcctgaaggttaactataataaatcaaatatgtaccctataaacgtgccccctgaaaaaatggcgatcctgtcccgtagcttcaattgccagattggagagatgccattcacctatcttggtttgcctctgggccttgcgagaccc

SEQ ID NO: 115607 - DNA, 946 bp, Zea Mays
tgtaagaagagggaatacaaaaggattggttcgcaatttagtttttaatttctaaatcaagggtctctctttttattattagtaagtgataggagagcatgggtattatatgtatgtccactttattatgaaggatagaagatgtctttaaagcatagataggtttgggtaagaaagtgtagggtaaggaaagacttcatccaagatttgtggatcttgattcatctgatgatttagcttgatctttgaaggcttgagttaatgcttatcctcctttgacatggttggtctcctttggcctttcttcttggagttgccatccgagttaaggacatatggttgagatatatggggtaagatagactacatgatataggtcaaaatttggtttgatgtcaggtggtggttgatagattatgcactccattaagattctattgcttgggcaagttgtgtaacttgttatatagatcgagttgtttgtgtatgtccttggttgctctaagtcaccagattagacttaagtgaatgtggagtatggccttatcctttgtaccagcattaagtaactcaatctagcttagatcatattggattagatagaatccagattaggttggtatgactagattaaactagttaagattagctagatcaaccagggtaggataaatgttattaggatatgttagaatcttttaagacaggaaggattatatgatataggtaggccattgttcaaggatgagttggtataagacattaatttaggttaagatatatttgtagagacagtgtctaacctatatcaccaacttaactaacttgttaataactcactttagattgggtcatatttagattagatagaatctggattaggttggatataactagattagactagataatatctaattactttggattagatcttggttgttac

SEQ ID NO: 115608 - DNA, 385 bp, Zea Mays
gctgaagatgtaaatctagatgccacactctctgaaattgataccatgcttctggatgcggccgcggaagaagctgttgcagccgctaaagagatcccaggcacagtggctagaaaaggaaaggagaaagccgaggatatttcggaagaagaggattttaattttcaagatatacttaggcaagaattgtcgaaggctgaaaaagaagaactgaaagagtatgctatatcttgcaggtacaaaccaggtgcgctactcttcgggggagtcaacgaagaaagcttaggatgccttcgggaccacactggggcgaaggttgtcggcactctatcgaagagtgttggcttcccgaaggttgaggcagaccttagcaggtaccggcggc

SEQ ID NO: 115609 - DNA, 272 bp, Zea Mays
gcgccattccaaattcacgcgccaccgcccccggagcctataaattgagcgtgccttcgggtccataaggtagtcaagcacccaagccaccaagccgtgcctccaattgctcaccagagctcgccaatttcagatttcccccaaatcagccaaaataccgttgtgtgaacacctcgccgtggccacccttctgcaggtcagttcaagctttcttaattggtgttctagctttcctcatgtcccctgaagctcaccgacccattcgattgaac

SEQ ID NO: 115610 - DNA, 609 bp, Zea Mays
agcatcgtcaaggttacacccattggggtcagcatcagcagggtcacacccattggggtcagctccagtaaaaagttccactggtacttcttcatcagcaggagcagaagggccagcatcctggtccaaacacgacactcgccgaagccgcctctttttcttcttcttcccctcggtaggagcagatggatgactggccgggcgaaggcgctttgggcgagtactattagatttttgagcattcaaggtttttccaggctctgggatagttgcaacagctatggtttcagcagggaccgagtcagaagaatcctcagccaacatgtccagcatagcacttatctctgcattgcttgggtttataggcatctcaaagtgaacttgcctctcatcattgggaagatcaccaattgaagcaaccagagcctcaacttcttcgtgagagggtcgcactctaagacccaagccactgccactagcaggaggattggacacaaaattgaaaaaagacttggaaggtggcagattccaggcagaatatgcaataggagcaccaatattcgatactttgcctctaagaatcatctccagtcggcttaccaaatccac

SEQ ID NO: 115611 - DNA, 521 bp, Zea Mays
actatagtcacctgcttcatgtcatctattctttccattctttccacatacaagttctttatagctctaggctggctagtgatttctctgatcgccaatctctttctacggattgtgtttttcttggtgtctctcttatttgcttggaagactaaaaagcagacaacagtttctctttctagtgtagaggccgagttgtgtgcttcagctcttgtgactgtataggtaacttggttacgctggttgcttgcagattttatgtttctatacaaactcctcttttgactgacagtacaggtgttattagctgtttccataatgactcctcttttgattgactgtgttattagtatcactcgggatccgatcaagcatgagcttattaagcatataggtgttgatgtctattacacgcatgcacatgttcaagatgatgtgattgatcttcactatgtgccttcaaagcttcagttggcagatttcttcacgagggcgcaaaccagatcttggcataggttttc

SEQ ID NO: 115612 - DNA, 655 bp, Zea Mays
gggcgagagagggatgttcccaagtctctgtggggtgtgagtgcttctagcgtattgcatgtgttgtgttcctccttttttgttagagggcctcctctcccttctataggtcaaataagaggggttatggacttgtcgcgtagtgccatcgtggtgaaaaaggagttggtacgcctataaggtggtcgggttcctttttccaatgccatctcctgccactattgttgcagctttgttgactttcttggagaggtttcgtgaagattacgggccacagtgcatgcgtaagcatgcctcaggccttggtgtgggggttggggttcttctgaccccaacaagaggcctaagccggagtaggcattgcagggctatctattgtggttaccatcccttagggttgtttaacattacccacgagataaatcggtagatgacgccatgtagttcattcgtaccttcgtcattccatgactgacttctatggtagaaagttatatggagggtcggcttcgtccgcgggatggttggccttgacacgagcaaggttcaagcaatcctgtgagccagcttgtcttagctcgattggaggaatcagctttaggcacgtcctacccctttgtggtttgcctgaccccttctttaagtcaaggaaggg

SEQ ID NO: 115613 - DNA, 889 bp, Zea Mays
tgacataatatgtcatgtgagcaacacatttagagaaagtgagaaaaaccatactaaatacaatcatccgaggggtgcaagagtgtcataacaggagttgtgatgcacatgactatctctaaatgcacatcatttttacttaatagcaaagtaatcattacaaactgataggacaaaagatgatggccagaagaccatcatattactttgaataacaacccaacagttttatttcttacaatggtaaaaggatacaagccacaacagtggcccaaaacaaaaataatccaaaagaaaaccgaaagaaccacaaactagaaagaaccacaaactagaggttggattttctccccctttttggcaacaagtaccaaaaacggagagagagagacaaggatacatgaatcaatatcctccaggaggaggatatgacagaggatatgatggagggtatgaagtgtaatcagggaagagggtcctcatcacttcctcctcaaatgtggagtcccgaggtggctcatcagccgcagaaaaaacagatgccgaagatgtacgatgatcaggaggaggtggagggtggtgatggtaaccagagccggatggcctagggtcaccaggaatgggtcccagacccgggtagggaggcagagggtgagaggatgattgacctggatccccatggtagggaggcggggcaaactcctcgcgatcgtcaacataggcttcttcttcttcatcgtctgcagacataaatggcaccccgtaggcctgatggtgccactcattgatctccgggggaggaggatggagaggcacgtcaggcgagcgagggacaaatggcatacccttggtggaagcttgacgacgaagattgtcgtcagtctcccgc

SEQ ID NO: 115614 - DNA, 779 bp, Zea Mays
aaaggagtatttccatgcagagcttgactaggttgagttcttaggctccaaacgacgtagggcaactcccttatccacttccctgcaaacttttcatttttatcgaagacttttttcctgagtgcctccaatatcatcccgttagctcgttcaacctgcccgttggctcttgggtgtgccaccgaagcatatttgatctgaatgcttttttgctcgcagaaatcgaagaactccgaacttgtgaagttggatcctaggtcagttatgatactatttggtattctgaatctgaatattatgtcttgtatgaattccacggccttagctgaggttaaagaagcaatgggtttgaactctatccatttagtgaatttgtcaattgctaccagtatatgagtgtatcctccttgagctttcttgaaaggtccaatcatatccagtccccagcatgtgaacggccaagttactggtatggtctgtagttgctgtgctggtaggtgttgttgctttgacaagtactgacaggcttcgcacctctgaactaactcggctgcatcactttttgctgttggccaatagaatcccgacctgaagacctttccaactagtgtcttggatgctgcgtgtattccacattgcccagcatggacctcatctagaagttgcttcctagtggatgagagaatgcatttcatgaggacgcccgaggcaccccttctgtataatgtttcccccatgagtgtgtagtgagctgactgtctagcgacgcgctcggctgc

SEQ ID NO: 115615 - DNA, 360 bp, Zea Mays
ccggctggggcgagtgtaggtgagggagagctgcgaagtctgtttgagggcgatgaattgaggataatgctgttcaactatagggagatgggtatcatcccgaaggttgagccgatgtaatgtgtgatgccctcgctgcatgtatgtaactataatttgtatgataaggctgcgtgccttcgctgatccggccgcgcccgtaggcgacttgtgcacttgatcttgagcatttattgtgttggtccggctgcacccgtagtcgatttttgcacggaggatccgtctgcacccttaggcgacttttgcacggatggtcttttgaagatgacttcgattttgcgcacttgttgtgctagtccg

SEQ ID NO: 115616 - DNA, 390 bp, Zea Mays
caataacatcttcacccactagttgtactccaataccctctcgtgcgaatacaatgcccttgacatgagggaaacatcatttttagtttaaaagtgatctattgttttgaattctttatattcccactttttagcaactatatggtgggaaaaaggtgccttacaacctaacatatgtttggacagttctctcacgcaatttggctaaattttccattggctttattttattttgagaaacaatgtggcaaattgatgtgtggtgttttacttcagtggacattaacaccgtctaagtatgccttgaatagaggggattataggaaacctgttatcacaaaaggtcattagctagcccactaacgtcttcatccactagttgtactctaa

SEQ ID NO: 115617 - DNA, 1025 bp, Zea Mays
agacctcaaagccagatactggtggagagggatgaagaaggagatagcacagtatgtggcccagtgtgacacctgccagcgaacaaaggccgaacaccaaaagcctgcaggcctactgcaacccctcccagtgcctgaatggaagtgggaggaaataggcatggattttgtaaccggactgccccagacgcaaaaagggaatgactctatctgggtaataatcgaccgtctcaccaaggtggcccagttcattccagtaaaaaccacttttggaggagccgcccttgcccggatatatcttaaagagatagtcaggctccatggtattcctcggaagatagtgtcagatagagggacgcagttcacctcaaaattttggaagagccttcggcaagctatgggtaccaagttagatctcagcaccgcttatcacccccagtcagatggtcaaacagaaagagtcaacaaggtcctcgaagatttactaagagcctgtctgttgacattcgacaggaattgggagtccagtttgccatatgccgaattctcatataacaacagccatcaggccagcatcaaaatgtcaccgttcgaagcattgtatggaagaaagtgccagacccccctaatgtggtccaatgtaggggaaaggacactagaaggacctgactttgttaaagaagccaaagataaagttgccctgatccgcaagaggttacttgaagctcagagtcgacagaaaagttatgcagacaacagacggagagaactcagatttgaggaaggagatttcgtatacctcaaggtctccccgatgcgtggtgtcaaaaggttccaaatgaaaggaaagctagcaccgcgtttcgtcggcccctaccccatcattagcagagtgggacccgcagcataccgccttgagctaccagaatccatgtcagacattcacaatgtgttccatgtgtcccaactccgtaaatgcttgcaagtaccagagaaccacatcgaggcagagacaattcagattc

SEQ ID NO: 115618 - DNA, 403 bp, Zea Mays
gcgggccggaataaatctgtttggtgaattacaagggtgtgttagccctgaggattcaaacaaaaaatttacggagattgtcaatattccatgaatgctctaagtcttcgccggatggcgttgttagcctgtacgcgctggggacgccttcgtcttgacgatgaagggaccctcccactttggctctagcttgcctcgtgactctgtccgagttgtccggatgagtacgaggtctccttcgttgaattctcttgggacgactgtgtggttgcgccaggcttttgtttgagcttggtatttgttgagggcctgcagggcgaagacacggtctccgtcgatgaggtccttcgaagttggttcctctacatcggggacggctgaagggcttgtccgtggtgaccca

SEQ ID NO: 115619 - DNA, 409 bp, Zea Mays
atttctttttgccacatgttgctctttatgaatgtggaagtaacttggagcaacacaagtgattagaatgaagatcaaagcaaggaaacttagagaggaagagggaaaacaaatcgcaaacaatcaaacacaaaagcacaaggatttgtttatcggaattcggtttccaaatgaaacatgcgtatctatttaggcatccaagggaccgagtctctttcacccatctcaaatgattccaaagatcaaacttgagtcctctcgcttttcttgattgagtaattgaagtctccgtagggtacttcacacgtcaaagcctcttgctagccttacaatgactgggagtcaaaactccaagatcaagagcacaacagaacaccacaaagatgatcactcaagcacactatttttc

SEQ ID NO: 115620 - DNA, 319 bp, Zea Mays
atggtcagtctatcatggattacaaatgttttggtcatgctatctcgtttgcatcttccttggacctgtcctctagtttatgatggtctacagggatccctgttttgatccttgttgcatggcattttttccaacctatgatggtatctccatcagccctcctgtgttaattttttcgggcatgcctcatgtggggagtctacactctaaagtccctcccagtgaggggtttgcgcaaggcgtgactctatcctctcgtcggtagactgctttcctctggtctaccttcgagctttcccatacgcactaaccctgcccc

SEQ ID NO: 115621 - DNA, 355 bp, Zea Mays
gctattctcggtggcgcggctgaccgatttggggaaattggtgattctccggctatggtggctaatcgagggtgggagcgggtgcttcagcttcgcaatttagggacgaagaactgtgctcggttgatttgaacgaaaagagtgaggatgcggtgaatttataggtgcagtgagtcactgccgcggccatggtgataaccatcgccggccttagctggcgatcaacgacggcgtcgagcgctaccctttcctacatgcttgccacgtccccgccgcgacagtaacacggtcaaatcggtgaggcgtggatgaacggagaggagcggcgccgatgaccggatatggccggagcgat

SEQ ID NO: 115622 - DNA, 293 bp, Zea Mays
cccaaggcactagggcatttagcaggttctctgtatagcctatagcgtggaaattcagatctagcatttccctcctagtcctagggtctttctgccgggttaacaaactttggcactgcagttaatgaaaagtttcacttttaggagtaggaatgggatgtttttgacaagttttcctaagatccacctcgagaaggctgtatggttgttggttcttctcatacctattgggcaagtgttggagcatcacataattcggtagagggagtctatagacaagtttttactactag

SEQ ID NO: 115623 - DNA, 301 bp, Zea Mays
aagggttggttttggacttagaagaattctgatttttcccttaggtttctccctttggtgaaccttttggggtttttctgaaacctttttggggtcagattcttactatgttttgtagggtatgaagtgtacaacaaatgttataattggcccaagtcatgatcatgtagtttttatagccttatggtcgtgctcacttatagtgctccaattgtccaaaggggtttgcattagggtttgggcatgtctctccactatatgtgcatgataaagccaagtcatgactcctaagatgacttgc

SEQ ID NO: 115624 - DNA, 747 bp, Zea Mays
gccaactagaactagacatccgttaggactaggcggtaagaagaaaacaagcttggtgtaagactttggaggatcggggttagagatatctagtccttcaattgtcactacttcatccaacagatgtatgactcctagacctagaactggtatatgtgagctcacagtttaccttgacaatgacaatattgtggcctatgagcatggcattgatatccttaaatggtggcataagcataaactaacctatctagttctctctataatggtcaaggagattatgttaatttctatctcaactactttagagtcttgctttagtcttttttggcaagacccttgatgagcggcaatgacgcttgaacccagagatggtggagatgttgatctgcatcaaggattgtgagttagaccaacaaagcacacaatatgttgtgtaggacaaggagttagaagactccttgaagaacttattgtgagttagagtgagtgttggagcttctacatgagtatgagtgagtgtttttattggtgcttctgcatgagtttatgtgttagagtgagtgtgaatctgactgtgagttagagtgagtgtgagcctgtgatgagattcgaaactatggtttttaataactttgaacatttggatttgaaaatgagctagttgtactcttttctcctaggtttcacatgaggtgggaccgtgggagttttacctaaaaggtttttaatgaagtagcattgcac

SEQ ID NO: 115625 - DNA, 397 bp, Zea Mays
cgctgtggaagagctgcattcattcgcatcacatcggtcacccgctggagacagcactgccctgacagggggttggtgaccattacagattcgtgttgctactacggtaagcagctgctaactctgcccttaaaagttaaaacacacacacctgttctgttttgttgcgagatggagctggaacataagatcgtttcggtgtcaggaggcgctgtgtgggttcgttctctgcttctccctgtttaactacccagccttttgtgtgtgtctcgggcagaagaaccaggatttaactgctgcgccctgctgcgccaaagcctgccgtctcgcatagcgttgtacaatttgcattgtcatcttccactgcctttgatgaatttgccaagcccttttcttt

SEQ ID NO: 115626 - DNA, 329 bp, Zea Mays
tcccttgactttgaatctcctcattccatgaagtggggataccttgaggtacacataatctccttcctcaaattccggtggtcttcttctattatctgcgtacctcttttgtctggtttgagctaccctcaaattcttccgaattatacggacttgttcctctgcttcttgaattaattcaggcccaaagaactgtcttcctccagtctgatccaatgtagaggaatcctgcatttccgccgtataaagcttcaaagggtgacatcttcagactggcctgttactatcgttatatgagaactcagcataaggtagactcttgtcccaac

SEQ ID NO: 115627 - DNA, 490 bp, Zea Mays
gtgcaatatataggaagttggggatcaacgaaggttgattccataattattagaatatgcatgcatcatgttaagaatatactaataaatcttcccctcttatggagacatggcgcgtacaaggaaaatagcacgcaaatctactagatcttttggcgggcctcgccatcagctagcccccagacatgaagggagtagtagtggcagcaatgacccatatggagacctggaagccagggtggagcaactccggtcagaactacgccacaggaatagggcacgggagcaggacagccagcgtatacctgaattgtcagctgatgtcagccgcttgcaatatgaggtttcagaacaggattcggccattgattgggccgtcaactcgcgttcgatcgcttgggaccgtgaagcaaaagctcgagctcgtgtggcagagcttagtgcggcactcgacagcctgcaagtgtactgtaatactttacatgaagaa

SEQ ID NO: 115628 - DNA, 502 bp, Zea Mays
ggacactagaaggacccgactttgttaaagaagctgaagagaaagttgccttgatccgcaagaggttacttgaagctcagagtcgacagaagagttacgcagacaatagacgaagagaactcaggtttgaggaaggagacttcgtttatctcaaggtctccccgatgcggggtgtcaaaaggttccaaatgaaaggaaagctagcaccacgtttcgtcggcccctaccccatcattagccgagtgggacccgcaacatactgccttgagctaccagaatctatgtcagatattcacaatgtgtttcatgtgtctcagctccgcaagtgcctacaagtaccagaaaaccacatcgaggcagaggcaatttagattcaaaaggatctccagtaccgagaaaagccagtgaagattctcgactcagcagtccgaaggacccgcaactcagaactgagactctgtaaggttcagtggaacagagatggagaagaggaagccacctg

SEQ ID NO: 115629 - DNA, 366 bp, Zea Mays
cgatgacccctccttcctccgactgggtgatcgactctggtgcctcctaccacaccactcccactgcaggcaccctctctcgctcccatccccttcgttcttctcatccctgctcgatcgtcgttggcaacgattccactctgtcagccacctcagtaggtgcctcggttctacctagactgttctacctcaacgacgttctcgtagcccctcacatcactcataatcttctttatgttcgtcggttcaccatcgacaactcctgttccgttgagtttgacccctccagttcttctgtgaaggatctggccaccaggactccactcgcccgctatgatagcttggggcccctctacacgcttcgtc

SEQ ID NO: 115630 - DNA, 473 bp, Zea Mays
tggaatttcatcatggggcacagaagttgccctaagatgggtgattgcgaacgtgccaagcgtgcagtgctaatttaaattagcatcaatttaaactgactgctccgctagtagggcgtagtggtcaccccgagtttagttaagcgtgagcatgtcgcaccgtcttaagtcattgccgccttaagccgattgctccattattagggcatagtggccaccctgagttaagtatgcgtgagcatgtcgcaccgccttaagtcattgccgacttaagccgattgctccgttagtagggcatagtggtcaccctgagttaagtaagcgtgagcatgtcacaccgccttaagtcattgccgacttaagccgattgctccgttagtagggcatagtggtcaccccgagttaagtatgtgtgagcatgtcacaccgccttaagtcattgccgacttaagctgatggcttcgttagtaggg

SEQ ID NO: 115631 - DNA, 879 bp, Zea Mays
ttctttgtcgcttcctgctcaaccttggcgagatggcgatgtgcgttctccctcacttgactcatgaggtcttcatattgtttttgctcatcggtcgacgggcttgaaacaaccggcctaaggatattgtcttgggagatctcgatgtgatctttagaaccggccatctctagtggattataatagatctagaatgcacctggtccctagtgaagttgccaaaaaagtgtgttgtctccgatttgtgcgccaatcactagagatgaaccacctggtgctgctctctatggaagcgcggacagtccatggcacagggttggatggtccgcgacctcgatgcaggagctactccctccctgcatgctttcggactgtccatgcatgggactcaaactatccacgactggcgtagaggtcttcttcttcataggaaacctagatgtcgcctcccgggagggaccccatcggagaggagagattctaggtgtgtcttgggttggcaggccaccaagacaccactagacaacgccgagccgaagagagatgaagaaataggtcgagaaagactaatactagggctaaactaaggctagattactcatactcctaaggaatggaaaggggaaggtctggaccccttacaagtcgggtcctaaacaaatcccgcggatttttctaataaaccccgcagttaagtcctagtgatcatcctttattgttctcgatctatcggcatgactccgcatgacctttagctttgttgttgatgactgcctctagactccatacttgtgcaccacaagccaatataatatacatgttgtacacacttacaccctagttagtctacacaacacaacccaagatgttgctctatta

SEQ ID NO: 115632 - DNA, 483 bp, Zea Mays
aacaaatataaggatagaagaaatctgctaactttctaaatcattttgttggatactagaattacacaatactaaggaaatcatctcactgatcattctagcaagtagagcaccatcaaaacattacacgattccactcgactataacttagaagtaaagacttaaagtacttatacacaccttctattaagtagatttcagatttcaaacggaaggcctatcgatgttactagatttcaattactcggagaaaaataggtaacctccaactatggcattagccagccactaatatggattgggtgactcctaaagaaactcattgacttcaacacatcaacacaatcaacacaacacactgataggacctgtcggataatcgataaaaattctaaactcatcctacgcaatattttagttcaccaaaatcacaacatcgaacctataaaaccatacttggtaaccatgagagcatcaccaac

SEQ ID NO: 115633 - DNA, 828 bp, Zea Mays
tgtccactaaaagatgagctacattgaaagtcttggagaatttggcattgattgtggaacaactcaaggcaaaggaattgtatggggtgttacttttgccggccacaaggtgattagagaagtaaattgaatagattagtgtcggtgtttaggcccgacgacacactacaaggtgtactgcatagtgcttttgggagggtggcgaggtcaatggcaactcgatggtttgtgtagggcatgacgaaacacgaaaggttatataggtttgggccgcttgagcgcttaatacccgatgtcatgtgagtttgtggagttgtattgcctagtgtctttggttatagagggttctggcggtggaagatgactatgcctactgagatctatatctccttttcgtaggggctcccccactgccttattcctgaccgaggagaagttgcacgtatgactcagtgaacgtccttagtatacccaccttgacaagagtcgtgtcgacttgcccaaaggtcaatgagtctttagggaatttgcacatcccctgcatgtgcggaatgcgacctagaagccttcatgcccacacaactgccttcctcgtaaccgcattcctcataacctccttcctcgttatgcttctggttacgcccgactgatgtcctctaaaggctatgcccctgtcccattggggcctctctggtggtccacagaacgtatccaagtcatggtaacctaggggatatctatcctttagggttagtaggctagatacccatactattaagaggggtcaatgatgattaattgtgtgtcaattgtagaactcgaacaagt

SEQ ID NO: 115634 - DNA, 507 bp, Zea Mays
cacaattagcagaaaaaataaaaactacctgcatcctgtgctaccaagtcaaattggctagcattctcacctttttttcagtagggagattactctgacagatttacaaaccgtcctcggtctccaacagatttgcagcacttcgagctacaccacggaaagggagggagctaaccggctagcagcgcaggtgctggagaaaggtcgaacccgcttccaggtggtgaagacggcgagaggacacggccgaggacgacgacgacgctgtgtgccttgccttccccgatctgctccaaggatggcgagacggcgacgctgtgtcccttcccttcccttccccgatctactctgaggacggtgagagaagcttcaggagcagaggtagactagagtcggggactccagggagacgggagggagaagatggtatgaacggatgtgaactctagtctgtgtatgagcagtttggacatttccaaggacaaaatccattagtcaaacttaaaa

SEQ ID NO: 115635 - DNA, 338 bp, Zea Mays
ttgaattgtatcatggtgacacattcttcaatctcaatgttgggatccatcttcctgcgaaattagcagcgacaaggcaacaaatataggtggaatatgaagctatatagaatctctcaacctgaccactcttaccaaccaaggctcttatgaatttcctgcgggttgcaagaaaatgtgtggtggtaacaagaaagtggtggttaagcgaatacaagaccagagtaccgattacgatggcttatatgtggagcttggtggggaataataaacaagggatgcaatctgaatcctagttgttgtaaagttaaataaccatccaactagaagttccctgc

SEQ ID NO: 115636 - DNA, 369 bp, Zea Mays
caagactcccctatattgggatcaaactggagaaagacagttctttggacctgaacttatacaagaggcagaagaacaagttcgaatgataagagaaaatttgagaattgcacaatccaggcaaaagagctatgctgataataggagaagactactggagtttaaggagggtgatcacgtgtatctgaaggtgtcaccgatccgaggtatgaggagatttaaagttaaaggaaagttgtcccctcgcttcattggacctttcttgatcttaaagcgagtgggagaagttgcatatcaactgaagctacccgatcacctgtcagatgtacatgatgtgtttcatgtgtcccagctaaagaagtgcctcag

SEQ ID NO: 115637 - DNA, 798 bp, Zea Mays
ctttccttgagtcgtgttcccagaagtctgttggaaatttgatttattctgctttggataggggaaatccttgataaagtgtccggactttccacaattaaggcagcatttgaggaactgggtagggcggggaaacgagcaataggggcactcggctgattgttctgggtgggggcaggagtgggacggatgaacacttgttgcttgaaaggatatgtgggtggacgaggagaagagagatttggggttgaaaggacgaatgaccaaccttgatcgcttttcagacccatgggacgatccttcacccccatatctctttgtttttccttgtcccaaattcttggcttccactgatagcgttgtgcttacatccctgctataagtgagatccaggcatgtggccatcttgcgctggagtcgatcattcaaacctctcatgaagtaatttttcttctttaaatatgtgtccacatggtcgatagcatactgggagagatgattgaacttgttgagatattgcattactgagtctcccccttgctttaaatgtataaactctccagcttcatctgtaaaaccccttctggaacataatgttccctgaacgccttcttgaatttcgcccacgtgaccagatgtccggcagtctgaatagctaaaaaatttgcccaccaggtgctggcaggacctctcaattgttaggcggcgaacaggggtttctaggtttcagtacaccggatcagtccgaatttgtgctccatgattcatatcccttcatccgcttccaaaggttattca

SEQ ID NO: 115638 - DNA, 440 bp, Zea Mays
tgcgcatgcatgcgaagaaattgaagcagccgcgatgcagctcctgggctcaccgtacatgtgtgtggtcttgaccggggtgatgatagtcatgaaccgccgcaatttctcgcgggcagtgaagatccgggcatggcgagaacccacggccttgtgacgttgacgttggtaagatttaccccaccttgtttgcattaatacccactccgcgtagcacccttcggattcgaggattaaactagggagggagaacgagttgctccggtggggtctccaccgtgggctgaaggtggcgccgccgcatgggtggtgtctgaggttggggatgatgtcgtgaccgtcgatcgaaatgtggacaactcagattagggcctcgcgaacccattcgcttgatggaatctggatccttggatccagatcgggtggactggagtgtgtac

SEQ ID NO: 115639 - DNA, 525 bp, Zea Mays
aaaattttcagttgcttcgcctagtttcttctctaattcttgaatctcagatctatgtagctctacttgagtagataacttagcttcactggattttagcctttcaactaaagaaagcaatatcttatctttttcaagggcttcgttccttaaagttataacctccgatcagaggttttcaagtgctatctgacagctttcgtcttctgcatctttttgagctttcagagccttactaaggattagtccctgccaaatagaaggacgaacaaataataacaataagaattaccacaaaaatagttcactgtaactaaaagtactaaatacgaagccaaaattgtacaaaccttcaagctactgtaagcgaggctatccgcaagttgatcattcgtcatagcggacaaaccaagctcaagcttcggaaacccgcatgttgttcattatctcttggcaaacattgatctctgtactgtcaggaagccagtaaaggaagtcatcctcattttctcctccataaaccaa

SEQ ID NO: 115640 - DNA, 410 bp, Zea Mays
tcggcacgagggatttggtccaagagcatattgcttacagagtatggccccttgcaagtggatgggaaatgccgaaggaggctgccgctgcctccagccaaaatggactaatttatccgaagtacacattttggttcagggatcggtttgacgagccaaatgatgattggttggatgttatagaggcaacaagtgatgagttgcttggagcctactcgaggctaaagacgaagctatgacagtcaccttcggccctcgagggaaaaagagactgaatagggttttcgatgttatcgggtttatctaccctgactactgttttcctattcggaaacaaaaggggaaaaggaaaactgctgcttcggcatcttctagtgcgtcgaaggcgaagaaattgaaggtcttgacac

SEQ ID NO: 115641 - DNA, 689 bp, Zea Mays
ggcggcgtgcgatggaggacgagttccaagccctcatcaccaacaacacttggactctcgttccacgcccgcctcatgccaacgtcgtctaaggcaagtggatattcaaacacaagtttcactctgatggttcccttgagcgctacaaagcgtgttgggtccttcgtggatttactcagcgccctggcgtcgatttcgacgagacttttagtcccgttgtgaagcccgccaccatctgcaccgtcctcagcttggcacttcatcaggactggccgattcatcagttggatgtcaacaatgcgttcctccatggtatcctgactgagacagtctattgcacccaaccagctggttttattgaccctcaacatccagatcacgtatgttgcctcaacaaatcactctacggattgaagcaggctcctcgagcatggtacagttgttttgcgtctcacatccggtctctggggttcattgaggccaagacagatacttcgctcttcatctaccggcatggtactgccagtgcctatttgcttctctacgtagatgacatcatcctgacggcctccacatcagctctgcttcgccagatcatcagttcactacagcagtcctttccgatgaaagaccttggtccactttagcattttctggggattaccgtgactcgttccgccaccggcatg

SEQ ID NO: 115642 - DNA, 279 bp, Zea Mays
gagaaaacagtgagatggtagataggtgcgttgaaaggactatcttcaccaaagtttcacgtcctaccaatgaaaggattgttttcaataacaatgctagtaagtaaaatagggttaatcccacattaaaagtgcaagactctaaccaacttaagaggtggactttgtgtacaccatctacaaagttagaaaaggagactagtgtgtcccacacgctcgctcgaggtgtcgggccatgtcgtgctgtgatgagataaatgttttgccattatataattt

SEQ ID NO: 115643 - DNA, 497 bp, Zea Mays
gttccatttgatatcagagttaattcctctaatattatgtgacaaaattttcaagctgcggtgtaaattctgaggggagaaagtcatggatgaacaataatctttgcactaagaaatcccggtatgcatagcatacaccaatagttcttcataaataagtttgtccataaacagaaatatccagaaaaccaatatataagcatgaagtgggggacttaaatcttcaaaggggccaaactagaagtttccaaaaggagcaaagataacaaataacaaaaattccaaacaccataattatccatgccgagaaccaaagagtcatcgactctttcagagtttgttacggcaaacaaaaatagcgccacatgcgcaccatcaccaacatttatcatgttgctatacatggaaaaccaccaaaagatccaccaaccggggcacagaaaacactgtaaggcccaaaaaggggaggcaaaagccttacaaccccgcaggggcac

SEQ ID NO: 115644 - DNA, 579 bp, Zea Mays
cgaaaaatgtgatttgaacattgtatcgtttttagttattatcacgatttatggcaaaaaaggacttgtcatcaatttgtgaaaaaatactagtgctagaggacaagaacaaggaggaaaacacatactaaacacattttaagcacaacactaaaaaatagtgagggattctaaccacctcaattatctccattacctttgctaaacaaacttttatcaaatattgaatacacgtgggagaagattcagacgtgggggtgggggtggacatgatgggaatgggtgtagcacaaaattgcttgtttgcatattttgttgtgttgaggataaaaaataaaataaatgatacgctgcgcatagctcgccttcgtatataatcatcaccgctacatccaggtacgacacaattatattttctccaaagacgccaatgagtgagtgaatccaagttcggatgcggttgccaaattacttttccccctccatttatttatgcatgatccatccatcgtacagaacttttcaggaaatcatcgtccactttgtagtatcatgtagcgttcggattttttttaaaac

SEQ ID NO: 115645 - DNA, 365 bp, Zea Mays
ggtatgtgtgttcttcttcttgtaagtttctacacatttcccttctttcttagtcctcttcggccttccttagggtgctggtctaccatcctaggacgcagtaaggtcatggtatgacaactagcccatccatcccaccgacccctatgggttcatcagtggagtacctttgagaggacctaggcacgaatcgtgccaccctagaggcggctaacacctaggttcggagtcttcgggtgcgcttagtggttcttaatgatttaggggcgggtaagttcgcacagtctggttctctgattccgaactcttcacgttactaggtattcacaacttccttgcatctgcagagttggaactcgaggctt

SEQ ID NO: 115646 - DNA, 568 bp, Zea Mays
ccggccggccgccgccatggctggagcttccgggcgacaggaacaccattgaacctccaccgaacacttcccctaagttaattccaggaacggcacacagaaacgccctgaccatggtgaccgcgggtaaggcggacgatcacaagcgttcatggtgatctaaggcaacctagttcaattgagcgggtcgacgagcatgatgagggcctagggatgctagaacaagtgacagagagccttggattaacctgagttaggctggccgcagtacgattgttttcacggtggccaagactgtaattgggggaaacgaacgattctcggtcccaggtgaataattcggggcaaagtttggtgcactgatgcgtgattaccctacggagccgcggggacactcaatttatagtgagggtaagcggtggcgtctaatttttgcgcagagagaccgacggccgagacgaagggtgagtcatcggcgcggtctatcgtggcgcgccccggggtgattcctccggcgaggagctaaccttcacaggatgtccatggcgacgtggtaatacgctcggat

SEQ ID NO: 115647 - DNA, 274 bp, Zea Mays
caaatacgtttttcgtgccaccgtgaacacttagccgtggccagccctctgcaggttagttcaagcttctttgattggtgttctagcctccctcaagccccctgttgctcgtagacccattcgattaagctagaccgcaccaaatcgtgaacacctcggattgtctcggattttcgccgtcgtcgtgggcagagatattttggccgggattcatgcaattagtcgagggattagggtcgccaggggtagaatttagtgtcgaccgagtaaggag

SEQ ID NO: 115648 - DNA, 720 bp, Zea Mays
gttcgacaggggaggctagcgcggacacactctaaatggtgaatcgagtgacttgagggggtttatagtggttcaggcaggtacccaatggtcaatgtagtgctgatcttagtattgctcttcgtggcatgttacaaagtgtgcaagttagagtgagagagcgagggagaggagaactgctaccaaatgctcctagctctcttgcctgccttgtttgctgctcagtcgcccccttttatagttaagaggggtggtctttacagagagatgtgttgtttggagaagagtgggatctttatctacggaagctcctataacatggttcctttgacaacgtcttctgacacgcgtgtaatcatacgacaggtatggcaggtcgctctgccatgtcccgttcgtgggctattgtaaagactatggtgttgaggctctctatggtgaaacttagctgatcccatgtcgtagagttggggacgttaagggggtacatggtggcacctcttcctattgatgggactcttcgtcactcccctggcatgtcgtggcgtcagtcaagacggtacttggtggcgacatgccttatcgtggatggcatgggttaatagtgtctgccaagttttcacgctcagcaggtacttgtgtgcgcctccaaggcgcgtgacgaggggttgtggaactggggtcatagatgtgttggcccccgcatctccacatttccgc

SEQ ID NO: 115649 - DNA, 342 bp, Zea Mays
gcacacatggatgccaaaacaagagcgaggagggcatgatcgtacctgtggagagctggccacgacgagctctcacactgcggtgttcttgaccgatttgggggaaatctcaaattagagctctctggtggacaatccgagacatgagttggtgcgctggatgcttgactacctagcggagctgatggcacgcgcaatttataggacccgagggcggtggctcttgaatttggcatggtgcgctggcggctggagagaggggagagcactggcgcaagaggtgcgtgacttttaccgcggcaaggttaccggcgatgaacagacacgccaaggcatgttact

SEQ ID NO: 115650 - DNA, 443 bp, Zea Mays
caaggggaaaagttttctattttgggggaatctcttggaaacgtgcctttgtggaagattttggggagttcttcttgtaaacacatttttataaggatgtctttctttctgtgaggttttttagatgtgccttagagagagacacttttgtcaggggtagtctttgagccattcgggagctttcgctagttgtgttgagcctttgcctctttctggaggaactagctttgattttagcttttgtgttgattttccgctttgatttggctttggctgttgtctagtggtgttgagtccctttctgcctcttcttgaagactagacgttttcttgcttggtcgtgttgagccattgctcatttctttggggatcaagctttgctcactctagatgacttgtttggctattatcttgcttttggtaattcaggtgagcttctcttc

SEQ ID NO: 115651 - DNA, 345 bp, Zea Mays
cgattcacaggcaaggattatccttcgtggcgaagtcaatcgagcagcgcacggttgataaccagaggagaagtggtgctatgattgtggggttctagtcttgttgattggaagtcggatcgtctgtatgacatctccaccaaatcgatagttaccttcacttgatggaagatcgggcacccccgttcctatcaaaattcttcatcactatcactatcatcaataatatcattatcattttataccttccgttcacctctagccatgaggcatatgtgagaagtcgatgatggtgatggtggtggtgaagagaagtccccagcgatggcggtaactttttcatca

SEQ ID NO: 115652 - DNA, 545 bp, Zea Mays
agatggtgggtcctacgggtgtgctcctaaaacttcaaagccgaagctgtgtgcaggtccaggtcctagtctagaggtaggtagtctcaaactatagagactacctcctaggggtcgggccaccaactttttctttggtatactggtatccagcctcgacacgtcgagcctacctcctaggggggccaagtaccaggtggtagttgatgacgctacacacaacaagggaaaataacatacagataagttccagtgctacttgattaacagttcttaaaatatgttacacaaccaaaagttattacagccacccccagcgagaccctcgccttgtctctacaggtacaactattcggtgtcggcaggatcatgctgaaagcgagcggccaccatctccactgcatcttgtacgctctctcggtcgacgtcttctgtggcggctactggaccatcgatcactggtgccaaggatatggcggggtcatgactccggaagcacgtcaggacgtattcaaccaccgcccggtagagcttgttgccctctg

SEQ ID NO: 115653 - DNA, 450 bp, Zea Mays
aatgattgttaaaggtcgaatactcactggacatgtttggtgaggttgtgggtgattgatcatgctagaactcaatgaatcaacatatagagagcacttgtatgttgcactagttaaggaggagcgacactattgtgcgggtgcatcaatgaggacaagtggagagtaccaactcttcgatacctcgggaaaacccatgttcctaactttcccttccctttgagcatttacatttgaggaattcaatccttgtctctacattactagaattctcatgctaaaatacggttggaacttagggtgccaaacttttgtggtagaacaaaaaatgctcttgagcacaaaggggtgaagtgggctattcagactgatttaaatatcacgagagattttagattaactcaattcatccctctcgtgggcatcctgatcctttcaattggaatcaag

SEQ ID NO: 115654 - DNA, 467 bp, Zea Mays
gcacaatggacgacatgaagtgttcccgacgatctaaggggtcatagcttaattggctgggtcggggagcatcagggacacataaggatactgaaacgaaagagcaagaggcatgagcggacctggagcacgctgaccacgacgaggtcacaaggcgcggtgtttcggactgaattggaggaaatccgaaattggggctcgttggtgagcaattgaaggcacggtttggtggcttgggtgcttgactaccttacggacccgacgacacgctcaatttataggctccgggggcggtggcgcgtgaattggagttggcgcggtggcggtcggagaggaaagaggttaccggcgctagcaattcgtggcgttcaccgtggcaagctcaccggcgatgaacagatgagttatggtgactcactatgacatggtaaggctttgaggcacgcagcagggccagataacggcga

SEQ ID NO: 115655 - DNA, 539 bp, Zea Mays
ttcgggggcggagctctgcctcgccgtcgtgcgcagactgccggtggtgagggaggaaagccgggaccattgactcctcgatctacggtggagattggtctggggtaccgcttctggttgcggtgatctttaccgttgatcgaccgatggagggatcagggccgatcgtggtatggcttatcgtgggccatgggatcttgggtgtgtggccaagattgggagtgggcaatgtagatcgtggctgttggatcgcttatgtgcggtgcagatgagatcctagtgtaaccctgcatctcttctaatcggcgccatcggatccgtatcatgcggtcctgattagaagccacgtagtgtgtcctcctctgttgatctcggccatagatctagcatcgggtggctgatacggaataccggttcatttaaaggccaaacagatccgtgccatccggatctaatctaacgaccagaagatcgataccccttcgctacgtcacatttgctaaagagtccctgtgcttaattgaaataaactcgcggtc

SEQ ID NO: 115656 - DNA, 439 bp, Zea Mays
gcattttcttgagattcttgggagtagaagtgagaggaacagtgttatttgttgggaaaacctgggctactctccttttgatttagctgatatggacaccatgatcaatgatgatgagattaagaacgtggttatgggcatgcattcagagaaagcgcctggaccagatggcttcataggacttttctacaagggctgttttgagatgattagagaagacctctccaaagcgatcaatgatttttatcatcacaaatgcaaaagtctgcatctggtcaatgaggcaaacatcgttcttctaccaaaaagggagaacccggacaagatagacctgtttagaccaatcagtctaatacatagttttatgaagattataaccaaaataatggcatccaggctggcaccacgaatgaacgaaattgtttccactacccaaaac

SEQ ID NO: 115657 - DNA, 573 bp, Zea Mays
ggaataattcgggcggttccgccacatgaatggtcaagattcttatgaaaaagttggagctggtatataggagaacaactttggtataggcgaattggtagttcgctatataaaaatcaaagaaaaatgcccgtgaagttgctctgtcaaacgagctaaacggggtcgccatggtacactgtctgaaaaagatctgaggcgcagtgcacctcaccgccgatcccacgacgcaattcgcaccgtcagaaaagattgcggtgagctcggcatggataaacatcgtattgaaaagatcgtggaagggcagtgaacatggaccctggcactggttcatcaatcgtgattcactagctccgtgacgtggctgagcgatcgacgttgtcatggctcccggtgatctcggttgcaccatgccatagaccatgttaccatgtcgtcgtaggtcatgtgagacatccaattaccccccatcgagaccttaccccattgagcgccacgattgatgaactccgatgactcatctcttcaccgccctgagatcatctttgtccaaaactcagagcacccatagcc

SEQ ID NO: 115658 - DNA, 555 bp, Zea Mays
gaagaaaccactccaaagccaaaggatgacgaagtagtggttttcaaaagctttttcagggcaggattgcagtttcccttgaacgagatgattggagaagttttggataattttgagatttttcttcatcagctgacccctaacgccatcgttaggctcagcatcttcatctgggcccttcgaagccaagggatggacccaaatgctgaagctttctgccgagtacatgaattgcattactaaacgaaggccagagaagacgggctacatgaaaatttcggttgttataacttcgcgtatcgcaaggatacgaaggctccggtcctcagctatcgcaccaagtggccaactggctggaagagtgagtggttttatattaaagctgatgagaagaaaagaaggaaactgatgacgatggtgatgagcccgctgtccttaagcttcgggatgaccagacccttgtgcaacatgaagccagggtcagcatgtccgctggccatagcagaattcagagtggtggctgaacaaatcagcaccagggatctagtgcaagaa

SEQ ID NO: 115659 - DNA, 821 bp, Zea Mays
tgacaacatgcatactgctaaatagtgaagacttcacaacaaataacaaaagacacactagagatggaacagggattggtcctaaataagtgtcaagagatctctctggacgcaactaccgcctgaccaatggaaattatcgcctaccatctgaccctgttaatgccatgaccagtcctcagtgcagacgcaacagaaaactctttcattggaaacagagtaggtgcagcgcggcatggatttgaggtagcggaggcaggagtacagactcccaaaaccccaagatccaagcaactacataaacatcgaatcacatatgtgaaataggtttagttggccatatacaaacaaaagttgccgaactgccagcacggtccccacataattaggctcttggattggaccacataattggtttgttaggccacaaaactacttcgtgcttcttatgcatggtatcagttacgctgtcactgtctcttcgtaacagctgatattgattgtcacacagcttcacttttggttcacctaaagacacaagtcctacagaaaatattacttgggatatcttgcatcccttgcataaaaataataaacaaaaataccaggcacatgtcctgcagaaaccaggctacaacaaagatcatctggaatgcctagctcccaagcagagagttgatccaagccaagagtgtgcaagaatcaatgagcatttatcattcaacaaatcaagatttggtcgaaagacctcaaagtaacctttactggagccaatagtcagaatagtggtcctgagtgaagccaactgaaatgcaagtgac

SEQ ID NO: 115660 - DNA, 411 bp, Zea Mays
tggccctattagcttctccttttttttgcggcctcctcgatttttatgctctgaatcttacacacttaaaccccaattctgttcttcaaattattgtgtctgttcacctctgcgaagctttccttggaattcttcctcattttgggctttggaagtacctctaccactgtcggcccaagatggctggaggacagcattagcttgatggcggtgcagcttggaacttcgtcggggcaggaaagtcgaatatctcaatatccctctaaaggacaatatcaagggatggagccttgagtggtttaccaaggaaaaccacaacaagtccctccctcctcgatcagggaggcagcctgacgtctgcacgcccagctggacagagtcccccacagctttagagctagccgagcccgg

SEQ ID NO: 115661 - DNA, 411 bp, Zea Mays
catcattaccggctctccttctggtgtcgtggccacttgagtgtaataaatttgcccagtcttcttaacatttttgcccactgaattattaccatgttccctttgccatgatttgagctcccagagttctgctgattgttggacttattctgcctcagatatggacagtcttttataaaatgaccagacttcccacagttgaagcagccagttgaggaactagggagggcgaggaaacgagcaccaggggcactcggctgatttgtagaagtgggggtagtggaagggcgaatgaaaacaggttgtttgaatggataggagggtgggcgaggcgaagaacgattctgattaaatggtcggattaccaacccggttcacttctcaggtccctgattggacctgtcatcccca

SEQ ID NO: 115662 - DNA, 359 bp, Zea Mays
aatgagtcagttcattcttttaccaaaaagagaggttgctgataggattgacctgtttagatcgataagcctcatcaacagtttcatgaaaataataaccaagattttggcaaatagacttgcgccgagaatgaacgagattgtctccactgcccaaaacatgttcatccaaaaacgatcaattgatgataattttctctatgtccaaaaagtgatacagaatctccataggaaccatcaaccaactctttttgtcaagcttgacatatcaaaagctttcaattccatcaattgggcatttattttagatgtcttgagagctccaggattcacacagaagtggagagattggatcacca

SEQ ID NO: 115663 - DNA, 502 bp, Zea Mays
ttctattgccttttcttcatttcggtaggctctatctcagcaggctctgaaggcccagctttggttttagtttgaattattgtagctctgacttctgcctgttcagtttcagcttcaggttgcgccttagaagcttcgacaatttttctggcagaagcaggattcaaggtttttgctgtttctaatacaacatctagcacatttgccatcctcctcttaggagttgtggcagaactcttttgtgtcttcggcgctgttgcttttgttgaagggcttgaaacctctggtatctttgttacttcttcagtttttgacctttcagccttatctttgtcaaccttcgtttcaactagctcaaccaaaggtgccttcggcattatagtcggctcttcagtcctctgcacgggaggaataatttctcttgtttcagcagctgaagaggcctccccgccaaactcaggcaccacaaccggttcaatgtaacgcggtcggtgggtaagaa

SEQ ID NO: 115664 - DNA, 314 bp, Zea Mays
gttaagtacctgttcaagtacatatacaaaggagatgatcgtgcgtctgttgttatgagagatgcgagcaaggaaaatgatgatgtagatgagatccagcagtatagagatgcaaggtgggtgactcctctggaagcctttattgaggatatatggatttgagcttagtcataactctccatctgtgatgcagctgcaactccatcttccaaacatgcacatggtgacatttcacgagcgacaaatggtcgagcgagtcgtcaaccgtccaggtgctgataggtcaatgattacagcatattttgaggcgaata

SEQ ID NO: 115665 - DNA, 629 bp, Zea Mays
ctagtacttggttggttctctcgggctgcccgtcagtttaaggatgctaggctgagatgaaattcaacttcgtgtccaagcactcgtgcaacttttgccaaaatcgagaagtaaactgggatccccagtgtgacacaatcttcttaggcactccgtgtagacaaactatacgtgccatgtagaactctgctagcctagcacccgaatatgtggtcttcactgggataaagtgggccacttttgtcagtctatcaacaatcaccctaatagagtcatacccagtagatgtgtagggtagaccaacgatgaagtccataccaatttcttcccacttccattcaggtaccttaagcgtgtgtagcaaaccggcaggtctctaatgttcagctttcaccctctggcaaacatcacacaatgctacatgtgaagcaacatccctctttagaccgtaccaccaatacttctgcttcaggtcctagtacatcttagtactaccagggtggatggagtaggccaagtcatgagcttccttcaatatggtttgacaaatactatcaatttcagggacacatattctgttcttgaaccagattgtgccttgatcatcctgtgtgatgtctgaacctctg

SEQ ID NO: 115666 - DNA, 644 bp, Zea Mays
ttgtgaagttaaaagaaaaagaaaactggcgtgccacgcgtgctcaatacccaaacatgctcatggcgagacagaccgacgttacggtgtgactggacgtgatgtgatgtgacactgctgtttgatggtaatcagtgttgacaaccgtttggtttggcttctgcacctataccaagagtagacacctctgttcaaaaaatataatctcacaaacctcatgtatgcttgcttaggagacatgtccctcctttacatgcacggacgcagacctccgaaatgactgtcgtccaagcgcttatcttgctcgtgtgaaggatgtgcaattcgattttttgggacttgatgtatacccataccaagggtacctaagatcactctaaaagcttactctaagaaaatagcaccaccagcaaaatatagccaaggccgaaggcaacccaacctggtcacctcgaccagaacaacccaaaccataatagcctcgacctatcaccctaactatgtgggtacctactagagctattctgaccaagtcatcctgaccaaaactaccatgtcctagtcaccctaactaggttggatccctgatcatagtgatcccgacatgcccccctcggctaggtcaacctcgtccttggtcaccc

SEQ ID NO: 115667 - DNA, 590 bp, Zea Mays
gctggctgtaataaatatatgatggtgagttacgaaggtaaaaacgagcaacaaggcaaaaagtttcaaataaaagtacctataatcatggcgcgttcggcagcttcctcaacttgcttagcctcctcacgggagtcgtgagattctttctcattcttttcaatggcttcatcagccatctcacgaccacccttcatccacacatcggagtagaatttgccgcccagggtagaagcctcaactgaagggtccttagtattgtcagcagagagaatagattctggttgggccgcggccttgacatgttcgcacccagccttttctaagattgccgcaatccctcgggcaccagaaaaagcacaaaaatctccgcaattgctaaggatctcatccaatccttcggcttcttcacctatccattggataaccccttcggggtcgccacgaataaatttttgttctgaggaatacgcccccaccttcgcaaagctatcttttagcttcttcgcgcagtccaaggaattttcataacacctttccctggaatcatgaagctcttcaacattcttttctagccttgaacttgttca

SEQ ID NO: 115668 - DNA, 502 bp, Zea Mays
gtctataataatgcttaattcaatgttttagtcttagtaagtcttagttaaagttagattgcttatcatatgtttggatgcttgtcgtgatgaacttgtaatgaagttggatctttgtaatgattgtcaccaaggtgtgggtatcccctaccacttggtgtagccattaataaagtcagttatttagttaggtaatccctttatttccactttcctctttatctgagaagcgttgtggagagtcagtgaagatgatcaattgttcagtgttatgaagatttccatatatcttttcttatgctgaaagactgcagagtcagatctaatttgtgtgtgcttcctacagatgtctgagaacaggcgccgaggtgcaaggcatgctcagccggagcagcaggcaccccaggaggaggcagctcagcagtagttgccaccgccacccctgatgaccattcagcagatgtttctgatgcagacccaagcagtccaagcaattagtcag

SEQ ID NO: 115669 - DNA, 404 bp, Zea Mays
ggcgttagtgccgtggtctggtttgcccaagggaggaggacgaggtgactgttgttgatccagtggtgtgcagccacgattagacctcgggtaccccttcgagttttttagatctgaatcgtcgatgaaataacgagcgatgcatattagatctgggcttcattaaatcgtgggcgtaggatctagatcctgtggatatcgtggcgtgccgattcagtgtaatttggctctaatctggagcgtagatcttagatcgagcggtcgtggtgcgatcataccccttcggtctggcattttagcacatgaaaccctaggtttccttggaatagaacccgccatccactggagatgtgctctgtgtctacatattcttaccccaagccccctggatttctctggttttg

SEQ ID NO: 115670 - DNA, 344 bp, Zea Mays
ttccttgaggaaacgctacgtacatggtcgtggtgctcggagtttcctagcgcctcagatagctagtccctttcttctcagctacaacaattagttacatcttcttctcaacctccttagtttgtggctcattgaacttggtcttgccctcctatagcttttttgataaatgagcttggaggaagttttggtccctctcctctatcccttcgtatgtatcaggcatgtcggtctcagctgtcgcccgttcttccacccaccactatcccttcttagaggcataccttgttagggccaagtggtgaaagttaatgtttctctttgtgagctctgagaactacttg

SEQ ID NO: 115671 - DNA, 684 bp, Zea Mays
ctcagatgctgtctaacttttctgattttattctgccatttctccaaggccgaagtaccaccccagtcttgtgaccaaatctgagcaaccatatctcgaaacccctccctcagtagccatccgagttcaaacttgaacgtcggttggatattacttgggagactgtctccagtgttaagcaacaagggcgtatggtcagaaatatccctagagtgtgctaccaccgacgccttagggaagtgtagctcccattcagtagacactaggattcgatctagcttttcgtaagttgggttgaccctagaattggcccacgtaaattgtctattcgataactctagttcactgaggttcaatccgtctatgactacgttaaacaagaatgaccacctcgggttaaagttgtcgttgtttttctcagatgacttcctgagaatattaaagtcaccaccaatcaaaactggcaccgttacccgacctaccatgttaaccatttctgccaaaaattcttcttttaagttatcttgcgcaggaccataaacacaaacaactacccatttaaagccatcatttttatttcgcaattcaaatttaacatagaagtcgccttcatctataactcctatatcgaaaaccgagagatctatgcccatcagtattcctcctgatcgccctctaggttcc

SEQ ID NO: 115672 - DNA, 692 bp, Zea Mays
gcaatgtggtgcccctattgacttagtatgaccccaattccactagctgaagcatcagtttctaactcaaatggaagggaaaaatttggcagttgtaacactggtgcagaggataaggccgacttcaaggctataaaagcatcctcatgcacgctagtccaaatgaagagagaatgtttcttcaacaaattggtaagaggttttgccataatagcaaagtgacggacaaattttctgtagtagcctgccaaacccaggaagctgcgaagctgtttacaattagtgggtgttggccatgtggataccgctaaaaccttggtagggtccgtggacactccatgtatagaaataacgtggctgaggtaagaatctcttgtttggcaaaggaacacttggtcagtttaatctgccatttgtccttcctgagcagctgaaagactgattcaaggtgagacaaatggtgagacgatgtagggctgtatattaagatgtcatcaaagaacaccaggactgatttacgcaacagaggtgctagagtttggttcatcgccccttgaaaagtagcaggagcaccagaaagaccaaagggcatcaccttgaattcatagtggccttagcgggtttgaaaagctgttttgtgttggtcagcagaagacatacggatttgatgaaagcctgctctgaggtccaag

SEQ ID NO: 115673 - DNA, 505 bp, Zea Mays
cttcataggaggagatctcaatggccatgtgggtacatctagcactagtttcaagggtgtgcatggaggcttcgactttggactaggattcaagaaggagaggaaatcctgaacttttccctagcctatgacatgtttatagcaaacactttctttagaggaaatcccacctggtgaccttcagtagtggccaacacactagccagattgattttgtcctcttgagaaaagaggacaagcatgcctgcttagattgcaaggttatacctggagagtgtgtggtaacccaacataagcttgtcgtagcttacttccattttaagattcgtttacaacggaataagcataacaaggtcactaaaacaaagtggtggaagcttaaaggggatgtggcccaaactttcaaggagagagttatcgaggagggcccttgggcagaagagggagacacaaacatcatgtggaggaagatggcgacatgcatccaaaagatagcttcagaaga

SEQ ID NO: 115674 - DNA, 523 bp, Zea Mays
cttcgtcggaggctcctactccggtgaagacaagtagacggacctcgggggaactccgtgtcccccggtctacgaagctgaagcacgccttcctccgaaggcccttccggacctcccacgggtccgagctgcagacaggtacatgcagaagtgatcacatccagagacaagggctcccgtgtcaaatgcggataggaaccctgggtcggggcttagccccgcggcaagtgccataccaagaggtgctccgcaactctcccccagctgggaaggaccctccaaggtaacgggagtgcaccgacccaggggcaaccatctagctacgactggaggagtaccttaccccgatgccaaatatctctgtaagttctatccataaagcaagactaaggggtcgagtctgtttcctttttgtaactaaataacgcatacgtgtatgataacccggtggggtctgcccccatgaacccggactattggtctgcacacatgcacgacaagttatgaagaagaaactaccccc

SEQ ID NO: 115675 - DNA, 663 bp, Zea Mays
taaggaagggaaactctaaccctagaagcagctagctaggaatgaggaaggaggacgacgaagtcgtagctgttctctttgatgtctcttgtcgccgttgcttctgcgctcttgtagaagccatcatgtggtctaggtaatgctcgaccaggccaaggctcatacgatggcccaaccgtgatccttgacaggtaattatcgcggaccgtccagctataattcgagtaccgtttggctgtgttgatttgctccagtccaaaggagacaaaattgagcaaaaggatttttagagctggcgtggaccgtccggaaccagggacagaccgtcgacgagtcatcaccgagggaagacaactgttgatctagccgttgggttgtcaaacataatcgttgtaatgtcagtccgaccgttggagggtcatggaatgtccgggccctagccgcggaccgtccaccagtgcagattttggcagatgcgccataacgactatttgggtggttgaagagctataaaagccaccccaaccagcccattcttaggattcacagatccatatcatacacaagagttgggtattcacttctatctactagagcaacacttctatacacatcaaagcctcacaagtgccacaaaagagagatcaagcaagaaagagctac

SEQ ID NO: 115676 - DNA, 377 bp, Zea Mays
gtcgactatacggatctcaacaaacattgtccaaaggatcccttcgggctccctaggatagatcaggtggtagactccaccgctggatgttctgtgctgtctttcctggactgctattccgggtaccatcagattagtttggcaaaggaagacgaggaaaagacagcgttcatcactcccttcggtgctttctgctatacctccatgtcgtttagcctcaaaaacgctggagcgacttatcagagagccattcaaacatgcttagccgatcactagggcaagcgtgtggaagcctacgtagatgatgtggtaatcaaaacggagaactcggaaaacttcatcgaagacttacaactggttttcaacaatctacgacg

SEQ ID NO: 115677 - DNA, 312 bp, Zea Mays
gaattttgctggtaagccaaaatagccacatggagttacctaaatttgttcaactaaataaggaaaaggtaatgtctagactgcaaataatttgtcagtagtaagtagcatgcgtgtgctacacatctacataactagtttgtagcaaactgatggctagtttacttgccattggttttccaggccggtgtctaatccaccagtatggtaacttgtggctggctctcatggttttgagtctcactaactgaatgatctgcttttaattttctgggttttttcctgttctatcccacaagtcacaagacaaag

SEQ ID NO: 115678 - DNA, 285 bp, Zea Mays
tccttcagctgcgagctcaagcgccgacagtcctaaatgagatagtcactaaatctatgatcaaagggcttcgtccaagaccagccacatagtattttgccataaaacctcccaatcctaagagaagcttctttagaaggtggatgaatacattagagcagataatgacttctgccaaagaagggaagaagcccaaaggtatgtagagatgattatgggcttcgagggaaggtttcacccaaggcatgtcagaagcatccacaacccaagccagaatgaagacaa

SEQ ID NO: 115679 - DNA, 422 bp, Zea Mays
tgcgacgtgttaaagctcctaggcacgtggagtatgggcggcaagtggccaacgctggcggattatcacggccggccatagagcaagtgggtacggtgaaccatccagtgaccgggcccgagcttatctaggcgccaagatcttttactcccctcggttatccgctttgcgtcgagcacgaatcacagcgaccggcgcgaattcgagcacgagatcaccggcggcgaggtgcactgcacctgagatattcttcagacactataccatcagaactctcatcagagcgcctgacagagcgatttgcagggccttgatctttgttttttatgtaacaactcacgcacttgtctgcatcaatattgtcgttcaaagaaccagctacaagtttgttataaagaccttactcagttacccactcaatt

SEQ ID NO: 115680 - DNA, 637 bp, Zea Mays
ctttgtctcccttcttttttgtagggcttaattctaagcaacgctttgagagcacagaagaatgctgaggatgaaagttgccagatatcccttagtaaccttcggtcagaggttatcaaactgaggaatgaagctgcagagaaggacaaaattctgctctccttggtggacagagtcaaggctggtgaagccaatcttaccgcgcaattcgaagctcatagagccaaaattgaagacttaaagaaaaaacttgccgagaagaatgaagattttgaagtggctaaagcaaaataggaaataagcgagtggactagcgcaagattgctaaagaatgtagatgagcttcgggattcgaaggagagatattacgaaaaatccttggattgtgccaagaagctaaaagacagttttgcaaaggtgggtgcttactcatccgagcagaaatttattagaggcgaccccgaaggaatcatcgaatggatcggtgaagaagctgaagcttttgaagagatccttagtgatcatggtgatttttgcgcctttgccggtgccagaggggttgcagcaattttggaaaaatctagctgcgagcacgttaaagctgcaacctagacagaggccgtcttcactatggaga

SEQ ID NO: 115681 - DNA, 628 bp, Zea Mays
gtaattacccataaactagatgcctggcactgcactcattcccatgaagatgcctcattcactcagggaaccttacagccttgggatgggatggaatagaggatcaaaatttaccctgcatcctctaaatgttgaagcggaaagtgccttccgggttgacagcttctcctttttgaagattttggttcacaattgttgtcacacactactagaaccattgttggagattgaactaaaaaccgtactcatctgtttgagttttattcactctctattacagaagaattagatgctcgtagcagatgtccactcaggttgagattttgcacattcagcacatatgcttagtgcttaccacgcatcagggtgacatgcgtaaagttgtgtgcttgctatggtgaactacatctagaatttcagggatcattgttttagttgggctcaattgaataccatttaggagaacatgaagctgcttctttagaattggctagatgctagctttggccttttaatatttatggtgcatttatatactgccttatgggttgtattttctctgacataatttcctgctggtgtttatgtagactttgaacccttaactgttatcagaactacctgtcca

SEQ ID NO: 115682 - DNA, 800 bp, Zea Mays
cgaatggggcgggcataggcgaaggggatcttcgggagctctttgagggtgaggagttgaggataatgctgtttaattacagggagatgggtatcattccgaaggttgagccgatgtgttaggcgatgccctcgccgtgtgtatgtaattgtaatggtggtgtggcctgttggtcgtattcgtacgcttgtattgttccggctacgtatatgggcggctttgtgcagagtgtctttgtaatgatagactttgattaacgttattctggctgcgcccttaggtaattgttgcgctgtcttttgaataaaagactttgtttgacgcttctgttgtgctgttccggctgcacccttaggcgacttttgctcggaatgtcttgtaaagaaaagacttcgaataacgctcttgttgagctattccggctgcacccttaggcgacttttgagcggaatgtcttctgaagaaaagacttcaaataacgctcttgttgagctattccgactgcacctttaggcgacttttgcacggagtgtcttctgaaaaatactttgaataacgctcttgttgagctattccggctgcacccttaggcgacttttgcgcggagtgtcttttgaatacaagactgattatcgcacttgttgtgctattccggctgcacccttaggcgactttttgcgcggagtgtcgcacacgagggtagtctgcgctgcctctcgcggtgactttggagtggtcgaatgccgaagaccgttgatgcggtctttttcaacatgttgcatcttagttttttgcggggg

SEQ ID NO: 115683 - DNA, 863 bp, Zea Mays
aaatattcgatcccggtctgtcacaattgaaacaggaagcccgtgcagtttgtaaacacagtccatgaatagctgagccacctttagtgcagagaaaggatgcagtaatgggaggaaatgactgtattttgaaaaggtatcaacgaccaccagaatggtgttggcattggcagaccttggaagaccttccacgaagtccatactaatcacctcccacgcttgcttgggaattggcaagggctgaagcaatcctgggtatttgctgcgatcaggcttggcttgttggcaagtagaacaagaactcacatactgcttgaccatagtcttcatagatggccaagaaaaaatttgtttaattcggcgatatgtcactagaaaaccagaatgacccccaacagggctatcgtgtaatgccaacataatttgctgctgaagatgtatattattgccaacccatacacgacctttgtaccggatgatgcctgaattcactgtatagtgtcccaagtcattgggactaactgttaaggcgaccagcaatttccgagcctgatcatctcccatatagccctccataacctgaagcatccattgaggagtggctgaagacagactaaataattcggatgatggccgtcgtgacaatgcatcggccgctccattgtcaatacccttcttgtacaccactttgtactgcagcccaattaacttggagaacacccgttgctgccacggtgtggtaagccgttgttcagtaaggtgagacaagcttctatggtctgaatatatgaagaattcaccatgttgaaggtactgtcgccacttatcaacagccatgagtatggcgagatactccttttcgt

SEQ ID NO: 115684 - DNA, 369 bp, Zea Mays
tctaactccaatcaaatttcactcctttcttcaacaactcagtcattgttttagcaattctagagaaatctgaaatgaattgtcgatagtatcctgccaatcccagaaaactctgaatctgtcgcacggtggtaggaggcttccaatccatcacttcttgtactttctcaggatcaactgctatcccgtcctgcgaaatggtgtgacctaagaacttgatctcccttagccagaaatcacatttggagaatttggcatacaagcgatgatcgcgcagttgctgaagtactatgtgcaaatgcataatatgctcgtcttcatttcttgaatataccagaatatcattaatgaagaccaccacgaatttgt

SEQ ID NO: 115685 - DNA, 887 bp, Zea Mays
gaaaaaggcaaagaaagctgtgtgctctgtagtggtttctactaattctatagtgttttgtctctatgaattgcaattatagtgtaaatgctgcactcactttttgacagcggcctagcagcctatttgcttcgaattaaagcctgctgctgacatgatgcactgttcactccagatgagagccatagtatagcagcatgggcaggtccagctccagatgagagccatagcatagcagcatgggcaggtccagcagcgagcgagagcagcacattccaccaacccctcatgtgaccacggacaccatggccatccatcaacggtcttctgcacccttgctagtagatgtcacgtcagttctaactaaaacttttcaaaaacactcttcaacaccctagccaactcgtccttggaccctgacccaaactccttccacgccttgcaacgtccttggattacgagtctccatcaaccttataagttgactaattgattttgctgtttgatgatcaacataacttatgaactaacacgcctactagtattttatgtttgtagttcacatgatgcaaagtatgttgaactgaggcagtgaggaaatgacacctcaaagaagacacttaaatccttaaggtttttccaaatctcatgtgtaaatcccaagtcttcgatactctaagacttttggatcaagagtcccacaaatcatattgaaagtttgatcatttaattataggttttcttcctcgcttttgttggatccacaaaggactccttcaaaataccccatatctagctcatagccattacatgtaaacgtattctcttcttccaatagtcatcatttgtcccattgaagtgaggtggcttgccaatatgattagctg

SEQ ID NO: 115686 - DNA, 571 bp, Zea Mays
gaaaaagaaatttgtgtaccaggattggttaccgaagccaaagaaaaggtcagactaattagaaagaatttagaagccactcaaaccaggcaaaagagttaccatgataggaaaaaggtatccttacaattccaagagagagaccatgtgtatcttaaggtctcacccattagaggtgtgcaaagatttggaattaaaggcaagttagcccctcgctatattgaaccttatgagatcataaaagcatgtggaccagtggctcataagttaaatctaccactaaatatgtctgttatacatgatgtgttccacgtgtctaaactaaagaagtgtgtttaagtatcgacagaagttctgatcaagccagagatggaaatagagcctaacctatcatacaaggaacaccctgtcaaaatattggattcaaaggaaagatccactcgcaaaaaggcaatcaagatgtgtaagattcagtggaataatcacactgaagaagaagccacttgggaaactgaggattatctaaacaagaactaccccaagtttctacataaaagtgttggtacgtaac

SEQ ID NO: 115687 - DNA, 364 bp, Zea Mays
tgccagtacccggtgggcaaattttgcagcaatccaacctactgggcatcaggttacctgggaggaattcaagctagcattccgagagcattatgttctagagggagtgctccatatgaaacaagaagagtttatccggttaaagcaagggggagatactgtaatgcagtatctcaataaattcaaccatctctcctactatgccattgaccaagtaaatacatatctgaagaaaaagaattgttttatgaagggactcaatgacaggcttcagcggaaaatggcaacctgcttggaccttacctacagtagggctgtcagtacaacactggtagtggaagctaaaattgcaggacatggaaaa

SEQ ID NO: 115688 - DNA, 793 bp, Zea Mays
taatggcgcacggaaacgtcctgcccacggtgaccgcatgggcaacagaagaacacgggctttcacggcaatctagggcgatctaattcaatcaaaggggtcgaggagcttgaggaggacctaagggcgctagaacaaacaatcaaggcactggaactgacctggagcaagctgtccacgacgagggtaatcgcgcggtgtttttgagcagattggaggaagtgtgaaattggagctctcgggtacaccattggaggcaatactttgtggctgggtgtgtgattatcctacggacctaacggcgcggtcaatttataggaagcaagagcggcggccgggaatttggatgacgacgcgcgacgaccggagaaggagaggagcactggtgcaagcgcttagtggttttcactgtggcgctccctccggcgatcactggatcccttaacgtgactaatcgtgacgtggtaaagtgtctggacacgcagcgcacggcagtgatcgatcaacgacggtgaggtcttatcccgatccaccgatgagcaagggggtacgacgggcttagccgtgaccgagctcgggctgatcccacgcccagatatttactttaccatagttatcccctcgctagtgaacacgaatcacggtgtgaagatcgtcggcggtgaggggggatgaatcgggcatcttcttcagttactgtaccatggcatacatctccggttgactgacaaagcaccttgaagctagattttctcctaaattcgctagacaaccaatctaaggctctgcagca

SEQ ID NO: 115689 - DNA, 285 bp, Zea Mays
atttcagacttgacccaatagggtttaagtggtgctttttgcaaataagtccaaatcttatggtttgatttgcaaatcctcatacatgtgaaccatatgatttgaggtgcccaaataccttggtttttgcactttggtccaaaagtgtgcaacatttacatataaccccctagggtttcaatttggggtttttagtggtccttttagggcttctggtacttctagggttttggtgctataaaatcccattaaaggtgatatcttatgaccatttctaataaggtt

SEQ ID NO: 115690 - DNA, 566 bp, Zea Mays
gtgttcttttcttctttacaacttgcttgttgacagaaaccccaagcatgtcattaatatcaataaaatatgcccggtggtacaagtaatggtgtggttggatgggagggagcaagcatcgatattgatgaaacgaacttataaagcacacatatgctggaaatccatagagcatgagaagtaaacaaactagtaaatatgaaggactatcatcacagaacttgcatatccaaccacctactaatgaaaaccacttaagaaggcattaaaaccactcatggaccaaatttaaagtaaaatctattgattctcaaagtcatcaaattatcataaccttagtccctacattgtaggaaagtcagattatgccatcactaactgaacacggaacataactaagtaaataggggcaaagaaaaggtaacatttcagaccatagatgcaatattaaatttttgcattgcacctcatgtgatcagaattcagaaccataagtgtggcacttgtaagctcgcatgtgtgcaaccaaacgaaatagtaaactgcagacgaagtctcctttgaat

SEQ ID NO: 115691 - DNA, 350 bp, Zea Mays
ggggctgggtaactaccagcaccaccctcgggggctgggttttctgtagcagccacctctaaggctgagggctcccctgtcacctccatgggagtcgggcaactcggaccaacgtcttggcattgaagactgccctccaaagtcgacgatgcacgagacattgctcgggatacctccaatccaacgtctggaatttctgaacaaacagccatcacatcatcagcagttggctctgacagcatatccttagggacgacctcctcgagggcctggtcaaaattcgatattgacagtccttggagactgacaagagccgacagagctggagaaggaatatcacttcccccctc

SEQ ID NO: 115692 - DNA, 421 bp, Zea Mays
tgggttcaacattaacccaagaaatggaaggatgctaccctgttgtgttgtgatcatcatctgaattgttggcgatgagttcgggattttggcatgctttgccttttgagcctaggtaccattttgtagcgtctctatgtataagggaattctcttggtttcagtggtcttttgcaagaaccttttcttttgcagaaattacatctcgtatgtaaatttaggatagtcacctccaaaatgataatctcattcagtcatttttgttatagccgatgaacttgaaatgtatccttgcggcttgattctttgtattccaactcattccaactcggttgcaattgatcacttgaaatggtgtatgctgatgataatggctcattgcttttttggtgacagaagtattgcaggaaggctttcattt

SEQ ID NO: 115693 - DNA, 490 bp, Zea Mays
ctttcatctgcttcgcaaggttagcccctttcttggctgctcatctacttcgcaaggttagcccctttcttggcttctcatttgatttcatctgcttcgcaaggatcgctctccgacgacctcgatcggttttcagctgcgagcgaaccctagccgtgtggtctccctcttctcaggttagatcgatctcctacgacctcgatcggttctcagctgcgagtgaaccctagctgtgtcgtctccctcttctcaggttagtacccttctagatcttctcttctcgtttgtcctcctagtttcctccattactgatctgtgatcttctcgtttgtcgtaaagttcttgtctttgtttatatatctgattagtatacttgccttgctgatctgttgtctagtaccaaactcttgtctttgtttatatatttgattagtatatctgattagtattcctcgttaaattcttgtctagatctgtttacagaataaat

SEQ ID NO: 115694 - DNA, 401 bp, Zea Mays
taacgacgcatgctacgtgtatggcgaaagggacaatggcaggccaaagaaccgctattattgcacacattgttaaccaaatctagggccagataaacattaaaccatctataggaacatcccggatccaacctacaacacatatcatataggtgatcctaggaacatcctactgagagttaatggccacacacgcgaacatggatcaggacctccaaagaagtccaaccaaaacaaaacgatgagactaagcatatgtaaggcagggtgccaaatgcgtatcgctcttctgagttgccacatgcacatgtgcagtttgcatgtcgtggagtgtagctactagtcaaggaatacacatatgatggtgtaaaaatcaatctaacaacaacgcttagtacaag

SEQ ID NO: 115695 - DNA, 1843 bp, Zea Mays
aaaggcatgactcggaactgatagtggccctgatgagttttgaatgccgttttaaactcctcggagacacccatgcgtatctgatggtaacctgaagtcatgtccagactcgaaaagatttcagtacccgccaattcatccagaatttcctccaccactggcatgggaaaccgattcttaatagtcatatcattcaatttgcgataatcgacacaaaaacgccatgtaccatccttcttctgcaccaagaggactggagacgcaaacgggctcacgcttggagtgatcaaaccggatttcaacaagtctgccacttgtcgctcaatctctgtcttatggtgaggggaatatttgtagggccgagcattaactggtatggaccccggaagcaaaggaatgtgatgatcaaatggccgagatggaggtaagactgtaggtgcctcaaaaatatccatgaattctcccagcaacccttgcaaatctgtatgaatttcgttgatgctcactgcagtcacctcttccaacagagcaaacacccagatatcatttccgcgcaaccaccgctccacttgtaaagaagatacctcctgcaccacttgttgttgtggatgatttcccaccaactggacctcgatccctttgtccacaaaactgatcacctgagcttcccaatcacaatgcataggactgtgccttctcaaccaatcatagcctaaaatagcatcataggcccccagccctagcaccctcatatcattctggtatgtgtgtccgttggcccaccactccagtgatcgcaccattgtgtcactatacataatctctccatttgccaccctcactttacatgaagcacaagggtgcacggtcaggcccattcgatcgaccagctgcttgttaataaagctcgtagaactccccgaatccaccaggaccaacatgacttgattctgcagcaaggcgcgcacaaccatacattcgtcattggtagtaccgctgagagcattcagagacaagcgaaaattctcctcttcccctttttcctccaactcaatctgtgtcaatgtttgctctgataaggtcatacccaactcttcatcggtaagagcactcaactgcatctgcacccttttggggcagcgagcttgatggccgggttcaaatttgtcaccacaggtatagcacaaaccattttgcttccgatactctttcaccaatcgctctttagacaactcgggcaacgaaaccgagcttctactgtcagctttgggcacagtactaccaaatcgaccttgactgctagtcgagaagggtttatggcgctgtttatccaagattccctgctgaatactggctaataatgccgctcgttcaacagaagcaggcatatgagatttaaccggtccttgtaattcttgcttgagtcccttaataaaatgagccacatatagagtctcatccaaatcatgattgtggacagaagtggcatatcttgcttcatcaaacagctttttgtactcctccacagaccctgactgtctaatgtccagcaaagactgcatagcctgagaatactcctcggatccaaacttcaacagcaccgcgtcacaaaactcctcccacgaacatggaccatattgaatcttaaaaatctgaaaccacctcttagcattcccctccatgttcaacgatgctgacatcacccaaactgactcagggacccgatacaaagtgaaataatccacacattgatcaatccagatacgaggttcctcccctgcgaatttgggaaatggcatccgtggtattgggagatgcccaccttcaaaatcctcaaccctcc

SEQ ID NO: 115696 - DNA, 724 bp, Zea Mays
tcaatgtagacttccacagtgtttcgtaatagctcgtgaaagatcaaattcatagccctttgataagtagcaccaacattctttagaccaaatgtcataacaacccactcaaataaaccaatgaagcctggacatataaaggccattttagacgcatcttcttcggccatgaaaatctgattatatctggcattaccatcaaggaagctaataattctatttcctgacgcattattgatcaatgtgtcggctatggacatgggatattcatccttaggagttgctctattcaaattgcgaaaatcaatgcatactctgagcttacctgactccttctccactgacacaatattagagacccactctgcgtatctgcaaggtctaataaaattagcttctagcagccggtgaatttcgtccttgattcgtgggagaaggtctagacgaaatgttctagctttttgcttgaaaggtctgaaaccggacttaatgggcatcccgatgctctatgatctcatggcttaatcccggcatctcagtgtaattccaagcaaagcaatctgaatattctttcaatagaccgatcatttcatctctaggatcggtctccagggtcttgttcacaaaagtcggccttggagttttaccatctcctatgtcgatttccttcaaaggatcgacagatgtaaacccctgtcctaatttgtcgagatctctgaattcc

SEQ ID NO: 115697 - DNA, 580 bp, Zea Mays
gaaaaagagacgccttcggcgagtatccagtttggatcgggatgtcggtacctcggttcctactgttgaagaaatgcctgtgactgaatttgctgatgctgatcccaatgggtgtacccaacccgctgctgatcccaatgtgggtgctccatctgttgctgatcccaatgggggtgttgcttctgttgctgatcccaatgggggtgctgtttgtgttgccaatgtagatgacgaggaggaggaagatgaagttcctttgactcagaaaaacagtcggcagttcatcgctagtggttaaagtagtggagttccctctcctgctttgtctgctctcattggtctgcaagaattgtccctggccaactttgatcagactcttgaggatatggttccagagggcttgttatcggagccagtggatgatggtgtgatggaggtttgcgctgatgtgctcgatgctgggttgaggtcatcacgtgcctcgtcgaccttagagcgcgatctcgagggtcgggagactgacttggatcgtcctggtcctatggaagtggatgagggcctgtcgaccttagaggtggct

SEQ ID NO: 115698 - DNA, 337 bp, Zea Mays
tgacttttctccactaaaacttgtttcctagttgtgtgtagggatggcaacgggacgagttctggttgggtgcaacattcacggacccaaacccaaaactcgagacacagacctgaacccaaacccaaatccgatatgggtaaaaactgagctttgaacctgaacctgtggggtctcgaaacccaatctagcacccgtggatctaagattctcttccacctaatgctcactgcactacgtctatgtgttcacggagaggtggcaacacaacctttaacctagaccaaacatagacacagacacaacagaaaaaagttgttctgtagaatgaaatctc

SEQ ID NO: 115699 - DNA, 512 bp, Zea Mays
gttaaatatccatcaaatcgagctccacaaggtcccaaagttcatccaatctattgccttctctgaatatcagggagccttagtctgacagccagacctcagggctgattatctctaatttttgtatgtcaacaatgcctaatctcttaagcaaagttgtacacctatagtagctctagacttttgttgtgttgaccctaggcaaattctttgtatttttagaactgcagagctccaaagtcagcctggcttactgattttcagacttagtcacatgagaggtgtagagtggcctttttgcaaataagcccaaatctcatgatttgatttgaaaatcttcaaatatgtgaaccatatgatttgaggtaccctaataccttggtttttgtacttgggtccaaaagtgtgcaaaatttacatataaccccctagggtttcaatttggggttttcagtggtccttttagggtttctggcactcctagggtttggatgtcactcaagttcattaat

SEQ ID NO: 115700 - DNA, 282 bp, Zea Mays
ctgcctacgatcttctcaccggtaacaaacctaaggttgattactttagagtctttggttgcaaatgcttcattcttaacaagaaagttaagagctcgaagtttgctcctagagtggacgagggtttcttgcttggttatgcatcaaatgctcacggatatcgtgtcttcaacaataccaccggacttgttgaaatagcgatagatgtgacatttgatgaatctaatggctcgcaagggcatgtttctaatgatattgcaggaaatgaaatccctcctaatg

SEQ ID NO: 115701 - DNA, 345 bp, Zea Mays
ggcaaattgaaaagcgatgaaaggcgaatattttcatgatttgtccatagtgagggctgggggagaagacactgtaacccttcctgaaggtgatgaagtggtagtctttaggagcttcatgaaagttgggcttccctttccgctctacaaaatgttggtcgaagttttgaagacattcgagatataccttcataagcttacccccgaagctctaatcagagtgggggtttttatatggcccatgaggagtcagtggttggagctggatgggagatgcttctgcaacattcatgagctatcttaccagatgaagacgatcagaaaagaacaatatcataacaactt

SEQ ID NO: 115702 - DNA, 719 bp, Zea Mays
ctcgatcgcgccttctctaacacatgaatgctcgcccttttctcctccatctccctgaatgctctccctcgccccacttcagatcacacacccatcctagtctccatctccacaacaattccaaagtccaaaatcttttgctttgaaaatgcttggcttctcaaccaattcttcctccccgtcgtgctcccggcttggcactccgcccctgtcctccctgacgctgccgcgatgctggccgcccgcctaaaaaaactaaggcgctccttcaaacactagggctagggctggaaacgagccgagccgaacccagtctggggcgtttacaccgacacaaatcctcctcggtcgctgactgcaccttcatcatcatgttgcttgacaccttggatgaagacataaacctttctcctgctgaatctcaagcccgagggctatgaagatcatggttgtcgtagtctccttgagcgagctaccaactggaaacaaaagaagcaagcagaaagccatcagagaagcagatgaaaatattgctttgcaccatgctcacgcatgtgctcgaaagaagaagtgcttcatcacccgagtataggttggccaagtcgtctactcaggcggggaagaaaaaaacccaaaactatcaccgagtactatgcctcatctatggggggtgctcccgtacctatccctaccttcgacttccagaatctatatcccca

SEQ ID NO: 115703 - DNA, 328 bp, Zea Mays
atctattggaagcagcgtgcggctattaggtgggttactgatggagacatttgctctcgcttctttcacgcccatgctaccattaggcacaggaaaaattcaattgctaccttgactgacgacaatgggatcactttcctcgagcatgaacataaatctggtctcctctgggacgctttcaagtgcagattgggttcgtctgacttttcaggcattggttttgacctcccagaacttttaaccagtaatgagcaacttcacgagttagactcaccgtttactaaattggagattgatagcattataaaactattaccttcggataaat

SEQ ID NO: 115704 - DNA, 380 bp, Zea Mays
cagtgaccttctttctctccggctgccagcgtgccattccaaaattgagtgccaccgcccttggacactataaattgatgcctcagcctgctccgctaagtaattgtgcacccagtgaaccagccctcacctccaatcgtcccccacagctccccaatttggaattttcgccaaatcagtcaagaaccccgccatgtgtgagctcgccgtggctagctctccacaggtccgatcacgccctcctcgttcttgtttcagcactcttgtgtgctcttgatgcttctcgacccgaccaattgagctagaacacgtaggatcaccgggaacgcctcggttcatccgtagttcacgctatcaccgtggacagagagattaggagc

SEQ ID NO: 115705 - DNA, 322 bp, Zea Mays
atccagtatcttctttctgagctcagggtccttgggaacaaccaatcgatctccgaaccataaaattcccttgttgtcctgtcggaaacacttgtatttttctgccttttgcttgatcatgtctttgataacttgaacacccttatcctcaatttgtgccctaactatttgctcttgcaatgtgggctccaccgagatataatttaattcaccggaaggaacaacttccaggttcagcttgcacaattcatcacacagggtggtaacccttgcatccatgctcatacaattgcactgggcctttctgctcaaggcatctgcc

SEQ ID NO: 115706 - DNA, 1020 bp, Zea Mays
ttacctggatcacctgcatgcagccgctgcccctcaaaataagcttggtacacctcgcattaaattctttgataagaatatcataaaagctttgactaaagccgacaagaggaaggtacgccatggggccgaacctttcggacattgtgaagtaagttattcatatttaaccaagtgtattttatgacaaattttatgtcaaatatatgtgctttgtttctagtaccattgtttgcataacaaactcatggtccatttcaactttcactttaattttatattttagtttcgaagctcgaccgagacatgctattcagttgtacctaagctcgatcgccaatccgaggcaagtttatgctgtattatatacatacatttttaagatttatggaacaaatggaataggaatgtggtcatggattcttattatttttgctgaacaaccagccgaagtgcaggaccaacatttttgatgcaccgcgccctgcccctactcctcggtccacttttaacatccaacttccatcgatcaaggagatgatgtcaagtaagatcaacgagatcccacctcgtcatcgatctaaattcacagacaaacttgctgcatatgacttggaggttgacaaggcatgcatagccataaaagacagcattgacaaaattattgagaagcaatatgacatagcagacaagtttatagagcttatcgacgaggtactacgtgccaatttcgataatttagaaaacgagacagatgagccacaacgttcgaggaattcggctgatttagcatgtcagtcatacaattatccattttcatacattcagaacctttaacagactacatgtgcataggggttttttatatgtacagtaaacaacattttgttatttttagtatatgcagtaacatttgatctataatgcaagttttgacatacattattttcaatataattgtgtacaaggacacactgtgcatgccacccaacccacaccggatctgtcatcccaagcatc

SEQ ID NO: 115707 - DNA, 273 bp, Zea Mays
ttcggttgatgtggtatatggattacgtccaggcttaacgacaatcaagggaaggctatgttcggggttaccggcagttcgaaaaactgcatctaggggtaccgatagtttggaactatgtctatggttgccagtattttcaatgttgtgtttatcacctgaatcatttgaatttgaaggacaattcatggagcgaccacccatgaaaaatcgtacaaccatgaacaagtatgggcacgacttgacatagtaagtggtggaatcaagttatgg

SEQ ID NO: 115708 - DNA, 376 bp, Zea Mays
cattaatccatagcttatctctgaccgcctcctaaactgtcgtcctgttaatcattctgctaggaattgtctccataaggcgaggggcaatatcagctactcgctgctctccaatccaatgatcaccccaaaagagaatggaggccccatttccgaccttagattgcatggccatttttaagaaatctcgaatttgttttggaacatgaagaggtagagaagactaggggcggtttggctcaattttttgcagccaaccccaccgcatcttgagtgcccatcctagctctgaagatacccagtccttcgagctcaaggggtctacacactcttccctaggccacgagacaatgtcttcctctagcatcttttcgac

SEQ ID NO: 115709 - DNA, 721 bp, Zea Mays
gcgggtcttttggacagccaaatcaagaatcttaactggcttctctcggtactaaagatctttctgaatctgcactgcctcttcttcgatgtgactttttggtgcttgcaggcatttgcggagttgggatacgtgaaacacattgtggatgtcagacatggactctggtagttcaagacggtatgctgcgggtcccactctgccaatgatgggatagggaccgacgaatcgcggtgctagttttcctttcacttggaacctcctgacaccatgcatcggggagaccttgaggtagacgaagtctccttcttcaaatctgagctctctccgcctattgtctgcataactcttctgccgactctgagcttcaagtaatctcctgcggatcagagcaactttctcttctgcctctttgacaaaggcaggtccttctagtgctttttcccctacgttggaccacatgagaggtgtctggcattttcgtccatacaactcttcgaatggtgacatcttgatgctggcctgatagctgttgttgtatgagaactctgcgtagggtagactggattcccaacttctatcgaatgctagcacacatgctcttaatagatcttcgaggactttgttaactctttctgtctgcccgtctgtctgagggtgataagcggtgctgaaatctagcttggtgcccatcgctttctgaaggcttatccagaatttg

SEQ ID NO: 115710 - DNA, 327 bp, Zea Mays
ctttttccctcggtcattcactcattcagtacacatttgttcaattaagtcatttcattacagtttcgtttattccgttacagtttctgtcatttcattacagttttagttatcccgttacagttttagtaattctgttaccgttacagttttagtcgtccgatcggagcgcgggcccaagcctaaattttacataacatgttttcttcgttcgatagtgttaaactgctgatgtgtgcaagagaaccccacgtgacactaccccttgtctgcaaatagagcttgttcaaggttgagtctaggatttaggcttgggctgtgaagctt

SEQ ID NO: 115711 - DNA, 375 bp, Zea Mays
gcattgtaccatcatgatagttcatcagaacaactgatagagcaggtttggggtcaatttgctccatattttatgtggtgacccaaccatcaccctgtatcaaagttgaagcttaataaaccagctttaactttgctacattgtgcacccacaaaaagtcacaggatcttatttaaattgactcctaagttcatccaatctcactgtcagtctgaattcagacttagggcagtctgacagcccaactttgagctcattttactccaaattttcagtctgaccaaggcttaatccctatagcaaagttgttctcctttagtagctttacaaacttgatgtgttgaccctaggcaaattcctcataatttggtagat

SEQ ID NO: 115712 - DNA, 283 bp, Zea Mays
tgcaagcagatagaatatgctcgaatataagggtggaaataagggggatagggttccccagtgacctaatagtaatagacacccttggagtagatgtcatcctagggatgaattggttaatgaaatatgaagcgaatgttagttgtgacaagaggaccgtaacattgaagtccccatccggagaggaggtagtggctgagctaaggatgcctaaatcagcggagggagattgtcaccagatttcagttgatagtaaggaggccaaaccgctagaggctattaa

SEQ ID NO: 115713 - DNA, 403 bp, Zea Mays
ggataacgccatggcaaggacttgaactttagggggattccttccttctagttgagcttccagggctgcgatccttgtgtgtgcatcctccagctccaagtgtaccctagagaggtccaaggtagcactatctaggtcggtgttaagacctgccaccacaccagctatggtgttgagacgatcttcttcagctccacctagaacaatgctggtctggctttctccacgaatacacagaggaagatgcctgtacttcgtgttgtgcaactactgccggtaggtgtggctgagggaccactgagttcgccttgcaacatcgctgaccgaagtagcgtaggtggatagcggcgttagagactcatgagctgacagagtcctgaaccctctatcacttgcatccatc

SEQ ID NO: 115714 - DNA, 594 bp, Zea Mays
gatgctgaacccttgtagaatggtttatgcagcgatatttaatgagggcatctatttttgtttcatactacacttgataatatgttatcatattcacataaactacattgcttcacatacagaagttcttttttggttcatattgatttatggtgcctgttcgttatgctttagcaattgggtaatgaccttccaaagcatatgtgcttcatgttgtgctgcttggtggtggctaaaatcatataactaggttgtttaaatggcatgctatgtacttgttactcagtctatttttctagagtttatgatttactgaacacaaactcatttatacctgcatctccctttcttttattgtcaaactatactatgtcaatttgattttgagtataagtagcatgcatcatttttacattgtgtaacttcagaaaattttgagcatgtgaaagcagcaagggtctcctggaaggctgcaacttttggaaaacaaagaagtagatgattacatttttgtttacggttcagtgtttttattatttcttatagaggttgtagaatatggccattgtttttcttatgttttattgatttata

SEQ ID NO: 115715 - DNA, 458 bp, Zea Mays
gttttgcccataaaaagacccccatccaaatgaccttgagttagcaagtgaacccttttaaaaaaaattatgcttgtgttggcgttttctagcccttgtgtgtttcacccttgaagttgcacctacacaacttgtagacacccatagcttgacccctaaatcgactaaaacttccttgtgcacttgttgcgtcaaaagaaattattgttggtgtctagttgcgcaaaccctatcaaggccacgtttctttccataaatccttgcccctaaaacttcatagcatttctgtcgatcatcctagctgatcctgtttgcctacctctcctttcgcctggatctaataatcctttttcttgtgaatcatgtttgctttatcatccgaatctctagatcccttattgattctgccccgttatctggttatctcctataacccgttctcaagcatcggatgttga

SEQ ID NO: 115716 - DNA, 293 bp, Zea Mays
gtgcataccacccacaagacagaaaagtatgcagaaatctatgtggatcaaatagtgcgattacatggtatcccaaagaccattatatctgacagcggagcactgtttgtggcactcttttgggagcagctgcaagaatcacttgggacccatgtcatatgaagctcagcataccatccccaaacagatggccagacagaaagggtaaaccagattttggaagatatgttaagggcatgtgcactacactacggaaaggattgggacaagtgtctttccttggcagagttttc

SEQ ID NO: 115717 - DNA, 664 bp, Zea Mays
cccgtttttttttcaggagaaagactctgtcgttgtggtgtttctgctggattgaaattaagctgatgactggcatgcatatcatgtcgattcctttcgccggagaagagatcaagtcatgccccatttttttcccacgaattctttgttaagatcagtaccggttcaaatttatcgtactcttgatgtcactgtggcagatattaagtaggtttcgtatgaactgatgaccatctgggctgatccattgtatcagataccatcgtatgtgtgcggaccgctgaaagccggaaaacttggtcattggtctcatctcagtccgaacaggcacgaaactgtgtgccgattctatatattcatcacaaattaacctcgtttggttgcactaggattaaagttggttgaatataaaagagatttaatccactcgaatcccccaatatccacctctaacgaataagctctaaaggagcaataagccaccttagaatggcgcgtacgaaaaaaagagtgaattacataggaagcaggctcaccacctctgaaaacacatgtatatattgatgatgcaaatagttgtcaatttatcatacttggagtttccaccgtcaacaggctactatagcgtctcttggtaattggttgatttgtagttctattacga

SEQ ID NO: 115718 - DNA, 535 bp, Zea Mays
gaggagtgagttgaaaaagactccgagccaattagatacctccaacgtggagtagggaaatatttgaggcttcgctgaaccacgagataaattatgtgtcttctcacgttcatgcatgatcttgacgtatcctaaatctccttcgcgttctccaagccattcaccttgttgtattcttccctacacaaagaggcaagtaatatcgtggtggcttgagtgttgtggtggatgatttgttctgcctccaccggattgtagtccacatcgttgttatctagtgtctccattcctacctcaactaatgccaaatacttggatcgtgtgagtacaaatgccctctcatactatggctccaccaagaatattcctcatcatcaaaatgtggcggttttccaagtgaaaccaatagtaaggtagtagtagtattgggaggaatgcgagaatcattaaaagacattcgagaatagtttgatttaatcgtctttcgttgatgtcgccacttgtaggtgaatacgttgctacttgagcttcatgt

SEQ ID NO: 115719 - DNA, 312 bp, Zea Mays
aatgccacagcagagatgatgtgggttcagaaacttctaactgaactcaaggtaacacatccacgggctgctagattgtggtgtgataacctgggggcaaaatacctgtcggccaatcctgtgttccatgctagaacaaaacatatagagatagatttccatttcgtcagagaacgagtggcacagaagcttttggacatccggttcatcaacttcggtgatcagttggcagatgggttcactaaggctatcaccgctgcaaagcttcgacagtttaggaccaatctcaaccttgtaagtggctgagattga

SEQ ID NO: 115720 - DNA, 557 bp, Zea Mays
ccaaggccctggctcaatatatgcacctatggcttgttatcacatgtgggtaagtggggagaaggggcacaaaaacattagaaaccatggcttaattaagtaataataatgatagaagggataccctagcttttcatgtatcttcaccttggaaaaagatgttcaaaccctagcaccccctcttgagccattatacccccaagcattggattagtgggaaaactatgcaaatgaccatttcatgacttaaaccttataccaaagttgaagtacatttatatatctacaagaaatagtaaaggaattattccaaaaaggtcctacgaaacccccaaattcagcccccaagtggagagtaatatagagtaacccacattttctctaagtaaaaaatcagcccacttccaaagattagagatgttcacctagttgctggcgccaaatccataaggtccaattgacaaaaaggagccaaattacccaatgcacacccctgaaaaatttgaaaccaaaccagaatagtgccgacacccctgacttggcgccaccatatctcc

SEQ ID NO: 115721 - DNA, 527 bp, Zea Mays
taaagatgtacctaaaatagccttcactacaagatatggactaaatgagtttttggttatgtcatttggattaaccaatgcaccggcctactttatgaacttcataaataaagtattcaagaaatatcttgacaagtttgtggttgtgttcatcgacgacatactagtatactcagaatgaagaaacacatgaagatcatcccagactagttctgcagaagcttcgtgacaaccagttgtatgcgaaattctcaaagtgtgatttttggctgaaggaagtcgctttccaaggtcatattatcacagatggaggaatcaaggtagaccccgttaaaataagtgaaatattaaattcgaagcaaccaacagatgtgtccaagatcaggagttttcttggattagcaagatattacagaatattcattgaaggcttctccaaaatagtgaaatcccttacttcactgctggagaaaggtaaagagtttaagtgggatgaagcatgtcaaaagtgttttgatgaattaaag

SEQ ID NO: 115722 - DNA, 657 bp, Zea Mays
tttcaggtgagaattctgcagcctgtgtctattgggcagatgctgcagtctgtgtcattttagccctaggtgacccgacatacacaagtagaacggagtggaacatcaaataaacaagcagagaaaacgagccataattttcattcctaacttggcacaaactaatgtacatagctcgactaaacaaacacgataagctttaccttgagatagtatggtcgatgatggctgtgaggccggtgtagttggaagtgtgttgccaccatccatttctgcatttatagcattcacttggaaggaaacactgctataaataattgtgctttcggtgaagctaacattccactcgaaagacttctccagtaggtttgtaatttcgtttggaatgaaaccaggtggattagttgatatgagggtgtccacatttttttaatgaggcgctgcgccatccgtccaaagaagataaactcggcggtgtcagtgtcgtcttcagcggtgaggcatatcttgtacgtgcagagagtggtttgattggtagacatcactaaacatggaatctgtagacagtgaaggccttagttcaatttagatctaggttttggccgagacactaaatatgtcctctagttgccatggtctgttttcacaaggtttctt

SEQ ID NO: 115723 - DNA, 483 bp, Zea Mays
tctaaatagccgcatggagccccatcccacggcgacccggacagcgagggaggtagtagatggggcgcgcggtgttggcacgccgggcgtcgggtctgagagcagagagggcgcgcgagcgttctagagatggcgttcagcgcaccgagctgcaggaggaggaagccgcatagcatcggcttttatgcacaggaggggcaagtccgagtgaatgttgttggttcacggcgagaaatccgggcggagtttggttgaggtgcccgtggaagtcgcacatttggttggagatcatttaggggaagaagataacactgtcagctgggacccacgcgcaggagaccaggtgggcagtgggctgcgcggagtggtaagtgggccgagcagaggaaaaccggcccaggtggttgtttcgtttgttctctttttttttctaattttattttcctttccaaatttaagactccaattcaaattcaaattcta

SEQ ID NO: 115724 - DNA, 582 bp, Zea Mays
atcaattgtcatgtcaagaatactagagaatcattttctgactatagcttgacgttgcctttcattcaatatctgaatggacgcaagaacatctcctgggttgcatatgatgttgagtctctgtaatgaaaaggtagatagatggataaatatgttaatacttaaatatcacaatttatgcgttcttatttatacaaagttccttgtcctatgactgttttggattaatgagctaagataatgtagaaagctatatctttcagcacataaggtatgtattgtgattagatgcatgattaaaatattggaaacgattaatttctgcaatgttgtaaactcacctgcgtcttgtttggggcatccattaagatattgcacttcttttttggtggctcaaagtcatcatcaccatccacattaggcataggaatctttttagcatcggctgcatccacatttgtagggtcgcccatgtcagccgagcgcggaatgtcaacactgaaacattcttgacttgactcaatgattaaacgcttcagattggttgggggtcgatcaaccttccgcattattgaagcagca

SEQ ID NO: 115725 - DNA, 890 bp, Zea Mays
gtttagttcatcctgtttgcagcatttacggttgttcatttgatcttgcactggctgtactgctcaattaattagcttgtaaatgagaaactgccatggttggttgcggtttcgttgaaaaattattcaggtttttggatgctattccgttctagagcttccagaatccaaggagatattgttttccctgcatccctgttttggactataagacgtactttgtggttgtcgtttagttaatcgcttttctattcggtattcatttcatcgcgttccagctgtaacgcttaactagattgcactaactgagaaactgatgtagttgtttgctgtttgttttcaaattattcagtttttgagtggtattctgatgtcaaacttccagaattcaaggatatattcttcgcattccttttgtcacattttttctgtttttatgacatgctttgcggttgttgtttagttcattctgtgtgtagcatttaacaccattcattccgttgtgcacagactgtaacacaaaagaaaaagattgtaactgagaaactgccatagcggtttctgctggcacattgacaactgtaaatgcaggatgtttctgttcaaatatctccttttggcaaatttatttccataaatccctacatgatccccatgcttcatgattttggttatgagaatttggtctatattagtatttgttgttatagaatctgttggagaggagagcttgattactcttccttgcctcggaagtcttaccggaacaatcggcatcagagtggcttttcacatttttataggccctagaactagaaattctgctcatgcttttatccttgttatagatgggcagccctagtcccaatgagtcactagtttggtgttcg

SEQ ID NO: 115726 - DNA, 447 bp, Zea Mays
ccaatatgtcattgagttgcttggcacattgctactgaggaaaaagaccaggtcaaccacttagcctagctttagctccaccaatgcttacacaatttttttgtaactaaaaatataattatacaaggttcgccacaccatcatcaagtgccacgatatgaacagaaaaataatatacaatggataaaagcaccaaacgttatggtcaaatgaacttaagcaaaagcaggcataagtgtttggatgcaaagagaaggattagagaaatggtatatcctatttttctgatattccgatactctcgaaaaggttgaatatccaaacttcccacttgcttttactatttcgtgattattgcaaattaaggctgccaaacttaaagaacttctgatctcacatgtatccattagaatccacagaaactacagtggaaatcattgttagttg

SEQ ID NO: 115727 - DNA, 301 bp, Zea Mays
tattctcaccctcacttttttgtttggtttatggagttgaataggttcatctgccaccaccctatcccttgcaaactaataattagtacaaacatgagggatgtactcattggttggttcctcaaaatacattcgaagtgcacccaccccaatagctgtggcaatgcccatttctcctttgagactctctaagaaggcatttttagatgttcgaactgatataggtttgaaaagttttcctagctgaaaattacaattgacggcttattgacagttatcatgtgcgcatggggctgcaaaa

SEQ ID NO: 115728 - DNA, 1004 bp, Zea Mays
acccacggtcggccacttcccttccacttgcgctcgtgcttataaaggccaccctaaccctcaggcaatacctctgacactcctccagcctagtgccaagctctacccgagaccttgtcaaatccggtgagctcagcgccccaccattgcctccgagtgccagccaccgcaaccaatcgacccaggtcatgttccatcccactccgttgctctgaaaacttccctagagcattgagaggaatcaccaagctatagcacaagctaagacccaccgaaatagtgggatcggcatcaccaatgctcggtaatccgccgacgaacgtgggccaacctccacataccaccatcgtccaattcctctgagggtcagcgctccaccaaccctgtggagcttccttaccgaccggaccaagctctactgccattgttggccagaatttggtgccgccatcgaccaccaccacctgcgagcgtggaccgagcagcaccggccatcttcgacactgacctgaccaccaacgtgatccccaggacctccccgacctcaccaaccacctcaccagagtgctaccgcctccggtaagccgctccatcatttccttttgccatggatactgttcctccagccatggaccgcgagtttagattttagaaaccgaagggttttactgctaagtccgaaactcaagcgaatagtgcaccgatgactgttttgtgaggaaggaaagaaggaaagcccagggacccaagctctaattgtgttttctttttaattttcaattcaaattcaattattctacagagaacttataaaaagcataacttgaagaatatttatccaaatttgatcaaacaaattttgctagactttgtacatgttacactttagagaaaaataggtaactccctagtccaatactgtttctggaagatgttatgaaatttaagatatgagctaaaatgtgaaaataaaagtacaaatagtgagactattgcaccatggc

SEQ ID NO: 115729 - DNA, 734 bp, Zea Mays
tcaattttaggaatcaaagtgacaagaccaaagttgagacgtttgatgtcaagctccccatcataaaaatctttgaataagttccacaaatcattatggatgatatcccaaaaatcttggaagaattcagcaggaataccatcggggccaggagcactgttgtgttttaagctaaacacaaccaatttaatttcatcaatagtaaaaggagcagtgagccgaatacgatcctcctcactaagcatatccatatgaaaattagacatactaatgctcgacacaggagaaggaccaaaaagatctttgtaaaaatcagtggccactttgttgatattaacatcatttttaatatcattttcctcatgaactaaggataaaattctaattcttcttttttttcctttagcaataagatgaaaatacttggagttttcatcaccatcattaatgaatttttctctagccatttgtttttttttgcagcaatcttcaatcatcaaattctttaagttccattccaagtctaatttttcaagtctttcctcatgagaaataccaaaactttcactttttttgtcaatgagatcaattttttgacttaactctttcttaagtttagaatacttgccttcaacattactattccatcctttcaaagattttttcagtcttttaattttttctttccaaatatcaatattagagcgacttctaaccggaagggaccaactctt

SEQ ID NO: 115730 - DNA, 416 bp, Zea Mays
aaagaatgcagttcttttgtttatccactattgcatgcttttttgtttgtgcgtttgaaggctcgctggcattttagaggtaatgtccgagtgatgattgtgatccttgcttttctgggttatgatctggcactctttgcgcccgatttattgagccaactcatatttatgccgatgtgtcttcttgagttccgaaccctaaatcttgcttttctcctccgccgcttctttgttttctgagttcttgagcctgcccacttcgcttgagagattgcgatggtccccaagaggaagagacagagtgctgctgctctaatcgttccgcccattgatcctagtagccagcttccgtttgccgataaccatatgtccatcatttctgagtctgatctcttgcatcttgtggaaactggggt

SEQ ID NO: 115731 - DNA, 436 bp, Zea Mays
ttgagatattatttgatgattgttctaattatgattcatggtctactagtgtgataaatgcttttaaaaccgtagatccacggttagaacaaattatagacaagagtatttttccctctagttttaatggaaaaattaattccgaggaggatcaaagatgttatcgcttaaactatctagcttttgacatcttaactaattctcttagcaatgaagattatcgtgccttcatatcaaactatgatgaatccattcatgatgcacatgatatttggactaaaataaaaactaaatttgatgagtccaaacataatagttcatttgatgcttctacttcctttagttcttgtgatactaacccttgcaaggaggaagaggaaaatgaacgatggaggccaaacgatgaatccacctctccaaaaggtttgtctttcca

SEQ ID NO: 115732 - DNA, 533 bp, Zea Mays
gggggagggagtcgcctaggaaggggggactaggggaagactttaacggcgagggcgaagaggcgctagggaggagagctctagcgaggggctcgaaggcaaaaaacggtggctcggtggcataaagcagagcagcagacacgagcaatggcacatgcggagaggagcgacagagcagaggaaggaggaggtgagcgcatccgactttaatagccgagggagggaagggagaggtcaatagagggaagatgaaaaggaagcaccggtagacaccattaatggtggtgggagaacaatgggaatgggaggagaaagtttggcgcggtgtcgatgcctccatccggggaggcgagatggctatgcaggatgcgcgaggggcgagcgcgacaaagcaaagggcaacagagcttgaagatggaccccatgacggatatggccctacaagcagtgagaaagaggtggaggtgtggggcgcgtgggttggctacgttggggtggattcagccgatgggacaagcgcgagagggcttttt

SEQ ID NO: 115733 - DNA, 494 bp, Zea Mays
agtacagaacttgtagccactcaaacaaagttaagaaaacatgaaccatacaagaaaattgaatgtaaattataatgcttcccaagcaataacagaagtacataacttcaataaactaaaaatgcatcatggcacaaataagaaaaacacaaaataagagcttttctagcacattcatttccatgatgaaatacagtggaactggactcacattcttaaagaatggatttgcaaattaaaataaatacgatacctacagtaaacaaatgtttaagtgcaaccttgtctagtacaagtaaatgcaccctcaaactcacaagtgaggccttgaaagagtattgctatatattataaacacaccactggtctccaaatacaaaacacaaggagggccgagatcacaaaccattactcttagcaaaaacccaaaaggcgctcttcatttcaaagccacacagaagtgctgagttagtaaaatagtctcaaccacaaaa

SEQ ID NO: 115734 - DNA, 387 bp, Zea Mays
gagggatgagaggctcccaagtctctttatcgtggtgggtgtggtttagagagtggagccttagctaagtcttcgcttcgcggcgatcgacgaggctccgacctctgtgtcctcgtcgttgcatcctccttctgttcgttgatctttctggacgtcttctcgtttggggtccatccttgtgttcgtccgtgtcttggggatccataagtctactagccaaagtatgagagtccaacccccatttttgggctggcctcctccttttataggccaaagaggaggtctactagcggtggcttccttaagaaggagccaccggacgatgctaaaaccaagcatcctaccatggggtaaagccacgcgtgctgtgggcctcgaggtcgcctg

SEQ ID NO: 115735 - DNA, 578 bp, Zea Mays
tttggtgtgttgtactctgtatcttctaatttcagtataatcagatgcatgtcttcctttttcttagaattgtaccctaactatggatgcagataatgagatcgatatattttgaagggcactcaaacttcatcatactggattaaaagttgaacagtcttattttgttgctaaaatctgtgggttgacatcgacacacagatagggctcaagatggaaataaatgggcaaaggcataaaatgaagcctatgctaggattcgtacttgaaatatttggctttgatactttgttagagtggatgtactaaccacatgaagctaaaagattaagccatatggagaaggtacgcaatccactcatacactttaacattaccatgtgaactgcttacaaccattagcaaaagtcatttgccaatatcagcgcacaaaacaggaacaaactatcactccatagctcttctctctgatgggcaatacagggggatgtgcctctctttagtgcaagaataaaatatatgtaaatattgatgtattatgagcaactgcctactgtacagtcaaaacctttccaaac

SEQ ID NO: 115736 - DNA, 670 bp, Zea Mays
atgcaaccagaatgcggaggagaagaccctacgtgaacgtccatggaagtgtgagagggagaaccgactcggacaccctcaggggctgggtcatagctcgcgctacccatccgagccaggtcatccccggcaacaccctcggggctgggtaagcgccagcgccattcttgagggccgagctctccgtaacagccacctctaaggctgaaggaccttcacccacttccatgggagcagaacaatccagactagcctcctgacccttaagaccgtgctctaaggtcgatgaggcatgggacgctgctcgagataactctagcccagcatcaggcacctcagcacaaatatccatcattccaccatctgccggctccgacaacagatcttctgggaccatgtcttcaagagtctgatcaaagtttgccagagacaattcttgcagaccaatgagggcagacaaagctagagaaggaacaccactactttccccgctgactatgtagcgtcggctgttcttccgaactagagggatttcatcctcctcttcctcatcttcatcaacaatgcggacggtacacccattgggatcagcttcagctggatcacacccattggggtcagcatcatctaggtcacacccattgggttcagcatcagtcaggtcacaccc

SEQ ID NO: 115737 - DNA, 448 bp, Zea Mays
caagatgtatcatgaccttagatccttgtactggtggaccagaatgaagagggaaattgcgaagtatatagctgaatgcgacacttgccagagagtcaaggccagtcatttgaaggtagcaggcaccttacagccccttcccataccatcctggaaatgggaggatatttgcatggattcattgtggtattgcccaatacctccctacaccacgattctatttgggtcattatggacagattgaccaagacagctcatttcttgccggtgcacaccacccacagggcagagaaatatacagaaatctacattgaccagatagtttgcttgcatagaataccaaggactatcgtatcagacagaggagcaccattcgtggcacgtttttgggagcaattgcaagaatcacttgggactcatgtaataagaagctccgcataccaccctc

SEQ ID NO: 115738 - DNA, 410 bp, Zea Mays
attgcgtgctcgcacaggctaaccgagagatcagtgagtactgaaaaaatcatctagagaaaaatattgaagaacttcgcgaatcaaaggaaaggtgcttcgagaaatccttggattgtgtgaagaaattaaaaactagcttcgccaaagtgggtgcctactctgctgaagaaaacttcatatgaggcgaccccgagggcgtcgttgaatggataagtggagaagccgaagccttcgaagaaattttgagttatcacggggatgtttgcacgttttccagtgcacggggaatttcaaccatgttggacaaggccagatgtgatcacattaaagccatagcctaggccgaagctgccttcttcgtagatgatacgaaggatccttcggctgaagcaaccttaatgggcggg

SEQ ID NO: 115739 - DNA, 306 bp, Zea Mays
gttccatgtatcccagttgaagaagtgcctacggattcctgatcaaaccatcgatgtggtggatgttgctttggaactagatttgacttattcagaacatcccattcgagttttggatcagaaggataggatcactcaaaaaagcaccctcaaattttataaggtacaatggaaccagcatactaaagatgaagctacctgggatactcaagaatccttggagaaaaaatttcctaggtttttagcttcatgtaacttgtaagatgtgtatatctgaatgtagagttggaataaaccccataccac

SEQ ID NO: 115740 - DNA, 661 bp, Zea Mays
attcgggtcagcttcaataaggtcacacccattgggatcagctggtgcacggtcacacccattggggtcaatttcaacaggtacaccaccaatgagatcaacctcagtaaagacctctgctggtacttcttcacaaacaggagcagaagggccagcatcctggtccaagcatgacagtcgccgaagccatctctttttcttcttcttctcctcaacaagcgcagttgggtgactgacttggcgaggacgctttgggcgaataccatcaggctttcgagtgtccactgttttatcaagctcttgtataaccgtaacagccattgctttagcaggggccgagtcagaagattctccagccaacatattgagtacaacatctatttctccatcatctggactcgctggcatctcaaaatgaacttgcctctcatcattaggaagatcacaaagaggagcaaccagagcctcaatatcttcaggagagggtcgcactctaagacccagaccactatcaccagcaggagggttggacacgaaattgaaaaaggacttaggagatggcagattccaagtagagtaggcaacaggagcatcaacatttgatactttgcctctcaagatcatgtctagtcggctcaccagatcctcagtaggaattctc

SEQ ID NO: 115741 - DNA, 402 bp, Zea Mays
gggttcttcttagtgctaactcaagaaccattatctcatgttaatcaaattgagcaaaagacaccaaaaacttgggaacacaaattcaactaagtctttttgtcttaagaatcatgcctaaatcatatcatgcactcaaagtggggaaaatgtctaaaccctagaataaccttaaatgggccatttaagtaaaaagaaagaaattggtaaaaagaccatgaaaaacatggaatcatggcttaggccaattataaaagttgaaatacactaattaagctacaataaatattagaaaagtttagccaaaataattaattaaaatccccaaaaaggccatccaagtgggagctctctagggaaatatgaaaattcagatttctgaatttcagccctcacctagaa

SEQ ID NO: 115742 - DNA, 481 bp, Zea Mays
gccttttcaaccagaatcaccccatgggagtgggagagggagtaatctcacagccacggtatatttacctggaaaatgaggccagcgaggagaagtcgccatataaaacagatagattttatatggattttacctatgacactaaaaaggtaaaacagattttaatttgggacggagggagtactttatagtggcaatagataaccagtgtgtcttgcaccttagtaaaagcattaccaaaaacccactcatctggaacttgctctgtggaacaatacttgctggtcatctcttccttttcatatggaaactttacatcaaacacacatgttgattttattacagcaaataattgaaggtcgaagactcagagcagccaacccccaccccttttcgtagcatatatcaggatatccctatatctgagaaattagaaatctgataaagaaagaaaacgatgccataggccattttctttaat

SEQ ID NO: 115743 - DNA, 705 bp, Zea Mays
agacgaaagaggggcgattttaaagggcatgtatgagacaaacatcaatgtaggatatagaggtgtcaagggtgcatatgataataattaaaagcataacaaaggatatagttaaggcaagactcgcgaaacaacaaagtggagaaaacaatcaagggtcagttaggtaaggttccaacagaagggttgaagtaaagattcattaccgagtggagttacaaggagacaacgggatcaccaaggatatgcaaagtagaatggccgctcatggatcattaagaaacaagggtggtcaagggcacgttaactgaaatgtcttaaccatatattgggatattaaggtaagcacatataaaaataagagtaggcaagattccaatggcacgagcataccaagaccaagggcatagaaattgtcgaaagatagtgacttacaaccgaataagaaatgatcccagaagacaagaaagtcatggacacctaatctgaactggttaaatgagcaatagaggtacaagggtaagtactttagattaagggataagggtattaaaaacgcaaggatacaagcatgtcaataacaaaatggaatagagatggtcaaatagtagcaatttaataatggatgaggaaagagtcccaaaagattaaagcctatggtcaggggcatctacaaagatgtcgcaagcataagatgagatcaga

SEQ ID NO: 115744 - DNA, 436 bp, Zea Mays
aggggaggtctgttccctaatgattggattcgattcccaatttagaattttgaaactacacttaagggaagggaacctacttacctacagtgatttcttcagccttgtggactagtgtcctaagttgttctcctatgtggagtcacactcccatggagtcagcactggtggatcaaggtgatcggtgagtactagcatatgtgcttcacacggcacggctcagacaagcttggctgctacctttttgagttttggtgctttttggggccatatatacaaaattctagcatattattaccagtgttttcttagacggaaaacggtagacggacggtgaggagctgtctaaggtttagacgtgtttagacgtgtttagacggaattaaacggcctaaacggtatgttactgtagcatagtttcagcaggataaaaaag

SEQ ID NO: 115745 - DNA, 559 bp, Zea Mays
caaggggtagctcaggtgtttctggacattgtggttaagcttcatggggctcctaaaactattgtgtcagacagagataaagtgtttacaagttctttctggacacatttgtttcagcttatgggagtgaagttgctattttctactgcatatcatcctcagacagatgggcagactgagagggtgaatcagtgtttggaacaatatcttaggtgtgcagtccatgatcatcctcacaaatggaggcagtggttggctttagcagagttttggtataacaccatctaccatactgctctggaccgttctccctttaaaattctgtatgtttatacatctcctgtgatggctgttccttggttgagagaggaaggggacatggatgttactacctggttgcaggaaagacaagtggcctctgaactgctcagagagaggttggcacaagctcagaatagaatgaaacaaatggcagacagagggcgaactcctagggaattccaggttggagaatttgtgcttctcaagttacaaccttatgctcaaaagacagtggtta

SEQ ID NO: 115746 - DNA, 313 bp, Zea Mays
catgccctatgcttgataacagctcaagaatttagggatgtcaggatggaggattttgtcgatgagtactattctgtagctaatttcaccacaacctactcaagggtggttccacctatcggtgacaaatcattttggtcagaagttcctttcacaaaagaagtgggttctccaattgagaaacgcgttgtgggtcgacagaaaaaataggatcaaagggtgccttgagggaggcagtggaaaaaagaaaactaacaacgagaatggtaagaaaagcattcggggcaagttcaagtgtccaaactgtggtgaa

SEQ ID NO: 115747 - DNA, 429 bp, Zea Mays
aaatgactatataatgaaacaaacataattctagaagtaagaataaaacacatacctatcttctgatgagatcttttttagagctaataggatgaccattagagcaataaaatgttgatgtggcagtctgatagagaggtgagggaaaacattagtatcaattgcttgctttggaaaaaagctaatataagtggcagacctttaaaaaaagagaaaagaaatcatagaaacttacctgtttgatatgaatatgtaactctttaaagcgtcgttgcagatttgatctgaagatgtccttcaattacaacacaaaacatatgacatgtctattggagccaatgaacttggtgggatgggactgtgggtaggaccgtaggagaggtatgcactgtaatagggaggagtagaggaggcaaacaattgcttctc

SEQ ID NO: 115748 - DNA, 346 bp, Zea Mays
ctcaaacatggtgaagtagagcgtcactgaccttcccttcatggtcatgtagagagtgtatgggagaggagggtattgcaaatattggttcgcatgctggttctcccctatttgtatatgcgtcatgaaaggggctacaaccacaaggttcttgcacccgtgatcagggcacgatcgagatagagtttgagttcaattcggtcctttgactaaatctgtgagatcaacataatattcctttcatgatctcatacttgtgtatacttaaacttattactttcttaactatttaattctttaactaacaattcccactcatcattaaattagtacaagcaaggcgtta

SEQ ID NO: 115749 - DNA, 367 bp, Zea Mays
aggtaattcttctttgcaaggggttatgccccttttgttagaaaaggtcgacatttagtattacgaatgaaatacactctgataattactcttatttctatttaggacttctatctttgttatgaagggctgacttggtgtagttgagtcaccagatcatgggttcatagatgcctctccggatttgcggtgggaaggcttgtctcggattatccctccccaaaccctactcatttgggagcctgcgttactagatctttcctttttgcccacttctatttttgttcatatcaatgttttgtgttcttgctccatgattttttaccacacaacattgtgccccactcacaatgccctagggtccgtg

SEQ ID NO: 115750 - DNA, 743 bp, Zea Mays
caacacgcacgaacaacacgcagacaacacctacgacacacgagaattactaataatcatcgcgtttatactaaataaatattacttcacaaaacatttgaggtggcattaatcatgttaatcggtattttcaaagcgccaattaaaattgtaggataggcttaactagatttctattttaataattatcaactaactaaataattaacgaaagcatgtgtcgcgacaaaataatgctactaacacgcaggatagatgaacgggttcgggggtagacgggcgtcgtctacggatagacgaacgcgaacagcaagccgtcacgcgagaatcgccaaatagatgtaatgtttatactaaacaagtattaattcaaaatcatctacgttaacattattaacgcgtcggcaatgttatcccgaagctaacgcaatttgaacaggtcgaaattgatttataacgtgaaagatttcgcttatttaacgaactaggagcttatacgtaatgaaccatatgcttcgtggactagcaattagtttttgcatgacttaggagaatagtaaattaattctagaataaaagcaggatcttttctttaaaaggcagctgagcgatgtgtcgcaaatttattggctggaaggctggccacgtggagggctacaaagagcacaaccacaacaactcctgagaggatctagtgtggagcggtttctagatattttcctgcatgcaccaaggaacgtgga

SEQ ID NO: 115751 - DNA, 344 bp, Zea Mays
agacaagattacaatcacacaaggaacaacacgttccaagaacaataagatcgcaagtaagaatgatttgcaccaactagagagggagaatgaagaacttgaattgaaatcgcgctttagatcgaaaacttatctcacaccgaagaaacttcccaccgatcgaaggggaaggacttagggcgcgagatcggcgttgaaatgcttttgaacggaggaggacagtcgtcacaagtgttttgttcgtgagtcttagggtttagaaagagaggggaaggctttttatagccgcccccggctcagatctgaaatttctgggcggttgcgcaaataccggttgaaccggc

SEQ ID NO: 115752 - DNA, 612 bp, Zea Mays
ccaaaataaattaagtagatcttatctgattacaccaatttaattctgatcccatctaatttgatcaaatctaacctaatggacaaacatgttagataatactcgtaaaataagattggatcctactcttataaatatgttttaatacaagttggactaaggttctaatttagactagacgacatacaacaacctggccatatgcaactaccttaaccactcgatagttgcataacccctccattttaaccgacagagattctgaattacctacaccatataatccctcctatttcaaaagattctaacatgccctaataatatttattctactatagtagatatatctaacctaaactagtctaatctagtcatatccaacctaatctagattttatctaatctattatgatctaatctagagtaaggtacttaatgctggtacaaaagataaggccatatccctcatgcacttaaaactaaactagtgccttaaaccaactcagccacatgcatgagatctggcccaaccaataaagtcatgaagaattgtataatccatctatccccacctagcgtcaaaccaacttttaacctacatcatgtagtcta

SEQ ID NO: 115753 - DNA, 545 bp, Zea Mays
cagtcatgtattcatcatataagttacttcctgtaagctgtggtaagcgaccttacaatcatgctagcagcttaaaaggcgaatgatatttgagagttataccaccggacacttcagtagcaaaccacaatagaagtaaaatatcctcattgagaattagagaccaactcacccatcctacaagaaaatatgagtaataagaacagaagtcagcataggataagctttcaattcttatatcatcagtcatacagatgtgaacagaaacaaaaccagtcacaggtggcagcagaatttagctaaaaagaatacataagcagataactactaggtaccatgaacaaaacgacagctagcagtttgcagtaagcagatcagtacaattgagtacagcattactgcactaggaggaaactgatactaaagaagcttaatttccactctaaaagtcgatattcagctaacttctgcatgaagacatgcatatagtaatacactagagggtaggtcgacaagccaacaagacaaatgcccaattctgaaca

SEQ ID NO: 115754 - DNA, 674 bp, Zea Mays
gcaagaatagcctatggtacaaaagtttatggtgagaaagaattccgtgttgggtgataatgcatctggagatcgagtttgacttctctccttccttgacgtggttgatcttttttcttttctggtcttggtctcattgagtcggggtcagtgtatatcatcggagttgggaaaatatggtaaagatagatataggtgagatagactacatgatgttggtgcatcaattgaactaatcgggcttgggataccctctatccgcgactacggcggacaccaaggattggcaaagccgttccatcgacacagtgtggtagcgttcaatcacaaagcatggcaagcctcagtagttcatggggctactgtaaggaccagaaagaagttggaattagctggccatgctaaggagggccacgatggcgcttaaggacggcgaggcattgttcttatcaaaatactacgatagagttcaatcggttgggtttacaagcaataggagaccctaaggatactagaacacagaccagaggagtatgaaccaacctggaattctctagccacggcaaggtgtctcacggcggtgttccggtcgatttgggggaaattcagaattcacgagctatggttgatgatcgggattgaggggtggtgcgctcggtgcgtaacaagatggc

SEQ ID NO: 115755 - DNA, 395 bp, Zea Mays
tgcatctgaagatcgagtttgacttctctccttccttgacgaggttgatcttgttcttttctggtcttggtctcattgagtcggggtcagtgtttatcatcggagttaccggagaatggttaagatagatatggatgagatagactacatgatgtaggtcaaaagtttgtttgatgttaggtggagataggcaaattatgcaatccatcatgactctattggttgggttagatcatgatcatggtgggataagtcaagtggttttggtcacgcaaatataacttagatccagtctcattattttggattagatccttgttgttactttaggatgatataagtaaactggttaggataagatgattccttcaagataagatgaatcttactaagga

SEQ ID NO: 115756 - DNA, 572 bp, Zea Mays
aagtattctccaactatagctctattagtttgttgcagcagtccaagaccaaaaatgcagggatcaaaagttacagtgccccaaacagcttccaaactcactaaatctcctagcaatagtcaactaaatgagtcctctctcaagtgtgacagagaacctttggagacacattactcccacttttatgtagcaccagcctagcactgcttaaataagtttgttctcctagatatggtcttccatttttctgtaaagttttctgtccaaaattaccaggatttggcacaatagagctccaaacagagcaccaaactgtaaattcaggttttagtggtctgcacaaaaattcagtttgtgcacactaacagtccattttcagtctactttttctccacatttttttgtaggatcatatccatcacccataaagacatttgtacaccaacttatggtattcaattcctctatagaaaccatagttcaaaaccttatggattatgcacaaggaagctccaaagtctgtcacaaccactgaaattcagacttatataccattccaaatctgaaaattc

SEQ ID NO: 115757 - DNA, 503 bp, Zea Mays
gtttttagagagggctgctatactgcctgcttcaggggtttcaaagacagaggctattgaatctgccgaagataccctctcagcttcggaggtaatactttttctttttcgttgctttaaatcggagaaaatttaatcgaatgctgctattggaattttttgaatagatgatcaaaaaacccgttgcagcagccgaagttcccattactcatctagacaaatcaaaaacagagagttccaagaccgagcagtagcagaagctgcagagttctccgatagtgcaagggctgtcaaggatattatccgcttcagtagcaacgtctaagaaagggataaggatggccaacgttctagacgctattctgaggccttcgaaaatagttactcctgctcctacttgggtttccaaagaaaaagctagagaattggaaaaagctatcgacgtaagtgctgctcctgattgcactatggttggaccttcagaaattaggccaacaaagcaa

SEQ ID NO: 115758 - DNA, 802 bp, Zea Mays
aattactgagctgacatgttcagatggagtctgatcaaagcatggaccactgtcggggagatctgtttctgccgcttgttggacgccgccagtagactaacaattatggtataaatggattagaagtttagtaaactactaataataatatagaaaaaacaacgaggcggtgtactcatacctttatttgcggcgtcgcatcaaatatcggcgcggaagattccgtatgtggtgttgctttaggagtgacgtttgtgttggtcggcatgttctggccaccgtcaccatgtttaccctgaaaaaattgtaatggttatatgctatttaaagaaaacgatgaatacaacccttcaatgaaaaatacaagtaataagaaaaacattaccactggggttgtaggtgttttgttctgtttcgttatatttgtatgaaccagtggatcaatatcagcttcatcggggcaactttctaatagtacacgaatatgctgttgccttaacagtaattcatgtacctgtgtgtctgtaaactgtgtatcctgctgggatgctggagtatacatatcaggtacagttgggggggccggacacgtacatccttctttatgtatcatgtaaacaaacaaaacatagtttaaaataatggcatcaaaacgatatcgacaaatgattgcacaacttttttatattgacgtaaagaccataaaactgactaacctaccgtctggggaagaatatcatctgattttgtagttgttttctgcacatcataaccatcttcattgtcccctgactcagcgcgg

SEQ ID NO: 115759 - DNA, 392 bp, Zea Mays
ctggggttggcgacgaacgcggaccgttgatccatttgcggacgatcgggattaggcggtagtttaccccttcgcccgataggataccggccgttcgattatgatcctacgtgggtgaagcaatgttgctgtttttaaatcgtgtccgtccaatctggatcagacagtttgggtcgcgtaccggttcgataaagacattcttttaatctggatggtcgaatagcgatcagacggatctggttagacaacaccccttcagccgagaccaatttgcaaaagagccctccgctttagaagtattcaaccagcagtcctaactagtgtaaagaccattacgacaaggtcctggattttgcagaactggccctgggctttctgatattactgtccgc

SEQ ID NO: 115760 - DNA, 665 bp, Zea Mays
gttgcaaaccataatgatgaaaaggctatgaagaaggctgctaaaagtaaatccgtcaacaagccaagttcagatgctatgtctcatgcttaaaatgtgtgatttgtattgagcctttatgacatttgttgcttctaattttagcttttgtgtggcattaaactttacattcttgaactatgtgtttgtggttgtactttgcgccattgtggcatatgttgcttgaattatgagtttagacaatgtgttgctattatatgcaatatggtgttgctgttattatggtgttgctattattgtggaatattcttctagtatagactatatggtgttgctatcttgccgacagtcaacaacaagttccactgttggtgttgttgtgttggaggttggagtagggtcgcctacacaatctgagtgcctgacgccttgactgctgactacattcagttgcattcagttgttcactgctactgtttgagttggccagctcccacatatcatagtcccacgctcactcgcctggtttcagactcgctattgtcgagcgtcaaaagccaccgcagtaccgcaccggccagtgagagtggtctgtatgtcactctattcgagtgtctttgtttttaaatctcggttttttggttaaccaaaaattgaaccaaact

SEQ ID NO: 115761 - DNA, 411 bp, Zea Mays
ccactctcaggcaaatctaggataggggcgctcaacaacttgttcttcaatgcgtgatagctgacctcacaatcgctggaccagacgaatagaacacccttctccaaaaagtctagtcaacggcttagcaatgctggaaaaatttggtacaaagcgtcgataatatccagcgagccccaacaaacttcggattttagagacactagagggtctcttccactccaccatagccgcgacattcttgggatcaaccgcaatgccctgctgactaatcacatgccccaggaaagccacttcggacagccaaaaggcgcacttcttcaatttgccataaaattgattcttactaagagcactcagaacgagacgaagatgccgctcatgctcttcctcggtcattgaataaatcag

SEQ ID NO: 115762 - DNA, 358 bp, Zea Mays
aaataatagtatacgtaggaggtaggggatcaacaaaaagttggttccataatcattaggtcatgcatgcatcatgtttaaactatactaaataaatcttcccctcttatggaggtactcctcacctcaatccatccactgtagcccgagaatttggaatttcccccaaatcggtagccagcgccgcgtgagacatctcgctgtggccagagctctctaaggtaaccgtggtcgagcttgtgggtgttttgggttccattacatgtggtgatgctcattggcctgcccggttgaactctaccgtagcaggatctctagaacacagtgtcgccaccatggacactctccccgtcgaccc

SEQ ID NO: 115763 - DNA, 501 bp, Zea Mays
gtaaaagatcttggcgcccggataggctcggacccggtcactggttggttcaccgtacccacttggtctgtggccggtcgagatgatcctcgctggcgttggcccctaacgtttgtgcgccacgtgcctagtagctttaacacgtcgcagtgaaccatagcagtgagtccttccatcgctggaggccttgccacggtgaaacccatgatcactcacgccagtacatttcccttatctttggccgcccagcgcaacttctcaaaattagccaccaccgctctcggacactataaattgagtgtgttgctagctccgataggttgtcccgaagccaaagcacccgcccttgccctccgatcgtccaccgtagcgctctaatttggaatttcccccaaatccactttccgcgccaccgtgaacgcttcgccgtggccagccctctgcatgtcagttcaagcttcttttcttgatgttctagcctcccttgagttccctgctact

SEQ ID NO: 115764 - DNA, 462 bp, Zea Mays
gggaaatatgggctttgaaagtttagtttcgtgtttgtttttggcttatacatatagcctcagaaattagcagcacgcgcagggaactggtacagttcatagtagtctctgcatgtgatatagatactacccatctgatctgagccgcccggcgaatacgcatgtggggctgtacatgtgcacatacacagtgctcattcgcctacctcatgccgtcgtctgagcagcagaaggcgtacggcgtgtgtccatctcgtctcgtctcgtcttctaaagcacgctagccttttcaatgcgatatgcacggggtatgcggtgccccacgtacgttttggccaaacacgtcggtccatgcatccgatgtttccaccatggtactgcccaacagcgaacgtcccaaccaatccattcagcagccgccggttgctcttaaatataatccttcgaattcgaattcgtttg

SEQ ID NO: 115765 - DNA, 615 bp, Zea Mays
gacgaatgtatcccttttgctgcagatctgcaatttgtagcttcagttctgctaactcggtgggagccatccggtatggtctctttgcgatgggtgtcgttccagggatcagatctatgtagaactccacttctctttctggtggcattcctggtaattcttctggaaacacatccatgaattcttctaccactgatatactttctgttgctagattgaacatcattgggtcactggcgggtggctgtgcctgacaagagactgactttccctgctggtcggtgaggaggactgtcttgactgtgcaactgattatgcctttgtgtttagttagccaatccatccctaatatcacatcaattcctttggatggcaagacggttaagtctgccaggaatactaccccacttaaaaggattctgacttgggagcatttgtgctagcatagaaggtctgaccctggggttcgggtgaccaagggaatctctagaggagtagatggaatgccatgcttttccacaaaactagtggctatgaaggagtgggatgctccataatcgaaaagtacggtagcgggagtaaattcaacaaggaactcaccgagcactactcccg

SEQ ID NO: 115766 - DNA, 476 bp, Zea Mays
aagcggcctactatgcatgacgtgagcttgtgggatgggccagacgtaagaccactaggccacgctgcccttgcatttattatggagaagacgctccgcctgactactccgctgacaggcgatgtgcctcttcagcatttaatgcgccctgtccactcaactggcaggcggcgcccgagctatcctgcaggcagcctgtctgactaatcccgttggctaatagtacacctttgtcgagacgtgtgccgcacccatcatgactcgcgcgttaccaagggcgctgcagcaagatatcaatactgtacacactacgaatattatggcgcacggagattacacgggcatggaaagcagtagttccatccttccatttgtccttgggcccacgtgtcggggctcagaacccttgtacatgcccccctttgactataaaaggggaggcatgcgacgtgaggggactcggacgcaagtcattc

SEQ ID NO: 115767 - DNA, 360 bp, Zea Mays
gagagtttcaggttggggagatggtgctgctcaagcttcagccatatgctcaaaagactgtggtgaaccgtccttgcccaaagttggctttcaagttttttggtcctttcagagtgttggcgaagattggtgcggccgcttacaaattggatcttccagccgatgctcaagttcatccggtgtttcacgtttcacagctgaaaccttattatccatcgtatactccagtttttacttctttgccttcattggtggacctctcaaggactggcattgttcctgaagaaatcctggatcgacgtctagtgcgcaaaggcaatcaagctgttccacaggttcttattcgctggtctggtgtgc

SEQ ID NO: 115768 - DNA, 389 bp, Zea Mays
ccaggtgaccttcaagaatctaagggtcttcagctctcctgggttgaactgggttggatggagcgggctcttggatccgcagggctctacgttggttatgggttaccaagtaggcctccatcaacttctggacatgctcatccttggcttgcttcagggcttcaaccgcaatgacttcacaactttccaatgcagttgcacgggcttgagctgtggtgagatccacatggagctgacggttgcgcttctctgcatcttctgctcgggcaatcatctgacggtggtgccgagccaagaaatcatattgtgcatccagggtgagcaggtatgcagtgaggtgcacgactgtggggtcatcctcaagcagctgcttcccttccaatgcacgc

SEQ ID NO: 115769 - DNA, 447 bp, Zea Mays
cggcctgttagtctgcttaatggcctgttaataggcttgtaataggaagatagacttctataaatactagatctggtggttgagaaggcagttacgaactgaataacagaaatccagatattggaatcattcttgtgtcttgcttacctggagagttcttcctcggttgtcaccgtggtggcctcgtccgtagcaaggagagctcacgtcggagtagatctgctaccctcggccacgggtcatcacaactggtatcaaagcctttggagtcggcgttgggaagaggaggcgccacggctccaccagcgaaaccgtcggtacaaactcgtttcctgcttgaggcgatggatgagagagatcggttggtgcaggaaaattgggatcgcatgttcgagtcaatggaggcgatgactggaagactgaaggaagttgagcgggtgcaacaac

SEQ ID NO: 115770 - DNA, 800 bp, Zea Mays
ctgtacagtgtgtcccctatgagggtgtagtgggctgattgtctcgcaatgcattccgctgccgccttgtcatctggttcctcttcattttttatgtacctgatgataggctctctcaagtcattggggtctaactctggttgtctcaaggtgttgcactcttctgtccgatctaagagaatactcgggcgtgatacttcttggacgaaggtctcgggtgggacctaggcctggctggatcctagcttcgacaacgcgtccgctgccgcgttgcgatctctttccatgtgatggaactccaacccttcaaatttgtcttctaattttcggacagctgcacagtacttgcccatagaatcagtcgagcagtcctaatctttatttatctggcttatgaccactagtgaatctccgtataccatcaacttcttaatgctcagtgacacgacaatgttcaacccgtggatcagtgcttcatattctgctgcattatttgatgctggaaataataactagagtgcatacttgaattgttcacctccaggagcaatgaagaggattcttgcacctgcaccctgcagcttcagtgagccgtcaaagtacattcgccatacttcggtagcctccgggttgtctgggacctgatgctcagtccattctgatacgaagtcaaccagtgcttgagtctttattgtcatgcaaggtcggagctctatgtcgtgagctcccagctcgcaggcccacttggctatcctcccgatagcttctttgttgtggagaatgtccctaattggaaatcc

SEQ ID NO: 115771 - DNA, 661 bp, Zea Mays
gtcggttttcccctccttgacccatttcaccataccgaccgaatccacctcatggcaccgacacctggggcccgcgtgctagcctctccttgctgtcacctacacgaaggccctctctcttagccgttcgacctcaacgcgcccattcccatcactgcccggtggaccccaccctctagaagcaatcttccccaaacgaactctcccaaaatcatgcactggctcggccgagtaaaccgagggccattcaccgaccccatctcgctcctatccctagaagcctaggagttgaaagccataacacctcgaccccttttgcctcctcggccaacactgctccttacacaaaactcagtgaggggagaagaatcgagggagagccacccacgacgaacgcacggtacaccatcgcctgggctttggcacgatgctcatgatcttcgccagggcgcaaacagaaacgtcggtagcgtttgttgaattggggatcatctctgcatcagggaatttctcatcggagcttggagacgtcgtggatccgccacccaccgtgggtcggcttctctatcgcctccaaactctggtaagacccccattatcttcaccatgctctgagcatcacgtagctttggccaaggtagaagttggtgctggggcacct

SEQ ID NO: 115772 - DNA, 332 bp, Zea Mays
ggagaccctaggatggcttactgaggtatcttcattgtcaattggaccctagagctcaccaccctagtagcatctaggcttgttgccaagtacttcatgaggcatttcattagggccctaagcacgagggataatgtcattgatctaagctcaagggacactcgtatggagcggggcccttcgatagccgtggggccctatgaggtgttgtctctaccaccttgacatcacctagcttacatggtcgccgaggaggttgaagcatcaatagccactgagtggctacttcttaaggaagagcgagacgtcatagacaagatgtggtccttgat

SEQ ID NO: 115773 - DNA, 348 bp, Zea Mays
ctctagttgaggattttgatctgacagcaaagattccgtaccggttcggcttgtatttctgactgttgatctcgatcgaacggattaaataggtctaaggtagatataatctccaccgttgatttttaatccagtgtcgggtagcgcgtactggctgacttggttatgggattcaatcgcaaccgttggggtctgatcgggcggacacgattagaagataccccttcgccgaactctttgcatatgagtcactgcgtttgtgggaatacaacccaccatccaaccaagttataaaataattacaatggagctctggactttgcagaaccaaccttatgttatccggaa

SEQ ID NO: 115774 - DNA, 1118 bp, Zea Mays
ggttatataatgcggtgatataaaactataaaatgttgcgtaaatatagacaattacacaaattatgtaactgaatatgtacaacaaattggcattgaacgtttagcaatcggaaggtctggacgttaaaggtatataaaaatgtatacacttaacaatactaatcaaatgggagtgcatacgtcggtttcacacttcaaatacaaaaaacaggatatagcataaatacttgttacaattagcataattagcgtgaaaattgtataaaatatgaacctattgtatataaaataaggaagtatatagtatgcataaaacttgaatattgaaacaatatgataatacaaataagccaaacattggaagcaaaacgattaaccaactcacaaactggagatgaaaacagcatagaatttgttaacagataacataaatagacattctggtaacaattatgtttgacacacttcaaataaaaactgattcgaagtagcatagacaatagccacattgaacataagtggcacacggagtatcaaacgcatgatcagaggcctgacataagtgacttaacaagtaacataaacagttttgtggatcccacagggaatcatgttcagctatgctatctaagtcttggctttcaaacagcggcgtctccttggagaatacttgaaaggtagcagttctgcaggaaggggggcaaccatgttgttgcgatgaaatgtaaggtaatgcagaacaaaggcacgttggtccaatggttcatcctgaaatagccataatatcaaattaatggtagaataaaatctgaaggagtaatatatgcaagattagaagactaatttagtgacataccggagtataaaattctgataagtcgccatcatcaaagtcgtagtagcggaggaagtttgcgacaaagaaaccacaatcatttgaccctggtgtcattgttggacaattgggaaggagcccaatcttgtagttgccaaactttggtacatttgactcaggtcgagcttcatgtaaggcaatgctaattcttcgcattattaatctggaccaaggtatcttcgttccatttatcatcagttgatcattatggatttgtttcc

SEQ ID NO: 115775 - DNA, 333 bp, Zea Mays
gcctgggcatttggaaccaccgtaatcaatgtgtcttcgatggaattcagcctaacattagtgaggtcttcagttgggtcaaggatgagatcaaccgttggagtttggctggagcccgggaactttctagcatcctagccctccagccaaccaatgggtgaatcctgtttttttctggtcaatcaaggggctagtttcccctctttgggcaggcctatgtccttggtctaaaagcttagagggggtcatgtggagttgtcggagtttctataaacctcctttgttgtatggtttttttcttctcttcttaatataatgatacacatctctcat

SEQ ID NO: 115776 - DNA, 492 bp, Zea Mays
tcgggacgcttcaggtggtatcagagcccataggactggccgtaggtcgcaggcctgaccctaaaaacttgccctaagagaaaatacctcttaccccaagaaaagtcttctctcctcttccccgatattaacagacccttcttttcctattccatatggaagactctctggccattaggacatcctactgctcagaggtggaagggttcccatatctgttgcgaagttgtgcgcttcgcatgggaatccacaaaaagccggaatacgtctggaaggagtatctcgaaaacggaatggaaaaatgctctatggcagtctacctgggagaaagccgaaactatccgaaccacccttctttccaagtcacctttactggataccgcttcccagatacttgccagaatgttgcccgaacagccctccgacaactatgccagaactacaacaaggtgatctttgaaactccccttcgctactttccacccagcaaca

SEQ ID NO: 115777 - DNA, 355 bp, Zea Mays
ttacttggctcgataagtatgactgcataggtgcatattatagagataaatttattgccaaaaaagtgaacaacatttggtgccacatcatttcactttgcaggcattgtgagtatgacgtgtgctttgcatgggccagcacctgactcagttcctgtgaaatcatgaatccaccaacggaggtcaaatacctgactgcagccagccagaatgtttacagccacacatgatgatcctatagctggctagaagaagaagaaatatttacagccatccagcataaccttagagctggtttgaagaggatgcaaccggtgcagctgcacaaatggtcagtatatgtttatccttttta

SEQ ID NO: 115778 - DNA, 393 bp, Zea Mays
aactggtttgtgggccgcttcggaaggccttcaggccttctttggttgccctgttatcaggtacccgacactccgccctgtaacccacgcaaaaagagcaacaaagacttcaacaacataatagacgtagaagttctctccgaaccaatctaaaaactctcccctggctcatttcgagcatggccatcgggactgtagcatcgtaagccccttcccaacctacaattttgaaacatagcaacacttattttagaatgaaagggatacacctctaacttactgtctaaccatctattagcacttgacaaccaaccaaattttagtctaatagatctaaataggcattaactgtgatatcctggcccttgggatggtgttgtcctggcccaaggc

SEQ ID NO: 115779 - DNA, 547 bp, Zea Mays
gcggacatcaccgatggcgacatgccctcagacaaagtggaggtcaatctccacgtgcgctggtgttgcacgacattggtggagaggtagaccacactcacgttaacagattagattagtgtggcgtgcgcgagggggtagtggagctagggatggcaacgaatcgggtagagtaaatactcgcccacgaccatactcgtggggatcatgcctgctcgcgactatacctgcaggtaaatttttgtactcgtgcccatacccgtcgggtattgggtacccgtcgggtataacaagattagctaacactcctcataccatagaaagaaaattaattatcccagtgattgcatacacatgctgcctaagaagtctgtcttacccgacggtgttgccttgtactgtatcaacgacttgctgcattgtcaggattggtgttgccaatgaaatctgttaagaatctatggcagaccaataggataggaattggttcacaataacataacaccccgacttcctaacaaaaatgtggccacttagtcactcatcg

SEQ ID NO: 115780 - DNA, 710 bp, Zea Mays
gttgatgatgatgatgaagaagaaaacaacgaagaagccaacgatgagtaggaggacaactttgttgggatatggcctgtcactgagcattgcacttcaatgttcgagacgggacactttccaaacctgctacaggatgtactgcatgcgctaggaacctacgtccaacctctatattacacaagatgagtgttggagcctccccgggcttgctactacattactcgcgtgcatatcagggtaatggatgcaaaagataggggtttcaggacactatcagcccatgagtatctgacaccactatctacctatgctgcttcggttagcaatgctgctaggcgagctctgtggtctctcagccacacttattggcagtacctacatgacacgaggtataaacatcttcctctacgtctttgtggagaaagccagaccaatgttgttccaggtgaagctggagaagatcgcctcaacacccttgtaggtgtggtggcaggtcttaacactaacatggacaacgctaccctagatctttcaagggtacatggagaacttgaagaagcacatgccaggattgcagccctcgaagctcagctcgaaggaaggaatccactcgaagcccaagtccctgccacaacattgtccccgctctgcaagaggattagctatggagaaccaggatctatcaccaggctactcaagatttataa

SEQ ID NO: 115781 - DNA, 675 bp, Zea Mays
gatgataaatggagatgcacatatattcaaaggagacaattcctccctttattcttccttacaatatgagtattacaaatcctaccccccttagaaagaatctcgtcctcgagatttaagaagatctagggaaaagatggggaaaatctatgcgaagctcttcttctctttcccacgttgcttcatcctctccatggtgactccattgtaccttgcacatctttatcaccttatttcttgtaactcgagtcagggtgtctagaatctttatagggtactcagcataagtcagatcatcttgaacactaaggtcctccagtggtagctgctcctcaggtaccctgaggcacttctttagctgagacacatgaaatacatcatgtacatctgacagatgatcgggtaacttcagttgatatgcaacttctcccactcgctttaagatcaagaaaggtccaatgaagcgaggggacaactttcctttgactttgaatcttctcataccccggagtggtgacaccttcaaatagacatgatcaccctccttaaactccagtaatcttctcctattatcagcatagctcttttgcctggattgtgcaactctcaaattttctcttatcattcgaacttgttcttctgcctcttgtataagttcaggcccaaagaactgtc

SEQ ID NO: 115782 - DNA, 701 bp, Zea Mays
caagcactacttggtgcagggtcatccaattagtgcccagaataatatccacactttccaaacccaaaacaagaagggtggttttgataatgtggcttcccagttgaataggcacacttcggattaattggttggttacagttttacccccaggtgtggttatcataaatgacctttttgcatgacaaaagggcaattggcatttagcactgaacttctggctaatgaaactatgagatgcaccagaatcaaacagaattaaagcaggttgattaaaaactgaaaaggtaccagtcatgatgggggcttcctcaggtaactcctctagagtagtgaagttgagcttcccttggtctgacttgctccttctgcttcctcccattgtcttgacttggtgctggcatctgcctctgctgatttctggggcagttcttggcattgtggcccacattgccacaagtgaagcacttgttcccattgccctagtggaactgctcctactatggaggctgattgttcctcggggcgggagctggaaagcggttgggtgccggctgctgctgctgaggtggcctgatcacccatctgcttgcctgctgctaaaatcccatgctctgattgtgagaaacaatcctgaacctctgggcctgagtggatggtgttgtcattggtgccttcctcttcttctctgtctggtgagc

SEQ ID NO: 115783 - DNA, 365 bp, Zea Mays
gtcactgattgggattgagtcgtccactatacattcatatcacgtgtactacttcaatataagtaatattacactagtatcaagaggacgccttccctcatctcttcttggtcatctcatctacatgtctacgttatcgattcatcatcacaaacatatatcagagcgcctttccttagcacatgtgacatccattatcgagtaccaagcgcatcttctccgagtaatagagctattgtcgtgtttcctgctcctcattaagcctcaacactgcctccaagtgttcgctttctcattgcatctatatcatcattccctatgcattgatgattatgttgcataaactttattgtaccatccatctg

SEQ ID NO: 115784 - DNA, 375 bp, Zea Mays
gctggtgaattcttgactcgctcccttgtcctccacagagaaaaaaattttatctagaatttcgttaacgtttatggggctgctcaaaatgagcacaaatctcgttttctcagtgaactatctacagtttgttcgagaagtcaggtccctatgcttattggtggagatttcaatattctcagaaaagctgatgaaaaaaataaaccaggtaccctcagcaagtggagttttctgtttaatagtatcatagatcatcatggtctagtggaatttgagctgaaaaacagactatatacgtggtctaacaaccgcaacgatcctacttttgaaaaacttgacagatttttggccagtcctgactgggatcttgcttat

SEQ ID NO: 115785 - DNA, 367 bp, Zea Mays
gctgtaacaagtagtacgttaagcggccgaaaagctgtgtaataagcgctcaaaagaaaaaaaaaattgatccctgagttgaactacgtgtacaagtagaatgctgcttctgctaaatctgggggtatcctagtgctaggcactaacattaaacttttgacgtactttcctttttgtagtctatggagtggctcaagaaaacaaactgaatttcctttgcgaaccaacatttttgctccgaagtcaagtctaaccaatcagtcgtgggcaaaatggacaactgttgaagctttgatctaacagctacacactcttcacaaaagctgctttgtcctgacgcactcttcgcgaagacgttaaatgccgc

SEQ ID NO: 115786 - DNA, 479 bp, Zea Mays
ggctcgccttctccatctcattataagccacatgagggacaaagcggaccatcttgttgaagcccacttcatactctgtgacagacttcttctcctgcttgtaggactgcaaatcaatcttcattttctccaggaaggtgaccaggtagaatcttctttcaaactgcctgatgaagacatcccaagacaggactcctggtgaggaggagtgcgctgcatgcacgcctctccaccaaatatgagcctctcccttcagcagttgtgtgccaaagcgaacccgatctccatacacaatctcgaagacattcatcttatcctccacgtaagttagataatctaccgcctcaaccggagtaccactgccatcaaaagaatccaacttcatgcccatccactgcatcagagaaagaccactgactgaaagaggctcctcggccccgccacctggagcagcacccgcagggatagcgcccccgggc

SEQ ID NO: 115787 - DNA, 2070 bp, Zea Mays
gtggagaccacacatgcgaagcctatggtggatgcttcgctggacccgtgggcacagttctgcgctgttgttgatgggggcggagggatcactgatgcttctacgggtggtgactgttgtgcagtagctgcaatatgtgagtttttttactgaagtctgtgtgttggcaggctgctgtcttcactgatcaggtggcgtccggggcgctggtggacgtggcaacttcgcagccatgctccgagaaaaagcggttggaggacaagatggagcgtcttcagatgcaaaatacataggccatctgggaaaaatctgcggctgaaaacaagagtcgaaaccttctggagaaggtcagcactcttgagaaagaaaatgaggggctcagccgtcagctgagcgaattgaaagatgttgttgcccagtcacagacaaaggcgcaagttgcctggatggaggccaaagtagccctagagcatgctactgaattggagttggaggtgaggaatacgagaactcatcatgaaagggtggaggctgccatgcggaccatcatggaccgggcacactcgctctttgtagatgccaatcatgacctgggtgcggagacaggccccttcgactagtctagaggagaggtggggctagcttccttagctggctgcaagaggagctggagtccctcccgtctatcaggatgggcctcacgtcctatgcctcccttgtttcctgcgaaggcgttgcgaatgctgatctatcccgtgagggcttcaagaacatcgaggccttcgagcagagtaatgaggagttcgaccgggaagtgttctaggttgaggacgttgcgctgaagcagtcggttggggattttacgaccagatgtttgagccacatgccgtgctgtcgtccgggagagggctggtcgtgcacatcgaggccttcgagcagattaatgaggacttcgaccgggaagtgttctaggttgaggacgttgcactgaagcagacgattggggattttatgaccagatgtttgagccacatgccgtgctgtcgtccgggagagggctggccgggcactggcataggtgaaggctttttcttttgtctagggtgaaaatattgccttttgatttctgatgctatgttattttctttctgcaggcactaaggaacgaggaggttgaagaccttgctggcttcaagtgctttttggctactcaagatgttggtgttgaggagggcgcggaggagcaatcgtcctgtgctgaggtcaaccacgccatcctcgatgcggtggggactttgcagccttatgccgctgagcaggtgtaaataggagtaggcttactaagtggtaatatacttgatgtatgttcacattaaagctgttgcgcaagttccggtgactaggcctgagcaggcaaactttggcttcctggatagagggaaagaaatcattggggctactgagtgcgtcacgccgttgtcccgctggagtctaattgtgtgtagcggtgagaactctgggtttggatcatggtcatcggggtagcgacgggtggttgagcccaatcgcaaagatggatgaggagtcttcatctagggccccgatacctatgatgaacaaaagaaaatgagttggtgtaccaaaacaaaggttggggagtgctgatgcgccggtgggatgtggcgcaggctctcgaagacttcgttgtatgggattgggcggacctcgccggcgggtctcgctctgcgaggtgcttcgcatgtcaccccacatcctcatgaaagggagagggcacggtcaaaagagggacctcgccaaattgttctagcaccgatggctgaaaggggttttggggagtaggatcttagggcgctttttgaagccgaagagcttaaacttatgttgtctaattttcgggaggcctgtctaattccgaaggtgttgcttttgtaatattaaaatatgtgtattgtcgtggcttgacgaatttgagtggaacactgccctcgcccccttcgccgagggacgactatactgctctttggtgtctgaccatgtttgcacattttt

SEQ ID NO: 115788 - DNA, 1162 bp, Zea Mays
ggcagccaaaaagatccactcgtcatctattacatggatacatatagcactagtggtgttttcagtttagataaaataaatgggaacacacagtgggaagttgtagcactccttctattaatagcctggcctaatggaactctttggatggttgatactcttttgcatgcttgtacgtgtgtggacagcaacctggttgctgactgccttcttaactcacaaatttatttgacatccacggctgatctgcatggtagctgaatggtccgtccttctccctttattctcacaagcacgtccaagcaccaagctatcattattcttctaagtttcacactgcaatatcagcatgtcacagagagagctgatcatcacaatgttggaaggcaaaatccatcatcgtcccatgaacttgggtacacgccatcattcctaagaatattcaaacaacaacttgaaagcactgactgatctggatcattgtgattaattaaaataaggttagcattcacctgagaataaatttccttctctagttgtttagctcgcattcttgtaactggaccatcaatatttgttgcattcttattctttataattttagtgtcaatgctaggggtgtcctcatcagcctccctctcttgagaaggagtcgtcctcgactctgactcaccaacaaatggaagcaagtctttaacattgaatgttgcactcacattggaatattcagacgggagctctagtttataagcattatcatttatttttgcaagaaccctgaatggaccatctcctcagggtgataacttactcttgcggtgttgaggaaatcgatccttgcgcaaatgtagccacactagatcacctggtttaaaaagtacttttttcttacccttgtttgcttgcttggcatactgagcagatttcttcttaatatttgtccttgtgtcctcatgtatttttttgatcaactcagatctcttgatagcatctaaattaacttgttcctgcaatggtaagggcaaaagatccatcggtgtatgtggtttaaaaccgtaaacaatttcaaatggacaaaaattagttgttgaatgtactgccctgttataagcaaactcgacatgtggaaggcattgttcacacatattcagattctttttca

SEQ ID NO: 115789 - DNA, 294 bp, Zea Mays
ctttaacgtttaacaaatgtgttgccttgttcttggttcacagtaatcgaaaacaagtgaccaacattgacgcccatcgtgggtgaactcaaacgaccaccttcgtcaagagaactcgaatgaccaccttcgtcatgccaccaaagaagacagcagcgccaggggctgcccttgctcccctggacaccaatcaagatgggcttcttttaagggaggcccgaagccagaagaggaaagctattagcccaacaccataggacgaagagttggatcaagagatcagggatctagaag

SEQ ID NO: 115790 - DNA, 531 bp, Zea Mays
ggctatgctgtgctggtgtgattatagtcggtcttagcgcggatggtttgatgctgtcgcttctgcttttgttgtactagcttgaccgcgccctgaggcggcttctgcgcggagtctttgtgagagacatcggaatttctcgcacttgttgtgctaagtccggctgcacccttaggcgacttctgcgcggatggtcttcgcgatagacatcggaatttttcgcacttgttgtgctaagtccggctgcacccttaggcgacttctgcgcggatttgtcgcacgcgagggtggctagcgcttagcctcgcggtgacttcgaattggtcgaatgccgaagaccggtgtcgcggtcttttttcgacacatgtttttgcgggggatttttctcacatatattacatggctccacctcgttaaaaacctcaccccccgggaggaaaagagtgcgggccggtacaagagtgtttgcggtgaattacaagggcgaaatcagccctaagtggatcaaacaaaaaatttgcgaaggttgtc

SEQ ID NO: 115791 - DNA, 762 bp, Zea Mays
gatcatgtttcacggatcatggatatagagatatcaggttaataatgtgaacacatgttaatgaacatggtgttggatcgacccaccccgaaacactactaggattgctattatgtatgtgccatcagttgtttttgagtggtacacctactagaacctaagacctgagatcgccattgtttctcactatgtgaagttgtgcattttgggacactaatctctacgccgtaactaggtagtcataaaaggagtcttcgggtgtaccatgaagcatggaatgggatatgtgcggatcaaaatgggatttgcccctcttagataataggagagatatctctggtccctcgagatagttggattggaaagtgcatggccatgccaatatgattagagagttaatcacaatgactaaatgttagtcattaactgaatcaactatttgatcgagtgaatggttaagctataacaaggatgacgcgtaccttgccttgagcttgactgatatcgtgcggcaaagggattagtaagtgaatgtatcaaggttcaggcggtatgatttttaatgtacattcaggagttagtatgtcctgctaggtaccgctactgacttgtggtttggaattgttccattcactgttgtctgcacatgaacctaatgggtcacacacttaagaggttagaacattggaacttgcctatatgattgtctctagtgcaagtgggagattgttagtgatatgcccaagaggcaatcatacacaa

SEQ ID NO: 115792 - DNA, 355 bp, Zea Mays
gttacaggatcccggaaattccacggtcgaaccggtctccgagaatcccggggaagggatcagatatgcattgaattaggtgaagactctcagcggaatccatggcggcgttctcggcgttcgttcactgggtccggcgagggagcagggcggtcacgggctcaggatttatggtgccgcggatttcgcaagggcaagcggtgacctgtaagctcggcccgggacctacggatcgagatgaacagacaccaagtctgttgcggcgacgttgaagatgaccctggacagtggggtccatttgtctgtgaagcacaggacgtgtgttctgggtgggaagcggctgacgatgtgggtc

SEQ ID NO: 115793 - DNA, 601 bp, Zea Mays
cacctaggcagggtcctgcatcccggaacctagtcccttgtcgtcgaggcaatcgtcggcccgaagcgtctctccaaagtcctcatggatggggtgagcggtctcaacatcatgtatgttgatactttcgatgccttggggattgcacgccccgcgctacgccccaacaccgcgccgattcacgacatcatgcccgggcacgacactcgcccgctcgggcggatcattccatctgttacgttctgagacccctctaatttccgcaccgagcagatgcagttcgaggtgatgaacttccctggagccgacttgcaggctggatcggacgctcctaaggctggttccgatacattcaaatccgcaacgttttcgcttgtcgacgacgctcctaagggtcccaatcgacgacgctgacccctccaagcacgttcgaattggggcaacactccccgacaaacaagaaagcacccttgtcgatttccttcgggctaatcgcgacgttttcgcttgtaagcccgcggatatgccggggatccctagggaggtcgccgaacactccctgaatatccaacctatggccaggccagtcacccaacgactt

SEQ ID NO: 115794 - DNA, 532 bp, Zea Mays
ttgatttttctccaaactctagaaccctatataagctaacaaatgaaaaaagagaggagaacccttctctcccaagccggtctcctctcctccctcatgctcgtctcccacctcatctctaccgacgcgtgcctccactagtacccaacctcgcatcctccaaaacggcaaacaaaagaatgatgcataatcccatgaacttcttgtctcgtttgtttatatatcatcacaattgtgtgaggtggttcatgcatttaattcccccacatcatacaacacattaaatagcactcactacacaattatactgaaaccaatttcatagtttcatgagattggccccagcgtgcatcgtctctcccaaccacctcgctcacgatcccccacgctcgcgatctgcccgcccccgctcgtgtccccctcgcatctaccccactcgtatcaattgtgtacttttcgagattggaaccgtccttgatagatttcatctccatcctagtgaagaccttggtaacctacgacaacgactcac

SEQ ID NO: 115795 - DNA, 643 bp, Zea Mays
ctagattctagccactgtaaggaggttgtgttgtacttggtccactttgttccatttttccatctaaatataatgatacacaactctcctacgtattcgagaaaaacgatagcacatagtataagttattgtttgagtttgagctcccttgctcggctcagtagtagatattataaggggaaggtagggctattcccactcactagctcagatgtcatctgagtatgtagcctctgctcacacttatatttaaacaccaagtaggacacaaggtattgcgtgtaggcatctcaaacctttataaatcatgtgtgtgcatacaaccatgtacatgtcatggtccagttgtttccgccgtatgccccctctctctttctctctgattttctatagtacccttagtatcgtggtgtcacaacatagcgacacttggcacgccaagtaggggcttgggtacactttgttgtgttgcatcgagatggcttcactagtgctctcggtcaatggagttgtgtcctctaacatcagctctagcattattgaccatgaattgtgtcatgagcgacgcaacaatcttgcttagtccagccctatactacctcaactgtagttgaatcaagatgatccccctcttctgatgttg

SEQ ID NO: 115796 - DNA, 1048 bp, Zea Mays
catccaatgtccagacatcaggttgtcatcgttgtccaaggactccacatctgacgattctccatcgtacgcccaagaccactcagtgctggtgtcggagtccagctccccgtcaacgaggaactggaggtcgtccccgtcggtgaggtcaccgtcggattctgatgcaactgcaaagtcccatccatctgcatcccagtgcaaaggtgcctgtttttcatatgccgctataggatcccactctggggttggttaacggctagaagaatgggagacaaaagaagcaaaggaatcactcggtgatgtcgacatgggtaaagctaagcgttgtggccatgaatggaaatgtgcctgttttttctgagttgcgatgaatggaaatgtggccggccgatgaccatttaaatacaatcaaatcaagaactgaatcatcgtttactcgaacttcgaggagcaaagaggagtcaaaagtcgccgcttcgtgttcggcgattgccgtttcaattctacagggacagggacagttgaaaagacacaactgttcaactccacacgcgactgagttaaggctacagggacagttgaaaagacacaactgttcaacatgaaacagtttccataggcggctcgtaagactaccacgagtgctatgtttttcactgacggtttcttaagcaagccaccagtggaaacaaggttttcactgacggttcgtaagactaccaccagtgctatgtttttcactgacggtttcttaagcaagcttccagtggaaagaaggttttcactgacggtttcttaagcaagccgcctgtgaaatttgtattataaatacccccacccccaacaggaatagctagctcgtagccaacttccattggaggtgattttggaggtccagattatataaaatacaagggtcgaggttttgatcttcatttttcggaggaaggttgctaagaaaggttggttttatgtttcattgtcaatttttgttcatattatttaccatgcttttataccgcgttcggcttatgttagatttggg

SEQ ID NO: 115797 - DNA, 733 bp, Zea Mays
cggatatttattcttatttgtcacttgattcaaagcacgataatccacacataacctcttgcttttatccttcttctcaacaaacaatactggggaagcccaaggcgacctaggcctaatgaaacccttagccagcatatcatccaattgtcgcttcaattcaacctgctcctttggagccatctgatacggggccttatgaataggctgcgtacccggaaccagtttgatttcaaaagcggcatcgcactgtggaggaatgcctagcagctctgctggaaacatgtcggcaaagtcacacaccacctggatgtcttgcacccgcaaggcagccacaccctccaccaccatggagaaaaagatccccgacttccttgaccgacgatccagaagcaattgcgacaataaggataacgtgaactttggagaaacttcccaagaataccacctccctacccgacagcgcctgcaataacactatcttccaaaaacaggatataactgcgcgatactgagataaccaatccatacccaagataacatcaaatgcccccaaggaaatcagaacaagattagctgaaaagacttcatcagcaagaatgacggaacaaccctgacaaactgaacagctactattggagccattagcagaactaaccataattgggtgacccaacctctgcaccgaaagaccagcctgcgacacaaaattctccgaaacaaacaaatagct

SEQ ID NO: 115798 - DNA, 308 bp, Zea Mays
cccacgtgtcaggacccaacatttggcacccaccatgtctacttccacaaccaatcccataatgcctaccaagaagatcaacagtaggtccagctcctcccccactgacgaggctgtgaaggcaagttgaccttcacttgccaaatcccacatgaccctgcaaaggctgcttccatcaccatcaacaaaccaatcaccaacaaccaatcttcccctcgccacaaagatccactcaccccaagggaagtgttcacacatacagtttggagacccaagactccatgagcatccccattcaacccccagag

SEQ ID NO: 115799 - DNA, 410 bp, Zea Mays
gcgtggtcgtggtgcggtaactcttatctagagagatttgcgattgtgttggttctcagttggggatttgtggtttggtgtgtttgagccctcttgaacctgatcatccatgttttagatccatgacttcgtgtttgtgacttgtgagtggtcgtggtgtgataactcttatctagagagatttgtgattgtcttggttctcagttgaggatgtgtggtttggtgtgtctgagccctcttgaacctgatcatccatgtttaggtccatgacttcgtgtttgtgcgtagtcgtggtcgtggtgtggtaactattatctagagacatttggattgtgttggttctcagttggagatttgtggtttggtgtgcttgagccctcctggacctgatcatccatgttttaggtacc

SEQ ID NO: 115800 - DNA, 296 bp, Zea Mays
ggaatttgccctgggtcaacacatcaaatttgcagagctataacaagattacaactttgcttgagtagctaagccttgagcacatataaaatttggagtaaaatgagctcaaagttgagctgtcagtcacactgataactgaattatggccacccgtgacattagcaggactttgaagtcaaattagagtaggatctagtgatcggttggggatggttactatagtcgaattgtagccggactataggactacaactttgttaaaggtggattagcaagttattacatggaatttt

SEQ ID NO: 115801 - DNA, 550 bp, Zea Mays
ccactaacccaagcaccagtgacctcccacccctccgaccgccacgcatctcaaacccaaattcaccggccaccgcttagcgatcctataaattgatggtcgggtctgttgcgccatgttatcacgaagccaacgcacccacacttgcctccagttgtccaccagagaccacgaattgctcacttcccccaaactgagtttccgccaccgtgaaagaatcctcaccgcggccagctcgattcaggtctgctcatgacctttgccctctcgttttagtgttcttgtgtgcccctgatgctccccgaccaacttgattgaactaggatcccttagatcaccaggaacgcggttgtctatccgcgatggccgctgtcaccgtggccagaacaaattgggtagttgttcgtgaaattgagtgaggggaaacgctcattagatcttgaattcggtctcggctaaggtagggcaccggtatttgagtgaattggccggtacacaagctcgacggagctctgcgcgacaccgcccgccgtcagggactcgattcgtg

SEQ ID NO: 115802 - DNA, 386 bp, Zea Mays
gcctagtatcatgttattattttagtgttgaaagtaatatttatgaagcttttgcatgagtctgtgttaagaagtacattagtgtttcttgttgttatcccttcattgctttatgagtcttgcaaattttatctcttctaagaggagaataagacgttatatgacatgagcaccatttgcttcatgtcaacagaatagtttggaggtctctagtagttggattctaatgtaataacaaccatgttttatagtgcttgagagtggtatgtcaggtgtttcatacattgacgatatatggatgtttggccttaatggcattaacaaacgaggttgttgaattcgatgattgttgtgcttagtgttctaatgtatttggtgaagtgttg

SEQ ID NO: 115803 - DNA, 383 bp, Zea Mays
ttgagtttgacttctctggtttctctgtgaaggatctggccaccaggactcccttcgcccgctgtgacagctcggggcccatctacacgctccggccatccacctccggtgcgtctccgcctcctgccctggtctccaccacttggcatcgtcgtctcggacatcccggacctgacgtcatgaccaagattaccagtagcctagatctttcatgtagtaggggacattttgagggcctctgtcatgcttgttagttaggtcggcatactcgtctcccattcaccacctcttcttctcgggctgagcaggcttttgacctggttcattgtgatctctggacctcccctgtactcagtctttctggttataaatactatttggtg

SEQ ID NO: 115804 - DNA, 356 bp, Zea Mays
taacttttcgcccttcggcacaggctcgtctggagtggccaaagtagcagcttttctcttctttccatgacctcgcagcagatagcggtagtcggggtaaacaaagccaatggcatcaaaaactctgttcaatctcttttttccccggcctccgaaggctgtgaataatgcattgtcttctgccttggaatatgatccaagcagttcatcacttgtaacttcgatgcattttagccagtcatcgtttggttcatcgaatttatccccatatctgaatgtgtacttcagccggaccagttcaccttcactagatacggtgatggtctccttcgacatttcccagctctctacaagcg

SEQ ID NO: 115805 - DNA, 420 bp, Zea Mays
agttagtatcagaccatccggcgctagccttcaacttaagaagttctagaactgtacgcagtgtagtaaactctttgtcacaaccctttgattcatcatataaaggttcttttgaggcactttctagtccctccattttagatagccccttctgtgatcccacagaactcaacatttctggttccatatggcgcaacatctcttcgcaatcaaattcttgaaaattttgattggcatccacagaatccactttaccttccactttatctaaaattccgacaactctctcgtcattaccaggcacttcacatggatccaactcaccatgttatgtccatatcgtgtaattgtttttaaaccatcttttcaacagatgtgattggattactcctgtatctctccaagctaccttattatcac

SEQ ID NO: 115806 - DNA, 677 bp, Zea Mays
agctaatatgttgtgcagagatggcataggggtttagaaagctaatcagtgcgcgtagatatggcttaactcctcgcgagggcactgggtgtgccgttcttaacggtgtgttgtattttataatctcgggtgaataagaagaagatcgagatcagattgttgctgtaaatgtgcaagggtgaagttcagattgttgtcgggtcctcttgcttagatgttctatatcctatattcctattccttctgatggtgacgcttttcttcttccaaccagctgtatgtgagttatgcaacatggtgctttgtgagcacgcatgtggctttatagttctttctgctgaatgcttggatgtatcctatattccttctgatggtgatgcttttcttctctcaacaccctgtacgtgtgtcagccttttttactttacatatgcaacgtgatgtttgtgaacatgcatgcatgcacgtggctttttagttctgctgaatatcttttgtagtggtgaaactgaacttagttaggcttgcagatttgatattggtcaagcaaaagtacaataatgagtcggtctcggaatatattcagaggtttagagatgtcaaaacccatcgcttgagcttgattatattgccgaaaaggattcagccagccttgccttttctggtttgcttgctgg

SEQ ID NO: 115807 - DNA, 449 bp, Zea Mays
gaaatataccttcaggtttggagaccaatttatcgaaccagacgatgactggctgaagtgcgttgaaaatactagtgatgaactacttggaacatactccaagtctgaagataatgcactgtatgtggcctttgggagccaaaaaaagaaaaggctaaacaaagtttttgatgctattggttttgtgtaccctgactatcgctatccgccacaggggcagaaaagaaagggtgcgactcctgagaaggctgcggctccggctacctcaagcgagctcgcacctaagaggaaaaagttgaaggtccttacacaccgaccgcgttacattgaaccggccatagtgcctgaatttggcggtaagacttcttcggctattgaagccaaagaacctgcctttacacagaagattgacgagccagctgcaatgccgaagactatcaaaattgaag

SEQ ID NO: 115808 - DNA, 489 bp, Zea Mays
cacaaattgacagagttggctcgctacgcgcctgatgacatcagcacagaggccaagaaaatggcccactttttgaaagggctcagaccagaactcaagaccatcctagccagccaagatttcctcagcttctcgcacaactcaaacaaagccatacaagtggaaagggcaagggaagaagaaaaaggtcacctcaagaggaaattccaagtccttcgagctcagcagcaagaccggcaccagaaagctcgttcctttgggtttccacccaagggaccaagcttcaatagaccagctggacccactctgtcatgtttcagtcagcagagtcagagctccttccaggctccctcggttgcaagcaaccaaccgccagcaaatgcctgttggcactgtggagaccccagtcacttcaagaacaattgtccccagttgaaggcatcaggacctgcttactccaactcggtgaatggccccaagaatacctca

SEQ ID NO: 115809 - DNA, 405 bp, Zea Mays
gaaattcattatcacccaggcaaagccaatgttgtggcagatgcactaagctgcaaggtttcctgccattgtttaacaatgaagacctctgacaacactttatgtcaagagatggagaagctaaacctaggaatggtccaacaaggaactctgaatcagttaaagcttgagtcagttctcttgcaaaggataattgatgcccaaaaggataatgagggcatgaaacacattcgtgggaagttaaggactagaaaagccaaatgtttcaaagaagatgatcagggcattgtatggtttaataaccgcatagtggtgccaaagaatgaagagcttcgccagcaaattcttgatgaagcacatcttagccgctactctattcatcccggaagcactaagatgtaccaa

SEQ ID NO: 115810 - DNA, 684 bp, Zea Mays
ctggaaattcctcgacgaagtcgcgggtcgccgcggacccgcatggttccatggactgggacctcttcgccatccttcctggtatgaactacttccactggttcaccatgtgtgtagcatagcgcagcttcgtccgattaggttttatggctctgtgttgccgaccgcatgtgcgccggtagatggccgaaattgtcaaactccggcgtgggattgccgtcgtctggggagcggatgcccctgctcggcctcgggcgcggggtaggagaagaactccttgccgtgcgatcggattcgtgcggctaggatttggtttgggttgtgattcggccaaatccgatatccgctgttggatcaaacgtggatgggcgagattataggattgtataccccttcattcgggtcgtcgatctcaaatcggacggatccatggcgatcgcgtgtatttaaaatgtaaaccatggatctctgatccaacggcttgggtggcataccggttcacttaaagcctggatctgatctggaccatggatttctaatcggacggccgtaagaccccgatacctattcggccatgctattttgctaaagagtccccgcggaacataggaaacaacccgccgtccctcgcggttgtgcttatgtcttgcgaatttttataccagagcccctgcactctctaag

SEQ ID NO: 115811 - DNA, 360 bp, Zea Mays
tccaccccttggaaccgggtgtgacagaagtggtatcaaagcaatgtgaccgtaggtcgctagattagttagaaatggaaagcccagttagtcgttcaaaacttgacttaattgtctccataaaaacttactttatacaaaaactcgtctcttttatcttcaactcttcttgtctgattcttcgtctatcagaaggttctaataagaagcattgcaagatgatcaagctaggattacggaacttaaagcgaaggttgccagaagaaaccttttcgaagctatcagcaatgccctgttctctgtcttatccccactctgcaagaagttttgttatggatcccctggatctattatttgact

SEQ ID NO: 115812 - DNA, 421 bp, Zea Mays
gtagtgtcgaaggtgcttacagtcaggccaaccaaagctaaggatgataaggatgaagagccacaggtggaaaaagtgataaaaatgccagaaattttgagcccaccggcaaaggcaaatctgccgaagatgcaaaaagctcctgctgcaactcccaagaggaggaggatggccagcatgctagacgctgttatggagactacaaaggccttgaccccttctcctgttaagaaagttgccaagggccaggccgaagccgaagctgagcctacggtgcctattgagacgaaggctatcgcgcctgaagacaaggctgatcagcaaacttcagatactggcataacagcagggcaaggtatggcagaaaaagcaaaatctcctgccctcgaagctccagccgaagctgttgattacatttatc

SEQ ID NO: 115813 - DNA, 300 bp, Zea Mays
ggaacatccaaagatcaagaacggaccagacacgtaaaacctaactttgtccggtctaagcaaaacagaggccagatgaccgacgagaagccgacataggaaacatctttatttgtaccaaaccaaacagccagttctactgtaggatcctccatcctttcactataggccaaaccatacggacaacgattaagcaattcagaagaaaagccgatccaacacaggagcaccctcgtgcaaataatagaacagggcgcatggactacaaatcagatctaagtcgctatataaaccatgagg

SEQ ID NO: 115814 - DNA, 375 bp, Zea Mays
gtcccaagtgattcttgcaattgctcccaaaatcgtgccacaaatggtgctcctctgtctgatactatagtccttggtattccatgcaaacgaactatctggtcaatgtagatttccgcatacttctccgtcctgtgggtggtgtgtactggcaagaaatgagctaacttggtcaatctgtccacaatgacccaaatggaatcatggtgcctagaggtattgggcaatgccacgataaagtccatgcaaatgtactcccatttccaagatggtatgggaaggggttgcaaagggcctgctgccttcaaatgactggctttgatcctctggcaggtgtcacactcggatatgtacttggcaatctccctcttcatt

SEQ ID NO: 115815 - DNA, 2412 bp, Zea Mays
gtgatcaagcatgccacggcggtcagcctcgaccagctgttgatgctcatggcagggtacccaacggacatcccggcgcaggcgctgcaggtgcttgacattgtgctgcgtgacattgtgctcaacgaacgcaacaccatggagtaagtacttagcttgggtttattttattcacctctcagtgttctcgatttgagctcaaacattttcgttgtgttattttggcaatgcacaggtacgttgcagttggccggtccttcttctcaccactcatagactcaatgggacccaagaaccttggcttgggtgtggagggatggaagggtttctatcagaccatcaggccgacacaaaaaggcttatctgtgatcataggtaagatttcacttcatttgaaaattcttatgatctgtccaagttttctgtgatatcttgagaaaaaacacgtttgtgatgcttatatgttagaaatgaccagccctgtgcaatttgatttcatatggctggttggcatatagtgagatcaattgaaacgtctgtacttttgtgtttcaatttttatatgttttaagttgttgacggctgcatattttccattgcagacatttcttcatcagctttcattcgacccctgccactgattgactttgttatggagattctgaacaaagataacaggacctttagaagtattacttccatggatcttgtcaaggtaggcatttttcccacacaaagagcattgtgcatgatcacacttgtgatggatgaggctttctgagtttgcagctcaagaaagccctcaagggtatgaggattgaagtcacacaccgaggagacatacgccggaagtaccgaattgccagcttgacaaacagtcctccatcttcacagttgtaggacctcacgctttttcctatgttgaatagatcaatagaacatcctagcctgcccagttcagaaatgtcgggatcaacttcttgcagttattgtttattttaatatatttttcttcaaatcaacagctttgaatcatctgctggagttcagaagtccgtagcagattacttcagagaggcataccatctggaaatgcactatgattttctcccatgcctccaagttggcagtgatcagaggccgaattacctccctatggaggtttgctaactatgaactggccttagcttatgcttcaggactcttttgtcttctatagtctgctcttgtttcttaatttccatttggatttcaggtttgcaagatagtagctggacagcaataccggaagaagttggaaggccaacaggtctctaaactaatggactccacctgccagcgcccatctctccgcgaggacaacatttgtcaggttcttgctatttctgtatttttttgtgttttatctgattaaactgttggcaaacaaacttaaagctctctaaactccttttgcttagattgttgagcaaaatgactacaataaaactgagcgtgcaagtgaatttggcatggaggttgattatcgtcctacttcagtgcaggctagagttctgccagctcccactgtaatccttcttccatatgtcatgccgttttgttttgtttttgcaaatgtgatgcattttttttaataataataataaccatgttctatttttttttgtttatgtagctgaagtaccgtggcactggatctgacagtttgtgttgtccaaaggatggtcagtggaacatgataaaaaaggtatgccatgaacatctgaacaaccattaacattgtagcatagtagatatcattttgaaaaccttattcaattcaatgtgcgataaacatagtattatgtctatggataagtaaattctttccatggtaaatatcatgatttataggagaagcttgaccgggttgcttgagttttgttctctctatactagggtagctacataggcttgctacatgttcactgaagtggaatgatggaatttttgtgatggtaaatttatgttactaattttattatttgtctacacattctattttgttatgtgcagcaagtagtagatggtgcaagggtgggcaactgggcctgcgttaacttttgtcaagagttgcgtgcagatggtgttggtaaattttgctctgatctggtcaagtggtctcgcactactggagtggtaatatacatttacgtttgcttttgatttccttatcaccaaagaatattcttgcatgactcacagtttaccattccactctcgtttcaggacatggataacttgagacttccaatatataccgctcgtcctgaacaagctgaaactgatcttcgtaggctctatcaggatgctcggaacaagctaagagggcaaaagtttgatcttttgcttgctatactgccagagaaaaat

SEQ ID NO: 115816 - DNA, 461 bp, Zea Mays
gaactttctggatgatgttggggcaacaaggatgttgttgagtcacaacggaccacgaaggaccatgtcacctacaaggcaataggtagagttgacctattgtcgacagtgatggaggaagggaaggcgggttatggggtgggggtaaaacgatggctctagggtcaggagtggtgtggaacgaggtatcaaagtcgacaacctagccggtgggagggtacgatgaagaaaagaggtgtgagaagagagccaagggaggcacccctagagagtcactagtaggggagattgtcatggacgcaatcacaacactaggaaacattaggggctcaatagcatggcggtctgcctgagggtgtagctcaacacagtcatggggaatagggttcatgacccgatcaaaagccacgaaggtaccccagataagttggccgccatgaagggaggagcgcatagtgatt

SEQ ID NO: 115817 - DNA, 411 bp, Zea Mays
caggcgccgtggtgatcatcacatcacccgcaggcgtcaagtacaaatacgcaacacgcctcagttttgccttagagtctgataggtgcactaacaacgtagcagagtacgaagccgtcatcctgggtcttcgcaaattacgagcactgggtgtcaccacgtgcataatcaggacagactccaaagtcgtcgccggccaggttgagaaggagtactcagcaaaagagcccgtactcatgcaatatctcaccgatgtccgcagccttgagagacaattcaagggtttcaccctgcaacatgtcgaccacaacaagaacgaagaggccaacgcgttggccaaagcagcggccaagggtgaggccttgccctccgacgtgttctaccacatcatcggcatgccagctatccaca

SEQ ID NO: 115818 - DNA, 504 bp, Zea Mays
ttcagcacccttatcgttcaccgccccgtggtcgcttcgactatggtaccttagactgcaggacccggatatatttggatccctagatcgaaagagaatgagtctgtaataatgcttagttcagtgtcttagtctagtgagtcttagttagagttagtttgcttatcttatgttggatgcttgttatgatggacatgtactgaagttggatctttgtaatgattttcaccaaggtgtgggtatcccctgcaacttggtgtagttattaataaagtcagttacttagttgggtaatccatttattcccactttcctctttatctgagaagctgtcagtgaagatggtcatttgttcagtgctatgaggattttctatacatcttttcttatgctgaaagactgcagagtcagatttgatatatgtgtgcgatttctacagatgtctgagaacaggcgcagaggtgcgaggcgtgctcagccagaacagcaggcaccccaagagga

SEQ ID NO: 115819 - DNA, 413 bp, Zea Mays
cccacttttgggatcgttttttctgtgtttgccgccaaaaccctgtatcgtctcttccatttggtagcatcatgagggagtaattcacttctatatggtagcgtgatggcgagtaattcgagtaaaataaagcaaaagcagagagtaccgtggatttcgcagactaggtgttggacttcagtgcggagctgtcgtgatcccaatgcgagagatagttcgtgtagtcaggattgtattctgttgggtggatagtttttcgaggagacgtcgatgtgcttagattatcactcaattgggtgaatcaagatatcccactgcactatgtccaacgattgagctcctgaaaatatatcattggcttcgcagcattcgtttatctgtcacgatgcacggctagggaaactttcagaaat

SEQ ID NO: 115820 - DNA, 375 bp, Zea Mays
gaaacatacaactgatttctaaacacttccacactaactgtgaataaatcctaaaaggctaaaacctatatcttactcgccttgttgtatttaaactaataaacttttacaaatctacaatgttttgaaatcatactctatatggttcttcagaagattgacagatggtaggtacgtttacatgctagttacgtttacactattttttgttcaccgccatctcatcatgtaaacactaaaaattcagaagtccaaaattgatgtcaaatgaatatactcacctctgctgtcaatttttgtgcataatcccctcaaacccctatgacagcctcatcgacattggccacgtgtggtgagcatggaccccctcaaaac

SEQ ID NO: 115821 - DNA, 588 bp, Zea Mays
gtgttgaagccgccatttatagcattcattaactgcgaacgtttcatggtagcgtttcaatggtcatcaaggccacgttcttcctcgcctataaaacgcgacaccgggcgtgttctcctcctcttccacgctcgttgttctcttgcgttctagctctttgctgcttgtagctcgccgcaggcacgcccacctcgctggagccctgttccttgacccccagcactaccacatccagcaaaagccttccccaacgccactgttctgattccctgccgaaacgctgcccgtcgtcgtgtcatcgaagacccgccatctctgcctgctgctcagcacaaccactcagtccctgctggttgcaccaagttgcggtcgctagagcgattcctgtgctgtgttgtgacagcgatcccctcctgcaaccgaagcctcgtcgaccggcgtcttgttctacttcttctctgtgctacgtacctgtgcctgaaagtcatgtcagaggcagaagaagctaaagtttgtaatctacaccttagaagctagcacctatgtttgattttcaaattataactgaataattagcatctaattaaa

SEQ ID NO: 115822 - DNA, 810 bp, Zea Mays
cttaaagagaatgttcacccagtggaaaacacttaatgaaagggctacaggtcttggtcgagaccctcatattggttcaatcagtgctccagatgagtggtgggctaagcaaaatgaagtaagtagacttcatttttatttttagattaacaatactaatggccatctgaaagtaggaaataacatgttgctgcaggcaatgccagggtgtattatgttcaaaacagccccccttgagaatgaggacgagctaaaggttatgtttggacccattgtctacacaaatgaaacaacccttgttcctggcgtcgaggatgcaaattcatcatctgatgatcatgtcgaagccaatttaggtggggggggaaacagcacacctgacccatgctcaaatgcgactgggaagcgtaaggtgccgcatgattctcctaaacctaagaagaaaaagatacgaaggaagaatacatgaaacgcctagtggaggcttttgagccgcgttccatgaacactaacaagtccataacatcatttgagaccgaccctgttcgtgttgaggttgctgctcagttgcaacaagtgattgaagatggttcactggaaggcagcgacttacatttctttgccactcatttgttgatggagaaaaagtatagagatgtatttgcaacactgaagaccaaagaaggaaggaacgcttggttgcgccgtgctttcgagatgaatgttaagtccagttagatggtggttgtccgacaacagagcctggtggtccgaactatgttcctgttgctgttatagtgtaaaactgtc

SEQ ID NO: 115823 - DNA, 654 bp, Zea Mays
gcctgatcggcgaacaggtgaagctcgaccaaagagagggagtggaagtggaggtccaacattgcggcatgaccgcacaattgatgcgcttcgctaaaactactgttgtatgggttgcgcatgcctggctgatggcaggagacggctgttggacggtaaaagagctggaggcgagtggtgactggtgagatcgatggccagaagaagaaggatgagcagtgaaagagacgtccgcgataagaaaatcagagggtggctgaaagagaagaagtgaggcaagcattacagggaagatgctagggccaggaatactcgtcgtttatggaccgaaaggagcaggaagttgcacgtggctatccttatcacagtggaaggagcgctatagagccagcaccagtcgagtttggatacgtggccgcgatggaatggcgcaagcaaaactggcttcagttaagcggcaaaaatttggatttagcggtgtccacacaggaggcaaggcagacaccagccgacgcgtagcttgagcatgcacagcgcctccctaaaactgaaactaagttcccagccggcctgacagcccaatttcaaacgaattttactctgacaatttctccgacaatttctaagcaacatgtaaatcgtccttaatcaaag

SEQ ID NO: 115824 - DNA, 541 bp, Zea Mays
tcgacggcgacgaaggtgaacttgaggttcccttgggccgtgggtagtggcccgacaatgtccaggccccagcgctgaaggggccacgtgtgggcgattagttttgtgaactacgaagggcttcccgagcgtggagaaaacttttggcaggcttcacatgaccttgtgacccgattcgcggcgcagatcatagcaggccagttgaaaccttgacggatcaccttggtagctagggccctaggccccgcgtaagagccgcaagtcccactgtggacttcgcgcaggatctggacgccttcggtctcggtgacgcatttaagcatgggttgactgaccccccttcttgtaaagttgtccctcgatgagagcgaagtcccggctctagtgtttgaggagcttgacctcgctgatatcgcttgggtggtaatatccctgcaggaacatggttattgatgcccgccagtcttcggtcatgatgaggttgactatgcggtggccctcggtgtcgttggttatttggaggccctctgggctgcgaacg

SEQ ID NO: 115825 - DNA, 520 bp, Zea Mays
gaagctagattgaatgggccactggattacaaccttcacatcgttcctctgactcaggtcattcttcacataaaaccattgcttcatccacgaacccgaccatttcttctggaaagttggcatggggtatcggacatctaatcagtacacgaaggtgtagcatccaaagttgttgtgatattgtcctaaaccctaaaccctttgtttgataggacaattcatgaatattacaaaaacaatcggcatctggttctagcccttgactccttatggcccagatgaaaattctaatttttatcaaagctacaggcgtaggttgatgaagagagatttcaaactttttcaagacttcaaccaacatcttatgcaaaggaaaccgcagcccagctttcatgaagcttcagaataccaccacctcatctttctcggggagaggaacagtgtcttcacctctggtccaccacgtgacttggcctccacggtcggtcttcggcatcatctgcgccactatcaacatcaa

SEQ ID NO: 115826 - DNA, 390 bp, Zea Mays
cggttatagaaatctcaacttcaaatctttcccctttggaactggtaagttctacggttcccctttcacattgtataactgccttagctttccttaaccaggacatcccatgtataagatctatactgctttcttctagtactatgggtgtagaccagaattcctttcccataattttcagtgtttatctttgtgtcatatagtttgcttcaataggccctttaggtgtaattactaccataggtgttttcatgttttgcagtggtaattcattggtggtggcaaatcggacagacataaacgaatgtgtagctccagaatcaaataataatgttgctggaattgcattaatgtaaaacataccgatagtgatgtctgcaccgtcagcag

SEQ ID NO: 115827 - DNA, 629 bp, Zea Mays
aaaagatatagaacgaatttaatgtttattttttgtgaagattaatagcctcaatgctaaaaacaagaatataaattttcatagcaaattctatatgttatttgttcacaatcgaagaaagaagaccaaaaaattgacatccgaatacatatccggatccatccctaattgtcgcctccccacgtggttgccgtgtgccctgcctcacctgttgaccaacgaacgcagtcaaataagtcgctaacttcctagcgcctcctctagaaaattagtcgcctctggtaacttcacacctctactagccacgttctaccacaccggtctctgccaacttcgtgatcacctttggtgcacggtccagcccaagtagaggttccaccctctcaaacctgcagcaatgtccacttcttgatcgccttctgccaagaggagcacataggcaatagatggtcgtctagtactgtacactctaaatcatgggatgaaatttagcgatgatgtggtcgcacgaggaggtagaaactggtatatgaaaacaagggttatggtagatcaggcacggtccttgtggtgtccaaattgtattcttgttgttttcaatcacattgttggttgaattggtggacctc

SEQ ID NO: 115828 - DNA, 405 bp, Zea Mays
cggcactgtcaccattcaccaacaggttcgcacttcactgcaggcaccagcatgccaggaattacgttggcactcggcagtgctgcgcggagcaagaaagctagcaaaatagagctataaatcacaaagaggtgtccacggcttaggctgtcttcggtggatcgtgtatataagtaatgtaaaacactgttttcaactgttcgtatgatgaagtttaaaatatgagatgaatgtgagatttgatatgtaagctgctgtagacattacaacttataaaaacaattggattgaagatcaccacagagcatgtccgttttacataagcagatggcagcacaaaaccctatttatttccccactataaaacttgtttcagaattcgaagtggcatacaaggtaacgagt

SEQ ID NO: 115829 - DNA, 628 bp, Zea Mays
aaattctaatgtctttagctatctgatctctcattctataggtgacaaggagaatctcctttttgaacaaagctttacacataattgtggtgggaggggtacccacaaggatccaactatttctgcacttttagatacatgctggcaacatatggccttgttgtggcgagtccaagctaaaaggttcatgcgctaattcacatcacatgctaagcccacaataagtgtgtcgtaaggactactctagagaagcaccccaacaatacacgatttcactatagttgctctttgtaaacctctcatggggaatgagcataaaagcatctctcacagtgatgatcgaagctgacaacaataacaaaagtcgttcaactatcctctactaccaccaagtcatctggtggtggaaaccaccaagagtaataagaatactatagcttaatatgatcattagcaccagcaaatgcaacaacttaatgtaaatcatgagagaccacttccaaactcactttgaatcaatatcacgaaatatgatggggaaatgttttttcttaggcttactagggtgcatgacaagttggaaagccagaattatctctaagtccaaacaagatctacttggcatgct

SEQ ID NO: 115830 - DNA, 494 bp, Zea Mays
ggaacgagaaatttttagaaaaagtgcaattggagcacaatttgagcctataccaggattctaagttggagatgagaaaaaggtaagaatccatgacttagatcagttggatatactctagataagtttgtctaagtcatagggaagctctcaagttcagtcaaactggttggaaaaagatatgcataaaagtgtcaagtttcagctgttttaggccgcaccgaaccagcccggtggtgcgtcagacccttctcctagagagccagcaaaaagactcaaatggcctagcgcaccggaccagtccggtggtgcgtcagaccactttatgagagatctctacataagtgttgttgtggcctagcgcaccggtggcacgctggacaaatttaatagagaggtctatagaaggaaccctaaacacttcagcacgccagaacggtttagtgtgccccgaactgattggatccaacagaaactttaacgttcaattgttg

SEQ ID NO: 115831 - DNA, 607 bp, Zea Mays
ttcatctcatgccttagaatttggcattatatcgtcagcttatgcttttagagatcaacctgttgtctttaattcttgccttagagatcgacaacgcggtatacacatgtcctgttaggtttgaaatttatttgatcggcgacagattggacgtctggtagatggctcttggctggtcttcatttcacttcgtgctttaatgcttctgttgattacacttgtacttcatcagctatttttggctttcctccaatctctattgatatcttccttctatcttgatacattcattgcgtatactgtatggatgtgactgcttgggaaaatctattgaaaattcctggacgtcccccccaatgggtgtagccaagggacggcttggtgtgctgagcatttagcaaactgcccttgagtagtaactttacatgactgcggggcgtaatcatatcgtccaagtagttgacctcagtcccaatggtgtcgtgttacgtgagacggcgtctgccgcctgacttgtttctaggcggtttgaatggcttattgaatatttgcgactgttcagtgaccgtggtaggagatgagtggttgcctcccgcccctataaata

SEQ ID NO: 115832 - DNA, 469 bp, Zea Mays
cataaagcttatttccaaaatattggcattacgacttcagccccatatgaacgtgatcttctccacttgtcagagtgccttcatcaagaataggagcatacatgataacttcttggcagtgtgtactgcggctcgccgttttcatacaaacaagaccccaacactgctgttcaaattggacatagcaaaagcctttgattcgatacgttgggagtatatcctcaccctccttgagcacctaggcttccctataagatggtggggatggattgcggcaattcccccctatctgtcacgggcgaggcctaaggcaaggcgaccccctatctcctctttttttgtcattgcaatagatcccctgcaaagactgcttgaagtagcaactgaacacggaatgctcaccaaactctgtggccgctcacccgacctgcgcatatcgatgtttgcggatgatgcagccatatttgtc

SEQ ID NO: 115833 - DNA, 289 bp, Zea Mays
ctcgcattgcacaggatgacaacacccaaagcttgtttgtggtgtgacttgctttgcctgtgatgtgacgaagatctaacactcttcctgcaaaaagttgagaccggcaagaacactgttgatttcattgtttattcacgttgtaaatttatgtgaccttgttgttttgttaaaaagatagcaggtacggtgtggggtgatgtactgatgtctcttctggatttttgtcccaagcatatctcaatggctatcttgcctttctttcttttttcccagtgccctcttgctc

SEQ ID NO: 115834 - DNA, 439 bp, Zea Mays
taaacattaatatgatatacagtatgctatccaaagttttgtctaaaaatatatctacctgacctcaatattcatagtttccctttatatgaaactgtagttcctgtcagatcgcgacatttatatgaaactgtagacttatccaaattttttgatggttcaaactatgtcctatataccagtttaatctgttcaacgtgttgcggttcttgtcagatcacgaatattaacatgttcaaggtgatccaaaccccttagccctatcctttgtcttattagtccatacttctatacactatattgttttagttcagtgtctctatcctgaacttatgtgtctgtggtaaagtacccccatttaatgacattcttagtcacggtaaattattgaattaagaagaaaatgtgttgcgacacagttgtctatctttacactttt

SEQ ID NO: 115835 - DNA, 273 bp, Zea Mays
atcacaaacaactctgggagtcagggactacgccactaccgagagctccgggagggatattgctggccaacggcggccaggcgatcgcctccatggcatggaagcttgaggggtcatgtccattagggagagcagaggagatccgatgagtccattctctagagtccagactccagactaggatagaacaaggctgaggcatccagtttcatcagttcatcacgtcagttaccaggcgcacgccacatggctgattaccaaggtgggcctttc

SEQ ID NO: 115836 - DNA, 528 bp, Zea Mays
tttgtttatgttattctacacgctacacataagtgtgtgttggtgttgttcttctatcgtggcggtgcaaagtattgtgttttcgttgaaatggtggagtcaaaattgtgaagtgtgttgaactcaaatcccatgtgtggctttttgggtttatgtcgtaccttcacaaaactatttttagttaagtgaactcgcgttatccacatgttgtgttgtaccatctaattgattcggtgcctttgttccttcctgcgcagatagcttttgacagaatttgcagaaggctactcgtcgctgattccttttgggaggttagttccttgtcgtgcttttacacttctcctcacgattcgtagacgacgatgactgctttcttgctacacacagtgcgctcagattatgtcagtgatatacttcttttcagtggcatagtattttgtttatgttattctacacggtgcacatagggtgtgttggtgttgtgcttctgtcgttccggtgcaggattgtgttttcgttgaaatggtg

SEQ ID NO: 115837 - DNA, 323 bp, Zea Mays
gaatgcatgtctgggagacaacggtggcctggaagtcaagccaaatctagaagatctcatatgcaaggctcaacacctggacgcagagacagccaggcttatgggaagagcacgcaaggagcaactttcggaccttaggacagacgagcaaggagtcctctggttcaagaaccgcctatgtgtgccagtgggagaggcacgaggaaccctgctcgatgaagcccacaactcagcttactctatccacccagggaccaccaagatgtacctaaacctcaaggccagatattggtggaaagggatgaagaaggaaatagcacagt

SEQ ID NO: 115838 - DNA, 370 bp, Zea Mays
atatggtgaaagaaacagaagagaggattcaatggattatacataatttgaaggaagcccaagctcaccaaaaaagttatgcagacaaacgacgcaaacccttgtactttcaagttgaagattatgtctacctgaaagtctcaccaatgaagggtgtatcacgtttcggggtaaaaggaaaacttgcactgtgatacattggtccattcctcattcttgaataatgtggaccagtggcataccgactccaattacctgaaacattatctacagtgcacaacgtgttacatgtgtctcaattgaagaagtgtcttcgggttccagatcgaaccgttgaagtgatggatgttgccttagaaccagacttgac

SEQ ID NO: 115839 - DNA, 687 bp, Zea Mays
atcctgtcaacacaacctctcccaaagaatcccagagaagaaggtattgttacatccctagaaaagaaaggggggggggggggataatgtccctcacccaccttctgttgtcaagatcttgagccaccgttctagaggaaagggtcttcttatcaactttagcagccacctcaggagcaatgtcctgaatacaacagtcattcagccatctatcagaccagaacaacgtgttgtttccgttacccacaaaggagatgatcgagctagcaaatagttgtcgagcctgaggctggataggaagatccagaccactccaaggcctatccgggtctgttttctacagccataaccatttcgtttgtagcgcccaactcatatatcgcaggttcggaatacccaggccacccagttttagcggcctagtaactttgtcccatgacactaacagctgcccccattcacttctttccttcctttccaaagaaacccctgccgcagcttatcgatagatttgatcacccactttggcacattcatggcaataagaaggtacaccgggatagctgataggacaaactggacaagatcaaatatctcaattgtcagtatttttgtttgtttctattctaatgctcttaagacaagatttgctttgatttttgaacaattgaagcaacagaaagctgg

SEQ ID NO: 115840 - DNA, 283 bp, Zea Mays
caatctggtgatcaacttgtatctgaaccattgatgacacccactcagatggagtcgcagatgactcctagtcaagtggaaaagttagttatcagacagcaggaagtgcgacgagtctttgagagttgccctgatgaatctgttacacctaatattgttagtatttaagcttgacttatatattttctggcttgatagtgtgcattagatgtttacatattatgattatcgaatacttcacttttttgtgcagcaaggtcagacagtgccaggtggcatagtt

SEQ ID NO: 115841 - DNA, 852 bp, Zea Mays
tttacaagtggtgttttctgagcggagaggtgctaatgagatgaaaatgatggggttcccctaggccttatatacacgatcatggggcactccctacgcacacgctaatcacactcttctagcttatctcctagctaataatgaacagacttttcttatcttaaggaaaacccagtggcttcgttgcgatctatcttcggcgtttgagggcgtcgggcgcgggaaagacaaatggctccctcgagattatgcctaatccacgaacgatccgggcgtgagcccatcgccttcttggattggcccatttccactatagtccttgcccgacccacgatgagatgaccttgtggggtgactggtttgtggccccacgcaagggttttcgccttctagtggacccgagggatatctgtcccccacaggcgccatcgccagcaccacccaaaacccatctctacgcgctcaaacttcgatcgggctaggtctacacgactaggatgcaactgtgaatgtatgggtgaggttcgtaccagtattcaagcggtgtgctgccctacccacggtgcacggcgaagccacaacgacgacgaagaattgcggtcaccgagatcgcccttcctccctgccaccacccccgatgcgatccagatgctcgataggagcctcctgaccgcgcacctatccccaaagaagaacaccagtggtgattcctcacgtcgactttcctctatccctctctcacttccggttgtttggcttgcacgacggcgggtctgcgataagtggcaaggtgggcgaggaagataaccgtgcgaccttttatgcgccagagtagctcctagactacgcacc

SEQ ID NO: 115842 - DNA, 330 bp, Zea Mays
ttccggctccaaggatttctccacctttaacacttgcagactgtccgttccgtgttaatcatagattccaacgaattggtgagcagggatcaggtaacatggtgacaatcagtgaccagagctggggaaggaagagtgatgctgctcaaaatttgaaactccacgcgagatttcaggcttcagttacagaaggcagcacctcaaaaaaaggaaacaccaagttcaggccaaattgggcccttgcacgcctgttgaccagacggggcaagttttttggcaaagcccagcccacaaacgtttgccccaaaggtgtcataccctacgtaccac

SEQ ID NO: 115843 - DNA, 358 bp, Zea Mays
ttgggcttcaaagggatccctttcttccagttgagcttccagggctgcaatccttgcatgtgcatcctccagctccaaatgtaccctagataggtccagggtagcactgtccaggtcggtgttaagacctgccaccataccaataagggtgttgaggcgatcttctccagcctcacctggaacaatgctaggctggctttctccacgaaaacatagaggaagatgcatgtactttgtgtcatgcaattgttgccagcaattgtggctgagagaccacagagctcgcctagcagcattgctgaccgaagcagcgtaggtggatagaggcatcagagactcatgagctgatagagtcctg

SEQ ID NO: 115844 - DNA, 827 bp, Zea Mays
taagatatgaaatgttactactggctattaaaataatttcatcacatcacatcattaaaaagtttgtggctctaagccatcaccacaagcatcacaagtcaggcgaataattattatagaccaattgagaccaattgttcattacataaattaaaagtactgctaagatgagaaccttctcccccctttttggcaactagcaccaaaaagagagaaccaccaaccacatattaccactgaggaggaggaggatcaaagaactgatgcgccaggtgagttgcaaagtgttcttccccagactgagctgggagaggatagcttcctgaaggatcctggggcggaggataagaagaggattgacccggatccccctggtggggaggcgggacaaactactcacgatcatcaaagtattcttcatcttcttcttcatcttctggagacatgaaaggcaccccatatgcctgctggtgccactcattgatttctggaggaggcggatggagaggcacatcaggcgaacggggagcaaatggcatacccatagaggaagcttgacgacgaagattgtcgtcagtctcccattgacgccttaccagctcatgcacatctgcagaaatattccggcacatagaaaagaatgctgcaatcccatgggccaggcgggcacccatccctcggccacgacctcgaccacgaccacgaccacgtggcgtgggagatccacggccaggggagggacgcgaggcaccggcagcagcagcaggaccaacagaagtatgtgcacgggagctggaaggggctttcctcaaacgccctactggatt

SEQ ID NO: 115845 - DNA, 796 bp, Zea Mays
ccaaacaaccgagaagctcactcggattatcaatctggcacaagaggctagaaaaactcagtgcacaagagctgaagatgagaggcatgacataggcccctaatgggagttctcaagatccaggtaaggatgatgcttttggaagaagtggagtaaaggcaaacaaaaggaagaaagcaagtacaagatgtttgggtgaaaggtttgccctagctcaacaaagctattggtcattgcatagtccatatttttcagctatgccatatacgtcgtcccaaggtatgttcggttatcctttatggcatcattttgctccatatgtgtctttatattatggaggagtgcaactgaattattacgcatatggatagttacgatatgctgctgcttaaatagaaccgaagtatttcagttgttggtagtaatgattcttgctacaatttgcttctgtcatgtttattcatgggatgatcatgcttataatatttgcttatcactattcagttattgtttacttgcaaactacataatcagtcttgccgaatagtttcaagtaaatgattcatttattagtacaaccaatactcgaacttatgcatcattgagttgactattattttgttcttccatgggagcaagctctatagttcaatagacatctttgctctcagtgtctggtatggctgatgaatcctttctaatcatcgtgctaagtttatgtcctcatccaaagggtaggatggatgctcgggggcaagcatgattagatacctgatcatggtcacctatcctgcgt

SEQ ID NO: 115846 - DNA, 909 bp, Zea Mays
tgttatggacaattcttgaaggctgacaagagcagacagagctggagaaggaatatcactatcccccctattacctctgtaacaccggctattcttacgaattagcggaacttcttcttcctcttcttcgtcctcataaaaaatacggacaatagccggtgcacggtcacacccattggggtcaacttctgcacggtcacacccattaggattatcttctacacggtcacacccattggggtcagcttctgcatggttacacccattggggtcaacttcaacaaggtcacacccattgggatcagctggtgcatggtcacacccattggggtcagcttcaacgtgtacaccaccattgggatcaacctcagtaaggacctctgctggtacttcttcacaaacaggagcagaagggccagcatcctggtccaagcatgacagtcgccgaagccgcctcttctttttcttcttctcctcaacaggcgcagttggatggctaacttggcgagcacactttgggcgagtaccctcaggctttcgggtgtccactgttttgttaagctcttgtccaaccgtaacagccatcggttcagcatgggccgagtcagaagattctccagccaacatattgagtacaacatctatttctgcatcatccggacttgccggcatcgaaaagtgaacttgcctctcatcattgggaagatcacgaagaggagcaaccagagcttcaatgtctttaggagagggtcgcactctaagacctagaccactatcaatagcaggagggttggacacgaaattgaaaaatgacctaggagatggcagattccaagcagaataagcaacaggagcacccacatttgataccttgcccctcaggatcatgtctagtcggctcaccaggac

SEQ ID NO: 115847 - DNA, 314 bp, Zea Mays
gctagatagaatataatgcagttagaaagatccataactttattttggtttgacttaattaatttactttatgcatttgatatgtgaatttgacattactacaaacgagaaaggagatgctagtttaaaagatcacgtagtgtccaaaaaggatacctttcgatattaggatcaatgctacagagagacaacaatattgatgaagatattagccatagaatcaaagcaggataaataaagtggcatcaagtatttgacgttctacatgaaaagagagtaccacagaagctaaaagacaggttttatgaaacgac

SEQ ID NO: 115848 - DNA, 407 bp, Zea Mays
gtatatatatatacttacatacattaaaggcggacgcaaagctctgcagccacgctatccacgacagctgaaaaaactgtagccgtcagattcttgatttacggtctttaccatagtgagggcctgaggggaactacagtttctaaaggctcctcgaatatgccagatcaaacatcgatgtggcattttatatgtctcactcatagtctgcctcgccggttccgcccctctcaccttggcctctccaccgtccgcccttgcttcatagtgccagcaacgactccatccaccccctagcatagtagctgatgcatacgtctagatcccaggagtttcctaaatgcgcatgaggttgccccacctcccgagaagcgtcgttgatccgctcgcccgcctgcggaacaggt

SEQ ID NO: 115849 - DNA, 451 bp, Zea Mays
gctggtagtggtacgataatgatgagagtctgctgctgttgggctggttgtacgatagtactactagtgatgagagtgacgctagctagttgctctgctctgcgttgctctgctctgctctatgtccccgatcaaacgagagagggatggcccacatcgacgcagtagtgcccggctgtttgcatgggctataaaatggaccaccacctcaatcgatagggacggtcgggtcacaatcgccactaccctacccactagtacatactagagcagccgatggcctcctcctctgtttcgctgctcgtcacgatcatgctgctgctgccgccgtcacatgcatgctcctcgctgagttgcaggcttgacttcaccagcgtggcgctgctctcctgctaggagacggccccacaaaaccctactgcctcatgctgcgacaccctcctcttttcca

SEQ ID NO: 115850 - DNA, 710 bp, Zea Mays
gttttttacgcaaagtttaatcatcctccttctggactctctcagcaggttcatttagaagtctttctacaacttcatcaattgatgcgtttgccattctgatttcatcgagagtaccctttagggctggatcagtattagggttgtatggttctggaggaggagagagttcagccacaccaaaatataagtttttgtcagactcgaagctaaaataattacgaagctaaaacatgacaaatgtacctatacgcattttgcgctcagcggtttcttgagcttttctcacttcttctgaggcaagatgatattcttcttcgctttgtcagataccttcgtcggctatctcttaaccattgttcaaccaaacttcggaataaaatttcccgctaagggcagtagcttcggctgaaggcactttgatgttagtcgttgaaactgagaagtctggctaaattacagcattcgcatgttcacaaccagctttttcaagcaaagatactgctccccgagcaccgacacaggcacaaaaatccccctgctagtgagaacttcgtcaaatgcctcgatttcgccctaaatccatttgatcacaccctcaggatcaccacgaatgacattccactcagccgagaacacaccaacactagtaaaagcatttttagcttgtctgagcactgcatagcaatgttatagcattcctatttcac

SEQ ID NO: 115851 - DNA, 271 bp, Zea Mays
ccttcttgccttcgaactttctgccagttcgagcgctctgctagttcgtctcttcgtgcacccatggtttcctttccccgccgctcgatctatcggagccgtgtcaagggtcgagagaggaaatgattcctccccctgagacaatgtcagggtggcggctggaggaggatggtgaggcacctacgccgtaggatggcgaggtggtcttgcttgcccccttatacaagcgtggctttgggctgtccctgcacctgttcgtgcgggggttgct

SEQ ID NO: 115852 - DNA, 387 bp, Zea Mays
tgataacctacccatttggtgaacatggccgtgcatcctaaatgtgagcctgtttttatgaatctataataatctcatacagggaaaagtgtttttggttaataaatttgtccacagcagtatacactaacattttagtgttttgacaatgcatcatcatcaatgactgtgataggatccttgaccatgtcgtggttgtgaagtgtgtcgggatatgagattgggggttgggtcaaaacctatgatttcgataaggtgccgtggtggctaggatgtagatcggcggcacaataatgatgggacataacacgtggggcagcctttgaagcctaacaaagataattgccttgcttgctttcatttggttacatagttctagagtacttt

SEQ ID NO: 115853 - DNA, 473 bp, Zea Mays
catcaattgatcttcttgcttagtatagttacccaaaatttcattgcacatagcttcaatcatttccaaccattcttggctaggctctttgaaatgtttcttgaacttgaagtgatagggcagtcgaacaagttcattctttttcttttctcctttgagcttcggcatattctattcctttaacgttgggaatactctattggctaagtattcctgtaccaaatccctagtgccgatatgctcagacacaactcggaattcacccatagcttctcggcatggtgacccttgcagcatgtcgcagaggggcctagttaacccgaaggttaggtccagtgggctctgaactagcttgcccttcttctcatcaaccttaacataaaaccactcagttttccaaccagttggccatttggtgcgatagctgatcactggagtcttcatgtctttgcagtaagcaaagttgtaacagc

SEQ ID NO: 115854 - DNA, 802 bp, Zea Mays
gccctttagtcatgatgtcggcgaactggtgagaggagggcacatggagaacccgaatctcaccaagggccaccttttcgcggacgaagtgaatgttgatctcgatgtgcttcgttcgcttgtggtggacggggttggccgtcatgtagactgcactgacgttgtcgcagaagacaacagtggcggaggttagctggatgtggagctcctggagtaactgtcgaagccagcagcactcgaccacaacgtgagccacaacccgatattctgcctcggcgcgggagcgggacaccgtggtctggcgcttggaggatcaggaaaccagattgttgccgagatgtacgcagaagctggaggtggatcgtcgagagtttggatagcctgcccagtcagcgtcagagtagacagtcagcgtgtcgatagagccggtgccaatgtgaagacccgaggagagagtcccctggacgaagcgtaggatgcgcttgataagtgcacagtgaggctcacgtggggcgtgcatgaagaggcacacctgctgaacaacataggccagatcaggacgagtcagcgtcaggtactagagagcccctgccaggctcctgtactcagatgcgtccttctctgacagtagaaccccgtcggtcgcggatagtttggcgtgagtgtcaacaggtgtcggtgtcggatgacactcagccatgcccgcgcgctgaagaagctcgacagcttactgtcgctgggagaggaagaggccatctgaggagcgtgtggcagcgatgccgaggaagtggtggagggcacc

SEQ ID NO: 115855 - DNA, 430 bp, Zea Mays
ccaccgtggaccatggaccgtccggcctcagggacagaccgctcgaccgtgcatttctggtgctcaacacacccatagccccatcatgcagagctgaaatgagctttgtccttaaggctgaattatttgcaatccatattaaaccatcctttcgaatgagaccattttgtaaagaaaacccatgctcactaggactgggaacagtcagctgagccaataagttttgagcctgcatatcagttatataagagttcaatacatcctgtagccaaacaggttgcacttttgtcacagaatgcatcaccattgcatttcttacccgagaaagtgcatcagcagcaacattctccttcccttctctatacaccactcgaaattgcaaacccataagcttggtcatagcctttttctgccactctgaatggaggac

SEQ ID NO: 115856 - DNA, 524 bp, Zea Mays
ctaatgccgaggacgatgctgtcaaaccgccgtggacgaggcgtgctctaggtttgctacgcctggaaacgcgtcgtagacgaatgcacgtgttggtgttgccagtaccgcacgtactaggtagaaggctccaaccaagtgtcagtgtctgaagggaccaacagagaagacctccacgacggttgtggtgcagcatgtcgggagtgctgttgcagctcacgattgtcagagtggagtagacgaagtagttgaggatgagatggcgacgctggcaacaaggttgtgctggaagaaggtgaagaggtaggcatggcgacgcatcgaggattctggagtcgcggcggcgagagccacgacacacaggaagagactcaacgccagtggagtgcgacggcggtacttgtcggcaaagaactcgacgatgaacgtggtgcagaccaatgacagtgtcgacgcaacatgcaggtgcaacacagatcgacgggtgtgatgacgcagctcgcagaccatgcgtaggagacgcg

SEQ ID NO: 115857 - DNA, 362 bp, Zea Mays
agactgtgaaatgaacgaggtcatttagccgaaggtccgaaaaagcaccttccctgcgctataatagtgaatcattctgtatcatgggccctatcgcttagtggtgctttgtgtatatatacaggggcttgcgctgagaatatttttcgtgctatctagcttttgtgttgtgattgtcgttttagctttcttcttctgtgagcgcaattgttttttgagcttcggctctctgttgcgatcatcatcgaaatggccaaagataagaaaagcgtagactccgcactcgctggtttctacgaagccatggagaggactaacgttgagaaaatcactgatgaaatgctagttgggttatctaggga

SEQ ID NO: 115858 - DNA, 365 bp, Zea Mays
ctgttttgtcacatgctgattgcttgtgtttgagctcactacctcataagctttggattgcacactagtatagtttgcctctggattgtacactaatcgagacaagtcttccctccttaaaaaggtgctacgaagccctaggccagtcattttactaggaaaatggtgcctctgcctggcagtgtataatgtcactctaggccttgtagcggctactgcttgttgactgaacaactacattgaaacttccaaaaaaattgagagttaatgtttctacatgcacataggattaacgtatgattgactgattgagggtctatttggatggactaggactaacgactagtcttattggctcttatttg

SEQ ID NO: 115859 - DNA, 484 bp, Zea Mays
atgaaatacattatggatatcagacatggattctggcaactaaaagcggtaagctgttggctctattctaccgatgataggataggggtcgatgaatcgcggagctagcttcccttttgcttgaaatcttttgactccacgcattggggagaccttgaggtagacgaaattaccttcctcgaaactgagttctctccttctgttgtctgcataactcttttgccgactctgggcttcgaggaatctcttgcaaatcagggcaactttatcttctgcctctttgatgaaggcaggtccttctagggtcttttctcccacgtttgaccacattagaggggtctggcatctctttccatatagggcttcaaaaggtgacatcttgatgctggtctggtaactgttgttatacgagaattctgcatacggcaaactggactcccaatccctgtcgaaggacagcacacatgctctcaatagatcttcg

SEQ ID NO: 115860 - DNA, 870 bp, Zea Mays
ggggcttcttccttctgctcagtctggcatccttggcttctggtcttcttgcggattttctttgcgggggcgagcttctttagcttcttgtggtaatccatcttcagggttcggtaggcttcacgggtgttggtttcctcgccttctgctatctcgagactctcttggagggacgccttttcccttgtaagttccctgaattattgctccaggctttccacccgggattttaggtgagtgcagtgggaggcaaggtcatcatattggttatcgagagtgtggaggtatccaaccatgtagacgatggtggggtcatcctcggtgggatctctccttgacagggcctaaagtcttttcctccaggcgggggtatttttgttgctgggtggaaactagcgaaggggggtttcaaagactactctgctgtagttctggcataggtgtcggagggcttttcgggcaacattttggcaagtatctgggaagcggtgtccggtgaaagtgacttggaaagaagggtggtttgggtagtttcggctttctcccaggtagactgccatagagcacttctccattccattctcgagatattccttccagacatattctggcttcttgcggatccccatgtgaagtgacttcgcaatagatgtgggaacccctccacttctgagcagtaggatgtcctaatgaccagagagtcttccatctggaataggaaaagaagggtctgttaatatcgggggaaaggagagaagatttttcttagggtaagaggtattttcttttaaggcaaacttttaaggtcagggctgcgacctacggccagtcctatggctctgataccacctgaagcgtcccgatcctttg

SEQ ID NO: 115861 - DNA, 651 bp, Zea Mays
cagaagtgaaggcgctgggggcaagccaaatcagaccacctattaaggcttcctatctaacactgcacggttggtccgatcaccacttccgtatggtccaggcaatgagcgaacagttcaggatcctcatccaaacgatcccggggcaatcagagatgtctgtagccatgaccacacaccttcaagccacgatgacccgaagataggtacatggaaacaaaacgtagctaaagcacatagtcgtctgattaaatgtgaccctattttgatcaacttctttctaaatatgtcaacaaaaggtcattcctcgcgaccggctagcaaagctacctcatttgcctacccgacagaggcaggtgaagggaaactgctcacctcaggaggtaagaccgaataaatcagtcagcgatgttatccagctggtcccaaatccacaatcaaggccacccgcatcatggacacctccacctagttatgcactcatgtatccaccaatctacccacctccttatgcatttacctttccacatccaccatatatgtcaaatcaaatgtagggagcacctaaagccaaggcacaagcggccataattgacaagacacttgcaacacaggctcctgcacagcttgtggaccgtacgactcctatgt

SEQ ID NO: 115862 - DNA, 641 bp, Zea Mays
tggtcaagccacttgcgcttccaagttggcctcgaaatatgctaaggttcgattcattgtcgccatcattgcaacgagggggtggattatgcagctcggcagtttgtcaccataataagttgttgtgaagtttgagacctcctctagaatgtatgcctatgcaatggaagcctcgattttgcatttatttctacatttctttcgaatagtctttagacatctctcgattggatagcaccaacgtccctgcacgggccccccccattcgttcctcataggggagatgaagaatcaaatgctgcattggattgaagaagccgggtggaaatatcttctcaagcttacacagtaacatgggtgccaatctttccaagtctgcaaccacggtccgagataactcttttgcacaaagctgacggaagaaatagctcaactctgaaagcgctagccagacatgctcagggacatagcctcgaaccatcgcaggaagaatccattcaatccatatgtggaagtcatgactcttcatccctaagactcgcatagtagatatgttcacccccctactcaggttagctgcatacccatcagggaacatcaacatcttgatccactgaagtacttccttcctctaggccctg

SEQ ID NO: 115863 - DNA, 305 bp, Zea Mays
gttgtcagatgagaggacctcatgagaacggtggataagagtgcttgcaggtgtggaacgcttttaagtaacgaaagttctgcagacttgtagatttgagtaccagacagtgcaggcattgtaaccttggggactacagactattcgatcagcggttttataacgttcaaacagtgctcagaacagattgtggaaaatatggtttatcataagacgtaatgcctccgaatggtgtgcagcccgtgaataaactatgcaggtatctacatccagcggttgcttctacgatctgtgtcctatacaat

SEQ ID NO: 115864 - DNA, 351 bp, Zea Mays
gggacgggaatggactgaatacaacgcgtctaagaggttgttcacgtcgccagaagagcgtcaacatcctttatatttatacacgcgcagagggaggggaacggaaagtaacggtcgccataagagctagaaactgacagccatttcagcccgcccgttactagccataagacatgaagcggacggtcatcactgcagtcaaaatgcggaattgttgcgaagaaatattcagaccaaggtccgatctaccacaggcacggcctagccctaccggcggggcacgacagtccttcatacttttctcaccttcttaatgtccttcatacttttctcaacttcttaatatcaccg

SEQ ID NO: 115865 - DNA, 493 bp, Zea Mays
gcggccttggcgttcgagaatggcggcctgcaccgccgggattgccctatcaccatcggaactggtcatcatccgccgtgcgccgtgaatagctgaatctgctccgcggtcgctggcaagaccctccccaaaggtttgctttctccttcttcatgcgtagctctagtcgaagccaggtttcatggacttgcgcgttggtgtggtggtgctccagcgcgtcgcggccaggatgggtggggcgccgtcatgcctggtggcctggtggaagaaaacacctctgccatcgatcggatacttaacggccaggattctgagaaacgtaccgctttggtgggttgggatccagaccgtagatctcgtggttggcggctgtgattataaacgttatacccttcgtccaaatcgtacgcaggccgtcgatcctggatcgttcggtcgtgcggctggcatcgttgtttaaaatctccaccatcgatcgcccatctcacaatca

SEQ ID NO: 115866 - DNA, 609 bp, Zea Mays
cgacagtgagtgagtaactctggcgatggatatttcactgcagttgagctgtcatgcatgcatactgtaaatcagaacagaactattaatttgctgctgctgctgtagatgccttgggtcacggcttcatagtacagaacctgacaatcagaaacactgcagggccggaaggcatgcaggccgtggtgctaaggtcaaattcgaacaagtcggtcgtctaccggtgcagcattgaaggtcatgaggacaccttgtacgtggagaatgggatccagttctacctacagacctcgatttggggcaccgtggtctttgtgtttggcaatgcccaggccatgttctagagctacccactgctggtgcaccgcccaccgaaaggcaagcacaatgtgctgacggcccaaggctgcaacaatgcaagccacgagtccggcttctcattccacatgtccaccgtggaagcggcgcagagcgtggacctcgacggcgtggagacctacctcggccgcccctataggaacttctcccacgtcgccttcatcaagtcgtatctcagtcgcgtggtcagccccaacggttgggtcacgtggaacaagaacaaggttgtcg

SEQ ID NO: 115867 - DNA, 423 bp, Zea Mays
ttgttttttcctcgtcttcttttgccaagctgatctgatgatacccggagtagcaatctaagaaggacaacatataacacccagcaatcgagtctaccacctggtctattctaggaagtccgaagggatccttcagacagtgtttgttgagatccgtatagtcgacgcacatgcgccaatccactttattctttttgagtacaagaacaggatttgctaaccactcgggatgtagtacttctctaatgaatcctgccgcgaccaagcgagccagctcagcacggatggcttctctcttgtcgggcgagaaacgacgtaacttttgtcggatcggcctcgcctggggatagaccttcaatttttgctcggccagctctctggggactcccggcatatccgcaggttgccatgcgaatacgtctc

SEQ ID NO: 115868 - DNA, 313 bp, Zea Mays
gataaatttgtttttaaccgtgcatccttcttcgactgctttttgtcagatatgacctggtggtactctgagcttgaggagaaacatcttcaacatcaagctgactcgtcccgacggtactccgagcttgaggagaagtattctcaaggttagatcgacctggctcgggtttctgcttctttagacgacacacattctttgaattcttctctgaacgctcagcttgactctgaaagggtagttaatgaggtaaacttactcagttggatctaccgtgctcttactgcttaatgaatgcttgagagttgattct

SEQ ID NO: 115869 - DNA, 379 bp, Zea Mays
aatacatacccttacatgactgatggtggtgcccatgcatacgaggtcaagttttagtcacatcgaggtggatagttataactagagctaactaagttgtggctaccatcatcaataggaaggcaaaccgaatgatgtcggtcgcttctcgtctcgtgttgcgaatgaggtgctccatgatctggatcttggaagcatgggtgaactgactctctctggtgaatcgccaatcctccataccactctctcctgcatgactaccctagcaccatatgttctagcatcacctccatatccccatggctgccaccaccatcatctccatcgtccccatggctacaatcatcatcgtcaccactatcaccttcactagggccag

SEQ ID NO: 115870 - DNA, 801 bp, Zea Mays
tctttgggactcgaacatcagttttcctctccgtatgtgccccagcagaatggtattgttgaacgcaaaaattggacccttgttgagatggtcaggacgatgcttgatgagcataggactcctaggcgtttttgggccgaagcgatcaacactgcttgccatgtgtccaatcgcatctttcttcgggcttttctgaacaaaacttcttatgagctgcgatttggacggccacccaaggttagacatttcagggtatttggctgcagatgatttgtgctaaaacagtgtaatctggacaagtttgagtcctgatcttctgatggggtttttctgggttatgcattacattctcgtgcttatcgtgttcttaacctagatactaaccgcattatggagacttgtgaggttacattagatgagattgcaccttgtccatcccctgtctttgagcctgcaggtgtagattagatgggacagaccatctttatggaggaggagcacgacgatgccgattgggttgctctcgagccaactccaccggccgccccagtcgagcctgcttccactactacggctgacggaccctaccccactccttccaccacttggggtccacttgagccagttcttgctgagattggaggagttgaagctgctgttgagggggaggccacttcctcaagggaggctccacagcatattcagcgtcgtcacccacctcaacagatgatcgggagcttcacgagcgagtcactcgctctaggtcacaacccatttctcattttgctcactcagcttttg

SEQ ID NO: 115871 - DNA, 291 bp, Zea Mays
tccttcacctctacaaccttagccttttttggcaaaagggtcacgtaggctgagttaaggaggtatagcttggaggaatcccctttaataacagaccaggcacacttgtagaaatgcccagtaaatccatctggacccggggctttgttagaagggcagacttaattgtattccagacctcctcttcactaaacccttaatcaagatcttcaaggttgatggctggtctgtgaaaggctcgggaaaaatccctagatgctgctgccccaagaaggttattgtaaaaattcc

SEQ ID NO: 115872 - DNA, 945 bp, Zea Mays
tgagaaacgagataaagaagccacggaaaggtcggagggcaactgacttaccaacgacacgaccgtaggcttcagcaagctacgtgcgaagtagctcggcctaggcctcggtggcctcttgcgttgcacgagagtcgtcgcaactctctggagacgcctgagggagaggaggaggagataaggagctcggccgtagcagcccgatgggtggcgatgtgacctcctgatcagcggtgaccgcactacgacaaaaggagaagggagaaaatatcaaggctgagaagggggtcggggaactcagaggaggaaacttacctcggctcatggcccatggagcacgacatcctagcggcccaagatccatcggccgacccgggcacccggcagaaggtgtgttcaaggaagaggccaaagagaaagggaaattgagggtgactaatcagcgaacgactactcgagacttataaagagagagaagtgtctcactccaccccgagggacgacaagtcaccatgaaagcagcccaagtccctaggaggaataaaacaccatgatcactcgaaaggcgaaaggacaaagcgttgttgaacccttcatcagccccgaagggagatactctcaccctctagggctggggctactgtcagggataagttgcctgacccctaggcccatcggtcagcgaacacactagggagaggcctctagcaactagggtcctctgttcagtcggaggagataggtaacgtctaccctggaggcacccgccctagacgaacctcgcagcaccgagcttggggttgggcatggtggaacctaacagggggccaggcacggcaaagggaaaccactcgagtagatcctgcgtctagcccgagaccgacccatcataagtgattggccacattaactatgtctagcgatgagccacgatggaggcgcccg

SEQ ID NO: 115873 - DNA, 275 bp, Zea Mays
ctaggcatgtcaagtcgattcataagcccagctcaagcgacgacggggggaatcatacccaaggacaaaagcacaactctcaaccatcaggggcacaacaaagttctttcaggccaccagctccaagaggcagaggggggagaagctttggaggaagatatggtaatcagcccaggagactattctgtctattctgtggcgaagataagggacaaaccgacatgccaagtcacgatctagaagtagaaggaaatcgctgaagccaagcatgacag

SEQ ID NO: 115874 - DNA, 528 bp, Zea Mays
attcattgctattgcactgttttgctgccaaaaatttgaccatagccaaagcttgcttactgcatcgtcaaccgaagctattcattttgctcaagcttcgtaacaagaaagagcttcggcaaaattaaaaaaaaattcaacttcaacaaaaaacaagaaatccaatcatcagatggctagggtatgctcgacatctagggttactcgtgacggagaggaagccgaaggtgccgaaaccgctccaatctctgaagtgatgcaacggtcagggctggtagtatcgaaggatgcacctgccgctgaagctgagtaggttgatgctgaggaaactgaatctgaagatgattacatcgtcgtgccatctaaacccagccacttggagtttgggaaatccaccgttaccgaaggtgatatgtctaagctgatgaagctgggctatttcagtgaagcaaaaaaggagctggttcgttttggcagagaggaaattacttcgaagccagaaaaggatgaggtggtagtgttcaaaag

SEQ ID NO: 115875 - DNA, 293 bp, Zea Mays
tgaggtgatcttcttcagtttactcagcccactctgaattcagttccccagtcctgctgccccattcctcaccttcatgttcagtccatgttaactcacaaccccaaatggcaacaaacccatctcccttaatacacattattctccacacatagttctattaacttgttagaatcacccaagaccaagaatgcaaggaccaaaagttacagtgccccaaacttcttccaaactcactgaattttctgcttcagttatctgcaatagcataacaccaaccttgacagcccaac

SEQ ID NO: 115876 - DNA, 804 bp, Zea Mays
gttatataagcgcgagcatgttgcaccggcttaaggcgctgccgacttaagccgattgctctgtttagcagggcatagtggccaccccgagttaagtaagcgtgagcatgttgcaccggtttaagtcgttgccgacttaagccgattgctccattcagcagggcatagtggtcaccccgagttaagtaagcgtgagcatgttgcaccggtttgagtcgttgccgacttaagccaattgctctgttcagcagggcatagtggtcaccccgagttaagtaagcgtgagcatgttgcaccggtttgagtcgttgccgacttaagccgattgctctgttcagcagggcatagtggtcaccccgagttaagtaagcgtgagcatgtcgcaccgccttaagtcattgccgacttaagtcgattgctccgtttgcagggcatagtggtcaccccgagttaagtaagcgcgagcatgttgcaccagtttgagtcgttgccgacttaagccgattgctccgtttgcagggcatagtggtcaccccgagctaagtaagaatgcaagttaattatgaacaaactgagtatctttgaagcctttttttattgatgacatatttccattttacggagtacatcgtcgtcccgatagcttttgaaatacagctagggataaaacttcctgaggtgttctatattccaggagttcccgacttctgtgccgtccatctgagtgagacgatatgatcctggccgagtgatttctgctactatgaagggtccttcccataagggtgataacttgtgccgtcc

SEQ ID NO: 115877 - DNA, 676 bp, Zea Mays
gctcagtggaaaggcttcccatcacttcgctaggcctgttcttctgtctcgccaatatagatgtctattatatttcaaggaactcccacgaaagtaaaagcatgataaacaagtcttgcttctgccattattttatctttccagcattctgcagttcacatttttccttgaatacacgggagagctgtgtatctttgtattaggagtgaaaaaagggggtccaatacagactacagaacttcgcctcctgttctggaccaagcagagaggactgccaaaacaaacacgactactgagactaactaatcagacaataactgtaggacctaagtacctaaccaacactgtgaaaactactaactagcccacccctcgaactggactcagttctttaagatgtttggccccggcaaaacaccaaagatggtgttctttagcaaaattgtgcagaggccttctgcatgttgggctgaacaacggcattcctatgctttcaaagagaccaagctcctagaatgatggccgagataactccttgctggaccagttttgagaggtgttcaatgctctccttcaatcagcaaaagaggattcagcttgacttggctcttgaggcaaagcccaagtttgaaagaattttaaaccagaattctctagtgaaaacacaagtggtaat

SEQ ID NO: 115878 - DNA, 1029 bp, Zea Mays
accacaagaaggaaattgtggtccgctggggaagtatgaaccaaaacctctgtcacatggtccttggccatatgatacacaaccagcatcccgtcaggcacgaccaccacgtggtttcactacctgagtcctagcggcaagaggcaaaacacctctaggcctcccaggacgtctctaaacaggctgagcatgaacaccatgagaggggcggttcatgtccttcctgctcgactcagaaacccaccgctcatctctcttcctcctaaagcaaaaataagctagatgcccatccctctcacaatattcacaatggtacctcacctctctcttgggtggattttgtttgtggaagggggctttcttttcggatggctgaggggctctaggaaggggatcgctagagatgtcgggaaaggtgtcaagggtgttcctaagatggttaggttttggaagccacacttgtttctgaggaggatctctcataggttcatcaatcacaccatctctcacatgggtgacaggcttagcagaggtggttttgataagcttgggagtggatgaaggtttctctgaaggtgtcaaaccactgcactcaccaaccttcccaaagtgagcgacactcccatccttagtagcaaagcctaaccccggtccgccagttcccctcttgaactgactgaccatcatgcccaactagggctcactgcacgacacctaactcaatatagatcaaaggtatgtgttttcttcctcgattcttgtcttttcgtgtctacaggactcaagggcagattgcaaacgctcacaaagtgcacactgcgcaggtgcaggcactcactgagctagccttctgaagcaaagctatcccagcgtctctctctgctagctcagactgcaagccaggacaaacggtacacgcacccaacaggatagacttagatctcaacttgtcgcgctcatctagcaaggtggagtacttggtctgcaaagtggtgatgttcgacatgtgtagagcgcactcatcacatt

SEQ ID NO: 115879 - DNA, 603 bp, Zea Mays
aaaatgatgatattgccatatatttatgagtgttgttatattaaactgtggaagcatagatgattagcatcgccaatgcccacatacttacatatttatatatcttataaatgtgcatatataatacgcacacatatgtgctcatattaattaaacacaattacctatttttctatgtcctccttactcaagcataaatcatcatatcatctctatttagctctctctttatttctctttgcctattgaattcaaattcctacttaattaaaggtaattgaacaacaacaggttacgagtataacttataaaaaaatgaatccccaatcgacagatgcagaaagcagcaacaacaaacgcgtgaacaaaaggaaacgcagtatgttcttatcttgcacattcgtagcagattaaataatgaatataaaaaacagtcagttattaacttggtagatggtctctgttttcagactcttttactccgtatataccactacccacagatgctgcagaagcacggaaaatccgaagattgttacttaaccaaaatagactcggaagaagaggtaatgccaacttagccaaatgtgatgacaccaaacg

SEQ ID NO: 115880 - DNA, 467 bp, Zea Mays
caagaggccaaactctataggctatgtgctcctggactaggtctcttgtgccaataaaggtgcatacattgttgaaagccttctggcatgcttcgatatcgttcccaagagcagtagccggccttctgatgccaaagcgagaccaaatagggcattggataatcccctttatatcttccctttcaactaaattattctttacataaaaccattcttccatccaggctcctgaccacctcttccaaaatgttggaaccggatagcttacatcagaacgaggtacaaagccataacaaccaaaattattatgatactgctccttgccagtagccttcatctcatacagcagctcatgcatgttgaagaagcattttgcactcggctctagtccctggcacctcacgacccaaataaaaatcaccgtcctgattatggctttaggggtaatttgatgaagaaaaatctca

SEQ ID NO: 115881 - DNA, 379 bp, Zea Mays
agatgttgcacataagtagctccgttacttgccactaactcctcgagtgaaacagttgtttctatctaaaaaaccgctatgcacatgcgatagcataaagaaggtgaccgtgagaacgatgagctaatcgtgcacccttcagatggggatgcttggaaggctctcgacacgtttgatccagacttcacagctgatccaaggaatgttcgaattggcctcgcaaccgatggcttcacaccttttcgtcaaatggcatcatcatactcatgttggcctgtctttgttattccatacaaccttccaccttctctttgtatgaaatatgaatttatatttctttgcttaatcattcctagcccagactatcctggaaacaaac

SEQ ID NO: 115882 - DNA, 599 bp, Zea Mays
ccaagcaggccctaagttagaggattcgttttgctggttttctaagttcgggataagtaacccaacgtgccaagttcgaggaattccactgtattttatactctttctaaaataagttgtatatgttttgtaatcatcaaagacttatctgatgaaatccctttagcactactggggttggatgaattaatggatgtgcatgcaagcatgttgcaacaatggtgtgtggtagggtttttcaacctaatctttaaggcagtgcaaaagagtaatggcaggttaaaccttaggatgatgaacaaatttcgggatatcttagacacacttgagctaatggagatgcaactaagtggaagacattatacttggtctagtggtacatccagcccaactttcacatagattggccatttcttccccactgagcattaggagctgcacaacccgacttccaaccttcaggcattaccttcttctgtgtctaatcactacctttgctactatctcatatgcctgtaaacaacaaaaacaagacttttaggtttggaaccttttggcccaaactgtctggatacttggatgtggtgcagcaggtctgg

SEQ ID NO: 115883 - DNA, 603 bp, Zea Mays
cccagtcagaagtcatagagacgcgggttgaggtagagtggaaggcaagggacgaggccactgccacgttggtgtcgtcggtggccgacctcgagacgaaggtcagggtcactgtcattggtaactctctttcccatgcttctcttccattttcacattcaatttggcaggactgtcatttatcatttcattaggcagagctctcggacaagctttccccggtagaggccaacttcactgaggtgatgaatcaacttgtggcgctcaacgcttagcatgtcatcctgtccagtgccatcatatgatcatctcaaggtgccgcagccggagggcacatccatatcagacgattgggtagcccgtgccgtcgaccgcgttcaagagtttgaggtggacgctctccggctaggggtaaaccatgccttcattgtcacccgctcttgttacaacgattcaatcgtgatggtctagacgagccacagttttgccctcaaatggtgggacgatgagttggacgatctggaggtggtgatcaacccctacgctcggtgtctggctaaccgctttatcgaactagtgctctctacactaccgaaatctagc

SEQ ID NO: 115884 - DNA, 420 bp, Zea Mays
gagagaagaaccttgctttcacccagaatgttcatttgatttccccctttgggaatgagagtcatcctgaaaagagagttgagatacatgtagtacttatgcaaatttgtggatttctagtactcgtcattttcagaaatatgtagatctttggcctcagccctggtgggagggcaaaaatcatgaattttgatcttatctccagcaatatcattatcagtgaatcccaaaatatgagcaaatcttctatagctgaccttgtaccagctcccttcaataaaaaagttcatataaggaaagttgtagggactttcctcatctgcatgcttgatccacaatgtggagtagaattgagcaataatctcatcattctaatcaaattggaaagtcatgatattcttcatgttcttgtgttcacag

SEQ ID NO: 115885 - DNA, 535 bp, Zea Mays
cgataggccacctgcctgacacgctccaacaaatggaaggggtcagcatagcatggcccgaacttgctcttgggttgggactctagggaatgcgtcggtttatggaggagatggagccacacccaatttccaccacgaactcaagctcacgatggcggatgttgtagtagcacttgccatacttttgggcctagagaagatgctcgcaaacctccacggggaaggtgtcacggtcgcacaggagggcgtccactgcctccacttgagctatccttgcaacgtgtggaagtagagacggtgggggtcggttgtacaccacctagaagggcgtggtgtggagcgccatatgtaacgaagtattatagcaagactacacccaaagaagccagtcaacccaggcgcacgaatgatcccccatggcgcaacagagtacatggcgatcaccttgttgacaatctttgattggctatctgtttgagagtggaaccctgtgctcaaacggaacttgatgtcgaccatcttgaagagggcgtgc

SEQ ID NO: 115886 - DNA, 528 bp, Zea Mays
aaagcaattcgtttgcgaaattcacgccaagggccgttgctaggattatgcatggcatatcaagcccggcttttccatctgccacctggtccaagaaccacttctggtctcttcccgccacttctctccctctcatgtatatatttttccttgctaccagtttatgtatctcacaggctggaattttggttggcaggggccgctatttggaggttgatttcccagtggtcatggaagctgccaaggccgagctggtcaaactcgtgggaaaaggagagtagcagtgtagtacttaccggcacggcaataggaacagttgctttcactcggtacgtgtcctgtgccgagtagaatgcttgcaagccgcaaccgcaatcgatgatagagagctgctacatgttcgtgccttcttcccagcttgtccgcagttggtccaccacaagcattctaaatggttacacatctgcttggcatcacctcctcacttcatacagatggcggtatttattcaagcgatgctgatgcggc

SEQ ID NO: 115887 - DNA, 403 bp, Zea Mays
cgacaggactagacgcatttccacgacccactgtttgactaggcgcttttttactgtcgcttgcaacataaacaagggtttaaaagcacgctttgaaagtttttttaataatgaaataagatttcagcttctactttcttgaggagaaagtaaacagctcttcaaaacaaataaagcaaggtttcaattcaactccacaagtgttcaaactccacctaaagaaaggaggaaaagaagctaagctttaattctgtatgtgaattttgaattgaactttacaaaaaccttaatgattaggctatctccaatcacatcccttattccacctcatatttcaaactacactatgctaatagtgtcatttacagtgcaaaacagtgttttacacgaccaaatacacgat

SEQ ID NO: 115888 - DNA, 547 bp, Zea Mays
tttacttcatagcagagtagtcattacaaactgatagaacaaaagatgatggccagaagaccatcatattcctttgaataacaatccaacagttttatttcatacaatggtaaagagggtacaagccacaacagtggccaaaaacaaaaataatccaaaagaaaaccgaaagaaccacaaactagagattggattttctcccccttttggcaacaaggaccaaaaacggagagagagacaaggatacaagaatcaatatcctccaggaggaggatatgacggaggatatgatggaggataggaagtgtagtcagggaagaaggtcctcatcgcgtcctcctcaaaagtggagtcccgaggtggctcatcagccgcagagaaaacagatgccgaagatgtacgatgatcaggaggaggtggagggtggtggtggtaaccagagccggatgccctagggtcaccaggaatgggtcccggacccgggtaaggaggcggagggtgggaggatgattgacccggatccccatggtagggaggcggggcaaac

SEQ ID NO: 115889 - DNA, 404 bp, Zea Mays
aaccggcgaacaagagtatgaagttgaactgttgtcgtaaggagtgaaaccatcagtggacaagcctagacgaacactcctagcgtctcttgaaatttttgggtcaaaacgatccaaagccttccaagcatcgccatctgatggatgcatcataatgtctgggtcttggctctcacggtctccttccttatgccacaacattagcttcgcagtttctggggttaaaaacaaacgtttaagccttggggtgatggacatatatcgaagttgtttaactccacttttgtagcaaaagtagctccatcctcttttagtacctccgcatatcttgatttaccgcatttctgacaatgggtgtccgcttcatattccttccagaacaacatgcaattatcttcgcacac

SEQ ID NO: 115890 - DNA, 754 bp, Zea Mays
cgctaggactccattaaaataggatagatcaagctgctagcctagccccactagtcagttgtaatcctatctcccctaaatataaaatggagaggatgatcctctgtgcaagaggtttccttttctcgcttttagactcactagtcatcttcacgctcgatacttagccgttttcatgcaatacaaaccactcgtatgatattacactctagcagcctgaacctctctacatcacgtcacacaccacgtcacacactcctgagcaacatccttgtcgagtttgtgtgcacgcgtccgctggttagcctccggcatgtctagctctttcgtctctgtcacgttggagctagaacactatcgccaattgagggtgcacccctaaggcgtgatgctgtcacatcacatgcctcctcatcaaccaagcacctcaaacgcttagaatctcggttgagtccaggcatcgggtagcctctacaacatcgagagtgagtccctcccacttcatacatgttgtctgccatcacctcgacttcagggagccctagatgtagggcccatttgtgaccatgcaagcgctgcttcacaacccctaggcctaggcccagagaccgagcaacaatggcgatccgacatcaccaaattcattgctacgcagaatgcccccgagcaatgtgtcgcactcatccgacgacctgcgccccgactgccatgtcgagggtgcccatggaggcccaatagttcatgcattgaagac

SEQ ID NO: 115891 - DNA, 981 bp, Zea Mays
atacacaaaacaactccaaaaatcgaaggaaaaactctaaaccaagctaacagtgaactgaatcagcacatcactggtcccttgcagacctccatgttcagaccctggtttctcacaattccatatgtcaataggtcaatcttccttaacaaaaattattcttcacttatagcccttcctacttggtataacacttcatggctggaaatgctcagaacaagagttgtggtgcactaaagttgagtaaaaataataaaatatcctgtcttagctaactgaacaaccccatactaactctgtcatggagttttgtagcacccttttctctcaaatttgtgtagtaccaagccaagcttccctaagtaaagttgttcagtaatatttggtctccaagtttactatagaaactatagtctaaagtctcacagattaatcaccaaatagctccaaactgagcaccatatgctacaatacagatttcaggaactcaactgaggcaacacacctccccatccttcattctcactgacagaggaactttgggggtattttactcccattttcatgtagcaccagaccactctcaccacacaaaacttatacaccaacataatgtcttccacttattatatagagtatagctcacaaccccatggatcaattcctagagagctccaaagttagttaaacacaaccctgaaacagattttcagttttgaacagaatccagccaccaacacactgacaattcatttttaggagcctgttactccacaatttgtgtagcaccaagtctgtctcactctagaaaacttgtttacgttactgtggtctccaatgttgctatggaaactatagtgtcaaaccacacagattaaccacaaaacagccccaaacaaggcaccctaacctgaaatttagatgtcagaatctgaacacaaattcagtccaaccaatctgatagttcaactttgagccacc

SEQ ID NO: 115892 - DNA, 505 bp, Zea Mays
atgaggtggcagatgatgaaaggaagcaagagcacttcacataaggcctcaatgggcccctacagtatgcactggttgctcacacatttccatcattttagagactgctggataaggctcttgctattgaacacaagcgtgttcaactgggtgacttgatgaggaagtccattacctaggggtagggaagcagcagtgttcgtcctcactatgttccgcctcagggtaccccagctcgtccaggaggaggaccacacccagctcagtacactccacaggggtctccatggacacctcccactcgtcaggctgcccccactggcaccctggcgaggcctacaggatagaagactggccctacatgcttcaagtgcagtcaggttgggcactatgctaatgcttatccggtggggaattctggtacaccagctcagaacaagcaacagactcctagcaagggatactctattgccaaggttaatcaagccagtgcagatgctactcc

SEQ ID NO: 115893 - DNA, 639 bp, Zea Mays
caagctaggattgcggaacttgaagcgaagtttgccagaagaaaccctctcgaagctatcgacgatgccctattctctatcttatccccactccgcaagaagttttgttatggatcctttggatctattaccagacttcttggtaaggttgataggattgttctttagtattaagctttttgactagaccggtaatggcgatattatattttaagtggatttctaatccctaatattgctatataacccttgactccttatacttttgttttcttgccattattgccacccttgcgcaatatctaccttgatatattaaacttttgcctctctacttttctccttgataatgctttctccctactaaattcttacacttttgcttttgtaccattgtattgccccctttgtgcaatatctaccttgatatatattaaacctttgtctctctacttttccccttgataatgctttctccctaactcactacatatccttggttatatcatttatcctcactttaatagttcatggttatcttatttcactattggccaccgacaaatatgacttgtctaactccttgataattcttacccaactccttgactttataatatcttttttattctaaacctt

SEQ ID NO: 115894 - DNA, 403 bp, Zea Mays
acagacgcagacggtttgggacaccgccggacagtccagatcattccagtggacagtccggcaacgcccaggaaccatgacgaccacgtaccttcaaaccacgacgaccagaaataaatacgtggaaaactaacatagttaaggtagctagtcggctgatcagatctggcccaacctttgaccaattattgtctaaatatgtaaaaaagaaggtcagcccaagtgactggctagaaaagcgacctcgctcacccactcaggagcgacatcaggtaagaccgattggaccacctcaccaatcaagaaaaacggaaggtcatactgtccagttaagacctaacatgcctgcatggacaccccccagccccatatccacctgtgccatatacatacataccaccgc

SEQ ID NO: 115895 - DNA, 406 bp, Zea Mays
cacaaatcacagtgaattagatcaaaagggcgcacgacttgagtggagtgaggaaaagggagcctaatatgacgacccaactgacaagcatggcataaagactcatggtggccttgagtacaatagaggacaaaactactagacaccttggacataacatcgggacgatgtatgaccgagccgacggtgccaactagtggacgaagcggtagtagtcaaagcaggtgaggctgacgaagatggcgaagtagtggatgcaggaaagcgaagggtgtacaggggcccagagctgtcacaccacacaagaagactttgagcggcaagatccttcactgacaaaccaaaagggtcaaactccatagaacatgaattgtcagtgtgatctgacgaacaaacaaaaggttct

SEQ ID NO: 115896 - DNA, 653 bp, Zea Mays
agcgaagagcgcgtcacatgtgctcgagcttgaactcagatttttaggcttgttgaagaaactatatttggccgctttaagtagcatagcatcatctgctccactcgaccaggtcatgtacaagtggttgtagatgcagttaaggaggatgatctttcggttgctcgtcgaccaccattttttcaattgcttggggtacgatggtgagaagcttctgtgaaggagttgtatctattgactatttgcccctggaatgatgatccctccttatcattgccatcaatgggatccaccaattatagtagccacacatgcatctaaaaaatatgaacctaaaaactattatggacctaaaacatatgtggactttcaaaaatatgtgtacttaccagcctttcattcttcactctttgtgcaatcccttcatagctaaaattatggagtgccagagtaagcatactagttcaaagcgacatcactgcatatgtttggtgacattgtcgtggctattggaggacgagcactgtacgaagtaggagcaccaaacgagagagggaattgcggatgagaaccatatggaataacatatgtaggaggagccccataatccatatggaggagcacaatatggatatccatatggatatggagga

SEQ ID NO: 115897 - DNA, 382 bp, Zea Mays
aggcgatgttgctctccctccatgggcaaaggtaatagttcctcttgatgttagttatacttgtaataatagttttcttgatgatggattttttgtccaccaggatagttctgttgcttttataatggcggttaatttagctttgcaatcgtgttagtaaaaacatgtactgttctcagatacacaaggtatatctagctttctcaatataaaatagattttctcaaacattccaggctaatttacttcacataatgttttctttattttctaactttgtccatcttcagttcgcaaattccaccctaataggtttagcatggcaaagaagaacttctgcatgctattatgtagcccaacttcatgacttgacgatgatgat

SEQ ID NO: 115898 - DNA, 635 bp, Zea Mays
cagcatcaaagtaccaacctttgacatctagatcccaagtgaccagctccgcatgcaatccgcaaatagaacctgggatatggctcgacaagttgttgcaagaaagaagcacccagcggagggagacttggagcaccaaaaagtttgtcaatatcaggcaggcgtcgggtgcatccaggaaggaaatggaatcggctcatcccaagtcaaggtaatgtagttgctgcagatgtgctatctatgatctatccgtggagtgcattattccagctgagatccagaaatggtgcagccggataggcacaacaagtgcgtaacaccacccacagggtgcgaagtcgtctataagacacacacttttatccgagcaaaagctgcctaagggtgcagccggataaacacgacaagtgcgcaacaacaccacaagggtgtgatgtcgtctacaacatgcatacttccatcccttacaaaagcctcctaagggtgtagctggattcacagtaagcacaacaagtgaagtcgtcacaaaagattaccaatagatcaacacaaagcgcacgaagacacaattcagcgcaaaacaaaaatgaaacacattgttacaactacacaatgtacaccatacacaagatatc

SEQ ID NO: 115899 - DNA, 370 bp, Zea Mays
cagggagagtgagagctccgccaccccttgagagaagggagcctccacacctgaggtcctcctacatcagccctgggtctcgggaaattgatcggaggagtttaccggtgcgtccgaggtgtgttcgtggtgttgctggggtcagtgaacatctatagcatgcacatgattcgtccgatcacatatgaatggctccgattagatcactaaataccccttagtcaatttatgttgtgaccatcaatcctgggttgggtggccgagattaagaggtgacgtggagtacgtttgggccatggatctaagatccaacgactgtgttttcatattggttcacgacttaatgtgagccactaatctggatcgggtg

SEQ ID NO: 115900 - DNA, 1380 bp, Zea Mays
cagtttacaaaaacctcccccatgttctatttcttcacatcccgaagtccacgacggtgcacagcgcggggccgagctccagcgagcctacaccagacgatttactcgatgaccggcgtcctactttggcagagaccgaattcaagtcctaacgagagtttcccctcaactaattttactattggcgctctaacatgctctgtccacggtgaccgtgtggtcagcgaacattctaatgcgttcccggcgatctaaggtagcttagctcaatcgagttggtcgaggagtatcaggggcaaacaataacactaaaacgagagggcagagggcatgagcggacctgagacgagctgaccacggtgaggactctttcacggtggcggaaacacagtttgggggaaatgagcaattcgtggtctctggtgaacaattggaggcaattgctagtgctttggatgcataattatcctacggagctcacggcgtgctcaatttatagcaggctcgagcggtggccagtgaatttgaggagagacgcacggcggccagagaagaagtaggttactagcgcggtgattcgtggcctattaccgtggcaagctctccggcgaccaccggacggctacataagtcacgacggtgaggttatcgtgccaaggcacgtggtgcaaggccacgaagagactatcttcggcgaacctatccaaggcgaccgcgacacgctcgggtacgacggccgaagtaacatagcggctggagttcatccttgggcgatatttcttatccccgatgctatccaactgatctgagcgtgaatcaccgcggcgatagaacgaatcctcgtgcgactcatcggcggcgagggcactgagctagcgatctgatcagtgcactgtaccatcacgtaactcattcagtcggtctgacagaagatctttagaggcattgttcttgaatttttgcatgacaacatgttaatcggtttgtagcaaacttgtagcccaatatacaaactacaattctgcagcagagatcatgctcagttgtttactccatggagcatgaatcaagcctaaagttcttcaaaactcattgacagtttgaattcagacttaaagcagtctgacagctcgactttgggctcatttttctccaaatttttcatgtgaccatggtttaatcccaatagcaaagttgtcctccttttatagctctacaaacttgatgtgttgacctagggcaatatcttcataatttggaagatatagggcttcaaagttgacccattgtcactgaaattcagacttgactcaatagagtttaagtggggcttttttgcaaataggtccaaatctcaaggtttactttgcaaatccacat

SEQ ID NO: 115901 - DNA, 361 bp, Zea Mays
gctgcttccgcaacctcggggatacaatttccattggtctgaaatcttttgaggtatgaccggagagtctcatccactcgacgcctgatggatttgaggtcccatggctgcgctggcttgtcagagagggattggaagttggcaataaaacgccaactgaagtcactctaatcgtcgatgcagtgtcgaggcaggtgtcatagccattgcagcgcatcttgcccaaggacgatgggcaaatacgcaatcatcacatcttcagttgccccagtggcccaggcagcagtggtatagacggccaaccaacctcccgggtcctgcttaggctcgtacttgtcaacgttggagaccttgaagttag

SEQ ID NO: 115902 - DNA, 564 bp, Zea Mays
atgtttaggataatgacaatattgtacttgttatttgatggtcgatggacatatggatagatgaatctccggtctgaagctagattgccagcatagcaactaataattgtgccacatcacacctaccgagcatcatgagctgggaagatcaatctaaagccgagaagagagagcaagcaggcaagcaaagtaagttcacgtcgttaccatctagctaggtctcgaaggttgcatgcggcaccaataagaacaggactgcggcaggtcgcggattgagatgaggagtcggaaatccaatcgttgcactcgtctaactgtcatcttgcaacccagctagagcagagcctgtactctgttgggctggcccaggtaagaaaacacattatctagctacgcacgttaattacaacctagactataggagtagatgatagtatatatatacctcgggccggccgggccccttgcagtgcgatgccattccaacagttcagctcttatccgttggaggaatggagagcggcctgctgctgttcattggaggtctccgtcgtcgtctagcta

SEQ ID NO: 115903 - DNA, 617 bp, Zea Mays
gctttttcaaatgacgagaattttattcgcgatgatgccgaaggagcgattagatggatagaaggtaatatagaagcttttcatgaagttctcaccggttggggagacttctgcgcctgtgtgggtgcacgaggagcagtgtccctgtttgaaaaagctggttgcgagcatgtgaaagttgtggttcgaccaaggtttggggttttagctaatgacatcagagagccttcagctgaagctattgcactaggggaaggttttattctaagatctggcttgctagtggtagagaaatggcagatgaagctatcagagagtgaaggggaggttatttctggatgcttagaattttatccttcgattcttatgtaacattttgtaacgaatcgctctttggcttttctagactcaccgagccgccgaagagcctagaaagacagaagaagctttgcggttggagaggcgtatagatatactatatttttcctatgagttttagcttcgtgattacttagtttcatgataactaagatgtatgatacaaaatgatttctaacgtagcggcccttttgccaccaccagaattgtatgatgctgaaaatgatctagagtgaaaa

SEQ ID NO: 115904 - DNA, 801 bp, Zea Mays
gagaattctgcataaggcaaacttttatcccagcttctaccatgctttagagcgcaagctcttagcatatcctccaacacttggtttgttctttctatttgcccatccgtttgcggatgataagctgaactaaagtttagcttggtatccatggactcatgtagtcttttccaaaagcgcgaggtaaactgggttcctcgatctgatacgatctttttcggtactccatgcagacaaacaattctcgacatgtataactctgctaactgggctcccgagtaagttgtcttcacaggtataaaatgtgctactttagttaacctgtctactacgacccatattgaatcatagccatctcgagtacggggtagtccaactatgaaatccataccgatttcttcccatttccattctggtaccttgagaggttgtagcaatcctgctggtctttggtgttcagctttaactcgctgacacacgtcacataatgcaacatgagtagcaacatctcttttcaaaccgtaccccaccaatacttttccttaagatcctggtacatctttgtacttccagggtgaatagagtaagctgaatcatgagcttctctcaaaataagttggcacaagtgctcgattttgggtacacagattctcttcttaaaccatactgtgccttgttcatcttccgtgaaatctggggtttttcccaaaccaatcaaagctttaatttccttaattttctcatcagactcttgtcctttacgaatctcttcttccaaagtagattcaacttccatcaccg

SEQ ID NO: 115905 - DNA, 665 bp, Zea Mays
ctcaaacttgttaataggagcagggtctaatgtatttcctcagcattagtgaatcacgtttgagtgacctacattaggtttgatcataatgggtgagataggattgggtatgactagaagtgactagtttaagttagataaatctaccagggtagaataaatattattaggatatgttagaatcttttgagatacgacgaatcatatggtgtaggtatgtcagaacctctgttaggttaaaatagaggggttttgtagctatcgggtgattaagtcagttgcctaaggccaggttggactaagactctaatttagatgatttataagagtaagatccaatgttattttaccagtattatctaacatgtttgtccattaggttagatctaatcagattagatgggatcagaattagattggtatattcagattagactagataagatctacttaatttattttggaatagatcatgtttgttacactattatgagataagcaaagtggtggggataagtatgcttattaggacaagataggtctctaagattaagatagaattttttgagattagttagatctattagaataggatagaatcttttcgagataagatggttctattaagataagaaagaatcttttaagataagagagaatctttt

SEQ ID NO: 115906 - DNA, 484 bp, Zea Mays
atgcactgctgctacgtggtgccatgcacatcagcgagcatcgcatctgcacatacacaaaaacgagctcgcgtcccgtccgtccgtccgtcgctgacgaacgacatggccgtgtgttaggtctcacgtccattcgtgaaagctccaacgacgacatgatggccagtacacgcacactgtgcctgctttttctgtcatgctgtgtatagtattagtagtagaagcagaaggccgctgtcagcatgcgacgagcagccctcatcagctatagctgctactgtaattaagtgatgctaccacacgcacatatatacatacatatcctgagttttccgaggtctatagcgtgatcaaaatttgtggtccctcgcattagtcattttaattacacacttgttttgtttattagataatttgattataaaatcgcaatttggtatcgtcaattccacattcgatttttggtgatgcttgcactttttta

SEQ ID NO: 115907 - DNA, 494 bp, Zea Mays
gctctttatatgtcctcaaatcctgttcagcatcagcgtaacaagcatatggaaattgatattcacttcgtccgagaaaaggttaccctcggtgttgttcgcgtgctacatgtcctgacgacttcccagttcgctgatatcttcactaaaggcttgtcgtcatcagtcttcactgaattttggaccaagcttaacgttcactccacggacgctaacactaccgaggggttagaaagtgcagcagggcctatcgcctggcatatctgccggctggtctgtatggaagtcttgacacagatatagatagagagaattaggggaggatctcaatccctctgattgaggatctgattttaatctaggatctttcctttggtgtagaaggcttccttttacctctcaccttcctctcctatatatacatgtagatgtattgtctctcatatatcaattaatatacgaactcacttacaatatgtatagggatgttgtcg

SEQ ID NO: 115908 - DNA, 718 bp, Zea Mays
tggctcaaccggatattaataagccctttgatgtgtattgtgacgcatcaggcagtggcctcggctgtgtgctaatgcaagaaggccgagtaattgcatatgcttcaaggcagttacgccgacatgaggaacattatcctactcatgatctggagttagctacggtggttcatgccctaaagatctagcgtcattatctgctgggtaatgtctgtcatatttatacagaccataaaagcttgaaatatatcttcacccagtcagaattgaatatgagacaaaggcgatggctcgagctaatcaaggattatgaattagaaatccattatcacccaggaaaagcaaatgtagtggcagatgcgctcagtcgcaaggcttcctgccattgtcaaatagtgaggacttctgacattacattatgccaggagatggagaaattgaacctgggaatgattcaacatgggacttcaaatcatttgaagctagagtaaatcatcttacaaagaataattgacgcacaaaaagatgatgtgggtatgaagcacatacgtgagaagataagggctggaacagccaaatgtttcaaagaagacgttcaaggtgtggtatggttcaataaccgcatagtggtgccgaagaatgaagaactccgccagtaaatcttagatgaagcacatcttagtcgctattctattcatccaggaagcactaagatgta

SEQ ID NO: 115909 - DNA, 416 bp, Zea Mays
ccacgggcactgaaggcaatattcatggctttgtcttcaactttcgtataggcccccaataaatcatcagtggtcgcctcaatggcctcgagccattcttcatctggctccccgaactgacttctgtagcggtatgtatatttcaaataaattagaccaccttcgcttgaactatcagtggtctccttcggcatctcccatccattaacaaggggtcataccttgaaagctatgtgctcttggaccaagtctctggtgccaatgttctgcacacagtgttgaaggctaccatgcaggcttgagccttatcactattcacgatcgagggccttcggatgctgaagcgtgattgtattggacactgaattatatcctttacatcctccttctcaaccaaatcattcttaacataaaac

SEQ ID NO: 115910 - DNA, 288 bp, Zea Mays
atcgttcgtcaggatcgaggcagaatgttgatcggagtcgtccacgccggtgaactcccacattgcctctagaaggtcgcgaggggctgcaggcaacactgcataaaagttcggactaaccttttgccggagaggccctgtccacgccgcttggcaatggcggccagcatatagtcgatcttcggcctgaacttcttctccgcgccataagaccagtgcagttggaccaccgcgacattactagtaaacgtgggtgcactgccccccaggtttcgtacgtagaaccac

SEQ ID NO: 115911 - DNA, 1156 bp, Zea Mays
ccatgaactgattgtatcgttaaattaagcaaacaatgcagtttctgaaatttatatagaatttggacagattcagttactgaatttgtgaacagcataactcctaaacgatcaaacttatggctgtcaaattgtaatacaagtaagataataaggttatctacaacttttctatatgacttatctacagaaaacatgatttggttcatcaaacattcaacacgaggaaatcactgcgtgcagtccaaaacagcactaataattttctgctcctttttaattcgagaatcgtcgtgttttagggacttgacctactctaacttatatcaaggcatactcaagcatagtcacataataaatgacgtgatggctacatagtcaggccatcacttcaccacacactcccaagtaacaaaacaactctaaccggacttggcatttagccgatcgatttctaacccatttttataccaccacgacacggcataccgaatacattgaataactcgttcacatttcacatatatctttactaaaacattccgacattgcttgcaacttaacctaggctttcctacaatattacatgacatctacttaaatcacgaatatcatcatcacacgccttgcattacaaatctacatgtccactcgaaaacatctatttgaagtcatgaacacaaccatacactatgtgtgatgtgaaattcaataaacgcataaggtgtattggctcgacttataaatatagaggaagtaatgactactttggcatgtcaccacctctctaaattaagccaaggaaaatttccacgtataacgacccaaacattcatgtcgagcacactctattttattatgtctcgcatacaaccatattgtgacgtgcactcgagacccttcggttcaacttaacgcaatcactactacaacgcatttcgacatacacggttgacaacatcgtgctcaaacaaacccacacttccaatctacttatcacatccaaccaacaccacgtttgataacacacctttctaactaaacatatctcgtcttctaaacacccatcatatgtcacataatttacatttcctacttaatctaacctacaccaacgatgaatacataaatataattaccgtagactgactcatta

SEQ ID NO: 115912 - DNA, 938 bp, Zea Mays
cttccattcaggcacggggaggggttgtaataggcctgcaggtttttggtgctcggccttcgtcctttggcaggtgtcacaccgggccacatactaagctatctctgtcttcatccctctccaccagtatctggttttgaggtcaaggtacatcttggtagttcctgggtggatggagtaggctgagttgtgagcttcctcgagcaggacctctcatgcttccccttttggtacacaaagacgatttttgaaccaaagggctccttgttcatctgccctgaggtccggaagttgttccttgcgggctttttccacaagtcttgctgtctctgggtctaggcgttgtgctttgaatatgaggtcttccagcattggtttgacttcgagactgccgctgtttcccagacatgtattcagttgagctgattctttcttccaatcttctaaaaagttggttccctttattccgaatggttttcgactgagggcgtctgctaccacgttggccttcctagggtgataataaatctcaaggtcataacccttgatcagctccaaccatcttcgttgacggaggttgagatctggttgagtgaagatatacctcagactcttgtgatcggtgaaaatgtgacacttgttcccgattaggtaatgcctccatatctttaaagcgtgtactatggctgccaattccaaattgtgggtggggtaattctgctcatgcggcttaagtaggcgtgatgcataagtaatgactttttcgttttgcatcagcacacaccctaacccttgcctcgaggcatcacagaagacgacaaaatcctgatggatatctggtagtgtcaaaacaggtgcggttgtgagtttctcctttatgatctggaaacttccttcacattttggggtccacacaaatttatggtctttcttgagaa

SEQ ID NO: 115913 - DNA, 653 bp, Zea Mays
cgacaacttcgtatgatttgagtatggcaattggtttgacctcgatccaattgatgaacttatttaccaccataagcagatggatggagccccgggcgcttcttgaatggtccgaccatgtccataccccaaaccgcaaacgaccaggtgatgggaatgctctggagggcttgtgctagcatatgtgtttgtcatgcgtagtattggcaaacctcacaggtatgtacaacctactcgagtcggccatggctttgtcgatgagcgagtgtgggggtcgtggggtgtccgcatgctcctccgtgtagagcatatgtcgtccttcctcgagcgttatgcactttgcttgatactcgaggcacttttcttatagagcgttccatcaatgatcacgatggactttgctttacgagataaatgcctagtagcgctccgtaagtcaatcggttgattagggttggcgccaatcttgcttttcggtcgttgcgaccaacttgccatcgcgagctagcgaggtgacctggccgtttgtcccctcaataattcccccttctgtctgtttgatttttaataagggtttgtagaggttgaatgcgaagactccacctgggacgggttttcgccctgatctatggttgagagatcatcgacttcga

SEQ ID NO: 115914 - DNA, 472 bp, Zea Mays
aacaaaaaaattgttataataggaactttttttatcatcttgtcctttacgactctacttagataataggaacttctttatcttctccataaactcaagtagattggaatccgtggcagctaaataatgtttttgtggtataaagtgtgtaaatcattgctggtgggcctagccaatggagcacgacccaataccagataagctagctatgcggtacatggatgggctgatgcgatggatctaatcaggcaagcatgatctgtttttcaacactttgtttttgcaagcgattacatgactcaactaaaagaaaaacaaacttttttttgctgtttgcaccaactatatgaatatatcataattgcacagtccatcccttcccctttctccactaagtgttcttcatttttctctctattttttctgcatctttttcagtgtgagtgttcgtggttctgttaggaggggggag

SEQ ID NO: 115915 - DNA, 609 bp, Zea Mays
gcccgatcgtgtatgaatatctcccagatttttgttacacttgtggggtaattggacatactttcaaaggttgctcagtgaagttggggaaaggagagaagcaaccatatgatagggggttgcgatgcataccaactcgagctatgggcaccgggtcaaataggggtgtaccacgtttgggctttcaggagttaaactcaaaagaaaagcacgatgggaagaactttgtcttgccttcacgtagtaacgctccaacatggaagaaatctgtggagccaaatgctataacaaatgtggtgagggggaaggatattgtgaagaaagttatggagtcaacagtagttgatcttgagaaagaaggggaaaaagagagggcaaatgaagttccctttggggaaaaggagaaacaacaggaggaagacgttatacaggccacatcccacgtcaatagtgttatgcaagttgaagtgaacatagggctgaacaaggagaaagaaaggaagtttaagcgttttcgcagaatgaacaaacaagctgctggggcgaatgatgagttgggagacttgggtaaaagatcaagggaggcgatgttgttggaccaggaagatg

SEQ ID NO: 115916 - DNA, 311 bp, Zea Mays
aatcgcccctaagcatcagtcgtccaaagcctacatgttttttcaatcgtagtttgatgttctaacccaagtttcttggtcctattttatgaagaatgctccttttattttcttacaaggaaacaagtttaagcgcttaaaaaggctagaagggaatctcaaatggatgaccactttggctattcagatggtgatggaataagggaaaacacagtggcaaagagagccaagtacaatttatttgttcaatcatcaaggtagccacaacagaatttgacttccttctgtctttttgaatcataatgtgtaat

SEQ ID NO: 115917 - DNA, 775 bp, Zea Mays
ttggggctcagctggtgtaggtagatttcaaactttttcaaaacctcaccaatcatctcataaagggggaaccaaagtcctaccctgaagaatctcttgaagactacaacttcatcctctttcgtctctggaatcatctcctctccagcaaaatgaaccagttcatcatcattttctccaaaatatcccagtttcttcattagaactaaaccctcaactttaactgtggatctcccgaatgcaatatgactgggcttagttggacataggataatatcatcatcctcactttcattttcactttcagcttcagccacagtccgttcagcttcggcatcagcaataccttcggcaatagtttcttcctgcacaaccaacccagaacgcctcatcatttcttaggggagctgtctcagtcatttcagtctcatctccctcgtgggtcaccctagtagttgaacttactctagccatttcgttgttcagactctagcagacgaagttgcgcttgagcagtgaaatgtttgtttgaagcgtaatgcagaaagctttcgcttctgtggaaattttcaacaccacaatggtgcagtagcaatgaatgttggggtaacttctcaccaacttgtctgtttatatagccgtgcaggagaagaaggcgaaccaccaagacgctcgtactgactgatcgatggaccaataagtgatgtgaatatttcatttgttttttgataacaagctcagggaaggtgttttttggaccttcagcattccaaat

SEQ ID NO: 115918 - DNA, 409 bp, Zea Mays
tctgaataaggctgatgaggagcttgatagataggtttcaggggaaaatatgtttgtgatgcagtctttgattttttttatcgcccacatactagcagtcatatgctttaaaattgttatatagtctcttgccactacatctatgcttgttactggttaccccctgcacccaaacacatacacactgaaagtaataatagagcctcttctaaatttaagtaagagcatatccctgcatatccttctgctttgcttttctattattgcataaaactcttgtccatctccaaagaagaagttaacttaacatgggaaaatcatttggttctaattaaactagctgccaaatcatctctgctgaatgagctagccaagttttcaaaagctattatttatgtacaacactgcc

SEQ ID NO: 115919 - DNA, 437 bp, Zea Mays
ctcggccatgaacaaacgatctaacccaaccaacagattcatgatgggttgcataatccatccatcccaacctaacatcaaaccagactctgacctacctcatatagtatagcctactcacaactatcttagctatatgttcctaaacttggatagagacaccaagaccgaaggtccctaactcagatgggaacaccaaggcccaagaaggagaagatcaacctcatcaaggaagataggagtcaaacagatcctcaaatgagtctagatccaccatccgggatggagcttttcctttacgtaaccttacaagaagatgaagggcaaggcacacattagcaaggagtgggacttggactgttcctcctctgactctgatgacgagggactcaccgcctccgccttcgataagccttctctcttccccaacgatcggc

SEQ ID NO: 115920 - DNA, 285 bp, Zea Mays
cgggcggggaaatgagcaccaggggcactcggctgattgttctgggcgagggcaggagtgggacggatgaacacttgttgcctgaaggaatatgtgggtggacgaggagaagaacggtttgggttgaagggacgaattaccaaccttgttcgcttttcagatccctgagatgatccttcacctccatatctcttggtttttcttgtcccgaattcttagcttccactgacagcgctgtgcttacaaccctgctataggtgagatccagacatgtggccatcatgc

SEQ ID NO: 115921 - DNA, 317 bp, Zea Mays
gctaggtctagcctaaggagaacttccatggccatatgcatgaacagcctagaattaggaacaagtctggagctccaacccctgagcgcccgggctgtgctctggagtttataatacagcctatggaaagcttcatggtgctgggtcggcttcgaccaggcgtgctccgccacctgcttgaaacccggtaaaaccgtccaaaaattctcaaatttgaaggagcgcggacacctcggcctagcattattggatagaagcagcggacagtggtcatagacggaagatgaaagagtgtgcaacccataattgtcgaaaat

SEQ ID NO: 115922 - DNA, 1237 bp, Zea Mays
gggcaaaccaaacacccctaagtcaagtcggtttaaagttggtaccatttgaaggcaacatgttacagtcccagaaatattttatcattggatgctgaattatgttcttttgtgttttttatttgatctggattaaaaatatgactaatttgaaaaagggatatgtccttgagaatcatattacatgaatgcttaagcgatacggtttcccaaaaaaagattaaataggatgtaaattcagggcaatacgtgggataacagcaagaaacagttgtaatgtgtggtgagttactaatgaagcacctccacggggaagaaggcgctatcagcgaaactcccagggaacatcgatctcggcctcccatgaatcggaagaacagctaagcaagtaaatccgggattatggaggccatggacgcgaatcagcagatcaaactaaaagccgatccaagagaggcggatcgacgggggcttccaaaagagactcacagatccgagcgaaaactcgtctgggattgccgatgaccaccgtgaacacgaaagaaaactgcgtggccctgcccagttctcactcggaagagacgaatctgaaatccgaaaacgataaagatctgttcgggaaacccgtctgccatctcgctagggtacatggtgtgcgaaggatgggacggagcagacagagatccagagccgatgccggctctctctacgcccgcaacggaaccgagatggcacgagagcaatgagctgccaaccggttctctcaaaggcgacggtttctccaaccttgggaacgatccagaaatttcctaaaatcgacaaccaattcgcacatccgcacagaaaaggaaacgaaaacattaagcacggatcaggaaacacagaagaaactttttctctcaaaaaaaaaacatcgagatctagacgatgaggggggaggcgccgccgccgccgccacggccagggaggctgcagaacgggtcgagctagctagggttgaagttggcggccggcgaggtcgatggtcgattgggtgcctgtgtgcctcatatagagacacggaggatcgggatgatgggccgtggagcaggcagaacctgagtttgagctgcccgtgggctggtaggaaatggcagcctgtatctctatgggccccttacctttcgaggctcgctcagtttcgggctggctgcttgtttcctgaatgggccgggctgccagcccgccaaatatcgtt

SEQ ID NO: 115923 - DNA, 463 bp, Zea Mays
gacatttttaggatttttctaccattttctatcaatttctaaagttggacagaaaaagaaaagagaaaagatgaaatagtgttgggccaaatccggtccaggcggcccaacaatgggcagaagcgcgcccgcgcgtgcccgcggtggagactttgcaaatagcccccttgtgttttgaataacccgaactaggttccctgcactgtttctgtgagtcgctgacgttttctgaagagcccctgaagttctaattctttacactttgaagccctcgacggcggacggcgatgcgcagggctccaacgagctcatgaaccggctatttcgctcagcgaccggtgtcctactttggccgaagccaaattcaagtcctaaggaccatttcccctaaaccaatttcataaacggtgagctatcctgttctgtccacggtgaccgtgggtgttgcgggtggatgaacgcg

SEQ ID NO: 115924 - DNA, 1576 bp, Zea Mays
tattttgggtgactctttggcactaattggaagtattttctcctaggcctaaacttaaagagcacatgaagtattgtgaccagcaccccgaggagatcgacaagcttgcaaaagtgaaggctcaagtcacagaggtcaagggagtgatgatgcaaaacatcgagaaggtgggtaatgtccttttactatagtggttatcagttactaatcctatgggatcaattagtatttaggaaccaactattttcttttactttaacttactaataatctgatgctcaaatggctctacattggtcatcaggtactagatcgtggtgaaaaaatcgaacttcttgtggataaaacggaggatctccgagcacaggttcatcatgtggaatcccattagtcccgtctatctgactatcaccaaactcagttgttttaattccacatctaggcacaagatttcaggcaacagggaacgaagatacgaagaaagatgtggtgggagaatatgaagatgaagctcatcgttttcggcatcgtggttgcactgatcctcctcattgtcttgacagtttgcaaggacttcgattgctggtgatgtgaaattacagagcccatgcatccgacctgttgcttttgtagccttgcattccttcactttgatgttgttgttcttgcagataagatgcaggaacatgaaaggaaagaacatgagaaaaaatgtagggggagtgtagtgccatgacaccgcgggaccaaaatccatcatttgtgtgatgttgttggcattggccacaatgttcttagctacgcctagaacgatgggctcaaattaagttataacagggctctctaatattttaaataattgtaatagtagcaaatatcgttgtgaatcatgatttgataaggtgattactctacaatttagtgaagagcttcttattgatgtaccccacttctagctgtgctggtgacactttgagtttccttaatgtctttgtaagccttttagggcttgatgcatggggattggaggggatttggattatatggacctcaatcccctccaatcccatgcatcaaacaagcccttactcttggggacttcaccttgttcccaagtatttaccccttttctcatctttgccaacgtccctgctgcagatccgtgttgtgccactttctgatatataaaagcacctgaatcattgccagtgccagatggagagcattttagtctacatccaatgcactctatccttaccatctgtctcgttagttgtcaaccatactatcaactgtgttatcaattgtcgccatctgttatctctactataaaccaacattttctatggttccaccatcgtcgcttttgggaaaaaccttgtacttctttataatgaacctacggtccaagcctccccaccccaatttcaatagttggctttctcaagtgtcttcctccacctcgacgaatccctctacgccctcgccctcgctcgcttaccctttcttccccaggcacgaccgtcaccaccattagacaccttgtcgtcgtcgtctggtgaaagggtcagatccc

SEQ ID NO: 115925 - DNA, 426 bp, Zea Mays
ttattccgtagcaacgcacgggcgtttacctagtattatataggtcaaagactcgagcaccatcccggggcggacctactcaatttccttgttttagtggacattttgtcttagttattgcagctacaaaggtttagtagtcattgggccatcgtttaggcccccaactcgacctttgggctaggtccgcccatggcaccatcctttgacagtatagtagacatacactgctactgaccaagcttcagtttccagctggctagctgctatagctatcgtctggaaataaaattcctgcctaaccgagaaattaattggtagagggaagcacaggtagccagcgtgttttatttaatttctttcttacctgcagctcaccctccgcacgtacgccgccggtcggtgacctaccggctaccgctaccg

SEQ ID NO: 115926 - DNA, 840 bp, Zea Mays
gttcaaactataccttgaaagaatttgaccaggacctatagagggggtgggagatgaataggcatgcttaacgaaattaaattaaaagcaagtggttagtagaatttgtggaggttttgtacaaatccattaaggctccacacattcaagaaaccaaagcacaatgaaattgagagctagtaatatagattgaataaaaagcggaacaaagttgagagctagtaattttgattgaacccaatatcaactttcttgggaggtgtagaaacatgtactaacaaagggttgcacctagagtttgaaggatgagtgatcgattgcaaatcctagaatatcacctcaagcacaagtgagaccaacccaaggacaatacaagagataagacacgagagttaccttgtggctcagctcaccaccaaagcttacctatacccatgttgttaagaaaatcacaaaagctttgggtctcatcgaaccctattatcatctcaagtcaaacaccaaggttgagctaagggttccacagatgttccatgcaatacaaagttcccagagcactccacaaaacttggatgcgttatggatgacctctagccatttaggagcacttgctctaagagtaacaaacaccaaccttgtcaaggacggtgtacccttgactcgccgaaccgcggctacgcagttcgtagccgtcggtcatcttctccagtggggattatgcctcccaaccgcaggcttaacagaggtagaaaggtgagagacaactgattattgcttgccttcaaaggtccggttacaatcaatttataaggccagcggccagagcaaatggagaagctc

SEQ ID NO: 115927 - DNA, 815 bp, Zea Mays
ctctccttggtggatagactaaaaaccagcgaagcccagcttaacgcataagccgaagctcataaagccgaggttgaagatttaaagaagaagctcgctgaaatgaatgaaaattttgaagttgctaaagcaaaacaagaaataagtgaaatggaaatagcaagggtgcagaaaaatattgaagaacttcgagattccaaagaaaaatgcttcgaagtatccatgaattgtgcgaagaaacttaaagatagctttgcaaaggtgggtgcatactcatcgaagcaaagatttacctgaggtgatcccgagggagttattcaatggatcagcgaagaggtcgaagcttttgaagtaatgctcagtgaccgtggagatttttgtgccttcgccggtgcccgaggggttgcagcagttttggagaaaactggctgtgaacatattaagactgtagcctaggcagaagccagcttctctataagcgatgcgaaagaaccttcaaccaaagctactttgatgggcggtaaattctattccagtatttggatgaagggcggtcgtgaaatggccaatgaagctataaagaagagtgagaaagaatcgcacgatgcccgagtggcggtgaaggaagctgaagaagctgttgagcacgcaatgattataggtatccctttaaaaaaaattgtctcattttttgtttatagctttgaaaattcattattatactttttattacagccggcctttcgccaccaccggagccatacaatcctgaggcggatctagttatgaaagaggctttagatgtgatgaaaatt

SEQ ID NO: 115928 - DNA, 593 bp, Zea Mays
gaaaagtacaaaaatgcaatttggtgcaagttcaatgagtgatgtgcattgtgcttctttcccaaaggcacaatggtgtctggtgtgtacccgacacgatcagtgttatcatagggcatgtccagtgcctatggttttgtcaacatgctctcatgttcatgtattcgctgggtcaccagacacatcaagtgccctagtgagcatgcatatcacataggtctatgtcagttcgctcttttgttctcctcagtttccatatgccactaacctcccatgtgctctaagtttgccctacctccgtgcacccactcaacattggttcattgtttatcccatgtcgcacctccactacaccactatgatgcgccacacactcaccaccatgccatgtgttgcctatgcctgcattgttcttcatcacttgctggtgttcccatgctttgtctcgcctttcgctgtgtgccactaaagcatgcactacactcacgtagttctctgcctaccactggtgaagtgcttaaacacttccctgtcccaccacattaccctattcacgtgccaagccaaccacacctccattgtttagtgccatc

SEQ ID NO: 115929 - DNA, 374 bp, Zea Mays
ttgctcatttccttaccctgtttgtttcttatagcagccttgggagctgagctagagaagctacgccagcgcctgggccagcttctagattacgtcacggcctccggtacttcccggatagagcgtctggataatgccccatgtcgcatccaggacattgctgacttcgacgttcaccggggagctgcggtggcgctaattatgggggagatatgctccggctatagcctctaggacatcggcgaccctccttcatccctttcgtacaaaggactggaagacatgctagagggttttgacgaggtggctagtcgtgtcgtgcttagtgtgtcggcacatgacatcgtgcgtagcgcgtgctaaccgcattgtaa

SEQ ID NO: 115930 - DNA, 895 bp, Zea Mays
gaatgcaataattgaccaagcaaggcatcgatcttatcatgcacataaaagcatcacaagcatatttacgccacctatcggttaacttgatcgacacactacacatgttcttcgcccttcaaaatttatcgcacaaccgaatttatcccacctgctaatgacaccgacaagacctactgatatgttatttacatcacgagcacagttacacgccgcagactagtttctaacataatcctcatataactcgtaattcaaactactctccaacaataaatcacacacgacagatttcgccttaactgattaatttatttggagcaccgcttagcgtaccactagtaccccgcattttgactcgacatataaacatagaggaagcgatgactacttcggcatgtcaccacctctctatttaagcaaagacaatttccacctacaacggctgaacatccccatcgagcacaccttattttactatgtctcgcatacaaccatatcatggcgtgcgctcgagacactaccgattaacttaacgcaattaccactataatgcacttcgatatacacatgtttaataactcacctttctaaattaacctatctcaccttccgacaccaattaaatgtcacttaatttacattttcacctaatttaacctacaccaacgatgaatacataaatataattattctagaccaactcattagccgattgcggaaaccaccaattatgttttacgctttattaatttaccacaactaacacactactttacgacgaattgttttaacaaacaattaatgcatccgtgaccaatccctacgacgcacaattggaccagtgcaggcacacaaacacttgttggtattccaatcgcaaacacatctacgc

SEQ ID NO: 115931 - DNA, 326 bp, Zea Mays
ccgcagccataacagcttcttcttcagccattttcaggagtatattgtcaataacctcaagtgtggtttccaggttcgactcttcggtggtcccggctttggccccggtagcttcggcttcggcctcggtagcttcggcttcgccggtttcagattcagtggttttcactccggtagcttcggcttcggcctcggtagcttcggcttcgccggtttcagattcagtggttttcactccggtagcttcggctgcggtgtcttcagcttcaacagtctctgcaaaggcaatttttgacatcgtcgccggtggcggcgtctgatgaatc

SEQ ID NO: 115932 - DNA, 557 bp, Zea Mays
cacccgaagaagacagttggagtttgaggaaggtgatcatgtgtacctaaaagtgtaaccaatcaggggcatgaaaagattcaaagtcaaggggaagttgtcacctcgctttattggaccctttaaggtcctaaagcgggttggacatgtggcctaccagctggaattacctaaccacctgtcagatgtgcacgatgtgtttcatgtgtcccagttgaagaagtgtctcatggtcaccgaggaacagttgcctatggaggagcttagtgttcagggtgatctgacctatatggagtatcctatcaaaatcatcgataccctcaccagagtcacgagaaacaaattgatcaagatgtgtaaggtgcagtgaagtcatcacgcagaagatgaagctacctgggagcgagaagatgagttgcaagcagagtttccccatctttttcgtagttcgtcttaatctcggggtcgagattatttttaaggggaaggatttgtaatacccggattctagtgaataaaagagagagaatattggttgtaccttatatgggttcttt

SEQ ID NO: 115933 - DNA, 584 bp, Zea Mays
gtaagttggtgatcaaggttcattaaggttggtccctttattgtcataggaaactaagaattataaggggatgaagttgaattttaagtcaaaaaggtgcatatcagtgtgcttcaaaatatatgtagtaaaaaatcttcatccactgaggactccaggggtttataagggatgtttggatagagaccactacctactgaaatatcaagtttcgctcactttggagaagtaaggagtggggtattaattggttttgtttgctgactgcagaagtagacaaaagagatatttgtgctatgcctgtaaaccaacccaaagtcagtgctctgtaatgtttcactcgactggataagtgaaggctgaaatgaactagggtggtgagacttggttcactggctaaagactatattgcacctgttactggattgattacaaccaacatttccccctgcccattcttttgtgcacactcttggatgagattcatcacccctatgttatcttctacgtgttgtttatgcactgctgcttagtgtccatgctaggggagttgttggcatccccagggtccctctccatcgtgc

SEQ ID NO: 115934 - DNA, 546 bp, Zea Mays
atcgacctttttctacgaccttcagttaggtcaccaaccgacgacatgatgactacgaaggcatgtcaccatttcatcgcacccattcatcgcctatatgcgcactaattcttttcttgcggcacatgcactcaaaatcaatccacactacacaaaatacacttatctcttatttatgcgtagacttaacacctttcgggataaagcatcactataaacaccttacacataattgccttaggaacctattagttcactcgaagacatctattcaaatcataaacacaatcatacacttatttgtgaagcacaatttaaggaatgcctaacgcgtatagactcgacttataattataggggaagtgatgactacatacggcatgtcatcacatctctacttaagccgagacaatttctacatacaacgaccaaacatttatgtcaagcacactttatttccccctgtctcgcatacaaccataatatggcgtgcacccgagacacttcgatcaacgtagcataaactactagtatatgaactccgac

SEQ ID NO: 115935 - DNA, 358 bp, Zea Mays
cactggcactcagccaaaagacttcaggagttcgacacatacattgaatcgcaaaatcaatatttacattacttcactccattacgattcacaacagctaaagccgctccatgaccatgggcacagttgtcggtgagatgcttgcatcggctgtcctgaaggtggtcatggggaagcttggtgcggttattgggcctgaggtcaacatgctgtggaagttcaaggatgatcttgagtcgatcaggagcactctgttgactctccaagctgtattgaatgacgctgagaagcggtcttcacgagaggaacgtgtgcgcctctggctcaagaggcttaagtttgctgcttatgacattca

SEQ ID NO: 115936 - DNA, 1079 bp, Zea Mays
cttttcttggaaagcgagggagagctgcgattcattaattatagagaggaaaaaaggttcccaaacaacctccctctcatacgggaaccaattatgaggggcggaaaatacacccaactagctacaggacataaaccacaaaacccgaccacaccccaacaaattaggttgccccttttagacctaggccttggagttttttagctcccgccatgcaccacaagctgtgctcatcctttaatatcctaatcctaattattctcacataggctgtgatgtcgctatgtatgggcggggcaagggttcgggggtttctcgccttatgtgagaatgttttattttttaatgcaatgctcgggacagtcttacccctcgctggtcgagttttttggatgattttctagagaaaacttgaatatttctagtcctttgcattgttgattcgaagtgtgatttcatgaattgatcactgtaggacaaaggagccaacatggaatgaagatttcacgtttaacattagaaaatctcgtgaaaatcttctgcaggtatcaagaagttataacttcatgccccccccccaccccattctagccccccttttcatttattcaagggacgttccggttattctatactatctgtcttgttaaacacctctccctataggcccattaatcttcctcttatcttggcaaagaaactgctgcatactttaagtaatattagactcactttaggtattataaatttgttttggaagttggatggatcaactccagtgaagcttaaactgagttggaaacatttatggcaaagatcgtaacaagcggaaatacatatatatagctttcaggatggcatagtacatggtcaagactatttctatttatgcaacttaaaggaatagatatgaaatagcaagcgatagtaaacaaatacatgattttgttcttcttttaattttcgttttaatcatgtactttgctatatcttggttttactttgaatgatttctgtggcttttggcatctggtgccatgtcgctcaataggttgcagcttgggatgcaaaccttgtta

SEQ ID NO: 115937 - DNA, 901 bp, Zea Mays
aaataatgatgaagcatgccaaaaggctttcaacaatgtttgttctttcattggcacaagagacttaatccaagagcacatagcctatagagtgtggccacttgtagatagctgggagatgccgaaggatactgctgccgggtctgtcgaaggtggattagttcgattaaagtataccttcagattcagggaccggtttaacgagccaagtgacgattggctgaaaagtattgaggctattagcgatgagctacttgggacatataccagagccgaagatgatgctttatcctcggccttcgggggtcgaggcaagaaaagattgaacatggtgtttgatgcaattggcttcatataccctgattactgctaccctttgcgaagacaagtaaaaaagagaaaaactgccgcttcgaccaccactactgtgccaaagggcaagaaaatgaaggttctaacccaccggccacgatatattgagacggccgtagtgcctgaacttggtgaagggacttcctccgctgccgaagggaatcaagctgctcccgctgaggctgaagctgaaggatcgactgcagcgccaaaggtgcctatagtcgggtcagccgaaaccaaaaatgacgtggccaaagagccagagatggaaaaaacagtgatgatgccaaaaattctgagcccaccggtagaggcagaattgtcgaaggtgataaaggctcctgccacaactcccaagagaaggaggatggccagcgtgctagacactgtcatggagaccacaaaagccttgacccctgctccttctaagaaagttgtcgaagctatcacagtccaggccgaagccaaagctgggccttcagcgcccattgagacgaagcttttcgcgcctgaggataaagctgag

SEQ ID NO: 115938 - DNA, 442 bp, Zea Mays
atagtgtaatgtgggtaatgtagaaatgtattgtagtaaaaaggggaaaaggctgattcataatgggtcagtctttgagtttgcaaaaaccccttccactatgtaatgaagaaatttcagttgttccgagcaaacttttgtttttcgccgttctttctttatagtcgattgatagttcgtctttgcgcctaacactgccgacgttattagaaataatcaccgagcgataactgatgacactggcattttagaggtaactgatgagtcatgcttggcactatcggcgttttagaggtaacgaccgagttatgcttgacactattgtcggtgttttagaggtaacagccgagtggtgcttgatgttgtcggcgttttagaggtaacagacgattggtgcctgacactgtcggtgttttagaggtaacaaccgagttatgcttga

SEQ ID NO: 115939 - DNA, 683 bp, Zea Mays
gcttctcatttttcttcctgagaaagtccctttcccgaagcatggcggatgatgtaatcaatgctctcttttaaagcttcgggagcaggagttgcaacattttcaaacgaaatttgctctgtggccttttcttctgttgctttttcttcaattccggcaggctttatctcagtgggctctgaaggcccaacttcggtttcagtttgaattattatagcttcgacttctgactgtttcgtttcagcttcgggttgcgccttggaagtttcggcaatttttctggtaggagtaggattcaaggttcttgttgtttctagtacaacatctagcacgttcgccatccttctccttttaggagttgcggtggagcctttttgcatcttcggcactattgcctctgttgaagggcttaaaacttctagcattcttggcatctctacaatttttggccctttagttttatctttgtcagccttcagttcaactagcttaaccaaaggtaccttcggcgttgtagccgactcttcagtcctctgcacgggaggaacggtttcctttgtcttggcagatgaggaggtcccttcgccaagttcaagtatcacagccggttcgatgtagcgtggccggtgagttaggaccttcaatttttttccctttcggcacaggctcgtctggggtggcca

SEQ ID NO: 115940 - DNA, 374 bp, Zea Mays
attttctatattgatgcacctttttgacatatactcacctggttgtccacagaaccagatgcataaagtaagggaaggggcacaggtgcaggttattgaggatgatcatatcattatttgtggagtcaatagtcatctgatgtctatattgaaccaattgaataagtaccatgaatcatcaattcgcttaggtttagctacagcaaggtaatgaaggatggcgtatcattttggttatgttaattcacccttttacttttaagggttgctaagatctatgtatcctatctagtgcctctgattgttttcttatgaacaatgtcaaggaagcagaaaatccttcttctctccgatcttccaaggaagcagattga

SEQ ID NO: 115941 - DNA, 333 bp, Zea Mays
gagattttgattgctgcattaagatttgaatttaaatctgtgaatcagaaatggatttgaatctagaatagaaaacataaaactgaaagtgaaactaaaaacaattggagagctggctggctgggttacattgcccacagcccattcattttccacgccgctagcctatgtctccatgccatacgtgtttttttcctatttgtttattcaccttgtcgcgtatgacatcagcatgacatcaagcaagcaacttcagcggtcgttctgttcgtgcgtgaatctcgcgcgggatctcgccagcaaaccatgcgggtcgccatagtcattgatcga

SEQ ID NO: 115942 - DNA, 566 bp, Zea Mays
ctttgattcaggttgcgcaacaacatcacaatggcacccttttttagctcgagtttgtgggtagggaaatttttcgcatcaattgagtttaagaattcggtagggtagaggatgtcgaagtctggtatgtgttccgatgattttgctataacgtcacaactcaggtattggatggtgtctccagggacaagcgagagaacgtagttgttaatgtcatcgactgtggcattatttgggcaaacaatggcacacgaggaaaggtacgtgggatctcggtagttcaacagaaaatctgggtatacttttgatacaagcgcaactaccttatcaccctcaacccggagcaacaaatcttcagggattgtaatccacgtagcctcacgctcgctcgctcttctttcagcaggcaaggtaccatcaccaacagatagtacccatttggcaaacatgtcgagctcgtttcgcgcatgtacttgcaaatagggatcaaaaagccgcatgttggtgcgtagcctaaggaggacaacgtggcgccagagattagagtttgtaatagaggcattaac

SEQ ID NO: 115943 - DNA, 314 bp, Zea Mays
aaaatagatatgggtgagatagactacatgatataggttaaaagtttgcttgatgttaggtggggataggcagattatgcaatccatcaagactctattggttgggttggtctatcattctttatttagtgtagggtgaagtaagttaaaacatgtggatagggtctaatctatttcacaagtattaactggaccattaagtaactcacttttgattcgatcatattaggttagatgtgatctagattagattggcatgactattttgacaaggcaatatctaattaatttggattagatcctagttgttaaac

SEQ ID NO: 115944 - DNA, 333 bp, Zea Mays
ggtaaacccgttgcatattttagtgaaaaattgaatggtcatgttcttaattattctacttatgataaagaattatatgctctcatacgatctttgcaaacatggaaacattatttgtggtctaaggaatttgttattcattctgatcatgagtcacttaagcatcttcgtagtcaaacaaatctgaaccgtagacatgccaagtgggtagaatttcttgaaacttttccttacatcattaaatataaaaaggggaatgataattggattgccgatgctttgtctagacgctatgctatgttgtctcaacttgattgtcgtatttttggactt

SEQ ID NO: 115945 - DNA, 775 bp, Zea Mays
gtctataccctccttctggcagaacccttgggcatccaatcttaccttgtttcaaactaccatcccatcatcgctttgtttgtttttgaaaacccattttgtaccaattgggtggaaattttaaggaggtgggactaaaatccaaacctggtttctctcaaaattttcaagctcctcatgcatggcattgactcagttaggatcagataaagtgtgtccaatatccaagggttcgaaagaggaaacaaaagcagagtgtgcaaagcggaacatctgttgatacctagagcgagtgactcagtcgtgaggctcaccaatcatttgttgggaagggtgatcatactggatatgacgtggagcatctcacacagaggtagcctccccctcaacagtagcctcagctcctccaggactaacactctctagctcgagcagaccccaagtcatggaataagtcatgttgggtccatcgttcgaagtaatggacataggctcaactgggatagccaatgaagtcggctcgggatgaccccaatcagcagcatgatgctcctcctccacaaagatgatctcacccatttgatcgtgaactgcatgcttaaatatagggggtggactaggtgaaatctaatcaaaattcacctcacaggtttccatgatgcggttagtctcaaggttaagaatgcagtaagctcgagagtgcaatgcataaccaagaaatattccgcgagaagaccatgattcaattttgtccaaatttacctgtttaagcaca

SEQ ID NO: 115946 - DNA, 442 bp, Zea Mays
tcagcattttccatgtccacatctcggttgtcagccacttgagcaattcatccaaacatcaacagcaggaacaatcagcagcacactacaacggactaaatcctagagcatacatttggaactctgattgctattatgccatatgatgaaataaagtatggccttgaagtatatgaagttgccgcaaaatttagccatctcgaacatcgcaaagggaataagtccaaatggatcccggattcactcagcaccagaagaggtagaacaaacacaacaaaatcagagcaaccattttctggtccctaaaagaaatgatcttgagacggtcaatgtgactgtcatactggccaacctcagaaagatgcaggtcgtatagatagtacatgagtttcacatagatgaagggtcctggtccatcggtcatatgaaacgcacgtctcca

SEQ ID NO: 115947 - DNA, 981 bp, Zea Mays
ttgttttcccattgttagaattccatagtatctacatttgtagaagtaaatgtagtgtgatggttttgaaatttcgtcatggggcatagaagttgccctaagatgggtgattgcaaacgtgccaagcgtgtcgtgccattttaagtcagtgccaacttaaaccggtcgctccattagtagggcatagtggccaccctgtgtttagtaagcgtgagcatgtcgcaccgccttaagtcattgctgacttaagtcgattgctccgttagtagggcatagtggtcaccccgagtttagtaagcgtgagcatgtcgcaccgccttaagtcattgccgacttaagtcgattgctccgttagtagggcatagtggtcaccccgggtttagtaagcgtgagcatgtcgcaccgccttaagtcattgccgacttaagttgattgctctgttagtagggcatagtggtcaccccgagtttagtaagcgtgagcatgtcgcaccgccttaagtcattgccgacttaagtcgattgctccattagtagggcatagtggtcaccccgagttgagtaagtatgtcaattgacagcgaacaatttgagtgcctttgaagccctttttattgatgatatatttctcaatttacagaatacatcatcgtcccaatagcttctgggatgtagctagggtaaaacttcgtgaggtgttctatgttccatgagttcccaatttctgtgtcgtccatctgagtgagacgatatgatcccggccgagtgacttctgctactatgaatggtccttcccatagatgtgacaatttatgccgtccctcccccgttagaattcggcgaaggacgagatctcccactgcgaaggatcgacaccgtatggccttatcatgatagcgcctcagagtttgctgataccgtgttgattgaatcaccgtattcagtcgctcttcttcgagtacatcaacatcctccagcctag

SEQ ID NO: 115948 - DNA, 510 bp, Zea Mays
ctcggccaggatcctatcgtctcactcagatggatggcacagaagtcgggaactcctggaacatagaacacctcaggaagttttatccctagctgcattttgaaagctatcgggacggcgatgtactctgtaaaatggaaatatgtcatcaataaagaaaggcttcaaatatactcagtatgttcacggttgacttgcatttttacttaactcggggtgaccactatgccctactaacggagcaatcgacttaagtcggcagcaacttaaggcggtgcaacatgctcacgcttacttaactcagggtgaccactatgccctattaacggagcaatcgacttaagtcggcagcaacttaaggcggtgcaacatgctcacgcttacttaactcagggtgaccactatgccctactaacggagcaatcgacttaagtcggcagcaacttaaggcggtgcaacatgctcacgcttacttaactcagggtgaccactatgccctactaacggagc

SEQ ID NO: 115949 - DNA, 1019 bp, Zea Mays
ttaagttagaattcagtgcaattggagcaactttggagctttatatcttttaatccatgaagattctgttctgactcaatacatcaagattatagagctattataggagtacaactttgcttaagtgattaagccttggtgttgtacaaaaataggagataaataggtttgaagtttggatgtcagaccaccctgaagctgaactaggactgacagtgagatttgctcaactttggattcaattcaagctcgaaggattggtaaatgagttaggtctctatagtcgatttgtagctggtttgttgagctacaactttgatgcagagggttggtcgtgtcaatgtatgaaatttggagctaatcgccctgcaagtcggcctgtcaagcgctctgaataggcctccaatagtacacttccacacaaatatcagcaggttcagggaatatcgccgccggtgaccttacgccgtgattggcgccggcgatgtgattcgtgctcaatggagtactgatagttgctcaaggaagtaaatatcgccttgaggatgaacttaggccactgttcaaccccggccgctgtgtccgcctgactcacgaccggttcagataaggtcgccggagttggctgcctatgaaccacgtgcctaggtgccttaccacgtcgtagtaactcgtattacggatgtccgttgatcgtcgatgtgctcgccacggtgaaagccaccaattccttgcgatagtactctcccctttctccggccgccaccgcaccatctccaattcaagggccaccgctcatgaatcctataaattgagcgtgccctcagctccgctacgtagttgtgcatccagtgaaccagctctcacctccactcatcccctacagctccccaatttgaaactttccccaaatcggtccagagcaccgtactaagtaacctcatcgcggtcagcgctccacaggtccaatcatgttctcctcgctcttgttctagcattcctgtgtgcccttgaagctc

SEQ ID NO: 115950 - DNA, 351 bp, Zea Mays
gcagcatgtggaccgagccaggaacgaggaggccgacgcattggccaaagcagctgccagaggcgaagtcttgccctccgatgtgttctaccacgtcatcggcacaccagccgtccgcagtccagagggtctacaaataaccaacgacaccgagggccatcgcatagtcaacctcatcatgatagaagattggcgggccccgataaccctgttcctacaaggatattatcatccaagaaacgttaacgaggccaagcgcctcaagcaccgaagccgggacttcgcaatcattgagggccagctatacaagaagggggtcagtcaacctatgcttaaatgtgtcactgaaac

SEQ ID NO: 115951 - DNA, 364 bp, Zea Mays
ccattcaacattatgtttatcaccttattaagacacctaacaaatattacaaacttgtatgttctgaatgtacttttatgtataccaaagcacaatgatggaccaacccaagggaaaccacatatgttgacccaatgcacttcgactgcaattacacccctagaattgagcttagcccttttgaggatgccatcgagatgaataatgtgttcaataatttctgttccattgaagacaacaccatgaccattggagatcctacatagcaaaacacaaggaagacaacaacttgttaaacacctaatttggcagcactggtactaccggacagacctgtggagaagcctggatagtccagaattat

SEQ ID NO: 115952 - DNA, 1131 bp, Zea Mays
gttgtaggggtagaccatgttgacaatgtcgaaggtcacttgctcagtcatcgcattaggggttgtgccaagggataacaatagctctatcttgcctaatggaaacgttcttttgcttctgaagccatacaaggggttatcagttggctggagcagactatggttaatgcccatgcaatcgaagtcatgtaggaatatgatgtcagcctaactgttgttgtctatgaggactttgtgtaggttccatcctgctatattacagtttataaccagcgcgtttgcatggggcgcgctgcgaaggtccacgtctattgcatcaaaggtgatcgggacatgggaccactttgtttggactactacacaaatgacaacgatgtggttcacccttcggtggtgatcctttttccgcaacttgtttttgaagtctaaaatggactctccagtaatcatgtggatgacctccttgaatggtgggttggcgaagtcctcttttcggttttagtggcggagggggtagatgatggggttgctggtttgcttggggtgacagaggggggtggaagtggcaatatttcttggtgttgcagttgtgggtgatgagggaatctttggttgcagttttgctgttattgggggtggtgtgggtgttcgttttcatagtggtgatattgagagtggtaggtgtgagatatggctatttgattgtttgtggggaccgctctagccatgtggtcattggcttcctttgttactaggcagtttgtggttgaatgccctacatctttgccatggaagacacaataaagctttctttactacttggggcctcttccacgacctctacctctcgctacgccgccgttgcagccttgctgtggagggtaatcatggcgtcaaggggtcgggggcttcacctggttgttactagttagctatattatgcacttgaagctgttgttggtcgcactcttggttatggtggtcttgatgcggacccttggtccatgtcctgctagactaccgggtctcctttggcttgcgctacgactccactttcctataatggagttcctcgaatcgagcatatttttttccaaaagctagtacaactcttagaggttggatgctggg

SEQ ID NO: 115953 - DNA, 283 bp, Zea Mays
aagggagctacaattttgcttggtgtgttgctatctctactacaaaataggtatttaacctaagttccaacactatcactagcttatcaaggtaaactagggaagtaagcacacaacctagttgaccaataaataatgtatggaagcttaatcgagatagagatgtaaattctcgtcgatgactctagtattttaccgtggtaccaagaagctcatgcttctcctagtcctcgttggatccccttgcaaggatgcccacgcaagggccaatctcttggtcagg

SEQ ID NO: 115954 - DNA, 361 bp, Zea Mays
ctccgtataccatcaatctcttgatgcccaatgatatggcgatgttcaatccgtggatcagagcttcatactcggctgcattgttggaggccggaaataacaactagagggcatatttgaggtgctcgcctccaggtgcggtgaagagaattcctgctcctgctccctgcaatttcagcgagccatcaaaatacattcgccacacttctgcagtctctgggttatctggtacttgctgttcagtccactctgatacgaaatcaaccagtgcttgagttttgatggcggttcgaggttggaattcgatgtcatgagatcccagctcacaagcacacttggctattcggccaatggcttcctt

SEQ ID NO: 115955 - DNA, 1545 bp, Zea Mays
ttaaaaagtagagatgtgtggacaagcatgatttatatgtttgagggtgcaactcccaacgggctatctttttagggagtgttggtccaacaaaactaaaactcgttgttgtatgttcaggcacgtatgttgcggccccacgacctagggtgtgtgtgcaggtgtgttgtgtgtgcaggaaacccggcgagcacgttgtgtgtcggtagttcggttccaacaattggtaccgaaactcaggtcgacaaatctcggctcaatgtgtgagggggagattgtggaaatagtaccacattgtgagttgcgtgtgggcaagcatggcttatatggatgtcactaccactggagcactcgaggacgctgtctcatcaacgagggcactcaccaccacacaacaacaaaatcgagaggttgtaatcaatcgtactatcgagcgagttactgtgcccagaccaacaacctatccatgggaaggccatcaacacggtgaggttgatgatcataatgatcgtatggcactcgacttgatttgcagcgctacgttgctagacatgttctctatactggcagtcaagctgatggcaaaggcagtgtaggaggcgttgaagacgatgcaggtgggaaatgaccacatccgcaagacagtcgtgcagaggctgcgacgcgagtacgagataggtgggtgatgaccgcattcgcaacaccgatgcacagaggctattgcgtgagtacaataacctcgtgttcaaggatggcaaatccatggagaacttcgcccttgtgctcgttggcatcatcgcactactcagcacactaggcgacctgagacagaggacaaggtcgtggctaggtatcttcgaatcacccgaccacgatataaatagctcgtgatctccatcaaaacccagctagacatgtcaacacacactgacgaggatgtaactagacaaatcaaggccgtcaaggaggaggacgatgtgatgctgcccagtgctagcggcaaactgtaccacattaaggaacaatgggaggcccaactcaagtagaagaaggatatgttggctggctcgttaaagtaggcgaaccaatgatgccatccacgccacagctcgtcgaacggatgtggcggcaccgagaaagcaggtggaggctagggatgtgggtcgagatcaatgccagagatgtagaaaaaccatcctttggctagggagtgcatagttcaagcccaagaaaggagaggcccatgccgtgtaggcagaagaggaggcggggactttgctattcgcacgggcctccttcgtatagctcccgactgacaaaatggcaacgacacatcgacagttgaatcttcggtgttgaatgtgtcacaggtggaaatccacccatcgttggcctggatcgaggcactagagttaccaccagcttagatgttgacacaggcggccctagcccctgtggagaagacattgtcggacttaccacccctggcctcggtttcagcgctagaggcaccacacatggctagggaggccccgctgacctcgg

SEQ ID NO: 115956 - DNA, 310 bp, Zea Mays
ggaagttttatccctagctgcatttcaaaagctatcgggacgacgatgtactctgtaaagtggaaatatgtcatcaataaaaaaggggtttcaaagatactcagtttgttcatgattgacttgcattcttacttaactcggggtgaccactatgccctgctaacggagcaatcagcttaagtcggcaacgacttaagccggtgcaacatgctcgcgcttacttaactcggggtgaccactatgccctgctaacggagcaatctgcttaagtcgacaacgacttaagccggtgcaacatgctcgcgcttac

SEQ ID NO: 115957 - DNA, 817 bp, Zea Mays
aagacccaaaccactgtcgccaacaggaggattggacacaaaatcgaaaaaggacttggaaggtggcatattccaagcagaatatgcaacaggaggaccattatttgatactttgcctctaaggatcatttccagtcggctcaccaaatccacagcaggaatcctcttgttggtaacccagggttgagtcggtgacaccactatacaaataagcggggtacgctctgtccttcagtggctgaatattcttaaaaacaaagtctgcaaccacagcttcagcagtcagacctctctccttcaacaaacaaatctcagcaagcagaaccttggcttctgttatctccaagtctgtgggggactcaatccaacttggagcatgaacatctggttgtctccctgaccgagggtggagagacttgccatggttttccacaatgaaccactctaaacgccatcctttaattctatcctttagtgggatgtcaaggtattttgttttcctcccacggtgcatctccagactcgcaccacctacgagctagtgttgccccccagccatcccaggatgacaatgatacaagtacttccacaaaccgaagtgagggagaattccaaggtaggcttcgcacaaatgaacaaagacagaaatttgcagaatagagttgggattcaggtgagtcagattcagatggtaaaagtcaaggagaccgtgaaagaagggagaaatgggaagagcaaggccgcggataagaaaagggatgtaaacaatggactcgtgtgtatcctctgtcgggacagtaaccccacgacaaatccg

SEQ ID NO: 115958 - DNA, 853 bp, Zea Mays
atatgataacgttcacatacctttatgccagtttgtaagcttatttatgaggcttttttgcattgtccattaaacatatgaatcacatttatcaatttaatatgtgtgtataagttttactccatctttcacgcctttttttagttccgaagcaccacagagacctgctacacagctgtaccacctgttgaagcacaatttaaggcaatattctatttatatatttttttgtcatagaatttcaacataatattcagtgatacgatatatatttacttaatatttttcaatttacaacagcataagactaggacaaacacttttgatgtacctcatcctgacccatctggacaacacacaattcacatcgaacttccgctcatcagggatttgatatcaagcaagctgaatcagcttccatcccgccaccgcctgggtttcatagagaagttgtcacattttgatacggaggttggtaaggcgtgttcagttattaaacagactcttcaacagattattgagaaacaatacaatctatctgatgtttttggcgagttaattgatgaggtcctccgcgctgagtcgggggacaatgaagatggttatgatgtgcagaaaacaactacaaaatcagatgatattcctccccagacgacaggttagtcagttttatggtctttacgtcaatataaaaaagttatgcaatcatttgtcgatatcgttttcatgccattattttaaacaatgtttttttgtttacatgatacataaagaaggatgtacgtgtccggccccccaactgtacctgatatttctactccagcatcacagcaggatacgcagtttacagaca

SEQ ID NO: 115959 - DNA, 411 bp, Zea Mays
tctcaatccattagatctgatctcactcttgtgcttgcgacatctttgtagatgccccctgaccataaccttcttgtctttttgggattctttcctctttcatcattgaattgctaccatcttgtgaactctagtcctttggtattgacatgcttgtatccctttaacactcttgtttcaaatacttgcctctaaatttctactgcttacttaaagatttcattttatatgtccatgaccttcctgtcttttgataccctttcctcttctgttgttaagtcgttatctttcgacaatttcttgtctcttggtattggcatgctcatctccttgaaatatttcatactctcatctttttttatgcttacctttatatcccaaggtccatttaggatatttcattttacatgc

SEQ ID NO: 115960 - DNA, 510 bp, Zea Mays
tagagtcataccctacagaagtgcggggtaggcccacgatgaagtccataccaatttcttcccacttacactcaggtatcttcagcgggtggtgcaatccagttggcctctggtgttcagcctttaccctttggcaaacatcacatactaccacatgtgaggctacaaccctttttagcccataccaccaatacttttgcttcatatcttgatacatcttggtgctactaggatgaatagaataatcagagtcatgggcttcctttagaatggtttcacggaggctatcaatctcaggaacacatatcctattcttgaacctgatcgtgccttgtttgtaacacccctggtgttactgtcactaaaacttaagcaaaacatcataagcattagcatatcatgtgtttgttacacttagagtgcattcactaggtaaaaatttcaaacaagttgtattgatgtgacttgttgtatgtgaaaccctaaggtagggtatttaaccctaaacca

SEQ ID NO: 115961 - DNA, 343 bp, Zea Mays
cattaacttagtgaaataaaagcctagctagagaaactttgattgttgcattcatgtcgttgcatattgtttatgggtgtaaaaggttttcgaaacataaaaagattatctcgatagtgtttttaggaatgtctggaaccttcgaaacgttttcgagtattaaatattaatttctagaaaacttctaatattatttaacctctaaaattcagtatttgcgaaaactagattattccgaaaattcgataatatgtatatatgtccctctttctctcgtcaagcccgttctagatcccatgtccttttcgcgggatcgttagaacgtctcttcgcgcgaacggct

SEQ ID NO: 115962 - DNA, 1035 bp, Zea Mays
tgggtacttacatccacgttgctcacaatctgaagggctctccaaaccagaacatgcatcatccttcaatggaggcttctgaacaaaagccatccgtgtcagtgctaagtttgggatgtcacttgtgaaatcatgaaattccaatcccccagaattcacagtttcgctctctttatccatggtgcatgttgcagctccagaacaaccaaactccaactgttcacgccgaaaagatctcctccgcctcatcaaatccctcacagaatgacaaactgaatcatgtacacctaaaaaactagaagattctgaatcagtgctgcctatggtatcatgatagtccttatcaattgtactcttcttagatgcacttaaatccttctgcggtgacattgcactgcatgaatcatcagcatctccatgttgcctcttttttctggaagaaagaggcaaagaaccccagagatgttcagttcctgaatacttactggctgattttgaaggcttcttagtagatgtgtaacttgccgatactactgatttcctagtgaccttacttctatcatattcctgggagacttttgggttctcatcagatgacccatcaagctgaggaatagaattgcccagagaagcagcagaattggacttcacagaatcgaggtaagatgtatgtatgtttggttcttctactgccctaatggggtcaactgaatcaagaatatcctgacactcctgctgagaagcgctatcaaaatccaattgagcagactccacagcaacttcaatggacttattggcaaacaaagggctgaggatgacttcattagttaattcatcatcagttgattcctctgcagcttgtgaagaggccagccagcttaaaagtccaagagcctcagcatccagatgctacaaaagagcaattccaagcagacaagctcaattgataaataacaaaagaacatgtttatgaaagagaaatcattccataaagtggaaatttcaggccaactagaataataggatcaaagtggc

SEQ ID NO: 115963 - DNA, 309 bp, Zea Mays
tagacatgggtgtagtaggagactaggggatgaagtttgagcgaagtcatggcattttatatgtgggtgagaaggtctttagtcaacattttcttaatcagatcatgttgtgatgccattacaagctctaagtggagcccaaacatgacctaggaattggatcaggcaaacacgagcatgatagatatgaaagcatctagttttagtgactaatgacaacactaaattattggctatgagtaataataattggctatatagtttttgtgcccctattgatggtattcaattattgattttagaaggatg

SEQ ID NO: 115964 - DNA, 522 bp, Zea Mays
atttaattcccggactaggcctcaattactgtaaagcgcagggggctcggggtaataatctgcagacacagggaacagtgggagtggacggcgggtttattctgcgaaaccagggggttctttatgtaaatgtgcacaccgaaggggtatgggaggatctctgccgttcgatctaaagggaacgtccccgattagactctacacctgcgcgaactggtacgcgccagagccacaagatctgaatccaacgccgcagatcaactctcccctcttttaatccacagcgttcatcaacacttggacgacgccgattcacctaggcgaaacggtatgtccccgtctaatccagaccgttcaatgaaggatcgacggcacaggcacgttcttccacccgacggccagggtccccagttcacccccagccgcgacggcgatacacgccggagaaggtctacctagcggctcggcgcccgacactttcgaagccggtacgattcacccctgcgtggcccaacgaagctc

SEQ ID NO: 115965 - DNA, 765 bp, Zea Mays
gaatatttatgatgataaggtactagataaaattacagtggtattcagaaaattattctacatatataacataaaatctcttggtgtcatggcggagataggacccatgaggcataatttgttccaaaaagatattagtatattattttctagacctaggggttatcttccaagctaatatacagttgcaagttaaaagtatcttcttttttcgcaaatatacatgtgtaattttaaggcttaactactacatactcatgattttacaaacacctaatactttttagggctgattcatatagtccatcactacagaaaccaggtgtcgatgcaccctatccacatgttgaagcaaccgccttaactatcgacgaacaaggttcatagcaccctttgtttcccctttattaatccattgagtccaagtaatagaaaaacccttactatgcaacaccttttctagaaatgtctagctaaccttatcataagccttctcaaatctagtttaagtataattggatcttaactcatgaaggacatcctgcactatgacaatcgcctctagaacgttcctcttagaaatacaagctatttggaaagggcttatcacttttccaactacaacaattagtctcattgtcaatgtcttgtaatgattttatagatgacattgaggagatatattggtttgaattgtttgatagttttttatggtataaccttgggaatcgggatgattaccccatagtttagtctccgtaattc

SEQ ID NO: 115966 - DNA, 800 bp, Zea Mays
gcaagggagcattgttgaatctcatgaagaggatgcttcgaggagagtgacaactgatgaaacggagagtcaagaggatggtcaagatcagtttgagagagccaaaactcaaaacatggaaactgcaatctcagaggtgggatgcctacagttttcttaaccaattcagaactgaaatatcacattgtttcttgattgtttaagtttgcagctgacaccttcacccaaaccttttacagtttaatcataaaccgactaaagggattgaatatatatatatatatatagtcatataaattggtagagaataaggcatcatctgtagctcggtttctcaagagcaatcccggtctagataaggtgatttcatctatagttgatcccttgtgatgtagtgttggatgattctagacatattttttgttttcctttacttttgatctgtgtctaaatcctttttcatgttatcccaactgaaacaaactacttcgattatttggccagtgctactaaaacaaactacctctggcatcaacctactaactggcatattcttcacaatcggtttagcaaaatttacttgactgccttttagctatagccgatcatagttttacatggttgaagaaattgtggttagtgatggctcagtattttgtgtgtacacgatgcatatgtctgatatagcccgtatttgatatttgttcctcataattaacattgtaatgaattataggtttttgagcaggtgattttattattgtctgctatgttgaattttgcttcacgatctggtggcc

SEQ ID NO: 115967 - DNA, 397 bp, Zea Mays
aaagtgctcaagaaattctgccatctttctagctttttgccaatcagctttatcaggaaatccaggatcatcctcaccttctaattctagcttatagtatgggtcttcatcactatacctctcaaattccttttcatacttttgtgcaacatttagcataaggtaggttgagttccacctagtgcaaacatcaagttttaaaaatgctttggattgaaccttagctaattcgacacatttcttgaaccttgcaaacctagatgtcccacccttgataaacttaacagcctcacgaacacgtttcactgatatatcaatttccttcaagccttccattactatcaggttgatgatatgtgccacacatctcatatggagatactctccttcagcaatg

SEQ ID NO: 115968 - DNA, 589 bp, Zea Mays
cgtaaagtgaggacacatatgtgtgtgccgtggtgtattagagtagtggtggcgtaagatatttgtttgaggtgtgcgggtatatgccgtaatatggttatactcacggtgaggaaagatgtatgtattgtgtaacacgacgcttaggtcgctattatataatcatgtgaaggatgctcaggaaggtcgtgtgattgaggagtcatgtaatggcaagcgagaagtaagttgagtttttcaaacggttagtggatagtgtccgtcggtgttgtcatgttttttgttgtatggcaatgtgatgcttgctttgtcaaatattgcattccattcccattagataaataaatgtcttgttgatcgattagaggtcttatatgagcgttatcgcagccaataattattggaagcgagtagcgttcataagtcggtccttgttaaaattgaagaacaatccgataacatatgcacataagtgctttaggtccttcagtagaaaatgtaagtcttatggagtttatgccatgtgttaatgcctctatgttagaccccctaaaatatactattttaggtgacttatgtgttaactaat

SEQ ID NO: 115969 - DNA, 960 bp, Zea Mays
cagaggccatatccacaaagaaggctctgtctagatcctttcggcttcaaggtcagctttaggatgagaacatgttgatactcttggattcaggcacttctcactgttttctaaacgcttctcgcacttcttcgttgtctgggttcgtgagtttggcgacaccactagcagtaacagttgctaatggtgggattctacattgtccattggagcttctcaatgccacctggtcggttcaggagttggagttctgtacaacatttaaagtcattcccctccatattatgacattatcctaggtatggattggcttgagcagtttagtcccatgatgatgggctggaaacacaaatgactttctattcctcattctggacagacagtgatattacaaggttatcaacccctggtccctgtgggtacaatattagaagtgtggctggtgtctgagttgcaggacacttcttcctagctgcactatgttgtggacatgtccctgcccaagcctattacccacttgcttcagcgctatgaggatctatttcagccaccaactacacttccgcccagccggtcctgtgatcattctattccactcattgacggtgctcgacctgtcagtattcgaccgtatcgtttctcgcctgctatgaaggatgagatcgagtctcaggtcacagagatgttacaaagtggattgatccagcatagcaccggtgtgttttcatctcctgtgctgttggtgaagaagaaggacaatacctagcgcttttgtgtacaccttaatgccctcactgtgaaagccaagtacacagcgcctgtaattgatgagctacttgatgagttatttggcgcctcctagttttcaattttggatcttcgagcaggattccaccagattttgctgaaggacggtgaagctcacaaaactgcttttcagactcatttgggacactacga

SEQ ID NO: 115970 - DNA, 415 bp, Zea Mays
gtttcgatgtagagagcgggaatgatgaagttgaagatcgaccgcggaggcctagccatgttgtttttggaaagtcatctattaagcaagggcagatcgaagtgatgaaaggcagatactttcgtgatatttctattgtgagggccggaggggagaatatcgttcctcttctcgaagctaatgaggtggtagtttctagaagcttcatgaaagttggactttgtttcccactgcataagatgttggtcgaagttctaaagactttagaaatataccttcatcaacttttccccgaggcacttatcaaagtagcagtttttatatgggccatgaggagccaagggttagagccagacgccaggtgcttttgtaatattcatgaattatcctatcagacgaaagcaactgggaaaga

SEQ ID NO: 115971 - DNA, 409 bp, Zea Mays
caaaaatctgttgtcttcgagtgcctaagtctatttaagagacctttaaaggtataatattctgaaggtctggtaagctatttgtgttctcggtctttattttatgcaataaaggaaagagggaggtgagtaaacccatgcatcctatatacatgcttcgtttacactactttgtctcatatacaatgatttcaacgttagtgttgtcatttactctcttctcttttacaccttgtttatttgtgtatatcataatatttgtactcaacaacttatcaacacgggtttcccgtgggcatcgggtccccagcggggatgtggacggggatgaaatcctctccgttaagtgttttggagcgggggtggggaatggattttgaggatcaaggcaaggacagggagcactcac

SEQ ID NO: 115972 - DNA, 296 bp, Zea Mays
ttgacatcgtgcttgtttcaccaaggaatgccacttttgactgatctagctgattgaaagcttattgcactaataatcaagccaaacatgaaggtctcttattcgattgggagctcttagactatatgggggtaaagcatgtgaaagtatttaatgattctcatcttgttgtccaataaattttaagagagtattaatgctaagatggtggtttgattatctcgaaaggtgatgggacataatacactcttttgacgaatttgacatttgacacatatctagagctgagaattcca

SEQ ID NO: 115973 - DNA, 464 bp, Zea Mays
caaaagtttcctatttttaatgtattagcctgtgtttttggagaaacacagatatcttttatgtctaatcaccgaataggttagtaggatggtttgataaagtacatgttgtggtaaggaagacttgggcaatgaaagggatttcatcacaggtggtggtcttgcttcctctcaagatttggtttgacttctatcctcccttgacgaagttgatcctctccttctcaggtcttggtgtcttcatccggggtagggacatgcaattaagatagatttgtaggtgaaccaaatagtttagtaggtagagccaacaattttagtaggtgtccttcggctaagagagattaggtagaatctggtttgatgttagattgggacggatggttatcatgaacaacatggttaagtcatttgttcatggccgagttggtttagggcactaatttaggattaagtgaattaag

SEQ ID NO: 115974 - DNA, 377 bp, Zea Mays
tcgtcgctttcttgaaaggtgtaggcctttaggcatccgtctccataaatggacgagttgctcttgcaaatttttccctctcttgtcttccgcgctcggcaatggatcaaggtaggtcgtcgagggatgggctcctcttagtgggggaatctttcgaaaatcatccttgggggctatggtacatgcattttttcctttggtttattccactaggttttcctattttcctcagcacttcgaccctattcgggcatgagcattcctttctccatagtgcgaggggagcttagtctttcacttaggccgattaatcctttggtccactgggagtcgtcgatggaggacctctaaagggactttgttgcatcccactcagc

SEQ ID NO: 115975 - DNA, 387 bp, Zea Mays
agcgagggcatcacacattacattggctcaaccttcgggatgatacccatctccctgtagttgaacaacattatcctcaattcatcaccctcaaacagacttcgcagctctccctcacctacactcaccccagccggtgaggccaacaattcccgcttgccagtcccgtccacacgaagacgaccaccctccacctcaccacgacgacgcctatcacttcgtgacaactcactcactctccgtttcgccaccgcccttcgccgcctatgcccagcactcgcacccagaagatcctcatcacccattacacgcggagaagcctccgccgcagccacatccaatgctgcaaaataatccaaatcctcatccgaagactcctctgtccac

SEQ ID NO: 115976 - DNA, 683 bp, Zea Mays
atagagttagatagtcatcattgacttgtaaagggataaccctctagtcacctgtataagggcgaggggtaccccttcgaacacatctcatctcgtcacatttcatcactacctcatagctcattagccttctcatagcaattatgctatcagtagatcgacaggagaattcaccctccaccgcccacaagctcatctgtaattcgtgtagtaatactcagatactcaacctcgacaggacgtatggcgttatgcattccagcgacacgaacccgtataaactcatgtgtgatccgacgtgtacccacacataccattgagtctcaatcaatgtcatcgtcctgccgaaaagcaccacgcggggaacactgtggtgcccagtcgagtcataaacaccgacacctggcgcgctaggtagagggtgcgacgttgattcacgatgactcaatgatcatcatcattaacaagttcaagaaccaatcagagaatattctgatcgttcgacatcaagttccagatcaaagattggaatccttcgctagggtcacaagaaccaaaagtgttatcggagttgtttagctctttattatgcagcagtccgaggaggtttgatcaagcacagtcatacatgcgtgagcacaagagagaagaagagatcctccatgcaaaacccacttttgtgg

SEQ ID NO: 115977 - DNA, 896 bp, Zea Mays
agaactgacttcaagcttttgagcaaccgcatctgcaatatcagcatctgacacaggcacatcactgaccacaaagatagatactgcgaacttcaagtcctcctctgctttttccatcaaactgttccaaccaatcacacaaggttgctgatgatgcgctgacccagtttcagtcagaggggcctcgtcatttccgggttgatcagattgcatccaacccggatcagaaccacccctagaagatgacttgcgcttccgatggcgcctgcgtcgcgggcgaggcgggagggtgcccagcgaagccgacctagccgcagctccaacctccctgggtggagaatcagaaccatgtgcatccactccccctgctatcatcatgtgatgtgctggacccttctcaatgcctggaggggagattctacgccagatacagaccttcttcttgcatgaaaggggcacagaaggctgaagtctcttccagaccgggacccgaggcaactgatactgcggaacacgatcagcgatcgttggctcaactgtcgaaagtctgttccaaaccgttcctctcaacagccgtcgatgtacaggaaccttcctgtcagctttcacaggcccggggcagtagtaggagcgatgaccaactgtcttgcaacgaaaacaccttggctcaaggtggcagaaagcagcgaggtgattatccgcgaagcaattgaaacagcgacctttcaagtcatttggcaccgggcgacgtgcccgcagtgcacgaaggcgacgcttcttcgccttccttgattcaactctggtccaaccaccaagtgttgtctccggcgcactctccaacccacgaaaccagtgatgttgatgctcgtgatgagggttcaacgtcccggtctcaa

SEQ ID NO: 115978 - DNA, 508 bp, Zea Mays
atcattgcaggtgggcagtctgtcactacgacacctttcgtgaagttcttgatgtctagtcagaatggatggtcaggagggagaaattgttgatgtttatcgaacgatgaatatttgccaaccttcttcaaccaaatgaacctaagagcttccttgcaaactgggcatgggaacttactgtgaacacaccaggcacaaaatagcccatacgtcggtaagtcatgtatggagtactggtaccaaacatgcattttgaagtttgtcttcctagctcggtcatacgtccatacctcttcctcccaagcacggaccaattcatcaatcaaaggctccatgtacacgcccattttattccctagatgtccaggaattatcaacgacacgaatatgttttatctttgaaagcatacgccggggggagattgatgggaataacaaacatgggccaacatgtgtacggggcagcagtcattccttacggattgaacccatctgtgaccagcgcaac

SEQ ID NO: 115979 - DNA, 470 bp, Zea Mays
ctcatggcaatgctctgtggagtgaaagcgattaatttgattttactttggtattttgattttgttctgcaatcaataagctatagtttggaattcctatatgatagcttcacgtttataatctagccaagagtattgataatgacttcaactttttcgagcatggttagtttaatattgctttggcaatttagcaatagtgcaaaactcctagatgatagtttcgccttataatctagctaagggtgctgatgatgacttcaagtttaatgttgtgtcaagtgaacgtgattagtttgatattgctttggtattttaatgttgtttatgcaatcaataaacattcttgttgaactcctatattgtagtttcaccttatgatgccttagacttcattgtgccttcttacttttgacagaatgatccattaattaatgtcttaatagtgcaggagttacacatttacgatg

SEQ ID NO: 115980 - DNA, 565 bp, Zea Mays
cccgccaacacatttttaagctcaaacataagccaatagcacaaaccaaataaatcatttgtatgtacaaccgcaaatcaatatagttgttaaagttattacatcttcaaaggaacgtataggtatagggatttgaacattgtccacacccccttcaagtatattatatacttcttgaatttcctgaataattggttcaaagctcagtatacatcagttacaattcaacatacacaacaatataatcaataccttgctattcctttcacccaattcaccatctctttcaacgtctctattgtcttcatcatcgtcctgatattttattgttttatacctcatcaatgtattagtatgaatactatgttaacaatatttacagtaaaacatcacatacttgtataccatctcccccactagttccacaagtctcctcaactcctatatctgtctccaaacgcgaaagtacctcgagaagctcatccattactgctagggctctatcattacctgtctctgataaactagcatgatgcactactttcattgcttttttagcaacgtc

SEQ ID NO: 115981 - DNA, 289 bp, Zea Mays
gtgagcagaccgttcttcatgtgttcaaactaaattagcacacgttcctaggtcgccttaggccagtgatgccttcctggtagttagctgtagcagccatcgccggccatggccagtacgggccgcgtctggggtgatctgcaagcgcaccgtggccaggggtgttcgtggggaagaaatagaagatcgagggcatctctgcaatctgtcagggacacagagaagtagtaaccgaacccacctccagttagccagaactccgagggtctttctgtaaagccgccagcgc

SEQ ID NO: 115982 - DNA, 1167 bp, Zea Mays
caaatttggtggagaggcgtgcaggcagtgcactcctcctcaccaggagtcctgtcttgggatgtcttcatcaggcagtttgaaaggagattctaccctgtcaccttcctagagaaaatgaagattgatctgcagtcctacaagcaggagaagaagtatgtcaccgagtatgaagtgggcttcaacaagatggtccgctttgtccctcatgtggcttataatgagatggaaaaggtgagccagttccgtcagggtctgaaaccttctatcaggcatgcactgggagcctttccgttggtggacttccgtactacggtggagcaggcactgggtgtggagatgcaacaccagtataccatggagtcgtagaagtcttcaggtgttgatcagcctcgtggccaggacgcgaggaggggcaacacgggaggtccagcccacaagaagggcaagtctcagcatcagcgccaccatccttaccgtggcaaatcttctgactcgggtacttcgggaggaagtactcagaggtttcgggctattcctaagtccgggctggggctagtgtgtttctgctgtggtgatgcgcatcgctgagcagagtgccagtggagtggcaggtgttttatctgcagtcaggaccacaaggatgtggtgtgtaggaggaatcctaatgggaagctcagatgggagccggtgacttcctcctcttctcagggcactatcaacatgatgtcaagtgctgagcagcagttttcagttcctcttcctccgcagcagctttatgtgcctaggacttctcagttcgtgccggtgcagggttttcctcagtatcaggccgtgccgactcccgcaccgtctactcctatatcgtctcagtttggagctccgcgtctgcctcacccggtggctcagtggggttcttctgttaatttcactccaggagcttcctcttctgcgggtatttctagagcttatgttctacccgctgtggatggcagagagcaaggagacgtggtgacaggtacaatttcagttgattcgtttgcggcccatgctctttttgactctggcgctagctattcgtttgtttcgaaggattttgtgtcgcgggctggtctttcggtgcagaggttgggtcacccaattttggttagttctgctaatggctcc

SEQ ID NO: 115983 - DNA, 583 bp, Zea Mays
ctttacttatgtttataagtttatatgatctattcttgtggcttgttgatttcttcaccaacttcctcatcttccttgacgaggttgatcttttccttttttggtcttggtttcattgcttcggggttagtgtatatcatcagagttgggggaatatggttaagatagatatgggtgagatagactacatgatgtagatcaaaatcttgtttgatggtaggtggggatagacagattatgcagttcatcataattctattggttgggtcagctcttttgctcacggttgagttggtttgatgtactaatttaggtttaagtgcatgaggggagaacaaggtttataggagtatgatccagtttattttactggtgttaacttgttaagtgactcacattaggttgaataagatctaaattagtataagttgagtgtgttatgtcaaattctagttgggtggctttgttttaggtcggacttggaaaaaataatgatatatatcattggaaatatgtagatcaagctggtagattagaatctctttttatagatagattgggcaatatcaagaatgtgtaggtc

SEQ ID NO: 115984 - DNA, 894 bp, Zea Mays
gggtcttttgagtcttgcaacgtaagtatgcacttgtctctagttgtttcttagtttactggtagtcatacgattgttggaggtggatcaaaaaatgtgtttcgttgcttgcaaacagtcagatgctgctcaagtatccaagtgcgattacacattataggttctatttcccaaaattaggattaggcagaaacacccgattactgcttgtcaggttctatgtgcaagcatggtgtgtattttttgtccctgatgacgggtgagctggaaaccatatcaatcgcagtcgatagaaatagtaatacgactaacatctaaacctattatagtagtgttaggctatcagttgtcatgtagcagtaaaataactctaatgctcaatttcatctcactattaactcatacaaccatattttttctagattaaagtgatttttattactattttattttgtagatgtcctctgagcttgaagaagagattggggcaggaactcaaactgaaaatacaatcgtggaaggtgtagaggtaagggttgatgggaatgtgagcatccaaggtagtgaaaaagggcaaaaaggaactgaaggggaggatgaagttgaaaagaaaaaaacaagccagaaaactaatggcaccaagatctgaaatgtgggagcatttcattaagattaaggatgtccaaggtgtggtgaagaagggaaagtgcaagtattgcagccatgtcattagagacgattcttatgtcaatggcattactgcaatgcggaggcattttaatatctgcaagcgcaatccccataagaacaataaatgctatatattaatccatatatattgtttctattttgccagctgctacctgttatgtcatggaatgtaggggtgaaaac

SEQ ID NO: 115985 - DNA, 423 bp, Zea Mays
ttgttcttgatcgtgacctcattcagagctcgataatcgatacacatccttctggtgccatctttcttctccacgaataggacagggcggcccaaggcgaggtgcttggccggatgtagcctttctctgacagctcatcgatcttctttttaagttcaactaactctgggccagatactctataagctctcttaaagatggaggcggttccaggaagaagctctatggcaaactcaacctttagctcaggtggcatacctggtaggtcctttgggaacacatctgggaactcggacacaaccttgataatctcaagtggatctgcttcacgccttcactgctatcaacagccatctaataacaacttcctttctttggctcaggcgggactaactcggtcaccacttcctctcctagtgggga

SEQ ID NO: 115986 - DNA, 519 bp, Zea Mays
cccctctagacgactttcaagtatctcctgctgcatatgagctagaataactgctctatccacagactgtggcaggtgacacattactcccccttgtaattctgccttcaatcccttcacaaattggttgacaaagaaaatctcatccatcccgggttgtgaacagaagtggcataccttgcttcttcaaactcttgagcgtattattcaactcccttcatctgatacaggttcagaagatgtctcatcaccttgggatattcttccacgccaaatttggctcgaacaactttgccaaattgcatccacttccctagtccctgcctcatcttgtacacttgaagccacatcgcaacatttccctccatgtgcatggatgctaagtttgcccatagagcttcaggaacctgatagatggtgaagtagtcctggcacttggctagccaaattccgggttccttcccttgaaatatgggaaacaagtatttgggcaaggatggatgtcctcgccctcccata

SEQ ID NO: 115987 - DNA, 1316 bp, Zea Mays
cgggtcggtgagcatcaagagcaagcaagggtgccaaaacaagaatgcagcgggcgagattggacctaaattgggctggccacggtgaggcctttctgcggcgttcttgagagatttgggggaaattcaaaattgaagctctctgatgatcgattgagggcacgatttgggtggcttggtgcttaactaccctatagagctcacggtggcctcaatttatagtaggcaagagcgatggccattgaatcggacgacgacgcacggcgttcggaggagtgggaggtcactggcttaaggaattcttggcatctaccatggcagccctcatcggtgatgatcagatggccaaagtgagccacgacgatgcgatggacgtgccgaggtatgtggcgcaaggccgtgaagtggctgtcaccggcgagttcatccgaagcgaccgtggcaagcttggtacggtggccggagtagtttaatggccggagtatatccacgacgatgatacttactcaaccccgagcgttatccagtcgatccgaacgcgaatcacggcggtgaaggcacgaatctgtgcgcggctcgtcggcggcgaggttctctgaacctgatcccccccgttcactgtaccatggtgattaccatgcagtcagtctgtcagagcaaaatcagagccacttttctcctcatttcatgtgacaaccccatcatcccactgcatcaaagttatagcccaattaaccaactacaatcttgctatggggatcatgcccaaacttgcgccggatcatgttcaaatctgggttcaaagattgcctcatcacactgtcagaccaggttcagtctctagacagcctgacagcccatctttgggtgtatttttcttcacatttttcataacaactgtgttgcatcccttaaacaaagttgttcacctttgatagatctacagaattgatgtggtgacctagggcaaaacccttatggtttgaaagttacaaggccccaaagttgagctaatatcactaatttcagacttaagcaattggagtatgagtggggctcttttgcaaataagtccaaaactcaaggtttaggttgcaaatcttaataattgtgaaccatataacttaagacaccttactttcatggtttttgcactttagcccaaaagtgcactaattttgcatttagccccctagggtttaactctagggttttccagggttctatttagggtttcttgcactcttagggtttggatcccacttaagttcatccatggtgacactttatgactttttcaattgaattttgaagtt

SEQ ID NO: 115988 - DNA, 505 bp, Zea Mays
agcgctggagcatggtcgattatccgtccgtcgaagacgcagagtgaataaaaaaacagaacagaaaaaggatccgagaccatgccggtcagactcgacggaaggcactactagctttacggggttgcgctggtccgcggatccagcgaggaagaaagcgggggtagtagcaagcataggggaagggaaatgcggttggggtttttgcgtggtacggtccgtaccttgaaaaccgctttgctttggttggagctgtggtggaggagtcgagtgccaaagccctgctgttccaggaaggaagagggtggaatgcggcgatcgcgctgcagcggaagccctcgcggcggaaggaagacagcgtggttggatggatgtagtagtgaactgcgctgcctctcttttatgtccaggcctctgcacagcactacgcctgcacggtgagaactgagaagggaatggaagtgtggttgatgaggagggatcgtgaaactgattctgatacgca

SEQ ID NO: 115989 - DNA, 336 bp, Zea Mays
cagaaggacaagcatcctaatccaagcccaacagtcgccgaagtcgcctcttcttctttttctcctcgacaggtctagtcgggcggttcactcgtcgtgaacgctctgggcgagcaccttcaattttccgaatctctgcttcttcatcaaattctttcccagtcgtgatagccatcggctcagtgcggctagagtcgaacgatgccccggccagtaggctaagcacgacatccatctcagcatcatcagtgctggctggcatctcataatgagtttgcctctcagcctcgggaagacaccgaagtggagcaatcaaggcctcaatatcctcaggag

SEQ ID NO: 115990 - DNA, 905 bp, Zea Mays
tgggggctcacgtcgacgaggtaagttcggtgtccaatttggaggatgaagaccgtgaggatgatacagcaggtgtcttctcagtggattcatcgtcggtggctgccttgacggagggacctaggggtcgtttctgggtccttcaagctgagggagaatctgacgatgactccaatattgagcgggatgttgtcggtgcggagaggcagatgaattcggtctctcccatggccaacaataatcacagcagggatgtaggtactgcgttctcgagcacgggctcgcattctccgggagtgctatcgttggaggtgatgcacaacggtgagatgcgggggtcgtcgtgcggcagatcggtgagtcgccaaaatatgcttgaggaggaagcaggttgccgtccatctcgtgcttcggttagcttgaatgggagtcgtcgggcgagagcatggcctaccatggcttgccctctgaccactccttctcccaccgacccgaggaggaagacaaacagtgtggggggtccacatgtcagcggactaaagtaccccgaagaagaaggtagacagtcgcagagcgtaacagagcgccagcctatgggcctgggcagtaattacggattagagcctcagcagaagttcaatcgttacaggccctacaagccgcctaatggtcttgtggcctttttcgaaaagtctttctcgctgttctcactccgtagagctcctagtaccagtactcgccgcttaggattcccatcctacgctgcagcagtcaaggctaggccaccggggacgatggagaagcagaacccgcagccgccggctcaaggaggcaagatgggggacgctggctcagggcgcccgatggcgagaggcaagttccagtatgatggtcctcaccatttt

SEQ ID NO: 115991 - DNA, 711 bp, Zea Mays
cggaaccccaaaaacattgctttctttccaagtcctcatagaaggacacacacgaaatgatgaaggggcaggtcaaacccgcgctcatagaaggacgcgagcatgaccacctcgctgtccccgggacaaggcacctcaccttcactttccaacctccactctgatgcctctctcgagggaatgaaccctttcttctctagacaaaggagacgactctcccggatcagggaaacagggaatgacaccatccgtgcagtgggcaaagtggacgggcacaaggaggcaaggaggcacgacgagaaagcacaagcaactagagggcttctaggggagaaaggaagcaagggctcgagcgcaagaatatggtaagcgaaactaaccccgatcacttcctcctctctacttatgcaggggataggggtgacacctgaaaagtggggccaccacaaacaacactgactggggccacaatgggtatcaggcagaaaagactgtgtgccttgcatgttttcaccgcctgggatagagcgccaacggggcacgccacataggatgccccagcaacgagcgaggcggttaaccaaaccaccactccaccccaacgtgatagggcaggcaggctatttcgcgtcccgtcaagccacccacgccgagcggtgtcatgatgaccacccatttaccacactacggtagtgattgcatcagaccaac

SEQ ID NO: 115992 - DNA, 437 bp, Zea Mays
caccattcgaatcataggttagggctcaaaatcggggcgtcgttgctctccggtgtggttgccgccgtgtatggtgtgcgcgccgtcgcggcttggagcaaggaggggaagaagtccagggaccgttggatccctgatgtgggattgtggtgtgaagaggtgatcagccgttagatcggctacagacgctcctgatctgacaatgaataccccttcagctatttaaatcctaaccgtacatattaaatcgagcggttctggaaggtttgggtcatgcgctattgttgaccgtcggataatgatctagcggtccatatccgataccggttcgatgaaaagagtgatctaatctcgtgggtcggttttagatccgacagccctgatcgatcgataccccttcggccagccttatttcaaaagagaccctaaggaattaa

SEQ ID NO: 115993 - DNA, 401 bp, Zea Mays
gatggatcttggttctccatagtggatcctcttacggggaggggataacgccatggcagggacttgaacttcagggggattcttccatctagttgagcttccagggctgcgatccttgcgtgtgcatcctccagctccaagtgcaccctagagaggtccagggtagcactatccaggtcggtgttaagacctgccaccacaccagctagggtgttgaggcgatctgcatcagctccacctagaacaatgctggtctggctttctccacgaatatgcagaggaagatgcctatacttcgtgttgtgcacctgctgctagtaagtgtggattagggaccatagagtttgcctagcagcattgctgaccaaagaagcgtaggtggatagatgcgtcagagactc

SEQ ID NO: 115994 - DNA, 590 bp, Zea Mays
ggctttgcgcaaatcagctatatgagaactaaactcagccaatttgactacaatatcatcgatgtaaacctccacagtgttttccaatagctcgtgaaagaacaaattcatagctctctgataagtagcgccagcatttttcagaccaaatgtcatgacaacccactcaaataaaccaatgaagtctggacatataaaggtcattttagacgcatcttcttcggccataaaaatctgattatatatggcattaccatcaagaaagccaataattctatttcccaacgcattattaatcaacaagttggctataagcataatatatttatctttaggagttgctctatttaaattgcggaaatcaatgcatgctttgagcttacctgattctttcttttccactggcaccatattggagacccattctgcgtatctgcaagatctaataaaattagcctctagcagctcatgaatttcgtcctttattcatggcagtaagtttggacgaaacgttatagctttctgcttgaaagatatgaaatcagacttaataggctgccgatgctctactatctctcggcttaatcctg

SEQ ID NO: 115995 - DNA, 446 bp, Zea Mays
cgggggttcccaagccttcttctctcctctgatagagaccgggtgaccttcaagaatctgggggtcttcagctttgatgggttgaacagggttggatggagcgggctcctggatccgtagggctctacgttggttttgggtgaccaagtaggcctccatcaacttctggacatgctcatccttggcttgctttagggcttcaacagcaatgacttcatgactctccaaggcagctacacgggcttgagctgtggtgagatccacatggagctgacggttgcgcttctctgcatcttctgctcgggcaatcatctgacggtggtgccgagccaagaaatcatactgtgtatccagggtgagcaggtatgcagcgcggtacacgactatggggtcatcctcaagcagctgctgctcttccaatgcacgcatccttgcgatccaagcgg

SEQ ID NO: 115996 - DNA, 500 bp, Zea Mays
cgagttaagtaagaatgcaagtcgaccatgaacaaactgggtatacttgaagccttttttattgatgacatatttcccactttacagagtacattattgtcctgatagcttttgaaatacagctagggataaaacttcctgaggtgttctatattccaggagttctcaatttctgtgccgtccatctgagtgagacgatatgatcctggccgagtgacttctgctactatgaagggtccttcccataagggcgataacttgtgtcgtccctcccccgttagaattcggcgaaggacgagatctcctactgagaaggatcgctgtcgtacggccttgtcgtgatagcgccttagagtctgctggtatcgtgctgattggattactgcattcagtcgttcttcctcgagtacattatcctagtggcttcagcttctgctatgctttcgaagatcagccttggtgccccgaacttgagatcggcgggtaacactgcctctgac

SEQ ID NO: 115997 - DNA, 299 bp, Zea Mays
cgcgaagactatccgtgcaaaagtcgcctaagggtgcagccggactagcacgacaagcgcaaagaatcgaagtcttccgcgaagagtatccgtgcaaaagtcgcctaagggtgcagccggaccaagcacaacaagtgcggaaaagactacactaaactgtccacgcaaagaccgactacatgcgcgccagaccgacataacacatacaccagaccaagtgcacaatgccttcgtgagcatagccgaatgtgcgaaggcacacaacctcatcatacaagccattacatatgtacgagcga

SEQ ID NO: 115998 - DNA, 498 bp, Zea Mays
cgggaatagagggactcttttgcttaattgttcggctgaaacagtatggggggttttcggttgtcagatctagaactaagggacaagattataagctcatttacccgaaccggtacacaatgccacacgtaggatacataatatatggctctggtttaatgattgcacgatctgctttcgaccgttcatccaatgatttacggtcgagatgaagcccgggcgaagcagtgcattgatctaatccaaaccgttcaacaccggacaacggccaggtgcaaccggcagcacagagacccctgatttgttcgtgaccgttcacacgcggatcaacagccgagggctattcacccaaaccggccggaccccgatggcggaacagaaatcccacggcggcgccatgggtggcgaaccccgtgcgagtgctggcgagccctaatcctaacgcgatcatgcgcaaaacggagtggggaaagtggcgtgcattaaggttgtagccat

SEQ ID NO: 115999 - DNA, 578 bp, Zea Mays
tggggattgcatctcacattaagcctctgctgaaataatgtaaacaatgaataacgtaaacatttacatctacatgatcgcaactcaatgtttaaatcaaatctcaatacaacataatttcacgcagaaaatgatatattggcattgaccatcaattctaacctgtcggggggatccactgctttcctccgctttgtaactaacttcttcaagacttttggaggactgtcatcaaagttacgcttcttcgataatggcataaagtcatcgtcctcgtcaccatcctgcattggtttgtgtctaacagtattcaccggaacacggggtatgtcgacactaaagcactcttgagtagactgaattataattcgctttggattagacggaggtcggtctacgttcttcatgtatgattttcctgccaaatcaaacaacacacatacatataaaacgtataaaaacaatcttatggagcaatacaaattctgctcatatgcaacagccaattaatgtataagctggctctttcgtgcgtactggccctaaatgacttacctgcttaacaatgaatgtacagc

SEQ ID NO: 116000 - DNA, 786 bp, Zea Mays
tttcagtcaagctgggcattgagggaggaattcaaaaaacgtgcaccgtccaaagaagcagaggtctgggccaaatcggcttgactttgagaatacttctcctcaaggtcaaagcaccattgggccatatccaacaacgcagctaaaaggggatgcatgactaagaacaagttgatcaataaaaacaactaaggaagctgtaaggtcactaaccagcgttcgatgctttcaagtcatcgatccgtttctggagcagcaatgggttccactgcattagagacagagcttgttcgggaacagtggtaccgcaggatctcagctgggcagatattccatcaacaaaagcctatgatcatagtcagatgagtagaagaaagataattcgctaatatgaacaacatagagcaagaggccgactcacctgacgattggagaggaacagtggtagacccagggcaggaggagctgagtcatggctcgacgagggaaggttagcaggaatgatctgaagagcactatcaggggtgacctcagccccaccagcagacaacaagctccttgcatctagctcgccagcctctaaggcgacttgtccggttaagactgtggaagcacgtaccgccatcgccccatcggaccgaggtggggatgacccaacgtggatgttcatggaggcgtgggagagagagcccacctgaacgcccttgggggccgggttgtggcttgcactacccacgagagctggatcactaccagcaacacccttgggggctaggtaactgccag

SEQ ID NO: 116001 - DNA, 500 bp, Zea Mays
ggagtttaatctcctgatatgatctaatcatggaccatctgtacctatgggcagaccgcctgcagtcctttggaccgaaccatccgatcgtgcctagtgccacaaatgatgatcaacaaccacgtactaagaaactaagtagccattcacatgagtctgactttatctgatagggccactagcctcaagacccgctccccgccggggataggtccggtgctgccacgtgtcctaggggtgaaaacactcagtgactgcaattatgagtctggaccctacatgtgggacctagaccccacatatgtcgtttagacccccataggttggtcccagacctctacgtatatcgttcggacccccatagaagggtcacattcctccatgtatgccatctggacccccgacgaggcgggcttatgacttcgagctagcatgctctcctgttccccgctctccgctcgggtagagatccagtgccaccacgtggcacaagacttcgg

SEQ ID NO: 116002 - DNA, 349 bp, Zea Mays
ggagtcaaacaaaaaatttgcggagattatcaatgttccaagaatgctccaagtcctcgccggatggcgttgtgagcctgtacgcgctgggggacgcctttgtcttgacgatgaaagggccctcccacttgggctccagcttgccccgggctctgtccgagctgtccggacgagtacgaggtctccttcgctgaattccctcgggatgaccgtgtggtcgcgccatgcttttgtttgggcttggtatttgtttagagcctgtagagcgaagacgcggtctccgtcgatgaggtccttcgaagtgggctcgtccacgtcggggacggctaatgggattgtctgtggtgac

SEQ ID NO: 116003 - DNA, 304 bp, Zea Mays
aaaaatcttgtggagaagagccttccagagaatccttcggcgtctgctcccgaagcaccttctagtagtgatttgaatttcattgtgcgacatgcttcgggaaagcaactatcaacaaagcaagctgccgaaacggaacattacgctaaagagctgaagtacccccatggatccttggtatacggagaggataatgatgatgatttcctctattgtctacctgatggtaaggagatcaatgtttgccgcgaaatgatggatcatatggggtatccgaagctcgaactcggcttgtctgcgatga

SEQ ID NO: 116004 - DNA, 327 bp, Zea Mays
gcttcatccgtcagtgagaacattcctgaaatacacttgttaatgatgaagccagatgttaggcaagtgatcttcggcatacaaggcccccaacagtagctcgttgcgggatgagttcattttctacataatgagcttagatcgcaaaaattataacttggaggccctatgccgaagatatgaaaagcaccttcccaaagctcgtttaagaagaagatgcattcacagtaaaaacgggtgacttggaagttgagttatcggggggagaagcaggggacgctgcgcgggaataattccaatgacccgcgccgcttcgcgcgcatcttt

SEQ ID NO: 116005 - DNA, 365 bp, Zea Mays
cgagtcagccacgtatgtccaggcaaggaccgagcacactctagatccaacaaaacatgtttgatctacccatgtgaaacaacactatgttgaatgaaatgaattagagtcaacatatcatcaccaacatatgtctctgtatcaagctcaacaacactaccaggtagatatttcaaaagctctacttgataagttggcaacaaatcatagttgtcatcccacttcccatttatcatgtcaagtgctctatccttgcctctaaaaactctgccatatggaacatctaccttgtacttaattcaacacatcctgtaactttttcagactcatggtagggtcatccctcaacaactcaaccactcttt

SEQ ID NO: 116006 - DNA, 327 bp, Zea Mays
atcctcaggactttgctcagtagtaagctctgataaaataagcttcatcagcaaacaatcttcatatcaaaggaataaaaagttaagaattttaccttaaagttagcataaattaggctaccagcgatatgctgccgccggtacctgctgaggtctgcctcaaccttcgggaggccaacactcttcgatagagtgccgacaaccttcgccctagtgtggtcctgaaggcatcctaagctttcttcgttgactcccccgaagagtaacgcacctggtctgtacccgcaagatatagcatactctttcagttcttctttttcagccttt

SEQ ID NO: 116007 - DNA, 420 bp, Zea Mays
tgggcccatggctgttctttgaggtgatgagattaggatgtatacacaacatccacatttacgaaaatgagaaatacttggaggatttccacgtaccatttgtattggggaagtagtatgatctgtagtaggtcgtagttggataaggtcggcactcggtagcgtgcagaattgcatgacctcaacacgacgaaggaaatttgcaattcattaacaatggtcttgcaatgagtttaatcctcttgattagtgactcagtcaagccattctagatagtacatatggtaccgagtgctgaacttgaatacccagtgccatctaataatcattgaatgtctgagatgtaaattttgtagcattgtccatccggattgtttgaattcgatgtttagtaaaatttgcctttaacttgaacatttg

SEQ ID NO: 116008 - DNA, 409 bp, Zea Mays
attctaccctcttgagaggcttacaagtgggaccactaccacctggtaggaactaggccccgcgaggtggtctcgaggactccatcttcatgcatgttttcccttccatgttggctgtcaaaggcgtgcgcccttctatcggatgttaagtcagggccttcgcttcgcggcgcaggtgtgctcaaggatgtctttgcttgctgaagagcccttgctcaccagcggcttcgctaccattgaccccctcttgtgtgagccttcgtatagtcgttgttagcgaataccaccaaagggcccttcgttggtgcgggtctgacgaagtcctccgacgtgcgggaccctgcactcaaacgtggtttgttctagccagcacaaggctgatcgaggttgggttcaccttcgctccatc

SEQ ID NO: 116009 - DNA, 1484 bp, Zea Mays
gcgttgagcagccaacatcggggactacaacaccctcagcgttgtcaccgttgtgatcaggctcagcagaaaattgatcatcttcttacatcttgtgtttttgctcgccaagtgtgtttcagcatattgcaaaaggttagactgcaggatctaaccccacaacctgatgatctttcttttgatgattggtgggctagaaaaaatgaaagagatgatgatcatcaggtcaaaaaagagctcaattctatcattttgggtgcttggtcaatttggtatcattgcagcttgtgtgtgttttatggcattcttaatctagctggagttttgtcactcgctagagaagaacagcattgtggggtctggacaggttcaaggtatttcttatctcgctgcatttgcaccagatggtggctagttttctcctaggttgcagtcatgttttcatccttgtaataggcgtgttagtgtaagtgcttcgaagtgggttggtccggtgctgtacgagttttaaacccctttcttcttcttaatataatgatatatgcagctctcctgtagagtgtagagaaaaaaagcatgacaaacaaacttttagaaagttctattgcagtttagtactccaaaaaacgaagtctacataagtggcatattattaacatttacaaaaggtaaggcagagtggcagtaatcaaggtcatctggatgctctcaataaaaaatgaaagtggactcataaagttttctttgttcataggataatttgtggcaaaaaaactcatcttatttatttcaaactctactgtgtatgcaatctgaatatgatcagagataagactcatctgccacgttaaaaaaaagactcgtctgccattttgacttgaccgctatctatgttttttcccataagtgacagatattatcagtcagcggatgaattgaagcatcatacaggtatactatcagtcagcggactagatagcaaatgtgagtcagtcataagcaccaatgcaccattcactatggtgtctgtccgtctgaataatgtcaagtaacctcacgtgctatggcactgcctaatggaccaattggtatgcccccaatgctaaaacaggtaccttttctgaagtttggaccttacataactggaaaatactaaaatttcatttctgataagacacgcacttatattcctaatagaccaactactactctcccagtgccaacaatggttatttttcttggactaaaatatgtttccacttttgaacaatggacctggcataagcaagatgcccagaatgaccaaaagctctttcttccatcctccactccgcatctgtcatcgccacaactacctccttgcccacctccacctcccggtttcctcctcaccacttcatgaccggtagaaaccaacaatttaaaggttttcaagaagtagaccccacctctgcttcataaaaactgccgctaactgaccacca

SEQ ID NO: 116010 - DNA, 511 bp, Zea Mays
cccttggtggtcatacctgaactgaaaggaggcgggacttgcttctttgagcgaaagcatccgaccatccattgattaatctgaaaaacctttagaggtagtaatcatgcccctgctctgcaactccaatccttagttcttggcgcagaaaaccttttgcaacttcaattgtggtcatctttcgccacagaggttttatagcctttttcttgctcgaatgtgccaattgactcacaaccagatggggaattttatcgaatggaacatggttcaggtctctgctctctaattaggaccttttttgcttggcaagaacaaagacagacattctgtcttgttttctattgcctgaagaacaaagacagacactctgataccagcaagtacttgaggctgtagtgatcagtcttgacttcgaaacggcggccccaaaggtagggcctccaatggcggattgcctggactaggctgatcagctcccgctcataggcggctagggcgcggtgacgag

SEQ ID NO: 116011 - DNA, 496 bp, Zea Mays
ggcttgaacgacacaccacaatccacgcgagtacaagatctagcgtatttggtgtcaacgcgtgtgcggccatcagagctacaatagcatatcaagccttcgtaataagtgcaacaagcgcagttgtgactcaatagtcggggtacatgacaagtccatgaaacatgcgctacatgcgcaattgtggctctatgatcacgagagacaaacaatgcctacagggcgtgcgaaaaatgcgtgactcgatgatggcggtccgactcaacgagagtggtccgattaagcgagagtgcgacatagtaatcaaatgacgcaaccaagttcgtacgacacaaatactgcatcgtgttgccagggcgcagccagtgctcagccaatgccataactcggtcgattaataacgtagtctgatcgacgtgtctgagtacccactatacaatttaatcgctcgacgtgaatccaaaagctcaacacatcataaatatttagagcgtat

SEQ ID NO: 116012 - DNA, 857 bp, Zea Mays
gcggagccgagcgttgccgcgctttgcttgatgggataaacgccgcgcgctgggaaggttcagtgaccactccctgccgccgccgccgccgccgccgcgctggtttttattcgcttctttctgccttcttcctcctcgcggccggggcgggggcgtgctgctctctcctctccagggagttttctgcgggggttttggttgggttttcttcagcgccagccgtggatgtgtttaacgcaacagtattagtttcttcatgatcagctgtgtgtcctcaaattgagtttcgtgccgtgtaccagtcgcgcatgttccccagatcgattaaagtttcttcgcgcgtatgtatgagctctattcgaatgttctttgctctgaaaagattccccctgttcatggttacagaagggcctggagttgaagcacgaatcatcgaagcgcagcaaaactgagacacacgtcttacttcttcacaagtactgtcctctctattcatcatttagatgtatcatcaaattgacatagtaacctatgattcgtgcagtgaaactttgtatcgagagtgcatgtcttgatctttattttatctcactcttaatgacgtggtagcattgaaaacgacgcgataaaactaactcttatgttggccaggttcttggacgatggacatcttcgggagcccattctgctccaagcaagccgtcgcctcatgcggcggatggacggacatactcgactcctccagctgcacgaaccatatcctggaaaccggcaccgccgctctgatcaccgtcgctctcgcgctgcacctcctcgtcgtcaggattactacgaagaccagagcgtccgcacgccgc

SEQ ID NO: 116013 - DNA, 333 bp, Zea Mays
gtttaagaactctattaaaaggtgaggaagatccatacggtgcccccacttccgcacatagtaaaagaggtgcgtataacaaatacagaaaccccggtgcccaatatttatttgtgtgtgatcttgcacacttcctatttgctcctcttgtacccttctgttctgcgacaaccttcctccttccattagtttactttgcgcagccgagaaaatggccgaggaatgagaacaaaccaggcaagctcttcaaccaccaccaccatcgtacacagttcacaacaactaaaaccagcactagcagtggctaacccacgtgccttttgcactaaacgc

SEQ ID NO: 116014 - DNA, 3536 bp, Zea Mays
atttatgttttaacatataaacccatgtaaacttactgaaatcatcaataaaggatacatagtatttctgacgaccaacagattgaggagcaggtccccaaacgtcacaaaatacaagctcaaaaggttttaatgagatactagtggacacagaatacagaagctggtgactcttggcctgttgacaagcatcacaaactgacttatttgactcatttgaacaggaaattctattttgactaactaatttttgaatgatctgaaaagatagatggccaagacggttgtgacatcggtgaggagtcatcttgatggcaccaagagcccctcgtcaagtgctatcggagggaagagggtagagtccatcttcacatctaccacgaagaaggtttctcctagtttccagatccttgatcaaaaaatgagttggaaaatattctagatttttcttggcttggggaacatggaggatattattgagatgcaaggatttagcaggggtatcaataacagcattaccaatattgctaatgttcatacctgccccactggctgcgaggatctgatctggtcctttgtatgcgttttagactgtcagcttatccagttctgaggtgatgtgatctgttgcagcagtatcagtgtaccagtttgtatcaacgccataacctgtgggtagcagctgcaccagtcttgctgttggacgagtagttctcatcaaatctccaccagcaatcaagagcaatatgtccagtcttctcacaaacctgacatatgatgtcagactttctttctggcatctgatgacaccattctttgggcactacgaccatgacctcctctgccacgaccagaaccattacggccatgaacacaaggtccatatctaggtccagatctaccacggccacggcgagcagcattgaccgaggcttgtatccctccgtgaagcagttccatcctgttctcgaagctgagaagctgagaatggacatccccgactgagacaggttccacacgagcaacaatggctgatacaactggattgaattcttcatctaatcccgccaaaatacacgagactagttcatcatcaatagcctgcttggcagatcccatctcatctgcaagagatttcatcttggaggtatactcagaaacaatcatgttacctttccgagtagtagctagagcaattcgcgtgttgacagttcatgtgcgagactgtgatgcgtaggtttgctctaggagagaccacacatctttgggtgtggtacaggaggcaacctgacacatgacttctggagtcatggtcgtcatgaggaagccaaggacctgctgctcaagcgcggtccaccggataaattccggattgatctcttctgtggtcttgccatcagacttgttgggaatcttctcctcaggcgcggcaagggaaccatcaaggtatccctgcagttgaacgcctctaatgatgggtagtagaacctgcgctctccatagcacatagttcgtcttgctgagttttatagcaacaatttgccctagaaggggtgttggcacaacggtttgggagctggacgccattgctggaattggtgatagatggcggctagggttaggatagaggagaggctccaattaccatgtgagaatagcaaccacgattggttaagcgtttctacttgcagagcagaccgcattgatctatttatataggcagaggattgccgaggataacatcctaaggggataactctgcctaacagaatctgctatattttaggctaatctatagcagagttatcccctgaatatctacgtggttatcttatcagataagctacgtttacacagcagaggcctacgaccagattagaagctattcaatctaacacaccttacagtgttcagtaaagaaaatgtagaaatgtgtccattacaacaccaaaaagactaccaccctacaacccaggaattggggctgttaggagagagaggctcttggcccctgccatcgcccacaactccctctcttccgcagcccttcttatggatgcatctacatttggggtgatcttgtcgctgttcctatggttccagatggtccagaaacccaggattattaaggagttaagccccttttcagctatgccttgcacctgctcgctcgcccttctccaccattccatagccttcccttcccttggctgaggagcatttccttgaaggttgacctgcccaagcaatttgcaccaaaattcccttgcaaagacacaaccaacctataagtggtctattgattcctcatcttcgtcacaaagtgggcatcttttaggatgttgccgccctctttttttcagtcgatctgctgtccagcacctttgaagggcagctagccaaaggaagaacttgcatttcgggagagcccatgattgccatatctttccactatgttcaaactaaattgaacaaatgaagaggctctcataagcagccttggctgagtatttgccatcttgagcaaatctgaaaatgtgtttgtcctccctttccgggtgcagctgaacggtgcttaaagtattccaaagggtgagataatcagccaatacacctactgttaaggcgcccttgatgtctgctatccatctcatgtccatgagggcatctcgcacagttctactgctagctgtgcgtttagggacagcagccagaactctgggagcaagatcctcaatactttttccatgcaaccagcaatcctgccagaatagagttgaagtgccactgctaatttcagccagcaaggctgtagagaacaaacacttaaccttttcggggaacttcatgggcaagaaggaccaaggtttcctgtgatctattttggatagccacaaccatctcattcgaagggcccaacccatttccttgaggctaaaaattcctaatcccccaagctcaattggtctacaaaccttaccccatgccactactcctttgatttccttcctgccccaccaaaggaaaccctttcctgatcttgtcaatggcctttaaggcccaagggggtagctcaacttccatagcaaggtaaataagcatacctgtcaacacaaactgaacttgcactcttcgaccagccctcgacatcagctcaactttccatccaggtaactgatttagcgattctatccacaatagtctgcacttgactccttgttaacttttttaaggcagtgtttatcctatttactgtggtgaagatgagattgctattattcgggaacaactcccttgtgaagtttccttaccctttttcctgtggtgaagatgagattgctatgatacaaggttctcctacgtgtttgataaaaaaaatcctaagtaaccatatatatctaggcagttaaagaaaacaatcctaaacattgtatatacgagattaatacagcatggggtcaaaagtgcatgtgtcgaatttgctcctacaatgtattcttcgcatctgttctttaaaacaaaatacaaagtttaag

SEQ ID NO: 116015 - DNA, 326 bp, Zea Mays
gaaaatcaactcataatgagttggtttttaagtttgtgaaaatacttcccctccttatataatgaagaagacttctcctcgttttgtgcgtgtttcttgcttttccagcgtttcttttgcaattggctgatcgactgtatttgtgtttaaagtagccgagtccttttgagccatctcggcgttttagatataatgaccgagtgattacgagtgatgtcggcgttttagaagtaacgaccgagttatactaagccatgtcggaattttagaaataacaaccgagtgaagaccagtaacgtcagcgctttagccgagttatatcgagc

SEQ ID NO: 116016 - DNA, 345 bp, Zea Mays
ctcgtatccactaatgattcctatctcgtaagcaccacttgtagatgccaattgagtgagtaacacttaatgtatgttacgaacataagagactcggttctattctataagcaaagtaagaaaactaccacttcactcaagggacaagagtgacctttagcccgcaaaaagaaagatcttcgtataggcccaatctctagagtagaatagtagagtatagattagatgcttgactccgttgatacgagatacaagtgtttcaatattatacgagctccaatgctatgactatgatatgatacttggggtattccacaagatggatcgagctagccattcctctaa

SEQ ID NO: 116017 - DNA, 552 bp, Zea Mays
ccacgctctttagaccgaacgacattgtcatgtaatagtatgagccgaaaggcatgatgaaggagttggcgggttggttgtattccttcatcatagtatggttatagcccaagtaagcgacgaggaagcttagtacctcacagctgaaggtggagtcgaccacctggtcgatgcacatgaggggaaacagatccttcaggcacgccttgttgatgttggtgtaatcgacacacatcctcaatttcccgctcttcttccagatcaacactaggttgtccaaccattccggatgatgtatctccctgataaatccgtccgcaagaagattaccaacctcctccccaatggctctacatttttcctcgtcgaaacagcgtagtcgctgctttacgggtttgaagtcgggttgatccacaaagagtgcttgacaactttccttgggatggccctcatattgtagggtttccaagcaaagatgtccttctctgcatggacaaagtcgacaagcgtgcttttctatgtgtaccctcctcccgatgaaggctatgcccg

SEQ ID NO: 116018 - DNA, 674 bp, Zea Mays
tcgcgttagggataaaaacaaaaggaagaacagaaaaataaaaaaaatcaagaaggggagcgtcggccgccagagcggagttcacgatatgacactcttgtgcttcttcgtctcttggaagaagacgacgcgaagaagaaaaaaggtactttccccatgacagcacagtcgtccgagtctcgcgcctaggctgcttccgtggcacggttcagcctcgtccttgcctctccactttggttgtcgttgtcattgtctattaccccagcgttcctacagccgcattgctgccaaatgcgcgatcgcttcgaccgaggcacgcgctcgcgcactactattaaccgcgggagcaaagagatcaccgtgttgctccacgtcattagaaaaaaattcaacgtccgatcacagctcagcgggtatgcctctacgcgtggaactgacgtcgctctcgcttctagacgcttcgcgttagggataaaaacaaaaggaagaacagaaaaaaaatcaagaaggggagtgtcggccgccagagcggagttcaagatatgacactcttgtgcttcttcgtctcttggaagaagacgacgcgaagaagaaaaaaggtactttccccatgacaacacagtcgtccgagtctcgcgcctaggctgcttccgtggcacggttcagcctcgtcc

SEQ ID NO: 116019 - DNA, 1205 bp, Zea Mays
atttaatgtgaaattttaatatttaatttacttagaaatggttatataaatgtcgtggtttcaaaaaccgaggacatagtagaatttttgtttggtgagagaggcaagcatggactcatttcgaatggtgaatcaggagactcaaacaggaggtttatattggttcaggctcgtgccagtgtagtgttgattgtggtattgttcaaaggagcgtgttacaaggaactcttttatagtttaaggagaggctcttacataggggacttgttgtctaaagcagggtgcgacctgttgtctaaggttgtcctactgacatagttctcttggcgtcgtcttctagtacgtgtgtagtcgtatgtctggcatggctggtcactctgtctatccggtatacgagtcactgtagaaaccatggtgctaaggccccgtgtagcggtgcctagcgggacccacgaggcagagttgggggatactgaggccgtacacggcaacgtctcatcccattgtcaaagatactccatcacccctatggcgcatcgtggcgccatgcaagacggtctatggtggtgacatgccttactgtgtgccttgccttcacgtcaggtgggtataggcatgctcctgtcgcacgagtgatagggggacatggcaccagggcccataagtgtatgggctcgtcatggacctttgcttctccgccgtgcagagttgctcagcaggacagccaacctacctcgcagagttgctaagttggacttggtcggcccgtccgtctcgcagagttgctcgacaagacttgttcggtcagtacgtctcgctgagttgctcgaaaagacttggatggccagtccacctcatagagttgttctgcatggcttggtcgacctaggtgggctgccatgagttatgggcatactttgggtaccctgttccttggtatgcatcagcaggcctcgtgccttcgtgcaacttcttggagttgtgcggaggctttcttgttgggaactgaaatcttaggtgcacgcaagcgcatcttctagatgtagcccccaagcccccccctcgagtaatctgtgaggattgcatgggggtttaactgtcgttatttgcagttttggcatggacccttttttgtgatagtcagcatggttcccacttagcggcttcaatctcaaagtcattggctggcttttgtattaagatat

SEQ ID NO: 116020 - DNA, 305 bp, Zea Mays
attcggcaagctgaccagctcgtaccctccggcctcagaacctggtggtggctgctcgcctatttctgcgtcttgtggcaactgctcctctagcagcgttagtggagcttgcaaggacgaagacgaaacacattagttagtagacactaatgttcgtaaacaaatctgaaaaatgcatatgttcaattcatatgtagacatgaagaacaatgtgttttaacttagttcttctccataagttctaagcaacattatttgaaactaatttgctagtattttaaaaagcatatgacctcaaccagatt

SEQ ID NO: 116021 - DNA, 575 bp, Zea Mays
aatacggtgtcctctatctcacaaatgaggaagtcaacaacatcaaactctgaatgagagatcagggcaccgaggagccagagctggatatgagtacaacctccttgtaactcatccgccacaaaagcgtccgtctcatgagctgatataggtacttggccgctgtagtgaaatcttccggagaacgtcgtgagccatctgagaagggcggtcgggacaaggccacaacgtgagctgtagctggagcaactccgccgtgagggcgacgaggaggatcagaggtaccgtagcacaagctatgaagacgagtcaatgactcgttgaatccaaacagctggcgaatctggctagcatgaagtgtaacatcctcttgctcaaagcgaaacctcatccactggtgatcggggtcgatccatacagaagcgtagaaaactcggacccactcctcaacatatctgccgctggtagtcaatagagtgagaagtctaggcaaatatgtgagatgcaccttagagtgcgcaccgacggctagtagaaacacaggaagatccaaaagccggtgcgctcacagagca

SEQ ID NO: 116022 - DNA, 575 bp, Zea Mays
cttaaatcgttgccgacttaagccgattgctctgttggcagggcatagtggtcaacccgagttaagtaagaatgccggtcaatcatgaacaaactgaatattcttgaagccttttttattgatgacatatttcccattttacagagtacattatcgtcccgatagcttttgaaatatagctaggggtaaaacttcctgaggtgttctatattccaggagttcccaatttttgtgccgtccatttgagtgagacgatatgatcccggccgagtgacttctgctactatgaatggtccttcccataagggtgacaacttgtgccgtccctcccccgttagaattcggcagaggacgagatctcccactgaaaaggatcgtcgtcgtacggccttgtcgtgatagcgtcttagagtctgctggtatcgtgctgattgaattactgcgttcaatcgttcttcttcgagtacgtcaatgtcctccagcctagtagcttcggcttctgctatgctttcgaagaccaaccttggcgccccgaacttgagatcggcgggtaatactgcctctgacccataaac

SEQ ID NO: 116023 - DNA, 494 bp, Zea Mays
aaccggagaggtgaaagccaaagtgaccggtcggagcggagaaggatcaccagaaggaataaggggtccggtctgaatcgctggcacaactggagcctaaagcggaggaggtggagcagactgaactgggggaactgagacaccagaatgttgtagcataagagccatgaatgccctactctcagcccgatcctggagaagttgctgctgaagtgaatcctgtctgtcctgtatggtctaaaacatcgtgagcatcctctcagacaaccgggtctgctcggctgccaggtgagcctgctgctgagtgagagactggagaatcgaagcaatagcagggtcaatagccggaggggcagcaggggcagcactaaaactcccagcctcgtgatcatgtgagcgtggaggcataggaggtggaggaggaaccccaaaatcaacatcatcatcatcatcatcaactgctgtatcctgagtgtcgaactgatgaagagctg

SEQ ID NO: 116024 - DNA, 519 bp, Zea Mays
gtagcggctaatgtccatctcgagcttcgggaaaccgatactttttgatagagtaccaataaccttcgcaccggtctgatcccggacacaacccaacttttcgtcattgatgccaccgaagagaagtgctcacggtcaatatccgcaagatataacatattcttttagctcttattttcagcctttgtcagctcttgaccaactaagttttgaaagttaaaaatttcatcttccgaagtgtcttcggctattttcttctccttctcgggcactggggccatagtttcttcggtggctgcagcagcttcttctgtggccatgtctagcagtatcttatcaatattagcaattgtgctctctaagtgaatatcttcggttgtggcagcttcggtagctgtagcttccgaaggtgcagctttggaagctgttgtgctctcaacagccagggcctttggagctgaagcttgtggtggtgtcccttcaatgacttctgtcactgtaatgattctttgttttttc

SEQ ID NO: 116025 - DNA, 1474 bp, Zea Mays
cccgaatggtgaaagacctcacgataggatgagagattttctaagactcaagcctcccacattcgctggatccagcaatccgctcgacgctgatgactggctgtgcacgataaaaaggaagttagaagccatcgaatgccctaagaaccagtgtgtcattctggctgctcatcaactttccgggatggccctatcctggtgggataccttcagcactaccgtcagagatgctacctaggcagaatttgaagtttctttccgagaacatcatgtgccccaagggattgttcagctcaaggaagatgagttttgggaattaactcaaggcgggagatctgtcagcgagtacgtgcacaaattcacataactagctcactacgcgcctgacgacgtcagcacagaagccaagaagatggcccgctttttgaaagggctaagaccagaactcaagactatccttgccagccaagatttcctcaacttctcgcacctctcaaacaaggccatacaagtggaaagggcaagggaagaagaaaaaggtcacctcaagagaaaattccaagtcctctgagctcaacagcaagacaggcactagagaattcgatcatttgggtttccacccaagggaccaagcttcaataagccagctggacccactctgtcacgtatcagtcagcagggtcaaagctcctttcaggctccctccattgcaagcaaccaaccaccagctaatgcctgttggcactacggagaccccagtcactacaagaataactgcccccagttgaaggcatcaggacctacttactccaactcggtgaatggcccaaagaatgccccaacgcccgcctccaaggcaccctcctccagcagctagcagagcaagacccagtatcatggcagggcacgagtaaaccacgtcgatgctcaagaggctcagcaagctccgggagtagtgctcagtgagttcctagttgaatttactcccactactgtacttttcgattcaggagcatctcattcgttaatagctagtagttttgtggaaaaacatggcatttcctctacacacctagaaattcccttggtcacctgaaccctagggtcagaccttctatgccagctcaaatgctcccaagttagaattcttttaagtggggtagtgttcttggcagacttagtcatcttgccatcccaagggattgatgtgatcttaggaatggattggttaaccaaacacaagggcatcataagttgcgcaaataagaccgttcttctcactgaccaccaaggaaagtcagtttcatgtcaggcttagccacctgccaaagatccaatggtgtttaatctagcaacagaaagcatatctatagtagaagaattcatggatgtattcccagaagaattgccaggaatgctgccaaaaagagaagtggagttctatatagatctaattcccggcactgcacccatc

SEQ ID NO: 116026 - DNA, 497 bp, Zea Mays
cggcatgcccgatgagaggtaaagattgtctgatacgggtgctgtggcttatatagcaatgtctgtttgaggactggccaaatttaatcttcagctgtgcgactgtgtgcgtcggacctctatttgccttcgcactggcctgcttagttatttgtacggttctaggtttgttcagtctggggcacttctttttatatatgtatatattttattttgggggcacattgtgcgctgaaatgctgatgtttgagattttcggaacctgataatctaggattgtttgaatctgcttatccgcaataggctatagctaatgccagtaacaattctctgctgtgatctctatgctgccaagttgggtcggtgctccacgagctggaatcagctgctaaccaagtaactgattgtcacctctgtgcccctttatatctttgttctattgtatgattttgccaatcttgtctcgtatttctgagtatgaatttattacttcttat

SEQ ID NO: 116027 - DNA, 580 bp, Zea Mays
cttgcctcgcttaagagtaaacaatcaactcaaatatgctttagataggcttactcccttcattagtcactttcaatgcatgtttacttccatttattatgatcattactaactcgaaaaaattacaaatagctcaagggagacaattagtgcaagcagctcaggctgatccgcgtaatctagctagaatttaacatttaatttattgttgtacatttgcagagcaattcaccaaaatcatcacatccttcctggctacaagtcaagctaggtggcatgcctagaaccctcatatctggagtcacaattaggagggacaaccataatagttacacacctcttagctccacgtgtatcggttgtcggacaactcccaagcaggtttcccgtgacgacacatttctacatgccatgtgggaccaacgaatcaactttcacatcagctcatcaacataaactcgaccacgactccacgtcaactcttcactaccaccttgaatcgcacgggtaaagaaatcatcatcaatgatgatagcaagcactatccatcaggcaagacaacactgtcgtagctcaacga

SEQ ID NO: 116028 - DNA, 1350 bp, Zea Mays
gattacaactcaacactataatcccttctaatctccctacaccgtgttacctgcagatgtatagtcgtgacaatcccccttcagatcttgcttgaccccaagtacaggcctttagaaatcttgatttgaccactttgaaatcttcccatgttgcacatgttgatggaacacttgaccatctgatgagaacttagacaatagtagtgttcccttccatgaccagtctgcgatccaagatctccatcggaacgatgctcccactgtcgagatccactgtctgaggaagagtatcaaagtcgagtataagtgggcacaaaaggcttgagttgtgagacatggaagacaaggtggatctgagcttcctgtggcagttccaaacgttaagcagatggcccaatcctctccactaccttgtaagggccaaaatatctgaatggcagcttagggcatggtcgattggccactaactgttgagcataaggttgtaatttcagaaacagttgttctcccacataaaactctctaggaactcttttctgatcagcataatgcttatacctcttctgagctcgagtcaaattagcctttaacatctcattatgctcagatatgtgctgtagaaattgtatagcccccacatcctcatctcgtctgaatattgggacagcaagaacagatgcttcattgccatataaggtctagaaaggtgaacaacccaatgatgagtggaaagatgtattataccaaaattcgactaataatagccaagacttccatttctaagggttagagtgcatagcacaacgaagatacatctataaacattggttaaccctctcactttgtccatctgtttagggatgataagttgtgcttaatgctagcttaatgtctagtgatttgaacaaatgcttccaaaacccacttgtaaagaccttgtctctgtcagacaccactgtcttcggcacaacatggagcttaatcactgagtccatcatgagttgagcacttgagctaccccttgagttgtaaatgggtgctttgaaggaaagaagtgggcatctttagtaaatctgtctaccaccaccagaatagtatcatacccctcaaattttggaaacttctctatgagatccacggtcaggtcttgccaagctcccttaggcactagaagaggttggagtagcccaggtggcaacttcctttctccttttgcctgttgacagactacacattgcttcacaaagagctcaacatttgtcttcaatcctttccaacagaacaattttttactttgtgataggtaggcctgggcattcggtaaaaaccgaaacttcggttcgattattt

SEQ ID NO: 116029 - DNA, 405 bp, Zea Mays
tgtttgtgcgctggtcctcgtcgttgtgactcactgggtgcatgtccggtgatcaccggaggaagcgccacggtgaaagccacccaccccttgctcctgtgtccatattccctccggccgccagcacgaccttgcgaaattggacaccaccgtcgatgggatctataaattgagtgcgccacaatctccgtagggcagtaagctatccagccaccacgaatcagccgcaaccattcgctagaatccacgaattttgaattcgccccaaatcagtctccgccgccgtgacgaacagctcgttgcggccagctcgattccggttagctcgcgtccctctgtttcttgttctagcatcctcatgtgcccttgatgctcaccaaaccgtccaattaaactagaagccca

SEQ ID NO: 116030 - DNA, 468 bp, Zea Mays
gaaggttcttgttcaatacactgtctcgcttcagcaggccctgtttcaatgggcacagaaggcccagcttcgacttcaacacaaattgtagtagcttcggcagtctcctttgtaggagcaggagttgacgcccttgtcgattccaagactgtgtccagcacactggccatcctcctcctcttgggagttattgcaggagcttttgatgccttcggcaattctggctctagtagcgggctcaagaattttggtgaccctgtcggctcccctagctctggctcttcggctgcttttcctttggctttggtagaatgctttggcgcttcggccgactcggttgcaggaacctttggcacttcagctagttctcccttggagccggcaggagcagggtatcctacctcaacggtggaagatgtcccttcagcaagcttcgacattctggtcgtttcaatgtatctaggccgg

SEQ ID NO: 116031 - DNA, 590 bp, Zea Mays
cggccatccgtagtctcgagagacaattcaagggtttcaccttgcagcatgtggaccgggccaagaatgaggaggccgacacattggccaaggctgccgccagaggcgagtccctgccctccgatgtgttctaccatgttatcggcacgccagccatccggagccccgaagggcttcaaataaccaatgatagcgagggccaccgcatagtcaaccttattatgaccgaagactggcgggcaccaataaccctgtttctacaggggtactaccacccaaccgacatcaacgaggccaagcgcctcaaacatcgaagccgggacttcgcgctgattgaaggccagctttacaagaagggggtcagtcaaccaatgcttaaatgtgtcaccgagaccgaaggcgtccaaatcctgcgcgaagtccacagcggtacctgcggctctcacgcagggccaagggccctagccgcaaaaggtgatccgtcaaggtttctactggcccgcaatgatttgcgccgcaaatcgggtgacaaggtcctgcaaagtctgccagaagtttcctcctcgatcaggcagcccttcgcaattcac

SEQ ID NO: 116032 - DNA, 613 bp, Zea Mays
gcttacggtaatccacacagaaccgccacgtaccgtccttattttgcactaaaaggaccggagaagcaaatggactcacactgggggtgatcagtcctgacttcaataacgcagcaacttgcttctcaatcttcgttttatgatgaggagaatatttgtagggtcgagcattgactaggatagatccagggagcaaaggaatatgatggtcaaatggtcgagatggaggcaattcagttggtgtaacaaaaatgtcacggaattcccccaacagcacctgcaattctggatggatcccagtgctgttctcctcacgcacctcctccaacaatgcaaacacccagatatcattccctcgcagccatttctccacctgtagatcttcctccaccacctgctgatgtattgtattgcccaccaactgaacttccacacctttgtccacaaagctaataaccttatcatcccaatcacaatgcataggactgtgtcgacgcaaccaatcatagcccaaaatagcattataggcgccgagccccaacaccctcatatcactctgatatgtatgcccattagcccaccattccaatgattgtaccatcgtgtcactata

SEQ ID NO: 116033 - DNA, 808 bp, Zea Mays
atttgccaacattgactacactaagaaagaattcattgtcgagtcactttctaggagtgagctgcagcggatgaggcactacatattacaaaattgtgatgaggctactccatggataaagtaagatcttatttcaaaatctatattttgatactatgcattggcatgtttcatagaatttgaattacctgaagccctcttttaaaatattgtagcgagcatatggacgaactaaaaaaattaagtacacggaatgttgatcaaaggcacaaggaacaatttgtaggttggtttgagcgaaaggtaggttgtgagtaatttgttttatttgtaatctcatccactaactgctgctccatattatatttgcaaataacttaaacatatttcgttggctgcagatcagcaaactaaatcaacaatggaagacaagtgacctgctctacacactttcacaaggaccagaccatcgggctcgtgttttcaacagatggttcatcaatggatttctttttcgtacagaaaaaatagagcagaacctatgcacacaaaatagtggtgttgttgtgaaaggagatgaaagcttcggtaatattgactggtatggtgtgattaaaaaaattattgcactagattttcctcaaggaaaggaagttgtcctctttcagtgcaactggttccatgttcctaccgccaagaacaaaggaagaggctaccaaagggatcagtatggaattgttgatattgataaaactcggttgtgctatttagatgagccttatattcttagttcacaagctgagcaggt

SEQ ID NO: 116034 - DNA, 346 bp, Zea Mays
tgcatgcatgatgaactcatttcctccattaatttttgatcagatctgaatttgtcctgagctgacagagatctgaattactaagataatataaggtagacctgtttcataacggaggtaaaaggtagcggagggctggctgggggaggagagtggaagctagcggagagtggaagctgcatgcggctctgccgccgttgcccatctcgctaggtccttcctcgatctgcaattggctacctgctaggctgctactgtgtgagttccttacctcctcacctctctattcttcgtgctttcaggcgactgaaattaaaggtggaaagtcgaaagctttcggtagccg

SEQ ID NO: 116035 - DNA, 314 bp, Zea Mays
ctttcatgaaggataatagtaatctgggtatacgaacccgatgacatcaaaaaccctatccaactcttttttcctcgacccccgaaggccgatgtcatagcatcatcttcggcccttgaataagcaccaagcaattcatcgctggttgcttcaatggcatctagccagtcgtcgtttggctcatcaaattggttcctgtatttgaatgtatacttcaagtaaattaagccactttggctagacccagcaacagcctccttcggcatctcccacccactttcgagtggccacactttgtaagcaatgtgttcttg

SEQ ID NO: 116036 - DNA, 2637 bp, Zea Mays
ctttatactaatgcatcattaataacatcatccaacttcttggtgtcacctaccttggtgtacccccctccccgccccacacttctctctccaatttagcactgattgtaacatcttctcagaagatgacatgatcgacttagggggttgtagtctagccttagattgttatcttccataatatgttatgtcagtgatccaatggacttcatggaaataccatttcattgtgttgtgtgctgacaccgtcatgttttttttgctattcttcaccaaggatgtgacatcatgcttattcgttattgattcaaagcccatatgcaattgttactcgttgtgcaattaatactgttagaatattaattgttgcctatatgtgtattagagctttatatatattgggaccaatccattttctgcatgagattgggttgaacctattggcgcctagggtttccctagtcacttacctctaggactatatatgtactcccgtacacataaatagatgtatctaattctacagcaataccttctctaacatggtatcacgaatctaatctcgcttctgctcctcccatggctgctgcctctctagggcagccaccctttggggccaccgccacccttgtttcgcgtcaccatagcaacacacaaacatctcctcccacctcctgcactcatggtagggatctcatcgactgtcgaggtgtacgcccgcgctgaggtcacgaccttcgcaagaggatcgacgacatgcttgccgctattcagactgtggaaaaggaggctgccaacacacgtgctcgcatctaggcagccacccttctcaaacgagaaggctgtcgtcgccgccctcgagtaggaggtcaccatcgttcaatagggtttgggcctacaacaccacatggccgttgacccccaccttagggcacccccataggatgaccttgttgtagcctatgaggctgctatcgtcaacctccttgtccaggccccatcgaccacatattgtctagccctctgttagacatcgattcatgctgggatcgaatggactacgttgtcatctccgtgatcttcagcaccatctcccccaatatatgtcggatggccagggagcaatggcacggcacaccacctctggctcactctcgagaaccagtttcttatgaattgtgacctgcatcctctaactcaacgccaccttccacacctttgtccaggatgacctctttgttggtgattactgctacaagctgaaggggatgtccgactccttggctgacatgggcacgtcggggccatcattcgacgccccccttcctatccttccttaagattcaatacgatcttgttctggaggatctcaacatgaccaccactggtcttgctgttgctctaatggccttcatcgccactcccccgtcgatcgcccccacatcggctgccctagctcctttttattttggcacactccttcgggacttgaaagcaacccactcccatctcacgatctgacaagaagaaaggtgtggtcggggtaacactctttggcgggccttctacaaccggtggacgggtagcatcaccatgctcctggcctggctcctagcagccagcagcaatagctgcgccaggtgtcctaggccatgatggcggcgtttgtactgtttggaccgtctgacatacttgtctcttaacccttataggcttcaacattcccatcacaaccgcctacaccgccaagttgaactccatgaaccgatagctgggattagtaaattcttgctaactcgtttagcactatggctctgcatccacatgttacgttcatcaattgggtggccgactctggcgcctccaaccataccaccaacatgtcggcaacatctccctcttctgctcatctaattcaactacaccttcatctattgttgttggtaataactccatcctccccatcacctcaacatgtggcgcggttcttcccgggccattctatctcaacaacattcttctcaccccttatatcatttagaatttcctttgtatttgttgcttcactattgacaattcgtgttctttggagttgaaggatctcgttacccgaaacatgatcatgaggtccaatagctctgagcctctgaccctttctacacacaatgcctctttgggtctcctgccccctgcgtcatgtctgttgttgctgcgtctacctggtatcgtcgtcctagttaccctgtctctaatgtgttgtctagtttgtctaatgcttcaactgtcaagggctccaatgcccaagacagcagggccccgactacggagctcatagtcgtggtcagcaaaggcgccgaggattttgcccggtaacccaattgtgaaggaggtgagattggaggaacaataagagaaaggagataggaaattcttgcttgccctattgaaacagccacctgctttatatatagccaggccggcgtaaccaacccctatttattctctatacttatctaaacaacttcctaacaacttatccctatttgctagcaacggccagctctgacctgttgctggccgtgagcttatcttctaaacaaatctcctattttctagctactagcaactaccagctat

SEQ ID NO: 116037 - DNA, 354 bp, Zea Mays
tggggtagggaaagacaaagagatatgggcatgaaaggcgtgaaggatccgagaagcggtcgaggttggtgattcgtccttttaacccaaatcgctcttttcctcgtccatctgcttatcccttcaagcaactagtttttatccgtcccactcctacccccgctcaaaacaatcagatgagtgctcctggtattcgtttacccaccttacccaattcatctagtggctgcttcaactacgggaagtctggacacttcatcaaggattgtccctatccaaaacaagataaattcaattcccaacagacttctgggagcacatctcaaggcaagggaaatgtggccagctctcacg

SEQ ID NO: 116038 - DNA, 403 bp, Zea Mays
gcggaggttgtcgatgttccaggagtgctccaggtcttcgccgcttggcgttgtgagcctgtaagcgctgggggaagctttcatcttgactatgaaggggccctcccacctgggctccagcttgcccctggactctgtccgagctgttcggacgagtacgaggtccccttcgctgaattcccttgggatgactgcatggtcgtgccatgcttttgtctgggcttggtatttgtttagagcctgtagggcaaagactcggtctccatcgatgagatcctttgaagtgggctcatccacgttggggacggctgaaggaactgttcgtggggacccatgttttatttcttgtgggtcatggcctccgatccgtatagaaggcggaaaggagtgaacccggtcgccc

SEQ ID NO: 116039 - DNA, 679 bp, Zea Mays
cttgggtataaaaagaaagagaaaaatgatctcatccaggagctagatcagatagatatattgatagaggatcaggttaatctatgggagaactggtcaaaaagactcgcgatagagaaaaagcttgagcatatttatcatttagatgaggtgttctggcagcaaagggctggtagaaaatggactgttaaaggggactctaattctagattttttcatctatatgctaatgggaggagaaggaagaatacaattgcctatttggaaacagacaagggggtctgtatggatcagaaagcactgatcgcccacattgtgaacttctacaaaatcctatttggtccgaacacaccctgtaatatgaagctgagtgaggacttttggagggacagatcaatgaccagcaaagaggaaatggaatccctggccaagccgtttgaggttagtgaaattaaacaggctattgatcaaatgcacaatgagtcagcccctggcccaaatggttttggtgcctctttcttcaaaaagttctggaatcttattaaagaggatttgatcatgatgttcagtgacttttatgcagggaagttggatatccaacgtcttaattttggggttatcacgttaattcccaagattaaagaagcaagtaatattaggcagtatcggcccatttgtc

SEQ ID NO: 116040 - DNA, 273 bp, Zea Mays
acgatgtttatcccgctcgtgtgcatctcaccaccactaatgagatcgcggatggagaactcgttatggctggtacgtttctcatgaacgatcatcccgcagttgtattgtttgattccggatcttctcattattttatgagtactactttttctcatcgatttaaccaatcattagtagaagtggggcataagtaccggataagctcagctggggctaaagttttcaccaatcgtatagtccgaggtgcaatccataggattgaaggaagag

SEQ ID NO: 116041 - DNA, 362 bp, Zea Mays
agaaagtcttatatggctagtatgacctatgtttgttttagctcagagcgactggggttcgagtaagcctagtctaagtgactaggttggctcttgctttctttgatctatggttgggagtcgactttgttgggataaccaggtcgaggtttgcttgggacaacaaaggttagggttgacctggttggtgtgactataggtcatgattgctatggttggggctgattcaattgggatgaccggatcaggggcgacctagttgggatgaccagttcgaggctattcgagatgatctgggttggtcccaacttggttggtgtgactatagccatgtccactcggagcgaccgaggttagtgccg

SEQ ID NO: 116042 - DNA, 601 bp, Zea Mays
atttgagtcccagaggattggggacgcttcaggtggtatcagagttgttaggttggccgcaggacgtaacccttatcctgatccaaaagtttttgagtcaaaactattttcttaaaagaaatcttgctctcatcccttcatttcaaaaatgttttccccctttccttctctcagaagtcagatggaggtttgctgccaaaccagcttttgccagaaggaagatggtttccccaagttgctgagagcatgcacagttcgcctcggaatcaggagtcagccagagtatgatggtcgtgaattcgtcgagcatggcacagagaagtgtgtcgtgactgtatacattggatccagtccgcaccatgtggaatggagtgtcactgctggtgggcacagattcaaagacacctgccaagtcgtcacccgcaaggcattgagggccctgtgtcagatctatgaagaagaagtagccgacaccccgctcagattctttccgccctttcagagagaccgtcccgcttggatggccaggatgcgtgcattggaagtgcagcagttgcttgaggacgacccctcagtcatgtacctcactgcatacctgctc

SEQ ID NO: 116043 - DNA, 882 bp, Zea Mays
tgttgattacaaatatgagagaagcatgatagctaacaaataatatgaatcagctcgccaaacagcttataccaaccatcaaccatgtacagatcggaccacaaattacaatgcattgttcaatagaagccacctgctgaaagaacaccatgcttcttcttcgtgtagtcttcccttctcaaggatgtaatcatcatgcacaatgacaagaaccattttcttagacctgcagatggtaccgttgacttagttgtaaatttctacaaaaactaagtaggacttagttatcatcatgcacattgttatgatctggattaatagaaatgtaaataaacaattagtgatactttactaactgccgcttctggattggatctggatagatctggcaggaggaatacgtgagcaacagaccgctgtttttagatgtcttaattgaaatacgtgagctggtttaccgcaatcatggttatgtactgacgtttagtaaagtatccggtaacagtcaattagcccattcacaaccaatggttagaaatactacttgctttggacataagcagtcaaacttcaaaattttgatcaataacccttcatgcaaatatgttgcaaactcgaaagaacacgtctaggtttgtctcagaatgtactttcgtcactttattaggttctaaaaacatactatagcacgaattaacaataaaaatatgctttggagattgcgatggtaaccaagagtccaagacaaataaatttgtgaccagtagctacatagaatgctaccagacgagttaacagggttgtcatttaagtctggctttattgtattattatctacaaggggaaaagagcaaagaaaaaaagagtggtggacactttcaa

SEQ ID NO: 116044 - DNA, 751 bp, Zea Mays
ctcagtctcgtcatgctccctaaagcgaggtggaggtatgggcagagcggaaatgggagtgggaggggaagtagtggaagctggagtggtggaggtggtgggtatagcggaagtggtggatggctttggagcgacaggagctggtgaagtgggaggtggagtagacacagtggcgaaaggtgtggagggagcagtggagcgaggccgagatgcgaggcaacgaacccgataggctatctaatcacaggagatcttcagttgtcctcctcgctcagcctgctctgctgccgctgcaagtgctgcacgagcggctctgtccatacgacactttttcttgccctcttgttgctcgaggtaaacagtcttccccttgacctgcctgaaggggcaaggagggtcctcatcgtctcctccccctgacgatgagacgttctacgtccgcaccatcctgacctgactgctgcacgagtgagtgaaaagataagcagaagtagagagcagccgataggatctcaaatgaagtcatagctacctagaaatctcacgagagagagaaaagatccaggaaggataggagatgggcacacgggccggcgagatcactgaaatgacagaataggtgagcacgtattagtcacatagtcataagtatatgaaatgtgaataattacatacacagagagtgaatacacaaaaacagggcgatttggagaaacgagggtcaaatgactcaataacgacgaattatgcc

SEQ ID NO: 116045 - DNA, 365 bp, Zea Mays
gaggatcacagtttacctctcggtattggaagaagttgcacgagtcaatggatacgagattgaattttagtttggcttaccatccccaaaccgatgggcagactgagaggactaaccaagtgctggaagatatgttaagagcttgtgcccttaagcatggtggtagttgggataagagtctaccttatgctgagttctcatataatagctatcaggccagtttgaagatgtcaccgtttgaggctttgtatggcagaaagtgcaggactccattgtattggaatcaaactggtgaaagacagttgtttgggcctgagattatacaagaagcagaggaacaagtccagcaaataagggagaatttg

SEQ ID NO: 116046 - DNA, 458 bp, Zea Mays
aacgcaacccaaagctgatactaagcaaatagaagttgagactacaataacccaggctgaaaccgaggcagggcccacagtgcctactgagacaaagcttgccaccaccgagcagaaggccgaaggaataactcaagatattaatatagcttttgagaagagtgcagccaaagaggctgaatcccttgcccctgaagcactctccaaagattttgattatatcattcgacatgcttcgggtaagagattatctgaagaagaaaattttgaagctaaacactatgcctgagaactgaagtatccgaagggggccttagtgtttaacgtatggatgaagatgatttcttgtactgcctcctggacaacaaagaattattcatctgccgggagatggccagaagtatgggttttccgaagctcgaagctcgcctttgtgccatgacgaaggacgatctcgc

SEQ ID NO: 116047 - DNA, 787 bp, Zea Mays
caaggctcaacgcctggacgcggagacagccagacttatggaaagagctcgcaaggagcaacttccggatcttaggacagatgaacaaggagtcctttggttcaagaaccgtctgtgtgtaccaatgggagaggcatgagaagtcctactcaatgaagcccacaactcagcttactccatccacctaggaaccaccaagatgtacctggacctcaaagccagatactggtggagaggaatgaagaaggagatagcacagtatgtggcccggtgtgacacctgccagcgaacaaaggccgaacactagaagcctacaggcctactgcaacccctcccagtgcctgaatggaagtgggaagaaataggcatggattttgtaaccagactgccccgaacgcaaaaagggaatgattctatctgcgtaataatcgatcgtctcaccaaggtggcccacttcatcccagtaaaaaccacttttggaggagccgcccttgcccggatatatcttaaggagatagtcaggctccatggtattccgcggaagatagtgtcagacagagggacgcagttcacctcaaaattttggaaaggccttcagcaagcgatgggcaccaagttagatttcagcacagcttatcacccccagtcagatggtcaaacggaaagagtcaacaagatcctcgaagatttactaagagcctgtgtgttaacgttcgatagggattgggagtccagtttgccgtacgccaaattctcatacaacaacagccatcaggccagcatcaaa

SEQ ID NO: 116048 - DNA, 336 bp, Zea Mays
caggacacacgacacacttccaaatatagtcgccgctagggacgtccgctattttagcgaactcgatagcggacattgttggaggccttacgttcgaaaaaatgctaaatatatggtaacaacttctttatcgtgcattgttggagacggtctcagaacctatctagtgcagtcgtggtgtacgaaagtattattcacgacaatattatattgtatggttgagctaaccctaccattaatttgggccgattaatgaatgagtaaatggtggattgacgtatgaggtaatgaatgtatgttccatatcttttaatctttatgcagctcatggtatta

SEQ ID NO: 116049 - DNA, 440 bp, Zea Mays
ttttagtgcactaaatgatttggataaaatttgtaagcctacttgctagtcctcatgtaattaatttaactctaagaagtggtaaagtgctggaatgattcaagtctctagaatgctgcaattcttgaattatatagaaactggaatatattgattgctgttttgggctgcacgcattgttttcgttgtgctgttgtttgataaaccaaatcatgttttctgtagaaaagttatatagaagagttgtagataacatgattatcttgcttgtactaaaatttgacagtcataaacctgattgtttagtagttgtgcctttcacaagcccagcacctgaatctgacgaatttctgaacagatttcagagattgcaagggttgcttaagttaatcttgtaattagttattggtggtcacaagaaagttgtagataactttatt

SEQ ID NO: 116050 - DNA, 708 bp, Zea Mays
tgttgtgtcaatcattgcattccatgtccgttggataaataaatgtcttgatgatcgattataggtcttatatgagcgttatcgcagcccaataattattggaggcgagtagcgttcatgagtcaatccttgctaaaattgaagaacagtccgataacatctgcacatgggtgctttaggtccttcagtagccagtgtaagtcttatggagttttatgccatgttttaatgtctctatgttagacctcctaaaaatatggtgttttaagtgatttgtgtgttaactaatttgagtggagaaatggttaagaaaaactaattaacctgcttcaacccatgtttatgagttgcgatgtcaaaaatagtttgctaagttttatactgtgttggctaacttcggttaagaaagagtcgattgcgataagtgattgctatatacatatggtgtctcggagtgctataatagtgagttagcagacttgttagatgatttgggttaagttcgtagttacgatgaattacttgttgtagtataaatgcgtatggttatgatcgcgggtaaaaagtagtagtgcccatgtgatgtctaatttaaaatgcaaattgttgagtgattgtcgtgaagaatgcattgttaattggttgtagtaattttagtgcactaatgacttaaataaaatttgcaagtcgaattgttggttctaaatt

SEQ ID NO: 116051 - DNA, 852 bp, Zea Mays
tgtcaattataaaattgtcacaaaaaatattcatttcatctgtgttctactcgacacgctatcattcctaaatgcaacacaatggtagcaaataaccacaatcctactaaacataccttgcatgtccaaaacaaccaaatactaacttgttgcatagtttatgctagtatgtactatatattgtatgaggcaccatgcatgctaggactagcacaataaactagtcacaacttagcctacttctatgcaatcccctcttagttaaggataaacatggtattttaaaaaaatgaaaagaaaaataagcaaggagcatgcaaccacaagatacacaacacccaccacaagtctaaatttagcattacatccatggttcctagccacaacaattctctaccacctccaaacacaacggccatcccccatccttcaccactcccgcccatcccttcgctccaccacctctgagactcctccttcacaggccggcgtcgtcggtggtcggagagatggggcaacaacgcacgttggtgtatagcttcgtggcgcgaggcaccatcgtcctagcggaccatgctgaggtctccggcaactttgcctccgttgctgcacaatgcctacagaaactccccgccaacaacaatcgcttcaactacaattgtgatgggcacacattcaactaccacatttatgatggattcagtaatgcaccttgttcttgcttcgctctctctctcccacacgcttataagtcaacaaatgtgatcctattgcctatgcaagttttacttgatgacacaagtaattaaaacctggcatcttacaatcttttacttgataatgataatgaag

SEQ ID NO: 116052 - DNA, 641 bp, Zea Mays
gagagagagaaggtgaggaatttagtttaggtttttcttcttcgatacccttctcactgtccaggctggttcaaatacaactcacccaattcagaatacgtaatactgcctcatacgtgtacggtatacacacgtacacgtatggtacgccacacatctagacccactctggccctcggacgcggctgttgacgtgccgtttgcgtttgcctcgcacgcctgtgtcttgagtctgaatgtgatcttcttctccctctggcaaggctgaggtagtatctgtagtggtaacatgccactccaatatattaaaaagggaagaacttacaggaaattacagggaaccgaatcgacttacaagactattgaaaaatactgaacaaacctactgagcagacctattagccagactagcactgaaacaaccaactaactctttgaccactaacgcgacctgctccgctgatctatgctggctatggaagattttattatttctttctaaccaaacgctccaccagaagtaaatcataaggccatcaaaagatcttctcaaatgcttgctgcacatactttttaatttcctccaccaatcatacaaggactcattgccatagacccccctaaaggacgaaaggttcgcc

SEQ ID NO: 116053 - DNA, 514 bp, Zea Mays
ctcccccctcggtcagggagacagtcggatgtttgtgctccaagttggactgaatcccccacaaacttggagatagccgaggccagggttctgcttgccgaagttggttcgttgaaggagaaaggtctgactgctgaagttgtagtcgccgattttgtttttaagaacattcagccattgaaggacagagcgtacctggcttatctgtatcatggtattacggactcaacccgggttaccaacagaaggattcctgctgtggatctggtaagccgacttgagatgatttttagaggcaaggtgtcaaacatcggtgctcctattgcgtattctgcctggaatctgcctcctcccaagactttcatcagttttgtgtcaaatcctcctgctggtgacagtggtttgggtcttagagtacgaccctctcccgaagaggttgaggctttggttgtttcgcttggtgaaatccccaatgatgagaggcaggttcattttgagatgcctataaacccga

SEQ ID NO: 116054 - DNA, 1093 bp, Zea Mays
gctagccggctgggcagagcggccaaccacgacaggacacgtctccaagagcccacacggtagctatgggtacgactacacgcccctttcttataacaataatatcatgttgtctaatgggacaaggcagcctcggttagaggagacctcagcaccagaccctccatagtagtcggtatcttagaagagacaaaacgaggtgccataccgaataggagaatccatgcgcacagaaggatagtacatggcccacaatgatagaagaaattcgtgtcacattcataaagctccaatactaaaccatgtgacccaccgcacatcatcgcagggacgtcagccatgaacctaccacacggatgggagtgacgaacgacaccatactgggagcactactttgcatgaccacaggaggggtgtgccacgacaccaaaggactttctctccctcactttctctcccactctctctcatttgtagaaaacagatctcctctgtaaggactggcccttgagctataaaagggcaggttctctttcttcttaggacccaagcacacctgttgtaacacgcccaaagcaatactacaatcaacactacactggagtagggtgcaaacacaaactagtataaatcatttgggcaaggattctattggccaactgccatggccgacggtgagcaggttgttcgtacctgtgagggctaccactactacgcacgacaaacacatatgtcagctcaagccctcgagaccattcccattacctagccatttgagttttagggtctagaccttgtcggatccttcaagaaaagcacccaagggctgcacccactttcttgttacggtggataagttcaccaaatggacgatggcagccgagctacttgcattactctggagcctgcggaccatgtcgtctagggtgataggttgtacgcctttcttcctagcatttggcgcggaagtcgtgttgccctcataactagaatgtggctccccgagaactaaggccttcgatgatgaacgagcaactacggacacatagcttgtcgtcgacctactcgatgaagcacgcaacatggtcgtggt

SEQ ID NO: 116055 - DNA, 662 bp, Zea Mays
tgcatagtgtttatgagtgcaaaaagttttcgaaacatgtaaaattatctcgagcgtgttttgggggattttctaaccattcggaacttttttcgagtattaaacgcgaaatctagattctctgatattatttttatccctaaaatttagtatttgcgaaatataaaatattccaaaaaaaacccttgataatatatgtatattttttcttcttgctctcatcgggcttgttccagatcacgtgccctttttcgtgagatcactgaaccgcttctcgcgaacggcatgctgctcgcgtcggttatcctcgttctatccccgtctactattccgacgtctatctcatcatcttgggcccacgggctagctctgactatcttcgtctaattttatctaactatgtctaccacacgtctaactctgtctccatcttacactgtctcgcgcaatccgccgcgcaactgtctctttcgctcgcgatccccaacaaatttagtgaccatctcccgcgccctgtggcccagccacgtcgcgtgtcgagcgtgagtctcccccgctggggcatggcactacgccatggggcccatttgtcatctccctcaaaactgcctatcccagtccatcttgcccacgatgcagtccatcttgcccatgatgcagaa

SEQ ID NO: 116056 - DNA, 396 bp, Zea Mays
attctgaggggcagagtgtcaaatgttggtgctcctgttgcctattctgcttggaatctgccacctcataggtcattttctgaatttgtgtccaaccctcctactagtgatggtggtctgggtcttagagtgcgaccctctcccgaggacattgaggctttgattgctcctctttggagtcttcccaatgatgagaagcaaattcactttgagatgccagctagtccagatgacgcagagatggatgttgtgcttagtatgttagctggggaatcttctgacttgacccatgctgagccgatggctatcacggctggacaagagcttgacaaagcagtggagacttgaaagcctgagggtgctcgcccaaagcgtcctcgccaagttagccgcccg

SEQ ID NO: 116057 - DNA, 461 bp, Zea Mays
ctgaggacgagtgacagtgtgtaccatgatttcccggtgatcaacttgttgcgccacaaaaccatgagggaggaatggagcgggatcaactctgtggaatgccattccttcagagtcgtgaggagggggtcgcgagcgtgaagaacactctccgcgcagaagagggcttgaaggcgacgggttcttccatggtagcgaagaggaagagggttttgtaaacagtgcaagttccatggaaggcgaggagccacttctcgttagaaccgcctgcgcgaactcaccaaaattattaaaaaagggcgagggaagaggcccaccagcagacgagagacgagcagccctgaaccacagtcgcggagagtactcctaggagacattctcaaacttactagggaaggaaagaaaatccctcctgcaattctgaccagaaatttcgaataattgacgattattgcctgaaa

SEQ ID NO: 116058 - DNA, 487 bp, Zea Mays
ccacacttctgtagcctccgggttatctggtgcttgttgcttggtccactctgatacgaagtcaactagcgcttgagtctttatcgcagtgcgaggccaaaactcaatgtcgtgagctcccagcttgctgggccacttggctattcttccaatggcttctttgttgtggaggatatcccctaatggaaatccggtgactactatgactttgtggtcgtcaaagtagtgacggagcttgcgagcagttagaagtactgcgtacaatagtttttgaacttgaggatacttctttttagagggtcccagaacttcactgatgaaatagacgggatgttgtactggatatgcatatccttcctctgcccgctcgactactaacgtggtgctcaccacgtgagtcgtgcaggagatgtacaacagcagatcttctgccgtctggtctggcatggatcggtgtggcggctttagcgctggcggtgtggtcaag

SEQ ID NO: 116059 - DNA, 296 bp, Zea Mays
acacagttcacctcaaaattctggatgagtcttcagcaagctatgggcaccaagctggattttagcaccgcttaccatccccaatcagacggacagacagaaagagtcaacaaagtcctcgaggatttgttgagagcttgtgtgttaacctttgacaggaactaggagttagtttgccatatgcagagttttcttataacaacagctaccataccagtatcaagatgtcaccttttgaagccttgtatggaaggaagtgacagacccctctgatgtggtccaacgtagggaaaagg

SEQ ID NO: 116060 - DNA, 518 bp, Zea Mays
aacaagtcaggtttggtggctaaccaacatttattccccatgctctcctcaagggcgagaggccttcctctcttggttctctaaccttgaagttgatgatgacaagctctggatattttttggtgatttcaatatgattagatttcctgaaaaccgcaacaaaccgggaggagaccctactagaatgctcaattttaatttggcaatcagccagttgggcttacaagaaattcctctcaaggggcaagccttcacttggtcaaatatgcaacgtcaccctttgcttgaaaagctggattggtgttttgtctcacatgcttggtcttctaactttcccgctacttctgcccattctctggctaggggtgcttcagaccacgtcccttgggtggtcaacgtccaaattaacgttcccaaaccacccattttcaggtttgaaaattattggttacaactcgaagactttcattcaatttttcaaggctcttggactcaaacgttgtttcagctggacccag

SEQ ID NO: 116061 - DNA, 876 bp, Zea Mays
gcgtggttttatccgaagccatctgccagggggagagaattactactatgcatatgccaaatttttttcaaccatgttattttattcattacacaagttcattacaagcatatagttaccacaaatcacactacacgcgagcgctttctaaggtgcttccaaactccctttctaaagtgtccccaaattccttgagaaggtcgtcaaggctagctaggtacatatcctcgacgtcagacaagttctctattctggtgggaggcttcctttttccgcttagtctggcatccttggctcttggtcctcttccggattttcttcgtgggggcgagcttctttagcttcttatcgtaatccatcttcagggttcggtaggcttcacgagtgttggcctcttcaccttctgctatttcgagactttcttggagggacgccgtctcctttttaagttccttgacctgttgctctaagctctccacccgagagtttaggtgggtgcagtgggaggaaaggtcgtcatagtggttatcgagggtgtggagatatccggccatgtagacgatggtggggtcatcctcagtaggatctcttcctgacagggcctgaagacttttcctataggcaggagtatttttgttgctaggtgggaagtaacgaaggggggtttcaaagacctccctgctgtagttttggcatagctgtcggagagcttttcgggcaacattttggcaagagtctgggaagcggtgtccgctgaaggtgacttggaaaggagggtgattcgggtagcttcggctttctcccaggtagactgccatagagcacttctcagttccattctcgtggtattctttccagtcgtactccggcttcttg

SEQ ID NO: 116062 - DNA, 654 bp, Zea Mays
tccgtatcaaccactaggaacaggttcatctcaggtgagtggggactgacataagggctctagaagcatttttcccttattattgtgtgctgacattaacatggataaagggagagctacatgcctgaatctacattgaaattttcagtagtggtgtgcaggatacatgctcacagtcacattggttcagtcaaaagtgcttgtgctaatgggagagttgctaaaagggcaatatctttcactacagatctctattgaaattatagtaagttgcaaggacttctttgtgaagtatagggtacatactcacaactttcagtttttttacaaaaaacggctagatattacatcaatattttacagaaaataccacacagcataaggggaacttttgtttaggctatcttcagcggtctctcatatcacatctcttattttaaactctactttataaacagtgtaataagcggtctaacatctcttattttaaactccacttcgtaaacgttctctcatatcacatctcttattttcacggcttctggagaacaatcacttgctattactgactgacatgtccactcctcatatgtgagatattggggttgatatatatgttgttcgtttccatgtaattgttgtgcactaacattt

SEQ ID NO: 116063 - DNA, 507 bp, Zea Mays
ctcccactcgtcaccttccacttgacaacaacatagggtggcactcgcgccaccatgacggagtagctcgccggagcacgcccttttgatgatacccggcatgaatctcaaacccgatagagtataatagagaaccgaccaccgtgaatccaatagccatccagatgccccgagtcagcctacccagacccctgcccacgacgcgcgcaaggcggggtggtgacgccgcccatgcactgacgagcaattaagctcccacttctacctaatcacgtgttcagataggtgctagagaatgcgaagatgaaggtggacaagatgaaggatacctcaatggcggtggaggcagtgacagagatggccatggtatagtgtgtttcagcggcgcctttcaactccgatgagtaattcctggatcctcgaccactcccatcacgcagcgagggcacgacccacttctgtgcaatccgttgaatcgcccaagactcgtgattgacgcccgacggc

SEQ ID NO: 116064 - DNA, 279 bp, Zea Mays
agtcgcctaagggtgcagccggactaagcacaacaagtgcgagaaaatccaatgtctatcgcgaagactatccgcgcagaagtcgcctaagggtgcagccggactaagcacaacaagtgcgagaaaatccgatgtctatcgcgaagactatccgcgcagaagtcgcctaagggtgcagccggactaagcacaacaagtgcgagaaaatccgatgtctatcgcaaagactccgcgcagaagccgcctaagggcgcagccgaactagcacaacaacagcag

SEQ ID NO: 116065 - DNA, 386 bp, Zea Mays
catgcgcggagggttccgaggaactcccgggcgcaagtactgggtataggcggcggagggcggtggcaaagcggagagtgagtgaattgtcgcgaagtggtaggcgttattgaagcgaggtggagaggggtcgtcttcgcgtggatgggactggtaagcgagaattgttgtcctcgccgattggggtgagtgtgggtgagggggagctgcaaaatctgtttgagggtgaggaactgaggataatgctgttcaactacagggagatgggtatcatcccgaaggttgagccgatgtaatatgtgatgccctcgctgtgtgtatgtaaccataattttgtgtgatgaagctgcgcgctttcgttgatcaggccgctcccgtacgcgact

SEQ ID NO: 116066 - DNA, 443 bp, Zea Mays
tcgggcatttgcatgtagtgcttcaacgtctgtgagagcaccgtctttatgccaaattgtcaaattgtgatttttggctaaaagagatcaaattcttgggtcacactatctctcaggcaggtatagctgttgatcttgataaggtgcaagaggtgataaactggaagccgccaacgactgtccgtcaaattcgaagttttctaggattggccgattattatcgaagatttattccggatttctctcgaattgcgaagcccataactgaactgttgaagaaagaagccaagtttgtttggggtcagaagtgcgaagatgccttccacacattaaggcaacatttgaccaccgcaccggtgttagcgcaacccgatagcaacaagccatttgatgtgtattgtgatgcctctggcactggactgggttgtgtcttgatgcaagac

SEQ ID NO: 116067 - DNA, 277 bp, Zea Mays
cgaaagtgtactaagtaatagagaatacttcacaatatgatgatgaaacaatatgtaatagcaagcgtgactgtattattctgccatcaaactagtcaaacgaccaccatcagaaccaaacaccatggtccgatgcccctgttcctagtcacaacggttacctatgagtgggaccccatggtcaatagtgtgattgtattgtatgatgctgcatttttctcaattgtcgaaccaaagacaacgggtctgagcattctagagagtaacctagtcagtt

SEQ ID NO: 116068 - DNA, 318 bp, Zea Mays
cataggagccaacaagattccgaataatgtgccctacgtacgaacgaatagtggattgtttggcgccaagctcggaggggaacaaccaccgaaagagtcggcacacaatagtagacttagatagagttagatagacctcatggcttgtaaagggatatctctctggtcacctatataaggctagggggtacccctatagaactatctcatctcatcatccctctcatagtaacctcgccaccattagattgatagagagaattcacccaccgccatccattactcatttgtaacctatcagcaaactcaatactcagc

SEQ ID NO: 116069 - DNA, 670 bp, Zea Mays
acagaatgggttgttccattctacttcattctagaaccaaacaaaaaaatagagtgactctgttctaactgtcaaacacagaacggagccattctgttcttagaatctggaacggagccattccatccaaatagactctggaaccaaacactacctaaatagacagtcaaacaaagagctaaaaataaaaagtctcttggatatgctctaaagagggaagagtaaaatttgcgtatactcttagtaatttaagttaacaaacaagcaactagattgagttcaaatcaagtctaaaattttgccccaccctttgaatccattcaatttcacgaaaaatctgcagaatcctgtagcatttaccggagcccaaaatatccgtatgaatgcggcccgtcacccttgagaagtttgagacaacgccgcacttcaggtcctatcggcaatctgggcacccactgccactagcctgaatgcccccacaagttctagggttttaggtccaaggtttttgtgcaaccttcgtccgcgcgccaccaatttcttagcaattagtacctcacacgtgctccctctgctgctgcgccgctctatggctgacccattggacgcggccgccgccttcggtgtatccaccaacgacaacaatgtcgacgacgtcgaggacctttac

SEQ ID NO: 116070 - DNA, 467 bp, Zea Mays
ggaagatgaagctaccttcaaaactcaatctgagggccaaaaaattgagattgaagaccttcggaagcaactagccgaagctaaagagaaatgcgcactcgcagaagctaaacgaggaattagcgaatactggacaaatcatttagagaaaaacgttgaagaacttcggacatccaaggaaagatattttgaaaaatccttggactgtgtgaagaaaataaaaaccacttttgccaacgtgggcgcctattcttccgaagaaaacttcatacaaggcgaccccgaaggcgtcattgaatggataagtggggaggccgaagcctttgaagaaattctaagtgatcgcggggatgtttgcacgttcttcggtgcgcgggggatttcagccatcttggagaaggcggggtgtgaccatatcaagaccatggcccaaggtgaagctgccttctctgtagatgatacaaagg

SEQ ID NO: 116071 - DNA, 398 bp, Zea Mays
ggatttcatgcggaatggattgaatgttggcgggatgccacctaggagtatgggccttcccaagattcaaccatcagaagtcagaaaccaccttccgcatgatggaaaaccgcctaaattttggaatttatttccgtgttggccgtgagctcgttggggggcaagtagtagctgcgagttagcgaaaactgctgccagcgttttaattagttgggcgtagattcagttgcttaattttgctggtattggcttgcttccctgtatttcattaggagatttctctatggattttgtttattcaatctgtcctttactgggaaccgcccagttatgtatgtcagcattctctgctttttatctcattcagtagttagtttggtctttggtcagctgttttc

SEQ ID NO: 116072 - DNA, 385 bp, Zea Mays
ggggactgaggtagtgataattaaggctatgtgcagcatcgtctgaatcacgtcgcggacgcggaaataggatgcggaaataagatgttccaaaccaattgagcaaaatgattttataagctgttagaagctggcgcggaacgtccgataccaagggtagacctgcaaaatcgaagtgttaataacattcttgaattcatcataattaatatatatggatttataaaaggaatgtaataaacaccgaaacagcgtaaaacgtgttgaggccagcaaggcgcggaagactgattcagcatcgaacaatggagcgtgggaagctgatgatggacctaagcacagtgttcgcacaataaggcccaatacaaagtacgcaggagcacag

SEQ ID NO: 116073 - DNA, 538 bp, Zea Mays
cagggggttattttctaagtcctatttttgctggcatttagatgctataacatgactttgtacaaattttcagccactaatacttattagttattttattttgattttcgaaagtttctagccaaaggggtgctttctactaacattatattggaaaaatatctaacaacatatttctaattttttctaccttcttctttgtgcaagagcaatcattctaaatttgggtaactttttgcttaagggaagggtggtaggaatttcttgaactaaatggcctttttcatgaagtaggggcaatgggtattactttgtagctttcaattgggttttgcatttttctctggtggcctacttcattattaatctggtaaaaatttatttgccgactattgcacactttttggcttgcttatgatttaattgaaatatgtctcaatatcaagttctatttgtttacgctacttaaaatgttggactggggtgtttatcatttttgtagtggtgtcctagtggttacaagtccagtgaatttttc

SEQ ID NO: 116074 - DNA, 346 bp, Zea Mays
ccatcgggaattgatcatcttctgtgatgcttcaaggcaaggtttagggtgtgtacttatgcaaaatgagaaagtcatttcctatgcatcacgcctactcaagtcgcatgagcagaattatcccacacacgatttggaattggcagccataatgcatgccctaaaaatatggaggcactacctgattgggaacaaatgtcacatcttcacagatcacaagagcctgaagtacattttcactcatctagacctcaatctccgtcaacgaagatggcttgaattgatcaaagactatgaccttgaaatccactaccaccctgggaaggccaatgtggtagcagacgcc

SEQ ID NO: 116075 - DNA, 405 bp, Zea Mays
agattacctgggaggaattcaagctagcattccgggagcattatgttccagagggagtgctccatatgaaacaagaagagtttagccggttaaagcaaggggggagatactgtaatgtagtatctcaacaaattcaaccatctctcccagtatgccattgaccaagtgaatacagatctgaagaaaaagaattgttttatgaggggactcaatgacaggcttcatcggaaaatggcaacatgcttggaccttacctacagtagggctgtcagtatggcactggcagtggaagctaaaactgcaggacatggaaaatccaaggggtttggaggtgaaaggtctaatcatgggcctgagaagagaaccaggttggtgatccgaccttttaatcgaaatcgttcttca

SEQ ID NO: 116076 - DNA, 735 bp, Zea Mays
tccaatagctagcaggaagagacgccagcaaaaggaggtagcgaatcatgttggcggtggtgtgaataatccgtttgactcgaccattttgaggggaagtgtaggggcacgagagtcgcaactgaacgtcgtgggagagaaacaaggagcgagaggcggagttgtcaaactcgcgttcgtatcgcactggagggcatgaaccaggtgacagaactgtatggagacccaagaaaagaagtgcgagagtgtggaatgtaccagactttaatcgcagagcaaaagtccaaagaaagtgagagaagtcattcagaatgactaggtagtatttgtaactagagaggttgaagacaggagatgtccagagatcacaatgaacaagatgaaatgcctgagcagctctggatgtggaagtagaaaagggaagacgcgaatggcggctgagctgacatgcatgacaaaggttctaagaggggcccttggtccaagatatatttgagctactggagagtttggacatgacgtcaggtccaggatgaccaagacgacgatgtcaaatggtggaggtggtggtagtagccagagcatgaggggaggacacgtcggtggggcaagcagatggctggagcgtgtccagggcataggctagggcaacacaagaggagggaggtgggtcaagacaagagatagagtatagtggaacggagatgtcatatcgagcgagcacgacatgggtgg

SEQ ID NO: 116077 - DNA, 339 bp, Zea Mays
ccgacggttttttataacggaaatagattccatctaagatccaacggttttctataatggaaatagattccatctaacatccgacggtgccacattctttttcggactccgactccacgcgctcttatcgctgctcatccagaagatcgcgcagcggtggtccgagtcactccacggcctcgtcgataatagactgtctgcgccgctgccttcaactcctcctgggcactgtttgcgccgccgccaccttctcgcaggtcaacctatccaccgctgccttcaaccgtttgttgtggcatgcggtccccgacgaggccgtcgtgacggaggtctttggca

SEQ ID NO: 116078 - DNA, 455 bp, Zea Mays
tggaattgagggaaattgtttttcgattgctatctcgttcctgttcttgcatactgcccaagccaaacctgcatgctctgttctgctcttctgtcccacgatgtatttagtttattaggatatgccacgatttctgtactgctaccttggatggatcatttttacttctaactagttcattcacattattaggaatcacagtttttggtgattccacatcatgacatgctgctctggtaggtcatttgttgttgcatccaaactggttcaactaaaccatgtcaacaccggccccttttgtaattttgcatactatattatattattactagacatgtaaagggttccagactgtgtacttgtctccgacagccttctcttttgttcatgttttcagtttcatgtcctcatatcctacatcgaaacatgaatgtgacaatttaatccatgtttgt

SEQ ID NO: 116079 - DNA, 417 bp, Zea Mays
gtaaacaattaagaacagtaatgggcagcagtatagcacttacaatgaactccttactatagaaatgttctttaaccaaccactcccagtcagcttgtggaaaatcttcagggcagttcttaatggcttgttgcatattctttgctggcttgacatagtgccgacacaagtcaccacgccaattgttccatagatccttagcatgctccatgatatcattctcatagacatcaattttaatgttttcatctatgttttcatacttgtcctaaaaaattgttaaacagatgccccatataaatgtaccatcttcagggatatatatatacatatataaaaggtaacacaacaatataatgaaagtataccttgactgcagcaaaaatatgcttcatagatgtctcactaatgtttgtc

SEQ ID NO: 116080 - DNA, 481 bp, Zea Mays
caagggctactatcctcttgaccatgttttggagtttcctaggtgtgagggctccctcggtttgcgttgtgccttgaccttgcagtaatggagatcctcagaccatgcatacttctcgaatagttggtacagttcttgaagggttgttgggggatctcgagtgcaatggatgtagaactaaccggcacaaaggccgcttatatagagtaatggatggcaattctatcttcaaatgatgttagctgagatttgagcgacaagaacttgttgtaagtcatggaggctctcggtttctagctgcctgcacagtgatagctctacgagggcgtcagtctacgacatgtaccttggaaattgaggagaaacttctcccaaagggccgcccatgagtcgattgagagcgatggcagcctagtgtaccatgtcagagcggggcctttgatggctattacgagtgacttcgccattgcattgtcgttgc

SEQ ID NO: 116081 - DNA, 339 bp, Zea Mays
attttggatgagattttgatggggccgagtgtctgtcgtcgggcacatgctggtgccggtcatggggcgctttcagtgcctggactgccatgcttgttgtgtcttcagatgcatcggcgatcaacaagcaagggacagcaaaacgtgcatgggcacggaagcactggctgagtgtctcgactctcgactcgatcagagatggcaatgcaatgctgcgaaataaaagctcacatgacgtgctgctactggtccagctgcagacactgaattgaagaggcgataaagctgtcgagcaacttgtgtgggccgccggcgctggacaggcttaatcagatagta

SEQ ID NO: 116082 - DNA, 541 bp, Zea Mays
ctcacgagtccttgacaccactatccacctacgctgccttggtcagcgatgctgccagacggaccctatggtcgcccagccacacctaccggcagcagctgcaggacacgaggttcaggcatcttcctctgcgtatcagtagaggaagtcagaccagcatcgtcccaggtggagctggtgaggatcgcctcaacaccctagctggtgtagtggccggtctcaacaccgacctggacagtgccaccctggatctctcaagggtgcacttggagctagagaatgcccatgccaggattgcagccctggaagcccaacttcaaggactggatccgcccgaagcctaggtccccgccatggcgttgtctcttccccgcaagaggctgtgctatggggagcccggatccgtcactaggctgctttaagtattttaagttatgatgtaataagttagtcttcatgtcagacgttgatactcttttaagttatcttattaataaataacaaccatgtgatggtgttgattgacatgtttgagttggat

SEQ ID NO: 116083 - DNA, 458 bp, Zea Mays
ctgccctgtactttaatgcttctgttgattagacttgcgcttcaataaccacatttgggcttcctaccatttcaactgatctcctctttttgttgcagtacattcattgtgtatattttgtgggtatcacctcttcagaaaatcttgaagaatccgagcgatacacccaatgggtgtgaccaaggggtgtctgccccgcgaagggtgtttatcgcgttgtcctaaagtagtaatttgatgtgatggaggggtgtaatcatttgcctgagcagttggcttgggtccaactggtgccgtgttacacgaaacgacgtcagttgtctgactcattttcaggcggcttgaattgcttatttcttgtgactgtttggtgagcggggtaggaagtggacggtcacccctcgatctctttaaatagcccgattgccttggctgttttcttcactcgcccttgatca

SEQ ID NO: 116084 - DNA, 891 bp, Zea Mays
ccgacttaagccgattgctccgttagtagggcatagtggtcaccccgagtttagtaagcgtgagcatgtcgcaccgccttaagtcattgccgacttaagccaattgctccgttagtagggcatagtggtcaccccgagtttagtaagtatgccaattgacagcgaacaatttgagtgcctttgaagcctttttattgatgatatatttctcaatttacagaatacatcatcgtcccaatagctttggggatgtagctaggggtaaaacttcctgaggtgttctatgttccatgagttcccaatttccgtaccgtccatctgagtgagacgatatgatcccggccgagtgacttcagctactatgaatggtccttcccatagaggtgacaatttgtgccgtccctcccttgttagaattcggcggaggacgagatctcccactgcgaaggatcgatgccgtatggccttatcatgatagcgtctcagagtttgctaataccgtgctgattgaatcaccgtgttcagtcgctcttcttcgagtacatcaacatcctccagcctagtagcttcagcttctgctatgttttcaaagattaaccttggtgccccaaacttgagatcagcaggtagcactgcttccaaaccatagaccatgaagaaaggtgtgtttccatgcagagctcgactaggttgagttctcaggctccaaacaacatacgacagatctctgatccattttcctgcgaacttttcattcttgtcgaagactttctttctgagcgcctccaatatcatcccgttagctctttcaacctgcccgttggctcttgggtgcgccaccgaggcatatttgatctgaatgctcttttgctcgcagaaatcgaagaactc

SEQ ID NO: 116085 - DNA, 351 bp, Zea Mays
ctctcttttacatttagtataaactttatgttcctctcgttatgctattttcaagggaggtgcttccggattttgctttactttctgtctctatttcttttcttatgtcgtttaagttttgtgggaagagtttttggtaacattcattgtgtgggagcaatggggtgttacaagttcgcgcagagtgatctgggtcattgatctcagatcgaacgtgcggtgtgagggactagatgcagagagtaatgactttaatctggaccgtcagactctaatcagacggctcctaatacccaataccccttcgatcgatcaatcttgcaaaagagccctacgagaaatagaaattta

SEQ ID NO: 116086 - DNA, 413 bp, Zea Mays
attagggtcaacagagaagcttttaagagcaacgacgacgacgtcgggtagagcttgagctcaacgtcgatttggggagctcgtgttgttagggcatagattgctctttgggatatgaaaacacgtcaaaaagggtgcaatgacattgatgttgtgcgacaagaaaggaaggaaacatacataataaatgaattgtttggatacagatcagaataggaagacgggaaaaagagaccacatctgatgtgggaagaagacaaacactaccaggtgagtctagtatatcaacgtctcaatgaagaacgttgcaagcaacgagcgtcgataggtaggctttaggtgggcctgcggccgaggtgggagaaaagttttttatttctctttctcattttctacttatattttcaaatcca

SEQ ID NO: 116087 - DNA, 605 bp, Zea Mays
gaccccaatggtgatgtacctgcttcagttgaccccaatgggtgtgaccgtgcaccaactgaacccaatgggtgtgatcctattgaagctgagcccaatgggtgtgatcctgttgaagctgaccccaatgggtgtgatcctgcaccatctattgtccgcattttttacgaggacgaagaagaggaagaagaagttctgttaattcgcaagaatagccggcgttacagaggtagtagggggatagtgatattccttctacagctctgtctgcccttgttagcctttaagatttatccataacagattttgatcaggcccttgaggatgtcattcctgaagatatgttgttggaaccgactattgatgatatgatgaatgtttgctctgacgctccagacgtgggattagaggtatcccgggcggtatctcgtgcatcgtcgactttggaaggcagtctttggtgtcaagaggttggtcaggattgcccgactcccatggaagtgactgaggatccttcagcctcagaggtggccgttgcagaaaacccagcccccaaggatgatgctggcggttacccagcccccgagggtgtcgtcggtaatgat

SEQ ID NO: 116088 - DNA, 714 bp, Zea Mays
gccggacccccgtggatcgatccagtacccatgtgtgtgccatcgggacccccaatcaggggtagcccggtgctgccacgtatccaggctactaagaataaggcatggatctccatgagtgatttccaaatcctcgggtcagggaggtctggagctgccacgtgcccagtagctcctggcccttactcctcacttaggtgggtcctggtgccgccatgtggcctatagaacatgatgtaagccaacaaatagagcatgacgtaagcctctagcatgaggcatccccgtattaaatatgtataagacatgcacctatctgctcaggtggcaggcgacgcacccagtatgcaacgcgcgggttacactgttacctgcgtgttaccgaggcgaggtcattgactcaatgtgttgcatgggcacttgttatatgactcctactattccccgcgcattaccgagacaatattgaacatgcgaaggagacagaacgacactatccatacacccctacacacgatagcatatcaacctacaccgcaacctacaccaaggcctatgcatgtgctccgagtagatggggtaagagcatatcaagacacaagatccacacaaaaacaaagagaagatatctgaccggtacggatgagatcttggcccaccaggatccatcacttcgttttctatatacttagtattagattatcgggcccactt

SEQ ID NO: 116089 - DNA, 392 bp, Zea Mays
tgttgagttgagcctgcatattggccattgcattggccatttgctgcagtaactgtgtttggacagttaggaacgcttccattccggcaggtgggggatttgggggattcatctgcgattctgaattaattactacccttcttcgacgtatgcgtgcaggcagatcaactcctcctcttgtcctggtattgaccatctgggttcgagacatagggtaagagagatttgtagataagatagataggtcggtacgcaacacttggctctttgagtcaaaatagctcagttgattagagtatcacctacctatcattactatactacagctatgttggtacatactagaatgtacctactatactaggttttattgtggatataaccccacaaat

SEQ ID NO: 116090 - DNA, 474 bp, Zea Mays
attgtgtcaccaagcacgcaagatcctatgtctttttctgagtgatggattaatgaacacaaatgtgaacaagattacaatctcaagtatcaactaagtgacacgaccttctggctttccccctctgtgtggttctggtgagagttctatcctaatagtacctagttcacctttatgtttatccttagaagtaggttttagtcaccaggtttatggttccctctttggttcctttcttcatgttgctctacccctccattttatagaccaagagaggagaaaggattaataacagttggactgtggatcctagttagctgtagccctacatccccaatcttatcgtagtcgtggagttatatgtagttccatacctttggtcttgccatagtgtccatgatatcctactacactggtatacatatctatcacagaggcaggtatggcccatcatatcaacaagcattgaagtcc

SEQ ID NO: 116091 - DNA, 477 bp, Zea Mays
tggccatcctggtgcgtggcatggtggaagaggtggttctgccggaggtcggttcttcggaggtcgtactttgccaattcaatctaagggtggagatgttcacagcaggtttacaaatggaggggcttcctctgtgatggtcgctggacagggtctgggggggatcagggacttcttcggtgacacctgaagtatcaaacgttgtggacttgctccaacaggcaattacaacagcaattggcaacggtagcgctgccaggcctgtcccagataacaccgtggaacagattgtttccttgctgcaacagtctgtggggaagagccaccccattctgaattcgatggggaattcagcgggtccgaatcttgggtctcaacacagttcaaagttggagaccatcaaagaattgtctaatccgacccacttggatgacaaggtgggttcttctgtgatttcaatttcaaaagagaaagtgt

SEQ ID NO: 116092 - DNA, 533 bp, Zea Mays
ttctacttctgtgtggttgaattacctccagttgaccgataagggctgactctttcctgccgaagcctgaccttgcttcattggagccggtgtagtgtaggcagccctgttaggacagtagttggcatagtgtctcggttgtccacacttgaagcatgccctgttggtggatgtgttaggagccacgggtcctgctggggtgcttgcttgaggagtagcctgtttctgttgagtctgttgcccagaaccgccatgagttggtgtacttggagtggtagtatagcgaggatgggaactacttctagcctgtccttggttagcagtccttcttttctctccaaacccacacctcttgttttctacagcaatcgtcttgtcaattagtcgttgaaaggacggaaacgtgtgcggtatcagttggtattgtagcggtccaatcaaaccttccaggaagagttcctgcttcttctcatcatcctcaacatcccaaggagcatatcgagatggctgaataaatttgtccctatattcgc

SEQ ID NO: 116093 - DNA, 572 bp, Zea Mays
gctaagcctaacaatagcgttagaagtcagttggtgcatgtatatctcaaatttcttcaaaacatgtgtaatcatctttatacattggcaaccaaaggctagcccggaagaagcttctgaagacaaaaacatcattgttctttggtttcagagtcgtctcatctccaccgcatcaccaaaatacccaagctctttcatagccttcaaatcttctgacttcaaggtggatcgacgcatctcgatgtaactaggcttcgtcagcctacctttgtaatcttcttccataacctcagaaaccttccttgtacccccctttgactttggagctacataacctctcatgactttcgaaatcgatgtagtatccgaagcaatcttgtctctctgaagagcctccaaagatgtgggagtggctaacctagcaattgtgcggatcctagccatctaagagagcttacccgaagtttgcttcaagcacagcagccggtcgagagcttcggaggcggagaaaaaagcgacaacatgtgggtgcgggggcagtaaatgctgaactgctccatcccacctctctg

SEQ ID NO: 116094 - DNA, 378 bp, Zea Mays
gatttgcacattacaatgtttgatagtgacgttttaagaggaagttgttgatggataggaagttgttgatggagattagtttcctgaacatgagctggcgcatagtttactcatcttgtgtggttgaacaagcaagactcaaactaaaaggaaagcactaaagaagtttagaaaaaagagatataagcaacaatactttcccttaagggtgttcgcttgcgctaaatggtagatccaaaaaagaagcatgaagagaagcgggtgagagagaattgtggacgggtacaagtgtatcgttcaaaaagaagagggtgagagaaagaattgtgggcgagtgcaagtgcaacatacaaaaagcatgctaccagctaagcctcc

SEQ ID NO: 116095 - DNA, 632 bp, Zea Mays
cttgtatattggcaggtcctctactttgtaattatacatcttacactaggcatgtgtgtgtaactataccaagtaaagtggccttctaggccctttatatagtgaggaagagtgcattcatggtgatggtacactttaataggtgctcggtatcgttcctcgtaccttttattaaatgaagtaatgttgtgctatcaagtcaaaactacagtgattttaccattccttataactcgtatgtatgattgtctgatcggatatggtcttaaatgtgagggcatgtttgcaaaggggtaccgggtacactggcccttaagggcatgccaaggagaaggcataattataaggtcatccatcacatttaatgaggttcacaacctttgttcgcattcaccccttcccaaggtgattgttatatcgaccttaggggcacatatgatagcctacgcctatgaatgttggggctaggctagttgaaaagatgtaactaaccgatagtgtagcctttgcactttactgtatttcatggtacaatcctctggtgtatggattgctacaagacatatgcatggtgatttcgagtgccctacatcctaaatcttgtttcagtacacttagtcggccctataata

SEQ ID NO: 116096 - DNA, 471 bp, Zea Mays
cttggcgtcaccacatgcatcatcagaatagattccaaggttgtcgctggtcagatcgaaaaggagtactcagcaaaggagcctgtcctgatgcaatacctcaccgccgtccgcggcctcgaaaaagaattcaagggtttcaccttgtagcatgtcgagcgcaacaagaacgaagaggccgatgcgttggccaaggcagcagctaagggcgaggccctgccctctgacatgttctaccatgtcatcggcacaccagccgtctgtaaccctgaaggcttgcaaataactcaagacgccgagggccaccgaatcatcaacctcataatggccgaagactggcgggccccaataacactatacctgtagggccattaccatccaaccgatcgcaacgaggccaaacgactgaaacacaggagcagggatttcgcaatagtcgagggtcagctttacaaaaaggggatcaaccaa

SEQ ID NO: 116097 - DNA, 488 bp, Zea Mays
gtaatgaggtccttataggcatttaaacctttcttctgaagttagagatcttttaaagtaagtcgaattcctaacacagtaagcacactgcatttatttcattcccctttgatgcattcaattaactgccccccaaaaatagataagacaaggcattgggtatcaataaagggcaatggatattcccccagacatctcggcttgctgtttatttttttcatcacatgtatttttgtagtccagaatgcaatgtaactaaattgagtaaaacataacacaaaacaagtaaatagattttaatgctgattatagatcaaaactatgcatccactttgctacattatgtgttctgtgattttttgtctctgtacgtcatctattgtgcctagctgtagcctgagtgactacaaaggtatgatgtatgggaaataccgaaattcgaaatgtaaatttgaatgtattgtactccctgaaaacatgtgtgcctc

SEQ ID NO: 116098 - DNA, 476 bp, Zea Mays
tccttgacccctgaacaaaaggtagagcttgtagaagaggaatcagaaacagaagagttccaaaacgtggaaggagaatctttcttagggatagaggatgcccaaatgtcaggagtgttctcatccacaaaaccttttgatgtaaggttccttattctattgagagataatgtgcgatcgaccatgttctccataaagaatgaaagagttacagctttacattgtaataactttgtgtcactaggtaacaacactcatgggcatatttgagggtggtcctttggagtgccgggtgatggagaaagttggctgtatggactactctgttacagcatgggaacctgtcagagctgatatttaccagaggcaagttcattataaatttgacaagaaatcagtacggcatggaggagaagcgatgagcactcagcagaagtcccctttgcctaataagaatggctggcttgttgaagaag

SEQ ID NO: 116099 - DNA, 441 bp, Zea Mays
cgagaacaacggggagtctgcaaaggcaagtgatggtactgcagacctgggtttacgaagccgctcacaatgcgtaggtcgtggcgggcaacagcagcacaccaaatgctcccatggcgacggtgggtggcaaaaccgaagtgatgagcagcgaggaagacgaagtcgacaaactctcagtgcagggctaaataagatggccaggagccagggagaggaaatattaaagtgatgaaagtactcaccgtcgtaccgcacagagcgtggcgctgtttcggccatgcctggaactgctgacgcataggaacgatggagacgaatgacagcgtgtggacgacggctacgcgcccatccgctcctctccctacagcggctgcacgtggacccgcgcggcggcagggaccacccagtagtgtcatccaacccgtggctgctgtaatc

SEQ ID NO: 116100 - DNA, 620 bp, Zea Mays
gccagggagtcaccattagtagaatggaacgccaccccaaacggtttgggtgtaccacagctaccttgtggggtcgatcagaacagacctcagcaccagagtatcaacaatgacacacataccataaaggaccggtttgtgcgccataccgagcgtatatatgtccgtatacggtggaaagcgacgggaagctcacaatgatggcccaggccacgtcaagtatgatcgttccatgagactgactcatgggaccctccacgcactacagccaagacgtcagcaatagactcgctacagggagccaacacaatggacgacgccatatcgggggtatggccatgcacgaccctacagaagacccatcacatcgacctaggaagatatatgtttctctttatctctcttgcttgtcaaaagtaaggcacctatgtaaggtttctcccttgaaatataaaagggacgacactccccctactcacacacgagcacactagttgtaacatgccacaaagcaatactacgatcagcactatactggaccagggcgtgagcctaaaccagtataaccccactatcttaaacccacgttcgagcctcaacgattcaccattcggagtgag

SEQ ID NO: 116101 - DNA, 576 bp, Zea Mays
attttgttaaatggtgtttagcattgaatggtgaatgttatagtaagttcatacaattttagtatatgcctggtcaactagatccctggatccattgatatactgctccatacgtgctgcaagttgtgagaacctatataatagaaaagaatatgaacacattcagataaacatagttatgtataccccatagagaacctatagcaggtatatctattgaagccataataacagacctgggaatatagggcacaactccaatttgacgcacattacgctcatatttctcaatctggtagcaggcatcatcaacaaactgcactggccagaatatgaaagagtaaggaacatatggaagaactctccaaagtagaaaaaaggctagcctaatagtagagtcaaaccctgctgaataaaattgttattcttgtctccaagtcatcaagcaacacttgtacatatccggagacctctgctttctgaccagaaagataccgatctgttagtccatgcattgatatgcaactcaatggatctagcttgaatgcccagtcaaccaaagcataaaagtcctcc

SEQ ID NO: 116102 - DNA, 448 bp, Zea Mays
gctccagtggaatgcctggaagctctgctggaaacacgtcggcaaagtcacacaccacacggatgtcttgcacccgcaaagcagcctcactctccaccaccatggagaaaaaaaattcccgacttccttgaccgacgatccggaagcattgcgacaacatggataatgtgaactttggagaacttcccaagaataccacctccctacctgatggcgcctgcaataacactatcttccaaaaacaggatataactgcacgatattgagataaccaatgcatacccaagataacatcaaatgcccccaaggaaatcacaacaagattagctgaaaagacctcatcagcaagaatgatggaacaaccctgacaaactgaatagctactaatggagccattagcagaactaaccataattgggtgacccaacctctgcactgaaagaccagc

SEQ ID NO: 116103 - DNA, 312 bp, Zea Mays
ccggtggtagaattcgaactaatggcatttgtttgaatgtaagtgtggaaataagggggatagcgtttcccgctaacctcatagtaatgggtacttagggaatagatgtcatcctagggatgaattggctagataagtatcaggcagttatcagttgtgataagaggacaatcaagttggtgtccccactaggagaggaagtggtgaccgagttagtcccgcctgagccgaggaaaggaagttgttatcagatggctgtcgaaagcagtgaagcagacccgattgagagtatcaaggttgtgtccgagttcc

SEQ ID NO: 116104 - DNA, 335 bp, Zea Mays
gcagatgattgggcttattccaccaacatctggcactgcctatgtacatggaatggatataaagaccaatatggatgcaatctatactaccatgggtgtatgcccacagcatgagtaatgccttgctctaaaatttatattttctatccgaaacccgtttctgcacattaccgttgcattctattgccatcagttctcattctctttcacttcgacgcagcttactttgggaaacattaacaggaagagagcatgtaatgttttatgggagactgaagaatcttaagggcactgaattactgaaggtatagttctgtaattggtatgttttaata

SEQ ID NO: 116105 - DNA, 279 bp, Zea Mays
tgggttactctctagtctctacttcaaccatggtttgcattgtctggcatgttggtctaatcacttctacaaaatttattttaggagacatctagttttattagcagatattggtgggtcgatatcatccggctcggtcaagaaaccaaatcagacaccggcctctcgtgccctaaccaggagcgcaacaatcttttggttgtggcctcatttcatactacatatataaacaaaagaatagggtcgacacatgaacttgtcaacccctctttcccaaac

SEQ ID NO: 116106 - DNA, 507 bp, Zea Mays
tggagttctctttttcgagacccattactgaacgaatcctgtctgagtaccagactgttaattgtggcgagtcgcaggttggtctgctatgaatagggtaatccttggcttaggttaatttattagtacaatgcatataattaatatttggtgcaagccaccttgccagttctacttaaacatcacgtccattttcctaaaaataaataaggctgccttcctaccgatagcctaagctggttcatcgtggctgcaaggatcaaggaatgttgatggacatggcatcgacgtgaagcccatcaacgctcacctgccctttgcaacctccatcctttggtcgtgttcgcaggcctcaaataatcaccgttctcttcatcaatttgttgctctctaatctatacactcgcagcttctactactagtcatggcgtcatcagtctcctcgtcacaagtaacctcttcatttttttcccaccacgatcacatggctgccttctcttggcaatc

SEQ ID NO: 116107 - DNA, 458 bp, Zea Mays
caatggcaccaatacagtcctacacatcagggcaaacatttgttactacaaacccaacatgaaaaggaagggatcagtagtggtgtgtttggatggttggcctagaaataggggtaccatctgtggctatctctaattttggttggtgtagcagttgaaggtggcaagatcatttcatttctcagtttaccaatagcatacaatacttccctgaagtatctgttgatggtctcaatagaccttcgaaaggtcatgtgtacaactctaaacctttgattatgacctaccacatgtaaaaacatggcaacctgctcctctactgagttatgaatgctatctctcaatagttgcctagtgtgaaaaaggtcacacaactgcataaaaggggctcttctcatcctaagtaagtcaacacactcagcatcagtggattcataaatgaatatcgggttgttttg

SEQ ID NO: 116108 - DNA, 678 bp, Zea Mays
gaggcaacgagtcaggtgttttgaataccttttcaaacttgtcaaggatttgttgtatgtttggaggaatcatttgtgtttccaccttctcctagttagatattatttgcagcatggccacagcccaaatttcattgcctctatgccacttattcacttgttcacaagagatctcttgcagcctttgcactttaccagagtttagtccttgtaatctgaccatttctccttcataagtgaattcaacccactttctatcccaagcacacagcataggactaaacttctctagccagtccatacctattaccatgtcataggctgcttcgggcagcacaaaagcgtcagccacgaatgttttaccacaacaccaccattccagttgtaccaccttcttattgcaaattatcgtctgtccatttgctaccttgacagatactggaacaatgtcttgagttgtacactggattcggctgtaagctaactcactaatgaaagtgttagagctgcctgagtcaaacaactgtagtatcaactgattttgaatctgagccctcaatctgatgcatttggtctattcagtcccactcaaggcattcaaggatactaccattccttcctcattattttcccaactggactccagaaaatttaagacctcatctgacaacataggac

SEQ ID NO: 116109 - DNA, 499 bp, Zea Mays
atagtcgaagcgaccacgggacggtgaacgataagggtgctgaatcccgacaggggcgggagaaccaccatccagatagtggcatgctgcgcacttagcacgcaattccgcaacctccgcccgaaccttgcccaactcgtcgagggcgtggtccaactctgtgttgagcacgacagccaagttgaccatgttgttcagcctgggattgccctcaccaactggcgaggcaatcacacctccagcaccgccggtcgaacggtgagggtagtacttcaggtcgaggccatcagctaccccgctgaacaacgagcaatactgagaaagtgcccgtcgtgctgcattttgcatggctgcatcggcagtatccctcttagtaatagaatagtgctcttagaaggcctctgcaccccggggatcatcatccggacggcgcaccaagcaagtagcctcccactagtccgggtataacccgcgacgatgctggtagactacacaatgg

SEQ ID NO: 116110 - DNA, 428 bp, Zea Mays
acaagaaccaactgtttgatttgtttccaaatccaattccagcaacactaaccagtgtagaaaatcccgctagcggctctctcgaggccctcataacaacaacatttagctaacagaaactacccacattcaacaactccgagatttgatccctatccctcacgtgtgatgatcgcgcctactatggtgctaggagtcactccaagatctacgcctaatgccttgtgcacattagaagaagcaacatctagtgcatgttccctagcaccagatcatccgcttgcatgtgttcgtttaagaaatatgaccgctagctacgaatttataatgccttctccaactacctcgtctattgctagttcttcatcaaggaacaacatgccctcacaaaattaggtgtagcagcaacacccaatcgacgatactcc

SEQ ID NO: 116111 - DNA, 499 bp, Zea Mays
tgcccccaccaggccgagcctcctagtgggcccacttgtcgaaaccaaaccctaccaaagggtgatcagatatcacttggataacttgtttgaagtttgatggccaccttccacgtgtcgactaggtcagagaaatgcaacgcttctctcgaaaaggacctcataagggcttccgaggggggaagtgtgccgatcaaggatcaagtgctcagaggatgatcgacacagaagatcaccactcgaggattatgcccgactccggcgcaccatggactcacactccgtgtgtgacgaccatcgcaggcaggtctgtccctaaactacgcaaataccacgtaaacccccaagtgattcacatgatcgctcgaggctacatctagcagatgcgcttgcgtgcacctgagattttgaccgtcagcagtagccgaacaaaagtggacccacgctcaatgtgtgatgaccatcgcaaacggggttagtccctaaactgcgcaaacat

SEQ ID NO: 116112 - DNA, 374 bp, Zea Mays
gtaaggagttgtgtcgctgatatttccctagaacacgattgtcgtccttcatctgagtagatattcatttcggaggcctgctcagtgctgtaatggagtactcatctgacagttgagttgtgacacagaagtattcgacagcaaatgataggatggtgtttatattggcgagtcaggagacctaaatagtcagggtaagtctagagtacgagagagctaaaagggcatgtgagatcaatggtcaggtaactctgtgtcatcaagatataacttcttaattaagttaaattgtgaaaattctagtgttgcattcaaaaactcatgcactctaactacaacaatagtttatctatctatccacaacagtgctacac

SEQ ID NO: 116113 - DNA, 1919 bp, Zea Mays
cgatcaggtacacctcggtgtcacacccggaggtggtgaccacgctccgaccacgacacgcagctacgctggcgtcacctatttctccaatggatgctacgactccatctcctccggcgactgcggctccatcgtctttggcaacagcgtctccatcctctacggcggtttcgacgtcagcaacgcctgcaggaccgacggtcgagtatgctacaccgccaaccgtggatgtggaggatttggacgcggatcatgaagatgacgtaccccttcggttccgtctcctagacaagatcgcaggaccggcaacgtcccgagggctcgttcaccgctttctggatgaagacgaggatctactgctggctgaagaggacgagccgaggaccttcgagcaggcgcagcaacatgactgctggaggctcgccatgctggatgagatgacatccatcgaggcgaatggcacctgggagctggtggatctgccaccacatcaccgtccgatcgggctcaagtgggtgtacaaggcaaagaagaatgccatggggattgtcacgaagcataaggctcgtctcgtcgcaaaggggtatgtgcagcgtcaaggcattgactttgaagatgtgtttgccccagtggcacgacttgagtccgtaagactcttgttagcgctggcggcgagcgaaggatggactgtccaccatatggacgtgaagtcagcctttctcaacggcgtgctgaaggaagaggtgtacgtcgctcagcctccggggttcgtcgtctccggcgaagaagggaaggttctgcgccttgtcaaggcgctctacggtcttcgtcaggcaccgcgcgcgtggtacgccaagctggatgcttctctggcatctcttggttttcggcgcagcatcaatgaacatgctgtgtacactcgagggaaaggccaacatcggctgatcgttggtgtgtatgttgatgatcttgtcatcactggtggagatgtggccgtaatcaagcacttcaagcaggagatgaagagcacatttcaaatgagcgatctgggattgctcagttactacctcgggctggaagtaaagcaatgcaagggcgggatcgccatcagccaaggggcgttcgctcagaagattgttgaagaagcaggcctgaagaattgtaatccaagtgccacgcccatggagacacgcccaggactgagtaagtcgagtacctgtccagctgttgattctactgcatacaggcgcatagtaggtgctcttcggtacctggtgaacacaagaccggacatagcatttgctgtgggatttgtctcacgttttatggagaagcctactaccgagcatctgcttgctgtgaagcgagtgctgcggtacgtagcaggtacttcggactatggctgctactatcagagaaggaagaaaccagcaggcttgaccgggtacagtgacagtgaccatgcgggtgatgttgatactcgcaagagcacgacaggagtggtcttcttccttggtggcagtctcattacttggcaatcacagaagcagaaaatagtggccttgtcaagctgcgaagctgaatatattgcagcagctgtcgcctcctgtcagggtgtttggctggcacggttgcttgctgaactgcgaggagaagaagctgaaccggtgatgctcttcatcgacaacagatcggcaatagaattgtccaagaatcctgtgtttcatgagcgaagtaaacacattgatacaaggtaccattatatcagggagtgtgttgaggaaaacaggatgaggattgagccgattgacactaataatcaattggctgacatattgacgaaggcattggggcgcggtcggttcgtccatctgcgttccaggcttgggatcgtcgacacaaggctgttgtgcaagact

SEQ ID NO: 116114 - DNA, 296 bp, Zea Mays
ggacaggcgacatcctgtctggcgctagttcgtgtgagtggcttgacaggacggttgacgtctcgcctagcgcatgtttgtccctcgttcggcgtgttctcccggtgctctgcccgaggctatgaaccacctacaaaacgggcagttccccactcggggttcgaggcggtctgaagctagaacgacggatcctcccacgctgcggaactatcatggtgggcccacttggcaggcgccgaatggttgggttcgcctttggagtttgaggtgattgggagcagaagcgatagatcctc

SEQ ID NO: 116115 - DNA, 290 bp, Zea Mays
aaagaataccacgagaatggaacagagaaatgctctatggcagtctacctgggagaaagccgaaactacccaaatcaccctcctttccaggtcaccttcaccggacaccgcttcccagacacttgccaaaatgttgcccgaaaagccctccgccagctatgccaaaactacaatagggaagtctttgagaccccccttcgttacttcccacctagcaacaaaaatacccctacctggaggaaaagacttcaggccctatcaggaagagatcctactaaagatgaccccac

SEQ ID NO: 116116 - DNA, 461 bp, Zea Mays
attcaaccttcgctttggtcgggtgccgaaggccgcagtcatcagttgatcctcttttttagtgtaatttcccaatacttcattacacactgcttcaatcatttccaaccactcttgacaaggttctttaaattgcttttcaaatttaaaccgataaggaagttgcacaagctcaagtcccttcttcgttccttttaattttggcatactgaattcgctcaaagtcggagatgttttgttagccaaatattcttgaactagatccctcgtgctgatctgttcggctaccaccctgaattctaccacagcttgttgacatggtgatcctggcgtcatgcggcacaagggcctagtcaacccaaatttcaaactcaacgggctcagcactagcgtcttcaacttctccctcttcttttcatcggctttgacataaagccactcgcttttccagctagttggcc

SEQ ID NO: 116117 - DNA, 394 bp, Zea Mays
tgctgggcggaagatgtaaagggggcctctaccacctctcgccttcgaacgctgcacaattgaagcaaactctcatcagtcggtctttccctagtcgtgcccagtggcatgctagacttggtcatccatcccctcaagtagttcagtctattttaagcctcagtaatattttgtgtcctcgagagtccactaggtctatttgcaatgcttgtcaagtcgccaagagtcaccaattaccgtatttttcttctgttcatcgaactctagctcctttggagttgattcattctgatgtttggggtcccgcacctgtctctatcaatggttacaaatattatatcagttttattgatgattttacgaaatttacttggatataccttatgcatgatcg

SEQ ID NO: 116118 - DNA, 732 bp, Zea Mays
cgaggacgtggtagagtggatcatgacgccggtatggtcgatgactggcgggacacgtgtcacggacatgggggacgtgcatgcggtgcgctactcacgacgatttggtggtttagtcccaaaaccacccagtgctacagatggagggttttgctgagtttcagccttaaaacttgaaggtgcgttttcgatgggaatcagaggcgacatgtggcgacatcacgaagggtgtatcggggcgaaacaacttcgtgtggagcgtgaggccgtcaaatcataatcccatgagttggtccatttcgcctccgactaagtggataggctctatgtgtctaggggtagtttagactagtgaaataaccctatataaatagatgggtgggcagttgtggacaaccaattttcttgaggctatctgtttgggctttagttgtttgcactctcacattctagtgctctctatgttcacattagttttagcttgagatcaacaaatgttttaaactccacgactatgattttgtattcatcattttgaggaagggtggcctaaccatccacattgttttggtcgaatcatgctcagtttctatgtgctgtagttttttgttcgattttgtctccacgctcgattcctcccttctgtctttggattttggaagaaccattgagttcttgagttgtgtttaacattggggattgttgtgaggtgagatcactacatacacctac

SEQ ID NO: 116119 - DNA, 457 bp, Zea Mays
caaacggccaaggagatttaggactccctcaaaacgacgcacgaaggtgacatgatcacaaagatcacaggaatggagcttgtcgacggagagctcggaaagttcaccatcaacaaaggggaagggccacaatagacatacaactggctcaagacattagtgaaccaaatccacaacctcgggagcaccaaatggatcgaccatgaagtcatttgactcatgctgaggtcccttgtttcatgcaatgctacacttgttactcttttgtgtgaaaaatcctaggtatgaggtgatgaccctcaatgtggtgcttgggaagttccttagacatgagatgatggttaaggattccaagcatgtggaggatttacataaaggcaactcccccacaactgagccgcaagccattgccttaaaggcaataagcgagaaggaggagggagccccaagcaaggag

SEQ ID NO: 116120 - DNA, 476 bp, Zea Mays
caattttgtcaatcggtccacaatgacccagattgaatcatgatgtcgagaggtgttgggcacacccacaatgaaatccatgttgaggtcatcccatttccatgaaggtattgacaggggttgcaaggcaccaactaattttaagtggcttgcctttatcctctgacatgtgtcacattccgacacatattgggctatctccctcttcattctggtccaccaatataggggcttcagatcttggtacatcttggtgcttcctgggtgcatggagaatttggagagatgagcctcatccaagattctcttcttgagatccctatttttaggaaccaccaatctgtcttcaaaccatagtatccttttgttgtcttggcaaaagcacttatacttctccactttctgactaagattctctttgatgatttgcactcccttgtcactgagttgggccataacaatctggtctagcaagg

SEQ ID NO: 116121 - DNA, 716 bp, Zea Mays
tcgatgcttggtccgacatgcttatagggattgtggtttactcagagaattcctacagcaaagcggcaccgttcagaaggggacccgaaccccataaaaggcgaaaggccaggggaatgaggactgctcgcctcactgagaccacctgcttgctgatctttgggggcgcagttactttacctcgagggagcgccaaaaactcaaacgatgtgagatgacgccaggagcattgagcagcgagaacgactcgattcgagacgaagctttggcgcccaagaccggttctatatacctaccctggaacagtttcccagggtgatccaacaagcgaagttatggaagaagggagacctctagcttctccacaccttcttttccgtgtcttttacatttttattatgaatacaaccgcgctaacatacctctttcttttttcccttgtccatgtaactgacacaggacctcagagaaccgaagggacgaaaaggtggtcaagacaccgaccagaacgccctgcctaaggaagccgaacgaacactaggagcgtccaacctgggttgggacagacacagtgagcgccctggagatgcttggcccacaggcctaactgaccagatcgggagacggtcacacaacacgggaagtggcacaaaggaccaaccattaccgagtcgagaccaggtaagataacgcaacccatctttttcaaaactcga

SEQ ID NO: 116122 - DNA, 369 bp, Zea Mays
gaaaaagaagagttgaaggaatatgccatgtcttgcgggtacagaccaggggcgttgctctttgggggagttgacgaagaaagtttaggatgtcttcgagaccgcactagggcgaagattgtcggcactctatcgaagagtgttggccttccgaaggttgaagcagacctcagcaggtaccggcggcagcatatcgccggtagcctattttatacaaactttatggtaaaattcttagctttttattattttgatatgaagattgttttctgatgaagcttattctatcagagcttactactgagcaaagtcctgaggatgcaacaagacctcgaggacaagaaaaacgaagttataattgagggcctg

SEQ ID NO: 116123 - DNA, 833 bp, Zea Mays
agagaatccaggacctcttggtcctgaatatcagaataggacgaacgaaccggcctccccccgtcccttcgcagcggcaatcatcgtggcgcctagggcactgacgacttgatgcgagatgtggatcggctgcaatgggcaatcccaacaatcctcctactcatggccaaatctgtagccggggagcttgcctgaccctgccggttgtgtccgtaacgtggtgtggcggggaggttgagtagagtgccctgaattgctcaatggagctctcttcctctgccgtgaaaccatgcggggccataggcatgggtcccagtgccgtcatctcgggtaagaacctttggcatccattagttttcgcgtccgcatggggtatcttcatccagattaggattttagactgggcgcgacgataggccgctccggcgaggtctaggcctcgcccgccatgtgtggggagcgggaggaggatgatagcgcgtcggccgtccgatcagtggctgacggatggaattagatcgtgtccagtggtgatccggtgcgtctaattgggatcgtgcggttgtgatgagtatgagtaatgcccccttcgaccagattgaatctgaatcgttggatgcgaatcgggcggccagggctgtgtaccggttctagatttaatctggtgcgtcggatcctgatcgagcagcttggggtgcgtgcgcgttctgctgccgaccataattgctaaagggcccctgaagatcatgcgaattaacccgcggtccactgctgtaaacaagtaattgtacttaagtcctggtttttacagatttgaccctgagaaatttcag

SEQ ID NO: 116124 - DNA, 742 bp, Zea Mays
aaaaaaaaatggtccaacactccaaaacatggtctctggctgaccctcgacgacgatcgacgcagtgctctacgtactaccactacactactgtgtccattgctgtacggacgacggaaacttgtggccttaatttgataacacgactacatgtacatcagctagacggacctagctagacgatgcccatcgtcacatgcatgctttggaagctatacctttgcttgtttctgcgtggggtagtagtgtacggcgtacatgccaggccatctcgatcgctgtcacgtgaaatatgaatgcgccaagatagagtttgtgcatatgggagagaatcgtgtatcaatgtcagtcaggtgctagctagcggctaagatagcatgcatatacattatatacattctagttacagattgtaaatgcggtgcatttatttgaggtcagtcagcttcttaagtactaattagtagccgacgatggcgatgaacccgcgcgcgcaatgggagagactgtgtgtgggagctgagacgagaggcgtacgtacgtagagaaagaaggtgggcaacgtgtccatgtccaaaaacttgtgtgcagctagctagctgctgcaacaacacacccaatgaaaaaagatctagagagagaatctgatgctagctgggtatacaaactgaatcttggaaggtccgatgtagctatacgtacgagcgagagagctggtcatgcatgtacgtacgtagataaa

SEQ ID NO: 116125 - DNA, 739 bp, Zea Mays
tcgcagggtccagtaatcccctcgatgcagacgattggcttcgcacgatcaagagaaaactggaagccatcagatgccccgaaaatcagcatgttcaactagctgctcatcagctttcgggaatggctttagcgtggtgggacaccttcagtgaggccgttagagatgctacctgggcagaattcgaaacagccttccgtgagcaccatgtaccccaggggatagttcaactcaaggaggaattctgggagctaactcaaggtgggagaacagtcagtgagtatgtgcacaagttcacagagttggcccgttacgcgcctgacgatgtcagcaccgagtccaggaagatcgcccgttttctgaaaggactaagacccgagcttaagaccatcctcgccagccaagacttcctcaacttttctcacctctccaacaaagccatccaagtggaaagggcaaaagaggaagaaaaagggcacctcaaaaggaaattccaagttctccgagctcaacagcaagaacgtcaccagagagctcgaccctttgggcttccacctaggggaccaagcttcaataaaccatctggacccactccatcgcgctacagtcagcagagtcagagctcccttcaggcaccctccgttgcaagcaaccaaccgccagcaaatgcctgttggcactgcggagaccccagtcacttcaagaataactgcccccagctgaaggcacccggacccac

SEQ ID NO: 116126 - DNA, 321 bp, Zea Mays
ctgaaatctagcttggtgcccatagctttctgaaggctcatccaaaatttggaggtgaactgggttcctctgtctgacactatcgtccttgggatgccatggagtctgactatctctttaagataaatccgtgcaagggtggctcctccaaaggtagttttcactaggatgaagtgggctaccttggttagacggtctattattacccagatagagttgttccctttttgcatccggggtagttcggttacaaaatccatgcctatctcctcccacttccattcgggcactagaaggggttgcaataggcctgcaggcttc

SEQ ID NO: 116127 - DNA, 404 bp, Zea Mays
ctgatctaagccgatgaaagccaacattcgagttaagccctcggcgctacagttatgatcacccgacaaggtaagccctcggcggtagcttgggtggatgggcaaggatgtcgaatgtgtagggatacagtctgctacaaactaggagacaaacaagtagataaccatcatcgtctgtacaggataactctctttggtcgagtatataaggccgcgaggtaccccctaccatttcatctcatcctagccttctacattcagaattctcagcttgtaatcctaacctcaataccagagtcaccataggaagtagggtattacgcaactctacgcgaccctaacctgtataaatctgcgtgtcatcctgtcgtgttataacacgaaccattgagtctcattcatcg

SEQ ID NO: 116128 - DNA, 622 bp, Zea Mays
ctgagcgtcgaaagctttgttggccttagggatgggcgccaccaccaatgtttcagcaggagtagcgtcagaagaatcctcagctaacatatccagcatggcacttatctccgcgtcacttggattcaaaggcacctcaaaatgaacctgcctctcgttgtcaggaatttctccgagtgaggcaaccaaagcactaacttcttcgggagaaggtcgcactctaaggcccaaaccgctatcaccagcaggaggatttgacacgaaactggcaaaggcctgagaaggaggcaaattccaggccgagtatgcaacaggagcgccgatgttcgacaccttgcctctgagtatcatctcgagccggctcaccaagtccacagcaggaattcttctattggttacccgggttgagtcagccaagcctcgatacagataagccggatatgctctgtctttcagtggctgaatgttcttgaaaacaatgtcagcaaccacagcttctgcagtcagacccctttctttcaacaacccaactcctgctaacaaaacccctgcctcagccacttcctggtctgtgggggattcggtccagctcggagtgcgaacatccggctgtctccctgac

SEQ ID NO: 116129 - DNA, 336 bp, Zea Mays
tgacaatagaggtgaagtgctcaaactaggcacgaggggcatgtttgaggccatagagagaatggtgaaaccgacagacatgaccatcagggacaaggtaatcaggggaagggtgcatgtagacttcctcacgcaactcaccatgatgaaaatcattcttcacatcaagttgtgagatagcccaccgacgaacagaggcaacaacaacaagagtatgaacaatggtctgatgtgaaacaggagcaaaggtctcctcatagtcatgcccatactcctgttgtataccacgtgcaacaagtcgtgctttgtagcactcaatggagccatcagagtggg

SEQ ID NO: 116130 - DNA, 271 bp, Zea Mays
taaccagcaaaataaacatttatacagtactagatacatccaataactttcccttgcccaaagtcaacaaatgtcagaatgaaactgtatccatccatacaagagactagatgctatgaagcaattttctgttctcatatcccggcaagcaaataggacagtgctcaaaatggccatatacatttatgcataccaacacaatgtccataaaacgacatataaccgataaaatatttcccccggctttctttgatgtgatggtggatctacc

SEQ ID NO: 116131 - DNA, 498 bp, Zea Mays
gataccgcctgttgggttattggtccatgtatcgtgttggagcccattagaagtgcattcaggggtcttgcatgcccctaacctctatttaatcagcagtcgtcaccaccattagggtttggttttgcttagcatcattctatcatccaacggtgtcgtcgttcataggtttgtgaaaccccaactcataatgaatataattttgattacgttattcatgttcatgcttgtattttttattgtgtttgtagtgataagccttaatagcaaggtcacttgtgtgtcacgggtgaatgagtgataacaaatagagttgtagtatagtgattgtgaggatctattgagtcggagcctcaatgtcgagatcttcatgcgattaaattattgtatctctcggaagatcagactttgccctctatgacccttaatgtcgatatctcaagtccgcgaatgttatcgaggttttgtatgtcaaatgaatctgtgagcttatggatc

SEQ ID NO: 116132 - DNA, 511 bp, Zea Mays
ttaacagaagaaccccactgagtcgtcggatgaggcagacacggagctcaaaattgagatggtataggagtagtcggtgcaggagtaggcgcggccagatactaaggaaaaccctgcataggcacgaactgaggagtcccgggcacataaaactgctgcagagggggtggtactgaaaattgctgctcagcgctagacatcatgttgacagtgccctgagaatatgaagaagtcactggctcccatctaagcttcccattgcgattcctcctacacaccacatccttgtgatcttggctgcagatagagcacctaccactccactgacactcggcacggcgatgtgcttcaccacaacggaaacacacttgccctaggccgggcttaggaacagcccgatacctctaagtacttcctcctaaagtacccgattcaaagggtttgccatggtaggggtggtggcgctggtgctgagacttgcccctcttgtgggctggaaccctagtgttgc

SEQ ID NO: 116133 - DNA, 505 bp, Zea Mays
gggcaagaaagatgatgacagtgatgatgagaagaaggaaaagaaattcttcaagaggaaggaaggcaagcacaagagatttcataaaaaatggaaaatcatatattgttggtgactggctcactgatattgagtgctcaagcgggtcttcttcaagtgaagaagagaatgatgaaaaggttgcctccatggctgggaatttctcttcaccaccaccatcaccttcatccacttcacaccaatgcctcatggctaaaggtgaacggaaggtacaacctaaaaatgatattattgatgattgtgattgtgatgacgagtatgcttctcctacctatgatgaattagctgacttacttaaagaatatactcaaatcattagaaagtcaaaagctaaatgtgacaagttaaaggatgaaaatgagttcttaactgccaagtatgacatagttgttaaagctagtgaagaaatgaaggaagaaattaaaactatgtcatccaccaaaac

SEQ ID NO: 116134 - DNA, 327 bp, Zea Mays
caatgacttcagggaaaacaaaagacgttggctagaacaattgaagagcgtggataaagtatagggaagagcggtggagaggaaaagtgaagagagatttttctcttatttcattcttaacaaaagtaaacatagatattctaggttctgaaattcaattctaaatgatgtataaatatgttgaattaaatgagaccaataacataaatttggaccgctcgatttggtagatgcgcccagaaacagataaattttaccaactatttatacccgaacgtttggaccagggcgatatgcactcagatcgaacgacgactttggctctaa

SEQ ID NO: 116135 - DNA, 411 bp, Zea Mays
caaactcaatggaacaagcattgtcggtggtgaaccgacggacagaaagaagattgtgagtgatgtgtggggctacgagaacgtcgttgaggtagaacggtctagggagcaccgaggcacctactgaggtgactggaagagtggaaccgtttccaacgacgatcgaggtagggtgtgtggaaggaggtgggtgtgagcaagatagcatgccctgtggtggggagtggtgtgataggatgcaccgggagtcgatgacccagttagaggatggtggagccaacaccatgttgctgtaagcggcagcgaaggcggtagggtcccagcctccagcgaacgggggccatggtgtcgtggtagatgtccctgtaggcggaagctgaggcgggaccggggtcgtcaggggcacgccgt

SEQ ID NO: 116136 - DNA, 1005 bp, Zea Mays
caaaatcattacacaactcgagtgggtcaaatcagagttaaaatgagtaggttacggaattttgcaagtttctattcatttttacattaattttataccttcaaatagatcctaggggtctatttagaaagtccatgggtttatttgcaaagtccaaggacactcctataatattcttacacaaaaagaggatggcgggttgatttattaataccccgagggctcatttgcaaaaatgagatcagcgaaggggtatcgttggatatgggccgatagattggttctgggtggcccagattaaatcgattcacacactgaacgagtacacaccaggaacccatagattaattaccaacggcttagattttaagcacctgagattcattccgatccgatcgatcaaatcaaacggtcaggattaccatgccaaaagggtatgctagggatttaatctcatccactggctcgccgatcaatggtcaagtacccatcttcttcatccaagaaaaacacagtggtgcgagcaacccccacgacggaagccaccacgccggcgtttaggtgatccggcaacccaaccctccaacgcacaaacggacaagagctagacgtagtgaggaagtcaacgaagcaagcgagggaacccttaccggacatggtggcagcagtggcctcgcccatgagttcttgccgccagatggcaggttccatgctccggtgagcaattgggtcaaaagcggtggcctacccagtgcaaactcatcaacgggaagagaagcagtttgtttccttcacccaaagcatgaaacaacaacttggtgtcatctcccgctgtgatctggtggaggatcactgaggacggcctggcgaagacggacatgtagagccaaaaggagacggtaaagcctccttccccactggctcgggccgctcttattgggggtcttcatttccgccgaaggtcctcaagacgaaggtgtcattggcaaagagatgttgaggatc

SEQ ID NO: 116137 - DNA, 1137 bp, Zea Mays
caggcaaccacaagtcgtcgataaccaaggccttcgcctcacataaactgaagaattgcgactaaagggagtgttgacacaaagggtctcagggcggaggctacaggtcgaccctgttctgccccggtgctctagagaacatcgccaagggcccatccgttagcgtagcatgcgggtgtgttgtctagtgtatgcggattactgtacggacaagactgtaattactctattacatgagatatccctcgaatatagttggtagctaggggtagggcgtacattagaccagctacccccaaataggcctataaatatctccgtcctatagtgggatgggacaagcataatgagaagctacagttctccgcattttgtttcgttgtgcacttgtgctcacacctgtcacttgagtattagggtccacctgacagcgtagccatgtgttagtgcccaacattttgcacccaccattcatgcgacaaagacaacacccatgatgcctcccaagaaaagcacatgtgctagcccaccaccaaacgatgacgacgctaggactatccttgtcattaagaaagacaaagtagtcctcactgctagatcatcccccaccaactagcccgaaggccactatcgacccactaggcgaggacctcctcgcaaagcaaaagcagacaacagtctccactgcgcaagcaagcgaggtccataccaccagctcagaagactcaggagacctcccgcccaacccaaaaggccaaccttaccatgctaaggtttggcaatacatgacaaggagcttgcctcccacaccaccgggcttcaccgcatagcaggccctcaccacccattcgggatgccatcggaaaacgactacgaagacttataggccaacctagacctcgacatcaactctgaggaccagcagctgctcaaaatccttcgcacgcacaattccaacctccaaaagataatagatgcccttgtggccagacagtagcgcggcgaggcccgaaccagagtgtgtcacctcattcggcaagagaaagaacacctccaggccctcaagcaagaaatctagaacctataggcacaagacccaatgcacctttcacatggccacatgagaatgagcaattt

SEQ ID NO: 116138 - DNA, 604 bp, Zea Mays
cccacggcaggcccggcgactgctactgcaccaactgcctagcgtagttatgccactatctaggacggccggccggccggcggcggagccgcctcgatgtctcgatccccgacagatgatatgatcggagctggcaaaccaccagggacaggaaaacaaaatacttattagtcgagtcatactatttgttatatgtctgcatttttagtgagctactactttggatccgccgtttcttcgtcaattcatggtgtcccttcttcctgatttctcattcatttcctaatattgttctttgatctacaagattctttattcggtgaaatgaattttctactatattaaatcatcagcttcaatggtcctcctacgtcacctttttacaaagaaccccttgtgtttcttcaaaatcaacccgcggtcctagatcatatctcatctatgtcctatttattcgcataacagcgttctagcagctgttgctctagcaacaaatcctgtccatttcgcaacaacttctgcccgcttcttccgccgttgcacattgaattttaagtgaaacaaaccatgcaattggaaatgagtacaaggcttcgtaaaagtg

SEQ ID NO: 116139 - DNA, 341 bp, Zea Mays
tttgcttatttgaatgttgaaacaatttcaaaatggataagaatgtacaatgagcatgttagagatgctaaccactaacaagacagtagaaccagaggcaaacccatctgcttagcaaaactattcagcataattacactattctttctctagatgtaagacatggtgaattatatttgtggtctcaaaaaagtgcagatttccttatatctgtatggcaagttgtatctgatgtcatgtgaatatcactatcactttctgtatttttccaacactataattatgtattattttcccattatttgcattacttttttacgcaattcttttactgccaagtg

SEQ ID NO: 116140 - DNA, 677 bp, Zea Mays
atttactggtcatattgtacatgatgcctgtcggagagtaaactccagctgggtggcagaatgcacccgcctaatcctaagaacagacgcaacctagggttttcctaatgagatagacgaacacaagaacacaagggtctagatttgttcggactgccgaagtgtaataccctacatccactatgtgttgtattgctgaggtcaagatgaacttgggtccgagaggacctgtcctttttgcatcgcatgtgccctcccttttttagtccaaggcggacgtgtacaaaggtgttgagtcttgataggtgggcccaacaaactagtgttaagtaatgtacaccatggagccttaagtgttgtggtagatggagatcttccacctctgccattgtgcagatcttccgacctgacatgcctctgccccatctaccggctcgagtcggctctgaagtggagtctggtatgatgacatatgtaggggttctataactagtgtgcatgatgagctgaaattgttattttctttaaatactttgggctatattgaatttgatgttctatgtaatctaaataatttagaggagaaaatttctttgagtactaattttccatggttatataaacatacatatcatgttattagaagatatagttggaaaggagaatgtatggtacat

SEQ ID NO: 116141 - DNA, 380 bp, Zea Mays
ccgcaattaaaacacccagttgaagatgaagaactaggcaaggcagggaatcgagtgcctggggcacccggctgatttggggtagtgggggtattgttggggcgaataatgattggttgtttgaaagggaatgagggtggacgagaaaaagtgcgattttggcttgaaggcccggatcacaaaccgttgcttcttcgcctggcccctgattaggcctctcaccaccgaatcccttattcttcccagaacttgcgtattttgcttcaacagataaggctgtgctgacagcctttccatatgttaagtcaatacaagcagccattttcctctgtagccgatcacttagtcctcgcataaaacagttcttcttctttaaatca

SEQ ID NO: 116142 - DNA, 474 bp, Zea Mays
gagagattaatcaaatagcaggcggcattagcagcttccgcccacaaaccatgcttatcacataaaccagcattagaaagcatgcaacgaacacgttccagaatagtacgattcattctttcagcaacaccattctgcttgggcgtacctggaacagtcttgtgtctagcaataccatgatcagcacaaagagaattaaactcattattgcaaaattctaatccattgtcggttctcagtttcttgatttttctgccactctgattttccactaaagctttccattgcttgaatgcagtcagagcatcatttttatgcttcagcaaataaacccagactttgcgagagaaatcatcaataaaagtgatcatataatcacaacctccaatagaagaatgaggagcccgaccccaaagatcagaatgaatataatcaagaatgcatttggtgcagtgagtagataaagagaaactg

SEQ ID NO: 116143 - DNA, 282 bp, Zea Mays
cggagatgaagagggaccttctccaccgaagcatttagagaagaccccttcggcaacttcggttggggtaacataattttttgaggtaatgactgcacccttacctttcccaatgctgagtcctctaggatccgatctaacaagcttgttacagccacaaaagaaaattgttgagggaagtgccgatgcagaggcgggtaaagacccttcggcgcctagcagagggaacattcagaagaagcatcgaatgatgaatgtgatgagggccatccttgacacccc

SEQ ID NO: 116144 - DNA, 537 bp, Zea Mays
ttatggtgggcgtccagtacaggcgccgcaacaaggctggtagtcctaattagggggctgaactggcttaggctaagtgggctattagcaaggccctttagcagtagaataaagaggctaaaggctttttaggttaatctgtaataggaggttatttataccttaattggaatgaaatgagaacaaaatttgatcaacatattgttgatcagccgccgccctgccctagttttctcctctcctgctgtcttccccctggctgtgagaaccacgacctcctctcatcgccaaccgctcaaggagcggccacctgccacacacagctacaacctaaggagaagagggcataccaatctggtatcggagatgccgggcaacgatgacaacactgccagcgaagtcgcatctgctgcggcgccaaacaccaccagcgcagccctggagcagaagctggacaccatgacgaaggcccttgcagatctcgccaccagggtgttcaatctggcgctacatgtgacagaaatcgatgggcgcacg

SEQ ID NO: 116145 - DNA, 493 bp, Zea Mays
gtcgaaatgcgttgtagtagtgattgcgttaagttgaacggaagtgtctcgagtacacgccgcaacatggttgtattcatgacaaggaggtgtaggttttactcaattagaagtttggttgatgtggctaggaaattgtttcggcttgggtagtgaagtggtgacgtgaccaagtagtcaccccccggttatgagtctagtctagatgtgttatgccttcactgtgatacccatcacatatgctaactggatgtatatgaaaaatgaaatagacacatcatatgatttagtggtgctgggattatgttctaagtacattatatatgtgtgatgaatgttgggcttgaggattgtcattcgggcaaaggtgtaatagacttgtatgcgtagtatgattaagctagtaatacaaaatactctgtttagttcctctagcacttcgtcggtaagaataattagcgtcgttgtatgagagcataaatatcttgtctca

SEQ ID NO: 116146 - DNA, 517 bp, Zea Mays
gtccacagcgcaggtatgcgggggtgcctttgggtcgtccgagagagactggagggcggcgggttgaggattttgaaggagggcatcttccaataccacgtatgccatttcctaaatttgaaggggcggaacctcgtatctggattgatcagtgtgtggattatttcactttgtatcgagtgcctgagtcagtttgggtgatgtccgcatcgttgaacatggaggggaatgctaagaggtggtttcagatttttaaaattcagtatgggccatgttcatgggaggaattttgtgaagcagtgatgctgaagtttgggtcggaggagtattcacaggctatgcagtccttactggagattaggcagattggatctgtggaggagtacaaaaaggtgtttgatgaggcgcggtatgcaacttctgtccataatcatgatttagatgagactttgtatgtggcccatttcattaaagggctgaagcaagagctacaaggaccggttaagtctcatttgcc

SEQ ID NO: 116147 - DNA, 364 bp, Zea Mays
tatctctccgcgatcgactccctccaccagatcactcgagcacatctggttcagtagtgcctcagatcttatccgcgttcttcagatatttacagtgctttgatcttcagcgttttactgaaccgaccacctatcatccccactttctcatgattcttgttaagaacagggtaacctcccttaataaaatttgttccccaaacaacagtctttaagtttgttatagggttcatggatcaattctgtatagattctcagatttggtgctctcaaagtgactgcatttcactgggaccatacttttctgaatccagtgttcagaactgcccaattggcttctgacagcgcaacttcacacttattt

SEQ ID NO: 116148 - DNA, 488 bp, Zea Mays
gaaatgaggaaccaacttgtaaggccatcaagaagctagcagttggtgaaatgaggccataagaaaaagatgatgatgagataaatatttggatgagaaatgaagttgtagatgggagtacaagggtggtgggtgatcaatcctcaatccaagtaaacccatcaacttcaagtcatccaaatcaaaaggaacccatccaaacacaagggatgccatgtgtgggtgattatgaagaagtggtggatggtggagcctcacaagaacaagagatgatgggccaattcaacatcaacctttaatgtcatatcctcttgtggtgatcaaccacaagggactttggttcttacttccccagcagaccacaatttcctttttgtggtgatcgctttccttctggccggggatgggtggtgtttttcctaacaatttttatgggcagatgccacaacactagaattattctcagtatcctaacctaagtactgtac

SEQ ID NO: 116149 - DNA, 777 bp, Zea Mays
ggccgagtcatccgaaatcccatcgttgccttaggaatgccggccgagttacgatgagccgtgtcggtgtttttagaggtaatcagccgagtgattaatggcaacatcggcgttttagcggtaacagccgagtaattgacggcaatgccgacattttagaggtaatagccgagtgattgacggcacatcggcgttttagaggtaacggccgagtgacttattgtgatgtcggcgttttagaggtaacatccgagtaattgacggcaatgccgacattttagaggtaatagccgagtgattgacggcacatcgacgttttagaggtaacggccgagtgacttattgtgatgtcgacgttttagaggtaacagtcgagtgattgatggtgatgtcggtgttttagaggtaacagtcgagttagaatgggtcgcgttggccgttttggaaataatagccgagggatgacatggcatgccagcttttttaggaatagcggctgagtgatgacatggcaagccagcattttctaaaaataagcgtcgagtgatgactgggtgctttctggaaatggtatctagcccaggaaaaccccatatgtacttcattgtagcgcgcctctgctttctgtgccctagttcttgcttttctgcatctaggctttctttgcgcccgtgcgatattgcttccgttccgctcgccagcaagatagagatggcgcccaagcggaaagcatcaagttcatccgttgttgttattcccccccatcgatcctaacag

SEQ ID NO: 116150 - DNA, 402 bp, Zea Mays
cattaccatcctggcaaagccaatgttgtggcggatgccttaagcaggaaagcccagtgcaattgtatgagcatggatgcaagagtcaccaccctgtgtgatgagttgtgcaaactgaacctggaagttgtttcttcaggtgctttaaattatatctcggtggagcccacattacaagagcaaatagtcagggcacagattgaagacaagggtgttcaggtcattaaggaaatgatcaagcagaaggcagaaaaatacaaatgcttccggcaggacagcaaaagaatcctatggtttggagatcaattggttgttcccaaggaccctgagctcagaaagaagatattggatgaggctcacctttcaaaattctccatgcacccgggcagcaataagatgtat

SEQ ID NO: 116151 - DNA, 464 bp, Zea Mays
cacatccgagcaaaagccgcctaagggtgcagccggacatgcacaataagtgtgcgacatcaccctaagggtacaaagtatttactataagacacatccgagcaaaagccgcctaagggtgcaacgagacattcacaataagtgcgcgatatcaccctaagggtacgaagtttttactataagacacgtccgagcaaaagccgcctaagggtgcagccggacacgcacaataagtgtgcgacatcaccccaagggtgcaaactctttactataagacacgtccgagcaaaagccacctaagggtgcagccgaacacgcacaataagtgcgcgacatgaccccaagggtgtgaagtctgtactatcagacacgactaaacaaaatgctgcctaagggcgcaactaggtacgcgccagaagcgttcgacgtcgcccgcgggaagcgagggccccatcacacctaag

SEQ ID NO: 116152 - DNA, 427 bp, Zea Mays
aactaatgagtattaatgactaaacctttgtacaaagtcctgttacaacatctagatgccagcaaaaatatgtcttagggaataaccctctgttaaaaaggagttgtagttcaaaacaccccctttgccctaagatttgataattttatccagagagaaccactcactttttaagccccaaattttaagatagagaattatacactaataagaagccactgtaatttttacagaatttttggaaattaattaatataacttgtagttcaaacccaccttaaaagcatgagagaagtaggaggaaagagaggaaggataaacctcgctccaataagttcaactagaaatcttgataaattctcactaagacattaaaggaattcagtagaacaccaaaatagacttaccacttagtttaactaagctt

SEQ ID NO: 116153 - DNA, 372 bp, Zea Mays
cgggcaccgagcacctttccctcacacatcccctagagccgtgagcaagaatctcggtgtcatgtgagagcagaaggatgactacgaatgggcagaccgacgcgatgtattccagtcacgccatcgttcgggccccaacaacaggagacataggctttacgggatcaagggaatcgtatgcatggacttgttgcgcaggcagagacaacagagccacgatgaatttctcgtcggcaatgtgagccaccacggtgctgctcggtggcggggactgcgcgcttcgtatcacggtaaaagttctttcctaggtttgcattttcctcctctaggcgtaggaccattcgaatcttgaaccttggcacccaggcctcg

SEQ ID NO: 116154 - DNA, 593 bp, Zea Mays
caactggtcaatgaatactcatgcggcaatgtaaaatcaatctaatagcatgaatcataaagacaaatatagattgaaactacaaatgtaactagcggatatttctaacaacaacgcttagtacaatatctatcagggtaaggtggtgacaccatgccaccttgacacgatcaagaccacatcagggcaacatggcgttaccttgtaaaactcttgggaaggggtggcgatgcaccgagaggatgagagtcacttgctgcttggtgaatgaatgactttctatttattcatgtttgtatcagttttaatatatagccttgtgggcctgaagtgataaacacttcctaacttacattaccatctaatctgttacttatttttgatataatggtatatttctatatcacacacttattttttcttgtgatcagatacttcttttgtggagccattcggtcagaacaatatcctagacccagctaggattaggtgccaacacatgccccctatttttggtagaatcttttatgtcgaaactaaatcttcgccttgtggaagattaacacctctgttagcagtcaagtcatgtcaac

SEQ ID NO: 116155 - DNA, 567 bp, Zea Mays
ctttctctaatttgtttccttttttatcgtttgtgccttcgtggtgtcgatgtgcccattgcgtgtgccggctctcagcatgattgctttgttttgatgtctacttgttaaactagtgcccatttttgggttatttcgtaaagcaacaactcgatgtcacgtgatgtcgtccgcgtcgacaagaaaaaggcagagacctgatctggtttggtttttatttgaagagaaattcaatttgaatgaatgtggacaaagatgtggtctgtctttttttcctgaagaactcgatttgtacatcgaattcgaagatgtggtctgtctttttcatgaagaactgataataccgaagttgctagttttctggtagtatggagtagtccgtgcccagtactgccgagttcagtatttgttggttttttacttgcatcgctaaaatcaggcctgtttttttttcttccaaaaaaggggtcctggaaggctaaaagaagacggtgtttagaacagaaatcttgatatcagttgcgaacactgagattagaagctagtttaaggaccaacaggctcctt

SEQ ID NO: 116156 - DNA, 473 bp, Zea Mays
gcctgttctcagacatctgtaggaatcacacatatcagatctaactctgtagtctttcagcataagaaaagatgtatagaagatcttcacagaactgaacaattgaccaacttcactaacagcttctcagataaagacgaaagtagagacaaatgggttacccaactaaataactaactttattaataactacaccaagttgtaggggatacccacaccttggtgacaatcattacaaagatccaacttcagtacatgtccatcataacaagcatccaacaaaagataagcaaactaactctgactaagactggctagactaagacactgaactaagaattattacagactccgactctatcgatctagggattcaaatctatccgggtcctgcagtctggggtaccatagtcgaagcgaccacggggcggtgaacggtaagggtgctgaatcccgataggggcgggaggacc

SEQ ID NO: 116157 - DNA, 565 bp, Zea Mays
agatgatgtcgaagtgtacgagttggggttcattggtagcggtggcgaggaagtcgggagagccgaacatgatgtgacttcatagagcgaagctctcactgccggtgaacgctgaaatgtgagccatcaaagtggaagatgtcactaggcatgctaatgatccctacctggtgcgccaactatcgtggtttcagaaaccatgggatagtaagatttgtgttcgaagcggatgctagtgtggactcgctccaaatggtgagccactgggacttaagcaatggattcaagatggtgggttatactggtttaggcttgcgccctagtctagtgtagtgttgatcgtagtattgttgagggcgtgttacaactagtgtgctcatgtgttgttcgaaggaaggacatctcccttttatatctcaagagagaagccttacagtgggatcccttcctcgctgaggagagagagtgtgtcatatccaccagggtcaacaaactggttcccatttcttgtttgtggccatacccctgatatggcgttgtccctcatgacggttcctgtagcgag

SEQ ID NO: 116158 - DNA, 414 bp, Zea Mays
agctaatccaaaatttatttagatcttaactagtctaatctagtcatatccaacctaatctagattttatctaatctattatgatctaatctagagtaagttacttaatgctggtacaaaagataagaccatacccctcatgcacttaaaactaaactagtgccttaaaccaactcagccacatgcatgagatctgatccaactaatagagtcatgaagaattgcataatgtgtctatccccacctaacatcaaacaaacttttacctacatcatgtagtctatttcatccatatctatcttaaccatattcctcaccccgatgatatacactaaccttcaatcaataagaccaagactgaagaagaaaagatcaacctcgtcaaggaaggagagaagtcaaactcaaccttcc

SEQ ID NO: 116159 - DNA, 282 bp, Zea Mays
tgcgggtgcagcttaagtcgcatagattttgggttttcagctgaaaatcacgtgtcccatgccagttgcgcccgtgcgtggggttttagcacggttcaattgagctgtttcaacaaaaccttattattgcgctcgtttcttgtacttgcagttttttcttcgtgcctgtgttttccgattagagttactttgttccacgtttagttatacttgattatcctgcggacaacctgatattgtttccttgccactgtcatcccaatgtgctgttgataaacgaac

SEQ ID NO: 116160 - DNA, 653 bp, Zea Mays
acgggaacagggagacacaccacgggagttgggaggatggagaggaacgtcgtgcttccaggggagcaccaagcagatccgacgccgagaaccacaacgcaaaatccaaactgggcaaaggcgtgtgaccggatggtgaagcagaggatggagggaatgaggcgtgtgtgtggctagatcgagagtggaggttggaggggacgaggcaggggcatgcagctgaatcgctagtagatggagtggaggcgaggcagaagacgaccatcgaaatttcctgtggagagcactcaaactatagggctgacactttctaggtccaaatatgctattcatgaggttgggccctaaaatgtttagatgaatttcattgaaatcaggccctattgaagctgtcttttattgtttaggctctatctttcaaattgtttatgtgtttagggctcctattggagttgctcttagtagtgccgaaggaaaacatgcaattgcagatcagagagctatttttttgagctatttccagtttagtacaggtgggatgggctttcagaaagaggttcatgctgaagctttgtttcaatgtgcacatagctgaatcacacacctgggctttcagaagagttccatgctaaagcacttcgtttcaatgtgca

SEQ ID NO: 116161 - DNA, 525 bp, Zea Mays
ataataaattgtggtgttataaactgtaattttgagaaatagagttcccaaaccgacccaaagttgtcaagttgagcccgggaaagcagtgaccagtacaaatagtagggaggggtgggatgacctggcaacgatgatattagcatatgacagtgtagaagaaaatcaattagttgggatttgggaaggaagaagtgtgctaaggacgggatggtgatgacaatggtatccatgaccaacgatgcatcgctgcggcttttaagtcagctatttaaactgctgtaggtgtactttataggataatactgaaaaaaaagtagaagctgtttcggaataagacgcagcgaacaacataggggaaacgtagctgaagtaacggatagaggctgtgtgaattgtgttgacgggccaggaggaaacgcacaggcatactccctacgtgttggcaatataatggatcttgagttgtaccttgtttacttgtagtatttctttgctgcagttgatcttagtactctttatccg

SEQ ID NO: 116162 - DNA, 719 bp, Zea Mays
tgtactgtgtgcttgatggttcataagtacacaccggtgatgtggccgagcggcaatcaccagcgtgctcaccgttcaccgtgaggacgccacgccttaggaagtttatcgcgtcggtatgagccgtattgaccatccaatgaccgttgtagttcagtcactctgcgattgccatggtagatcgccgccgtgactcattcccctctcggccgctagcgcaattcatccaaaattggaggccaccgctcaagcacactataaatttgagcacaccgacgggtccgtagggtagtcaagcaccaagccacaagtcgtgcctccaattgctcaccagagctcgccaattccagatttccccaaatctgctttccgccaccggggaagaggcttcgttgtggctagctcgtcttaggtccgctcatgccctctgctctttagttttagtgttcttgtgtgtcccagatgctcctcgaccccgccaattaggctaggaccccttagatcgctgagaacacgtcgtgctgtccgttgtgcccgctgtcaccgtggacagagcgagttagagctccgttagtgaaattaattgaggggaaactcttgttaggacttgaattaggtctcagccgaagtagagcaccggtcatcgtgtgtcctggccagtgcaagctcgccggagctcggttctccaccgtgcggcgtcgtggaccgcgggttgtaaa

SEQ ID NO: 116163 - DNA, 632 bp, Zea Mays
gcgagatggcgagcgcgcaagtcataggggcacatatgggggttgcatatacactgctaggtagagtccgtgaggcagaacgatggtcggttccgtcccaggattcccggcgtccgcttcggtaatccagttcatgcgcacggcaggtttggagaggaagacgggaacaccgctgaccatgcaaggatacgagcgcgtgaggagggtgagtttgcagccgcgagagactcgggggttgttacggtgcctgaccatgcgcctggtatgcacggcggggaagaggaacaggacgataaactcgaaatgcccatacctagtgctaaaagctgtcttctcaatatcctcctcgcaaatcctcaactgatgctacccagagttcaagtcaattttagagaacacctgggcacccctcaactgttcaaagagaacatcaatacgaggtagcggatatttattcttgattgtcacttgatttaaagcacgataatccacacataacctcttgcttttatccttcttgtcaacaaacaataccgggaaagcccatggtgacctgctaggcctagtgaaacccttagccagcagatcatccaattgtcgcttcaattcaacctgctcctttggagccatcc

SEQ ID NO: 116164 - DNA, 436 bp, Zea Mays
caaagtctccacccacgtaccagaaaggataggacgacacacctagtgcatgctcgtacatactagagggagtaagggcattgacagaagatgaagtcgtattgaacacgaatctcaaccttatcgagagcacgttctacgggacccattaggtacgacagcacgggcgtagaacgagctacagggacttgcacgccagacggacgagacagaacgtcgtgccaagtgtatggtagcacacgactcgtcagaaggagccatgccgcacgcaggcacgccccaagactgatccaagaggggcccagcgcacactacaatatagggcattaatcgaagaactctctctctcatgtaaggaccatcccttgaagtataaaagggagtcccctcccctcgtacaagcacacaagcacacctaatgtaacacatcttaaag

SEQ ID NO: 116165 - DNA, 656 bp, Zea Mays
gttccttctccagctttgtctgctctcgttggtctgcaggaattgtctctagcgaattttgatcagactcttgaagacatggtccctgaagatctgttgtccgagcccatagatggtggaatgatggaagtttgcgctgatgtgcctgatgccgggttagagttatcccgagcagcatctcgtgcctcgtcgaccttgaagcgcggtcttaagagtcgagaggctgatctggattgctccgttcccatggaagtggttaaaagtccttcagccttataggtggctgttacagagaactcggtccccaaggatgatgtttgcgtttacccagcccccgagggtgttgccagtgatgatctggctcgagtgggcagcgcgagctatgacccagcctccgagggtgtccgagcgggttctctttctcatgcttccatggacgttcatgtcgggtcttctcctccacattctggttgcatggcagcagcacgggcttcgggtcaggaggtcgccttagaggccgacacgcctgatgacaggattttgatttctgctggtgacgctgaattggtccctactgatgctctttagattgcttcggttggtaatccttcatcaagtcaccaactgaattcccatgatttgggggttccttcgtt

SEQ ID NO: 116166 - DNA, 914 bp, Zea Mays
accaaacttattacaatatgacttataaatctagagtagcctggtgatagatcctggttcttcatagtgaatcctcttgcggggtggggacacaactatggtagggacttgggcttcgggtggatttcttccttcgagttgagctttgagggctgcaatcatggcatgtgcttcttcaagttctccatgtacccttgagacatctagggtagtgttgtccaggtcagtgttaagacctgccaccacaccaacatgggtgttgaggcgatattctccagcttcacctgaaacgacactagtttggatttctccacgaaaacgtagaggaagatgtttgtacatcgtatcgtgcagctgttgtcgataaggctgagagaccacagagctcttctagcagcattattgaccgaagtagcataggtagacagtggcgttagagactcatgggtagatagagtccgaaaacctctgtctcttgcatccatcaccatgatatgcacgcgagtgatgtagtaacaagcccggggaggctcggacactcggcttgtgtcatatagaggtcggatgtaggttcccagcgcatgcagtacatcctatagcaggtttgggaagtgtcccgtctcaaacattgaagtgtaatgctcggtgatagaccatatcccaacgaagttgtcctcctgctcatcgttggcttcttcattgttgatttcctatttttcttcttcttcatcatcatcctctccaccatcactagaatcatccggatcgtcgcctccgggagtaggggcttgggctactggtgttggtggtgtcaaagatgaagctccaactgcaaaggcttgtgactctaacaacaggttgggtgtcaccaaaatctcctctaagttgtcctctagaataactccattctccac

SEQ ID NO: 116167 - DNA, 414 bp, Zea Mays
cgacattggagaccttgaagatgggaggccactggatggctcgtagacatggagtaagcgtggaaactttgcacgtgtcctcggtcccggggaggggagtcggttgtaggttgtctcgaccatccccggaatggcccactagtcgaggttaccgccgactcaactcgggtggcacgactccgtgctggtatgtcgtgatcccggtcgtattcctcccgatgccttatctcattttcgtgccgtcagttgcgtgaagcgttgatggagctccgcgcatctcgccagctattgatagcgtgacacaggtcgttcgcaggatgagcgaggggtagaaggtgattagctgcctgagtaagcatccgccggtagccttccgcatctagggttcacgggagaccgtcagctatctgtgcc

SEQ ID NO: 116168 - DNA, 611 bp, Zea Mays
gttgctctcagctgccatgccatccagccagagtgaaatagatgttgtctactgggcaccagtatgctagctagttagcatcagtgtttagtgaaaagatatttaaccttagacaaagcgtagaaaatgtttatgataccagtctattctcaggggggaaaaagcaacgaaattgccgacagaaggaacaaaagcaccaaaactggccctcctggtcccatcataagttagagaagagcacacaggtacacaccaaaatcaaaaacacctacgtctccatccattcctacggccagtagtctctggttaaaagatgcttacagctcatgaactgctgacatgagttaacgtgatcctgacttgacgagagagcgtcgttgttctagctccttttcacgccgaacgacgacactaccggagtgtggagcgtactgctcccctactgtcctacaacaacatagaagctggaatgtgcccggcagcctttcctccctctagctcccatgcatgctccatgaagctagcccgtccgtccgctgctgaatactgaagcagcttggcaaatccagttccccggccccctactccatgagtggcaatgatcacctccc

SEQ ID NO: 116169 - DNA, 362 bp, Zea Mays
tctcgatccatgacatctaagttttgaagcaagtagatcaccgagaaccttaattattttgggcgtcgagatcaagatatctaacccaccacccagtggatggcaaaaaataataatatatccgtttagataatggaatgtaaatatccaatcctcggtatcatgagatgtttacatgttattggctccacaggtcaccgttagcgaaagcaaaagagtgtgttgaccctgacatgaattctagattatacatcagtaataactagtacacatacgatttcaatcaatcgttatagcagcgagataaaactatccgagagctaggatccgttaggccaacgttgtacccattcttattcttc

SEQ ID NO: 116170 - DNA, 722 bp, Zea Mays
cccgtcaaaaaaaaactctgctaccatacatgttttgagggaagttttgagcccctttggtttgaattaaataccaacccaagtacttcacatagttgagcaaaccatacaactttaacaacggaatgcagtgcactactaatttggcaaaataagtgtacagacccacaactatacatctttgtttccccaaagcccaatctcccagatcctgctttctaatttactgcagaacagagaaattgcaaattgtcggcaatgcggtcaaaacaacaagcctataacatctacaagaattaagggccatctatgttgcagaaacaatttttactaaaccatggaaattttacaacggacgacgtcatgattaccaattataaaaggaaaccagtttgcagatccacagttaaacaattatacattgcccgcctcaaatttcatagatgcaacgcataaaaacgataggcagacaacccattaagtaggcagactagcagaaacgcaaattcacccatgaaccggtcaaaagtcaacagactgcaccccaaatggcaaagctaagaagaaaagcattgccgcctatggaaaaaaatgcacgctcgtcccaaattgtaccgaattccatgcttttgctcttctccccgcacgacgggtcaactccctaggcccacgaccctctggacctctacactctcatcgattcagagtccacccatcagctc

SEQ ID NO: 116171 - DNA, 450 bp, Zea Mays
ctgcatagccctttgtcttgcctgggcctgcatacttggcttcaactgccagcgttgtgctgacagccctgctgtaggagaggtcgaggcaagtagccatcttctgttgtagccagtcattaaggccctcataaaacagttcttcgttttcaggtcagtgttgacctggtcaattgcgtactgggacaaatgattgaacttgttgagatactgtgtaatagtatctccaccttgtttgagtttcatgaattcttcttgcttcatatggagcactccttctggaatgtagtactcccgaaatgctaatttaaattcgtcccaggtgacttgatggtcggcaggctgaatggccacataatttccccaccaggtgctggcagagcctcttaactgctgagccgcaaataatggcttctgggtctccgtgcatcggataagtccaaacttctg

SEQ ID NO: 116172 - DNA, 454 bp, Zea Mays
ttgaaacgtcacaggtgcccccgtaagcccaaacgacattactcaaaactcataatgtccatgatgagtttggaaggctatcttatgctggtcttgaggagccattcgaatttggtgaaacccagctcgtaaatccagagttgaaaaccaagcagacccatgcaactcatcaaggaactcatcactgactagaacaggaaatctggttttgactgtgagggcgttaaggtgacgataatccacacaaaacatgtaagtgttgtccttcttcttgactagaatcactaaagaagagaactcactttggcttggctgaataatactagcacccaacatctctgtcacttgcttttcgatctcagacttcaatgcaggagcatacctataaggtggcatatgaaaaggttgtgcacctagcaacaatgcaatatggtgatcacaatccctggtgggc

SEQ ID NO: 116173 - DNA, 274 bp, Zea Mays
gcgggagaaagaagcgacgccacagatgactctgccttagcatccaacagcccacaacccttttccgacatccacgcaccgaagatcaacctttggcaacattttttgggatattacactctaccccccttaaaaagaattcgtcctcgaattcgttcactccaaacaaaacatccaaggtaccccatattgcaccaccattccaaaacatgggtccattattggtcttaattaacacaagaacttctacctcggactaaatgtctaaggaaac

SEQ ID NO: 116174 - DNA, 562 bp, Zea Mays
ggtctagggattaatcatccggaataaccatccgatcttctagtaagcatagtaagtgtatggttcacgacttcatcatccagaataaccatcagattttccggtgtgcactgaaagcaaatgatccgcggttttggtaggtgaaacgttgttaggtgaatgcggatgttggctgttgttgcacgtgcgaactgttgtgtggaagctgctgggtcctcctctattgtgcgtggcttgtggcgggcttggactactctcatggcttcggcgcttggaactgctcgtctgtccggtcctgcgtgcatctctctctcctggctggaggtgtggtggcctggcggcttctctgtgtttttctttttatgatgacttctcgtgttggctagggttggcgttaggggctcggtcagttatgctccctcagcttttataggcagcgcaccatagcaggcagagcagagataaagattccaattgcatccatctacaaacaaggctctcggcggaagggataaaagcatgcatcgcaattactgctgctctgctgcaaccttggctctcg

SEQ ID NO: 116175 - DNA, 288 bp, Zea Mays
tgatctggaccggttggggatcgctttgtgttatgtcggcaccgctagcaaggagactcagatgcttcttcaatcctctctcatggagagagtgcgtgcggctcagcagcaggatcgtctattgcaggaagctcgaaagagggtgggtgatggtaaaccgcgggagttcaccattgatgagaatgatttggttcatttcaggagccgcctctgtgtgcctcagaaatcagagctgaagatggatatcttgagagaagctcataaaacgccttacaccgtccatcctgg

SEQ ID NO: 116176 - DNA, 460 bp, Zea Mays
gcgcctagcactttcatgagattgatgaacgaggttttacgtgctttcattagtaaatttgtggtggtatatttcgatgatattcttatctgtagtaagtctcatgatgatcatattgaacacttacgtgttgtttttgatgttttgcgtgatgcacgtttatttggtaacctttagaagtgcaccttcagcaccgatcgtgtgtattttcttggatatgttgtgacatcgcagggcattgagatggatgaggaaaaaaatgttgccatcacgagctggccacttctgaccacggtcacgcaggttcgaagttttcttggtcttgcaggattctacaagcgatttgtgcgggatttcagcaccattgcagcacctctccatgagttgacaaagaatggagtgccgtttcgtgggggaccagcacaaaaacaagcttttgatgccctcaagtcgaagctca

SEQ ID NO: 116177 - DNA, 735 bp, Zea Mays
gcgtgatgatcttgcggagctgacggcgggctcaatttatagaacccgcgagcggtggccgggaatttgagcgtcgacgcgtggcggccgagaaaacaaggagctacttgcgcagtggattggtgtccggttaccgtggcaatctctccggcgatcaacggagagctaaagcaagtcatggcgatgcggtggagatactcaggcatgtggcaccaggccggaaggcggcggtcactggcgtgcttatcgggttccaccgcgatgagctctgtacagtggtcggatttgtttaccggccggacttatccacgacgatgatatttgtgtgaccctgagcgctatccaaacaatccgagcacgaatcacaatggcagaagcgtgaatccgtgcgtggcggtcgtgggcggtgaggttcactgaacctgatccgatcggttactgtaccatgttgagcttgattcagacagctgaccgagcgatttgcagggagatttgctccccgttttaagtagtaacatgatcatctctcttgagcaaagttatagcccaatgatctagctaccatcttgtcatagaaacccaagccaaattctcattagatcatgcttataatcgggccctaacttcatgccaccccactgtcaagccaaaattcagttttcagatagcctgacagcccatctttgggtgtagttatctccagattcttcataacaaccatgcttacactcttaa

SEQ ID NO: 116178 - DNA, 349 bp, Zea Mays
catcacgagattaataggtgatgcatgttgcgccaccttttgagccattttatttggtcgttttgttttagcgggtgatcggggtttctttgttggccgatcgtgtagaacgacctccttgctaccatatttggagagcaattgatcaaaagtagggccaactttgaccaaccgaccatgtatgttatgtttgatttgccactgtgttcccttttttctttgtgtgaaggctgacacccctaggtatggaaggactgtccggctgagtcacccgtctatttgagcaccggaccgtccacgcgcaggtgttggtccgtccatgatgctcgagtcaggggctcatgttggc

SEQ ID NO: 116179 - DNA, 1318 bp, Zea Mays
cgctcagtcagtaggggggccgcttctctgtctggacgtgctcaggtgtggcgtccggtctccagggagtcctcttcggtggcgactcctcccggtgcgatggaggcagtcctttctagtgggctgaagaagcgcactcgtcgaggacagaggaggaggaaggttgctggtgttgtttctggtcaggtggcatctgatcattcgcctggagggcctgctcgtattgtgaagttccttcgtcgctccagggagccctatttaataagtcaaccttccagttaggtaatctgtcagcaatcttatccaccaggggccagagttgttggttggataatctatgaagggatagaggaaggcccagatatttgcaggggaaggaggcaatatcacaaggtaacatatgctggacgtccaagatagtctcctcagagcaccttatagggtaaatattggatttatgagtattgttatgaagcccagaggcatctccaaagagttcaagaatatccagagtaatggagatatccgactgaatggggtgcaggaacaagactacatcatctgcataaattgaaattctgtgaagatttttccccaaataaagttgttgaagtaaaccagcctcctcagccctggagaaaaggacccctagaacatcctgcttcgacgaggagcagccaaccctaaggatgtcactttcctccgactgggctttggaattgggagaatttcagatggccttttactgattttgttgaagaagtccacccttcttgcttcgtcttgtgcctggtcacttagggacatatcatctgaagcaaggaccataggtccaagaccaggttcaggcagggccagcattggtggctcagcacctggaactaaattggaaaccagagcatccaccatccaagttgtcgagttcctttggttgtcaggcatctgtcctgtcattgccttcctacgtgagtagacctttagattgtgtgaaacaggaggtgggacgtcgcaaattcctgtctcaggctactcagaagtaggctgaggcgagacaggcacatgcagggtcctctcaagccatccaacttccaaatggggcgagacaggcactaggggcgtcgtctctggcgacccaggtgtatgctggggcgagacgtgtgtcagctgggccaactcaggcgactcatccagaaattgggtcaagggttcttccgtgcaaaacaaatggggcgaaccctgccctgccgttcccagcagcccagtcagcaaaggctggggcgagaacagcctgggtgggtccagcggcccatcgaattcc

SEQ ID NO: 116180 - DNA, 582 bp, Zea Mays
gggtgcagctggatcagcacaacaagcacattctaatagatagcgcgaataacaaaaggcacaacttatttcaaatacgagataaacaataagcacagagcgaccgttcaatacaagatattctgttctgcgcacaagttcccatagtcgtcctttgggcaagggggcgagggcagcgttacttgaattcaccaaagaatggccatgtcaacacaaacccttacataggctccaccttcaggatcaggctagcctcccggaaattgaacaacattagtttaggctcctcgccgtcaaaaagagtccacaaatctctctctttgaaacactacctggtcgttggagcaaggataatccggcaagtaccctcctccaactgcattccttctcatggatgatacctctgcattcccatacagcgacgccttagagggactccaattccttgcgaagggtcgccaattattcccaaacttcgtttcgacactccgatccttctcttgccccgcagcgcattcgggccaaccctagacaaagactctgccacagtgggggcaaccctaggcgaagactccgcaacag

SEQ ID NO: 116181 - DNA, 654 bp, Zea Mays
tttattgcatctatgacttgctttgggcttcattgcatgttgtttcatgcttgttgtcagattatgtagcttccttagaccattagtccgaggtagaagttcttgtgttgattaataccaataatggacccatgttttgaatggtggtgctatttggggtatcttggatgttttgctgggagtggtcgaattcgaggacgaattctttttaagaggggtagagtgtaatatcccaaaaaaatgttgaccaaaagttgatcttcggtgcgtggatgtgggaaaatggttgtgggccgttagaagttcggagtccgcagatgtgaagatctcatttaaacgatatcatttgagtattcatttgtctgaatcggggcatggatgggagatttggttgtgagccgtcggtttcacatcaagggcatcgggggcatcgctccctcctcttctcaaaaaccctagccgcccctccccttccctcatagcagcagccgtcccccatcctttcctcatatttgcagcagccgccccacttcttccccattgcagccgctcctctcctccccaaggtgctgcacccacgtccctctaaaccctagccgccccctggttcctcctttggtgtgctgcattctccattggtggattggtgggagg

SEQ ID NO: 116182 - DNA, 390 bp, Zea Mays
caagaatgttcttaaccgataactaattcgacttaccttttgacagtacacctagagctattccccaaccagatctacccgcgtaaagccgatcgaattttatttaaaagatgtactagcaattgtttagtaactgagggaacatgatgctcaggatcagtcgatcagatcttggtttcagccagtcctgagaaatgccatactgtcagagaactaacggaaggaacttagctgccaaaggacttgcgcctcagtctaagaaggtacagcagggtttatcctaatcaagtccggctcagacttaaccatgtgctccctgactccgtcttgtccactggctggccggcccctcgatgggatctgaatccaaatcaaccccatgccatattc

SEQ ID NO: 116183 - DNA, 551 bp, Zea Mays
gagattagtaggaaagggatgtagaaagtcaaacgtttggttgtagtttagcttcgagttttcccaagtggttttaatcacatatgttttctattttccttaagtccttaaataaggtatgggttaggaaaccctgggtatattatgtttatctattaggcagaagtagagaaggtgggtgtaagaaggattagggcaaggagtttccattccggatggtggacttgattcatctagtgatccagcttagctctttgaagacttgagttggtgcttattcttccttgatgaagttggtcatcttcaatctttaatcttggagttgccctctgcgctagggacatatgactaagatagttgtgagtaggataaactacattaagtaggtcaagatctggtttgagtttaggttgtaatggatggtcatcatgaacacgttggttaagtcgtttgctcatggatgtgttggtgtaaggaatcaatttaggttaaacatgttttataggagtggggtctaatctattttaccaggattaactgaactatttatg

SEQ ID NO: 116184 - DNA, 979 bp, Zea Mays
ggcgacgactgcccggactaatgatcgggaaagcataaccgacaataggtgacctcggaacacgcatcaatttgacatgaatgcattgagaacggcatgtccacgtgcacggcggaaaccgtgaccacgggcacgcgttcccgcacaaccggggccggattgagtaatcggacgccacgatgagcttcacaagcgaacggagttgccgaaacaacatttgatttgggcagagccttaccagggtgatatggccacggagcgcggtatttcgtgcttgccggagacggaaaagggggaaaatggggtcgcggcggctctgagcgaaattgggagatgggatcggggctaaaagaccgtaagaggctgtgctttcaccgtgcgcaatcgatttgggagaaggtggagagggcagtgcggatttgacttcgatgtaagtcactggtgtgcgtgatgaccgagcctcgccgtgaacctaatggctatttatagccatggcggtccggcgatcacctcacggctgaggatagtatcgcaatcgcatgtcgaccacgtcggtagaaggtacagtgagggagaactacagcatgagcgccaccgcggcggaattcactgagtcacggcggccgccggtgagtaactccggccgagctcaggagatggtgccacgtacgagttacccctccccgacgctatccactccataccgcactcaaatcaggacggcggcgacactaattttggcgcagagaggttgccggcggtgagatttttctgccgcggccgatctgatccgtttgggacactgtaccatcgcgagctcccatcagagcacctgacagccaatctttggtctggtttttctctcaaatcttcatggcaactcataccaagttctgcagcaaagttgttcctgtatagtagctctacaactttgttatagcaaccctaggtagattcccactggatcttagtcgaaatg

SEQ ID NO: 116185 - DNA, 660 bp, Zea Mays
cacattgttgggaccattgttgatttgttcccctagttgggcattagggagaagaatatcctctagcacatggtggtctccttggttaggtgggtcgtcaacctcctgaagcccattcataggaacatcacccatagcagggatatttggggcattattgtgcagcacaggcccaaccacatccaagtcctccagaatatgcccattctgcacaggaacaccctggatgggaccaaaagaactatctgaggacaggctcgaatgctgattgctgatttgttgctcgttaggtggcaggtcttgctggggttgctgagcaggtgggtcattaacaatccactggtcccaatccccttgaatattgtctgctggctgaacctaaacattgtcttctggcgggaaattaagatcccaaccagcagcgggcagaggttggcccaaaccaaagaacgcgagagggagctactgaccatcttctgggaccactggcactgggtcttcatcttggggttggccccccaacaagttttgttgtatgatctcacactgcactgtccacgagtcactgagaaaaccatcagcttcctagaagacaatgaactgggggacctcctcgagggacgtgacccgaaccctaagcatagtcctattcacattgtg

SEQ ID NO: 116186 - DNA, 816 bp, Zea Mays
cggtgaattagtttctactacaccctattattgagtgattttattagatccttaataagaaatgggatgaaagcgggtaaaagtggattctctactaatcttgactaaaatacagatcgagtgaaggagagagcaaggtgaaggaggggattttttttaatttcctaccctaaaccctaatcccacctacctcgtgatatgaaagtctgtaacaatgcccttgacttgcatggtggtctgttagcccgatcggacactggactctggagcacgccttaacagctcgtcctaatcaattggacagcgctcccaggccccatctcgagcacagtacagctggtagtagactgcgtgaccaccaccggcgtgtccccgtcatcacatgcatgcatgctcgcatccgtcgcctaaacgacccttgtattactggaccatatatatgcacacacgccacacgcatcttttcattaatttcactgtgcacgcatggtggtatggatacatgctgcatagtactcctactactggagtagtggtatttgtttgatacataaattacaggacaggaggagggtgtgtgttgtactctcctggatcggagtcggagtgctacgtggcagcaccagacaggcagggagacagttaagtactccaaatttttaatttaattaattagcctgacatgccagctcttttccactgacatactgccttgttatttcgggcggtcggtttctcttccacgccacgcgtgcccaattcactggttctctcgtgcatgcatgtctgactatatactaattggatggatcctaa

SEQ ID NO: 116187 - DNA, 604 bp, Zea Mays
caaagacatattagtttacaacatattcataacaagctaaaggctataaacgatgcatgtgggcttacctgcaagaagctgcgcatgccgctgtcgcccacagtcaaaagttggcgatcaatgtcctctaccgaccgttgcaatgtgttaccctgtacaacacaatttgcatcaaacatacaatttatacatgtcgagtattaaaatcgagtaaaacttaccactcgatctaagatgggtgccgcctccacttgggttcccagtctagtggacaggtcgtactccgtttcttcatcgtcagaagaatcaatgtcagcgtagtcatccgctgtccactgctggcgaagcttacaacgagtcgcaccctggtaccaagcttggtaccgcctgtagtcactgttgttgtgcaactcatcgttggaatatacattctcagcacccaaatcccattcattcataaatatcagatgaaaccactaattactagctacataactataaatataaccacaacccactaatatactaaccaccttataaattactcctatataataattgaaaattttgacagcacctcccctgcacggggaggataaaaaac

SEQ ID NO: 116188 - DNA, 573 bp, Zea Mays
cgacaaacaagatccctctgagcatccaaaactcgagaaaggccctttttaaagcgcacctcatagtcatcctcaagaagttgcaaaatatagagcagattgaaatgcaaatttgataccaaagcaacatccttgaggacaaaactctcgttcactcgaacgaagtcgcgagagacaaccttacctctcgacttatcctcgaatgtgatggattccttaccaatcacggggtcaaggctggagaaccctttggatcttccagtcatgtggcacgaatagccagaatccatgacccacatgttctcacaaccactgtcttgcatcaatagaaagacacatggtgagcaaattgcacagtactggtgttaggctactaaaaataataccagtgttgcggcatttgcccctgaaaagtgttagggaaaacaccaaacatctctggtcctgaacggggaaagcaatcaccacgagaaggaaactatggtccgctggggaagtgagaaccaaagccactgccatggggtccttgcccatacggcacatgactagcaccctgctggacacaaacaccat

SEQ ID NO: 116189 - DNA, 458 bp, Zea Mays
ttgtcaccccataatccactatggggtggagggagggttacgtggtaccatagaagatggtctgagcacgttttggaatggctctcgtgtcgggtgaagtctccatgctgacatgctccataatctaaaatggctctcagcgtcgatttgcatgataatccatttcagctatcaaactcgatgtttttccaaaaatccaactggttcctccaaacatgtactgcgtacatggttgcccctgctcaaggctgcaattctgttttgtccttgttttttactctctatcctaagatattagtcatcttaatattttaatagattcatacagtatttaatgtatgtgttttataaaaccggctgtttagactgctgcaacggtaatctatagaaataaaaatcctataaaaacagtagaaatcggtacaaattaaatctaagcaaatatgctgaatctcaac

SEQ ID NO: 116190 - DNA, 402 bp, Zea Mays
ggacggtccgcggcctgatactcaattcttcaaactctgtccactttctgattttgaatttcaaatctgatttgatgcacatatatggatagttcgaccaatccaagggttagtatgcatgcacatacacattatgtatttgagaaatgcactttttcatatcaaactacttagatcaaactagaatgaaaaattcatcaaaaatacccaataaatagcctagagagcatatttagaagcgaaatgcaatactacacatgtgtgttcaacctcaagccacatttgagagatcaatcacattcatttcacttctcaatgagcaaaatctagtttcatccaatggctttgtaaaaatatcggccaattgatcatccgtgccaattgaatatatagagatgtctc

SEQ ID NO: 116191 - DNA, 404 bp, Zea Mays
atttggagagatcattctgttaagtttgctagccagcctattggcaaggattttggtaatcagcttgccaaaactgtgcacaaggcttattggtctaaaatccttcacatgatcaaccccctcttttagggatcaaggtaacgtaagcagagttcagcttgtcaaacttatcaaaatttctattccagatagcttgaattgcagccatgatatcagatttgataacattccaacaggacttataaaaacatccattaaaaccatcgtgcacagtaagaaaagggcacttcacggttccaatagattcccattaaaacttgcctatcactccaagcttgcagcctcctggctgccttcttcagtttatggtgaagagtaagaaaagggcagttcgcggttccaac

SEQ ID NO: 116192 - DNA, 524 bp, Zea Mays
gcgcagtgcacggttgataaccagaggaaaagtggtgctgcgattgctgggttctagtcgtgttgattggaagccggatcgtctgtgtgacatttccaccaaatcgatagttatcttcacctgacggaagatcgggcacccctgttcctatcaagtggtattcaaagactcaggtattaccgtcaggcttaccctagtttagtttaggtttttcatcctataactccagataatttccataaaaaaattcgctgtcctagaacccttgtttagcctttgcaatttcgttttcagtttggctttgttcagttcgtgtccgtggtcgagtcgtgttactggtttagggtgtatcttcgtcgtagatcaactgccctcgctagccgctatcccatccaccattacccagatcacaagtcgatccacccattaatcgacttgccctcgctagccgccgccgcaccagccctagatagattgtagatacgccgctatcccatccaccattactcagatcacaagtcgat

SEQ ID NO: 116193 - DNA, 558 bp, Zea Mays
gtatgacgttgtactagagtacgctagaagttactttagtaacttcgacgtgaaaacagacgaatgtatctatggactatttacaaagataaggcaacagtttcgcgccaataaatagatatgacgttgtactagagtatgctagaagtttctttagtaacttcaacgcaaaaacagacgaatgtatctatggactatttagaaagacaggcaatggtttcaaccacatatcttatcattaagacatagatcctccaactcattaatactagccaaaacacacacgatttcaatgctacggttgatggctaacatttacatagcatctcgtgatccttcgccgactaggcgaccagagatatgttttttggattattctctttgaatgtcgattcggcgtggctcggtcggaatcacaaaagtaactggtttcgatgtttgctaaaatagttgatgttagggtttactcagccattgacttgtgtgacaataggtaatgcaagacacgctccgcctaaccttcccacactctagtcacggctctaacgagtatgctcg

SEQ ID NO: 116194 - DNA, 392 bp, Zea Mays
tttgtgttcctgagatcgacagtctttgtgagaccatattgaaggaggcacatgactcagcttactccatccacccttgtagcaccaagatgtaccaggacctgaagtagaagtattggtggtatggactaaagaaggatgttgcttcgcatgtagcactatgtgatgtttgcctgagggtaaaagcggaacgtcaaagacctgctggtttgctgcacccgcttaagatacctgagtggaagtgggaagagattggcatggacttcattgtaggtctaccctgcacctctattgggtacgattctatataggtgattgtggacaaggtcactaaggtagcccactttatcccagtgaagaccacatattaaggagccaggctagcacagttg

SEQ ID NO: 116195 - DNA, 417 bp, Zea Mays
cagtctgaggtagttgctattacaacacacacacaaatatgtatatataatgctgctaaacattcagctatgagcagtaccatccatctccttaagccttattgatcagcttagaagacgtgcaaaagaatcaggcatcaccaccgccatatacatcacctggccactgagcaaaataataggcaaccacctaaggaattcacagcaaaacaaccagccaacaacaccacccttccatccacaaaagagtacctggttgagcctaaaacaagtgcaaaacatatcagctaagtacaagttgaaacaataaaactaatgatatgtgaatcacctaatcacttcacagtagtgttgaatcactcaaaaacttgaatacccatgactgaaatgttgtttcagctgaagcggataagaaac

SEQ ID NO: 116196 - DNA, 305 bp, Zea Mays
taagttgagatacgtggaacacatcatgtacatctgacagatgatctagtaactcaagctggtaggccatctccccaactctattaaggattttgaagggtccaataaagcgaggggatagcttgccttcaactttgaatctcctcattccacgaattggtgacacctttaggtatacgtgatcaccctcttcgaattctagtggtattctttggttatcgacatagctcttctgtcgagtctgtgctatcctcaagttctcccggatcatacgaacttgttcttctgcctcttgaataatttca

SEQ ID NO: 116197 - DNA, 310 bp, Zea Mays
gcaacaagcacaacatagagaagtttgtgcatctcaaggtacctggcctttgattcatggaggacctcgctaacgtagtagaccggtctctgaacggtccggacccctgccgagccctcaggttcctggccttctagcgccacctggtcttcttgtgccatcctttcgacgaccagcaccatgctcaccgcttctacagccgtcgcgatgtataaatacaatggctcacgaggctctggagctaccagtattggtagggacaccaggtgctgcttcaactcttgaaaggcttgttccacctcttcggtcc

SEQ ID NO: 116198 - DNA, 660 bp, Zea Mays
cgacatcaacatacgttgctccaacgccgactccaccggctccctctcccgcggatcgggaggtactggctccccttcccgtggatcgagaggtgctagcttcaccagctccccctcctatgggtcgggaggtgccagcttcattggctccccctcctaggtgccgactccaccaatagactgggggaaccatcggtattcaatcccacccccttctggtttagcttcgatcctccaggctaaccctatacgacgagcacctacactagtatgtatgaggaactcccaggtcatcatctgcggtcggcattagacctgcttgcaacctctccaaacttggagtacgtaggatttgaggcagaggatgattttggtcctagcctagacttctctgggctatgtgatctcgggaccatgcgacatttcttatccacgtgtgacaactacctctccgacggttccgatgactacaactctgatgatgagggttacgactcgactcgggagtgcttccatgtcaggcacaaggagcacggtgaaggaaaccaacttgtcatgcctcgagaggccaacaccccggcactagccccacacgccggagagcaaatggaacaaggtgaggttcagaccctcgcagggtgtcagatcgtggacctcgag

SEQ ID NO: 116199 - DNA, 599 bp, Zea Mays
ttttagtgtcggggcgggtttgggtcgaggtcgtgggccataggcaggcatggcccgtttaaagcaggcacgaaatgacccatatagaggcacaaaaaggctcatatatattcattaaaaccacacttcaatccacactttcatgtacttgataaagaacataaagctagagatgatactagttagatgttttttgcagctttgaattagagtgtgatgtaattttacttttattatgaacatattgaaggatgcatagaccacgaaaggtcaaaatcaacgggtgttctctaatcatttaggagaactcatgataggttaggtgatcctgtcatatttaccatactggctagaaacagaagcaacagttcttccaaaggtgaagtgaaaacggttgaggaaaggaaaaatcgacgaaatcttattttcactctcaggaacattttacaccctcaaactgtcactgaagtataatattgacatccaacagcgactcaaactactgaaagcagccaaattgccctgttgatcccatttgaaagggtgttttccagtgatgtggcactgacaatgactcagtttgacatgtaagtgcttat

SEQ ID NO: 116200 - DNA, 294 bp, Zea Mays
gaaaagtatttttctcatccgaacaaatcattgtgcaggagcatttttgcaggaacctcgccagcaggattaccagagcaagaaggtttgctcacgctagcggatgtagcgagaacgtcagcaacgatgtcctcaggcaccacaacgccatgtcttctcatcaggattcgcttggcgcggacatccttgtccattgctttgtcacacatcgctttcataacaacatggtcatcctctaaggccttaatgttatgacgagcaacctccaactcttgcgcaacgagcttcttcgag

SEQ ID NO: 116201 - DNA, 707 bp, Zea Mays
cgaaaggaggtccagaagctgctggacgctggcttcatcgatgaggttcatcacccaatatggctggccaacccagtcatcgtccccaaggcgaatgggaagcttcggatgtgcatcgactacaccagcctgaataaggcctgtcccaaggacccgtatccactgccacgtatagaccaaatcgtggattctacctccgggtgtgacctattgtcattcttagacgcttactctggtttccatcaaatctagatgtctagggaagataggaagcataccgcttttgtaacagtggacgagctttactactatgttgttatgtcgtacggtctgaaaaacgccttgcctacatttgtgcgggcgatgagtaagactttcggggacctgattagggacaaagtggaagtctacgtcgatgacatcgtggtcaagactaagagagggtcgaccctagtggaatacttaaccctggtctttgacaagctgcgggcaacccacacgaagctgaacccggataaatgcgtttttggtgtctccgctgggaagttgctgggattcctggtttcataccggggcattgaagcgaacccggagaagatcaaagcgatcgaggcaatgaggcccccgacccgaatcaaggacgtccagaagcttacggggtcattagccgcccttagtcgcttcatttcgaggctggctgagaaagc

SEQ ID NO: 116202 - DNA, 323 bp, Zea Mays
ttgatatcattggcggagatcttaaactcaggctagatcacagattttacattatcacaaccagccttctcaagaagcgagtttgttccccgtgcacccatacaagcacaaaagtctccacgacaagtaaggacttcgtcgaaggcctcaacttcaccttctatccattttattgccccttcagcgtcacctcagacaaactcttcctcactagaaaaagcgccaacaacagcaaacatatttctcagagcactccgctgcaacagaaaagcatcgttcttttgattcccaagttcgtcaacattcttctaaactctatcacg

SEQ ID NO: 116203 - DNA, 444 bp, Zea Mays
ggccttcaaaggccaaggtcattacatcatctttggcccttgtgtaggccccaaacaattcgtcactggttgcttaaatactgctcaaccactcatcgtttgtctcatcaaactcgcctctatatctgaaggtatattttaaatagaccaggccgccctgactagacccgacagtagcctccttcgacatctctcattcactcacaagaggccatactctgtaggcgatgtgttcttgaaccaagtctcttgtgccaataaaagtacacacagtgttgaagattctctggcatgcttctatatcgttcccaagagcagtggctggcctcctgatgtcgaagcgagaccaaatgggacgttgaataatttcttttgtatcctccctctcaactaaattattcttcacataaaaccattcttccatccaggctcctggccacattt

SEQ ID NO: 116204 - DNA, 533 bp, Zea Mays
ggcattttggcttctcaccgccggtgatcaccggagaactccggggaggcccttctgcttctgctcggcctcttcatctcctcacatgtgagctgctcggcctccttttcttccccctccccttctctgtttcaattgtgcagtgtgctcacctcaccacctcttgtgctcaattcaaatccttgtgccaatctatgaatccaagtacttgtgtgtgtaccttgtgctctattgaatccccctgcaggttcctagctccctagggaggatttcatatcctcaaatagccatttcactcaaaacctaaacccccgcacactaagtgctcggtgaaatgcctaaactagctaaaattgctcaaatcgatcccagatttttctagcaccttcatgacacctcaagtaacttattcaccaaatttcacaccaatctgatatcccagacaccagttttcaacaaattcccatttatagcgatcgatttcgagccgagtgccccaaatccactttcttcgccaaaattcaaaccaagcg

SEQ ID NO: 116205 - DNA, 429 bp, Zea Mays
ttgggacttgacacatggtaccaagcactcgtgagtaggtgagagtgcatgacaaaattggaagttggatagctaggatgtcttgtcatgtgtgtcccgtccacaagcttgaaaggatatttatagggaaccaagagctaaggcctaaaatacgtgtatgcccttggttacctactacattcctggaatatactatatagtggggtaattatggaataggaccagcctaggtctagtacaccgatcatcatactcgtaaaggaggctgacaggtgggaccgtcttccttatggatgggactacatggtcttcattgccactcatagtattctaacttcaagaccctaaagcctttgtcctgaagtcctcggtgtctccgtgtccccacgggcgatgccaagggggatcggtagccatttggtattcccg

SEQ ID NO: 116206 - DNA, 351 bp, Zea Mays
ttggcgtttatatgtaccgatacagacgaaagaacagagcaggttaacttacatggcggtaaaacaagaagattacaagggggtctgtttcagtcagtaccgtgataatcgtggtagtgcagttgtatatatctcgcgtgtctcggaatatacggtgggatgggtggatggaggagctagctgcaactagtacacttactttgttgcatcactctcactcacgacggatcgagatgaagcggacaagacccgtgaatgtatttggcccagggaaatggcaggatattctatcaaatcctggttttccttggtcagcacacgcacacaatgattggcctcttttgctctctc

SEQ ID NO: 116207 - DNA, 332 bp, Zea Mays
gacgcagactatagacaatttacccttctctcagtttgtagtcaattttccttttttgacgtgttctggcgctagatgcgagctgcaaaggagctgctatattttgttcagcttttggcgtgaagaagctagcagcagcaccgaaaaaatttctgaacctttagctgcagatcatttggtttggtttcttgactgtaggatacaatagtgcatgtttatcaggcttaaaccctcgacaacaccgctcacaagatgaaggaccacctgtacacattcttatctgtctttctaacccacacctctagttgtatgtctgtgagtctttaatctgc

SEQ ID NO: 116208 - DNA, 628 bp, Zea Mays
agggcacacaacgtggacggggaggagtacaccacgaagggtgcactagcagagtggattgagtggagaaacgcagggaatagggcacacaacatggacgaggaggagtacaccacgaagggtgcgctagcatagtggattgagtggaggaacacggggaatagggcacacaacgtggacacgtggtggctacggaacaagatcaccagggggtggggggttcgccacggtgttcaaggagccgcaccacacacgtacaacttctttgataaaacccctaatacaatttaaggcatcttttatagctatagggtgtaacaactcaagagattattgaggggatataagccccgagaataagcctccttaaacctctctaacaaccggccgccgcctaacaaatggtcggcctaatgactctggcgcttggcatattgcaggcccacaacggagactacaacaaaaagtcgggactaattagatttaaaagactcgtctaaccatttactccttatttgtgtatattagttttgctagactatatgtagtacttctaaccagtagtaaagcattcgatgtcacgtggctaaaatttatccccaccaaaccaaacaccaacttagttaag

SEQ ID NO: 116209 - DNA, 937 bp, Zea Mays
cctttaccatcatatgtagtccctataacatgtaaatgggtctttaagattaagaccaaatctgatggttcagttgagcgatataaagctcgtcttgtggccagaggttttcaacagacttagggactagcttatgatgaaacctttgcaccgattgcacatatgatggctattcgtactttgattgttgttgtagcatcttcttcatggactatctttcagatggatgtcaaaaatgtttttcttcatggtgatttacataaagaagtttatatgcacccaccaccaggagttgatattcctttcggacatgtctgtcgtctgcgtaaagctttatatggattgaaacaggcccctcgtgcttggtttcaaaggttcttcgttgtcataagggctgctggttttacccctagtgaccatgatcccgctttatttctttattcctcttcacgagggcgcaccttgcttctattatatgttgatgacatgttgattacgggtgatgatccagaacatatttctcaagtaaaacaacatcttagtgagcagtttaagatgtttgatttaggccctcttggatatttcctgggtattgaggtattacaatctacaaagggctattatctctcacagtataaatacatccaataccttattgctcgctctagtctgactgataatcgtacggctgcaacacccatagatattcacttacaactttgtctgaatgatggttcaccactacaggatccatctagatatcgacatatagttggcaatctagtctacctcactatcactcgaccggatattgcacatgttgttcatattctgagtcagtttatctctgcgcctactttagtccattatggtcacttgcttcatgtactgagatatttacggggaaccacatctcgaggcttattctatgattgta

SEQ ID NO: 116210 - DNA, 452 bp, Zea Mays
agcaatcactctgccttcctgcatcaacacacaaccaagaccaatacgcgaagcatccatataaactgtgaaacgcttaccgctctcaggcaaagctaggataggggcgtccaccaacttgctcttcaatgtctgataactgacctcgcaatcgctagaccagatgaagagaacacccttctccaagagtctagtcagaggcttatcaatgctggaaaaatttggtatgaagcgtcgataatatccagcgagccccaagaaacttcggatttcagagacactagagggtctcttccactccaccacagccgcaacattcttgggatcaaccgcaatgccctgttgattaatcacgtgtctcaggaaagccacttcggacagccaaaaggcacacttcttcaacttgccatagaactgattcttccttagggcacccagaacgagacggagat

SEQ ID NO: 116211 - DNA, 380 bp, Zea Mays
tatagtcatatattttggaagatgcttcggggacggcggtatcaatttcttcgaccgaagctggctctgacattttcatttctttggttgcctttacaatttttacttcttctgcttccgaaggtattaccttggttggttctgaaggcccagtttcgactccagtctgttgcttcgaagcttcagcaacagacacttcagcaagtgcctcggaagtttcagcagttttctttggggttgtgcttggaagtttaattgtttccaaaacatctaacacattaaccattcttttcctttttggggtcactgtcggccccttcttaatttttaatgcctcaatttcttctgaagcacttaaaatttctaatgccttcactccc

SEQ ID NO: 116212 - DNA, 307 bp, Zea Mays
atttatcacacactaacaacgtgaatgctcagccaacacagtatcatactgaagaagaaggtccttcgaccgaccttagtgtttttctctggaaggggaaaggggtcggggcttctactgcacattatgttgacataagagagcgtaatttcaccatgctctacttgtacaccaacatggaggaacttgatccatactttgaaatgtttgattccatatatttagctggccacaaacctacaccaaaggaactggataatctacgtatgaaagggatgaatggaggtccatgtttcgttgaatggtt

SEQ ID NO: 116213 - DNA, 490 bp, Zea Mays
aaaaatcattttctataaacatttatataaattactaaagtctaggggcgctgggtacaaaattctgagagctcagggtcatttctgcgaagttctgggcctgattgtaatagttttttctataggagaggacggggggttgattacttgattcagtaggggctcttttgcattttgcgcccagcgaaggggtatgaacatttccctgccacccgatctgatctgaacggcccagatcagtcctatcattaaatgaactggtatgcacttggggccattggatttctaatggacgcccaggattttaaaatacctagctcaacttatgcccgtcggatctgaatcgaacgacgctggtcagtcctatggctagatccaatctaagtcacccatccgcgatcagacggacatagcacttcctagccgaaatgttacgtggctcgcaatcctatccacccgacccggatccaacggacgatgttcttccccc

SEQ ID NO: 116214 - DNA, 420 bp, Zea Mays
gctaactccagatcatgtgtggggtaattcttcctacgaatcttcagttggcgggacgagtatgccactacttcctgcattaacacacatcccagtctggtgtacaaagcatcacaatatactgaaaatggcttatgaacatccggaagaatcaataccggtgttgttgtcaagttcttcttcaacgtctcaaatgattcttggcacgctggggtccacttgaactcaaccttctttgccagcaaggctgtcattggcctggcaattttggagaaaccctcaatgaaacactgatagtaaccgaccattgcaatgaaactcttgattccttggacatattttggtgctttccaatctagaatcactgctaccttctttggatccacagctaatccctctcagtttataatatgacccaag

SEQ ID NO: 116215 - DNA, 393 bp, Zea Mays
ctaaaattagaactgtaaattggactatattgtgttgtctgcaaacatctgtaccttaaatagatgctttcttaacaatgaaagtttagttatcctcctaccgggctgtggtgaagatggatagattctcgttgggccattcacctgattttggtttagtgaaacactttggcaaagttcctagatttccatgaccttagcaagctaggcacactcattgctcagcatttgctaaaaccttacctaagaaaaaggtacttccgcatttgatactgaagtagtggagaccatcatgtggaatggggcctcttccactaattaatataggcacaccctgtttattactgtttagtttgttattccgcgagtacgttgatgatcctttgttaccac

SEQ ID NO: 116216 - DNA, 556 bp, Zea Mays
cacggttgctgacttgttggttgctaacccctcctattgagcaaggtaagaattggtaagagcttgtgtggtaggttgagagtgagcgccttgcagtagctacatcctaatagttgtagagtttttattccttcacttcattttttatcttattgcctctattcgtctaaccatggcaggattggaggttgatgatgcttctcgtaatatgccacactctcctcgcaccaagggtatcatacaacactttgtaaggctagtgaagacacacacggaaggtcttgataatgacttgtaggtaacaaatgaaaatatggggcaattggaggccacacagatcgacacaaacaccaaacttgcaaatgtggaaatgacagttgctcatattgacaagagccttgtcacactcttgaggcaatttgatgagatgcctgctaataccaatgatgggcgtgatgagggtgccgaaggtaactgggatgactatgttgctgatactgaacaagatgaccaagaagcacttaatcgtcagcgactacgtactaactgtagaggt

SEQ ID NO: 116217 - DNA, 914 bp, Zea Mays
gcgcgtcagccgttggattaactctggacagccgaagaggtatcacctaatatgagtcgtccaattagggatcgaagggccagattagatatatcattatgtgaactggtatgctatgtgggtcgttggatccgaatctgatgtccccgatataatggacgaacaggtatatggaggtcgaatctcctccgtccagacagaaccggacagtgtagatttagatggatgaacaagcaatacatgatctaatctgatccacactctccggatcagacggccgtaggaccttcttcctcttctctaccaaccacggcagcgctctgttcgaacgggaagcaggagttgtctacgaggacgcgcttgaaccagtcctgcgtcttctcctccactgaccaggattcttccacgcgttattcctaccagctcaaacaagcaccctgggcatgctcccatgcctcgaactccaaccggttcgaggaatcgtggcggcagcaggtttctctcaccccagctccggcgagaggtactcaacggctctggtggaggaccaagggggtgcggcggcttggtcttatagcctaggtgcagagtccgcacatgcattaatgtagcgaggatcgacctattgttacggctaagatccgtggagtcttccgtccatctattagcgcacgaagcggagaagagatatggagggggagatggtgctgacctttgggtcccacatggcggtgagatgaaaccacagcccacacgcagcggcaaaaacactgtggaactaccaggtagtggggcccgaccgtcaatgtaagagatgggaagggggtgatgggccaccgttgcaagaagggaggtgggccgaggtgagggaattcggcccacatgggttcttttcctttcccttttcttttttt

SEQ ID NO: 116218 - DNA, 1643 bp, Zea Mays
tcaaatctgaattggaatagaatctcaaactgatttaataggaactgacacgtaggctgcaaatttctgaatatgactggtatatgacgattttgacagtacaatggcttgtttattaccagggaacatttgtcgagggcataaaagaagaagtggtcttgtctcctgcacatgctttgtcccttattgcagccggagaaggttattttttttcttaatggtttaattctttgtttatttcagtattctgagtttctgactatcagaatataagccatatggcttcatttgtgggttttccaacccttcaccaaggaaaaagaatgtgaggatgattaattattatattggataatccttatacagcaaactcttacccactccagtatccatttatgaaatagttatataacaagctacagcagtcatacttcatagttgatggtacaaaatgcaatgaaaatcaataatggaaaacaaaattccagctaacaaatgatttcttgtagcatatgcttggtttcttattcttgtgaataaatatgattgcaaacaattatagatacagcaggtttatactttttatttatgaaattcaaaactctccctctggtcaagtttttttaatgaattatgaaagtttccttttcctttttaaatgttgagtgaaggtctgtgtcttgtcctggtattcattaataggagtaagaccttgtggtgctcaaagttcattgtgaacctaaactgcatctaagttaagtgatgaccagtactgtacctatattgatgtgctagctatttattgaagacatgtgggctgtggccttggtttacatttctcagagtgcaatttgatttacatccaattactgtttttattaagtgctacttttgaatttattgatgaattgattactaggttttttagctcatgtcaagagcacttgacataatcacttagagtttattgtgtttgttccacttccagaacatagacatgttggatccacaaatttcaatttgctaagcagcaggagccatacaattttcacactggtaataatgaagcctttcatgttacaatgagattcatgcacacaattcagcatcttattgaatatacgggactaaagtacctgcatggctgcatttcacattgtaaaatctctggcactactcagtttactgtttcatgtagacaatagagagcagcggcccctgcagtgaatctagtgaagaggaagcggttaccttctcacagctggtgggatcatcatcgtatttcctttgtttttgtttcttctgaagttctgatccattcctctgccttgccaatataaatgattcaagatataatacacatgcatttcattcacactaggctaatttctcgctatctgttcctgttctttatcattatagttggctgtagatatatgatacatctgtatttcatttacacttggcatcatatattgtttcgtctgcatttctattgtgttcacgtggtctataaatcggtttcttaattttcttgctcatttgcagaacctcatcgatctggcaggttcagagagttcaagggctgaaactacaggagtacgccggaaggaaggatcttatatcaataaaagcttgctaac

SEQ ID NO: 116219 - DNA, 427 bp, Zea Mays
tgtattggcactagcagagtgtaacatctaacgttactttttctgcaactgtttgacttttgagctagcagtctcgcaacaaaaggtagcttctttctagtaccccaagcaacagaacatgtaaagcacaaggcagtagagcacatgtgtggagcatgttgttttcacttctaaagtcaaaatgcagttttattcatcgccgccgcgcgctctaaagacctggcaataggcacagcacactccatcatggagcaccagaaccactggtgagattccccccaatcgacaaggcaaaatgcgcagcttgttggtttgactgcatgccaagttgctcctcaacctttttccgatcgacgtgcagcacacatggctgggcgcggagcagataggtgcatgcgcaactacttttttttctgatgaaatttgg

SEQ ID NO: 116220 - DNA, 446 bp, Zea Mays
gcatgccgcatcaaggactctggtgggaaaggctttcagatctggtttctactagccaaccatgaagagtgacgctgccgagttagtccaaaagtgtgaagcgtgccaattcctgtcaaagcaacagcacttgcccgcgtagcagctgcagaccattcctgtaacctggtcgtttgcatgctgggggctggacatgatcggacctttcaagaaagctcaaggaggttatactcatgtattggttgccattgacaaattcacaaaatggatagagtacaaaccaattgcttccttgacctcagcaaaagcagtggagtttatccaggatataatattcaggttggggataccgaatagcatcatcactgacctgggatccaacttcaccagctctgatttctttgatttctgcgagcaaaggagcatccagatcaagtacgcattag

SEQ ID NO: 116221 - DNA, 497 bp, Zea Mays
cgaccgaccagatccctgtcgagcaagtccgcgaggcagagtgactgactagatccctactgagaaagtccgtgaggcggagcgaccaaccagatccctgtcgagcaagttcatgaggcggagccaccgaccaagtctataccgagcaagtccacgaggcgaagcgatcgaccaggtccctatcgagcaagtccacgaggcggagcgatcgacgaggccctactgagcaagtccatgaggcggagcgaccgactagatccctgtcgagcaattccataaggaggagccaccgaccaggtccctgccgaccaagtctgtgaggcaaagccaccgaccaggtccctgtcgagcaagtccgcgaggtgaagcaaccgactaggcccatgtcaagaaagtcaataaggcacaaacccaagtcaaacatcatgaagtccatgccgactaagacaagacatgacaccccaagccatggccagccacatgaacgacagaccgag

SEQ ID NO: 116222 - DNA, 421 bp, Zea Mays
aacggttgtatcagaaggtgatgtcgtcctagagctgacaaagttattcatcatggtggttgaaggtctccctcacgactagtaactctttgagaccacattcgatacgattttggagctagatcaagaccgagatgcttcctatttaaaggatagcagcccaaacctaagacggctgggaccctcatgaattgcatacaacgagatgacaaatcactcgtcgtctatcttcaaagattcatccagtttagggcctaggcgcccaatgacgacccggaggctaccgttatcgctgtggccattgcagtgctggcacgaggacaatgcatgcgcctcacattttgtaaggaacatcccaagttagacgcatactaccactagtataaaagagctctaattctatgataagctctaattcttc

SEQ ID NO: 116223 - DNA, 498 bp, Zea Mays
cccagatcgagttctcttgagagaagcacgaagccaaaaaagggaagtcgtaagtccaaccccacaagatgacgagttggaccatgagatcaacaagcacgaagccatccatcaacaagtggaaaagaaaaaagaaaagatgcttcggctttctgagctgtagaagaagattgatgaggcaactgaagaaatgcaaaacatttcgtaagaaaatgagcgacaagagtactgtcagtatcagaaagaccttcggcgggaaggccattatcatgaagacgcgtggtacgaagcctttaatcgtgacaattttccttatgatgatgcttctcctttagctacgaagttgcagtcaataccatggccaccgtcatacaaaccacctcaattgcctatatatgaaatctactctgatccgaagcaatttataataagttataaagcaacaatatcttcatatggagccaacacagaagtcatggccaaatccttcgtcatggc

SEQ ID NO: 116224 - DNA, 928 bp, Zea Mays
gtgatttacacgtgccctcccttggtacggagtcttgttctgctggctgacggcggagggcgccttgggggcggttgccgaggtattcttggggccattcaccgagttggagtaggagggtcctggtggcttcagctgcggacagttgtttttgaaatgacttggatcaccgcagtgccaacatgcattcgccagaggttggttgcttgccactaaggaagaatggaaagagctctgactctgctggctgaatcgtgatggagtgggtccagctggtctaccgaagttgggccccttgggtggaaacccaaatgatcgagtcttctggtgacggtcctgctgctgtgcccggagaacctggaacttccttttgagatgtcctttttcttcctccttagctctttcaacttgcatggccttgttggaaaggtgagagaagttgaggaagtcttggctagccagaattgttttgagttctggcctgagtcccttcaggaaacgggccatctttttgctctcagtattgacatcatctggcgcgtagcgggctaactccgtgaacttgtgcacataatcgctgacagaccttccgtcttgagtcaattctcggaacttgtcctccttaagctgtaccagtccttggggcacatggtgctcccggaaagctgcttcaaactccgcccaggtagcatccctgatggtgacgttgaaggtgtcccaccaggctaaggccatcccagaaagttggtgggcagccagttgaacacgctgattttctgggcaaccaatggcttccagtttccttttgatcgtgtgcatccaatcgtctgcatcgagggggttgcttgatccggcgaacgtgggaggtttgagtcttaggaagtcccccattctgtcttgcggtcttccaccattcgcccgttgattt

SEQ ID NO: 116225 - DNA, 666 bp, Zea Mays
gcttgcctaagggttcgatggtggcagatcaagacctatttacgagtaattttgatgccaccatgaacgttgtactcggggtagtgttcgaggaggaaataatccacaaccttatgtagctctgcttgtgacctgaccgtttcggtattgcgacatgcatgggtttcgggtcccctagatcctgacttgtctcaagattttccttggtcatggggcattttttgtgcagctttcacccgtctgccatactcgtgcggggcgagcccccgagtctctacatgatgcagagatccgtctaggggggtagtctcgtcttttaaattttactctccctcgtgcattcccttcacgagaatgatgggaggtgagctgtaccacactttcctcgatggactagtaatgacacttgttgagttacaaatgggtaatccgagtgagaccctagtttctttgataggatccaagcatggggtccgctggagactgccctcatactcctgggcaccctcactcatataattgctgattttgttcgacctgaatcgaccactcgccacctctctccgtgaaaccatgagtcagatcttcataggacttgaacaagagccggtgatgctctcgatgctttacatgtcagggtcctagctgctagggtgcccgtcatcg

SEQ ID NO: 116226 - DNA, 826 bp, Zea Mays
ccggcctccaggtcttcaagtcttgtgtgttgttgccttccgtcgaacgtctccggttctgagagtctaatcctcccttttgtgaccgacctcctccttttataggcttaggtgggggttggtcgttggtggcctcctcgataaggagccactataccatggtaaatcaggtgttttaccttagtgaggccgtattgctcatatgcatcttggttgcctggttgtctatgctcgtgcttattatgatggacggcgtgggtgacatggggtcctggcgccatcattactacatatgtgccacgccgacccctagcctctgtagcctaggtctcggtgtggctcgtcgcattgcgggccctatagatgcctgcgcgcttagacctagtctcgataggccctgagtgcgctgtagcacgaggggcacgtaggttttgagtgtgttggaggctgaggagcctcgtaggtcatgagtgggaggcggaccggtccttctactgtgacttggtgtcagacgtagttaacgtggtcgaccacttatggcgggtcagtcttaggtcaggcgggtaatccactcgattggctttccttcagttcgcatcccccttctagctccaccacgcccgaccctaggctcagtacctcagggtttattcggggcggtcgcttctaggggagacagttcccttactcccctgctgactggtggtccccgatagtcaggaggcccttatcccgcagattctctctgaccggtgggcctcaggggctcggggttctttttcccaatagttgtattaagcagtctcttagctgtctcttattcttg

SEQ ID NO: 116227 - DNA, 546 bp, Zea Mays
cgaggcactgtgggcaacaattatggacattcctgataagtcaaaggataacgtgaaggcaagagtggatctggcagcgttatgggatagaccacacctagagatgaagccgccaagtggcggaaagacgtggagaaggcctaaggatgattttgtcctaagcagggcccaaaggaaggaagtacttcagtggatcaagatgttgatgttccctgatgggtatgcagctaacctgagtaggggtgaacttatctagtatgcgagtcttagagatgaagagtcatgacttccacatatggattgaacggattcttcctatgatggttcgaggctatgtccctgagcatgtctagctagcactttcagagttgagctatttcttccgtcagctttgtgcaaaagagttatctcggaccgtggttgcagacttggaaagattggcactcgtgctactgtgtaagcttgagaagatatttccacccgacttcttcaatccaatgcagcatttgattcttcatctcccctatgaggcacgaatggggggcc

SEQ ID NO: 116228 - DNA, 827 bp, Zea Mays
caccaatgtaggtcctctcctgcgtcaaacgttgttcccaccacggtcgcaatcatcgttgttgacttgatcttatcgctagagccctccccgactccaatttttctccctcgataccataagactatctgcaacgctatcctctaaatttttcccctatactgcactatgtagccatgtcacccagatttcatctctacttttctcccttccgcagtggttccctctaaattttctctctatacgccactacaactataaaatatcatttttcattactattcatttgtctattaccattttcttcttctacaaaaacaaccccacgcgtgtaccgagggcaggggcctatagctgctcgctatagatctggaggaagtctgtgcattgcgctattactatagttactagagggcgtagtagagtcgagcgttacggcgatagagggaccctatacaccaacaatactagagaaggggacgactagcggatgccgctacgcatagcctaagctcaacttgcatacaatagactattccatgagaccaatccaccgctccatcgttgtcccttagagttcgacggagctccactaccacctaccctctatcctgccaccacaaccaacttgtctatgccacctagatcttcatcatcatgcttgtaaggctatatttggcctcctccatcacgtgctggtgatccttgtccatgggagcaccatatcggtggtctcccgtacacacacaccgaagtgtgagcactcccttaccgcgacggtggctaagaaagagatctatgggatggccttcgtatcagttcccaat

SEQ ID NO: 116229 - DNA, 880 bp, Zea Mays
ggcacagagtagcatgcatgcatgtattcagtcatttactttgctatacgagttcaacaatttgttatggtcttaagcaaacaagattaattgtcttaatagaatgcatctagatgacaactccaatgttagctattataagttattgctatagcaatgagctaggattccttgtgttgtttgttgcaatctagtttttgaatgtatgtgtttaacatgtgtgccttttcttctcttttttgtttatttctcgatctttaaatggaaattttctaaccttttgtgttatgagaacaatatgtttttcttcattgggaaattaaagaacgatagggttttctcgaatcttttatatttttaatatcctgtgattcctaagggggtgaaaacagaaataactgtgggggcaaacttgtcctaataacgggattggtctatcttgctatcaagccttaatatgataagtgctttaggttatctgtttataggatcaatgatgaaataagtgctgccctcatgtgccaactatgaaacccttcatgcatcccatggcacatcaatatctccggtgagctggatgatccagtaagtaatgagtgaccctttgtcggcaaggttgcagtgttacagtgtatggtagtacaaatgagacacagactccacactaagcttgattatcgttgtcctcgcaataaatgagtgtatgtaatgcctgcttaagcaccattggactggtgaagaacagaatgatggatgctcttgtatgggaaaggaggactggcccacgcataggcgatggtgccactatatatgagtagggcatggggttcaggaattttctcggtctgcatgagtggtcttctacctcaaccagaatgct

SEQ ID NO: 116230 - DNA, 344 bp, Zea Mays
gaatttactaaaactaaccccaatgggtgtgacccttctgatgctgatcccaatgggtgtgctatccgtgttgttgatgaggatgatgaagaagaggacgaaatccctctaattcggaagaacagccggcgttacatagctagtggggagagtagtggtgctccttctcctgccttgtctgccctcattggtctgcaagaattatctctggcgaactttgatcaaactcttgaagacatggttccagaagatctgttgtcagaaccggcagatggtggcgcgatggatgtttgtgctgatgtgctcgacgccgggttggggtcatcccgggcagcttcccgcgc

SEQ ID NO: 116231 - DNA, 349 bp, Zea Mays
cggtggtggtggtcttgtgggagagggggggtgcagtgcagtgggccggccgggtaacgttgttcataagagaaatgaaacgacctacaaatggatggaaccagagaacgtgcatccacgaccgaccaccagctccaagtctctccaacatgtctggaccagactaccgcaaccacacatccagagtcatccatgcatgcaggaaagcttgtgtcgtcgctgtcgtgtgtacatgcatgcatgctgatgcccggccagttgatgcgtatggtctccgatcatgcatgcaggcaaaagtgtttccgaccgtttactgcaggtgaatccacgcgcgcccaatcgatgtttt

SEQ ID NO: 116232 - DNA, 443 bp, Zea Mays
ctcggcgatggcggatggccgtcagccgttggatggtggctggccggctaggatttgatgccgcgtaccctttcgcccggttaaatccatgtcgttgaatcgcatatcgaacggtagtaatcagatagggttttataaattttgggcctctggatctcgatccaacggttcttagggcgtactggttcgttctgcgcctgatctaatctcgcgcgtccgtttggatcggacggctcacgggagccgataccgtttcgcccgagcacatttgctaaagaacccctcggtttacctgaaaacaacccgccgtcctgatgacattgttcactgagtcatagaaaacttcggtttaggcccctgcacttcccagaaaatgacgcccagtccagaggattagaaaatcagagaatttaatttagaaatagatttttaacgttaaatta

SEQ ID NO: 116233 - DNA, 280 bp, Zea Mays
tagtagggtatagtggtcaccccgatttaagtaagcatgcaggttgacagtgaacaatttgagtgcctttgaagcctttttattgatgatgtatttcccagtttacagaatacattgtcgtcccaatagcttttgagatatagctaggggtaaaacttcctgagatgttctatgttccatgagttcccaatttccatgccgtccatttgagtgagatgatatgatctaggccgagtgacttctgctactatgaatggtccttcccatagtggcgacagtt

SEQ ID NO: 116234 - DNA, 401 bp, Zea Mays
gattttttttatattacatggcactgcctaacctcaccccttgcgaggaaaatagtgcgagcccgactggaataatgtctgaaggtgttacaaaggcgcgaaggccttaggatttgttgccttagacataaaattttctcaggttgtctatattccacgaatgctcgaggtcttcaccggattgtgttgtgagcctatagctatttggggacgttttcttcttgacaatgaagggcccttcccattttggcttgactttgcctcgggactctgttctgctggttctgattaggatgtggtcgccttcgtcgaactccttagggatgatattgctgtttcgccatgccttcgtttgcgcttggtatcttttcaatgtttcgagggcgagaacacgatctccg

SEQ ID NO: 116235 - DNA, 702 bp, Zea Mays
gcatttccacccacatatatctgctatggtcatctaccacaagtagaaaataagatgccccctatgcttttcggagtgatttgcccacataaatctgcatgtacttattctagacagctttcagctctgaaatttgaagcttgaggaaaaggttttctgtgttgttttctaaggacacaaccatcacacaacttttctagtctcttcactgtcggcattccctctaacaaacttctaccacttaaatcatgtaaagccctgaaatttaggtgaccaaatctggcatgccatttccagcctacttcttcagagttagtcagcagacagattggtgatgtcaggccaaatctagtagtgtataacatgttaccagccctttcagcaacgattaatagtttgcattcttgatcataaacacacagtttcccattttttcttcatatttaaagcctttttcttctaactgaccgagactaacaatattgcacttcatcttaggaatataatacacatcagtcaagactttatgacctctactctgatcttgcataaccaccgagcccataccttgaattatgactcgagagccatcacctagccgaactgttccctgaacatttgaatcaatcggtgtcagcattgatcttgaacctgtcatatgattgcttgcacctgtgtctagcacccacatatcatcagaca

SEQ ID NO: 116236 - DNA, 672 bp, Zea Mays
attggacctttcaagaaagctcagggaggatacactcatgtgctggtggctatcgacaaattcactaaatggatagagttcaaacccatcgcttccttaacctcagctaaggccgtggagtccatacaagatataatattcagatttggcataccgaatagtatcataactgacttggggtccaacttcacaagttcagagttctttgatttttgcgagcagaaaagcattcagatcaaatatgcttcgttggcacacccaagagccaacgggcaggttgaaagagctaacgggatgatattagaagccctcaagaaaaaagtcttcgataaaaataagaagtttgcagggaaatggataagggagttgccctacgtcgtttggagcttaagaactcaacccagtcgagctttgcatggaaatacccctttcttcatggtctatggttcagaggctgtactacctgctgacctcaagtttggggcgccaaggttgatctttgaaaacatagcggaagccgaggctactaggctagaggatgttgatgtactcgaagaagagcgggtgaaaatggtaattcaatcagcacggtaccagcaaactctgaggcgttaccacgataaggccatgcgacgccgatcctttgcagtgggagatctcgtcctccgccga

SEQ ID NO: 116237 - DNA, 509 bp, Zea Mays
ggatcatcgcgacataatcacaggtaatgtcaccatcgtggcactcgcctttccttccgcatcgtgtagcacctcgctgaagtccgatttgtgcacctgggccctgcgccggagaaacgccgatgaacctccgccgcggttcggggcggtgcggccgtggttggctgggtgaaggagagaaggcattgtggccgttagatctcattcaacgtccacgattagatctggggatagtgggatttgcgccgttagttctccgatggacgatccagattacttgcaaccatacccattcgcgcatagaatatcagtcgtagatctcacatcctacgcttgtcatcacgtaccatttcgcgtatgccttaatcctggcactctgttgccgagtggacggctcggattgcacagtaccctttcaattgtaacctttgctaaaagagaccctgatctttttcgaaatcaacccgcagtccgcggggtatgccacctgtgtctcagttccttttgcg

SEQ ID NO: 116238 - DNA, 663 bp, Zea Mays
gccgttgcgattcgtgcgtcgtgggttgcagatagctcataagggtaggaaataacgcgacgtgggtgaactccggtcactattctactccggccgccgtaccaagcttggatcacgaccacttcggataagctcgtcggagttagccacttcgtgaccgtgcgccacgtgcctcggtggtttaccacgtcgcagtagttccccttgtgcatatccggtgatcgccggtgaccccgccacggtgacagccacctattccttgcaacagtattcttttcactctccgaccgccaccgcgccatccgaaattcaccggccaccgcccttggagcctataaattgagggcggggatagttgcgccatgtaatcgtcaagctatagcacccactctcatctccaatcgttccccgtagctccccaatttgggattacccccaaatcgatcgaagaacgccgcgaaaccaagctcgccgtggtcagctcaattcgggtcagctcctcccctctgctcccttgtttaagcattcacatacatcggtaatactcgccaacccatccaattgaattaggagcccactcgtcgccaggaacgcgttcatccacccgcaacatccatggtcgtcgtggccagtgcaaaccatagggtcattagtgaaattagg

SEQ ID NO: 116239 - DNA, 391 bp, Zea Mays
ttgttgatggaatggttgccctccctttcctgcctctggcatttttagtgtctagtatgaaaaacaagttttagtgcacttaccccagggcttctcctattaccgaatcatgcgtcaagcgacctcgacgctgttcaaggacctcagaaggctgttctataagcttctggcgcaccctggcgtcaagccagtcgtccctgattccctacatcctgcgcgtcttcggaggaatcaggagtattttgtcgtgggtcgcgggatccgactgtgcagctcccgggcatgtttctgtacatggcctgccatgttgttgctcggactttccattgatgacgatgtgttgtgtagggggcgtattgttccttcccacacaatctatccaccagaagga

SEQ ID NO: 116240 - DNA, 312 bp, Zea Mays
gcacccctcaactgttcaaagagaacctcaatacggggaagcagatatttattcttgattgtcacttgattcaaagcgcgataatccacacatagccgcttgcttttatccttcttctcagcaaacaatactggggaagcccatggagacctgctaggcctaatgaaacccttagccagcagatcatccaattgtcgcttcaattcaacctgctcctttgtggccattcgatacggggccttatgaatgggctgcgtacctggaatcatcttaatctctaaagctgcatcgcgctccggaggaatgcctgca

SEQ ID NO: 116241 - DNA, 512 bp, Zea Mays
tgtcagtgaagattttcccatttgtgtattcgaccactccgttggactgtggatggtagacagaggcgaagactgccctggtgccaatggaggcagacaagtctcaaaattcttagttatcatattgtttcccattgtctactgtgatctcggaggggaccctaaaatggcagactatgttttaccagaagaatatttgtgcgatcttttatgttattgtggaggccgccctcacttctatccattttgtgaaatactccaccgtgccgaaggcatacttgagattgccttgagcagttgggagcaggccaactatatccccccatcgctgtaatggccaagagttggcaatcaactttgtcagttgcgaaggggtgccatttcacggtgacaacttttggcatgctttgtatgaacacaccacgcggttggctattaggacaatccttggccaatagaaacctttccgcatgacatttgctgcgagggccttgggcctaagtggcagtcgt

SEQ ID NO: 116242 - DNA, 302 bp, Zea Mays
acatagtcatgtagatagttttgttgaatcagacagatagttttgttgggcatgtaatcgtataccaccaggttgcagtccgcgcgggagtagcagcagtagagcttcacgatgttcttatgccggatgctgaccagcgtctccacctccatgtggacctcacggtcttcgagccaccgccgccactgttgctgtctctgctactactacttttggtagtggtggtcaccgcgcgcagccgccatctagtcaatctgcttgctgctcagcccacacagcagccacttcgacgacgacaccca

SEQ ID NO: 116243 - DNA, 348 bp, Zea Mays
gaaacaggaagtgaatagcgcagcgttcttcatgggtatttagtgctaatttttccctccaaatttttcaccggccggcaccacgcgtgcacagttcctttgcccgccaccgcataatgagtcaggaagcgaatgaacgcgcccaaaattccttgggccggcaacataatctattccttgcatgcatgatgctaatatatttccatccatgcagtttcctgcatgttcatgtccataattatctgcccacgattctctctcacgtccacaaatttctcctccacgcttgcagccaggggcaaccagtggaaaaacaaagttacgctaattttcgtgcaaatcctttag

SEQ ID NO: 116244 - DNA, 641 bp, Zea Mays
tgtattaatgcagtatcttgccgccattcgaagcctcaaaaaaattcaaaggcttcacattacaacatatcgagcgcaacaagaaaccccgagggtctgcaaagggtgaacccttgccttatgatgtattcaatcacatagtcggcacaccagacgtaagaaacctcgagggtctgcaaataacgcaagacgacgatggacatcggatagtcaatctgataatggtcgaagactggtgggctccaatcaccctatacctttagggccactaccacccatctgatcatagcaaagccaaaaggttaaaacatagaagctgagactttgctatagccaacggccatctctacaagaaaggaataagccaacctatgttgaaatgcgtaactgaagccgaaggcatagagcttctctgcgaagtccatagtggtatatgtggatcacattcaggaccgagggcccttgctgctaaagtcatacgccagggtttctactggccagaaattgtgtgcacggccaaccgtgtaacccggtcgtgtgaagcataccaaaaattctcgcctcgaacaggcgccccttcgcaattcacaaagcttattacgcatacctggccacttcaacattggggattagacatcgtc

SEQ ID NO: 116245 - DNA, 732 bp, Zea Mays
gcaaggagccaatgatcatggatgtaggcatgaaggtgcattgtgtccttggagcgtatgctagtgatggcatggagggagactattgggccataaggcctgtcctcaagggccacctcaacaaactcatccttgggtgccttatcaagtaggtactcagcaacccaagcacttgtacgtggtgcccatggtggcgtggtgggtgggcagttgcggcggcgcgagaagagaagagaagagaagaattggggaggctggctggccaacagccgagccgatggagagaagagaccgagagactgcgatgccgcgggccatgaccacatcagatgaggagtcaaggaggtttcactgtcaatcctctgcagttaattcccagcattaacattaacatgtatattcaaatctagatcgaaatagcatttaatttctcgccgagaaatcaccgaaactcggtgttttttccgttttcgctactaagcaaaaaacgaatttcgaaacggtttcaaattttagtcaacaaaacaaattcggtttatcctaaacaaaattgtgaacccgggatcggatccacatatcattaatccatctatggatacctcttgggcagatgatctcattagtctctcgtatatacaactccgtgacgatagtaacaggcttcgatctactctactcctagtcttcttcatcatctctctctcttatttttcctctcatttttaattattt

SEQ ID NO: 116246 - DNA, 601 bp, Zea Mays
agatggcccgttttctgaaaggactaagacccgagcttaagaccatcctcgccagccaagacttcctcaacttctctcacctctccaacaaagctatccaagtggaaagggcaaaagaggaagaaaaagggcacctcaagaggaaattccaagttctccgagctcaacaacaagaacgtcaccagagagctcgaccttttgggctcccacccaggggaccaagctttaataaaccatctggacccactccatcgcgctatagtcagcagagtcagagctcccttcagacaccctccgttgcaagcaaccaaccgccagcaaatgtctgttggcactgcggagaccccagtcacttcaagaataactgccctcacttgaaggcacccggaccgacctactccaactcggtaaatggccccaagattccctcggcacctacctccaaggcacctccttccaacagccagcagagcaggactcagtaccagggcagagcccgtgtcaaccacgtcgacgctcaagaagcccagcaagctccgggagtagtgctcggtgagttccttgttgaatttactcccgctactgtactttttgattcggg

SEQ ID NO: 116247 - DNA, 631 bp, Zea Mays
attgttccctagaccaagatggtgatgcaagttgacacaagtcttttatcctggttcgggctagaagaggccctacttccagtagagggggatgagacttatattactcgcacctatgtgcttgcagtagggtttacaagcatagcgggagagggaaggatcccaagtactagaggatgattgaggcaagtgccaataccgagtggaggagaaagcttgtgaagtgttcgcccgtgtctcctgaagccgtaggatatcctatttataggcccagggggagctgcctggaggatgggagtaggtcgcgactgtgaggagacgtctttgtatccctgtagatggtatggcctgaggtatggtcttgtacttgttgttgacttgtgcctgcttggttcccgctgagagccgaggccgagggccggtcaagtacccgagcccccctggcgaggggccacccataccgtagtagttgacatagtgctaagtatggggaaaggcttcttaaggggcgcgtcagctccagaacatatgatgacgttggggcgtcctccatcatggataccgaggtcagagccaggctcagacgaggcggaagtcacaattgaaggaatgccctcctgcgggattcgcg

SEQ ID NO: 116248 - DNA, 841 bp, Zea Mays
ctcgatcaaccttcattgtatttcatttcttgggggcaggggatcgaggtctgagtgagaagattccttgtcgtcatcattttttctcttttgtttggatgtgacctctttccttttcttcctttctttggcagatctctctgtttgtctcatcataatactaacagtttgtttcctattcacctcggaagcttcttcttcagaaatttttgaataatatggataatcgaactgcaaagcgtccatgactctgttgacccatcgcttttcttggttaccaaatgcagcagtcattagctagtattccttattcgtaaaagtccccaaaatctcattccatatcatctcaattgtttttgaccattcggcgcaaggttctttaaatacatcccgaaccttgaatcggtatggtagtctaacaagctttgtcttgtccaccacatctttcagcttcggcattccccagtcaccaagtgttgggaataccttattagcaagatactcttgcaccaagtcatgtgtactgatatgctcgataacttgggttacctgtgtcggtgaaccgatgctcatattgcaaattggttgtgttaaaccaaagtataagccaagagggctcatcacaatcttcttaaatttttccctgcccttaatgtaacctttcatatagaaccactcatagtccaccaagttggccattttgtctgataccctagcacaggagccttcgtgtcttttttgtatgtgaagttatagcacccaaaattcttatgaagattgttcgaagatcttgccttattctgataatgaagttcatggatcctgcaaaacacttcaagat

SEQ ID NO: 116249 - DNA, 560 bp, Zea Mays
atcatcatcatcactatcactctcatcacaagattgtaccttggatggcttagccatcaagcatgtcgatggagagtcaaagagagataggttgttgttgttgagggcgatgcttgcaagagctttcttcttagtgttcttgcactcatcatcactatcatcatcctcatcggtggaggcatcactatcccatgtgatacaataggattgccccttcttcttcttaatgttcaagttcttctccttcttttctttcttcttcttgctcttcttgtcatcatcactctcattgtcattgtcactgttgaaaggacaatcagcaatgaagtgatccttgcttttgcacttgaagaatctccttggttcttgcttgttcttggagatgaacttcttcttgccttgaccgtagccctttttcttcatgaatctaccaaatcagcgcacaaaaagagctaactcttcatcatcttcatcacttgggcatgcctcatcttcactttcttctttctttgccttgcccttgctcttggatgatgtagctttgagtgccacactcttcg

SEQ ID NO: 116250 - DNA, 393 bp, Zea Mays
tttggaaacaacggccgagtgaagactggtaatgtcagcgtttttagaaataaccgctgagttatattgggccgtgtcggccgttttggaaataacggtcgagtgatgatgtggcacgtcagcattttagaaataacagctgagtgatgacatggcacgctagtgttttagaaataacagtcgagtgatgactgggcactttttagaagtggcatctggcccaggaaaaccccatttgtactgcgccattgcatgcctctgcattctgagccctagtcttgcttttctgcatccaggacttctctgctttcttgcaatctcgcttccgcccagctcgcgcagcaagattgagatggcgcccaagcggaagaatcagggttcatctaccgtgtc

SEQ ID NO: 116251 - DNA, 910 bp, Zea Mays
accttcgcttcggtcgggtgccgaaggccacggtcatcagctgatcttctttcttagtgtaattacacaaaattttgttgcacatggtttctatcatttctaaccattcttggcatgacactttaaactatttctcaaatttgaaccgatatggcagtcgcacaagttcattcttctcctttgtcccctttagcttcggcatgttccattcactcaatgtcgggaacaccttataggtcagatattcttggactagatctctagtgctgatcttctcggctaccatccggaattctgccatagcttcttggcacggtgaccccgttgacatgcggcacaggggcctagtcaacccgaagcttaagcttagcgggctcaatactagcatcttgagcttctccctcttcttctcatcggccttaacataaaaccactcatttttccaaccagttggccacttggtgcgatagctaaccaccggagtcttcatatctttacaataagcgaagttgtaacaaccaaaattctcataaagaccatcttctctggccttcgtctgatagtgaagctcgggcactcggcaaaaagcttcagcatttgggtctattccttggcttcggagtgcccagatgaagacgctaagcctaacgatagcgttaggagtcacatgatgaagatagatttcgtaattttccaaaacttccccaatcatttcattcaaaggaaacctcaatcccgctctgaagaaactcctcaaaactaccacctcatcattttccggtgtcggagtggtttcttcccccgccaaaacgaaccagctttttctcaacttctccgaagtagcctagctttatcatcataggcatatcagcctcagaaacagtagattttccaaagtccaagtggctcg

SEQ ID NO: 116252 - DNA, 327 bp, Zea Mays
gttttgcatgtagagctatgcatgtttttcattatcatcgtgtttgtgcatcactcgtttcttgtttatttcatagatgctattttctgggacaattgctgaaaacattgcttatagagaccctgtgggagatattgacatgaatagggttgagtacgctgctaagattgccaatgctgaggagttcattaagatgttgccagaagggtacaattcaaatgtgggacagagaggttctagtttgagcggtggacagaagcaaaggtaaaatgctcactttccagtttccagactaccttgtatcacaaggtaaacatgttgaccata

SEQ ID NO: 116253 - DNA, 364 bp, Zea Mays
cagaaagtctgatcatccactctctgtttcatcatttcaatctgagatttctctggagccaccttggcccgatcatccaccgaaccttcattatccagcacatcagaaagttgactatcagagaagattttttgttctatttccttattaagcatcaagacttcaaatgagttcaccgtatcagtgtgatcttcaactttttttagatcggatgaaaagaatccttttgtgggatgaaacgccgcaatgggtatctcatcataaatctcttgcagtgtcccctccaccccagcatcttcctccatgtcctcctgagattctccaaaactacaatcttgatttttctctaactccttccctttcc

SEQ ID NO: 116254 - DNA, 916 bp, Zea Mays
ctaatcctgtgttggtcaagctggacagagttttttgctcttctgattgggaggctattttcccaaatgtgttgcttcaaagttctgcttctcaggcttctgaccactgccccctactcttggggctccatgataattcatttgggaaaaacggttccactttgaagcattttggccaaaaattgatgggtttcttgatactgtacagtctgcctgggactctgtgggtagttcgccttgcccctttgtgaccttggatagaaagctcaaagagacctcaagaaggctgcacagctggagtgataagaaagtgggtcatgttgcctctcagttggcacttgcaaaggagctcctccataaatttgaaactgcccaagatcacataatgctttcaccggctgagaattggctcaaaaataagctcaagatgcaatccttgctgctggcctcctttaaaagaactatggacaggctgagatcaagaataagttggctgaaggaaggagatgctaataccaaatactttcatatgcatgcaaggcatagaaagaggaaaaatttggtgactaaacttaaggatggggataacatcttgaccagtcatcatgagaaagctggagtggttgaccttttttactcaaaacttattggtcatgaggttgaaagggatagatccatcaaccttgaagctctcgagcttccggtgcatgaccttgctgatctagagctacctgtttctgaactggaaatctgggaaaccatcaagaccataccttctgacaaggccacaggtcctgatggtttcactggaaggttctataaagtttgttggaatatcattaaacaagaggtgatgaatgttgtggcagctttatggaacagaaactccttaaatttgagcaaacttaatagtgct

SEQ ID NO: 116255 - DNA, 668 bp, Zea Mays
tacacagtcatcatggcttcgcgcaagctgcgacattacttcgaggcattcaaaatatgagtcacttcagatagtggccttggggaactgctcaaaaatccgaaagcatccgcaagaatagcaaagtgggcagcagaactcttagggtacaacatcactttcaagcccagagcagcaatcaaatcacaagtcctggcagatttcatcgtagactagacaggacctgtggggccacaataggaccacgcagaaacagtctggactatccactgcaatgcacatggtgtcacgtaggagcaggcgctgcggcgatcatcacatcacctgccgaagtcaaatacagatacgccacgcgccttagttttgcactacagtctgacagatgcacaaacaacatagctgagtacgaagcggtcatcctcggacttcgcaagatatgagccctcggcgtggccacatgcatcattaaaacggactccaaggtcatcgccggccaaatcgaaaaggaatattcagccaaaaagcccatactaatacagtatctcgtcgctgtttgaagcctcgagaaacaattcaggggtttcactctacaacatgttgagagaaacaagaacgaagatgccgatacattagctaaagcagcagcaaaaggtgaagccctgccctcc

SEQ ID NO: 116256 - DNA, 474 bp, Zea Mays
aaatagcacaggcggttgataactgaatccgcctgtaaaaatgtaccgtaccgcaggctttgagcctttttctactagtgaatcatggttgttcactgacgtctcaagggagaaacaccaaatatgcacttcatggtgaaaacatgagtacaactaaggtaatacctcgtcgatggcatctatccatggtggctagtgtttgtgaagatcgttctcctcccacagactctgaagtagtgaatgtttgttgaatgtccggaggacgtgtgaaaggacatatagagatcatttggggtcctcaaggcacacttccatattattgctagcatatgtcattcttttcccctgctaaatactcgatgtgattgtgcatatatgtatcattatgcacaacatgatcattgtgtaggagcatgaagaagcatacaatatggacaactatgagatagtcgagtactgcattgcggcaccaac

SEQ ID NO: 116257 - DNA, 338 bp, Zea Mays
tggagaaattcagaatgaatcgccgataatatccttccaatcccaaaaagctctgaatttgtcgcacggtggtaggaggcttctaatccatcacttcttgcactttctcaggatcaactgatatcccatcctgagaaatggtgtgacccaagaatttgatttccctcaactagaaatcacactttgagagtttggcatacaaatgatgatcgcgcagtcattgaagtacggtatgcaagtgcatagtatgctcctgttcacttcttgaatataccagaatgtcatcaatgaaaaccaccacaaacttgtccagttctggcatgaacaccgaattcatc

SEQ ID NO: 116258 - DNA, 356 bp, Zea Mays
acttttttgccttgtgggtggtgtgtaccggcaagaaatgagctgtcttggtcaatctgtccacaatgacccaaatggaatcatggtgttgggaggtattgggcaatcctacgataaaatccatgcaaatatcctcccatttccaagatggtatggaaaggggttgcaaagggcctgctaccttcaaatgattggccttgattctctggaaggtgtcacattcggatatatacttagcaatttccctcttcattctggtccaccagtataaggatctgaggtcatgatacatcttattactgccggggtgcatggagaattttgaaaggtgagcttcatccaatatcttctttctg

SEQ ID NO: 116259 - DNA, 764 bp, Zea Mays
tggaaacgcgcccgcgcacgcgcccgcgctgtcggttttgcgcagagagccctgacgatttgaaattctttcaagagtccctcccactatttctctgtctcactgacacttgcaaaaacacccttgcactttcctctcttcacaacccccagtccacgacggcgaacggtggggaaccgagctctggcgagcttataccggccgggtcactcgatgaccggtgctctactttggctgagaccaaattcaaaccttaacaagagtttcccctcaactaatttcactatcggagctctaacacgctctgtccacggtgatagcgggccccacgggcaattgaacgcgttcccagcgatctaaggggtcttaacccaattgacggggtcggggagcatcaggggcacacaaggacattgaaacgaaagagcagagggtatgagcggacctgagacgagctagccacgacgagacctctttcacggtggtagaaagcaagtttgggggaaatccataattggtgagctctgttgagtaattggagtcatggctgggtgtcttgagtgcatgactaccctacgaacccatcagcgtgctcaatttatagcgtgcttgggcggtggtgttcaatttggacgaattgtgctggcggtcgagaggggagctgagtcactggcgcgctgattcgtggccttcaccgtggcaaacccaccggcgacgagccaaggctgaggagcggtttatggtgactcaccgtgatgtggtaa

SEQ ID NO: 116260 - DNA, 553 bp, Zea Mays
agaaggagcagtgacgcaccgtccactagtgcgaaagtgcgagcagatcgctggctgcctgcgacctcgccaccaccacaccaccaccaccaaattgcagcgcggtgcgtgggcgccacctgttatttgcttcgtcactgaactatcgccgcgcgggctctgttggatcagagaagggtgaagatgcgagaagggtaaacatgcagttagctgaccatgattcagctgatagaccatggtgaaaatgcagattcttactcgtgcatcaaaatggtggtccctttgcaatggatcagcctaatgttgtaaccaactggaaacagaaaaaatgcaaagaatactgtcagtaataatatcacggtcggctgccatattgtgcactgaaggagatgaaatgcaatggaatgattgaaagtgacaaaatgaactatctgacagctaaaatacgtcagcagtaaacttagtcatgaattagtacctaattcccaaaaaggtgcaaatgcgaacacagtcactactgtcggccactgaatcccccaaaagtgcggagcac

SEQ ID NO: 116261 - DNA, 592 bp, Zea Mays
cttttgtttctcagcacgaatgcgaactcgataatcattctcaatttataaatctcgttcaaagcttatttaatcgaacgctcgacagttgctagtcgagctgtttccgaatctaatttctcgatgttcgatctatgtccaaaaatttatctcattccgtattctcaagcggaatctccaatgtttcgtcctctaataaatttttatccaactcggcttaaaatctctatgtccaatctaaattccaaaatcaacatcgacaatgatttttattaatccgactcgttttattttgataccgaatccgaagccgatcgatctcgattcattttatttctacttgtgtgcaagaatttaatttccaagcgacacccaaataaaatgtctcggttcattttatttcctctcatgcatccgtacgtcagttcgctctgtcccctgcgtcggtctcagccaacgagtgagcgttgcgcgaatcggctaacagatgaccactcctctccaaccaataaattgcccatcttaatatacaactcatacgggagctcttgtctcagaataaaaatcaaacgaaaattactcagctcctaag

SEQ ID NO: 116262 - DNA, 930 bp, Zea Mays
gaggattagggttgaaagggatccgactctttgtgggcgacgcaacgaggaagtagggcaccttttttgttgtgaccgaacctcgagataaatcttatgtctcttgtgttctttctcattgtgaaagaattgttcatatctttttggtgtgtggattttgagaagtgcccttctcagttctactactgtgaaccctgtggatcatctaggacatcttatttccaatgataattgggtgaatttcgagatccattcagttttatatctcattctttagttgagctcgtacaaactagttgaaccattttgacactggttgaaccggttttacccagtttgtttctagtttttgttgaaaaagtttctgcttgcctattcacccctctaggcaactttcaaccgccagcgctctagaggactttgaggacgactttggcataaccgccaatcttgtggtcaacatccttaagctagaggatgtgatcaacggatctccctagtttaggatgtatttataggttgttttggccacaggatggcccatgcccttctaatattatgtctatttctaaacttggtggaattgttcatctccctttccatcccccgatatttttagtgcctagtgcgaaaatgagttttggtgttcttattttgggacttctcttatttctgatcaagcaccatgcggcctcaacgcatttcaagggcccagaaggtggttccataagcgtttggcccatcctggcgttaagccagtcatccctagtttcctgcatctcgcacgtcttcggagaaatcgggattattgacatgtgggtaacggcattcggctacgatactccctaggcatgttcccgtctatggcccgccatgttgttacccgggccttcctctgatgatgttgggttcgtctagggggcatttcat

SEQ ID NO: 116263 - DNA, 546 bp, Zea Mays
gccagctgctcccgatgcaccagctcccattgccgcaatctctggtggcacgttcagatgcaactagacatacaacacatgcacttcctcgtgcagagtgttattatatgcttgcagattttccagggctatgcttagctcttccacctgggctcgggcagtcgcctcgtaatcctaggctatagattgtgaatttacagcctagtcaattgccctatcccgctccacattctcccgctgcaaacggtcaacctctgctgacaactcagcgatgcggcgactatcacgcgcacgctccctgcttccatggcacagttccatcgttaggcgttcaactctgacctccagatcccctatgggatcattactccctctactgctcccctcatgtcgaggagccaactggtgccgaggtacaccctgaggtccggtcgccttccgctgggtagtctcggtgcatgccatgtctctataaaagggtaaaattacttagtattgtttaaatatgatgcatgcatgacctgcgattatgaaatcaacctcttg

SEQ ID NO: 116264 - DNA, 565 bp, Zea Mays
tcaaaggttttaccttgcagcatgtggaccgcgccaagaatgaggaggccgacgcattggccaaggtagccgccagaggcgaggccctaccctctgacgtattctaccatatcatcggcacaccagctgtccgcagcccagaggggctccaaataaccaatgacagcgagggccaccgcatagtcaaactcatcatgaccgaagactggcgggcaccaataaccctgttcctgcaggggtactatcatccaaccgatatcaatgaggccaagcgcctcaaacatcgaagccgggacttcgcactaatcgaaggtcagctttacaagaagggggtcagtcaacccatgcttaaatgtgtcaccaagaccgaaggcgtccaaatcctgcgcgaagtccacagcgggacgtgcggctctcacgcagggcctagggccctagctgcaaaggtgatccgtcaaggtttctactggcccgccatgatctgcgctgcaaatcgggtcacaaggtcctgcgaagcctgccagaagttttctccacgctcgggaagcccttcgcaattcacaaa

SEQ ID NO: 116265 - DNA, 356 bp, Zea Mays
ttcgaggcttgagctcgttatgaaaagcgaactaattgcgcgaggggctactattgagggcctccatagccgaacgtccttgagatattgtggtaatagttaaagatgttccaagtattgttaacaggtaacaaatgttaccttcgccgaaggtcctcgagatattgtgctaacaattaaagattttccaagtattggtaacacgtagcgaaggttacctgcgtcagcacccgcgtataggcaagtgacaaagccagggaacttcagcctcgtcgagttgatcggtggacatgaacgaaggggaggacgtacgaagcatgagaggaacccggcgagcacgacggataatagaaaag

SEQ ID NO: 116266 - DNA, 612 bp, Zea Mays
tgcttatatagtttatacatttgcaagagtgccaaaaaccttgtgaatttcaaataaagcatgtgaaaaatatctttaaaaacgagtgatgaaaattggtacgatagactgtttgtccttggagcacagattgttcgtcaatataactcatgaaagtggaaaaacatgtgtaattttgtcatgaaagtctatggtaaactttgctcttggggcgtggactgtccttgactataactgttgaaagttgatggtaaacttcgctcttggggcgtggactatccttggctataactgttgaaagttgatagaacatgtccaattctaccaaggacctgaaaagtccacgatggaatatccgcccctaaggcacagattgttcgtcaatataactcatgaaagtggaaaaacatgtgtaattttgtcatgaaagtctacggtaaacttcgctcttggggcgtggactgtccttggctataactgttgaaagttgatggtaaacttcgctcttggggcgtggactatccttggctataactgttgaaagttgatagaacatgtccaattctaccaaggacctggaaagtccatgatggaatatccgcccctaaggca

SEQ ID NO: 116267 - DNA, 488 bp, Zea Mays
ccttggtaaatgggtaacacaacttttgggtaaaagtgtgttgttatgaccggcaggcagtaccaaaggaagggggcgtgcggtaggggaaagagatcagggccccaacgaccagtagtaattctagaagctatttccttttgaaagtttccttttatttagagataaacttccttttattcagggagaatagtttccttctattgagagataagcttcctttagtgagggggaagcaggcataaatagaagatataagtgaggagaaaggaataacaaaggagtattacctagctggcttccttgaggaggccggaaccctagccgctcttgtcttccttgctgtgattatgacttctcgttgtcccccttgaccagttcattcccaacctcctctagcacaccggtatagcttgagggcggttcctggtaggagtagaaatcctatcaacctggtatcagctatgtctagcaatcctccattcacc

SEQ ID NO: 116268 - DNA, 358 bp, Zea Mays
gcgagtgtgcagacctccaagaagcatggtgcagccgacttgcggaccttgtgaaaagcatgtgggtctgcccccccttttttttgctggaagtcatggagaaaccatgtgggtcaggcgtttctgcgtggatttttgacgatccacagcctataaaaacatagagcgacacagctgtagtagtactgtagaagtcgggcagtgtgggactgcaacatgaattgtgatgtgttgtgtggttgggacttggaagtggtggtgtaaccatgtgctgtgatgttgcagccatgtgcgcgcggtggtcatggtcgattttgctctctgccgtttgaacattccgaccatgcctgaactggat

SEQ ID NO: 116269 - DNA, 744 bp, Zea Mays
cacacatatccagtacaacatccagtctacttcatcagagaagttctaggaccctctaaaaagaagtatcccaaagttcaaaaactactgtacgcggtacttctaaccgctcacaagctccgtcactactttgacgaccacaaagtcatagtagtcaccgggtttccaataggggatattcttcataacaaataagccatcggaagaatagccaagtgggcctgcgagctgggagctcatgacacagagtttcggcctcgcacaatagtaaagactcaagcactagttgacttcgtatcagaatggactgagcatcaggttcctgacaacccaaaggctactgaagtatggcaaatgtatttcgatggctcgctgaaactgaaaggagcaggcgcaggcatcctcttcattgcccctagaggtgaacaactcaagtatgcacttcagctattattcctagcatcaaataatgaagcagaatatgaggcactgatccacgggttgaacatcgccgtgtcactgggcgttaagaggttgatggtatatagagattcactagtggtcataagccagataacaaaagactgggattgctcgactgattctatgggcaagtactgtgctgccgtccggaaattagaagacaagtttgaagggttggagttccatcacgtggaaggagaccgcaacgcagcagctgacacgttgtcaaagttgggatccagtcgggcccaggtcccaccc

SEQ ID NO: 116270 - DNA, 749 bp, Zea Mays
aggggaccaaatctgaagctgaatttgtggtcttcatgggaataaaatgcgcagacttagtcaagcgatccactaccacccatatagcatctctgccctgaggagaacgaggtaaacccaccacaaaatccatggtgatatgctcccatttccactccggaatttccaatggcttcagtaaacctgcaggtcgcttatgctcggccttcacgtgctgacatacttcacaggcggccacatacttagaaacgtcaaccttcatccgcttccaccagaagttttgcttcagatcttggtacatcttggtttcgacagggtgaatggtgtaaggcattttatgagcttctctcaatatatccatcttcacctctgatttctaaggcacacaaaggtgacccctgaaatgaaccaaatcattctcatcgatggagaactctcggggtttaccatcgccaaccctctttcgagcttcctgcaataaacgatcctgctgctgagccgcacacactctctccatgagggaagattgaataagcatacgggtctcctcactagcggtgccgacatagcacaaggcgatccccaaacggtccagatcagcaatcaactgcaaggccacttttgaaaccccggacctgctaagggcatcagccaccacatttgccttccctgggtgataatgaatagacaaatcataatctttaatcaattcgagccaccgatgctgcctcaaattcagctccttctga

SEQ ID NO: 116271 - DNA, 885 bp, Zea Mays
tttggctaatgatcaactatggagctctggccacggtggccgtgagcatggcggctatacggtcgtgttcccggcgaccagaggacttttagttcaattcagtggctcggcaagcatcgtagacgcataagaaggcttaaacaagagagcagaggggaggagctaatcggagtatggctggcgacggtgaagcttgtttcacggtggcggaaaaagatttgggggaaaacgcgaattcgagctcactggtggatgattgtggccgattagcggtggctagttagctgacgacctcacggagctagtcacgggctcaatttatagggaggacgggcggtggcgcttgaattgacgatggcgcggtggcggccggagataaggaagaacactggcgcaagtaaattcgtggcaaacggcgtggcaacctccccggcgacgatgggacagccttaaggtgtcacggtggtgcggtggaaaggctaagccacgcggcacatggccgggaggcggcggtcaccggcgagttaatccgctcagccgcaaagagggagagagggccacgggggtcaccggagtgatcgccagctcaccgtcggcgaagatcttttaccgtgtgcccttatctgcccatcccgtgcacaagttgggccggcaacgacacgaatcacggcggaggtatcgtcggcggtgagagttccgcgctggcagcctgatccaatccaggctactgtaccatcacgagtttcagtcagatgaaactgacagccaatgttgaactcgaatttcctccaaatttactgtggtgactgatttaagtctctatactaaagttatagacctatagttcatcttcaactttgccatggagctcaccataaaatagtt

SEQ ID NO: 116272 - DNA, 384 bp, Zea Mays
aaagcttcaaaacttgaaaaacgcctttgctacacatgtcgtaagaagggacatcaatgcaaggattgtcccattggtaacaatcctactcctaacttgtcaattgattctcatgtaactaggcaacccaaaattgcaacttgtgctagaaaggtaatgagtttacctagtgctaacacaaaggacttttgggttcctagatctttgttgactaaccatgatggacccatcaagcgatgggtaccaaaatatgattgacatgctttgcaggagaaggagatgatatgaagccttgggatgtttgagagagtccattcaattcttattaactcaaactatcaatcttcaatgatctatatacatgattgactcaaggttattttt

SEQ ID NO: 116273 - DNA, 465 bp, Zea Mays
gtcgcaattgatcacaatacacaacccttctattgcctaaggccttgccacggtaacagccacggtcaccgtgcctgtgactcagtccctctctccggccaccaccgcgtcatgccaaattcaagagccaccaccctcgggtcctataaattgagcgtgccattggctccgctaggtagtcacgcacccaatacactagcccgtgcctcggatcgtccaccagagcgccccaatttgagatttcccccaaattggtcaagaacaccgcgtgtgtgagctagccgcagtcagcccttcacaggttcgatcacgccttcctagctcttgttttagcactcttgtatgcccttgatgcttctcgacccggccaattgaactagaccgtgctagatcaccgggaacacttcggatcgtcctcgatttgcgccatcaccgtggacagagtgattaagagccataaccttg

SEQ ID NO: 116274 - DNA, 636 bp, Zea Mays
acaaaagcgaagatgaaccatccacggcgcagagaggcgtggttgacagtccaaactccaatgaggttctagctatattgatgatccctcatgagccaaaaaccccattcatacgtggtgcagaattgtagatcggacaatcatcttaacccgaagtagacaccaaggagcacttctagcacgattatcttcctggcggctccaagctttctctcccatctcctcagcccgagtcccctagcttccgctctcttggtgttcatggggggtaggcatggtggccagggaggtgttcgcggcgaatgttctttttatatccagaacgcgaggccgaggtaggaaaacgggggagggcgttgaggtagaggcgagatccacgggtggtaggtcagcgaagtcagttgggaaaatgagccacgacacggcggattcggtcagccgttcctcaaatcacgtgtggcggcggagatctcggtcatggctgttgcggaggtgcgggatgacacgcgggtcccagcagcagtggcgtgcgcgagatgaacgcgactgacagacgaggtcccatattccagtgaccaggtctgaccgcgcataggagtgtcatagacaggccggtcccacataacagggtcgcgg

SEQ ID NO: 116275 - DNA, 391 bp, Zea Mays
agcgagtactaattaagaatatttgagttagcattaatcacaataacatgtatttataaagcgcaagtaaaaaaactataagttagttttaattggaaagccattttagtgactatcaaataaacaattaattataacacgggtcgtggcaaaataatgctactaacacgtaatcgacattattataaagctaacgcgactgaaacgtgtcgaaacgggtctgcgacccaaaatatatcgtctatctaatagcctgtggaattgcgacgacgtggcacatttctattggcccgaaacaaagccacgcgacggaccacaaagagcatggctgctgaaaatcgttcacagctaggcctatgggacactgacacatgacgagatggtttttttt

SEQ ID NO: 116276 - DNA, 430 bp, Zea Mays
gtaagaggtatgtgaacctcactaaacattaggcctaaacctggagaaagtgtattagtggaggtctaaccatcctaagcacttcacaaagcacataaactaatcatcatgtgtatcactaagcactatgcacgaagagagcactagaatggagcaccaactcctttggtatgtttctcagctaggtggtatttataggccccaagtacaaaattagttgtttccaaaagatgcaacaatttgcgtatgcactgaacatgttcggtgatagcactaacatcacattaatcttctgacaattcgaccaatgaaatttgattgttatgatgtttttctatgagcaccaaacacttgtaccaaataggagtatcgaacatgtcaaaccaccaaaagttattgttatttcctatgcacaccgataggagcacta

SEQ ID NO: 116277 - DNA, 1346 bp, Zea Mays
gtggccaatccagaaggtggttttgtgggatatggtgagcaacatatgtggacacataagtcgggcttgactcggctccccaattatgacgacctgctccttccacacaacattgatgtgatgcacactgaaaataatgttaccgagacactttgagcaacaattatggacattcctggtaagtcaaaggataacataaaggcaagagtggatctggcaacgttatgtgatataccaaaccaagagatgaagccgcatagtggtggaaagacatggagaaggcctaaggccgatttcgtcctgagcagggcctagaggaaggaaatacttcagtgcatcaagatgttgatgttctctgatgggtatgcagccaaactgagtaggggggggtgaacttatctactctgcaagtcttagggatgaagagtcatgacttgcacatatggattgaacagattcttcgtgcgatggttcgaggctatgtccctgagcatgtctcactagtgcttttagagttgagttatttcttctactagctttgtgcaaaagagttatctcggaccatgattgcagacttggaaagattgacacccgtgttaatgtaagcttgagaagatatttccacccagcttcgtcaatcaaatgcatcatttgattcttcatctcccctatgaggcacgaatggggggcccgtgcagggacgttggtgctatccaatcgagagatgtctaaagactattcgaaagaaatgtagaaataaatgcaaaatcgaggctttcattgcaaatgcatacatcctagagaaggtgtcaaacttcacaacaacttactatggtgacaaactgccgagcgtgcataatccacccctcgttacaatgatgacgacaatgaatcgaacctcagcatatttcaaggccaactcggaagcgcaagtggctcgaccaccaagaccctgacacatgaagagtggtgccatgtcatgctatatgtactgaccaaccttgaagaggtgacgccatacatgaaacaatttattcatgaattctggcgtcgatcaagggacccaactccacaagaatatgatacccttcttagaaaaggtgcgagaaatggattgcccgatttcatttcctggttgaaacataaggtatatgcttagtttatcaaagagatccgtctatgaactcaatttagtgtcttttaacttgcgaatacttgcggggccaaagagatccatctatgagtgtcgagttgagacaagtagccaacgactttgcttatagggtcaagaaatattttgggtatgacgtcaatggatactgttttcgcacaacaagatacgagca

SEQ ID NO: 116278 - DNA, 761 bp, Zea Mays
atgaggttcaccgtacccacttgctcgtcatgcggccgggatagatttcaccaccgttgatcgctcaccgttgtgcgccatgtgcttaaacgctagcccatgtcgcgttgaatcatggtatgcatgtccggtgatcgccggagggctgccacggtgaaagccacttatcccgagcgccagtacctcttttcccctccggccgccagcacatcctcgtgaaattggacgccaccgccgttggaggctataaattgccgcccccgttcgctctgttaggtaattgcgcaaccagtgaagcaacccgtgcctcaaatcctcccctaaaactccccaatttgggattttcccccaaatccctcaagaacaccgagcagtttgacctcgccgtggccagcgtgtctcaggtccgctcataccttctgccctcccgttttagtgttcttgtgtgcccctgatactccccgaccaactcaattgagctaggatcccttagatcatcggggacgcggttgactgtccgtgatgcctgctgtcaccgtggacagagcaaattaggtagcctttcgtgaaattagttgagggaaaacgttggttagggattgaattcagtctctgccatagtagggcgccgatcatcaagtaaatcgaccgacgtaagtttgctagagcgcagcccagcgccgttcgtcgtcgtggacctcggcctgtgaagaaatagaactagcagggggtttctgtaagtgtcagtgactccattgaat

SEQ ID NO: 116279 - DNA, 504 bp, Zea Mays
gaaagggagaaggcatatgaagaatagttatcgaactctctcttgttgtcgctttgaataaccttgatagtgcaaccaaactgagtggaaacccaaacaaagagatgagaaagagtggtaaatgtatcagacttaaagcgcaaagtacaagttcacgagtaataagaccaatcatcagaagtcaccaaatagtacttatatcccgaaacacttacaataggagaggtccacaaatcatattgaatgaggttaaaaacatgcacatcttgagagaagctagagatgggaagtctaacatgacgacttagctgacaagcacgacatatatgctcatgagtgcccttagaacaagagatgattgacctactagacaatttggacaacaagtcaagacaaggatgaccgagttggtgatgccaagtgctggagggagtctagtagtaagtacatcgacgttgatagagatgaagtagtggaagcaggaagctgtagagtgtacatggg

SEQ ID NO: 116280 - DNA, 948 bp, Zea Mays
cgtcaaacgcgtcgtcgtcagagaagacaattagtgatgcaacgacggtagtggagttgctgctaggtaacactgttgagtttggaacttcgaggatttactttggccacgtgcaagaaatgcagcgtttacgttattttgggaatggtgtgggcgcgctctgggggcgaagaggtcccggagctagagggtgaattggttgttttcgaagcgtttttcatggctagacttcggttgcctgcggaccggttcatggttgaagtgctgcgaaggttcgaggtgcagattcatcagctaacgccgaatgccatggtggccctagtgaagtttgtgtgggtggtgacttcgtacagtggagagccttaggtcaaggtctttgccaagaactactgtcttcattggcagaaaaaggtgattggtggcaaggttgtgctgtttggaacttgcaccttcacaccgagaagtagaaagacttcgggtgaattagtggagattgtgccgtgtgccaagaataagtgggggtaattggtgggatttttggtcctatgtggaggcagaggacatcgaaggggttcctgggctgcctccgtctattaagtgttcgcatttttatatcgtgtttccgtggtttaagctgaagaagggagataagggtgaagacacccttcgacgtgcagctaggaccagcagcagccgtgatttggtggaataatttatcacgtgcggagtgtggtcgctcactcatggctggaatctgggtgcagttaagctgcgcccgatgcccttcttaaataattggatggtgctgagccccgcctttgccgttgagctatggggatgggatgtgttcgccttcgtcagggaggtggaagcggaggccgtgaaaattattggcaactactcggcgaagacggagctgacgaggagttgggatatacgaggtttgaa

SEQ ID NO: 116281 - DNA, 582 bp, Zea Mays
ctcaatctccacatctttaaaataccaccattgttggacaactaatgcccccaaatgagggaggaatctaggttttgtttgctcctttcacttccaacagttgcaccttagttcccgtttttagtgttgtgaaattaaattgaagatatatcattattccttgttccacgattgatgttcgacgattataggaaataatgttaccctttacgcacttactaatcactcgtgtgtggcttacctacaaacttgtttgactaaatcattccatttgtagatgtggatgcgtatgtggcacaaaagcatcaaaatcttgacgaacatgccacacaacaagggaacactattttggtcattgtagtcattcacattatgcagcaacaagaagaggagtcgccaagtcagggtggttcagttcttagccggcaagtggttaacaaataccgctttgttgccccatttttcttggctctagatattaatgttcccaacatatctgctacaagattaaagagcaaaggagacagtatatttctatgtcatagctcttagtttgaaagtatctacctacatcatcattca

SEQ ID NO: 116282 - DNA, 278 bp, Zea Mays
gtttctttttcagcacaaaatagttctactccatggcgcaattcacagcagccaggctcgagggcacacacaccttcatctcatgcagcttctacaccatctcgtgcaacccctcgctcagtttcagcttctggaaagcaatctgatgggaaaggcaaagctatgagttctaatcagtacaactcctctactgcagcagcccaaaagaagacaagtaatattgagtgttttaagtgtggtggtcatgggcataagcaagctgaatgtcccaatcggcg

SEQ ID NO: 116283 - DNA, 295 bp, Zea Mays
cttgttgtgtggaagtgtttgaatcagagagagtactggtggcatagttatatttgcgatgaagttttgtaactgcaagctgttagtgctgtttggctgagaatccggtggtaaactacaagcctcctgactatgctgggttactgccgtaactgttgagggtactggacattcgtcttgagcagcagtcacattacagacttgctcggcatagatatcatttgattctacttggggctcgacaacttgaaacccctgctgcgactgctgatgcacgtccacatttgagatctta

SEQ ID NO: 116284 - DNA, 682 bp, Zea Mays
caacaccccttttggatattttaatttctgggcataatgatgagcttctcgcttttcctcttcagatagccttttgcccgaagcatgtcgtacaatgtaatcatgtactctggaagatgcttcgggagttgaagagagagttttttcaggcagaatttgctttatagcctcttctttcgtttctcctccggtttccaaggttcctccttggcgggctctgaaggcccagcttcggcctcggtctggctctttgcagcttcgtcttcggatggttttgcctcaatttgcgttttcggagcttcggcaggtttcttcggagtggtacttgaagactttatcgtctctagcacatctaatacattgaccatccttttcctcttcggagtcgtcgtgaggtctttttgtgccttcggcactgtcattcctgccgaagggcttgtaacttctactatatttgttttcgcggcccctatttctttaatattatcagccttcggcatcatagccggctcttcattcttctgtgtaagagcaggtcctttggcttcagtagtcgtagacgtctcatcaccaaattcgggcactgaggtcgattcgatgaagcgcggtcggtgagtaaggaccttcacctttttcctctttggtgcggcctcactcagagcaactgaagcatcaccttttc

SEQ ID NO: 116285 - DNA, 515 bp, Zea Mays
gtaaggcttgctagttgatcagccacgttggagattcacacaaatgcatggctctggtaaaatgtagccacaaggtcttaaatgttttctaagtgctttgtttgatttttgttttgaggatttttttttagtgctttgttaactacggaagttagaattggatcggaaatggcaagacaaggatatgataagactgtacgtaagaggaccagaacaatgttgggccggacagtgccattcgttctaggccttatcacatgagaaagagagaccatgttcatttgcttacctcttaatcgtcctttcatcacataatttactttgacgcctttcttccgcgtcaatggccagtaacaaactctcatgcatggttctcaaattataatatatcttagctttctagatacataggatctgttattcacttagatatacattatgtctagatacacactaaaaacaaggcagctgtaaaaatcaaacatcttatcattttgaattgaggaacaaagtat

SEQ ID NO: 116286 - DNA, 686 bp, Zea Mays
cgcatacaggctcgcgacgccatccggcgaagaattggagcattcctggaacattgataatctccgcaaattttttgtttgactgctcggggcccgcccgcccttgtaattcccacaacaattttattctggcccgcactcttttcctcccggggggtgagatttttaatgaggcggagccatgtaatatacaagcaaaaaatcccccgcaaaaatctacgtcgaaagaagaccgcatcgacggtcttcgacattcgaccaatacaaagtcaccgcgaggggcagcgctagccaccctcgcgtgcgacactccgcgcgaaaagtcgcctaaggttgcagccggactagcacaacaagtgcgaaaaatcgaagtcttcctcaaaagactacccgtgctaaaccctacaccaaactgtccgcgcaaaggctgactacaggcgcgtcggaccgatatagtaaacgtactagaccaagcgcgcaacgcctttataagcataactggatgcgcgcaggcgcacaacctcatcatacaaattacagttacatatgtacagtgagggcatcacaccttacatcggttcaaccttcggaatgattctcatctccctatagttaaatagcattatcctaagctcctcaccctcaaaaagactttgcaactccccctcacctacactcgcaacggc

SEQ ID NO: 116287 - DNA, 484 bp, Zea Mays
ccgttaatgactcttcttctcttctcgctcccttccacctcctccggttggacacttgtggtggtgctcgtcggggccacgataccggttgggctaacgtggcataggccatggtggctcatcggtcgagcactctctccctttccctatttaatctccatcggctccccactagccctagcctctttctagctaccattgccaccgtcaaagcttccttcgtcgaccgcatagtgtgtctccactacctctctcttcgattggctactcattgtgcttccccttgatcacccctatctttccactgtgctcccaacccttttcctctaatagaccgcaccaccgcaggtgtccctatccaccgctaagcttcccctcgatgacaactaccttccagcctctaacagttttatccattgttgtggtaagcttccctgggtaacgctcgtgccctcctttcctagtccatcttgtgtccttatcc

SEQ ID NO: 116288 - DNA, 762 bp, Zea Mays
caaaactgaaaaaagtcttggaaggttgcagattccaggcaaaatatgcaacaggagcaccaatattcgacactttgccgctaaggatcatctccagtcggcttaccaaatccatagcaggaatcctcctgttggtaacccgggttgagtcagtgacaccactatacaaataagccgggtatgctctgtccttcagtggctgaatgttcttaaaacaaagtctgcaactacagcttcggcagtcagacctctctccttcaacaaaccaacttcagcaagcagaaccctggcctcggctatctccaagtctgtgggggattcagtccaacttggagcacgaacattcggctgtctccctgaccgagggggcagggacttgccatgattctccacaataaaccactccaagcgccatcctttgatgttgtccttgagtgggatgtcgaggtactctgtcttcctcccaccgcgcatctctaaactcacgccacccacgagctagtgctgccccccggccattccaagccgataatgatataggtacttccacaagccaaaatgcggcagaattccgagataggcttcacacaagtgaacaaaaacataaacttgcagaatggagttgggattcagatgagtcagattcagatggtagaaatcaaggagactgtgaaagaaaggagaaattggaagagcaaggctgcggatgagaaaaggaacgtaaataacggactcgtgggtatcctccatcgggacagtaac

SEQ ID NO: 116289 - DNA, 565 bp, Zea Mays
ctctgctattgatgctaagccatcccatgcagatccaaatctgacctctagtccaggtgtaaaaacaagaagcatgtcttctctttctccaactagcccaggtcctacaacaaggaggatggcatcaatctcacctgggggaattaatcgaaggctcattattagctagatatgttacatgtccttctctattttgtgtgagcatggctgtgcaagagtgggcgcttttgtgtgtaaatattttgccgctgtgcaacactgatagattgtgtctgtggtacttctgttgtcaaaattgcaagaactaagctgcaatttaggtactgaaatgacaacaaagttcagttatatatgtactgaaatgttatgttatatcctgggcatatcctgttgaaatcatgtcctctttatttctgtaatgttgctgaaatgagagttgcaacgcatctatattactgctggaatgattatggattgtagctatatttactttttctcaccaaggacataatggtcacagataactgagagataacagagatggtaaacagctatgaagtgctat

SEQ ID NO: 116290 - DNA, 466 bp, Zea Mays
tggtatatcgaaaacagataaatccgagcaaaatagctaaaaattgattgggaaacagtaactgtaatcggaaaagctcacaataaacaaatcataaccacacggttgttcattcacatccacatacaagtctcattcacaaaaatacacaaaacacaatcttgtcaacatataattggtcatacactcatacatgtccactcttaaattttaacatacaacacataagtcttaaaacacgattgttcattccacatacaagtctcagccacacaaatacacaatacatagtcatgaccacacataaatgatcatacatgttcactgaagttttaaccacataatatataagtattaaacacacgatacataaactagaatcatgtggcatgtcgtctagatcacttgatatatcttctatgacatctgaaacactaaaccctaaaccctaatgggtatagttctt

SEQ ID NO: 116291 - DNA, 439 bp, Zea Mays
gatgggagaaaaagctcccccgtgagcgttcgcggggacggggacggggaattttcctccccacggggacggggatgggaagccattccccgacggggaaatccccgttgccatctctacacataactcagccgaagtttatggaaccattgtatacacaatatattacatatctaaactatactacatccattagaccttgaatctttggatgtcttcaagcagcgatatggctttgttcttgcgatggaatgtaatgtaatgcagcgcaagagaccgtatctccctagtgttgccctgcaagccaataaaattgtgttagatatacatgtgtaccatatgttgctttgggccaactataaaatgaactgataaatttgtgcgtactgcttctatgtctgaccggagagatccttcaacgcagtaataaaagagaatg

SEQ ID NO: 116292 - DNA, 365 bp, Zea Mays
cactaatcgttttaagcactttagtatcacgtgcacagaattttcagccttacttttgtaatgagacatatgtgggaggaggtggctgctgagtggcatttaagagctgctggaagaggaattagagtgcctggacaggattgtggtttgtagtgctcaaccgtttgttcctttactggtcggaagatttggttgctaggaatgtacaagtagcgtataagagtgctcaactggctaatgtggccgtaatttcgtagcatggtggcatcaagattcttccaagaagactgattccatgttgcatatttttctcttcagacatgatttctctggctgctcctaatctcccattagattgtgtcttc

SEQ ID NO: 116293 - DNA, 553 bp, Zea Mays
aacttttttgtgccttcggtgctgttacttctgatgaagggcttaaaatttctaacacttttgtttctccaatatttgactcttcagccttatccttatcagtcttcgtcccagctagctcagttgagggtggcttcggcattgtagttggctcttcagtcctttgcgcaggaggagcagtttctcttgattcagcagctgaagaggcctccccgccaaactcaggcaccacggtcggttcaatataacgtggccggtgggtaagtaccttcatctttttgactgcagccttcggcacaggttcagccgaggcggctagggcattagctttcctcttcttcccttgcccccgcatcgggtagcggtagtcagggtagacaaagccaatagcgtcaaaaactctgttcaatctcttctttcctcgacttccgaaggctgtggataatgcattatcttctgccttggaatatgatccaagcagttcatcacttgtaacttcgatgcattttagccagtcatcgtttggttcatcaaatttatccccatatctgaa

SEQ ID NO: 116294 - DNA, 337 bp, Zea Mays
cgcttagagtggttcatagttgagaattatgggaactctctcccccctcggtcgggaagacagtcggacgttcgcaccccaagctggaccgagtctcccacagatcaggaggtagctgaggcaggtgcgttgctagctgaagttggactgctgaaagagaggggtctgactgctgaagtcgtggttactgattttgttttcaagaatattcagccgttgaaggacagggcatacccagcttatatgtatcgaggcctagccgactcaactcgggttaccaacagaaaaattccctctgcagacttggtgagccgacttgagatgatccttagaggca

SEQ ID NO: 116295 - DNA, 559 bp, Zea Mays
ggaatttcattatgtggagagagaccgcaacacggtagctgatgcattgtccaagctaggatccagtcggacataggtcccgcctagagtttttgtccaagaagtacatcacccgagcatttcactagatcgggtagaggaatgcaatactctaagccaaccagtgtcagattctgatgactggagagagctgatcatcaggtacataaaaaaatgaggaggaaccagatgacaaaaatgcagcagaacgcattgcaaggcagttagctcattatactatcattggggaaacactatacagaaggggcacatcaggagtcctcatgaaatgcattctctcagctacagggaagcagttgctagaagaggtccatgctgggcaatgcgggatacacgcagcatccaggaccctggttgggaaggtctttaggtcgggtttctactggccaacagcaaagagtgatgcagctgagttagtccagaggtgcgaagcctgccagtacttgtcaaaacagcagcatctaccagcacagcaacgacaaaccatacctataacctg

SEQ ID NO: 116296 - DNA, 685 bp, Zea Mays
ttggttccccctttttgagatgataggtgaagttttgaaaaagtttgaaatctaccttcaccagctgacccccaacgccattgttaggctcagcgtgtatatctgggctctttgaagccaaggaaaaagtgccaacgccaaagggctctgtcgggtgcacgagcttcattatcagacgaaggcaagagccgatggcctacacaagaacttcggatgctacaactttgcataccggaaggacacaaaggccccgtgataggctaccgcaccaaatggccgacagggtggacaaacgagtggttttatgtgaaagctgatgagaagaaaagggagaagctcatgagcgtggtgatgagtctgttgagattgaactttggcatgagtcgaccattgtgcaatatgcagttgaggtctccttgctagttggccaaagtggagttcagggtcgtggctgagcgcactagagacttagtgcagaatacttggcaaacaggatatttccgacctctggcggttggggaatgccgaagaagaaagaagaagggaaaaagtatgagtttgttcggcttccttaccgatttatgttccagaaaagattcaacaaaccgtgtaatgaatggttggaattaatagaaactatgcgcattgaaattcttggaaattatacgaagaaagaggatcaatt

SEQ ID NO: 116297 - DNA, 510 bp, Zea Mays
gatccttaaagtttgttgtgtaaaatttagagcccattaccacccctagttgaggcaagactcagtggtctcgcatagaggagggtagcgatgctgcattttggcatggaaactatagggatccatagagattagagcagatagattagagaagaggaggtagtggctatgtttatgataaatagaggagataaaacgtggtggtgggacatggcggtagagttgaggtcaccgtaaattggttgagcttcttcgtaacagtgggtcttataatttcatctgcctctagaaatgactagtacctcatgagctcgcgcttcgcgcgatcgttttgacgatgtgtttaatagttgattcagagcgtgcatatggtaaagattgtgttgttttaaatatatagattgagaatgtatgaacataaatatatgtagaagtatatacatagcagtgataaaataatttaaacatgtagttatttgtagtagagtgttacaaccgataaatatagta

SEQ ID NO: 116298 - DNA, 479 bp, Zea Mays
tagatgcgcaatattgaagcgcaagatcaatacaattacaaggatcaaaactatgagggtcataatcatgacaatatttgtcatgagtcattcaacttccaagatttcatttatgacgaagcttcaccactaacaccagagctgtaggcgacaccctgtccaccattgtatagacctcctacactaccaacgtttgatggtctaactgacccaaagcagtttctcatgtgctacgaagctaccatatcttcatatggtggtaactcagcagtaatggtgaattccttcatcatggcggtcaggaatgtggcctagaattggtattcatcgcttcagccaaggactgtcactttgtggaagaagctaaaagaaaatcttgtaactacctgatagggtttctagtcaaagcttgttactgctcaagccctgtttcagtgcacttaggatccggatgtataccttcggtcattcatccgaag

SEQ ID NO: 116299 - DNA, 384 bp, Zea Mays
tgaaaagggaaattgctaagtatatatctgaatgcgacacttgccagagagtcaaggccagtcatttgaaggtagcaggcaccttacagcccattcccataccatcttggaaatgggaggatatttgcatggatttcattgtgggattgcccaatacctcccggcaccacgattctatttgggtcattgtggataggttgaccaaaacagcgcatttctcgccagtacataccacccatagggcagaaaagtatgcagaaatttatattgaccagatagttcgtttgcatggaataccaaggactattgtgtctgacagaggagcaccatttgtagcacgtttctgggagcaattgcaagaatcacttgggacccatgtaataa

SEQ ID NO: 116300 - DNA, 507 bp, Zea Mays
tttggaaaaagatggccgggggcctagatgcaagagttgttctatgtgaaaaacgacttggttgcaagagaagatattaaatggattatccaatgccctatctggtctctcttcggcattaggagaccatccattgcccttgggaacgacatacaagcatgtcaggctgcctttaatacagtatgcacttacataggcaccagggacttagtccaggaacatattgcttatagagtgtggccgctcgcaagtgggtgggagatgtcgaaggaaactactgctgggtccagtgaaggtggtttggtttatccaaaatacacattcaagtacaggagccagtttgatgagccaaatgatgactggctagatgccatcgagacaaccaatgatgaattgcttggtgcttacttgagggctgaagatgatgccatgtcaacaacctttgggggtcgaggcaaaaagagactgaatagagtttttgatgtcatcagattcatgtatccggac

SEQ ID NO: 116301 - DNA, 584 bp, Zea Mays
gttatataagtgttttagcgcctgggggaaggacatacctctagctactgttaagaagcattcaagaatcttgacgcacaacactgacttctcggcccatggcggtgggatcgatgctctggtgcccttatggcctatggaccttcctcggccctagctagagaggaccctagccccgagttagtttatacggaggtatcctctataccaagtcttcagggccacatccatgacataaaaaacatatgccctcgagggctcgcatcctagggcacccggtgacataagttctaagggccctcgtccctcggggcacctgatgatataaccctccaggcctcacacatcatgaggcgtttgatagtttaaaccctcaggccccctcgcgtccctagcacctgatggtataagccactagggcccctcgtgtttcagtgcacgtaacgatataagcccccgaaggcccttcgtgccttagggcacctaactatataagcttctgaggcctatcgtgtcttgatacacctgacagtataagccttggggtccctcgtatcttggggcacttgactgtataatcctct

SEQ ID NO: 116302 - DNA, 502 bp, Zea Mays
gttgaggccatttccctttcaggaggcaacaagaaggctcctggtgatggagacgacaagggcgatgacttccccgacgtacacaatttctacatgattcttgggggtgacgtcgtcaaccattcttcaaaacagcgaaagcaggagaactgggaggtttttcagttgaggtagtgatcccaatctatctaggttggtcggaccgtgccatcaccttcgaccgagatgaccacccagactacatcccgaaccccgagagttactcgttcgtcgtcgaccccatcatcagcaacacacgcctcatcaaggtactcatggatggaggcgacaacctcaatatcatctatgcggaaaccttggagctcatgggggtcgggcgatcctagattcggtcaggggccacaccatttcataggatcacccctggcaagagggtgcaccccctcgggcagatcgaccagcctgtctgctttgggactcccgctaattttcaaaaggaggt

SEQ ID NO: 116303 - DNA, 368 bp, Zea Mays
gtttatttttatattaaaaatctaatttctaattcatttaatcactttaaaacagcactggactggacctcaattaatgggaaacgcaggggccccggtgcaattctacctaagactcagattacaggcgcaatggactgcgggtttcattcttaactaaccgaggggctcttttaaaagactgccagggcgaaggggtacgggtgaaccacagccgcccgatcatcaactatcgctccaaattagatctgctatcaaattcaaccggtatgcctccagagccgatggatccgcgatctacggtcagaagacactcccaccagcattaaccgctccatccatcggatcagaaatccatggcccagatc

SEQ ID NO: 116304 - DNA, 632 bp, Zea Mays
tgtttacagtccggaggacacgctcagccttgccattctgctgggacgtgtatggacaggacatgcgaaggataacactatgggagagaaagaaggcgcgtgaagatgaattgtcaaattcatgaccattgtcacattgcacactcttaatggtagtacgaaattgcgtggcaacgtaggagaaaaagtgagcaatagtggagaacgtgtcggatttgagacaaagaggaaatgtccacaggtggtgcgagcagtcatcgaggattgcaagataatacttaaaaccagacatactgggaaccggagaggtccagagatcacaatgaataagatcaaaagggtaccaagcacgagactgggaagaggaaaagggaagacggacatggcgacctaactgacatgcatggcagaggtcagcattattgatatttttattacaagtaatggaagcagtgctggctaagcgggagagggcttcagaaccaggatgaccaaggcgttggtgccattgctttggagacgcagtggtgaggaagccagtggcagctgttgaggggcgaagcgggtagagggggccagagctattgcacctggtgatcacgtgttgggtcctgaggtccttcacagaaaaa

SEQ ID NO: 116305 - DNA, 294 bp, Zea Mays
aaaatctgcatcgaaaagatgctatgtgaagcttatagcacactcttttgattcgtgtttcagctgccaatagctaatcctggagtcctgggaccctatgctttcttgctgtctgcaaatttatttgtcacaagcttacatgattgaattctggcattgaattggatggttggcatcaccaattcgtcatgtcaattcttcaaatttacaatgcatgatggttctagtggtaagatcattgcaatgttttatgtaatgtggtggtggtatcactcgactggttgatccagattg

SEQ ID NO: 116306 - DNA, 1072 bp, Zea Mays
ggaagatgggatgtaaggttcatctccaatggcgtgcgcgtcacccaggacgacttcattggtgcacaggaacacgaaaagcccaacgaacataacaagtggtaataaggttaattggtccaattctgccagcaagtgtctaaattaattcagatcagaagagggagggaactaatgacagttgtcggttatcagtaacatggtaaaagagatgacatcgtatctaaagttgtgcaggtaaagaatgaaggcaggtctgcagtctgcttgaaccaccccagctgcaaaaggaatgggagaagtcaatgcatagtgccatactgccatcaaatgcatgagagttaggtaaaatcagaattgatacctgaatacctctaaacatacgccatgagattttacaatctaaggaccagatgtcctcttaaaatttaaggagcagatgacatcctaaagtttaaggaccagatcaattaatagtcggataaagtccaaatccaaaagaaagatgtaacccattggttagattagctatacttttcagctcaagtgaacactattcacgaatgatgaaaaaatagcaaacatagtatagcatataagcaagctagattcttgaattgatgtggcacctgcacctcccatggtacgattccaccccttcccactcggctcccactgatgtcgttgtggagctacatgcattcgttatcattatgtgtttcttgccgtgttgtatagttaaacatattcatgcacacctaactaaacatattcatatagttaaacatagaatagtttcttagcatttttcatacacctaacagccatactatcctcattcacaacaatagtcagcatgcacctgatttatgtagagaaagatattgttgaaaataaggcatggtgacaatgtctattgataaatgagctctgttaatatctaatattaaaaaaggcaaccttacaattcacatgcaaccataaatgagctatgtaaaaatacttgagctatgcaaccataaatgagctatgtaatctcatccatattttgaaatccatttctacataaaag

SEQ ID NO: 116307 - DNA, 375 bp, Zea Mays
ccggcctagatatattgaaacggccacggtgccgaagcttggtgaagggatagcttccactactgagccagggcagcctgctcctgcaggctcgaaggaagaattggctgaagagccaaaggttcctgcaaccgagttgaccgaagcaccgaaacatgctgccgaatccaaaggaaaggcagccgaagagccagagctagagaaaatggcagggctatcaaaaatcttgagcccaccaccagagccagaattaccgaaggtatcgaaagctcctgcaataactcccaagaggaggaggatggttagcgtgctggacgctgtcatgtagtcgacaagggcatcaactcctgctcctgcaaaggagactcccgaagc

SEQ ID NO: 116308 - DNA, 796 bp, Zea Mays
aggaggttaacgaaaaaaataaagatacgggagagggaggctttttaggcgaataggaacttcgagccaagctcatcggcatgcatgctggcggtggcattgggatggatgatgatgcatggatggctttgggcactggcctcatcaaaacatcgtctcgtcccaacgcaacgaagaatctagctaggtacgacacaaactgccactgctctatcggtctcggcttcaattcttcagcggcggaagccaagctactctagctagctagctaggcgcttaggctgtctccaacaagaactagccaaaacgggcagacattcaggccgttggcttgccacagtaatttagctggctatccatacgtccgtcgtatccaatggagcagctaaaatagctggttcccagggcgagtggccagaagcctcagaagtgggtccggattgtcagagacgaaggggagaaaatggctgccggctctgaaccagacaatctagcttttctctctcatcctctctaaaatagctgctccttttggctgtgttgttggaacctgttttagacgctacagtagcaccacggcagccatattggctttggctggccgtttggctgctccgttggagttagtcttaggccaatcataacacctgggttttaggttgagtgatgacgtacaggtcgatcgtcgttaacacgtacccagttccagttggccctcgatctggcatatatcaggttccttaaaacttgaacgcatttgggctcacgcccgcacttcgcgcgatgccggacgtgg

SEQ ID NO: 116309 - DNA, 413 bp, Zea Mays
ggagtcttgtagaaggggaaagtatgatggtgctagaggggccatcacaatgttagtagagagtaaaaactaaaaattcttggaagttgttggagtccgttgaaaagggaaatggcgtctcattgaagacaacatatcatgcctagaaatattgatccggttggaatactgatcaagacaacaataacccttatggtgaggggagtaacggaggaaaacacacaaggaggagcgagtttgaggaccagtggcagaaaggttggggtagctttggcagctgaaaacacggagatgagtatatgagggtggggatccaaagagagcgatatggggtgtggataagttgattgctttagttggtagaatattgaggaggacattatcctgaaacaaggagcgaacgacactattga

SEQ ID NO: 116310 - DNA, 538 bp, Zea Mays
ggcagcggtgcataaacatcgtcgtcatcgtcgtcgtccacatgagagtgagatggggctggagttggtggtgggggatgagcctccattacgtccatgcgtgtaacaagtttatcaactcgtcgatcaagctgctcataggatgtcgaggcagagtcctggtattttttaaaagcttcagtcatcgtgcgcatcatctccttcaattccatctgagagacacactcatcttcgttaagtttaggccccttgtccttgtccatttgattctttggtcctgtcattgttagcacaaaacagagacaaaaaggcaacaaacaatgtgaaccctacaactatctcttagggtggtggtggtggtggaatacaaattatgaagcgtcttaccccgctcttacaacgttcttaccagcactgcaggtggcaaacggtaaccagtgtgattgtccaacgagcgtgggtgtgattgcaaaggagtacatgttctgctcgagagaaaactggagctatgggaaggatgactaaatatatatatgtg

SEQ ID NO: 116311 - DNA, 406 bp, Zea Mays
ccgccagagcgaaccaaccctttcttggcttctccgaagtagcctagcttcgtcatcatagtcatatcagcttcagacacagttgatttcccaaaatccagatggctgggcttcgatggcataatgatgttataatcaatctctccttcattagcatcaccatcttcaatatctgcctgctcggtttcagcagcgggtgattcttcgtcagcagcgccttcagtcacaaccaatcccgaccgcctcataacttcggagatcggagcagtttcagcagcttcggcttcctctccgtcgcgagtaactctagctgtcgagcgtaccctagccatttgatgttgaattttttgcgttttgacaaggttgaaaatttttatctttgccgaagctccctcttgtcacgaag

SEQ ID NO: 116312 - DNA, 290 bp, Zea Mays
ccctgtgagtgattacaattggtatcagattctcgtagtgatcctggcggatccgccggagtaccttcttcgcccgcagtacaagactcgtcttcaaagtgagctccaagccatggagaaaagcgttggtgatctcacaacgctgctgcaagcgatgcaacttcaaaacgactccatcaagcaagccttggatgctaatactgcagtggtgagggatttttcttcgtggaagccacagatcgaagctgaagtactgcatcttcgccaagatgtgggttctctgtcagata

SEQ ID NO: 116313 - DNA, 441 bp, Zea Mays
tcagttgacattctttgtatgtagtcattcatttcgcaagtaacattagtgtcaaatggcgtgccaacaagtatatgtgatatcctagcccaagtggatggtgatatcttggtccatgtcatttttcagaagtttatctcaaaaaaacctctaggtcattaagcatgctttcccaggtggatggtcatatcttgagataggtgatcgaccggtggccgaccgaaaagtcttctcggatgcacatgagtgaggataaggtatgtaactgtctgcgagtgaacacttggtgtatggaaaaggaaatctcatttactttatatatatgtcacaagctaatcattacaaaagtatatgtatatctatgtgtgtgccctccttgcaaaggcaaatcaaaagcaaaaaaaaaactaaaacaacaaattgaaatcgtttaggtgagca

SEQ ID NO: 116314 - DNA, 717 bp, Zea Mays
ccaagttggaccgaatcccccactgatcaggaggtggctgaggcaggggctttgctagctgaagttggactgctgaaggagagggtctgactgctgaggctgtggttgctgattttgtcttcaagaacattcagccgttgaaagacatggcatacccagcttatctgtaccgaggcctagctgactcaactcgggttaccaacagaagaattccctctgtagacttggtgaaccgacttgagatgattcttagaggcaaggtatcaaatgttggtgccccagtggcatactcagcctggaacctgcctcctcccaaggccttcactctttttgtgtcaaatccacctgttgctgatggcagtttgggccttagagtacgaccctctgctgaagaagttaacaccttggttgcctcgctcggggaaattcctgatgatgaacggcaggtccattttgaggtgcccttggatcctagtgaagcagaaataagtgctatgcttgacttgctggctgaggactcttctgatgctgctcctgctgggacattggtggtggcgcctctcccagaagctggtacaaccttggatatccagaagcctgccagcgctcgcccgagacgcccttgccgagccaatcaacttgatccttctgctgatgagcagaaaaagaaaaagagacgcctccgacgagtatctagtttggatcgggacgttggtg

SEQ ID NO: 116315 - DNA, 722 bp, Zea Mays
tgatctcactcttgtgcttgtgacatctttgtagatgtcccctgaccataaccttttttgtctgttgggattcttccctcttccatcattaaattgctaccatttgaccatctctattcactagttattgacatgcttgtgctcctagaatcttcaaaatactcttgtttcaaatacttacatctgaatttctactgcctacttaaacatttcattttatatgtccatgaacttcttgtcttctgagaccccttcctattctgttgtgaagtcattatcttttggcttttcctattttcttggtcttggtacgctcgtatcgttggaatcttgcatactcttatttttatatatgcttatctttatatcccagtgactgttcaagaaatttcagtttacatgtccttgaccacccttgtttctaaatgatccatgagcggtcatttaattttgcacgctcgtggtaatctcgttgcttccttataacttctctcggtaatgaattcttacttcaaccattctattgaaacatcacctatcttaccttgattgttttctccacttcgccacttcgcgagtcctgccttaactctatccttggttatgcttttcacgatcatcatctttaccctcgtcgcctctatatcttaccttgatgcttatattatacccgtccttaaaaaaaccttttctcctccatctcaatcttatagttgtatttt

SEQ ID NO: 116316 - DNA, 840 bp, Zea Mays
aattatctttgaactgatcatgatttattgcactctttaaatggatgcgacttactgctctggagggaaatgatcgttgtctgcaatggatctggtccaactcaacagttcagagttttgcctccttcaaccacattaggcagtacacatcagatcgtgaaaaataggaaatttgcattgtagattactctattcatatagtgaagtttgaaataggggatgtaatagaatagctgctggagacaacctttgtcattaccatcaaaatggaagctggcaatcaaacctagaaattcaaatattcaagatctgcgtaaaattcctggtcactgctacaaagaaagattaatcttcttgctcatttcaaggataacatccctaaatatctcaccgccttgcccattctgattccagttcaacaacctactatgaagatcaatcacaaaatctctatcttgatttgcctgttccaacactttaaataatgattttacacacttgagcagggtatggggcagtcttgtttctgagttggctgacagaacgatgacatctatcttcgcaaccaaatatcaatgaggacatatcctcaactacgtcaagccagataaagatgagatatgctccaatcaaagcccatctctcagctatcaatgcagctgcctaagaaaccatcattactggaataatcttttgttcttatttgtgcttcatttgataccagaatcttccccagtgcttgtgtagcacagaaggatgtcacagttctgctcgttagcacaactaggtgatataagcaatactcctaaaggaatccactgatgcaatattaggttaaag

SEQ ID NO: 116317 - DNA, 340 bp, Zea Mays
tcacatgtccgttagctgtttctactgggtagtagatgggtggacacattttgatcttttggtggttgagatgtcatttcctgtcataccttgcttgttggcaactgcgcagcagcacgagtaaatttcgttatcctatgatgtcgatccgttctatttgtgactctgcctccttcccatgcaaaataggggctacataggtagtcatattttggaactatgttatcaagagatctcactgcaaacttggtgccaagtgctcactgttgagaatcagaaagtttagacaactagatgagtttggcagtttgctactactaactgaaatcagccgtgctaa

SEQ ID NO: 116318 - DNA, 318 bp, Zea Mays
ggagactgcagaagtatggtggatgtatttcgatggctcgctgaagctacagggggcaggcacagggatcctcttcattgcacctggatgtgaacaactcaaatatgcccttcagttgttattttcaacatccaataatgcagcagagtatgaagctttgattcacggactgaacattgccatatcactgggcattaagagactgatggtatacagagattcactggtggtcataagtcagataaataaagaatgggattgctcgaatgactctatgggcaagtattgcgcagccgtccgaaagctggaagacaaatt

SEQ ID NO: 116319 - DNA, 342 bp, Zea Mays
tattactcttacccattcatcggcttctaaaggttcctctgttttgacgaagagcggcggtcgagtcttagagaattccaaataagtagtatcacgcggtccttgagggggaactctgcctccatgctgttggaattggttgcccaccatttcgcgcaagaagtgcgtattatcagcggtggcattgaccagggcagcgatagcctcggccaatgttggtggtaccagtggcgggttgggagtatcttccccactgcgggatgtccccgcaccatcatgtgcgtgagtccgtgatggcatctgaggcaatgaaacgtttgaaaaaaatataacatgccaaca

SEQ ID NO: 116320 - DNA, 519 bp, Zea Mays
ctctggtggcatacctggtaagtcctttggaaacacatctgggaactcagacacaaccttgatagcctcaattgggtctgcttcactgctatcgacagccatctgataacaacttcctttcttcggctcaggcgggactaactcggtcaccacttcctctcctagtggggacaccaacttgattttcctcttatcacaactgataactgtctgatatttgtctagccagttcatccctaggatgacatctattccctgagtacccattactatgagattagcgggaaacgttatcccccttatttccacacttacattcaagcaaatgctatcggctcgaattctaccaccggctgagtcaatttgaatgggggttgacatggtagttattggaagattatgtgcttctacccatgatgcagtaatgaatgaatgtgttgctccagtatcaaataacacttctgcaatatgggagtcgactggaaacatacctactatcatgtcgatggtctcctaaac

SEQ ID NO: 116321 - DNA, 553 bp, Zea Mays
ccacgccaatgctactgtcaagcatcgacacaacattatttcgtcactaaaggatgataacggaaatatggctctttcacatgcagacaaagaaattgtgctttttaatgccttcaagagcaggctggggacttcccaacaaacatctatggtttttaacttatcatccttgatttagccgattgataacctgtcagaacttaagcaccccttttcctgtcaagagattgatcagatcatcaaatgtccgccttcaaataaattgccaggtccagatggatttaatacagactttgtgaagaaatgttggccggtgattactcccgatttctatgaactatataataatttttttgaaggatcactctgcatgcgtagcatcaatggttcatatgtgactctcattcccaaaaacagctcccctgactcaattggtgattataggcctatctccctccttaacacaagtgttaaagtgctgacaaaaatcttagccaaccgcttgcaacatgtgatcacaaagttagttcatcagaatcaatatggttttata

SEQ ID NO: 116322 - DNA, 620 bp, Zea Mays
gagccgatagaatttgtttgaatgtaagtgtggaaataaggggggtagcgtttctcgctaacctcatagtaatgggtacttagggaatagatgtcatcctagggatgaattggctagataagtatcagacagttatcagttgtgataagaggacaatcaagttgatgtccccactaggagaggaagtggtgaccgagttagtcccacctgagccaaagaaaggaagttgttatcagatggctgttgatagcagtgaagcagatccactagagattatcaaggttgtgtctgagttcccagatgtgttcccaaatgacctaccaggtatgccacctgagcgaaaagttgagtttgctatagagcttcttcctggaaccgcccccatttttaagagagcttacagagtatttggacctgaattggttgaactcaagaagcagattgatgagctgtcagagaaaggttacatccggccaagcacctcgccttgggtcgcccctgtcctatttgtggagaagaaagatggcaccagaaggatgtgtatcgattatcgagctctgattgaggtcacaatcaagaacaagtaccccttgcccagaatagaggatttattcaaccag

SEQ ID NO: 116323 - DNA, 558 bp, Zea Mays
cgacggcctccaaagaaggcgtcggatataaaaaggccgccggaaatggtctattttactgttgtgcatgtgtttgctctttttaaattacaacaaggtatcgccgaataatcatcatgtattgtttgctcttttttaattacaacaaggtaccgccgaataatcatcatgtattgtagttgacgtctaaattaataataaattagtaatttttttattttaaaacagacatgtactatatgtgtgctctagattcttcatagcttcgtatgagctaataacaagctaacggaaacatcaactacttggctggacaaaaaatactcaccttcaatggtttctctagatatcctgaaagcaaggacaatgttctttcacatttcatttctttatttatccgctttgtcccctctcggaactgaatttgaaaacaacacataagcctcacatccaaaaaatgaatgaaacagatgcgcataaaagaaataagcaccggaatattagtagcaaaacaccttaggctgcttcaacaaagccgcttctgtctgtggaaacaac

SEQ ID NO: 116324 - DNA, 536 bp, Zea Mays
cagatgtttaagcctaggagtgatgggcatatatcgaagctgtttaactgccacttttgtagcaaaagtagctccatcctcttttagtacctccgcatatcttgatttaccgcatttttgacaatgggtggccgcttcatattccttccagaacaacatgcaattatattcgcacacatcaatcttcttatacttcatcccaagaccggacacaatctttttagactggtataagtcttttggcatcttatggttcgatgggatgagatcaataatcagattgattatatcgttatagcaattattcgagaagttatactttgccttcattgccataagacgtgtaaccacctgcaacacggtcacagtggtgtcgtcatgcactttttcctctgacgcgtgaagaagcttataaaactcctgcacttcatctggtgtagcctgttctgaggccaatgttggatactctctactaatattagccaccaagtcatccatccgatcctcctcatcatcatcaattatttctgactctg

SEQ ID NO: 116325 - DNA, 375 bp, Zea Mays
cctaggaacacatgctgcttcactcagggcatcaggatcatggatgtgctcagattctacatcgacttgagggcaagttgaattttaaggagtagggaatgttacaccaccattgtcagatactccacatgaggaactccatcctggtgagcgtggaagacacgatgtttgagtcgcaggtcctgagtgggtgtaactaagtgcagccatgttgttgttgtcctgtgtgggtgtaagagtctcgcgtgtagggctatgtcctttggtcactagttggtgggccatgtttctaagtagtctcatatatgctgttgccttgggacaggaagaaccatgtatgaactttactatgaatcaatacaacgtccctgttcc

SEQ ID NO: 116326 - DNA, 480 bp, Zea Mays
ggaagaaataaaaggtccgattgtacaattgagacctaacatgccgacatggacacctccacccccttatccatctatgccatatccatacacatacttacctccatcatatgttccaaatcaaatgtgggacatgccaccatatccatttggcatgccacagtaccccgcctggggggcaccccaaacatccgtttttgacaggttggcgccgccagtacaagaccgattgagcgctgctgaatccggtcaccaggcacaagcccaacaagattgccagactactcggcctcctaggccgaccaatccggcaggggggcatatgcctgtagcaactcaaataacaacaaaaaaggacatcatcaaaataggcactgcatatgttgtcatacagggagacaataaagggccgatgatttttggtgaatcggccaacacaaccaaaaaggatacggttaccatcaaaacagccgatccaaa

SEQ ID NO: 116327 - DNA, 550 bp, Zea Mays
cttgctacattcccaaaatatttctctcaacggggtcattacagtgtagtgaagtagagtaactcagacatactgcggaatctaccccatgaggggccttacaagtgggctcgaacggacacggtgacgaggcagagactgggtcccaccgtaatctggcgtggctttcacctgcgagttgcaccctcgactgcgcgaagtcgcgcccttgacttcgttgggacttggacttcgctgtagagggaagagtctgagccttcgaggcgcaaatggggagctacagtgtgccccccttgtctagcgtggcccttctcttcgtcacctttaaaggccacggtcgaggacctcgacgctggtacgggtcaaagtacccttcgctacttgtacctgcaccaaaacatgtttaattgtagccagattagtctgatcgaggttgtgttcggcattcgctccaatagacaccatgtcggggaccatctatgtgacctccgattcaagagcaacgattaggaaccgaccttcttactctaacagtccaatctttttaagt

SEQ ID NO: 116328 - DNA, 447 bp, Zea Mays
cgcaatctcttaggcggaacaagcgggctcaagaattcagaaaagcgaagaagtggcagaggaaaaagtgagagttagggctcggaactcaaaaaggcacatcggcaggagtataaatgggctccttaggtcgggcattacttctaaagtgctagatcatagttcggaaaagtaaagaccgcaatcgtcactcgggcattacctctaaaatgccatcactatcaagcgcacggacaaactttcaagcgcgcagatgaaaagcaaatagctgtgattatatggagcaactgcatctttcattcgtaatatgagaagtaacacaaactcgaagccgactcgttataagtcagcctcttctacccttgccactacattacactacagtacattacattaccttactacttatactacactatgctactaactaacactaccttattctac

SEQ ID NO: 116329 - DNA, 491 bp, Zea Mays
cttaaaagatcagggtcgagtttataagattttggactaagttgcgatgctctttcctcttacgtggatggagggttgatttaatcaaatctcggggtctcatttgtaaatctggctcagctgaaggggtacgggcgcgcctcgattgtttgatccaaaattgagggcccagattagatttggcttacgctgaataggtacgtgttagtggtcgtcggattcacgatatacggcccagatattatgaagaacgacctaatcctactccttcaccccaaatcagacggcccagatggccccaggatgaaatagtgtcgcgtcatgatcttgcccgtcggttaccaatcaggggcccatgcaccgtcaccttcctccgcatgcctgggcacggcggcgccatcatcggcgacatgccaacccgagttctaattctccaattcacacacagctcgacgctaaacatagagggaagtaaggcaaaatgaatggag

SEQ ID NO: 116330 - DNA, 510 bp, Zea Mays
attggatttgtgtaccctgactatcgctacccaccgcgggggcagaaaagaaagggtgcaacttctgggaaggctgctgcttcggttgcttcaagcgaacccgcaccgaagtggaaaaagttgaaggtccttactcaccgaccgtgctacattgaaccggccatagtgcctgaatttggcggtgagacttcttcagctattgaagccaaaggacctgctcttactcagaggattgaagagccggctacaataccgaagactgacaaaattgaagaaccgagaatcgaagggacaaaacattagaagttctaagccctttggcaggagtggaggtgccgaagacacaaaaaggtctagcagcaacccccaagagaaaaaggacggctagtgtactagatgtgctggagacaataaaagcttcaagctctactctagggaaaattgccaaggcttcgaaagcgcagattgaaaccaagacaaagctgaccgaagccgaagctacaataagcc

SEQ ID NO: 116331 - DNA, 386 bp, Zea Mays
caagttcattagttcacatgtaaatactatgtaacataacacaatagccttgtatacagaattttaaacactagtccatgaaacatgccaaagaaagtagccaaaaattaggctaacaacaaccacttcttgtcctcctttagaacatctccccttagaacatctccaccaatcaattttgctgacaaatgctagctcgttcaagctcgtgaggtagctcttgagcttagctcgagcagcttgttaacagaccgagctaagatgcaagcttagctcatgaaagaatcgaaacaatctcagatgagccaagctgactacgagtcgagcaagccaatgagccatgagtattttctatacccctaattgttagctaagggagagtagag

SEQ ID NO: 116332 - DNA, 371 bp, Zea Mays
cctcaacttggcgaaggggcctcttcaactgccgaagcaagacaagctgctccattgcatagagcattgaagatccaactgtagtgccaaagatacctacagtcgggccagccgaagctaaagatgataaggacgaagagccacaagtggaaaaagcaataaaaatgctagaaatcctgagccctccaacagaggcaaaactgcctaaggtgcaaaaggcttctgctgcgactcataagtggaggaggatggccaacgtgcgggatgatgtgctggagactacaaaggccttgagccctgctcctacaaagaaaattgctgaagctgccaaagcgcaagccaaagctgaaactgggcaagcagaagccgaa

SEQ ID NO: 116333 - DNA, 271 bp, Zea Mays
ggaagaacaccaagaggaatacagaggaagaagaagaacacaggatagaagagttatgcggcggcttaatccttcctgaggtctgtcctttttaccatccagtttttatatgttgcttacgaagccaattacaaggcccacggccctttactgtacccattcggcacctgatacgcgcgagctcggccttctcttccgtcggcccattatctgaacgtgttccagctctgttctggcgtcttccatctgttgtggctgttccagcctcctg

SEQ ID NO: 116334 - DNA, 407 bp, Zea Mays
gacgatttgaaaaccccataaagagtctgcaacactatttctctgtgtcactgacaatcgcaaacataccctcccctttttctatttcttcacaagtcgaggccccggaccatggacgacggagcaaggactccgacgagtctatatcggtcggataactcaactactggtgctctggtgcggctgacacccaattctacccataatgaccctttcccctcaatcaattgcaagattctagctcctaatcactctgtccacggtgacaacgcgttcaacggacaaaccgaggtgttcccggtaatctagcgcggtctagttcaattggccgggtcaagaagcatcaagagcatacaagagtgctaaaacaagagctaggagggtgtgatcggacctgtgaagagctg

SEQ ID NO: 116335 - DNA, 1226 bp, Zea Mays
cccgctcatcactccattgattccttcatcattagtcttgtccacctctatgtccatcgtgtttccttccatgtgagttattgaggggatgagagatggagagagagagagagaaagggtgagtcgggcctaggttggggttcgctccccttgtcctatgtctgacaccaagaatagtttcgaaaacacgttttattcataaccctcgagggattacaaatggggtgtggacccacttctgtcaacatgcctgatggccccctttttccgttctcatcggaggcatcatgcctgatggtccctctagttcctgccacgcgtggcgccccatttcactggtgccgccagcggcacttgtccctttaggagggcaagggtcacgatggtcgggcgtactccattctcctcgtcactagagggcccttcctcacagctcgtaggagagctagggtctgcgtcagagtttgagcaaagtgcattgaaggcgaggtcccgaccgtcgtcgaccatccctacgaacttcagatcgtcgatggtagggaggtggtcgtcggctacgagagccacgattaccctcggggcgtgacacaggtgaggtggaaacacgccagggttgccgctagagccgccatggcgtggcaacctttccctctcttaaagcatggaaagttccgcgtaggacaagaaggcccacagaccatcatatgaggggttggccccatatggattgtattttggtgccttatcttgttagccttggagggtaaatacgaaccttactgaccatttcctttttgccatcgaggacgaagtcgaggttctcgaaacgaatcgtcgtttcgggggtccgatcggtgtcgcggcgagaacgtgcaaggcccctacctgacgcgccaactgtcggtgtttggaacctagctctgacaagtaaatttctttgtgtgagttttggtttcaggatggtgtgctcaatcggcgtgaggtttatactggttcagacaaaatgtccttgtatctagtcttcggtggctcgctctatcggcgtcgttgatgctcaatgctcatagtaggggttacaagcgggcgagagagggaagaagagctcctaggtctcttatgtgtggctataccttaggactgcgggactagagttctctgctaatccttggacatcatggtggttcgctcctttactccggcctttgtgatcctccaggtcttctgga

SEQ ID NO: 116336 - DNA, 285 bp, Zea Mays
aatgcagtaatccaatcagcacggtaccggcagactctaaggcgctatcacgacaaggctgtgcggcaacggttcttttcggtaggagacctcgtcctccgccgaattctaacgggagagggaaggcacaagttatcacccttttgggaagggcctttcatagtagcagaagtcactcggcccggatcgtatcgcctcacccagatggatggcacagaagttgggaactcctggaacatagagcacctcagaaagttttacccttagctgtatttcaaaacagct

SEQ ID NO: 116337 - DNA, 458 bp, Zea Mays
tgtttcttagtagtgacacgtcttgcgaatctgatgttgggttgtggtcttcggaaggtgaaaagttggggagcccatttgcttggatagatgacgaatccgtggaagatgatttagattattttgtgacgctagatttagctgcggcggagtctctgttgagggccgccccccttgaagcgccgacgactttggtcggggtagcccctggtgaactgtgggggtgaaaaatatgggggtatcaaaagaaagtgtcagagagtcttcgcaaggtattagaatacatcgccgaatgggcatggagaggttgcgtcttcggatcggaccgcgattggatcaagttagccatcgtgacttactggcaccgacgactgggtcatgcttcttggagagggatctacgggacctttctgatggtgaagagttgaggttgatgttgtttaattttcgaaaagatg

SEQ ID NO: 116338 - DNA, 669 bp, Zea Mays
gtcatagggtgagaaaatggtgcaacaacaggtttagtaaattgcgaaggatactagtatgagtcatttactcaggaaaagtgttaggaaaaacaccagacatcctaggtcccatttgaggatagtgatcatcacaaaagggaaaacatggtccactagacctataggactttaaaaaactcctacgagatccatggtcatattgcccagaaccctgttaagcacgaccattgtgtggtcttgtagcctaaggactagcaccttgagacattgcacctcttggcctaacaactcgcctctaaataggcaatcatgtatatcattgggaggatggtagatgttctatttgttcacctaaaatttgtgtcactcatcactcttctctaaaatagaactcagtgaggtgatcattcctatggcaacatagtgttaccttacctctctcttgtatggttggttcactttcttgtaggtatggttcacgcttggtggctttttggctctaagaaggtatcctaaaaatgtcaagaagtttttcaaatgggttcctgggatggttaggtttcggaatccacacatgcttctaatgtggggattttggaggttctttaaacactccatcttcagtattaaacttgagggtcttatgtaaaatgattttgattagtt

SEQ ID NO: 116339 - DNA, 411 bp, Zea Mays
ctttgtgcaattttcactttggacaggtgcataaggacatagcatatgatggatgatgctatgcttagggcgtgtttcgggctgctccactccaagggtgcataaggacatagcatatgatggatgacgccatgcttagggcgtgtttcggactgctccactccaagtaatctagctctaacccaactcctaaccacaacacctcccgattcatcaattccggctccataaaaatgtagatctaggctccaactttagatttttgtggagctccaaaaggggtgctctagaaattgatgtttctaatgtacccacatggctgtcggttgtttacccacctttgtcacatgttacacaaaaaatctttcattctatttttgactcctcccctaacccctccttccccatcaa

SEQ ID NO: 116340 - DNA, 461 bp, Zea Mays
gaatttactgacgctgaccccaatgggggtgctccacctgctgctgaccccaatgggtgtgctccacctgccgctgaccccaatgggtgtgctccacctgccgctgaccccaatgggtgtgttgtctgtgttgctgatgaaaacgacggggaggaagaagatgaggtccctttgactcggaagaacagtcggcagtatgtcgccagtggggaaagtagtggagttccttctcctgctttgtctgccctcattggtctgcaagaattgtccctggcaaactttgatcagactcttgaagatatggttccatattacctgttatcagagccagcagatgatggtgtgatggaggtttgtgctgatgtgctcgacgccgggttgggatcgtcccgggcagcgtcccgcgcctcgtcgaccttagagcgcggtcttgagggtcaggaaactgacttggatcgtct

SEQ ID NO: 116341 - DNA, 811 bp, Zea Mays
attgtgaggggtattatggctcagcccacggaagttcacggaggacaactaatggtagaatgaggtgttatgagcaccaaatggtctgatcgggtctgagtgtcataagctcttgtgtgaacgctctctttgatagagagagtgatcttgtttgtgtgattaccattagtaagagggtggacggtaattttgagcttggctcaatagagattaagtggctggcaaaccaccaaacctggagataaaaaccattgcattattatctttatgttggtttataaatatgtgccataagcttgtaattgcttgttcatatgttatgcttgtgtttgtggtttctcttatgcttgcttagcttgtatagttaagttgttgttgctctctagtgtagcttttctagttaaatagtgttagtatagtattgatatttttatctgacaaaaaactcgtcaataaagtggttgatgcttttatttgacaaaaaaactcgacaataaagtgagattatgtgggagcagaaatacacgaaaactggaaagcaaagcgaaagttagctaaaacgagggatgcattagctgtaatatatatactcatatcaaacaaaataaagttgatgctcgaacgaacggctagttaagcttcttgaggccttgacagaattattccatccagtagctcgctccctgcttataattggttgaacacgtgattgatatgcatcgaactatttataataagataagtaatactcccagctgacgtttaattgcttcagaatttagcaggggatcggagctgacctacctgtgcg

SEQ ID NO: 116342 - DNA, 272 bp, Zea Mays
cttgatgccattgaagcaacaagtgatgaattgttggggacctatacgaaggctgaggaagaagctatgtacgttgcctttggtgcccaaggaaaacgaagattgaacagagtttttgatgctatcagattcatttaccgtgattactgctttcctactcgaaagagagggtcaaaaaggaaaagtgcaccgaaagcttcttctgttgtgccgaggccaaaggaagcaaaaattctaacccatcgcccgaagtcgtactttttagaaagggc

SEQ ID NO: 116343 - DNA, 371 bp, Zea Mays
ggcactgtggccagggtctcttcggtggatgtagcagcttcttccgcggccatatccagaagcattttatcaatatcagaaaatgtgctctttagatttgtatcttcggccgttgtagcttcggcagttgcagcttcggtaggtgcagcttcggtagctgtagcgctctcgacagctggtgtctttgacgccaaggccggcggtggtgtttcttcaatagctttagtcacagtaataatcctctgtttttttggcccagcagacttcttcgctgccgagggctccttcttcttctgtaaaagcttcgtcagatgtggccccagtggacttagcttgataggcaaggattcaatcattacctttaggatttc

SEQ ID NO: 116344 - DNA, 334 bp, Zea Mays
gtggtgtgtactggcaagaaatgagcggtcttggtcagcttgtccacaataacccaaatagaatcatggtgcctggaggtattgggcaatcccacgataaagtccatgcaaatgtcctcccatttcctagatggtatgggaaggggttgcaaagggcctgctgtctttaaatgactggctttgattctctggcaggtgtcacactcggatatgtacttggcaatttccctcttcattctggtccaccagtataatgatctgagatcatggtacatcttgttgctgccagggtgcatggagaattttgaaaggtgagcctcatccagtatcttct

SEQ ID NO: 116345 - DNA, 636 bp, Zea Mays
gggtgttgggccctagtaccatcgatccttttgagtcatcttctattggtggataatttcatagcctagctctttgtgttcctcttgcccgggctataaatcaccttcttagcgagggaggctagaaggtattccacacaagctctatcttacttccaccaatatgaagggtttcctagagtgggatggtgccctccatgtgaatctttttggtgctggaggcacctctttgtgagattggtgggagtacaacaaaatatagatatggtggagaggaaggagtagatccatgtcatggtgtgaggggaatgttcacatatgccttaggataaatggggtcaccccctccctctaaatgttattgatcgaggctatccttcatgttgccatatgtagaagtttatagtcaagttgcggccttctgcttcctcatctctacctaggtcaatctaggatggttcatgcacactcttgccttggccctcccgtgaggtttgggggacttcagcaactattgttgcttaagaatcccctaatggcttcttcgttagtttcctcttcttccttccactcggtggccaccttcttccctaaatccaaaaccaaggggtttgactttcctcacatggcctaggg

SEQ ID NO: 116346 - DNA, 409 bp, Zea Mays
actgactacgaaagcatcgccaaagagctcctctgttcttcctccatttgatcgatcatgcgcaagcaaagcaacaatgtcctccaccttgacgttctccttgccatacaccagtgcccgcaataattaaccaagtgtttccaatcagatcaggaaaataacacgctagcatgcacgtccttgactccttgcctatatctccagaaaaaagaatcctgcaggatgccgcatggcgcatgctgtcggtcaccaatcacatccacgacgaacaaaaacaatttccaaattaaagcacatcaaatccgccattgttgccactccagctgagtctgcaataatgtaacccgacccggtcaagataaaccacccaccgtcttgtcttcatccacgacgacgtcttaacttgtcg

SEQ ID NO: 116347 - DNA, 486 bp, Zea Mays
gcagcctggtgatggatccgggctccccatagcgaagcctcttgcggggaggggacaacgccatggcggggacctgggcttcaggcggatgccgtccttgaagttgggcttccagggctgcaatcctggcatgggcatcctccagctccaagtgcaccctagagagatccagggtggcactatccaggtcagtgttgagaccggccactacaccagctagggtattgaggcgatcctcgccagctccacctggaacgatgctagtctggcttcctccacttagacacagagggagatgcctgaacctcgtgtcatgcagctactgccggtaggtgtggctgagagaccacagagtacgtctggcagcatcgctgaccgaagcagcgtaggtggatagcggtgtcagagactcatgagctgacagagtcctgaaccctctatcccctgcatccatcaccctgacgtggatgcgagtgatgtagtagc

SEQ ID NO: 116348 - DNA, 665 bp, Zea Mays
gcaacgaattgcgccctcctgttacatctttggctcggctatgtgtggaatacgtgaggcatgctccgacgagcgctctgactttatacccgaccgcacccctgatcggatagtcaccctgctgagacccatcaacagcatgggcacgaccagctctctctctcttcgacctcttccactggttttgatgctccgctcaacgctgcgatctcccagcctcgatacattacgggattgttgaatcgcagagcaccccagccggtatttaaaggcgcaaggaggtaggattgaggcgagaaatccgcactggcgacctccccagacgtccgcccaacctcacgcagacaatagcgattctgttacgttaggagtccgtccaggtgggagctcggccggctgttccaaggatcgcgagatcctagcaaagtcgctcgaaggatctggccgttaccgcgacgattacgccaactgactttgagaagagcgcgggcttctgttttgtgctcgcttcggtgaagtagagacaccagccgatctagtcctaggcgtcagcggtggcaaggagattaagcgcgcatagcacttcgggtgatgtcaagggacgtgagctcaaatagagctgttaggaagacgtgccagctcaaataggttgcttccgcctccct

SEQ ID NO: 116349 - DNA, 368 bp, Zea Mays
attctctccaatacatggtggtggccacaccacaaacacaattgatgttatcttgcaagacttacaagcccaactcggtacaactacaatgtcatccgtaaggtcaacggatataatagtgcacataagcaccaaagattggaggtgtttattcctcacttctaaacactaggcaaaaacctagagtaggtgctaattaagtggtctaactaacctaacaacttcacaaagcatctatgttaatcatcacgtgatcttcgagcacttgggctcaagagctatagaaatagagtctcaacactttgtcagtatttctcaaatctcacatattacaaatggttggttggtgtcctatttataggcccaac

SEQ ID NO: 116350 - DNA, 860 bp, Zea Mays
attgaatacacctggacgaatctggaatttgtagcagtagtagtcacgtacggacacacatatatggataggagattctgcatatgcaaggattgattatttagtgatgccgaaagcacagttaacaatgtgcaaaaatcataaattacaaagaaacaactaacccgcatcttcatcatttgcattacttgccctatgtatcgcatggtatgcatccacttcgtccatggatacaccaacctttggaatatttgcatgccatccaagctcacctttagggaagaacaatggatatgatagtgcatcatagcatccatggtatgagcggatgccgtggtttgacctatccttcctatgtagcataacactcttaatgaactggcctcgtcattcgctcccctcgatccaaacagcggccacctctgaagtgagaggtgcattatacgtcttttggttcaacgtctggtcaaggttcaatgcaatataatagtcgtcaagattctcaacatggcccatgctccttaggtgatcggagtacgggtttccatggagtacgccaactatctgtctaataacctctttgtctctctgaagctgatccgcttgacacttacggcatcgatgctcaagactgggatcatcatcgtgaaagtaaagctctaggtgtttatgctccgccccaccttccctaccaattgtggtacatcatgccttgtgcccggaacgtgtatcgtcgtcgctcgccctctggatcggggagcctccaccaccgtgcctccgaatctaggaaccgccgccacgactccagatcgaggaaccaccaccgtcgcgtgtccggatatggaccaactggttatcac

SEQ ID NO: 116351 - DNA, 596 bp, Zea Mays
gatgatgtcactcggagcagcggggcaccggattccggattggtcgtcgggaggggaggaaaccgaccgctaaagaactcggcatcgccgcaacgccacgctcgagaatgccggtggatgacggcgaggatcaccgcgatgtgagcacgagaaaggccgccaacgagaacgacaatgctcgaatttggggtaaattctgtattctgttatttcataccgatcactgttttcttacaggtatttaaccacaccctcctcggctggcccatcactccacacacaagccggcccactggcccatcacacttacagcttaacccacacactccactcttcctctgctactattcaccacttgacaccagctttagaacgccctctcagcctcctgcttgtctacagacattcggcatctgcaattcagcaccctggtcaccttaagtcgtgacagtttccccctccagaagacttgcttgtccccaagcaagagcctatggaaaacgttgtggagtcacgatttagattgctccaacgcaacaacacctgtggaactgcacgaccccccttcttcaccaaacgccggtccagaatctctt

SEQ ID NO: 116352 - DNA, 289 bp, Zea Mays
tttcttcattaggtacttttagttgaagggtggttgatgtatattatgttctgcacgggtagtgggacctgtctttattacattgaaggctcataaaccattttatcttgtctgaatagctactgagttttaaccactgtgttagattgagtgcaccattgtgttgtttgtacggccttaagcccataactacctcatcaccaatctgtgtctaatttagatggattttgttgaaagcatctttcatgaaccggttgcaagaaaatgtactagatttaataaagattca

SEQ ID NO: 116353 - DNA, 1329 bp, Zea Mays
tcaggctgggtttgagaaaaggtaagggtattccttcctcaatgagtcctcactctctcaggtagcctcctcttctcctctgctccacttgactttacagagccttacttctgactttcaggtctttcgaatggctgaatcgagaatcttcactggcttttctcggtactgcagatccttctgaatctgaactaactcctctgcgatgtgactctctggtacctttaagcattttcggagctgagatacatgaaatacattgtggatatctgacatggactctgataactgaaggcgataagctgctggccctattctgccgatgataggatagggaccgacgaatcgcaaagctagcttcccttttgcttggaatcttttgactccacgcattggggaaaccttgaggtagacaaaatctccttccttgaaactgagttctctccttctgttgttcgcgtaactcttttgccgactctgagcttcgagtagtctcttgcggattagggcaactttctcttctgcctccttgatgaaggcaggtccttctagggtcttttcccctacgtttgaccacatcagaggggttttacacttccttccatacaaggcttcaaaagttgacatcttgatgttggcttggtaaatgttgttgtacgagaattctacatacggcaaactggactcccagtttctgttgaaagtcagcacacaggctctcaacaaatcttcgaggactttgttgactctttctgtttgtccatctgattggggtagtaggcggtgctgaagtctagcttggtgcccatagcttgctgaaggctcaaccaaaattttgaggtgaattgtgttcccctgtctaacactattcttcgtggaatgccatgaagtctgactatttctttgagatatatctgggcgagggtggctcctccgaaggtagtcttcactggaatgaagtgagctaccttggtaagacggttaattataacctagatagaatcgttccctttttgggtccggggcagtccgattacgaaatccatgcctatttcttcccacttccatttgggcactgggaggggttgcagtaggcctacaggcctctgatgttctgccttagttcattgataagtttcacactaggccacatactgggctatctccttttacattcctctccactagtatctggccttgagtctaggtacatcttggtagaccctaggtggatagaataggctgagttgtgggcttcatctagcaggatttgctgagcttggcatagagttgatgtgctctgagtcttccgaggacaattcgcaggtg

SEQ ID NO: 116354 - DNA, 589 bp, Zea Mays
ccgcaatagaagacgatcgggaactctgaccactggagatgttgtgggatggtcggttctgctgcatgcacctcttgatgggcggcattgatgcgacacttgttgctatatgcctctgccctgccgaagatcatgaggcaccccgttcgctcgaggaaatcttcgatgcggacctcctgctccgtcggctcctccggtcttgcttttttggtaggcggcttggagatgaagcgcttcagaagctcgcactcccgaagcttgtgatggacagggaagccgtggttttggcacgacgagttcattatcatctggaaatggtcgccaccgctcttggtcggtggtcggtgtgtggtggcgatttcctcttcgtcgagcaagggatgatggttccaccgatgtttgtcggggtgttcacaacgttctcttttctcctcattaggcccgtcgatgtcacatgggcccttccctttgcggaaaatatccccactgcgtcctccccattagtgaacttggtcactatatcgagtaggtccgcaattgtccttggtctcccccacccaagttcgtggacgagtgcttcattagtggt

SEQ ID NO: 116355 - DNA, 338 bp, Zea Mays
tttagaacctcaattagttgaagaggacgtcaaataatcaaataattttatcaagctgcataataagtaaaggtttcgttagttgcatgcaatggttggtcatgtaaggaaagactactcgaaattgtagggtcactgagtccaattcttagacagaggaactaagtccaatttaaagtaatggatatggaaggaagaaggggttgtgttggggaattgaacagtactggtactgagttcttcgaataggaacattaacatgcatttctctaccagcaacattgagcaaacaacatacaatccacatgactggaaatcaattcacatgcgagaaaatg

SEQ ID NO: 116356 - DNA, 683 bp, Zea Mays
ttagatatcccgagaaccgcaacaagctgggtggtgaccctattagaatgctcaattttaattcggcaatcagtcagctgggtttacaagagattcctctcaaagggcaaaccttcacttggtcaaacatgcaacgataacctttgcttgaaaagttggactggtgctttgtctcgccagcctggtcttccaacttccccgccacttctgcccttaccttggctaggggtgcctctgatcacgttccctgggtagtcaatatccaaactaacgtccctaaaccgcccatttttagatttgaaaattattagcttcagctcgaagactttcattccatattccaaggctcttggtctcatgctttgtttcagcctgatcctgcgaaacggcttatggctaaatttaaaagggcaagaaaggtgatccatgggtggcagaaatccctacccaacctagctaagttgattgataaggtggaattgatcattcagcttatggattttattgaggaaagcagagacttaacgattcaagaatggaattttaaggatgttctagttcatcacctgcaggatctcctttccaatcagcgtgtctactggaaacagagaggccaaatcaaatgggctacgttgggggatgctggtagggatgaaaatggtttcggaatttttcggaattcc

SEQ ID NO: 116357 - DNA, 885 bp, Zea Mays
gtttctaagtcagaatcagctcagattcaaccaaataggggtaaaacatgagatagatgaactaccaatagttctactccttggataagttcaaaataccccgaggaacgtattcaacacttctagaaaggttgaaaagctcaaaatcaacatatcgctattttggagctagtttgagcaaaagaagaaatatgagtaaaagaatcaaagtgttcatgatccttgacttagactcgatggaaaaccacttgagatatttttctaagtcacaggatctctctcaagtttagccaaagcaacaaggagaagattgttcaaagatcaacgagaagtcagaaactcaagttctgaaattgcctagcgcggaccgtctggccccttctagcggaccgtccgcgacagcgtttcgacttcggccaggaactgaaaatcgtggatagtccgactaaaccgcggactgtccggctatatagtgcgaaccgtccggctataattcacggaccgtccgcatgtgaagacctggttcagcccaaaggtgacaagttgagcaaaaggaattatagagctggcgcggatcatccgggaccaagggtggaccatccgcatggtgtgaccgaggcagatagccgttgatctgtcaggcgtatccgttggagatgtcagaattgaccattggagggtcgcgaaccgttcgggccatagccgcggaccgtccgccagtgcaatttctggcagatgcgccccaacggctatatgggtggttgagggctataaaagccaccccaaccagctcattcacaaggattcattgatccatttcatacacaagagttgggtattcactcctatctactagaacaacacttctatacacatcaaagcctc

SEQ ID NO: 116358 - DNA, 808 bp, Zea Mays
cttttctctcacaactaagtccttatatcatattcctatgagtcattgactttacgcgtagcaccctgagtttttaaggcatcgaatccgcagtccttctctcagccgaaacagtgcccgaagcagagaacatgacatcgacactcaacgtaggcggtagtgttctaggggaagagtcaagaagaagcaggaggttacgggaaacacgacggtaactttgggtggccggaggtggtcatagtcggccggtccatgtctccaggcggtggagctcgacagctacgtgtgctccacctagtctgtggtggtagagctcgattcgatcggtcagcaagctccatgggaggtcggtgatgcggtctaccgaaggaattgaatggaggcaggctgtggaggcgggtccgtgtgcaccagcagaacctttgactccggtgaggtcaattccactattccattgaggtagagtttgggctcgagctcgaggaggctttacggaccattggggaagctaatggtggagctggattgggtggaacgtcaccggagtgggctgaccatggtggccggtgctcagaggcaagggtggtgtgtgcggagctcatcggatctggacgctggcttgggaaggtgtggcaaagggctaagagagcaacggagggcatgaccaaggtcttggctgcttaaatagacgcggacacggtggtggccgaccgatgtttcgggtgcttctacgggcacatccaatgcgcggtgagtgtgctagaaggcaacaaacatgtggcccagcgtgtgatcctattttccctcg

SEQ ID NO: 116359 - DNA, 597 bp, Zea Mays
agtgggtgtcggtagtccgaagacctttttcccaatactctctctaactagtgggcctcaggggcccgaggatctttcccgacactatgtgttgttcatgtcaaggctacctcgatctcactagcaattctatgtcttctcatgttcctctctcggggggcctctctccttgaggccaaccctcccccttttatagatcaagggggtgattacagatagcttctcccaaaagagagcataatgttagggcaaaaaggaacaattcacaatggtaaaaccttgtcgtgtgtcgatagcctttcctgtgttggtctcttgtcgcgtttgagattgtcggggttcatgcgatctgtgctggtgacagaagtctaggcgtcgtcattactcattcttgtccgcttcttcttatgtcgaccctctgccttcgtagcctagctaccagtctcccttgtcgttgtgttgctcgtagaccgttagaggactctagactaggacccatagggtatgactggagcttggccctagggctcgtaggacgtcgggggactcaaacctagggttcataggtcatgagtggagctcaggcctgggacctgt

SEQ ID NO: 116360 - DNA, 512 bp, Zea Mays
gacttaatgggcagccgatgctctacgatctcacgacttaatcccgacatctcagtgtaattccaagcaaagcaatccgaatattctttcaatagaccgatcatttcatttctaggatcggtccccagggtcttgttcacaaaaggtggccttggagttttaccatctcctatgttgatctcctccaaaggatcggccgatgtaaacccttgtcctaatttatcgagatctctgaattcctctatcatgtcccccacagaggaaccagatgatctttgtgtgatggcggactctccgatctcgggggccagatcatccatgataatgtccttacactgtggtagatgttcagtcttaaagaccgaactgttttgtgaaagaccggaccatctggcctcacaagccaaactatccgtgactagggactcatgtattctatatgtactcatcatttaaactttatttaggatttagccgattctccatcagctctagcattacaggaatgaaac

SEQ ID NO: 116361 - DNA, 527 bp, Zea Mays
gacgaagttggagccatgaccggtggttgtggtaaggcccatgcagctagagagtggcttgtcaaagctactgaaactgtaggttgtgaaaatggttgttgattgcccacatacttagggatgtatggggaatatcatgaagcaatctgtagaacttgcttcggttgattttgtcgtgcttcggccttagctatctccttttgcttctgtattgtaacttggcaggtcctagctgtgtacccttatcctctccacaaaataagcagaacaaccttcttggttgtgagttgaatcttcctctgaaacatcatccccctctgcctcttggggctagtgctctaaaggagctttggtgcgtcccagttgactgggaactgtgttggtgtccttggttgtgattgccatttcactttggttgggattgtgtatcgtcctgacatgcattgggaggagccttcctctgaaacccctagtcatctcagaatatttgtaagcttcctcccttctttgccgaaaatcattgatgt

SEQ ID NO: 116362 - DNA, 419 bp, Zea Mays
taagaatcgaataatatctaatctttccttaaataggcattttatcaaacaactaaactacgaggagtggtaagctagtagctcatcgctattgataagcacttctcacctacaaaaaacaataaacacatcctcaatctcattttcacctcttccccatcccaaatcagcaaacaccttatcatagaacctactggttttcacactcttcatgcatataaacaatttaaacaatagacaagtcgattttcccaaatgagtagcctatgcatataaacttgaacagtttcaaaaatgtgatattgtgggcgatgagttttttttggattttagtggaaacttccaccagtgtacaaaggatgatattaagtgcccgtttaggagggcttctgagtggctccggctctggcttcttgcct

SEQ ID NO: 116363 - DNA, 727 bp, Zea Mays
cgcaagtgtacctctgacatgtgggtgtaatagaatcattaaaaggcatagctcatagccgagtggttgagagagggaatataaaaagggagactgctttgtaacaaactgaacctgaactattctgtggcaatacaaactccacagtcgagtgctgttccggatcccatcccttttcagttgagaagtggcagggacgtaacatttggtaccagagctggattttcacctgcattaagaacttcagtcagtttgcactatcttttaatctcgtttcgttactttccaacagtgcttgtgcagagttggtacttgtccatcgtggagacttgagagagtcgtgagtcttgcatggggcaatgatctggtgattgaggaaagtggcaacccaacctaatgatctgtttttcgagtgagccgggccaaaggggatgagctaccgtttcttccaatcaggagcaccataaaaagacgtctttgcacacgcagcgcaagaaaaaaaaggtagtgggcccaccgagcactaactagtgtgccagtggccagctgttcgtctggcgtcgctgtccggacaggacactgctgcctgggcatctccggcctgcgtacagacatttcgcatcacgctacccaggcaaacgttatggatattcttttttcccttttttttaaaaatgttgtagggtaggcgccggtggcgtcgtggtggatctggcgtaagcatgcc

SEQ ID NO: 116364 - DNA, 402 bp, Zea Mays
tgaaatctttctttgcgtagatgtatccaaaccatgtctcctggtttgaacaacatctttcttcgacccttgttggcacgcttttcatatttcttgctcattttctcaatatttgctcaagctttttcatgaaggttcttgattaactcggttcacttgctagcgtcaaagtttacccgttcctgcacaggcaatgacaaaagatctatgggagtagtgggtttgaagccatatacaatttcaaatggactcaacatgtggtagactttcttcccagagttttcaatttttcttgaggatagctcgcagcagcattgataatgttcggtttacaactatagtctgtccatctgtttgtggatgacacgttgtagagaacagtagtcgtgtttcaagttttcc

SEQ ID NO: 116365 - DNA, 1278 bp, Zea Mays
cacgtagctagagagacatcccaatccaaccatttaaccaacacatgggaaagtgctttgcctccacgccaaaccaacttggagtccaatatttgttcaggcacttgcaaaccaatcgacatatcgggtactaatgagctaacaggtgtattggaaccaacttgaggcttcaactgagaaacatggaataccggatgaataccacaacctggtggaagagccaactcataagctacaacattaaccttgcgagcaatggtaaatggaccaaagaacttaaaagccaatttgggataaggacgtgaagctacagaagattgacaataaggttgaagtttgagaaacacttgatgtccttcttcaaaaacatgatctgtcctccctttatccgattgttttttcatacgttgctgggcacgattgagatgcaacttgacttgctggagcatcagctgtctctctaccaacagctcttgaagatcaggtactgtacactgaccattgtcaacaagcccaaaatgtataggtgagtggccatacaacacttcaaacggagaagttccaagagccgagtgagaacaagtattgtaccaaaactcagccaacggcaaccagtgcgcccatttcttgggagaagagtggacaaaacagcgaagatacgtctccagacactgattcactcgctctatttgtccatccgactgaggatgatatgcactgcttaagcataactgagtaccagccattttgaacagttcttgccacaagtgactcgtaaagaccgggtccatgtctgaaatcatagcaactagtaacccatgtagccgatagacttctaacaaatatagtttagccactgaaagagctgtaaagggatgagccaagggaagaaagtgagcatacttagaaaacttgtccaccaccactaagatgcaattagaccgattgaactgaggcaatccggtgataaaatccaagctaacagtattccaggcatgtgttggaactggtagtggcagcaggagaccagggtacttgacccggtcaggtttggcctgttgacatgtgacacacgattgcacaaattccttcacctgcttcttcataccaggctaggcaaatatagctttgagacgccggtatgttactgggaaaacagagtgacctcctagagcgctgtcatgcaaggcggtcatgactgtctgctgcaaaacaggattggttcccaaccaaatacgacccttgtatctgatcactccatttgtcagagtataccga

SEQ ID NO: 116366 - DNA, 660 bp, Zea Mays
tgggaccagaatggcaaaccaaagcaaagccgagcgaggcgtcctcccgtgcgctgcgttgttctgacatgtgtgactgtgatcggccaaggataaggttttggagggatttgcgatcgtacgggaaggcgactggatgattttgggggggactgtttggttccctatgagaataaactttgcagaccctcactagctacgttttttgttcttgttttatgagatggccgtgcggagaagacgacgagaatgtatggaaagcgtgttcctttcttggctggcgcctggcaggtcgttgtgcaaactaggcgtcgttttccccagatcaattggatcctcttgttgggggaagttgtattcgctaacacgtaggatatacatgactatgcgtagggtctaatcggctttcacacattgcggttgcggggcaacaaactggaggcgatgagtcatttgccggtgactagctcgcgcacctctcatctgacggagacggagacagagactgcacgttcctgttcggtaaaggacacacggacacggaggagagaggcgggcgcaagcgcaagtagtaacacggattccgttccgccgtacacaattttgtcctacctttgccagatccgatccgcctgtcgtacaactataaatcctccgctg

SEQ ID NO: 116367 - DNA, 402 bp, Zea Mays
aaggtggaactgtataaatggatttactatctttttctaacgacttaagcttttggttctcaaccagtaacatggaccactccactcattggtaacatgaaccgacgataatgatggactatcaccaacggttattgttaccaaccattggtgataattgcccccattttcatcaatggttcgtaacatgaaccggcggtgatgagcataaccaatgacttggagcaaaccggcagtgatgatgagctatgtagttgtgtacgccataaagaatatcacacatgaattactgaaatgtcaaagatgactttaagggagacattgatttaaaaagaaaatcatttctgaaggtactgattgttgatttgctaatctacatgtcatgatatgtcatgtttattt

SEQ ID NO: 116368 - DNA, 744 bp, Zea Mays
gggtgttacagttggtatcagaggtataggttgtaggtcctagcaaggaaatgatgataaattgacacactacacatataggatgggttgcttgctttactattgctatattaggaattgtgagtgctcgttgatattatttgaagtttgtgttatgccaattttatttatttatttacttactcatgtggctgcagttatgcctcctcgtagggctcatggcagcccgcaagatcctagtggggattctttgagtccggtggcaatgttagccgtgatgcaggccatgcagtaggagttggcgattctaaggcaagtcattcttgttgctcctgctggtgctactcagggtgtcggtggtggaggagttcccaggggcgctgtccctgtgggtgctgctccaagtggtggggctgaggtgcccttcccatcagtggtcagtggatgggcatgaagttggacacctttgatggcagtggtattctggttgaggcggcggattggctgacttatgtggaagaaaagatggatgttttttagattgtgtatggggatcgtgttcattttggcacgcagctgttaaagggggaggctcaaatttggtggagaggcatgcaggcagctcacttgtcttcatcgggagtactgacctgggatgtttttatcaggcagtttgaaaggagattctacccagtcaccttcctggagaagatgaagatagatttgcagtctttcaagcaggag

SEQ ID NO: 116369 - DNA, 608 bp, Zea Mays
aaatgttgcgcccaaggtgcacacccaccaaagttcaaaacgtgcacacccaccaaagttcaaaacgtgcacaataaatttatttgtcggggagaggttcaaaacaccgacaaatcttatcctatatggcaagctgccaataaacttaatatcggtaacctatggtgtttctatggtgaaaatgattaaaatgaaaatgatgttgaacacttgataattttaaacttatttaaagagcaccagcgtcttaaactcacatgattaacttcgattctaggttggtcttccacacagtcttggatttgaaaaaaccaccatttgacacgttagttgtaccaaaagaaaattgcactgcgtatagacaacatatacagagatgaataccttagggcacgtatagcgcggctacaattccacccatttcgcaaaaaagcactctcgcgacctgaaatgcgcgtgatggcatggcgtcgtctgttgggacgacgaccacagatcgtgctcctagactagcaacgcgagaggcaacagggacaggggtagtgcaaataacgatagcttgtgttatccttcacaaatttaaaaccatgctcacggtgtaaataggt

SEQ ID NO: 116370 - DNA, 420 bp, Zea Mays
gtcccgttttcatccctagtgataacgacactaaatttttaaacagtgtcatcaccacattcctctcctgccatgaatttgtcgttcgtcttccatgcccatacaccccacaaaatggaaaagttgaacacatgctccgcacaatcaacatagtttgcaccctattgatcctgcctctaacctattgggctgaagccttggccgctgccacatttttttgaaagaaagactgtggagcatgtgttaaatgagtctatgtttccttttgctacgacaccctcggcagctcggtgtcgtcgtcactggacttttgatgcaaagcctctctacaatgtcggaagctccgcctttgagcgttaattaccacttctaactgtttaattatcaataaattatttattgttcatgctaagatcattt

SEQ ID NO: 116371 - DNA, 561 bp, Zea Mays
ctttgacgcaacagagtttgtgtagaaatgtgacagttgctagaaaatgtgcaagggactagaagcaaccttcgtccttaactcagcttatacaaagtacatggactttacagagatgggggatggacataataggcccgatgccagtggcgcaaggaaaattgagatatgcaacagtggcagtggagtacttctctaagtggatcatagcaaaagctctagcaataataactttgacaaccatctagaagttcttctggcaaaacattatttgcctcttcggagtcccgaagtccattactattgacaacgatactcagttcgactccaaagtattcaaagaattctgcaaccaagtgggaacaaatatacacttcgcatcagtttggcacccggagtctaatgggttggttgaaagagcaaacgacataattttgctgggaatcacaaaatatttagttggattacccaaagggaagtggacagaggagcttatcaaaggtttgtggaatcacaacacatctgtgtcaatatctactaggtttacacccttcaagtttc

SEQ ID NO: 116372 - DNA, 389 bp, Zea Mays
ttttttctaatggatgggcgtgagatgtccatatctttgatagagatgagagttcggtagctagcttatatgtggcacggaaggaaaatattgttttggatatcacgaggattttagccccttcattcccctccgatataaataacaagggggtttaagccacttctatctctttctcctaaacaagccttaaaagaatcgataaaggttttactcctgcggtcctaccacaaaataggcctccactttatttttgatctaggacattaggcctaatgttgaagtttagggaaattgtacgtggtagattgacaaagagtggttttagctcttgaacattgaaaatggtactatttaccaggaacacactaagaaacattgttcattat

SEQ ID NO: 116373 - DNA, 921 bp, Zea Mays
tttttagtctcagtcactgaattttattccagcaacatgatgtatatgcacatacatttggtgtaagtggtttaatgggcctcatgagccaaacacatacacaaatttatccaaagtattttcttaaggatcaaagtatttgtttaaataattactttcattacaaatgttctggaaacaacctccagcatatgttggtgaatgagggcttcacagcaagttaaatttttaagaagaacgagaagctgaattatgtaaacatgtggcaagtagggatggcaaaaaaactcatggttcactagcttgctcgactcgtggtcaaattagctcgactcgacttggctcgttaacataacaagccagcttacactagcatttgagctcgttacgttaatgagctagcttgtgagccagtttgtgaaccacacgaccaagcatacgtacacacagttcagattcttctatgtttctctcacattatctcccatctaacttgagcaaggcaaatgccattgatgactgatcaccacacccatgtgagaggcatacttacatttttaagataaaaacattaggacttttcctctgtgtgacttctctactgccatccatgttcccactcatatcttctcactctcacctcaagaagaccatacgccgcctcccaagttccaagtctaacacgtgccaggtcaccaacatgcagggtcgcaggtgatgctctccatcctatattgtcttgcataagtggtgcacttagccttagctcgatcgcatgtcttctctaccttcgtcgtctgttacctatctgcatgttcccaagccgaagacctagaaatatcgagcatggatccaaggatgtcactgaaaagactagcgacattatcttcggcacgtccgatacctgcccacatgttccca

SEQ ID NO: 116374 - DNA, 692 bp, Zea Mays
aaaaaatttgcggagattatcaatgttccaagaatgctctaggtcctcgtcggatggcgttgtgagcctgtacgcgctgggggacgccttcgtcttgacgatgaaagggccctcccacttgggctccagcttgcccctagactctgtccgagctgtccggacgagtacgaggtctccttcgttgaattcactcgggatgactgtgtggtcacaccatgcttttgtttgggcttggtatttgtttaaagcctgtagggagaagacgcggtctctgtcgatgaggtccttcaaagtgggctcgtccacgtcggggacggctgatgggactgtccgtggtgacccatgttttatttcttgcggagtcatggcctccgatccatataggaggcggaaaggggtgaacccagtcgccctgcactcagtcgtgtttaatgcccagaccgcttcgggtaacaaatcggcccacttgccctttttatcgtcgaggagcatcttcttgacagctgtgaaaattttgccatttgcgcgttccacaactccgttggattgcgggtggtatactgaggcgaaggcaagcttggtgccaatggagaagcagaaatccttgaagtcttggctgtcaaattgcttgccattgtcaactgtgagttcggacgggactccgaagtggcaaacaatgttttgccagaaga

SEQ ID NO: 116375 - DNA, 679 bp, Zea Mays
atcaaagaagcgagcagccagattcacagcgaagttttcctccccagggttagcaggaggagtgttaccagttggatcctggggggataagaagaagaggggcccggatcaccttggtaaggaggaggggcgaactgatccacatcatcagcaagaaaatcttcctcaacttcttcatcatcagaagacacaaatgggacaccataggcttgttagtgccattcatttatatcaggaggtggtgcatgaatgggcacatcaggggagcaagaagcaaatgggtgacccatggagactgactggcagcgcagattgtcatcaatctcctgttggcgcctagccagctcatgcacatcagcagagatatcctggcacatggagaagaaggttgcaatcccatgagccagccgagctcccagaccacgaccacgacctcgaccacgaccacgacctcggccaccatggttcatagtacatggagtggtagcaccttgagaggaggaaggatgggtgggactagcagaagtctgctcacaagaatgagcaggagcctttttcattctacctgcaggattatttggatctatccaaaaaggggtgtaaggaagatgcctggtgccattctcatatctgatttgagtaacaacttcaatcatttttataatgaaaggagcatgaa

SEQ ID NO: 116376 - DNA, 411 bp, Zea Mays
ggaaagttgatgagcggccaattgaacacgctgattttctgggcatccgatggcttccagctttcttttaatcgtgtgcagccaatcatcagcatcgaggggattgctagatcctgcaaacgtgggaggcttgagcctcaggaaatcccccattctgtcttgcggtcttccaccattcggacgttgattttccagacttcgagtgaggacctcgatgagtcgggtttgattggctagaacttgggctagatctaagggtagttgtggaggtgcggggaggtgggtttcactttcctctctaccggcttccctttcagctctcaggggaaaccctgctccaatcccggaggcggtaggcatggttttatccgaagccatctgccaggggaagagagtcactattatgcacat

SEQ ID NO: 116377 - DNA, 517 bp, Zea Mays
taattaggccctataggccaccttaagggatgggatttcttccctatcccctttatattggtaaggtcgttcaggacgagcatgcatgcattcttaatttaaacaaatggacatttgagtaaagacttaaaaacaagatgataaccaactaagcccccagtaccattttatttaactagagaaaggctgagtcttatttttcttgttctttttatagttctttttcttttacttacacttaaccgtacacagatgacttcccacggatcctcagatgacagaaacgcactgtcccacactgacgggcttgcacgagagggctttcctcgcattttatgggaggtacttcagggggccggatacacgacaccccctcagtacgtggtgcagcagttcgagaagcaccgagtgccccgctgtagggtgaggatgactttggagcctcatcccctgcagccaggctggcgctcgttggactctaagtcttttggataccgagctgaggacacgatcgagg

SEQ ID NO: 116378 - DNA, 411 bp, Zea Mays
gtaagatgaagaagttggctacaacttttatatacaacacctctatataaaacatggtttaattcattgaactagccgcataaccaaaactagtcatgtagacccaaacaacaagcaatagatttattcaggttctatactcttctaagattaagcgttcatcaaaggactaataactttaggttcttcattacgagacacttagagccaacataaggatagaagcaatatgcttactttttaaatcattttaagcctgatctcacatcatgcaagcaagaatcgatttaagcatactatgcctgcccatatatccatccaagcacattctatacattatatcattccatcgaagaacactttttttaattatactatgcatatatatccatccaataactcacacaatct

SEQ ID NO: 116379 - DNA, 728 bp, Zea Mays
atgcaattgatttttgggcactataacttgtaatctatgagatttgggtccatgaaacctatagtaactttttaggtccttgattagtgaacaagttatgttaatggtgactgacctattattaatcaaaataaggagaaaaggctgactgaagaagggaggatcagtcaagtgatgtagattctaaggtgctgaaatatctatctttgatatttattctccttgctgtgtcttactttagaatagagtgaagataaagatgaggacatggcagggatgttcagaactttggtcatcactgaaatatcaccaagtctgaaatatctactacagtgccatcttatctctacccccttccatggataaacttccccatgccttactgtgctctagaaaccggcgtgggactgcagggttgagccacgcctccacatccatgcaatgtctaacttccccaaagttccccttgctctaatcccaagaagccagccatcccttgatcttttcactgcccatttaagagtaaccgaggggaagaagcaagagcaaaggagagatccttacctctgttgtcaaccacggtgtgtagcttcaacgtagttctattgccttcctttccccaaactataccctagatgcgcccaacttccttggtcaagttactcaacgtgtctggtgaccacgtcgccgatgccttagcctcatgtggccaggtgactatggtatgg

SEQ ID NO: 116380 - DNA, 456 bp, Zea Mays
gtacaagttcatttcttggttggatttccacctcctttctgctaaaccgtgacttaattaggtttaggagattttctcaaattcgacaggctattggtctcggattcatatatatagtctcctaattaagcgaggaggacaagaactttagatacttttcataaaccctcatgctcattcagattgttatgtttgtctgtactgcaccattcttttgtgttgtttgtacaaccctatttgacatttttcttgttgggggtatatgtgaatatggcatctgatctttgttgcttgtgtgagtagtgcgtagggatttgttagagatggccagatgggaaacgagtcagagaacgtgctctcaagaagaacgaggagagttgatcctcttgaaggactgaggaaatataagggagggtacaacatcactgacaagcactactagagtgtaaactccct

SEQ ID NO: 116381 - DNA, 347 bp, Zea Mays
gcgaagatgatcatttgttcagtgctgtggagatttccgtatatcttttcttatgttgaaagactgcagagtcagatctgatatgtgtgtgctttctatagatgtctgaaaacatgcgcagatgtgcaaggcgtgctcagtaggagcagtaggcaccccaggaagatgcatctcagcagcagttgccaccgccacccccgatgaccattgagcagatgttcctgatgcagacccaagcagtccaagcaattggtcagaccctagcagcaatgtagcaggtgcagcagcagccacccccaccttagcctccagtgcaagtccagatgccacaagtgcccagagacaag

SEQ ID NO: 116382 - DNA, 321 bp, Zea Mays
agaaagtcaagtatttggtccagaaattctccaagaagcggaaaagcaagtgcagattattagagaaaatttgaagacagcacagtcaagacagaaaaactatgctgataatagaagaagagagttgatgtttgaagtaggagacttcgtataccttaaagtttcaccgatgagaggaatgaaaaggtttaaggttaagggaaaattatcacctcgctatatcggcccattcaagattttggaaagaaaaggtgaagtagcctatcagttagagctacctgatagtttatcggatgtgcatgacgtatttcacgtatcaca

SEQ ID NO: 116383 - DNA, 288 bp, Zea Mays
ctcaacacctgctgttgccacaggtagaagtaatactaatttgagaagcgtgtatactaagtcataaactttatgtctcttcgtttgaacaagattcttcactttcatcatgtccacgaaatgccaacccttgatgcaaaagaaacttcaaacatctaagtgaataagccaatctgatcttatagagataaagatcatcatcactccatttgtcaatacgattatcaattgcaacattgggattaacaaagccattgtatctctcttgagttgcagtgtgtgccttag

SEQ ID NO: 116384 - DNA, 451 bp, Zea Mays
ggggtcagctgatgaagataaatttcaaaatttttcaaaacttctcctatcatctcgttcagagaaaccgtaatcccgctctgaaaaaacttttgaaaaccactacttcatcgtccttcggtgttggagtggtttcttttccagcaaaacgaacaagctccctttcagcttctccaaagtagcccagtttcatcatcatgggcatgtcagcatcagatacagtagatttcccaaaatctagatggctgggttttgatgggatcaaaatgctataatcctcctcttcttcatcggtattttcttcttcaatatcagtctgttcaactttggcaacagatgtaccttcgtcaatggttccctctgtcacaactaagcccgactgtctcatgacttcagaaattggagctgtctcggtggcctcggtctcctctccttcacgagtcacccttgc

SEQ ID NO: 116385 - DNA, 442 bp, Zea Mays
caaaacatgcagtttgctgagcatctacaaaagaacactaaagaacacaaacatggaggtgttatgttgacattaagttgtctctcatccatgctagtgaatgcaaagcactctttaattatgtcacaagtttgcaggcctaggagtcttgtttgtttgtttgcataaatatgttcagattgttacaaaatggttacagattgtttcagttcttccaggttgtgaacagtaacctgaacctgaaacttgctccagtttagaacctcaagctgaacactgccgacagttcaggttctgtatgaaatactccagttcaggttcatgttcaggctacaagcattgtcattttgaagaacaccatggctacgagtattctcattctaaagaacaccatggttcatgtttagcctacttccaattacacttgacactatgaactcca

SEQ ID NO: 116386 - DNA, 363 bp, Zea Mays
acccttgccacagcctctacttgccataaccgtacctcatctgacctaataaatgtctagacatacaatattcatatgtaaaaacttgaacaaaactttgatttccaaaaccaaatgagaaactaaaattctagaccaaacttattgtatcccttttcttacaaatctcgagggcgagattcttgttaagggggctaggatttgtaacacccactttgtaagcagagtttaaaatgagaaagtatatggctcgatatctatatgtgatactcatgtttatcatttcatgtgaacacaatatctagaaacaaataattaattaagaataaataaatatatgccattaaaacctgcatcatgctg

SEQ ID NO: 116387 - DNA, 411 bp, Zea Mays
tgaaccttcttttgtgatcgaggtgcttccatcttcatgatagcttcaatcttatctggattagcctcaattccccggtggctgacgataaacccgagtaactttcctgcgggtaccccgaaaacacatttttcaggattaagcttccatctataccgtctcagactgttgaaaaccagctgtaagtcttcgatgaagttctccgaattctccgttttgattaccacatcatctacgtaggcctccacacgcttgccccagtgatcggctaagcacgtttgaatggctctctgataagtcgctccagcgtttttgaggccgaacggcatggaggtgtaacagaaagcaccaaacagagtgatgaacgttgttttttcctcgtcttcctttgccaaactaatctgatggtat

SEQ ID NO: 116388 - DNA, 360 bp, Zea Mays
aaaagatcagaagaggatcggattgggtcgcggggtgaagtttatcaaccgcgcctatagctgtgcgacgtggccagaccatcagtatcctcatggagactccggcaacctcggttatgccacgccgtggctcgttactgtgtggtagtaactgtggcacacttaggattacaatctttgagccgttgcaccggtgaacgccacgattaagccaccagtgctctcccctctctccggccgccagcgcgcgattccaaattcacgagccaccgccctcgggccctataaattgagcatgccatcagctccgctaggtagtcaagcatccagtgcacccacctgtgtctcggattgtccacc

SEQ ID NO: 116389 - DNA, 894 bp, Zea Mays
cttcggggtcgcctcgtacgaagttttcttcagcagaataggcacccattttggtgaagctagtttttaattttctcacgcaatccaaggatttctcgaagcatctttccttggattcacgaagttctttaacatttttctctagataatttttccaatattcgctaatttctctattagcctgtgcgagtgcgcagttttccttagcttcggccagttgcctccgaaggtcgtcaattgcagttttctaggcttcgacctgagctttgaaattagcttcgtcttcttttactttattcaccaataaaattaagattttgtccttttctagaccttcgtttctcaattcaatcacctctgaacgaaggttactaacagccattgtatagctttcgtcttcaatattcttctacgccctaagggcattactaagaattaagccctgcaaagaggaggaaagaattgagcatgacaaataaaatacttcattctcaaattcaaagttaacttctatacctttatactattgtatgctaggctgtcagcatgttcatccttcgacaaaatcgaaaggccatcttccagcttcgggaatcctatgcttttacctatctcccggtaaacggatatttctttgttgtccgggagacagtataagaagtcgccatcgtcagtgccgttaaacactaaggctcctttcggatatttcagtttttgagcataatgccttgcttccgcgacttcatcttcggacaatttcttccccgaagcatgtcgataaatataatcagcagcttcgaccggcgcttcgggaccatgagattttgccctttctgccatatcttgtcgtgctgtcagaatggtttccgaagtttgctgatcagcttggacttc

SEQ ID NO: 116390 - DNA, 713 bp, Zea Mays
cgttccaaatgaggcctacaagtgctaatgctagccacaatacaagaaaagtggagggcttaaaatcaagaaaggccataattttgcagccaatttattttctgtcctttgatgccagtgtgagtggatagtttcgtagtgttatacaaaatgaaaaacttagataaaacatatgtgtgtgaggaagacaatactctcggctgccatgaagacacactcaagcattctcatatagcgagctactgcgggacccatcatgacgagacttgacaccaattagaggacctctcctaactctagccagaggagggtcttgacaatgtgtaacttgacatcaagacattcgaaggaataactacatcattaagtcttgtaaagaaccactaagagacacgggacccatcagctatcagagcgctctaaggactcgacctctagtgactcatatgtcctaggttgggattatcaaagtcatcgagtccccttgtgccataggatatcaatgagcggtccaagccttgggggccctcgtatctctaggtgctcatgtgtctaagtccatgcaccccttagcttcagggagctatgaagagtacatatgctcgagacaatccaggccttagagcactctacgacacttagacacttatggccctcttctacctccaaggtctttaaaatccttagcatcacattacaagagtcgctgagcc

SEQ ID NO: 116391 - DNA, 535 bp, Zea Mays
ggggattacaggcgcagctgtggtattggggactgccagcaaacagttctgtcggtgatctgatggtgaaatttggggaccaagtcgttttacagtacagactggaactggacaagtaaactggggcctggaactgaaggggtcatgtccaccatgtctttgtagcatggacccccaaaatagaaagttatcctttttggccactacctgtccttccaaactaatgtctcccgttagtccttatttctagcagttcttgaagcaatacctcatatagcattttacctggatgatggtttatggctagcaatgacaaattagcatgggctaaggacttgaaaaacatgatgatgcaaggggatcttgcagatacttaacagagcagctaaaacagctaaaacagagtgtcctgtcaagttgctgcacatttcaataggtgatgtgtagcagagaaatggtgtggaccggtgcagacttgtcagagcaagagttttactgatctgatgtttgattgatgagcatgtatggcagcgag

SEQ ID NO: 116392 - DNA, 363 bp, Zea Mays
cacgtttttgggagcagctacaagaagaacttgataccatgttaaccaggagctcagcatatcatccctagactcacagccaaacagaaagagtaaaccagattcttgaagacatgttgagggtatgtgtgatccactatggctagaattgtgacaaatgtctctcattggccgagttctcttacaacaacatctaccaagccagtctgaagatggcacccttcgaagccttgtatgggaggaggtgtcagacaccccttaattggtcacaaactggtgagagggaaaattttgagcctaacctagtgcatgaagctgaagaaaaggtcaaaatcattaagaggaacttggaagctactcaag

SEQ ID NO: 116393 - DNA, 294 bp, Zea Mays
tgtggttacatcatattattatctgaatgttgactattgtaagactggactcctagtcaacaagcaatcatttgaggtgacttggaatgaaatgccaactgatcacctgtcctgccgatttccctatggtattccttagcactctaagaatttatattttgtttgctttaggatagagtgagttgtaccctgctggtggtgacagttgttgagtaaacgaaatcaatagaagccccagatcaagatctggtttgtgtgacaaggtggagttattgcaatcttaatgattaatca

SEQ ID NO: 116394 - DNA, 633 bp, Zea Mays
ggaggagctcttcctctgtgctgttgaaattggctggccgccatctcgcgcagaaagcgcgtattgtcagcggtggcgttgaccaaggcagcgatagcctcagccaaagtaggaggtaccgatggcgggttgggagtgtcctcctcaccacgagatgtccccgcaccatcatgtgcacgagtccgggatggcatctgaggcaaagaaacatttggaaaatataacatgccaacatacaccatcatattacattgctgaaatgtaataattatacaggctccattatacaactcaacttttcttacttattttacataagtacaatacttagactatactactctagtcttcttcatctttcgttgctccattgcctgctgcaggagaccgtttgtcagcatggttcatggaaggagggggcctaaaaaggtccagctccccatcaggtccttcattagttgttcccgatggtccggctcccattgcagcaacgtctggtggcacgtccgggtgcagccgatcatatagtacatgcacttcttcatgtaaggtattacaatacgcttgcaggttttcgagggatgcgctcagttctgccacgcgagctagagctttcgcttcacagtcccaagc

SEQ ID NO: 116395 - DNA, 333 bp, Zea Mays
aaagaacatcttaagggttgggatgttgtgtataaggtatcgccacacgggaggttacctgttcctaacgatgaagattacaacttagacccggacacatatgatggagaatttttccaagaagatgagctagaagggcgatttgagatagacttaaccgaagctatcagaatggatgtagatattgaaatggttgttgatgaggaggatgatgaggtgcaaaatgataatgacttagtaatccttgaaggcaatgacattaatgacgaggttgcgtcttccgatgatgttgagattgaaatggttgatagtgatgatgagagttatgatccg

SEQ ID NO: 116396 - DNA, 306 bp, Zea Mays
agtccgggtacacaaacccgattacatcaaacactctatttaatctctttttgccatgagccccgaaggcagttgtcatggcttcatcttcggcctttgaatatgctccaagcagcttgtcactagtcgcttctatggcatttagcctgtcatcatttagttcatcaaattggctcctgtacctgaaggtatactttaggtagactaaaccaccttggctagagccagcagcagtctcctttgacatttcccacccatctgcaagtggccacactctgtaagcaatgtgctcctgcaccaagtccc

SEQ ID NO: 116397 - DNA, 837 bp, Zea Mays
agccgccagatatgcttatcctcttgatccgggtctaaggcccagtctgcagtgaggtcccaaaccttgaggaagtcagacaaaacattaacaggatagctcctctaatgtcatgtacccagttccttgaattgagggcatcatggacattcctcattttagctctagaagagaccagcttgaccaaatgaggggccagctgacttagactctggccatcgatccatttacctgtccaaaacaaggtgtttttaccgttgcccaccaccgaagagaccgctgccgagaagaaggccttaaccgtaggatgatcatttattttaaaggatgcccaaggcttgccagtatcagtttttttcagccagagccaacgtaatctaagagcccaactcatcaaatacaggtttaagatacccaatcctccaaattcttttggtctagtaaccttgttccaagctaccaagcaatgtcctcctatagcttctttcctccctctccacaggaaatttcttctgattttgtcaattgctttgaaaacccaagaaggaaggtccatggccatcattaagtaaatagtcattgaagacaagacagtctggacaataatcaatcttccagctctagtcaacagatcggctttccagcagggaaggcgatgcgcaattttatcaatgaatggttgtaggtgctgtttgccaagcttctttaaggatagaggcactcccaaatatttgcaggggacattgtcaacagcgcatgggagcagattacgaatggtatcaaggtgttcaacagcacagtggatggggaaaacgctgctctttgccatatttgttt

SEQ ID NO: 116398 - DNA, 324 bp, Zea Mays
cttttctaacatgtagcttgcaaattgtgataggatgaatgatgggcacttgaccctgtcatgatcttgtatttcctttgtattatctagttagctgagcatggcactaaacaatgctaaaaaccattttagtacataacaagcgcagtgtttggaggcgtgtagtttgcttcaaatgtcccaagtcaaagtgatacttccaggtagcaaggatggagtgtttattaacttgaggcgaaattccggtgctaattaatcccctctccgatccaaattataagtggaattagcttttctagatccataggtttactatgtatctag

SEQ ID NO: 116399 - DNA, 449 bp, Zea Mays
cggaatcaagggaacaccacataggctacagagggtgagactccagggtcagccaaaccctacaacgtggcacccgatgctcctcgtatacctgcaccgtatatagagggggtgtagggtatccggtggagcagagcacctcccataagatagatggaaagcccttgtgggaaaggtagtcaaaactgaagcgagtgtctcctccattggtgagggtgggtgaagtcaattgtgaaagagggttagatgtaagtgctaaggtagcggtaaggagataagtgtgcttaagttttaaggtggatcaacttaggtttatctattccaactcatttcttgctaccctttttttaactaatgtttgttaggggtcatgattcgatgcattttccttaacttttaattatttcatgttttataatgcatgcatgcttgaatgaacgtcctctcat

SEQ ID NO: 116400 - DNA, 701 bp, Zea Mays
ccgatctctacccggcggaattccgtagacctcgccgtcggccaccgcccgtgcaatttggagttgagggaagttcaccggaaggcagcacgatggttcagaagaagaagaaagcggccgcggcgcccaaactccgcaagcttccgaagcgcgacgcggtagctagctacgctccatttccgcaacctccgcgcttggattggatcctctccgggggaaggagtgtctaacttcctttttctcggtctcggttctctcgcaggataagaagctcgggaagaagggtgacatggcagagttcagggcgcagctggactcccttgggctgaagatagtccaagtcacggcagatgggaactgcttcttcaggttcaggactggcttcttttggcttctaatgtgcatgtccttgtcgatgagaagaagaaacatttgattttgaacaaaatgagttttgtttttcccgaaagcaattctcaggagcttatgccttttcaaatttttaagcaggagagaagtgttaaaaaacgttttaagagtttttgaacaaaacgctagggcgccttttgagttatatgactactcattgtagtatgcagggcaatgggtgaccagcttgagggcgatgaggaagagcacatgaagtaccgagatatggttgtggattacattgtggtatgtgggataactttttgtaattg

SEQ ID NO: 116401 - DNA, 921 bp, Zea Mays
atccagttccgacatttcgaaagagatggccgggggcctggatgtaggagtggttctacgtaaaaaatgacctggttgaaagggaagatattaaggggattattcaatgcccaatctggtctcacttcggcattaggaggccgtccaatgcccttgggaatgacattcaagcatgccagatggccttcaatacaatatgtacctacatagacacaagggacttaatgcaggagcatatcacttatagagtgtggccactcgcaagtgggtgggagatgtcgaaggaagctgctgctgggtctagccaaggcggtttggtctacctgaagtacacatacaaatacaggagccagtttgatgagccaaatgatgactggttaggtgccattgaagcaaccagtgatgaattgcttggtgcctactagaaggctaaagatgatgctatgacaacgaccttcgagggtcgaggcaaaaagagactgaatagagtatttgatgtcatcgggtttgtatacccagattattgttatccttcgcgaaatcaaggaaagaagagaaaggctgctgcttcggtgatttctagcacgccgagatcgaaaaagttaaggttttaacacatcgcccgaagcgcattgaaacgaccgaagtgccaaggcctatagaggggtcttctttcgcatctgagcccagtcgctccgctcctgtcgaagctagagcagaaccgaccgaagagccagaactaaagaaatcgacaaagcaaccgaagactctaaatccgttgcaagagacagagctgccgaaggtatcaaagattcctgcagcaactccgaagaggatgagaatggccagcactagacgatgttatggaatctacaaaggtaccaactcctgcttcagcacctgatacagagggcgaagcct

SEQ ID NO: 116402 - DNA, 435 bp, Zea Mays
ctgcaagtcaccatcatcgacgatctatcttgcttgcatacatacatatatggctgggggctaatcaagtaactaatccgatcccaaatgatcaaagtccaagcatccctccctctacaaagccccgaaataaataagctcaatctccgtcactagttcctatctagccagagacattcagacatacatatacatacatagtgctactacataagcttaaacctaagccttggatcgatgtacttactcctcatatatggcaaaggtagctagctagatactagatagaggctgctcgagctacctgtcctagctagatcccactacatgcaactgcaaggcgcgtggtgaagtcgagcatgcatgcacatgcgcgcgcgttcatgtggctccgaccccgaggaaatctatgaacgctggcggcggcggcgccgc

SEQ ID NO: 116403 - DNA, 490 bp, Zea Mays
taagtgggtggaagggggtcggttcagataaacattgaagatctagtgcactgaaatatttgaaacaaagatctgggcactgttgaatcggatgagttcggatgaatcggtgggggaatcgatcgcgggggaaggataacctcagacgtggcaccaccccgcgtacttagccgggcgtggccagagatattcaccggcggtcaccgtgactcagtgattttccgccgcggtgtcacccatgccttgctcctccctcactttgtctcttccctacgtggtaaacatgcgctaacgatgttatccgtggctgtggatagttagccagaccgccgtgcctataaatagtgccatgaaccccggcgagacactcacaacttcaccagtgagtttgattgaagcccaaaattcgcactgcctctgccacctcttcccaaattgagtgtgcacggtgaatcgatagcactttgcgaccgtgtagctccaatctcac

SEQ ID NO: 116404 - DNA, 494 bp, Zea Mays
attatccctaaatcaacaacatcccaaatgctcagatggagtgaggataagtgactcttcattttcacactccaccatgaataatcttcaccataaaattatgatggttttcctaatggcatcgaaaaacaaaggtgtgtgtttagggatgtgagcataatgaaagggatttggttaaccagtgtgcgctctcagagcttggaagatgtcgactcgacggtggatgtggaaggccatggcgtgttggtctcgtagtagatgaccttccacatcctctttttcttcttgtcatccttcttgtgcaatttggaggagccttgagattattttattttttatttgtgcttctccttatgcttaggcttttctcccgacggtaccttgtccttttcgcttccattgggcttttctcacgatggcaccttccctttggccttttctcctaacgacaccttctctctcgagagtttgttctcgttcttggcgaattctca

SEQ ID NO: 116405 - DNA, 459 bp, Zea Mays
cttcgcagtgacgttatgaaaaaagattgctcaagtttttgcataagaaacattatatgcaatgcacacttctaccttacaattttaatgtgtcgactacctcataccacataccttttcataactgaatatgttgtctttgactccgtgagaaagccagacacatagttaaaagaagtcatggaccttcttagtgagtaattattaccattcgaacctaacttcctaaacctctaaataattcgattatgcacaaaggactgatcatttacgtaatgcaaggcatggatatggctacacaaaaaacaacaagaccaaaattcttaaacttagtccaagctttcttgtatttatgaagcttgcacatctcacaacttatttgccaataataattcataacttttcctaattttagcgtttgacacaaaaggggaccaacctttgcgatactacattagt

SEQ ID NO: 116406 - DNA, 515 bp, Zea Mays
cgaagaccatccaataccgtgtcctcgatctctcacatataagataatcaaccacatcaaactctgaatgagagatcagtgcaccaagtagccagagctggatgtgagtggtggcctctatataacccatccgaggcagtagcgtccgtctcatgagctgatataagtacttggccgctggagtgaaatctgtcggagagcgtcgcgacccatctgtgaaaggcggtcggaacagggccgcgacgtgggctgtagctagagcaacaccaccgtgagggcaacgaggaggatcagaggtaccgtagcacaagctatgaaggcgagtcgacgactcggtaaatccaaacagctggcgaatctggctggcatgaatagtaacatcctctcgctcaaagcggaacctcatccactggtgattggggtcgatccatactgaagcatagaacactcggacccactcctcaacatatctgccgctggtagtcagtagagtgagtagaccaggtagataggaa

SEQ ID NO: 116407 - DNA, 512 bp, Zea Mays
tgaggcttttctctaaactctctctttttttatattaccttcgtaatggtttgagtattctaaatttaacttgttttgcagggtatgttattaagcaaggcgttgaaaatgcagcaggatattaaagacaaaagaaacgaaattattattgaaggcttagaagataagattaagaaacttgaagattctttaaaagaaaaagacaacctgctgcaatcagccgaaggttctctcgtagaagcaaggtctcagaatgataagctgagcgaagagctaatcgaagctcgagcaaccttgaatgaaaggtcagagcgcttcgaccatgaaacgaaggaactcaaagcaaaggtcgaagccgaagctgaaaggaaggcgaagctaagtgaaactattaagaatcttcgggacaaatgctccgactttgccgcccaatgcattaatcgattgaaggagatatttaattcagtcggagccacttctgaagaagtcaccccttctaccgaagacatccc

SEQ ID NO: 116408 - DNA, 733 bp, Zea Mays
caagatattattacaagaaatgaactaaaaagattggtaagccaatatgatgttatttttcagaggctgatgatctgatctagtttgtaactaatgatctatgtgactttgttacatgacaaccagggtaggtaatttttttgtattttctaaaatctttttctttgttttttaggtaaaggatatacttcaacattacccagatcttgtgaatggattcaatgacttcttgggtcactgtgaaaatataggtgaatcacttgttttgaatgacactttattggatgcacctccatgacttaaacattgaatatattgtgtttttctgtgaataattagttttttatactctgcagatggttttttggaaggaaccttcaataaaagtaagagaacctagctgtgaagcttataatttaatttgttttactttttttaggagcctcgtttatgtttgtgttagtcttttggaatatagggcaaacatcgcggatggttagacctgtggaaaaagagagatacaaggagaacgagggggatagcgatcctgagaaagagagatacaaggaaagcaaaaattctgaaagagtattgaccttcaattctaaggaaggagcagctcatgaagctagtacattccctagcaaagagaagtataacttatgcaaaccaatatcagagcttgatctatcaaattgtcagcggtgcactccaagttaccgacttttgccta

SEQ ID NO: 116409 - DNA, 421 bp, Zea Mays
agaaggtggacaagttccagtggaccacagaagcacaggaagctcttgatgcactaaagaagttcttgaccacgccaccagtgctaaagcagccacgccgagccatgccagatcatccggcagaagatctggtgttgtacatctcctgcacgactcacatggtgagcactgcgttagtagtcgagcgggcaggggaagggcacgcatatccagtacatcatcccgtctatttcatcagtgaagttctgggaccctctaaaaagaagtatcctcaagttcaaaaactattgtacacagtacttctaactgatcgtaagctccgtcactactttgacgaccacaaagtcatagtagtcaccgggtttccaataggggatattcttcacaacaaagaagccattggaagaatagccaagtgggc

SEQ ID NO: 116410 - DNA, 372 bp, Zea Mays
attataaataaacaatttttagctatacgtataatttctatgtagaaataaaagggataaaactcaaaagtctattattagtaataaagaaaataattagcaattattttccataaagattgttaataaatgtttctatattatactagataaaactagtgtcatagtcacttactcatattttcaccaataatgactcgcggtaataatcataatgattaataagtatttatgatttaagacatatttatgagtataataagtgtgatgtatgaatgtgtatgtaatggtgaatgattactcctgtaatggtgtatgtttatttatttgacgtatgtattttttttgtatgtacgatacgcaaatcgatgc

SEQ ID NO: 116411 - DNA, 521 bp, Zea Mays
cttaaagatgggggcggttccaggaagaagctctatggcaaactcaactttccgctctggtggcatacctggtaggtccttcggaaacacatctgggaacttagacacaactttgataatctcaagtgggtctgcttcactgctatcaacagccatctgataacaacttcctttctttggctcaggcgggactaactcggtcaccacttcctctcctagtggggacatcaacttgattgtcctcttatcacaactgataactacctgatacttatctagccagttcatccctaggatgacatctattccctgagtatccattactatgagattagcgggaaacactatccgccttatttccacacttacattcaagcaaatgctatcggctcgaattctaccaccggttgagacaatttgaatgggggttgacatggtagttatcggaagattatgtgcttctacccatgatgcagtaataaatgaatgcgttgctccagtatcaaataacacttctgcaa

SEQ ID NO: 116412 - DNA, 555 bp, Zea Mays
ggattatagcattttgatcccatcaaaacccatccactaagattttgagaaatctactgtgtctgaagccggcgtgcccatgatgatgaaactgggctactttggagaagctgaaaggaagcttgttcgttttgccggagaagaaaccactccaacaccgaaggatgatgaagtagtggttttcaaaagttttttcagggcaggactgcggttccctctgaatgagatgataggagaagtcttgaatttttttgaaatttatcttcatcagctgacccctaacgccattgttaggctcagcgtcttcatctgggcccttcgaagccaagagatgagcccagatgccgaagcattccaccgggtacacgaattaaactatcagacgaaggccagggcaaacggtcttcatgaaaattttggctgctacaattttgcataccacaaggatacgaaggctccagttcttagctaccgcaccaaatggccaaccggctggaagggtgaatggttttatatcaaggtcgatgagaagaagagggggaaactgatgacgat

SEQ ID NO: 116413 - DNA, 1296 bp, Zea Mays
ccaggcacgacagtcgtcgaagtcgtctcttcttcttctcctcgccaggtgccgcgtggcagctcattcggcgtgaacgctttgtgcaggcaccttcgggtttttggatctccacttcctcgccatattcttgtctagtcgtgatggccattggctcgatacgggtagagtcagacgattccccagccaacaagctaagcacgacgtccatcttagcatcatcggtgctagatggcatctcaaaatgagtttgcctcttagcctcaggaaaactccgaagtggggcaatcaaggcttcaatatccttaggggagggtcacactctatggcccaggctaccatcacgagcaggagggttggagacaaattcagagaatggccaatttggaggcaggttccacgcagagtaagctaaaggggcaccagcattcgagaccctgcccctcagaatcatatccaaccggctcagcaaatcctcattgggagtctatctatttgtgacccgggtggaatcattgatgtcggtatacaaataagcgggatagactctgtctttcaggggttgaatgttcttgaagataaagtcagcaaccacggcctcagcagtcaaacccctatccttcaacaagcagttttcatcatgtagcactttggcctcggttatctttgaaaaggtgggagactctacccagctaggcgtacgaatgtctggttgcctccctgatcgaggggggagggatttgccgtgattctccacgatgaaccactcaagacgccatcccttaatgctgtccttaagggggatatcgagatattctactttcctccctcggtgaagctctaaacttgcactgccgacaagctgatgctgccctccagccatcccgggccaacagtgatagagatacttctagagtccgaagtgggggagaattccaagaaaatccttgcatagatgtacaaaaatggcaacttgaagaatagagttagtgtttaagtgtgtcaggtttaagtcgtaaaaatcaaggagaccgcagaaaaaaggagatgggaagagcaagtccgcggataggaaacgggacataaacaatagattcatgggtatcctttgtcggaacagtgaccccgtggcagatccgccaagaacaaagttcctttggtggaaaaaccccaatctcttaaaggtggagaaggtcagattcgaagataatagacttgtgattaccagcaaacagaagctggctgttgggatcgatgggagggatgatcgcagcaacgacgctttgcctcttccgc

SEQ ID NO: 116414 - DNA, 309 bp, Zea Mays
gtcggatcgtactaatagatagtaacagaactgttataattgggccatatggtctgagatatttgagggatctcatgggtgttatttggctgtttcaattttcagcctcgcctctgcagacaagtaaaggacgacccacgtgccgttcttgcactttcacctgtacatgatgttattgtttttaactgctactattcagcgaaaacaaatttcattgcagcccaaccggttccttgcaattgcagctgttttcattcgcatcaagcgtactattcacgaaacataggcaccatgtcaagtcaagtgtgg

SEQ ID NO: 116415 - DNA, 352 bp, Zea Mays
cagatgcactaagtcgcaaggcttcctgccattgtcttacagtaaagacttctgacatcacattatgtcaagaaatggagaaattaaacttgggaatgattcaacatggaaccttgaaccaattgaagcttgagtcggttcttctgcaaaagattattgatgcacaaagaggtgataagggtatgaaacacattcatgagaaaataaaagccggtaaagcaaactgtttcagaaaggatggtcaaggcatagtatggtttaataatcgcatagttgtgcctaaaaatgaggaagtccgccagcaaattttggatgaagctcatcttagtcgctattccattcatcccggaag

SEQ ID NO: 116416 - DNA, 421 bp, Zea Mays
gctaccggcaccagttcgaggcctcccttttccgctgttgtcagagcgccctttttctgcaagtcatggccatgttcatagtaaacgtctccagtagacgactggacggaatccgagggcgagtaacgtcccaagcggaaatgtccagcgacaggcgtcccactttttcaactgcccggcgtgctctgctcgcttattaccgcggcacggtagtgaaaaaacaccgtggagcattggtgactgtgagtgtggctggctggtagcatggggattagtggtttctttaagtatacgcagcacatgtatagaagcggagatcacattcacacgcgggaattcggcacggcaagctgtacctgtcctgctctgctggtgaggaacatggacgaggagggttcagagaccacgccacgcccaagcc

SEQ ID NO: 116417 - DNA, 511 bp, Zea Mays
tgcttagccgcaaccgagctcgagtggatcagacgccgagatctttactgagttgtgcttatccatggccacgacgcacgaatcacggcaagcaatcgatcaacggcgacgggccaccggcgacaagatctttttttggcgctggcggtcagatcttcaacagagcactgtaccatggctaaaacttgattcagtcgcctgacagcccaacttggagcgagattttctcttaatttccttgtgacaacacaagtcaagcattgcagcaaacttggagagcattataccaactacatctttgctatatggtgttgtcacaaaagaccagtagatcaggcataaacttgggcttgatgttgatgtcagtccaccgtcagcctgattttcagacttaatcagcctgacagccaaacttcaggcttaattatctctaaattcttcttaacaactgagctcacattcttaagcaaagttgttctcctttgatagatcttcaaatttggtgtggtga

SEQ ID NO: 116418 - DNA, 381 bp, Zea Mays
ttgtagatgacccctgaccatagccttttgtattttgggattctatcctcttccagcattaaagtgctaccatttgaccatccctattcccttggtattgacatgattgtacccctagattcttcaatactcttgtttcaaatacttacctctgaaaactctgttgtctatttaaacattccagtttatatgtccatgaatttcttgtcctctgaaatcccttcttattccgttgttaagattgttatcctttgccttttctattcccttgtcctggtatgcctgcatccttagggtattgcatactcttgtctttctagatctgcttatctttataccctaatgtttgtttataaacacttcagttaacatgcccttgac

SEQ ID NO: 116419 - DNA, 335 bp, Zea Mays
atcagcaatagtgcactcatgtttctatgtcagagcagtgagacactcatgttctcgagcagtagccacaatgtctttagctgtctggagggccgcaacaagtgtagactagaccacaacaacgttagatgggggaggacagtcgacacatggtgaggtagacagtataagaaacatcgaacgcgaggaagatgttcttgtagggggaagacactaacacccatggtagtggcggtcgtgcccatggatgtagtgggaggaggcaccccctccccgcgcctagatgcacgaagacacaggggctcacactggttagcagggggcacatgcatgcc

SEQ ID NO: 116420 - DNA, 409 bp, Zea Mays
ccaaacacagcagctctgaccagcggccctcatgtcgaagaagaagagttaccatgcaaggacaagagcttcttgatgagcacattggtctcctccatctccttgtcgttcttctctgttatctttttgtactcctccaactccctttgtgtcctcgcttactgttcctcagcttcttcacatttcttcctgagctggtcgagttcaccttgaacaacaatcgtcgcttcagctgcaagttgttcccaaagctcactttgatttgatgatgatgccttggaggatgccgatgttttgatgccaacactcttaaggaattggtgtgagctgctctaggacagcaccttggacacaaggtgcacactggatgctggtatctcaccttcagcaacaggttcagccctcaaag

SEQ ID NO: 116421 - DNA, 380 bp, Zea Mays
ctgtgggtgactctaagccggtttatgtgggtgactctgatgttgacgaaggaccaaaccatgagggccttcatagcctttcaggcactggcacaatactccagtcagggagacagacttggctgggccatccaggtcgccaccacagcacaacacaatactctattttgtcttaatttttaatgtccaaattcatgtctctgttttgtcctcttcagaacttattcggtgatcttttggcccatctttgctgataacgacatagtacgcatgctgctgttgtcaaggtatagtatgtgcccacctagatttgaattgttgccaatttcattcatgacagtgccaatttcattatttataatggatttgaactgttgcct

SEQ ID NO: 116422 - DNA, 552 bp, Zea Mays
ggaaaaacgaatgcaaatatcaattatcaaccatctgttttccagatatgtaaaagctttgcgtatttatttttttcccaatgatgtagacctattgtataagttgaaaatagaacggtgataggtgatcatatattttttgtagagcaatgcaacccaactgccgtgcttataaggtgtgtcaaacattgttagttatgaattattttgttgtcgtccaattatattgtaatatgatgcattattagtggatgctaccatctcaagcactagaaaattgtaaatccttctgatcgagaaacataaaacaactactcatctaccacaaatattgggttctttcatagtgtgttttttaccatatgccatttctagactgagaggcaccaattaagagcaatcattatcagtatgaaaaatcacactggccccatactaataattttattttctgacgcactaatttggtgaggatgatgcatatgtttccatgtgtgttctgttctctcacttttttagcaaggattcttctctctgagaaaaaattctggt

SEQ ID NO: 116423 - DNA, 430 bp, Zea Mays
tgaaaccgtccaagatatggaaacccgaaacacggccagcaaaaagtagctgattagccaagctaggcacttgaacattatgttacaccagctagactgcgaccgatttcaagattacaaatccctgatgtggtaacgactgtagcaagttgcaccgctgattgcgatcgaattcgttttcttggaacggccaacccaaatcgtgttgttgctcaggcagcaattgacctccaccagtgcaacaactggttttcggccgggttaatgtaataagctctagctcagtagccttggtttagtttgtgccatcccggctaaaaaaaaacagaaactggagaagttaggcagggacaaggcggttatactacttaatgcgcagtgtttcttgggcattagtgtaggtacatgtagaggtcgttggcacttaacc

SEQ ID NO: 116424 - DNA, 378 bp, Zea Mays
ctcaggcgtggggagagtcggtcgtggttgtgctactcgaaatttgccgctgacacgccacaattccttgtcgtggtcaatcctcgccttacactgtgtccggcatcatcgggtcgccaaaactaggtatggaaacctcacccgtgttcgtcttgtttaacgcaacgtgtagagccatttaattagagtttggtgcgccttggcctgggatttgcctcgccggcggtggtcttcgccgtcgtcttccgttgggggtttggtcagggggaggacgacatgttgtgggcggtcggtaaacggatcggcggtccagaacatatcacggtgtagaagaaatctgagtcactggatcaatcacaggcggtgcagattagatgg

SEQ ID NO: 116425 - DNA, 298 bp, Zea Mays
gagcctatttgcagttctaggtgcagctattaacagcatatgttcttgatcatacacacataattttccatttccacctccaaacttaaagcctttttcttctaattgacccaaactgactatattggttcttagttcaggaatgtagtaaacatcagttaacaccttgtgcccattaccactgccttgcataataactgaacccataccttgtattctgacgacagacccatctccaaaccgaactgttccccgaacaccttggtcaagctgcgtcagcaacgaccgtgtacctgtc

SEQ ID NO: 116426 - DNA, 546 bp, Zea Mays
agatacggtctcttgcgctgcattacatcacattccatcgcaagaacaaagccatctcgctgcttgtagacatccaaagattcaaggtctaatggatgtagtctagtttagatatgttacatattgtgtatacaatggttccgtaaacttcagctgagttatgtgtgtatactatggcaatgacggtagacgtttcttatgttatgtcaatgacaacctggggaacagtgatgtctaaactggataaatgtaccctatgtattttaacttcatgtgtgttttctcagctgattctgctaattttttcacaattttatgttgttaacagcatcgtgttatgcttatttttttcaagtttatgctataatcatcaccgtgttatgctaaaaacatcactttgtacatttataagcttcaccgtctcacaagtttatccactaaacaacaccgtgttatgcatatttttttcataaatttatgctatataggtcaacgtgttatgccataaacatctcgcagtacattcataagtctacatatctaaat

SEQ ID NO: 116427 - DNA, 334 bp, Zea Mays
cagccatactgggtgatggacctcttcgatgaagccagcgtccagcagcttccggacctccttacggatgaaatcctgcctctcaatggactgtctccgaggcttctgactcactggtttggcgtcagggtggatcttcagatggtgctcgatcatctctcgggggatcccaggtatctgtgacagttcccatgcgaatacgtcagcatttgcttggaggaaggcgatgatcacgatttcctatttctcctccagatcgcccgcgatgcgagtggtctgggaggaatccgcgctgagctggatagtcttgacggggacatcgtctgctccagat

SEQ ID NO: 116428 - DNA, 474 bp, Zea Mays
ggggaccgggttctctgcaacagccacctctaaggctgaaggattctcagttacctccatgggaatggagcaacctagaccaacttcttgactctaaagaccgcactccaaggtcgatgaggctcgagacgctgcttgggataactctaaccccacattcggaatgccagtgcaaacgtccatcataccaccatctgttggctcggacagcagatcttcaggaaccatatcctcgagagcctgatcacaatttgctatggacaactcttgcagaccaacgagcgcagacaaggctagagaaggaatatcactactcccccactgaccaggtagcgccgactgtttttccgaattaagggaattccctcctcttcttcctcatcctcgtcaacaatacgaacaacacacccattgggatcagctctggccggactgcacccattgggatcagcattgtcaaggtcacacccattg

SEQ ID NO: 116429 - DNA, 577 bp, Zea Mays
gttgaccaaccttgacaaggtgacaacatacatgcaacaatttcttgatgaattatggcgtcgatcaagggatccaactccactagaatatgatacccttcttagatagggtgcgggaaatggattgcccgatttcatttcctggttcaaacagaaggtatcgtcctatctagctcatacttagtttgtcatttgaagttgctcttacgtgtgaataatataacaatctagcatgtttgaacttgcagggccaaagagatccgcttatgagtgctcagttgaaacaagtagccaatggctttgcctacaggattaggatattttctggttatgacgttaatggatattgttttcaaacaacaaactacgaccaaagtcgtcccaatcgaaaaaccacgtgttctagagtttttacggtcggtcttgacgaggtcgagtattatggaagaattgaagaaatatatggactcagttttcatggttccaaacctcttactccaatgatattcaaatgtcattggtttgatcctgaagtgatgagatagacacattctaatcttgggctagtcgaaattcg

SEQ ID NO: 116430 - DNA, 437 bp, Zea Mays
gttgactgcttttagatatgcctgttgtgataagattgaaattgcgaaacttgttacctacgagtgggatgaacgtgggatggacggggaataggagctagattgctagaatggagctgccgagtccaacttggtttcaccggctaggacaccaaagcaagtcatgcgtgaccacaacaccgtgctcaaaagcattatatgtggcacgacttcaaaagatgctctcatacagacacaacaactagcattctagaaacaacactagacataatagtgataaacatgacctagcagtaaccaccaagtattacttgttgctagcctagctactggtctgggtttaagtgctttacatagtttgtcctttgcttggggttgtgtggacatttcactttgcctcctacttgctaaggaatagcgcaggggaggttaagggt

SEQ ID NO: 116431 - DNA, 470 bp, Zea Mays
tttagtaacagtaacaccaggggtgttacatccttcccccataaaagaatctcgtcccaagattaaaagtcctagggcaagtaatggaaaaggaaacgtgtcatattttttttccttatttttggtacaaggcaggggtggtatggggtttattcctctattacaatgagtgtacatatctcacaaattacatgaagctagaaagcctgggaaattcttctgtatgttggttccattgtatcttataaaacttgagagttctccttcgggtaatcctgtccctttgatccaagactcgaatatagtcacttcaacggttcgatctggaacccgaagacacttcttcaattgggatacgtggaacacattgtgcactgcagacaatgtttcgggtaattggagtcggtatgccactggtccatatctttcaaggataggaaaagtaccaatgtactgaggtgcaagcttcc

SEQ ID NO: 116432 - DNA, 552 bp, Zea Mays
ctgtaatcaatgcacatcctcttcgtgccatccttcttctccacaaataacactggggctgcccaaggtgaggtacttggcctgatgtagcctttctctaacaactcatcaatttgcttcttgagttccaccaactcaggtccggacactcgataagctctcttagaaataggggcggtgcctgggataagctctatggcaaattcaactttcctttcaggtggcatgcctggtaactcctcaggaaatatatcggggaattctgacacaatcctaattgcctcaatcggattggactccttgtcatctactgataaatggtgataggctccttcctctagttcaggtaagtacagcttggttactacttcctttcctgatggggacaccaacttaactgttctcttgtcacaactgacagtggcttgatttctgtgtagccaattcatccctaggatgacatctaacccttgagttcccattactactaggctagcggggaagtctatcccccttatttcaatccttatattcggacaaatcctattggac

SEQ ID NO: 116433 - DNA, 368 bp, Zea Mays
tcaccatgaagccgaggaatgggatcttgctcaacccgtctccgggacaaggcatttgaagcaagagaaactcctgacaacagagcgctccgtgagcaccgcaattcccgatgctgcgatcgtcaccacgcctaggagcgcgagcgggaacaaactgaacatgatgccaggatccaacatgagaatccacttctccctcagaacctgttgtctgactttgctcaagccctgaacacgctgagtgaagttggcgaggccctagctcagatcgctaatgacctgccgcgcaccccggatgtggaaggctaccgacagagtcaacataatcaacagtcggtgagaggcgtggagcaacatcaacgcttcgc

SEQ ID NO: 116434 - DNA, 493 bp, Zea Mays
cctcgctgtgtgtatgtaaactatgatgatatcgcgtgttgcgcttgttgtgaggttttcccgacttgtaatcgtgttggcgtggtgtgtaaataggatgtggacttcactttccatggtgcttgaccgtgtaaaatagtagagacttcgcacctttaaggtgattgtatagactttgcaccattagggtgttgttacgcatttatgcatgtccggctgcacacttaggcggcttttgcttggatttgttttatgataaagactttgcacccttttggtgatgtcgagcacttattgtgcgtatccggctgcacccttaggcggcttttgctcagatgtcttatagtaaagacttcgtgccgcacacttgttgtgcatatctggctgcacccataggcggcttttgctcggatgtcttatagtaaagactttgtgtcgcacacttgttgtgcatatccggctgcacccttaagcggcttttgttcggatttgt

SEQ ID NO: 116435 - DNA, 533 bp, Zea Mays
acagttagctatcctcaagaaaactgagcttattagcccatattaggtcacatgacaaactgaacatgaaaaaaatacatcatagcaccatgatatgcatctgtttggtctttacgatgcttgtctagatacataaaggaatcagtttgttttttttgtgtccagactctaaacatctatattgtcgttcaaattctgcccatcatgtgaatttgacttgatcatgcatatctaaatttggtttacaggaatgatattactctctcaacccacaaaataatgcaattttcgcatttcgagaaaccaaatgctttcaagtttaaccataatcgtatgaaaaaatactaacatttatggtacaaaataaatatcattggatcatatgaaatatactttcaatctttcataataaactgatttgaagacataaatgtaaatactattcactgtaaacttggtcaaatttgaactacttaaacgggcacaaatgtcatagttgcattcttttgtggacagagagagtatatgtcaat

SEQ ID NO: 116436 - DNA, 409 bp, Zea Mays
tttcgatggtgaggatcttaggcttatgttgtttaattttcgtaggctggcctgatcccgaaagtggaacctttgtaatatttgacattggcatagccgtgccttagcgaattgaacgctgtcctcgcccccattcgccgagggacgactatgcgagtcttcggttgttgaatgtactaaggctttcttcttttttctgtgagtggtgatttcgcgctcctaggtgttttttcgtgcttgtgctaatctggctgcacccttaggcggatttttgctcggatagattctgcgtctctcagatgacttcgcacccttatgtgactttttgctcggatagattatgcgcctcttagacgacttcagacccttatgtgttttggcacacttattgtgctaatccggctgcacc

SEQ ID NO: 116437 - DNA, 370 bp, Zea Mays
ggccggggggcagcaccagcttgtgggtggtgcgagtttggagatgcgccgtgggaggaagacagagtacctcgacatcccactcaaggacaacatcaaaggatggtgcctggaatggtttattgtagagaatcacgacaactctctcccccctcggccagggagacagtcggatgttcgcgctccaagttggactgaatcccccacagacttggagatagccgaggccagggttctgcttgccgaggttggcttgttgaaggagaaaggtctgactgctgaagctgtggtcgtcgattttgtttttaagaacattcagccactaaaggacagagcgtacccagcttatctatatcgtggtatcattgac

SEQ ID NO: 116438 - DNA, 317 bp, Zea Mays
aaaataaatgaacggtcaaagtgtaacttaggaaaccgtgtcatgttaaactgtgccttgtaaatcggacaggagggggtaataataggattgtgactggactgctttacctgtgctagacaataacatgactcatttacttgtcgatccagtttgcaacctaaaggcagagctttgaatcaactttgaactgttctacagtgctttattatgtatgcttagctcttattagagtgtcaccttaaacgaaaatagccggaaataatccgatgttttgtaacaaattattagtcaaaattttagcacgatcctgtgtt

SEQ ID NO: 116439 - DNA, 339 bp, Zea Mays
taaggcctcagaaacctataggagtgctagctgatatgagaggcaggagagaggagcattacgacctccagcgatggcaggcagaagagaggatcagaaaaaatggtgtgatgatgctccccttctgtcgtgtgtggtgaggaccactgaatttgctgcttttcactttgtcaagtgcaatggagctcaggcctctccttttgcatcctcatgcacacgcatgattactccctgtggttgctgatcccaaagcaacgcaaagcgaccttagtgatcacaattcaaaaaaaatatatgcaaagtgttgagaacatttttttaatcgtatcttgagatgtc

SEQ ID NO: 116440 - DNA, 466 bp, Zea Mays
cggcggtcttgttgcttctttgtttccgcgtgtcgttaagagcatggaggaatgctgataaacactagaatacgctatagtctagtatatttaattttgattcgtcaggtaagtgtctgggcgatctgcctgtagttactacaggcaacatgtaaatttggggatcggatcccctgacgtcgaagtcacctgacgcacctatattttctgcagctgggacttcacttatgcagagtacgttgtagctactggacatcatcatcgctcaattgtgtggcaggtaccttactcacatagttcatgaattgtgacacctacgtaagatggtcgggctggtggggtgtaaagcagcacaaatgataaaatttagatccaagcttctctccgggagcaaatttaaaaacgcatgggttaaaaggcacactttttgagtagtgaatctgagttatacatgtaatcacctaat

SEQ ID NO: 116441 - DNA, 385 bp, Zea Mays
cccggttcgagtacactacaaacaagacaaagatcactgcgcgcctaaggagcataccaggcctacaggaagcctattggacccctcgattctggtagtgacagacaagatttatcttcgcccctttttccctatgtcaaatatctagtatgtgaagtgactcagcaacccatgaggtgggtgtatcagtgggaagagtccgagtattaccaaatgtttgtggactcatggagtacgacggctacagcgtggaccgagcaggcttgggcagagtacaaggcgcagctgacacgtgagcaaggtatttgcgttgctctcatcggaggagtataatacatcacacgaccagtggaatctatgcctatgggcatgacgttcagggggg

SEQ ID NO: 116442 - DNA, 370 bp, Zea Mays
caagggttagatgtcatcctagggatgaattggctacacagaaatcaagccactattagttgtgacaagagaacagttaagttggtgtccccatccggaaaggaggtagtaaccaagctatacttacctgaactagaagaaggagcctgtcaccatttatcagtagatgacaaggagtccaatccgattgaggtaattaggattgtttcataattctccgatgtattccctgaggagttaccaggcatgccacctgaaaggaaggttgaatttttcatagagcttatcccatgcaccgcccctatttccaagagagcttattgagtgtccggaccatagttggtggaactcaagaagcaaattgatgagt

SEQ ID NO: 116443 - DNA, 298 bp, Zea Mays
gaattagagattcactaccacccaggcaaggctaatgtagtggcagatgcgttaagtcgcaaggcttcctgtcattgtcttacaatgaagacttctgacattatgttatgccaagaaatggagaagttgaacctgggaatgatacaacatggaacttcaaatcacttgaaacttgagtcagtcctcctacaaaggataattgatgcacaaagaaatgatgaggttatgaaacaccttcatgagaaaatggaggccggtaaagccaactacttcagaaaagatgaccaaggcgttgtat

SEQ ID NO: 116444 - DNA, 961 bp, Zea Mays
tcttgaaggtctactcccaatggctgtggactgcaatcttcggcttcacagccaacaatgtttcctctggaacctccagggatgaaagattctctgtctgatatgttctcaggtttaaatgtgtctcctttggaaacaattcgagcttcttgggatgaagagtccaactgcatttatcaagcgaaaaactgaacgaacaaaagcatccatcctccaaggaaaagaagcagggccctgcatcaatttcattatccatgtatttcaccgggagcatagtgatggataagttaggagcacgatcattgtcagtagtagtgacactgatgcaataagcattgatggatccatttccctctgacaagccaaggaataaagagccatgtggggtggcgcgaccaacgaatggtagccccttggtgtcaattttgtgccactcgactgaattggtgtcaaatgcatatgtgccccaaagttgattgaatgataccagtatgtaggtgtcgaccaccacataagacgtgataagtacaactggcagcatggtataaacaaatggggtaatcttccaagggaagcaaggtggatgtggtagctcaatccaggagcatccctccaggtgggagcggtcgtcaacaatgacaactttggctttggaaagatcgagtacctcgaaccagggtgggaaatcggggtctgtgaaccagcagagagtcttgcacagagcataaaccttgtcccccattgttgttaggacagggcaccactttgtagaattgagagtcggcccgtgaatgaccttcttcgtcttggtgtcgaagatgacggtgtcacccggatcacccccgaccctaatgatccacgcgcggtgcactgaccgtagggacgtgaaggtcataccgccagcaacggtggtcagacgggtaactcggtgcaggctcttccgcttcacccgcgaaggaaa

SEQ ID NO: 116445 - DNA, 479 bp, Zea Mays
ctcaagctagcaccgcttaatttttcactgaaataagcaaccggttttccttcttgtaacaaaacagcacctaacccaataccactagcaacacattcaagttcaaacactttctgaaagtcaggaaattgtaagagtggagcatgggttaacttatctttcaaagtgttgaacgcctcttcttgtggggggtcccaagaaaaagacacacatttctttgtgagttcgtgcaaaggggcagcgatggagctaaaatcacgcacaaaacgacggtaaaatcctgcaagtccaagaaaactccgaatttgggtgaccgtcgttggtgtaggccagtcctgaatggcttcaaccttgctgctatccacctcaatgccctgcggagtgaccacataaccaagaaacgagacacgttgcgtgtaaaatgtgcacttttccatgttaccaaacaagcgagcagcatgcaaaacatcaaaaacagc

SEQ ID NO: 116446 - DNA, 387 bp, Zea Mays
gaaaatctacacgtaattcttcttctctttcccaagtagcttcatcttctccgtggtgactccattgcactttgcacattttaatcactttactcctcgtgatatgagtcatggtatcaagaatcttgatagggtactctgtataagtcagatcatcttgaacactaagatcctccataggtagctgcccttcgggtaccctaagacacttcttcaattgtgatacatggaagacatcatgtacatccgcaagatgatcgggtagttccagttgataggcaacttctctcactcgctttaggatcaagaagggtccaataaagcgaggggacaacatccctttaactttaaatcttcacataccccggatcggtgacaccttcagat

SEQ ID NO: 116447 - DNA, 502 bp, Zea Mays
gcagaatgtccctacttccagtcatcagttgcttgcgctactgacacaattagtgatcaaagctcgtagtaggggctacaagcaggcgagagagagagaggagaggctctcaagtctcttattcatggtggaggtggttacaaggtggagtcctagctaaatcttagcatgctgtcgaggctccaacctccgggtcctccccctgttcgtcagtccttctaggagtcttctcgtctagggttcttccttctatccattctaggatcccctcatctaggggccaacctattccttttataggcaaaggaagggatccgctagtggtggcttccttaggaaggagtcaccaaaccgatcgttctaccatggggtaaaaacatgcgtcctcgcagtcacctagttatctcgtattctttattgcgggcgatgcgagcagcgtagggactgatctccatcatttgggctatgccaacccctggccttcatagccttcgacatggcg

SEQ ID NO: 116448 - DNA, 1452 bp, Zea Mays
gttgatctacccgcacgaattcgtcgaagaagggttgtagctaatctagaaccgaaaatgaatcctcctccaaatcccccacctgctgatgacgtggctgcagctcaaatgcaactactacaacagatgcctaacaccatgacagagatgcaagcacaaatctatcaagagcgtcaagaaatccatcaagagcatcaagaaatatgtcaagagcgttaggaatgacagcagccaccacctccaccaccagcaccatccagggataagcatcatgaattcatgagcacaaacctcccactttttctagctctcccaaccactacagctgacgactggctgaagtcatgaaaaaatgctcaacatagcttcgtgtactgatagggagaaagtactttatgcatcgggtcgcctcactggccccgctgcggattggtgggatgcatactgccctgcacacactgctgttgacaccatttcatgtgcagaattctccacccgcttcatgaattaatacattcttgctggtctcatgaagattaagaagaatgagttcctgtctctcaaatagggatgcatgtcagtaagtgaatacagagacaaatttatctagctatctcgatatgctcctagggaagttaatgatgatgagaaaaagcaatttctggaaggattgaccgggccacttcaataccaactaatgtcccacacattcctgtccttctagaaactgctagacaaggccatagctatggaacacaagagagttgagctaggagagaaaagaaaggctactaaccatggacaggctggaagtagtacccatccccgttatgctacacctcaaggcacaccagctcgtggtagttccgggcaacagactcaacagacccaagctactcctcaagcaagcaccctagtgggacctgttgctcctaatgcatccacaaacaggtcatgcttcaaatgtggacaggctggtcattatgccaactactgtcctaacatgctgcttacaccactccaactccgctgaagcaaggtcaggtctcaagaggtaagagccagaccttatacgttaatcggggacaagtcaaccatgtggaggcagaagctgaacctggagaactcaaaaacccagaagaggtgctagctgaaggtgaagaagccaatgtagaaggaaatgagcaacgagattagagtatttctttttaggagatagtatttgtaagacctaaataaggccttatgttgtagctagttctttattattttaggatagtaataaggactatttgatcctatattttaataacaagttatgcatcatgccgagattcttgattgtgcatatgttttgagaaaagattaggatacatcccttttcttactaatctcaaggacgagattaattttaagggggtagaatttgtaacactcaaaatccaaaatttg

SEQ ID NO: 116449 - DNA, 280 bp, Zea Mays
ggggaccaactttttagaagattggaagaaagaatcagctcaactaaatacatgtctgggaaacagcgacagtctcaaagtcagaccaatgctggaagacctcatatgcaaatatcaatgcctagacccagagacagcaaaacttgtggaaagggcccgcaaggaacaactcccggacctcaggacagttgaacaaggagccctttggttcaaaaatcgtctgtgtgtaccaaaaggggaagcacgagaggtcctgctcgaagaagctcacaactcagcc

SEQ ID NO: 116450 - DNA, 288 bp, Zea Mays
tggtctgacggcctgaggttgttgctgcttctggtcgtctgcggatcgtccgaccttcatagtcagactgtctgcgtctgtcccatactatccggccttagtactcggaccatccagcgtacacagtataggtggccctgatcaggtgtccgatcgtgcttgccccccggtgcctctggtctttcttttgtctggagccttcctagtaaccactctgcgtgacctatttagcatgtgaggatcaccaataacgatatttttatctttgcttttatcgcacatggccaa

SEQ ID NO: 116451 - DNA, 462 bp, Zea Mays
cagatggtaccgacaggtcagttggacgtggttgtccctgattggttggtccggttggtacaaacctaaacactttggtactagtcaactttagcgatatagcgcgttcttgtcggtctgtgtgcactatatcaacgttaaaaaacataggactctagcatataaatatagatacggggtattttgattcattcacacccccactctccatttcactcatctcctttaaatatagactcccactctctattcaatatggatcctaggtggagtccaaacttttaaaccttcattaacttgttcaatgaccaatcttcacaacttcttgagacacctgctagtgtaagaaagtctttttttgatggccttttcttctatacattatcgctgggaggatgtttctgcccatcctcgtccctcactccacaaactttgtttccatatccatatcctcctttgtgt

SEQ ID NO: 116452 - DNA, 837 bp, Zea Mays
aaaaatacatcgcttccctctacatgctcgcctacaataatgttgctaactccatcaataaatatattaaaataaggaaacatatgatcttagagagtcttgagcaattctataatggtgttgtttcatgttttggtgacaagtatgtataatcgttgtcccactgttggcgatcttaagtatcttttagctaaagggaagagatggatttttgggtacataggtagtacatattacatgcattaagtagaaaaattgtctcgttgaatggaaagagaagtttactttgggggacactggatccctgcccataatgctcgagacggatgcctcgtatgacttatgaattttgcatgcttttttatagtagggtggaacaacgatgtcaatgcgctcaaccaatcgttgttattcattgatgagctcaagagagaaacatcaaatgtgaagttcatgatgaatggacatagtataactaagagtactacctcgccaatggcatctagttctagtggtcagtgtttgtgaagaccattttctcctatagactctgaaagcagcatatgtttgttgcatgccacgagaggacgtacagagatcatttggggtcctctaggattgcttctatattctcgctagcctaggtcattctttttcccagcaaatacttagtgtgatcatgtgtgcatgtatcgttcaacacaacatgattgttaaagataagcatgaaaaaagcatatgatatggataactatgagatagtcgagtcctccattgtagcaccaaccatcatttccatgcacccatgagatttatagacatcattcaatgtgaggc

SEQ ID NO: 116453 - DNA, 881 bp, Zea Mays
gcaattctctaagactcgacccctgctcttcattaaagcagaagaacctctagaagccgatgagtgggtaagagttatggaacagaagtttgggctgattcgctgcacggagatacaaaagccactgtttgctgcacaacaactaagagggcctgccagtacttggtgggcaaattttgtagcaattcaaccggctggacatcagatcacctaggaggaattcaagctagcgttccgggagcattatgttccagagggagtgctccatatgaaacaagaagagttcatctagttaaagcaagggggagatactgtaatgcagtatctcaataagttcaaccatctgtcccagtatgccattgaccaagtgaatacagatctaaagaaaaagaattgttttatgaggggacttaatgataggcttcagcagaaaatggcaacgtgcttggaccttacctacagtagggctgtcagtatagcactggcagtggaagccaaaactgcaggacatggaaaatcaaaggggtttggaggtgaaaggtcaaatcaagggcctgagaagagaaccaggttggtgatctgaccttttaatcaaaatcgctcttcgccttgcccaccttcatatccattcaagcagcctgtttttattcgtcccactactgcccctgctcctaccaatcagccgagtgcccctggtactcgtttccctgctctccctagttcttccattggttgcttcaattgtggaaagtccgaacacttcatcaagaattgcccatacccgaagcaaaataaaaccaatttccaacagaactctgggaactccaaccaaggaaaggggaacatggctaatacttcaacgggcaagaacttcaagaaaa

SEQ ID NO: 116454 - DNA, 811 bp, Zea Mays
ttttccaatgcaatcacgaatatagtggtagcgagtatcaatgtgtttgcttctatcatgatacactgggtttttactcaaatcaatcgctgacttattgtccaccagcaaattgaatttctgagcactttcccctgtaatatctgcaagcaatctgctcaaccaaactccctggcaggttccaagtgcagcagctacatactctgcctcacatgaggatagggcaaccactttctgcttctgagatgaccaagtcaccacattcctccctaagaaaaacataatgcctgaagtactttttctatgaactaaatcacctaagcaatcactatcagtgaaacccagtagagacaacttggttcctcctcctttcttgagcttcactccatactcgagtgtaccagcaatatacttgatgattttcttcacagcacaccagtgttctttgtttggtgcctccatgaacttgctgaccaacccaactgagaatgacaagtcaggtcttgtatttaccaagtatctaagactacctatgatgcttcgatacttggtctcatccttttttgttcctttctttgccgctgtaagtttaattctctgctccataggtgtatcagtagggttagaatctgtcattttacagtgttctactatctttgcagcatacgccttttgacaaattgttatttctttttccttttgtctgacttccatgcccaagtagtagcttagaagacccaaatcactcatattaaaagaatgcatcatttgttgcttaaattcagtaatcttattaactgatggcccacag

SEQ ID NO: 116455 - DNA, 542 bp, Zea Mays
cagggtgctacttgtggacaagcactcatcatcaacctgaaccacaagtaacaagtcaaccttgtgttcgcaatccccgccttgatgagtgcattgtcgacaccaccacatgaacatatataagcataaaaaggaagaacaagataaacttactcgaacaaccaaaaaccagaaaagggcaaacaagtcatccaaggcaatcaaaaacttggtccgcaaagaaatgggcaatggttcaacacgaccaagcaaaaaatagctagtcctcaagaacaggcaaaagtagggctccacaccactagccaacagacaaagccagatccgagcaccaaataagcacaaaagctgaaatcaaagctagttcctctagaaagatgcaaatggctcaacaactagcaaaagctccaaaatctagagtctctcaccctgagaatctctcccctcgtgaaagcactctcccaaagcaaaaaatctccccccttgttaggaggtcgaaaatgtcaaaacctctcccccttgctgacaaatggactcatcatgca

SEQ ID NO: 116456 - DNA, 607 bp, Zea Mays
attaaatatgaatttcacaagtttctagtattgtttttgtattaaaaatcattttctaaaataaattctgaaattcctcaggcttctggactgggcacattaatacagagaaggtcggagtttattctataaaatctaccagactcagactacttccgcgaggacggcggattgattctacaaaagacgaggggcttctttgtaacactgttcagctgaaggggtatgagggctttctagccgtccgatctaacactggcggaccagattagaactccaacattatgaatcggtacacccttactaccgtcggattcaacatctatggctgatcatctaccacggcgcgatctgatctactccctctgatctggttacaacggcgcagatcaaaaggtatcatggctgattcttaacggtccgatctagatcgagggtctggattcaatctcgaaagggtatgcctaggatccgatctcagccgtacactctacatcctacggctcgcactgattcacccccaacccactcttttttcctcggcccgcatagcggcgacaccgtccagcatggcggcgccatggctgggtcacgaccctatgccgat

SEQ ID NO: 116457 - DNA, 1539 bp, Zea Mays
gtcatgggatagagggtgagcctgagagtgtaacgtggtgcccattccctgccccaaccaaaacttggtgacttggtcttggtcgacaggttttgcttgtgcatgaaaagaaaggagcaaaaaaagtagcaagggtagaatttccttagttgttcaatgttctaggtgttgaataggaggttgctgctattgtccttgagccggtaggttcccgtgcataggacttgggcgacaatgaacgacccctctcatggcggggagagtttgtgcttgtccttggtggtcatggcccttcttagcaccagatcgccgacgattaacgatctaccctggacctgtcggtcatggtagcatcgtaagtcctattggtacttggaagagcacacaacaaccatgttctgtgcttcgtcgaggaggtcactggagatttgggcgtccgtcgttccttgcctgttgctgaaggcttggacccttggggatccatactccaactctatggggagcatcgcctctacgccaaatgccagcaagaaagacgtgcagtctgttgccctagagggtgaagtacgtaggctccaaaggaaggttggtagctctatcgcccaatatctggtgagcttcttcaacttgtcaaagatccatggattaagccttgaagtattaggatgttagcgcactcaacatggtcattggttcgtgggtgtaccacgatggcccatttgacgcagatatcgaagtcatcacagaaccagaggaagggttcacctgtgaactgagtctcgttatcggttatgatggagttggggacaccgaaactatagacgatgtcgtggaagaatgtggcggcctccgatgacttgagcttagcgatcggttttgcgtatatccacttggtgaggcccccacgacgagcaaatgggtgaagcccctaagcgccttcttaaggggcccaaccaggtccagtccccagaccacgaagggctaggtgatgggtatggtttgtaggtcttgtgctggcatttgtgtctgttgcgtgtagtattggcagccatcgcaagaccaaacgacttgctcggcatccgccatggcggacgactagttgaaaccctgcctgaaggccttcccaatgagggacttggtgccgtgtggtgcccgcacgtcccgtcgtgtacgtcggcaagaagttgtcatccttcttcaattgggatgcatttctgcttgattcctaagacactttttgtagagtgccccttcactgagctcgaaggactttgccttccgggactatcgtcttccatttattgtgtcttctgggagggtcctatcagataactttgtaaatgaagggttggcactaatcttgatggttggttgctgcgagtagcccccgagactgggacacagggtcgactttgttgtctgtcggcttgccctgctcttcctctgattgcttgaacttgacggaagatttgtagagtacgaaggcgaagactccatccgggacgggcttctggcacgatgcgatggtcgagagctcat

SEQ ID NO: 116458 - DNA, 284 bp, Zea Mays
tccatacggcaaactagactcccagtttctgtcgaaggtcagcacacaggctctcaacaaatcttcgaggactttgttaactctttttgtctatccatctgactgggggtggtaggcggtgctgaagtctagcttggtgccatagcttgctgaaggctcaaccaaaattttgaggtgaattgtgttcccatatctgacactattcttcgtggaatgccatgaagtctgactatttctttgagatatatccaggcgagggtggctcctccgaaggtagtcttcac

SEQ ID NO: 116459 - DNA, 472 bp, Zea Mays
acgtggcaaagatgaggttacaaccaaaggcgggataagtaaaacaccactctcggactgagatggatgattggaggttttatataacagacatagtgtaatcaccaaggtaagatcgagagatgagaaaggtaaagaccacagtaaacaaaagcacaaccaaggatggagtttagaaaaaaaactcacaagcggcaaagaagaggatacgaaggaaaaaataggtaaagtacaactcttagattgagatagaagagaggagattttaaagggtaggtataagataagcatcaaggtaagatatagatgtgacaagggtaaagatgataataacgaaatgcataatcaaggatagagttaaggcaagactcatgaagtgactaagtggagaaaacaatcaatggtaagataggtaaggtcccaatagaagggttgaagtaaaaattcattaccgggggaagttataaggaaa

SEQ ID NO: 116460 - DNA, 535 bp, Zea Mays
ttctgatttgttcagccaccaccctgaattctgctatggccagcggacatgctgaccatggcttcatgttgcacaagggtctggtcatctcgaagcttaaagccagcgggctcatcaccatcatcatcagtttccctcttttcttctcatcggccttaatataaaaccactcactcttccagccagttggccacttggtgcggtagctgaggaccgaagccttcgtatccttgcgatacgcgaaattataacaaccaaaattttcatgtagcccgtcttctcatgccttcgtttggtaatgcaactcatgcactcggcaaaatgcttcggcatttgggttcatcccttggcttcgaagggcccaaatgaagatgctgagcctaacaatagcattaggggtcagctgatgaagaaagatttcataattatccaaaacttctccaatcatctcgttcagcggaaaccgtaatctggctctgaaaaagcttttgaaaactaccacttcatcatctttcggcgtcggagtggtttcttc

SEQ ID NO: 116461 - DNA, 391 bp, Zea Mays
ggaggagcgaggacgagaggcgaggtgacgaactcgataggcaatctgatcggaaggaatctgcaactgagctcctcgttctgcctgctcagtggctgctgctgctatcgctactcgggctgctatgtccagacgttgcttcttgcggccttcctgctgctccaaataaacggtctttcccttgacctgcctgaaggggcgaggaggatcctcgtcatctcctccccctagcgtcgacacattttcgtgcgcggcatcctaacctaatgactgcaaatgagggagagaagctaagcacatgtcgataacatccaatagaatatcaaaagagtggatgtctacctggaaagctcacacgagaggtgaaaatctaggcaggacaggagacggc

SEQ ID NO: 116462 - DNA, 272 bp, Zea Mays
gcgttctccttgcacgaagctgctgcaggacaacaactgagctgttcatacctcacaagtcacaagcagttgacacagacctgggccgtctcaggctctcagctgccaaacagacaagttaagggatcggaaagaggaatgggcaggatggtgctccgtttgacgggcttatccggaagtcacgtagtatagcatagcaggagtgctttgcttcttctcccgatcgagacgaagcaaactggcaattgggggatgcaagaaactgaattttt

SEQ ID NO: 116463 - DNA, 783 bp, Zea Mays
cgagggttgatgctcttgcttcgtaagaacctagcagagctagctgtgcactcaaattatagtatctgtgagcggtggctccgaatttggaagagggaagctggcagccgaagagggggggtgagtcaccgacgcgaactaccatggcgttcaccggggcagtgtctcaggcgatggacagtctacctacgacggtctattatgacgtggtaactcttcttagtatgtggcatggctacgaagggcggcgaactccggcgaggacacctcgatcaatcgcgcggcaagtggcacggtgaacagtccggtgataaggctccaactcttcctagcattgagatctttcaccgtcagccgttatccgcacacgagggcgcacgaattgcgacgaccggcgtacatcatggtgtaagttcaccggtggcaagatacactgaacctaaagatcttttcgctactgtaccatcaggatcttctttagtcgttctgacagagcatcttcaggggtgtttttcttcgatttctatgtgataagctaacaaccagattacaacaaagttattcacctatataccagctccaattcgaccataggaaccttggtcatttgctcacttgatcaagctcaaatcggctccaaagttcatcagagttcactgccagccaagttcagtcttcaatggtgactgacagtccaacccgatgcccatttttctccattttttgtacagcaccaatgcttagtcacttaatcaaacttgttcccctaacatagctctacaa

SEQ ID NO: 116464 - DNA, 595 bp, Zea Mays
ctggccaccgcttcccctcgctataaattgagtgtccccgccactccgtaggataattacgcatcagttgcaccaaaccttgcaccggattatccaccagtgactgggaattgctcatttcccccaatcacggtttccgccaccgtagaactcaaccccgccgcggtcagcccaactcaggtcagctcttcccctctgctcccttgtctaagcattcttatgcgcctgtgatgctcaccgacccacccaattgaattggaccgccaccaatcgtcgagaacgcgacgatccagccgccatgttctcggtcaccgtgaccagagagttttagtgcgcgattggtgaaattaagttaggggaaacatcgattaaggtatgaattaggtgttagtcgtcggagagcgccagtaatagccccaatcggccggcgtaagtgctcgccggagctcagccgtgcttgaacgccgtcggggacctcccagtgcgaggaaacagaagttgggggacccctgtgtaaagtgtcagcgactgttttgaatagtgttcggactttctcgggttattcaaaactctgggggacctctgcgcaaacctg

SEQ ID NO: 116465 - DNA, 600 bp, Zea Mays
tagataataagaatgaagctcatgaacaagtattgcatgacaggtgaagttagcaagtgaaaaaatataatcaaacataaagtcatcaaaatctcatgagagcatatcattaagttttggggcacaaaagagtaacatgcatataatacaacaaaagccaatatctctttcaactagctccccctagctctcataactcatctctcccactttagcatcaagcaccaaaaaggttcgacctaacctagatatcatagaaagaaggaggaggggcagacacattagggcatggacaatcattagtgcatagtctggaacaaggtcggagtcagtcttgggtctaggatctgctatagaggctagagctggtgctgactcagatgctggagcactggaaggatctaactgatgagcctatgacgatggcgctagagctagagctggagctggtactaaaaccgccactactagagtagacattgtagagcagactagtggcactaatggctgaatactcataactctggcggcctgagttgagaaatctagggtgattggttggagaggagggggcatcagaccaaaagagtgcaattgagc

SEQ ID NO: 116466 - DNA, 439 bp, Zea Mays
ccattttatctgtcacacggtcaccttagtagcagtttaactacactgatgatagttgtgcattagccaaaactgacactgaatataattctccctcaaactaagagtcgcacaacaacatgggtactgttgctgatgtggaaagtatgagtaatgatgaacaggtggccactgatgcagctagatttttttctcctgttgctgctgcttagctcatgggcatgtgattgaagcagatctagcacaaatgatgtgctgcataactaacattagaattgtactcaaagcagatctatctaaattgagatgaggcctgatctattaaaattgttgctgctgatgaactttcttttatcggtctgtggggattgtttttagataacttttgtgattagcaagtgatgattccttgtaatcttgtttgcagcggaatgaatgc

SEQ ID NO: 116467 - DNA, 338 bp, Zea Mays
atctggcccacgtcaagcaaaccccgcgcctccgccgatggtacgtagcaatgtcgtcttcttcctcatctgctatgaatgcgtcgtcggccgattcgtcatctgaagataccttgagcgatttggcagcggtggagttacaaccgggagacacggtggagttcggcgcctcaaggatttcctcggtttgcgtacatgatatgcagcagttggggtactttgggaacggtgttgggcgcgtcctaggggcggaagagattcccgagcctgagggcgagttagttgtgtttgaggcgttcttcatcgccggccttcgcctacctgtgcatcatttcatg

SEQ ID NO: 116468 - DNA, 779 bp, Zea Mays
gtggacggtggccccacttgtcatcgccacggagcataagaagggtcgaccgcccactgaggaaactctagactttttcgagaagctggagcagccctgcactaaccatgccttccatatcaagcacttacacaaggactatgccttgacaaagaagttttctcccgtggcttcaaaagtggagagccaaacaagatgcatgcaccgtccgcagacaatgatgggggagagaagaaagatgattactttctataaatggatgattgtcgaatgatttttagaggatcaaccatcagtgacaccaagcgtcgatagaagcttgcacaacgtgaggtctatgcgaccaagcctgttgtgttgcacttcctatgatggctcgagtcaaccatcacatttgatcggctttaccatccggctttaccatccgactagcatcccatagccaggccgatatccgctcattgtcgaccccatcatcgcatatagtagttctccaaagtattgatggatggaggcagtggcctcaacatcatgaatgcagagatgttggatgccatgggcatcaatcgctctcgcattcgactagttggagccctcttccacatgtcaggccagggaagcaggtacctcgcatcgagcagatcgacctacccatcatgtttagggatccgtccaactatcggacagagaccctaacatttgaagtggttgaattcaagggatcctaccatgcaatcctagggtagccatgttacatgaagttcatggctattcccaac

SEQ ID NO: 116469 - DNA, 332 bp, Zea Mays
gaggatatgtgtaccagaaattgaacatatacgccaacttattttgagagaagctcatgattcggcttattcaatacattctagaagtactaagatgtaccaggatttaaaggaagaatattggtggtatggtttgaaaagagatgttgttacttatgttgcattatgtgacgagttaaggtagaacatcaaagataagcaggtttgctacaacctcttaaagtaccagaatggaaatgggaataaattggtgtggactttatagttggattaccctgtacctgtgatggttatgattctatatgggttattgtagacaggttgactaaagt

SEQ ID NO: 116470 - DNA, 344 bp, Zea Mays
atcaaagtacgttccttgaggtcgaaggatcaggagccacgcctcgcccgaggtatcctcaggggtctccacaagctccgcctcgcctgagcctgttatcagacgggtgtgttctcgagataatcttcgtcctggccgaggtcccctcaccccagaacaacggtatccgtctcgctcgagcccgcctcgggcaagggagacaaactcaaggcaagaccatcacagttcgtcgggggacagtcgcattcaatacatatacctaactcgctcaggcatgcgggtgtacaaggacaacaaaactgctgtcttgtcaaagattcaccaactatgattacacatgtgac

SEQ ID NO: 116471 - DNA, 714 bp, Zea Mays
tatactggttaaccaacttgttagatgactttagttatgctcgtggacacgatgatttgcttgttgtagtctaaatatgtatggttgtggtcgcggatgaaaagtattagtgctcatgtgaggtctaagttaaaatgcaaattatggtgtcaacatcacttcgatatcgattatcggggagaatgtgttgttaattaaatatggtacttctagtgctcataatgacacggataaaatttgtaagtctacttgttagtgcttatttgattaatttaactctaacaaatggtaaagtgttagaataactcaagtctctaaaacatggcaattcttgaattatataggagctgaaatttagtaattgttgttttggactgcacacagtgattggctagtgctgtatgtttgatgaacaaaattgtattttctgtagatatgtgctatagaaaagtggtagataactttattatcttgctggtgttaaaatttgacaggcataagtctgatcgtttaggagttatgatttttacaaattcagtaactgaatctgtccaaattctgtacagatttcagaaactgcattgtttgcctaatgtaattttagaatcagtccttgtcgattatacgaaagttgtagatgcttttctcatcttgcttgtgttaaaatttcataaccataggcctgatagtttaagagttatgaattttacaaac

SEQ ID NO: 116472 - DNA, 303 bp, Zea Mays
gttaaagtccgtatggcatgcttgaatatcatgtccatggacagtggttggcctcctaatgccgaagcgagaccagatagggcattgaatgatcccctttatatcttctctttcaactaagttgttcttcacataaaaccactcttgcatccaggctcctggccacctcttccaaaatgttgggacgggatagctcacaccagagcgaggcatgaagccgtaacaacgaaaattattatgatattgttctatgccagtagcctttgtctcataggacaggtcatgcatgttgcagaagcattt

SEQ ID NO: 116473 - DNA, 326 bp, Zea Mays
catccatggaacgttgttgctttaagttgaattggctaaccttttgatttaatttttgtaacatgtgccattatttcctaagtgtgcatccatatcagttcaaaagagtatgaaaagtcatgcccaggttgtattccactaaattttattttgaaaagcaccaaattataaagtatggcttatgttatgatagcaatggcactaagttgttgtgactgacacaatttctatggcatgactttgtctgttagaaacatataaaacatcaatcatgtaccaactgtaccgataaggctgccaatttaaaatcaaagttagcttcatga

SEQ ID NO: 116474 - DNA, 680 bp, Zea Mays
ttgctctaagtagataggatcattaaaattctctgtaatatttgtataaatgcttccaatgattgctgatatgttgtcgtgttctggtattaataagaaatctgatggtatttttatccaagcaggttcagattcccctggtttcactgtagctggtatgttgccatcaccaatgtctagtatccatttgctgaattcaacaatatgagttctttcctcatttgttaattctgctgaagctagcctcatattttctatgaggtgaagaacaataattgatgaccaaagtggtgagtttgttattgcagcattaacaatttgtgcacgatctccgccttctataataggcaagatttgtcttggatcacctcctaagacaattactttacctccaaaaggagcattggtagatgcagatgcatttaagtagagcaaatctcggagggagcgatctaaagcttcaaatgcacatctgtgtgtcatgaaagcttcatcccatattattagagaagttgattcaattaattcagctagcattgttcccctttttatgttgcaagtagtagattcatctagatcgcatggtatcttgaatcgtgaatgtgctgtgtggccacctggaagaagcaaggatgctacacctaaggaagcaactgctagtactatttttttattggctc

SEQ ID NO: 116475 - DNA, 274 bp, Zea Mays
atggcatcgtgataagatgattgcattaattaaccactctattttgggatatataaatggtaagcactaaattccaatctctgctatcgataaaatcccttggttcctacatgacacaatcccttggcttcaggtcctcgttttggaaaagctgcattatattgtgagggagtttttgttactctctcatgctttaatttggaatttgtactctcatctagagaactaaaaaggatttttcgatcttcggccttggtaaagtttagaagaaaaa

SEQ ID NO: 116476 - DNA, 454 bp, Zea Mays
atatggtagttcctgaattgtgtactgaactctgcccaggtaatagtatcagcagcatcgtgggcagcagtatatgaatcccaccagtcagcagcaggaccagtcagatgtcccgaagcatataaaaccttctcccggtcagtgcattgtgcaatattcagcatcttctcaattgacttcaaccaatcgtctgcatcaagtggatctggcgaacttgcaaatgtaggtggcttatgactcatgaactctctatgcttgtctcggggtgggactggtggtggtggtggaggcaatggcacttgctgctgttgttgctgttgttgaagttgttgttgtagctgctgttgttgcgccctcctttcttgacatatctcatctctctcctggcgcaactcctggcgtatatcttctctttcctgacgcatttcctggcgttcttgctgcatctgggcac

SEQ ID NO: 116477 - DNA, 476 bp, Zea Mays
cacaagacaaggaagaataataataatctatagttgaagaacatgacatggctaataaatcatcacaagaggtggatacattcttcttatcttcatcacatggattagcagcattttgcaattgatcatataaatcatgtgatgagttctcactagttttaatttcttcactataaatcttgttagtgagaaaaacatgatcttgtaccaaattttcatgagcaacactaagttcctcatgattcaattttagttcctcatgtgaacaagtaataacataaagtagatgtttttgttgttcacatgaattctttagaaataagttttcactttccaaatttcttgttttatctttctcattttctaaatcaatgttcatgctagcaagtctatcaacaagctcatcatatgaatatgaatgattagtcacattagcattatatacctttgtattaccttgtgacatcaagcaatgt

SEQ ID NO: 116478 - DNA, 363 bp, Zea Mays
atttggtacatcaagccaccaaagctgaacgccagctgcaacaagatgctaagaacagcaagcccttgtcatatggtgcacgaaccatgactggaggaagcaaatcgatctcaaggtttactgctgcatcctcagcgacaaaaggttcaactggaggcttgcgatccaatattcaaggcaattctagtggaaagaatggtgctgctccaaacacgagttataaaccagcagcatccgcttcaacatcagtgggttcaacaaccaagagtagtggtattcagtgcttcaagtgtggaggtcatggtcatgtcataaaggagtgtccaaataatcgtgtgatccttgtgactgatgatggagaat

SEQ ID NO: 116479 - DNA, 613 bp, Zea Mays
gatgatgttagtctagggcaacaatatcagagccctagcggctggattcagcgccctaaggcagggggtgttgccggtggtggtaggacatgtgcctcatggtagctggcggtggaggtcaacaatgacaccagtgagtgctagagtcgatgatagccatggcgtgcgatgttcttacgcatggcgtgcgatctttctttttgtatttatttatcaattacttgaccaatataattccattaattgaatatgcccaaaataaaaggagaatcaaataatatctaaaggttccataattcacaaaacacaaacctattatttttcctcttatacaaattttgggctttacactcccgtatacggatgactttctagttcttgtccaccttgaaattggccaagtatttcgccctagcctcattgatcagttgcttcgtgtactcctcgaatttctactattcatcagctgatagtgcctctatagtcggcttaatgatattgctagggaaaatatcggagtggtccttgggaccggccattatgggccgatttaatggatccaaccgccttgtccccagcggagtcaccaaaaagtgtcttggcgtcggtccgg

SEQ ID NO: 116480 - DNA, 851 bp, Zea Mays
accttcaggtttggggacaagtttgttgaaccagatgatgactggctgaagtgtattgaaaatactagcaatgagctacttggagcatattccaagtccgaagataatgcactatctgcggccttcgggagccaaaaaaagaaaagattaaatagtgtttttgatgctattggatttgtgtaccctgtctatcgctacccaccatgggggcagaaaagaaagggtgcaacctctggaaaggttgctgcttcggctgctccaagcgagcctgtgctgaagagtaaaaagttgaaagtcctcacccaccggccccgttatattgaaccggctgtggtgcccaagtttggtgggaaggcttcttcagctgttgatccaaaggagccaattcctcctacgcaaaaggctgaagaactggctaccatgccgaaggcaccctcagccgagcaagctgaggcaaagactggtaaagataaggccgaagagccaaagactgaaggaacaaaaatgttagaagttttaagcccttcagcggaagtaacagtgccgaagatacaaaaaggtcttgcggccactcccaaaagaagaaggatggcaagtgtactagatgtgctagaaacagtaaaggcgtcaagccctactccagggaaaattgccaaggcttcgaaaatgcaaatcgaagctaaaacaaaactgaccaaagtcggagctgcaatgagccaggctagtgtcgaagctgggccttcagagcctgctaagaaaaaaccctcgaaaattgaagagaaggcagcagaggaagaggctatagaacagactttgcctgaaaaagctgccgctcctgctcccgaagcttt

SEQ ID NO: 116481 - DNA, 361 bp, Zea Mays
ctcgccaagggcggtagcttcggctgaaggttctctaatgtcattcactaaaactgagaatttcggctgaattacagccttcacatgatcacagccagctttttcgagtaacgacacaacctctcaagcacccacgcaggcgcaaaagttccctctgccagttaagacttcgtcaaaagcttcaatctcaccctcaatccatttgattacaccttcgagatctccacggataaaatttcgctcagttgagaatgcgccaaccttagcaaaagcatttttcaatttgtcagagcattgcatagcaacagagtagcattcttcctttgcttgacgaagctcttcaacattcttttgcacccta

SEQ ID NO: 116482 - DNA, 436 bp, Zea Mays
tccactcgtccactgagcatgcatgcaattgctcgtgagtccctttcgcatatcaaaacatgcaacttggggaccattatattggtcctgcaatttccctgaccgaataagctagagtgcggaatacatggcatgatggcccgatggcgatgcatcggtgccgatctgctagctaagcttgcacttgtgtgttagttcctcctcatcatgcatcaatccacccgggccggccggaggagcacaagaatatatgtcatgtccatgatctctatggatggatggacatggaccagcacagcatgatcagcacctgtaaactaacacccaggaccgctacagaaactcgcggaaagacgttctacctcggccgctagctagctatggcccaataatacttaagctgggctggcactgtatatgcatggttagaacctag

SEQ ID NO: 116483 - DNA, 357 bp, Zea Mays
acttcctgaggtgttctatattccatgagttcccaatttccgtgccgtccatctgagtgagatgatatgatcccggccgagtgacttttgctactatgaatggtccttcccataggggtgacaacttgtgtcgtccctcccccgttagaatttggcggaggacgagatctcccactgcaaaggatcaacgtcgcatggccttatcgtggtaacgcctcagagtttgctggtaccgtgctgattgaattaccgtgttcagccgctcttcttcgagtacatcaacatcctctagcctagtagcctcggcttctgctatgctttcaaagatcaaccttggcgccccaaacttgaggtcag

SEQ ID NO: 116484 - DNA, 443 bp, Zea Mays
ggagaaggcattgaaagagttgtttggtagttgggaggagagtttcaagctacttttttcttggagggaggcagtacttgctaaggcgtctaacggtattgtcgagattgaggaaacactagcaacacattatacagaaaggaacacattatacaacacattatgcattgttaatcggtgaacaaaacacacactagacaaacagtagtatgcactagaaaatggtgaaaagggacacattatccacctcccttcccatttcttcacacaatatatagttacagaattatgccttactaactggttaacaaataggaaacactagctacctccctttcaaaactcttctactgcatgtagcaccctataggccgtgcatctcatcatccattggggatctccaagaaaataaacggaattgagaaatattaccaaagcatcag

SEQ ID NO: 116485 - DNA, 334 bp, Zea Mays
cggacgcttctcttcatagtaatgctaccacatcttcagatcattgtcctttgaccctcaatgtcagaggtggctgcatggggaaaagacggtttcactttgagagtttttggcccaaaattcctggttttctggaggtggtgggtgtgtcttggagcatgccagttaggagctcctgcccgttggagcaagtgtcattgaagcttaaaaggtttgctcgtgttttgtagtcctgggggcataaagaagtgggtaatgtgaggatgcagctggggcttgtcagagaagtgttgcataggctggaaatggcgcaagatatcagaattttgtccag

SEQ ID NO: 116486 - DNA, 282 bp, Zea Mays
cgatcagtcagaaaatagagaatttactatatctgaggatttagggctcaatgaagtagctagtctcgccatagatttgatgacagaagaaccaggtccttctagggcaaggactcgtaagtcacagagaattcttgaaaaacaacaaagacttgaaataattgagcagcgcgttgctgaagcagattctgatgccgatgatttttgaaaagtatatatatttaaattcttgtatatgcattcctatttcaatactaaaagtatatatatttaaattcttgt

SEQ ID NO: 116487 - DNA, 423 bp, Zea Mays
accaacgaaaaaaatgtaaacatattggtgatcccgctggtgataggagtattatttttgcgagcacatgccgaaccgttccatgctttaattacaacaagatgttaataaagtggtgggcatgcccatggtcgtttaatttttgccagaaccagagacgagcacaatggtactgtaccatgctacaataatcaggcgcaaattcctgcttcatcgatcttcatatagtaggagccatttactccctactagcaacaatggtagcaggcaggccgagatgagtggtacctacactgtcaacgtgaaatttcccggggatatgatggctacccattgtcgttccgaaaattttctcatcgtccccgagggagctttttctttcactccgtctatgtcaaacatttattcccctcggagaattcg

SEQ ID NO: 116488 - DNA, 405 bp, Zea Mays
gaaaagctgagcaccccaggtctcagttatccattatgtgtattatattttgtgcatttaacactgaacaaactgtttaatttcttctgaaatcttcaaataaccgtggcctgttagccaggctgcccaccggattatattgggctcactctatgccaacatgtgttttctaccgctgcccttgtgcttgcgagcgcactagtagatgtgatgtttatctgcattaagcaatgatgctagctttggttctatttccataggcctaagcctaaccctagcgctcattacctaaatgcctatacacatatatgtgtatgcactacattgattaatcaatctactatttctgtgagccaatcacttatagttcatgtggcttgttgttatgctattggtatcgttggc

SEQ ID NO: 116489 - DNA, 382 bp, Zea Mays
caagcgtgttcagctaggagatttgaagaggaaggctatatcccaaggataaggaagcagcagtgttcgtccacgctacagttcaccccagggtacaccagttcacactggcgaaggccagccccagttcagcaatcacctcagaggactccaccgactcgtcaggctacccccactagcaccccgatgaagtttttaggacagagtgcaggcactacttgcttccagtgtgggaagactggacattatgcaaatgtttgcccacagaggattgctaccaccccagttcagaataagcagcagactccaggatctggcaagggatactctattgccagggttaatcaagtcagcgttgacgctactccggatggtgctgaca

SEQ ID NO: 116490 - DNA, 523 bp, Zea Mays
aaaggatgttgtttgcatacaaataatctagaaattggttgatttagttctacaaagaagtgttttaattccatgagatagttgtaggtggtctttctattccttgccttcataattggtattcctttcctaatatttgtcttgctggcataacctctgcttggccgaatttctcaacctctactcatctttttttgacgcaaaacacaaaccaattcccttattattaccctttaattgactcgtatcacttgcttggttgtttgtccttgagatgttaattaagtcggaagtatctatcttagtgtggtgatatctatagatgatagtaattgaattccttatggtgacaattactcaccaccatttcatgtgttaccttctgtgtactacaccattgctgccctcactacatggcatacatttctttgtttcgtgttgtacaaatgaatccttattcccttgacatttctaaggatcagtttgatggcatcggtcacagttcacttgaaaacaggattta

SEQ ID NO: 116491 - DNA, 341 bp, Zea Mays
ctttttcttctttggtgcgggctcactaagagcaactgaagcatcagctttcccagaagttgcactttttctcttttgccctttcagcgggtagcggtaatcagggtacataaacccaatagcatcgaaaactctattcagcctcttcttcttccggcctccgaaggccgcagataacgcgttatcttctgcctttgaatatggtccaagtagttcgtcgcttgtagctacgatgcacttcagccaatcatcatctggctcaataaacttaccttcatatttgaaggtgtatttcaacctaaccagctcaccttcgtcagacttgctgatagtctccttcg

SEQ ID NO: 116492 - DNA, 551 bp, Zea Mays
ccgtcgttggtgtcagggtggagtgatgattgggggccatagatcttcaatcgtgcggatgtgattagaatcatgtgtatcccttcgataatttgatcaagcacgttaatttagaatcgggcggttgggagtaggcttcatatattttaaactcgaaccgttgatcgtggatcaggtgggtagcattgcataccaattcgttttaaaagaaaactgatcctggcgcttggtttctaatcggatggccgatctcatcccataccccttcaccccggtgctttaacataagagcccctgtgtttactagaataaacccttagtccacgatagtgtataagtatttcaacttgggtcctattattcgcatgccaaaccttggaatttgtggtaatcgtgtccccgatccatttgagtctccaatttaataaaaataaatcagaatagactattaatatcggaattaaattctaaaacttcataaattcataactctattgagttaactcaaaattgatccattctagttgcattaatctcatattgatattgtt

SEQ ID NO: 116493 - DNA, 457 bp, Zea Mays
agaggagcaactttaggataattgatctttcttatccctccaagtttgattacacaacatatatatagccaatggcctggcctgcaaaaggaaactccaatctctcctctaaaggaaactccaatctctcctctaattaaggcatgcaaaaggaaactctaatctttcctataattaaggcatgcaaaaggaaactagatcctaactttccaaaacttagccactgacggtggcacctgccttggtcgtgcgctccgtagccctcctggcgtcacgacggtgcctataggtgcgaccgtacatgacatctctccccctcgatgatcagctcgtcctcgagctgaaactggggaaatttgtcgcagaagtctgcaacatcctcccatgtagcactagcagtggactgccctttccagcggatgagcacttgtcgaacacccttggccagcatgtaccg

SEQ ID NO: 116494 - DNA, 497 bp, Zea Mays
aagctttatttgaacttgcctttaaatttgggaatggaataaaggaaagaaaatagaataaaaaagaggagaactccaccctggctcttaggcctaaagtccttgcgggcggcccattttcccttttcctgtgctcccaccggcccacacagacgctgcgcaccagcccacacgttccatcctatttccttggtactgcactaatgatatgtgggccccacttgtcaccttattcaaccagatgagacgaactccttcacgcgccaggctgcgaacccatcggtcagccttggctcagtcccgcgccactgacgtgtgggcccatttaagtaggagcctcttcttcctttgtctgcctgaacaagctctgcggccagcctcgtaccgtgacctccactgtgtgattacaggctcaattttcccatgcctttcccctcgggttgccagtgattgtggcccaccggttggtaccctccccttcatcatcgtcaaactag

SEQ ID NO: 116495 - DNA, 278 bp, Zea Mays
ttgtgaggcatttttctcctatttcggggaaaatcagcatgtgagattgccatctaccccagtgatccccgttgatgatccgaaggtgccccttcttcatacatgtttgcaccggttcaaggggacccttggtggcagagagaggcatcgcacctgcttttcgccgaggtgcattattgcaagtggtgacgaagatttgattgaccgcttcagaattgacgctactttccatcgactcacagagatccttgggagttggtctcatgggtactatttca

SEQ ID NO: 116496 - DNA, 906 bp, Zea Mays
gttcgattgaaatataccttcagattcagagagaagtttgacgaaccaaacgatgactggttgaaatgcattgaagctaccagcgatgagctgattgggacatattcaaaggccgaagatgatgccttgtccgcagccttcgggggtcggggcaagaaaagattgaacagggtgtttgatgcaattggcttcgtataccctgattatcactacccattgcgaaggcaaggaaagaagagaaaaactgccactttggccaccactgctgtgtcaaagggcaagaaaatgaaggttctgacccaccggctgtgatatattgaaccggtcgtagtgcctaaatttggtgaagggacctcttcaactgccgaagcaaaacaagctgctcccaccatgcagagcgctgaagagtcgattgtagtgccgaaggtgcatacagtcgggccagccgaagccaaagatgatgtggccgaagagcaaaaattggaaaaaacagtgataatgccagaaattctgagcccaccagcagaggtagaattgtcgaaagtgcaaaaggctcctgccgcaactcccaagaggaggaggatggctagcgtgctagacgctgtcattgataccgcaaaggccttgagccctactcctactaagaaagttgtcgaggctgacaaagtccaggccgaagctgaagctgggccttcagtgcccattaagacgaaggttgtcgtgcctgaagataaagctgagcaacaaactttagataccgacacggcagcggggcaagatataatagaaaaagcaaaatctactgcccccgaagctttggccgaagatgttgattacattattcgacacgcttcaaggaaaaaattatccaacgaagaaatcttagaagccagacactacgcccag

SEQ ID NO: 116497 - DNA, 444 bp, Zea Mays
tccttgtgatcctggctgcagatagagcacctgccactccactgacactcggcacggcgatgcgcttcaccacaacggaaacacaccaaccccagcccaggcttaggaacagcccgatacctctgagtactccctcctgaagtaccagaatcagaggattttccacgataggagtggtgacgctgctgttgcgactttcccctcttgtgggctggacccctagtgttggccctgctcgcgtcctggccacgagactgatcaacacccgaagacttctaagattccatggtatactgatgttgcatctccacgcccaatgcctgctccaccgtagtacgaaaatccaccaacggaaaggcccctagagcatgcttgatagaaggtttcaggccctgacggaacaggccctaacagaactggctcgcggaccatcttgttaaagcc

SEQ ID NO: 116498 - DNA, 979 bp, Zea Mays
gaaggttctataatattacaacacttgaataattgtcgatatcaataatatatttggagatctaggataagtccccaaacatgtcacctgaggcatactctattagcatgtcatcagtggagaggtccatagttggcttgttgttgtccgacgattcttttggaaccgaagatgaaccaccaacttccattttagcatcgttgaagtgtgcttcacaatttggacccttttgtttcttctctcggatggattttaagtacagatcaaccagatgttgtggagtacgacaagtagcagcaaaatgcatattacatccacacttgtgacaaaattttccattatcacgggatatagttgcatttttgtgtgccctctagttagccttgtgcctgcggttcttagtgaaattgcgaccatggttatgactaccaggggagttctttggtggtccattgaacttccttttgttcacgtgcttattttggacattatgaacctcaggcaatgctgctgagcccgtagggcgcatgtgatggttcttcaagagaagttcagcatttttttcagcctgggttaatgaatgaataagtcgtgaatagacctggtgtctttccttgcggtattgattgcacaataccctatccgaaggatgcatagttgagagagttttctctatcttttcagcatccgtcggttccttttcgcaaaatcttaaccttgtagaaatgtcatgaacaacatgatcataatcagccacagatttgaaatcttgtaggcgaaggtgattccattcatgccgagcatcaggaaatataatttccttctgttgttcataacgttctttcaaggagacccacatgacacgaggattttcctccaaaaggtactcttttttgagatccttatggatggaagtgcgtaacaagagtaaagttgtgtacttcatcacatcagatataggttgagcatttggctttgg

SEQ ID NO: 116499 - DNA, 299 bp, Zea Mays
ctccatcacaaattttccagatctctggacatcaacagaagccctttttcccaaactaacagagtcatcattccacccttctgcatcaatattctctactttaaagaatatgtcatacagataaggtttaactctcacttctatgacttcaggaatcatatcaatgcttttgacatgaactttaaatctgaccatatctttggattcaagagaattcaaatcaatttcctcaatagccccaatagttgagccaatctcacaaatagcctggtaatttaacagctcttcaggaacatttt

SEQ ID NO: 116500 - DNA, 1162 bp, Zea Mays
gcgggccccaataaccctatacctccaaggtcactaccatccatccgatcgcaatgaggccaaaaggcttaaacatagaagcagagactttgcaatcgtcaacagccagctatacaagaaaggaatcagccagcctatgttgaaatgcataactgaaaccgaaggcttagagcctctctgcgaaatccacagcggaacttgtggatcacactcaagaacaagagcccatgcagccaaggtcattcgtcagagattctattggcccgccatcatatgtacggccaaccgagtaacccgatcgtgcgaagcatgccagaaattcttgccccgaacaagcgccccttcgcaactcaccaagctcattgcccacacctagccgcttcagcggtgggggcttgacattgtcggaccactacccacagctcaaggaaatctcaaattcaccttcgtcgcttttgaatacttcaccaagtggatcgaggggatagcagtctccacaataacatccaagacaacacaaaaaattttctggcataatatcgtatgtcggttcggagtcccatccgaattgatagtcgataatagcaagaaattcaacaaccaagacttctgagaattctgcaactccatcggcacgaaggtagtgttcgcctctatctaccacccacagtccaatgacctagtcaagcgcaccaatagtaagatcttcagcgctattaagaaaaggctacttgatgacaaaaagggaaaatgggcgaaccaactacccgaagtcatatgggcattgaacacgacagatccagagcaaccgggttcacacccttccgcttgatgtacggatccaaagcaatgacaccgcaaaagctaaagcatggatccccacaaacaagcccaacagccacccctgacgtcgatgatctaacctccaaagaccttatcgacggagaccgtgtcctcgctctataagcactgaacaaatatcaagcatagactaaggcatgacgcgacaacacagtcatcccaagagagttcaaagaaggagacttaatactcacaagaaccatcagaacagagtctcggggcaagcttgaacccaagtgggaggggccctacatcgtcaagaccaaaacatcgtcgaatgcttacaggctcacctcaccgt

SEQ ID NO: 116501 - DNA, 305 bp, Zea Mays
ctctacaactttggtacagaggtttgatgaagttcacatgcaaattttagagaaaatgtgacctaaacatgatctgtcaggcgactgaatcaggtttttaccatggtacggtaactgcagaagataccccttctttccccttcgccgccgatgacccacacgccgtgattcacaccgtcgttgggatttgtgttcgctggcggggagataacttcgatgaagtaaagatctcacggggaggagtggataggatcgcacatcagagcttatcgccgtgattctagtcactgcgacgtgggcggtct

SEQ ID NO: 116502 - DNA, 530 bp, Zea Mays
tgacaagttggcagaggagtttcataggctcaacttggggatagttgcccatgtaaaggcagttactatagagttggaacctaccctagaacaggatatacagaaaggtcaggtggcaatgcaaagattcaagaaatcaaagacctgatggcagtgggcagaggtccagacttcatagaagatgaacaaggtacaatctggttccaaaacaagatatgtgttcctgcgatagacagtctccaagaaaccatactgaaagaagcccatgactcagcatattctattcaccccggtagtacaaagatgtaccaggacctgaagcaggagtattggtggtttggcatgaaaagagatgtagcctcacatgtagcagtatgtgatgtttgatagacggtaaaaattgaacatcagagaccagccggattacttcacccattaaaaattactgaatggaagtggaaagagtttggtatggatttcatcgttggtatacccccacactcctgctgggtatggctctatttgggtaa

SEQ ID NO: 116503 - DNA, 489 bp, Zea Mays
cttttgaaatctagctaggggtaaaacttcctgagatgctctatattccatgaattccctatttccgtgccatccatttgagtaagtcaatatgatcctggccgagtgacttctgctaccatgaatggcccttcccatagtggcgacaatttgtgtcgcccttcccccgttagaattcggcgaaggaccaagtctcccactgcgaaggatcgatgtcgtatagccttgtcatgatagcgcctcagggtttgctggtatctggctgactgaattattgtgtgcaatcgttcttcttccaatacatcaatatcttctagtctggtagcttctgctttagctatgtttttgaagaccagccttggcgccccaaacctgaggtcggcaggtagcacgggcttcgatccatataccatgaagaagggagtgtttccatgcaaagctcgactaggttgagttcttaggctccaaaccacatacggcaactctctg

SEQ ID NO: 116504 - DNA, 963 bp, Zea Mays
ccaggaaccataattatgaaacatatttttggacagccatattgtgcccagaagttcatgaatttctcgaaaaactaggatagtccaaagcttaatgagcttcttggatttagcttgtgcccaaacgctaccaacgctgcgaagacggacgcatctcacttatccgaagcatctgtgaagactgaagagagtttggcattatgcttgaatgtaaatgacatgaaatatcattataacaaaatcgcgaaagctaatttgtaaaactgctaatgttatctagcataaatcaagcaacaggcaaagcgtacatagaacagcggttatgtaagtcgatttcttaagcaaaaccaaattggcatcagaagggatgtcatgtattcatatcaccgcgggttgggctacaagtgcccatgaactgctcatagcccttgcgcaataatcccagcatcacttgccattggaaaggggtgtgaataaatcttatatctcaggaaaaaatgccaggtagaaacggcaaattaaatgctttttttgtagaaaactgaacaatcacaagactacaaagcaaatgaagtttcctcgcaaaagggtgcagatccaggaccgaaaactgctgccatcagaagggataatacatacatatgttgtgatctcatcgcattcggcaaacacaagccacgaattgctcaaagcccttgcgcaatattcccagcatcacttggcagcaggaaaaacacacacgtagatttggggctacaaggaaatgaacgaatgaagcaggcacgcccaaagactgggaggagagacgaggtacacggggacacggctgtgtctggcaagaagcaacaaatctcccatggttgctgccttgctgattggaggcggcggcggcgttccgggcacagcggtagggttaagggggtggcttaacgacgacgcgtgcgcgagtcatgggctaaatcg

SEQ ID NO: 116505 - DNA, 750 bp, Zea Mays
tgactgggtatggctgcgacttctacacagccaggcacgagcactagttggcaacaagaagagcaaactgggtccaagatatgcaggtctgtttcaggtgctggaaagggtgggcacggtggcttatcggctgtaacttccagatgacgctcgcatccataatgttttccatgttggcttgctcaaacccttcaaaggtgatacaccaagtgctcctctagccctcccagagatgcaccaggggagggtcctgccaacacttgagcgcgtgctacgcgcacgactacgccgccaagaatggcaccttcttatgcagtggtccgggtcttcagcatcagaggcaacttgggaaccactggctcggttcagagaaagctaccccaattttcagctcgaggacgagttgtttctcgaggagccaagagatgttatggtgggcgtccagtacatgcgccgcaacaaggctggtagtcctaattagggggttgaaccggcttaggctaagtgggctgttagcaaggccctttagcagtagaataaagaggctaaaggccttttaggttaatctgtaataggaggttatttataccttaattggaatgaaatgagaacaggctgtgatcaacatattgttgatcagccgccgccctgccctagttttctcctctcttgctgtcttcccctggtcgtgagaaccacgacctcctctcatcgccaaccgctcaaggagcggccacctgccacacacag

SEQ ID NO: 116506 - DNA, 300 bp, Zea Mays
agttcgtaccgacataggtggtttggtctagttttccgattttatttgggtgttcaactgagccccatgaccctcgttttatccgcccgccgctttggaatggagtgcactgctaattagatgcgaacacaacctctgaattcttacatgtatttagtatttacgaaccgttttatgtcagtgttcgggctgccgtatgcaatgaatcagtgatcgggcagagtaacgcaaagagggagggcctgatcatttgagctgcttttgttgacaatgtcaggtatggccaggtgctcgttgtcg

SEQ ID NO: 116507 - DNA, 625 bp, Zea Mays
accgggtttccaataggggatattcttcacaacaaagaagccatcgggagaatagccaagtgggcctgcgagctgggagctcacgacatcgagtttcggcctcgcacagcaataaaaactcaagcactagttgacttcgtatcagaatggaccaagcaacaagtacctgacaacccggaggctacagaagtatagcgaatgtatttcgatggctcgctgaaactgcagggagcaggcgcaggaatcctcttcattgcccctggaggtgaacaactcaaatatgctcttcagttatcatttccagcatcaaataatgcagcatatatgaggctctgatccatggattgaacattgccatatcactgggcattaagaggttgatggtatatggagattcactggtggtcataagtcagataaataaagactgggattgctcgactgattctatgggcaagtactgtacaaccgttcaaaaattagaagacaaatttgaagggctggaatttcatcacgtggaaagagatcgcaacgcaacagtagacgcgttatcgaaactaggatccagtcgagcccaggtcccacccggagttttcgtccaggaagtgtcacacccaagcatttc

SEQ ID NO: 116508 - DNA, 551 bp, Zea Mays
tggagtctcttgcagtcatacacaagatgacagggttacaacttcaaatcacagcaatatagagaggagaatacacacacaacagcaaaacacagctacataacccaagaaatacgatcacaagagcacactcccacataatgactagaacatgtcaaaatggcgctcggatctcactggaatgacaagaatgtgttgtggtggaatatgggagtgctcaatagctcttggtgtgcttgggtaatgaaggaggttgccaagggggtctttttatagcccaaatacacctcctagccattgcactttccttctaaaaggttgctgaaatcttgctcggttggtgcaccggactgatccaattgaccaccagactcagaataggggtagcttcttcgggagtctgactgggcctttcattagctgatggtcaccagaccagttcggtgcacctctggaccatccaccatgttagctagccattggccccttgcgtgtcaccgagaagttgtcgttgctggtgatctggtgcaccactggaccgtgcgcaatca

SEQ ID NO: 116509 - DNA, 409 bp, Zea Mays
cttatgaagcagcagtagttatcctcatccctgagaagcatagcgattggatctgatatggttttgtcgtgtatcaaacagacgcaaacacgctcccctcctcctctcctccggcaaccctcctcctatgcatatgcacatgcaaacatgtgtatgtttaaagtgtctatggtttaaatgataaaaatcaggtaaaattatatataagtctgatttgaatcatagttgttggctctaaacccacatttatagctatccagccagtacaacacgtatatttataagtatatagataaagatttttatagaaaatagggaaaaataaaccgtgggcttggtcgtgtcgtgctcgggccgaccaaaaccgtgtcggactatgggccgctcaacaggtctggttcaattggac

SEQ ID NO: 116510 - DNA, 474 bp, Zea Mays
ctgaaaggggatgaacagtagtactcgtagtttgtttcgtgcgatcttggtcggtgggctatatagatcgaggttgctggccatcggtagtagccgcatcatctcactgacagatgatccacaaatctccatttccagcgcaactttatattcctaaatttgctttgagtactatagaatccaaacttatctttttttttactgatgaaactaattatcgtacatacatgccaggccatctttggatctgtgaaaatgaagtgaccaatcacgaggccctttgccctacaacacgacgacatataatagtatggaccaaagaagatagaaaaatggtatctgcattgacaatttcctcgcatagaggtacgaatttacaattgctacagccatgagtagctagttcggatgacaaattcaacgcaaggtcatgacgaacagaaagcaaaaggctacttcaactctgatgagccc

SEQ ID NO: 116511 - DNA, 443 bp, Zea Mays
ctcctccgcactagatctgagcagagaaaggtacgatcttcgatttcgtttgcggatctgttcgattcaatttgcactctattttgtgcgctttttctagagaaaggttatgaaagtatacgaccactttatatttctatgcttgttcatttcgagttgtccagatccctagctttcgaatggtgtgcacgctacggacgcacacactactctttgatctccctattctgaacatttgtgtggccgtgacgaacagggtgatgtgtgcaacaccgaaacctctaatatgtagtatgtatttgtgatcaatcatacgcacaatatgtatttctatgttacctgattccatatctatgatgtaaagtattcctttattgcctctaattactatgtttaaaaatatgtattcatgttgtctagttgtctgaaaaaactatttcctt

SEQ ID NO: 116512 - DNA, 445 bp, Zea Mays
aaagaatcttctgtcccattagtctcttggaccctattgtgcacatcacctctcctttgtcgtcgtaaccctcccaactgcatttccttgtctcctacaaaaaaatagtaagtaccggtataacattacagctggtgcaaaacaataaataaataccaacctcatcgtaatcgaccatatgtccataaaagtacccaacaccaagctcggaaggaactaatccatacttagcttcaataccacatttgcagagtactggatcaaacttcaactcttccgaccactaattttttcttttcgtttacctctgcctgtggccaatgggacaaagaccatacaaccactcttagaaacgacacttacgccactcgtatggctgcaggagaataaattagtaatttattgtaaaaaataactagtttatacaattagcgcattgatgggc

SEQ ID NO: 116513 - DNA, 411 bp, Zea Mays
ctcaaagagagaaagttgatcttgataagttagatgaggaggaggctccatgtatatcgttgactaacatatccattggagaaatacgcccacaagagctaccacaagaacaagatcaaccttcatccacacaagctcaaccccctactcaagatggtgaacatcacaataaagatgatggcaatgatctagaggagttgaggaagaacaagacaagggggataaagatgaagtgccaccactcctgccacacccaagagttcaccatacaatttaaagggaccatacgatagacaagatcctagatgacataaacaagggagtaactacacgttctagaattgttattttttgtgagctttactcttttatgtcttatattgaactttttaggattcaagatgctttgaa

SEQ ID NO: 116514 - DNA, 778 bp, Zea Mays
aattcggctgagacctaattcaacccttaacaagtgtttcccctcaaacaattgcagagttctaaccctaaatcgctctgtccacggtgaccgtgcaatcaacagacaatccaatgcgttcccggcgatcctatggttcctagcttaattggccaggtcagagagtaccaagagcatatcagagcactgaaacaagcgaatagagggaatgaacggacctgagacgagctagccacggcgaggtgttcacgcgtcggtgtttagaccgatttggggaaaactcaaaattggtgagctctggtgagtaattggaggcacggcttggtggattgggtgcttgactaccttacgaacccgacgacacactcaatttataggcttcgggggcggtggcgcgtgaatttgggttggcgcggtggtggacggagaagaaaggggtcactggcgcacaagattagtggttttaaccgtggcggctctccggcgatcaccggatatagatgacccgagctattgcgacgtggttaaaggcctaaggcgtggcgcaatcacggtgaacaacacggattccggtgacggccgtaaggccacgtcgccggcgcaaatgaccgagggacagcgcggccacagtgtcccggaccaatccgcggtgtgatcttttcaccggcgagctcaatccacagacctaaagcacgaatcatggcgagcagcaccaatcacgacgaagggtcaccggcggcgagatactctgaacctgctgatatttgtgtgcactata

SEQ ID NO: 116515 - DNA, 822 bp, Zea Mays
tgcgcagcctctgtttgatgagcattctgtggcaccagctaactttttatagtcatattgccatgtataactagtgtgtgtagatttcatatagcctgtccgtcacaacttttgggtagagtttgccctttcatttgtaacgaagttatttgctgaatttgttcatttagaccataacgtgacattaagtattaataattcagaatacgatcttaatttaatagtttgggcatgcatgtattttgagctattgcatatatatgccgatcagaataatttaatttgggtgtatgtatgcatggtgccaagcaacattttttattttctcgcagggaaacaggcgacgatggcctgcttccgtatcaaatcagaggaacttgattttttttatttgacaccccatgacacagaatttcaacttccaccgtttaactcaccgttttatacatatgtgcggattacaattgtatttatcatgatgccgacttcaacagcatgaatggaagaacatagctcttccaatatacgaggtcgtgtatgcgcgtggaggttatcaaactcgacggtaaagaagacaaggaacagtgcagcgatataaggggcttttcttaccttgcagtagacctttccgttaggccacaacgacgtatatgtcattgcagtgtgatctctctcaagggtatgcccttgagattgtgtataatccggcgacgcgatcttcctcaagggtatgcccttgaagtctttggaaccagtttctctctaaggtatgccttagagagaggtgattgctgaagaatttgttgttgatgaaacgctaca

SEQ ID NO: 116516 - DNA, 800 bp, Zea Mays
cgctaacagacgtggggcaggtgacacacccgacagcctggttgggcacactaggttggaccagtttgcaggggtggtcggcctgggcttcctttaactattgacatggaagaacaagcatcaggaaacaaaaatgcaattataactgcagtcgaaacgaaaccttcctgcctcctctgttgcccataacatcgatggtctaatcttatactatatcactcacaacacccacgtcttcaaatttggaggcataatcttatcaccggtctagatgactagtagattgacagttgagaagagagacactttagctacaacctcaatctaattatatcgcaactttgaatagtccaattttctcctgtcccaatagcagaaacgaataacacagaattcagaagacaaaatccccatccgaggacctccaacccaggtgttatgaacaccaaatttgaattgaaccaccaacaccccgatagcagaaaacaggagcacaaaatctagaggacgaaatccatatcttacaagctccacatcccagtcattcgaatgcaaaatttgaactggaccttcgcaaccatcatccataaaatagaatccaacaccacaaagccgagtagagaaaaccctatcctagaagctccaaatcccaatcacccaaatgacatatttgaaatggaccttcaacaccaacatccggcgataagaaaaaatattgtagtcctaccgacacaatcaatccaaaaacctcccctaaaacgcaagcctcacatcctctaatccgaactgctcgtatcgta

SEQ ID NO: 116517 - DNA, 1543 bp, Zea Mays
tcatatacaaggggaccaattctgaagctgaattggtggtcttcatgggaataaagtgcgtagacttagtcaagcgatccactaccacccaaatagcatccctgccccgaggagaacgaggtaagcccaccacaaaatccatggtgatatgctcccacttccactccagaatctccaatggcttcagcaaacctgcaggcctcttatgctcggccttcacgcgctgacatacttcacaggcggccacgtacttagaaacgtcaaccttcatccacttccaccagaagttttgcttcagatctcggtacatcttggtttcgccagggtgaacggtgtaaggcgttttatgagcttctctcaatatatccatcttcacctctgatttctaaggcacacagaggcgacccctgaaacgaaccaaatcattctcatcgatggagaactctcggggtttaccatcgccaaccctctttcgagcttcctgcaataaacgatcctgctactgagccgcacgcactctctccatgagggaagattgaacaagcatacgagtctcctcactagcggtgccgacatagcacaaagcgatccccaaacggtccagatcagcaatcaactacaaggccacctttggaaccccggacctgctaagggcatcagccaccacatttgccttccccgggtgataatgaatagacaaatcataatctttaatcaattcgagccaccgacgctgcctcaaattcagcttcttctgagtgaaaatatacttgagacttttatgatcggtgtagatgtcacaagcctcgccataaagataatgcctccacgactttagagaaaaaaccaccgcggccaattcgagatcatgagttggataattcccctcatgcttcctcaactaccttgagccataagcaatcactctgccttcctgcatcaacacacaaccaagtccaattcacgaagcatccatataaattgtgaaacgcttatcgctctcaggcaaagctaggataggggcgtccaccaacttgctcttcaatgcctgataactgacctcgcaatcgctggaccagacgaagagaacacccttctccaaaagtctagtcaaaggcttagcaatgctggaaaaatttggtacgaaacgccgataatatccagcgagccccaagaaactttgaatttcagagacactagagggtctcttccagtccaccacagccgcaacattcttgggatcaaccgcaatgccctgctgattaatcacatgccccaggaaagccacttcggacagccaaaatgcacacttcttcaacttgccatagaactgattctcccttagggaacccggaatgagacggagatgctgctcatgctcagcctcggtcttagaataaatcagaatgtcatccaagaacatgaccacaaagtcgtccaagaactcatgcaacatcctattcattgcttccataaaagcagcaggagcattagttaagccaaaagacatgactatgaactcataatgcccatacctggtgca

SEQ ID NO: 116518 - DNA, 398 bp, Zea Mays
tggagttattgttttcgctttcgttcatgaaggaaaactatgaaaatgaaaatggttttagtgtttaccgtccgttttcatccctacttttggccccagtctccacgcacttgtcctactcccctgtactgaagctcgatggttagcaacacgtcgctatcctctctgctctctactgccgttgcctgaaggtgttgctattgccatgtgtcgcgccatgtgggtcatctccctctccctttgcgccaagtgcgatctctccttccgtggtgtgtgcagctgctacacgacatatgacacacagtcgacaccgttcgtgccacccctcttcgtccgcgtcacctctctccctttgcatcgcccctctccctccatgcctctgtttgctagcaatcggc

SEQ ID NO: 116519 - DNA, 786 bp, Zea Mays
acaccaaagggaccatgcatgtccttggagaattcaaagctagaaactccctagcccggtgcaaggcacctgccacccatcccatctctttgccatggctgcttccttgcctacaaaagggccttgaacggttggcttccctctcctcccgaaggaaagcaaaaggggatgaatcggtcggatagtagagcagagcgatgcactagctagatcagtactactgcactgcactgcgcagggctgctgctctagagtgacacacttcacccacacgccatatatatctcaaaagacaaagccctcctttccacaacgaacgaacatattcctcccgtcgatcgctccagacactatcaccttccacctctcagcttcactctcaagcctctactccatcttcttgtgaagcttctcaagattctcgcgatcgcatgcctttacccttcctctctctctttctctctctggtcatcttactaaactacctccaatgccggtgccaatggcggcagctcagttcctctagctagtctcccaccgtaattagcaaacccggagaaaaaaagggaacattcgacgccaccccgtgatgaggccttcgccacctttgctcctgttcgtgctcctgcacttcgcgctcctgtccaccattgccgccgccgatgggaatgggaatgggaatgggaacggcgacctgcgcggcgacgcgatggcgctgctcgccctcaaggccgcgctcggctgccggccgggcgcgctgcggtcgtggtcggagggcaatgccgg

SEQ ID NO: 116520 - DNA, 717 bp, Zea Mays
tttaaacatcaactaagttgacattttctcttatagatggttcgtaccattcaaaccactcggatcaacaccaacttcatccctccgccacggcaagttcctgtctacccagtggtagttgaggaaatttttgtggatctccctcgcattcgagtggagcgtggagtcatcttggaggacagctcggaggaacttctacctacgcccaccccattggcagaatcactagccttcgcagctagatcatcaacctcagcaccacctgcaccagcatttcaagtccctgctcccggaggcgacgacccggacgactttgggggacgatgatgaagatgaagacgacgaagaagatgatgaggagaacgttaacgaagaacagcaggaccactacgtggggttatggcctgtcattgaacattacaccccaatgttcgagacagggcacttccctaacttgctgcaagatgtgctgcacgcgttgggaacctacgtccgacccctgtacgagacaaggcgagtgtacgagcctcctcgggcttgctactacatcactcacattcatgtcagggtgatggatgcaggtgatagagggttcttgactctgtcagcacttgagtctctgacgctactatccacctacgctgcttcggtcagcgatgctgctaggcgaacattgtggtctctcagccacacctaccagcagcagctgcacaacac

SEQ ID NO: 116521 - DNA, 555 bp, Zea Mays
ccacgatttaaggtgtgcttcttcagcactttctggttcatgtttttgtgtatgcacgcggatgcaggttatgaaattgaactatacaagtaatggtctggagtttgggctattgctttcaagccatagtgattgacaagtccaagcattctttaccccaagttttaatttagatcgttgaagctggagatggcggtttgtccgtacactctatatccttgcctagcacctgtctacgtgggatgtgttcacttggaggtgagagatttgtctgatgtggatatgatattcttcctcacctagaaacatggcaattttgtagaaataatttgtttgctttcattgtctttcgatttccaagctttacatggaactgcatatgattaactgtagcctttgaataatgttattgatcatttggttgcttggtctaagcagtatttttttttccaatgttcaatacagactctttgggtgaagttccctctgctagatccactcaccacttttcgcagttacaaggctcttccctctgcccctccatcccaactcctg

SEQ ID NO: 116522 - DNA, 773 bp, Zea Mays
gggtcccactctgctaatgacggggtaggggccgatgaaacgcggtgctagctttcctttcatttggaaccttttgacaccacgcatcggggagaccttgagatatacgaaatctccttcctcaaatctgagttctctccgtctgttgtctgcataactcttctgtcgactctgagcttcaagtaacctcttgcggatcagggcaactttctcttcggcttttttaacaaagttgggtccttctagtgtcctttcccctacattggaccacattaggggggtctggcactttcttccatacaatgcttcgaacggtgacattttgatactggcctgatggttgttgttgtatgagaattcagcgtacggcaaactggactcccaattcctgtcgaacgttaacacaaatgctcttagtaaatcttcgaggatcttgttgactctttccgtttgaccatctgactgggggtgataagcgatgctgaaatctaacttggtgcccatcgcttgctgaaggcctttccaaaattttgaggtgaactgtgtccctctgtctgacactatcttccacggaataccatggagcctgactatctccttaagatatatccgggcaagggcggctcctccaaaagtggtttttactggaatgaagtgggccaccttggtgagacgatcgattattacctagatagaatcattccctttttgtgttcggggcaatccggttacaaaaatccatgcatatttcctcccacttccattcaggcact

SEQ ID NO: 116523 - DNA, 685 bp, Zea Mays
atcttgatgaggaggcccggcgtagtggttcctgatgacattgttgccgatgttaaggctgcccctgatgcttcgagtcgaccttcttcttcactggctcctgtggaaaacattgccaaccgagatgtttcgatgcagtgacatcctgcgaaatactgaatgtactatgaattctatgtgtttgtgatggttgtatttgaatattttgtagatagggcactagaacgtgtccttggtgctgacaattataacatcctgttctcctgaagtactgattgtttttgttgtcagggtataacggtcatcctgaacaattatgaaagtaaatgtagcgtgctggttttggaactttccctggcttatgccaattgcttggctggttaggcatagtggtcaccttaggataggtagatgtatcgtgctgactttttaaatcattgctgacttttgagttgattgccctgctagtagggtatagtggttcctctaagtcaagtcagcgtgaacatgcagcatcgtcttaggtcgttgccgatctaaggcggctgcttcgttagtagggcatagtggtcacccttagtcaagtaagcgcgagcatgttgcaccgtcttaagccgtcgccgacttaagccaattgctccgttagtagggtatagtgctcaccctaagtcaagtaagcgcgagt

SEQ ID NO: 116524 - DNA, 409 bp, Zea Mays
ggcaactccctggtcaggaaggtcgagtacgtgatagaacactcggctctagcctcggctcttagcagaaattaagcgggcacaagtcaacaacaagtacaagaccatgttctgggccataccatctacaggggcacgataatgcctccttaccatacgcggccaattccagtactccaagcagccctccttgggcctataaataggacagcctacggcttcagggaggcgggcgaacacttcacggttttctcctccaccacgatattggcacttgcctaaatcaatcctagggacttgggatccttccatctcccgctcagcttgaattccctactacaagcacttaggtgcacgtaatacaagtctcatccccgctctgctagatgtagggtcttttttcccgaac

SEQ ID NO: 116525 - DNA, 438 bp, Zea Mays
ctcgaaggtggatttgagacaaggggtttactggttcaggccggagccctagtccagtgtagtgctgatcgtgtattgcttggagcgtgttatagttaggttcttgtgtgcagttgtggatggattggatgtctagttctagggtgatctggagatgatggtcatcttgcctttttatagctcaagggtagactttacaaatgagaacttgtgttctattagggtggagttcggcctcctgcttctgggcctcgtagcccctatggtgtcgtctgctaggtcgtgcgacgccgtacccttggtatggcatcacgtcttgttcgttcgccatatgggttcctataactattctgatatagacatagcggtgcttggtgtgttctgctgagtcagctcgaggtgagatttagggatgtctttggtacaacttcatcttcc

SEQ ID NO: 116526 - DNA, 597 bp, Zea Mays
gagatttgggcactcggctcggaaacgatcgctcgaaacggggaatttggtgaaattaaagcctggaatatcggattggtgtgaaatttggcgaatatgttactggaggtattgtgaaggtgcctgaaaattttgggttcaatttgagcatttttggctggtttgggcatttcacggagcatgtggtgtgcgagcatttagggttacggagaaatggctattagaggctgtgaaaccctccctaaggagctagaaacctgtagggatacacaatgggcacatatgaacacattgcaccacttggattcactggaattcataggattttgaatttaggcacaaagggtgaaaagagaggaacttctctggtggcaggaactcagagagaagggggaaagagagagaagggtatgctcaccagagagtgaaggggagaagcacttggtcgccgccggtgaagagatcgtcagagaggggtgatcgccggcgagggaggaaaccgccagagatagagagaggcagtggccagagaggggaaacagagcctggcctcgggctcgggcaggggaaaggttttttaaaaaccgaatatgggcg

SEQ ID NO: 116527 - DNA, 640 bp, Zea Mays
acaacgacgacaaaggcagcaacgatggtgagggcagtgatagttgcgccggtggcgtggccccaccggcttgattagaattaggtgtagagtagtatgtgttctagtagggtagtagtagtgattagggggagtttgcaagctggttcataaagaaccattcttttgtattttgatgggagaatgaatgaaatatctttggtgttttaagaattgtctctggttgtttgctgatgtggcctatttatgttgagtaacgtatacgcgagaactttgagggaaatattatgcttcccgacttaactcttctgactgaacttcttggaaccaactcttctggccaatggtagtattgccaatgttgacgtcaccgggctttgaggggatttttgtttcaactatctgattcccctagaaatccttcctttgttccactattgttccaatctccaatcccgcttttctcattgatgtttgttgattgcactaattccgatggcttcgaagaggaagatgactactagcaagtacaagaatctagcaggttacattgctccctttgatgagtccaagcctttgtcctttgctgctttccatgtttgtaggggattacagttgtctgtttgttcctttgtccgag

SEQ ID NO: 116528 - DNA, 457 bp, Zea Mays
gagaagtcaaattttgcaatgacaaaaaattagtcaaactaaaaagatcaataacttttaaattattgagttcagaaacatttggtttatatgtgtagacttgcatttgaaaatacattagcaaaatctcataattttgaaggattttgagaatctattctagataaaattagtggtcaaagatatgcatcaaaggccgcgcgaagtcaggtttgacaagtttgattgacttgagggagtactccattctaaattgtatttcaaagtcctagggtaggtgaggatctctccaggtaattccttgtttaattccaattgacacaactccccctgtgtatagactatagatgctaactgaaattagtaaattacatcgcttcacttttttctggttctgcaactgcattaaaggttcacaaaagttcttttgccttgaatatttgaaactggattagtt

SEQ ID NO: 116529 - DNA, 318 bp, Zea Mays
cgtgtctctgatgcatgtcgtgaccatgccctgaccgcgtctctgcttggccgccctgaccgcctccacaagcggggataggagaggggaaggaagagagtgcagggccttaccgtgagaaggcggcagagagagtcttcgtcgactttgcgctccgccaccacatagttactccacgtcgcctcctccgtcgttagggctgcgccacatctcgctcttgcgtcgtcgccatgatccgatctggaggatagttgatcggggttcgaaccgggccgtcaaggatgggaaaactccaaaccaggcggtggaggaggccac

SEQ ID NO: 116530 - DNA, 1300 bp, Zea Mays
aatcgacgcaaaaacgccaagtattgtccttcttcttgaccagcaagactggggaagaaaaggcactagaactttgttgaataagaccactggcaagcatttgttgaatttgggcttcaatctcgtccttcattgctggtgaaaaccgatatggccgtatagagatcggtcgagccccttcaatcagcggtattgtgtgatcacaaaatctgctaggaggaagggaagtgggctcctcaaatagagattggaatgaacatagcagacgtcggacgggttcaggcacaggcaattctgatagtgaatgcagctgggctgactccagtggtgatgaatctgaatgtctgatttccaatagagtaccatgtggaacagattgctgaacaccatggaggagcactgttgaatcctgatagttgaacttcagccacttatgtttccaatccacaaacattgggctgtattgttccagccaagacatgcccaggacaacatcataacatggtaagggcagcagcttgaaatcggtttgaaaccgaggagtttgtatagaccattcagcctggcacaactcggacacactctggactatattcccattagcaacccggacggacagaggttggtccaaaggtgtgacaccaaccagagaagacccaatcgctgagttgaggaaacaatgagaactgcctgaatctagtaaaatcaataggtccactccttgaatagtgccgtgtaacttgaaggtagacagagttggctttgtggaggaagcttcatgagataacaggaccataaactgttcagcagtgtcttcaaaagtgtcctcaggttcaggagattcaggaagcaacaactcccacagttcttggatagcatgtaactggacggagttggcacatttatgtcccttttcccacttttcagcacaatactgacagaggccacgagcgcgacgataagcgcgtagcgatgccaccttgctatctgaagaagacatcggatgtgtgactcccaatttgtgaggagccgattcagtggtctggtggcgatcccatcgagccggagtagttgaagactgcttcacataatgcttcgttgggcttggaccgtcagaaacacggtattcacggcgtcgtgaagtgtccgcctcttcctgcaacaacgcgagagcacaagcagtatccaaggtgctagggcgctggacaagtatagcagatttgatgtcatcatgcaatccatcgatgaagcgcatggtataatatagagggtctgtggtgtgttcataggtgactaaaac

SEQ ID NO: 116531 - DNA, 298 bp, Zea Mays
aacatttctgatataacctattcactttgggataatgtgtattatgcaggaaaactctggtgacctacgatctctggctctatattacctcacctttcatagcaagaacaagtgcctcccgttgcctccagaaattcaaagattcaagtttgcatgcaagtagtgtcgctggatcaaccttttgtgaatcacaactgtttggtatggaacaaccttttgtggcttccttgttacggaacagcattttgtgaagcccaactatctgttgcatgtctatgtaactgtattgaaactttct

SEQ ID NO: 116532 - DNA, 300 bp, Zea Mays
attatctagtcttgcaaggttggctcaacggaaatgtgagacaaagcactagaaggaatcacgtcaatcttcaattttctcaactcatcacatagggtgttgatgcgagaattcattatagcacagttgcattgagatttccgactcaaggcatcagctaccacattggctttccctagatgatagtgtacctccaggtcatagtccttgatcagctctagctatcttctctgcctcatgttgagatcagcctgagtaaagatatacttgaggctcttatgatctgtgaagatgttgcag

SEQ ID NO: 116533 - DNA, 461 bp, Zea Mays
ttaaccaaaaattgtcaaaccaattttgctagattcaaaatattatggactatcaattaaaaatactgaaccctatgctttctgctttaattttttgagtttggatttaattacagaaactgaccaaaccttatttaattaaagaaaattagttatgcttatgtgctgaacttgagaaaatttgtagatgttcaaacccaattagacactgtttaaaaatactagacaccccagtattggaagtttaagtatagttatccaataaaagccatttttgcccaaaacttaagaaaatcataggagtatatgaaaataatgaacagtgaatgcaattatttttcctagcctacttaagtaacagagaacctaggaaaaataaagagacccctagtccagaatggaatcaaggtgaaatgttttatttagcattattccaactagaaaacaattattggaattat

SEQ ID NO: 116534 - DNA, 358 bp, Zea Mays
tgatgcaataatggcaacgaacacaggtagtacatagaagataccgcgatatctagacatttttttaatactctagccatcgctcatgaaaattggactagtagaatacatttgagtttatggtttataaatatataaactttgcagtaaatatacagggcgacacatgccactggtatgtcagtatccataaatcaacaatatcaacaagctaatctttaagtaatgtttacattcagtcaactttcagtacaaccaaggctacgacagtatgctattaaggtccaactaaaagatgtcgaaataacatatgaacttgccatcaacaactctagggtgactctaaagctgacatagt

SEQ ID NO: 116535 - DNA, 378 bp, Zea Mays
acttaatcgctttgctggcgaggaagtgatccgagagccgaaggaggatgaagttgttgtatttaaaagtttctttagggcggggcttcggtttcctctatatgatataataggagaggttttgaagaggtttgaaatatatcttcatcagctgacaccaaatgccattgtcaggttgagtgtttacatatgggctctccgaagccaaggcaaaagtgccaatgccgaaggtttctgccgagtgcaagagttgcattatcaaacaaaggccagagcagatgggattcataaaaactttggatgttataattttgcataccgaaaagaaaccaaggcctcggtgatcagctaccgcactaagtggccgaccgggtggac

SEQ ID NO: 116536 - DNA, 956 bp, Zea Mays
tgactttggagctctatagatctaaaaatacaaagattttgcctagggtcaacacatcaaaagtctagagctactataggagtacaactttgcttaagggattaagcattgttgttatacaaaaagtggagataattggccctaaagtctggctgtcagatatacagagactgaatattgactatcagtgagttttgaggaactttaggcttgattcatgctcaaaggagtaagcaactgagcaagatctctatagcagaattgtagtttgtatgtagggatacaagtttgttatagatgtattggcatgttcttgcacaaaaatccaagttctaggcgttgcaactctggctgtcaagcgctctgaattgggtttccaatggtacagtacactgaaatatcccaatccactgaacctcgccgccgacgagccgtgcactcggattcttgcccgccgcggtgattcgtgctcggcgcagttggataacggcaagggggtaagaaatatcaccccatggatgaacttgagccactattcactccggccgccgtgtccgcttagctcacggccgcttcggaaccgtcctctccggagttagccaccttgtgaccttgcaccacatgccctggcatcttaccacgtcatggtagctcgcgttaggcatatccggtgatcgtcggtgagcttgccacggtaattgccaccaatcgcttgcgccagtgcatctccttctctctgactgccaccgcacgagctcgaattcactggccaccgctcaagggccctataaattgagcacaccctcagctccattaggtattcaagcatcaaatccacccgctcgtgcctccaattactcactagagcccccaaatcgctcagttcccccaaatcagttttttgccaccgtgaacaagctctcaccgtggtcagtgcacttcaggtccaatcttgc

SEQ ID NO: 116537 - DNA, 310 bp, Zea Mays
tattaatgagacagtttgagtggctataatttttattgggaaattgacaactcaccaatgatccgtatgttattggaatagtatatgttcaaatgcatcaagctgttgtgggcaatgaagttaactgaaggaaattcaagttgttattggaatagtatatgttcatatcctgctcgattgttggcctaggaggctaggacaaccttcagttccagcaaggcttcctggttcgtctcacagttgaacactactgctggtacctgatttaaggaagttgatgttggtagaatcccataaagcaccagaagca

SEQ ID NO: 116538 - DNA, 289 bp, Zea Mays
gaagaagtaaactcctatgattgatcaaatggttaaatagtgcatattcctctcttactatgatgtgcactaatgctagggattttacttcatgtctgtgtgacttatggatgatgaattgttcatatttattttctaaaagaaatcatcattcatcatatactcccttgcgctattgacatctctcttaagtattttcaataagtttgggaggaaaaagagacaactacaaagggaggacactcaaatgaaaaagaaagagcatcaaggacaacaacatctacctgga

SEQ ID NO: 116539 - DNA, 329 bp, Zea Mays
ttcagcaaggtggcggcataaagcaccttgggggaatccatcttcattgatgcagtaggtggttgtccagtcatccgccatctgactaataaggataaagttagcataacaaggatgcagtttatcaaggagtaatgggttatcaaggatagaccatcctaggctcctacggtcaactttggctaccggttcgtgtcctaaagccaagcatgcctctgataccacttgaagcgcccaggtctaaccgaccgagctaaacatgtattaagcaccagaaaacagtctctggcgaaaatacactacaacagtggtaccatagtcatacatag

SEQ ID NO: 116540 - DNA, 306 bp, Zea Mays
cgtgtttgttatcccaatcaatctccccctggtgtgtgctttcaaaggcagaatatattcgtgtcgttgataattcccggacacccagggaataaaatgggtgtgtacatggagcctttgatcgatgaattggtacgtgcctgggaggaaggggtatggacgtatgatcgagctacgaagacaaaccttagaatgcatgtttggtaccagtactccatgcatgacttaccggtgtatgggctattctgcgcctggtgtgttcacggtaagttcccatgcccagtttgcaaggaagctctcaggttc

SEQ ID NO: 116541 - DNA, 714 bp, Zea Mays
gttatgccccctgttgccgattagagagagaggtaggagactgagataaaactttcttgtcctcatcatgggtgcttacagagggtatataaggccataggccagggctactaaaggaagccactaatcactcttattcccttctaaatctagcccggattattaaaggaaagccatcaatcactaatcactcttattcccttctaaatctagcccgggctaataaaggaaagccatcaatcactaatcactcttattccttctaaatctagcccggactaataggaaggccatcaatcacttttattctttctagatctagccgctaggcctggctgcctgctggatcaggcgtcctgcgcgctcagccgcgcgccgcacgtcgcgtgccctgtgacgccgtgtgtacgtatttccgtacatcacaacagggagagcagtgtctttgaagctttgctccacttaagaacttgcacgtgtttggacgaatcagatttttggtagagatcaagcaatttctcgccgagttgatctgcactgcgacttctacgaacttcaacaacaccatgaactcatctttgactaggttcaagcaatcccctctagaagtactgatgagtctatgagatagattttatctactacaaggatatgctttttttgccatacgtattttattccttgtttacgaagtggttgttttagaaattaatt

SEQ ID NO: 116542 - DNA, 537 bp, Zea Mays
cgggaggtgacgcgggtgttggcgagcgtatgcgggcctggggagggtggagtcatggtctgcttgtgtacgatagaggtgagttgatgtgagatttggtgtgagtgtgtgcgtacatgaacagatactacaattgtacttgtaagtgagaggcaataaaaaagccattgcgctgctcaggagacttgatgccaaccacacactgttagggctggggttgtctctgcgcttaaactcaactgccgcttttacgtgcatgccgctgttactaatcgttgtcgagctgtcgtgctaccaggtgtaccgaactgaagctagttatgttgggcttgggcctcctatgcaaggccgccatgcttggtcctcgaggccggaatgaccaatagaggccgcgacggaccaaatatctaccggtggggtctgaggaaagtaaagttatagtagtgccatggtctacactattgacttaatagatagtagagataacaataatatcatgcgtaagaaaccggccgacaacaaagaaacgaactcacc

SEQ ID NO: 116543 - DNA, 494 bp, Zea Mays
gtcttctgagatcctttcctattccgttgtcaagtagctatctttcgacaatttcttttcccctggtcttggtatgctcacatccttggaaccttgcatactcctatcttttatatatacatatctttatactccaatgtcagtttgaagcattttaggttatgtgcccttgtccaaccttgtttcttgatgatcgatgagcgatcatttttattttgcacattcttggtgatcttgttgtttccttataacttccctggtaatgagtttttacttcaacccttctgttgggaccttacctatcttacctttaattgttttctccacttcgccacttcacgagtcttgccttaactcgatcctttgttatgcttttcattattaccatctttacttttctcacctctatatcttaccttgatgcgtatcttatacctgccctataaaatctcctctcttccatctcaatctaagagttgtattttacctatttt

SEQ ID NO: 116544 - DNA, 459 bp, Zea Mays
gtcttggtatacataatttggaaattttgggttgggctttaaacatgagatggttttggttaaagaaaactagttttgatggtccatggaggaatgtgcaggtgcagcccaccccaaggctgcctccgtggtctcggtagttggggacggctctaatacgctgttttggtcggacaattgtgttgaaggctactcctagccaactcttgcccctgctctagtgtagtggcagctgtccccaaacgcattgctaggacaagaacagttcaagaggccctccaaaatccactttgggttagagatattcaagggcatctctttgatcaagtcttaagggattacctttggctttgggacttcctggagggttttcatttatcgccacagataccagatcatcacttttggtccttaatatcatctggagtatactcttccaaatcggcttaccaggctttc

SEQ ID NO: 116545 - DNA, 353 bp, Zea Mays
gtgcacttgcctaggtgccggcttagtgttgtagtgctgccccttgatggtacaaataagacctatgacaaaacttgcacttggcttttgtctccataaccccaagttcctttctagaagcaacagtgaccaccttaaaatacttccagcaaccagccctctttactctatttgccttgcacttggagggggacaactcaataccagctcttgacctctttcctcctctctttgtctttttagtttttgacaactcatctccatcagttgaaggtggaaactcatcatgatgatcaaactcactgtcatctaattccgacaacataacctctaattctagctcctccccttgc

SEQ ID NO: 116546 - DNA, 415 bp, Zea Mays
cttgggtataataaatccatctagttttattgaaattcttgcccattgaagtattagccgcgttccctttccttggttggagttcccagagttctgttggaaattggttttattttgcttcgggtatttgcagtccttgatgaactgtccggactttccacaattgaagcaactagtggaagaactggggagagcagggaaatgagtaccaggggcactcgactgattggtaggagcgggggcagtagtgggacgattcaagacaggctgcttgaatggatatgaaggtgggcgaggcaaagaacgattttgattaaaaggtcggatcaccaacctggttctcttctcaggccgttgatttgacctttcacctccaaacccctttgattttccatgtcctgcagttttagcttcc

SEQ ID NO: 116547 - DNA, 467 bp, Zea Mays
attgattttcaccaatatttgagttggcatggtaatggagagatcaacttggtggagcatgatgacaatttgcacatagttgtcagttgaaaggatactcaatatttttatcacaacattagcttgtgtcatttgtgtgagtccatacacattgacttcctctataggaatagtcaagtgagagtacatgtcagtagacctttcatgatcatgcatctcaaaataatttacctttttcatcataagatgatagtgttcctcatgcttactcttcgttctctcatgaagcacacaaatgtccgaccatagtgcatgggcgtcattgtggttttgcacatggttaaaaacctctttgcaaaggcctcaaagaaggtgcctttggtctttgcattgcacttatcatagtgtaccctcatcactaacaaggctagcaagatccttaggtttcaaaagtcctcgtatgatag

SEQ ID NO: 116548 - DNA, 805 bp, Zea Mays
ggggaacccagttcacatccaaattctggacaagccttcagaaagctatgggcaccaagctagatttcagtaccgcttatcaccctcagacagatgggcagacagaaagagtcaacaaagtcctcgaggatctattaagagcatgtgtgctagcatttgatagaagttgggaatctagtctaccctacgcagaattctcatacaacaacagctatcaggccagcatcaagatgtcaccgttcgaagcattgtatggacggaaatgccaaacccctctcatgtggtccaacgtaggggaaaaagcactagaaggacatgcctttgtcaaggaggcggaagagaaagttgctctgatccgcagaaggttacttgaagctcagagtcggcagaagagttatgccgacaacaggcggagggaactcaaatttgaggaaggagactttgtctacctcaaggtttctccaatgtgtggtgtcaggaggttccaagtaaaagggaagctagcaccgcgattcgtcggtccctatcccatcattggcagggtaggacccgtagcatatcgtcttgaattaccggaatccatgtccaacatccacaatgtgtttcacgtatcccagctccgcaaatgcctgcaagcaacagaaagtcacatcgaagaagaggcagtgcagattcagaaagaccttcagtatcgtgagaagccggtgaagattcttgattcagcagtcagaaagacccgcacctcagaggtgaagctctgtaaagttcagtggagcagagaaggagaagaggaagctacctggga

SEQ ID NO: 116549 - DNA, 364 bp, Zea Mays
ttccaactgagacaagccaaccgccaccgattttggcagtcaacccgatccaacggccagatctcttccccccttaccctctcaccacgccagccagcagccggagccgtcaccagccatggcggcgccaccgttgacatcgcctgactctgaagatcggtgcccaagtgcgaccctaacatggtgtacaggccactacgaatctatttgtaggctcaatttcacctttggaaccccatgtgtagcgatcaccatgatggcgcggcccctaggtacctaagtaatttcgacgacaaattccccgctcctagggtctccacatggtcacacgcgagcgcgattcaatacaacgagcgattcgaac

SEQ ID NO: 116550 - DNA, 1043 bp, Zea Mays
ttaaccctccgttctcttccttctccctcccaatgccattcccccacaacacaaccatgacctaggtccacgcggccaccaaccagctctgccgccacaaagcttcacgtgcgcaggttggaaccagatcgaaaactgctccgtgccgtcgtcgacactgtccgctagcaatgccgtgccgcgtcgtctgcccgccacacggcagtattttagtgagtagggatctctagctgatctgtggctagcacgagccgaccctaacctaggaagttggtaataatcttttttatgacgtatagttgctgcaagcctgcaagtcgtgcctctctggatctctagctagctagtttgtgttccttactccatctgaaatttatttccttcggaaaccgtatctcataggtcactccgtccaaaggccaccatcgtcagcgtcaggcgttaatacgttaacagcaacctatttagacgggcatctcgctcttaaaacctagctgggagaggaaaaaggcccgcccttataagaacatcacacccctccttttggctagacgagatggtactaacacagcgcgtatataccggtccctcacatcccacctctaagagacccagagcttttctagccagcagcggcaatttggactcggatactaactgtaacacaccactcggccagtccgtccaaagcccaccatcactagcatctgacgttcatgcgctcgcgtcagcctatttagatgaataccgcgctctcaaaatctaagctgaaagaggagggagacccgcccttataaggacaccatgaccccttactaagctagaacgtgtataccggtctctcacactatccttttttatgcaattattaccggtgatctgcagttactagtgatggatggatgcatggaagctaaagaccataggaacaaaggtattaacagtcttcttttcgaggtatgagtttatgaccgcacagcagggaaaaaagtggagaagcgggcgacgaactaacctgctggataccgcattcgtcatccgcg

SEQ ID NO: 116551 - DNA, 448 bp, Zea Mays
ctgaaaattcagtccagggattgcctgacagcccgactttgagcttaattatcttcaatttattcttaacaactgagctcacattcttaagcaaagttgttctcctatgattggtctacaactttgatgtggtgacatagggcaaagaccctagagtttgaaagttacaaggctcaaaagttgagcccacaaatctgaaattcagacttagagtgaaatctcaattggggtcctttttgcaaatgaatccaaaacttagggtttggcttgtaaatcttcccaaatgtgaaccatgtgactttatatgctttaacattatagtttttacactttagtccaaatgtgcacagtttttgcacataggcccctagggtttggacttagggttttccagggttccaatgggggtttttggtatctcaggggtataaatgtgattcaagttcat

SEQ ID NO: 116552 - DNA, 367 bp, Zea Mays
cacacgtcacagcacacttgtgcagtcgtgcttcaatcccgttgctaccaaccgctgcatctcgggctcgtccgctccttttggttctgaatttttctcatgacaaccgtcgtataattgtctgagcagaagatatagagaggcgcaaccgttagctccatgtagaagtcaccacagttcaaacccatgcagctgctttagaagttgattgaggcctacttagtcacccccaaccaatatagagccctgcggatccaagagtctgcttcatccaacccagttcaacccatgagagttgaagagccctagattctggaaggcctcccgatctctataaaaggagagagtaaggcttgggaacccccgg

SEQ ID NO: 116553 - DNA, 756 bp, Zea Mays
gccggatatgcacaacaagtgcgcgacacaaagtctttactataaagacaaaacccgagcaaaagccgcctaagggtgcagccggatatgcacaacaagtgcacgatacgaagtctatactataagacatccgagcaaaagccgcctaagggtgcatccggacatacataaatgtgcgacatcaccctaatggcgcaaacgtcaattacgatcaccttaaaggtgcgaagtctttgccatctgacacggtcgaacaaaaaccacctgaggacgcaaccaggtacgcatcataagcgtccaccatcgccgtggaaagcgaggtccccatcccatttcacaacaagcaatttcaccatagtttacatacacacagcgaagggccgccgaccacatcgcacaaataatacagatcacatcttgttgccctccctctctattgtgagccaggggaggccagcgttttcactcactaccacaacacgagagcgagggcagcaaacatgctacattggctcagccttcgaaataaggcctgcctcacaaaaattaaacatcatcatcttgaactcttcgccctcaaaaagattccgcagatccccctccccaatacacgtcccggacgtcgatgacaacaaatctcgttggccaccccgatctagccgaagacgggatcgttccatccccatctgtcgacgcctcccacttcgcgacatctcgccaacattgtgcttcgacaccacccttcgccagcggcgc

SEQ ID NO: 116554 - DNA, 448 bp, Zea Mays
agatggaatcattccctttttgcgtccggggcagtccggttatgaagtccatgcctatttcttcccacttccattcaggcacggggaggggttgtaataggcctgcaggtttttggtgctcggccttcgtccgttggcaggtgtcacaccgggccacatactgagctatctctttcttcatccctctccaccagtatctggttttgaggtctaggtacatcttggtagttcctaggtggatggagtaggctgagttgtgagcttcctcgagcaggacttctcgtgcctctcctttcggtacacacagacgatttttgaaccaaaggactccttggtcatctgtcctgaggtccgggagttgttccttacgggctttctccacaagtcttgctgtctctgagtctagacgttgagctttgcatatgaggtcttctagcattggtttgac

SEQ ID NO: 116555 - DNA, 804 bp, Zea Mays
ctttttctttttatccgtcacgtgttgtctgactgacgtccgggccccggcagcaggcactctgtcttcatcctcctcaactgtctgcgatgcctgcggtacctcctacctgccgccgccttcaacggatacaccgcaacagaatttcgagcttccgggcgagattaagtctttatgacgtgtttggattgcagcatcatgtagcccggagtcaaatcatccgtcatgggttagagaccagaaggacgaggtcatccgctactttttcaaggaaccagctcgaccgtcaacttatacctatagagaaagctacgaaggatggcttgatgacggatgggtttacctcgtgacacaaaccaaacagaacatgcaggttcggacttaggttcggatgattccggatgagttcatttgtcaatccaaacaggtcgttagagtccgacctgggcgggctataaaaccacgcaccctgtttccttgttgcgcggctggtcactagctggtgggcccatggggtctggccgcaccccttgcgccattgccacaaacttcgcggggctggtaagcttttcttgcgccaaatcataactgatggatgcacctgtgtccggctaccgcatggacgcctatatatgcaatacatccaccttttcttttcctccctcatctgctcgggagtctttggaatcgtcgttaccgcgtgatccgccgccaccatcgagctccggtgtgagtcgccgccatggattggagtaagggttggttggccgccgttcacccaccattcctaggtgcatccggcgc

SEQ ID NO: 116556 - DNA, 315 bp, Zea Mays
tcttcagtggatgcaacaacaagttcttctccttgttcttgcatttcttcatcagaatcagattcaccaaactgtggaggatgagcaacacgcttccttgttctagtgtatgttttgttaacagccccagcagcagctctagggagatttcttccccttagatgctcagttgcaccaacagcttcatcaacagccctccaaagagaattttcatcgttattgtcctctacattttcatgaacccactcattttcccattggaactcttgtaggatcaaggggttgcttttctttccctttgagcccaactctcta

SEQ ID NO: 116557 - DNA, 411 bp, Zea Mays
gggcgctgtcggcctctgctcccagcctcgccgctcgacccgatcctagcggctgcgcgcgcccttcttgacgaccctcctcactaatcacgtagctgcgctactcctaccagtgtggtctcctcccacaccgattccatggcgtcccccgccatacatgagctttacctcacccgccgctctcgtgactgtgtgtgtcctgctccacgacggccaactcatctggggcatgttcgtgtccttcgatccagtctagaaccctattcttcgggactgcatcgaggtccaccctcaagcgagccgtcatgtgcctggaccgcttgtcttcccacgtgctacgatcgcctccctagcggttgagcccgtgtcatctccctcccttcctagtgcctctgtcggggcaccttcttt

SEQ ID NO: 116558 - DNA, 623 bp, Zea Mays
gtcgacattgtgtggacgtctgtggatctgtcctgtagtccccttccgccgcccgccacgttctttttgattgtaccccctgttgttatcgattaatttgccagcaacaacagtgatgatgttgattggagggctctcactttcgcagagatcacttggatgtttttctcggcaaaacaccaaagaaaaacgaaaaaatggtagatgacaaatgaaacaaacgataacaaggattttccctttttttctctggccttcctgtagcgtacaatatgtttatatatgcctgctctaactgaagataaaaaccaatctaatctaaacaataggaactattttatcctaaataataggaactgacttagtctaaacaacaggaaaaatcttcaacagacccaatctctacagcttgtggtgatgatctaatgcacattttgcttgtagactcctcaatgctcgtgcttcattatactcctattaatgactcgtttctttttttctggtagataggccgtgtatcctcttcagtcctacaccaacagatttacaaaattcacgttcaacacacgccccctgtttttcgagcaaacgtagtatgccgaaaaacatacttcaattatcga

SEQ ID NO: 116559 - DNA, 1009 bp, Zea Mays
ccccctccagttctgtttcttctttaacctgacccctagcccacagcgtgctcacctccgaccatcccgtgtctcggaccgaccaagaacaacggcggcagcccaaacaagttgctgggtaagcattaccgatccgaggcgaccctagaacaagctttaatttgattaatccggaccaggatgttcctgaccacggtgacagcggacaccgaacaccgatcaagatgttccggttgagtgggtaaagtcaagctaatggggtgagcagatgacgatcacaagcacgtgtgggtgctaaaacacggacaaaaagagcgagggcggacctggaagcagctagccgcgatgaggcggttcacggcggcacagtcgaccgaattgggggaagagggaaattctccggctatggtggctaattaaaggcgggaatgggtgctttggcttcgggataacatggcgcaacagatccggccaacaatttataggagcgctaagcggtggtgtccaattttgaaaggggagaccggcgtccgagaggagaggtgagtcaccggcgtaaactattgtggcgcttcccggggtaatgcctccggtgacgaactgacctcctacggatatctactgcgatgtggtacatcttctaagcacgtggcgcagttacaagccagcaaactccgactaggacaccactgtccactgcacggcaagtgtcacggtgaacagtccggcgataagcctctctcccttccccgagttgcgatctttccttgcccacggttatccgcaagtcacgacgcatgaatcacgatgattgacgttaatcgcggcggagggtcaccggtggtgagatgcgttgtatctgagatatttcagctactgtaccatgggaaactctatttaaggcgcctgatagagcacaatcaaggcagtttttctccaaattttatgtgacaaccttataatccatctacatcaaagttatagatctataatccatcttcacttttgt

SEQ ID NO: 116560 - DNA, 354 bp, Zea Mays
gttcgaagacagattggtggttcctaaaaataaggacctcaagaagaaaatcttggatgaggctcatctctccaaattctccatgcacctaggaagcgccaagatgtgccatgatctgaaacccctgtattggtgaaccaggatgaaaaaggagatagccaaatatgtatcagaatgtgacacctgttagaggataaaggcaagccacttaaagacagctggtgccttgcaacccctatcgataccttcatagaaatgggatgacatcagcatggatttcattgtgggtctgcccaacacctctcgacatcatgattcaatctgggtcattgtgaaccgattgacgaaagtggc

SEQ ID NO: 116561 - DNA, 583 bp, Zea Mays
atttgactgcacagatgttttccaggagcacaaacccacagtatcgaaccatgaaacatacgcggtacagtatatcgatgatatccttaacaatccacgagatgcaaggaattgaatgctaatagcaaccttttgtccaacacatgtgggtatgcgcactaacaagaccagatgatgagcaccaatagacctgagacggtatcaccacatctactactgttagttcacccaggcacagggaacgtgctttaaaagcggcagaagcaacaacgcagcgctgcaacacgagcatccgtgagctgctgaaaccagatctcgcctgacacgggttcaaaatgccacacgcgcagcgcagcgcatcaggtcgctaatcgccgagcaccaagtcccaaacaaactcgaagcagggagcggaagggagagaattttttttttaaaaaaaaaaacaagtggggcgacgagcaatccgtcaccaaccgcacctaacacgaagattccgccgtaaggaaagcaccgggcggatcggaagggaacgtaccggattgaaccgagccggcgggcgatcggatccggagatggagcc

SEQ ID NO: 116562 - DNA, 617 bp, Zea Mays
tgtggggaagggcgaaccaaacactacagactggaggcactggggcaagcacgatcggccaaccgattaaagctctatgtcccacacatcatggacggtctggcgcttacgcgcggacggtccgaataccgcacggacagtccaactcttatgatcggacggtctagcagtgactagaggtcgtgacgtccttgttccttcaagcatcgacaaccagaaacatgtgcgtcgaagcaaaaatcatctaaaacctctggttggctagttaaagtcgtccctgcttttgaaaaggctgtcccttgtggtcgtccgatgaagcaactccgatcacccacaaaagcaaaaacggcctagaaggcgacaccacacgtatcgcctgttcttctatctacaatggtgccatggtagtttccaccagcctattcatcgccaatatattatcttgttcaaacatggagtggtgcagcgatgaacaaatattacatccataatccctttgcttatttgagctggggacaccacaattttgtgcttgttggaccattgatcaagttgttattgccaagaaatatgcaatcctaaacgactttatgcattagggctctattaaataatca

SEQ ID NO: 116563 - DNA, 377 bp, Zea Mays
gtaattcaacgccctatatggtctcgcttcggcattaggaggccggtcattgcacttggaaacgatgtgcaggcgtgccaggcagctttcaatacagtgtgtacttacatcggtacaagatatttagtccaagagcacattgcttacggagtgtggccactttcaagcagatgggagatgccgaaggagactgccgccggctccaaccaaaatggtttggcctatctgaaatatacttttcgatacatgagccagtttgatgagccgaatgatgactggataggtgctatagaggcaactagcgatgagctgcttggagcatattcaaaggcagaagatgaagctatgacaactgccttcggagctcggggcaaaaa

SEQ ID NO: 116564 - DNA, 994 bp, Zea Mays
agaaataatgtcatcactaaggtaaggtcgagagatgggaaaggtcaaggcaacgctaaacagaggcacaacaaaggatggagttgaagactcacaagcgacaaggaagaggatacgaccaaggggaaaataggtaaagtacaatgctcggattgaggtggaagaggggagatttatatgggcaggtatgagacaaatatcaatgtaggatatagaggtgtcaagggtaaacaagaaaataatgaaaagcataacaaaggatagagttaagacaagactcgcaaactgatgaagtggagaaaacactcaagggtaagataggtaaggttccaacagaagggttggagtaaaaattcattaccgaaggaagttacaaggaattaacgagatcaccaaggatgtgcgaaataaaatgaacgctcatggatcatcgagaaacaagggtggtcaagggcatgttaactgaaatgtcttgaaaagtcattggggtatgaaggtaagcatacatgataatatgagagtatgcaagactccaaggatacgagcatacgaataccaagagaatagagattgccaaaagataatgacttaacaacagaatgggaaaggatttcacaagacaggaaggtcatggtcatataaaccgaattgtttaaataaacaacagaggtacaagggtaagtactttgaattaagggataaggatactaaaaatgccaggatacgagcatgtcaataacaaaatggaatagagatggtcaaatggtagcaatttaataatggacaaggaaagagtcccaaaagactaaaggctatggtcagggacatctacaaagatgtcgcaagcacaagagtgagaacagatctaatagattgagaagagtatagaccacactagaataaaatacttttggcaagggggcatataggagcacaacatagaattagttgaggtgaccaatattttgaagcagcatcaaggatgaggtgaagt

SEQ ID NO: 116565 - DNA, 546 bp, Zea Mays
cgcgatgaacgtaggtacatatagggggcagtcctattaattatctatcatatccttacacaagctggaacaacagaatagcttatgaatgtctaatttctttgctgagttcccctctaagtactttgcttctttgcctgacagtgttgctatcatgaccaaggcgtactcaaatgttgagaagagagtcgattttgctctaggagatcgctagctacatgctccttgagcgtggaactttttcctattggctgggcataagaaaatatagcgtagctaaaaggagaatgacgtgcacacccaccgtcctcctgctgccggcacccagaagcagagcaaacgtggacttacggagtcacagacaatgtctacgaggcggccggcagcaggagcagaccacacgctcccatgacgacggtgggtgcccaaactaaagtggcgaacaacgataaagacgggctggagaagctatcggttccaggacctaataaggcaaacatgaattgaggagagagggaagaaaatattaaaaagggaggaaagtac

SEQ ID NO: 116566 - DNA, 365 bp, Zea Mays
cactggtatgaaatgagccacttttgtcaatctgtccacaattacccaaatagagtcatacccagcaggagtgcggggtagtccaacaataaaatccataccaatttcttcccatttccactcgggaatcttaagcgggtgcagtagtccagctggtctttgatgttcggccttaactctttgacacacatcacacttagccacatgtgcagcaacatctcttttcagtccataccaccagtacttttgctttaaattctgatacatcttagtactactagggtggatagagtaatcagaatcatgggcttcctttaatatagtctcacgaaggctatctatctccggaacacatatccgatcct

SEQ ID NO: 116567 - DNA, 295 bp, Zea Mays
atggcagacattaagggttttggagaattgcgaggaactgggtatcatggagctcagtgaatggaatttctatggtttgtcgaagtttaaagattagggtttggaaaatagggtatggttgctggtgttgtctaggagcattgtgaagtgataggcgagcacagggacacaagcaggcataagcaaatatggggtaggcagcggtagagcgtgagcgtgagcaggcgagctggtgggtggtgtggcatgtgctcgctagtaggcgagcatttcgtcgagatgaggtcgctaatca

SEQ ID NO: 116568 - DNA, 271 bp, Zea Mays
gaacaactgaatttcctggatgcgataattacaacgtagcgcaagtgaactgctccccagattcagaagccgagtctaaaaaaggtgggaacataaaatgtaggcgagtcaatcgcgtgtggccttcaagtatttcgtgttgtaacaaatattcaatcggcatccaaacagaggtaggaagtctgcaagtaacaggtaggattgacgctgcaatgctctgacatatatgatgctaatacagtccagctcaagatcatgttcctgcatccaa

SEQ ID NO: 116569 - DNA, 433 bp, Zea Mays
tgagaaggcaaaggagggagaggagtcgggtgcacggaagcaactcgtgtgtgcaaaagtaggacacgacacttcgtatttacgaagcgcacaaagggccaggggtgggccatgtgtacgacaccaccaccatcagcacacgtcccatccaattacccatgcttgcctcgataagcatcattcctctaatgacttctactataagcaaatgtcgcagattgtatgggtggctgctgcttgtgctcgccccaacctcaaaagtggttgaccacttacgcccatggctatcgtaaacctgcatgggctaccatcgtccgggcatgacccgttcgttgtgatctcccctcggtaagtgactgaaccgcttttccttttcataggaactaacttccaccactcgtgtagatgattatgactcgataggtaccaccag

SEQ ID NO: 116570 - DNA, 394 bp, Zea Mays
cttcagagtaccagccggaaagctgctcagattcattgtcaaccatcaaggaattgaagcaaattcagagaagatcgaggccatcatgagaatggaagcgtcgcggtcacagaaaaacgtgcaaagactcactagatgcatggcaactctgagaaggttcatatcaaggctaggcaaaaaaggaatgccattctataaattactcaagaaggtggacaagtttcagtggaccacagaggcacaggaggctctagaggcactgaagaaattcttgaccactccgccagtactcaagccaccgcaccgagctacgcccggtcagccggcagaagatctactcctatatatctcctgcatgactcacgtagtaagcaccgcattagtagtcgagcgg

SEQ ID NO: 116571 - DNA, 538 bp, Zea Mays
ataaaaacgaaatctacttttctatgtatatagtgataggagtccttattcgtcacacatctgactcgaattccacgggccagctaaaatcggcctggattcgatttacatcatgacctgttcgtatcgacgggttggcctgttttcaggctccttctaggtggaataaattggtctagtttggagttcggttggggccatttcaaccgtttgtttaggcctgaattggaagcaaaataagtccggtttaaactttcccctccctccatggtctagaacaaagcctcgtgttgtctcttcctgatagaatccgagccacaatagcgcaatttcaccagactttgaatcacatggatccactctatttgagccagaaataaaaacaggtatctttttataccgtaacaaacaaacgggtcctcaatcaaccccgatccagactcttctctttcggcttgaaccaccatagcgccaattcagctgggccgccgaactctccttggcccaccccactccgcctgagcaccagctgcccgac

SEQ ID NO: 116572 - DNA, 657 bp, Zea Mays
attagatctggggagaaggcagtgtgtgccgctgatcttgtgattgacgacccagattagataggaaggtaacgcttcgatgttttaaatcttgagcgtttaatccgtctcggacagatgagatccaagcgcgtagcaaggtcatctgggccgttgatctgcgtttctgaggctaagatcaaccccaactcataacgtttcgtcaatctaattcggtcccttggatttcgatctagcggccgagaagttgggcaggcttcgatctggagcgtaggtgttagatagggaggtcaagatctcaccgtaccctttgcccgaaccatttttcacatggacccccgtagttttaatgaatgaacccgccgtccacttgagggaagcctgagtcttagggattgttatgaacagatcacagacttctcagtttttatgtgcatggtccaaccagagagttaattaggaaatctatttaagatatgagtttttaatataaaaacaattcctagaacttgtttaaatcatagaaaatctatatcaagtccaaattgatccattcaagtttctataattttgtaatattattggttatcattcagtgtctctgttttgacatgaaaaccatattaaaatttatctcttgattaacctcgtatcaaa

SEQ ID NO: 116573 - DNA, 395 bp, Zea Mays
tccgtgtacagtccctgccacaaatagtgacaaaatgaccgaaggagtagacattgggaagcagcacctcgactattaccaccaatggtaattacaagctcattccatcattagttccctaattattcttagtggttaatatgattaaggtgtgctctttacagaggattatgatgagactgtactttttaaagaagatgatgatgaataagaaggatacctattcgctgggcatggtacttacgtaatgtttttaatataggatatatgattttaaaagtttctaaagttgtatgtcttatctgttgttctttcaaaacaaatttagatggtgaatctggtgaggatattgagattgatgaaacccaagatgcctttactatcaaccctgacgt

SEQ ID NO: 116574 - DNA, 805 bp, Zea Mays
gtgacttcagctactatgaatggtccttcccatagaggtgacaatttgtgccgtccctcccccgttagaattcggtggaggacgagatctcccactgcgaaggatcgatgttgtatggccttatcatgatagcgcctaagagtttgctgataccgtgctgattgaatcaccgtgttcagtcgctcttcttcgagtacatcaacatcctccagcctagtagcttcagcttctactatgttttcaaagattaaccttggtgccccgaatttgagatcagcaggtagcactgcttccgaaccatagagcatgaagaaaggtgtgtttccatgcagagctcgactaggttgagttctcaggctccaaacaacatacggcagctctctgatccactttcctgcgaacttttcatttttgtcgaagactttctttctgagcgcctccaatatcatcccgttagctctttcgacctacccgttggctctttggtgcgccaccgaggcatatttgatctgaatgctcttttgctcgcagaaatcgaagaactctgaacttgtgaagttcgatcccaggccggttatgatgctattcggtattccaaacctgaatattatgtcttgtatgaattctacggccttagctgaagttagagaagcaatgggtttgaactctatccatttagtgaatttgtcgatagcaaccagtacatgagtgtatcctccttgagcttttttgaaaggtccaatcatatccaatccccagcacgcgaacgaccaagttacaggtatggtttgcagttgctgtgctg

SEQ ID NO: 116575 - DNA, 322 bp, Zea Mays
aaatttctagtgatgtcattcggcttgtgcaatgtgacagtgacgttccaggcattaatgaatgatgtgctacggtcgttcctacatcgtttcatgctggtattttttacgacattttgatctacagtgcgtcatgggcggaccatctttgacatcttcgggccgtcctcatggtgctgcagcagcacgtcctcttcgccaagcgctccaaatgcgtgataggtgagcgctccatcgcctatctggggcacgtcatctccgacaccggcgtcgccatggatcccgccaaggtgcaggcggtggcagattagcccaaatcctg

SEQ ID NO: 116576 - DNA, 554 bp, Zea Mays
gaggcccgtacacacaggtcaaccaccactcatcaccaatagttggacagaatttgacagaaacacttaagacatcaaccctggagtagacaatagctcccaatttagacctccaggccagcagtacaccaccactagcaccaacagaattaagagtcacgaaattgttgtcgaagtcaggacccaataacgagagaacaaggcgatgactacaactctgcatcttggtttcttgtaaacaaattatgtctgcacgaaccgactctactagactccttatagaatcttgtctcgcgatggagtttaagccgcgaacattccagaacataattatggaaggatccattagtaaacacttagaggacaacacacatccaccaaattagcagaccatggtggccgctccacccaagtcatctgggactgcccaaccgaaaagtgttgcaagggcttaaacctgtggataggaaagaggatggcagaaaagcttggcataagtctctagatccccacagttgagctgattcgtgtctgaagtattatgaatagccttc

SEQ ID NO: 116577 - DNA, 698 bp, Zea Mays
ggggagcaaaagaacctttggatgagaaatgccgagaaattatatggcaatccatgggaatccccgctcatgaccctcacaccaaagaagcaaatctagaagttcaaaagatagtcgatttgcaaaacttagcaaatgaactgcctgaccatttttgtgatttgaagagcgtggttaagtcgcatgttcccgcacagaatgcaccagagagggttgaaatactaaagaaaattgaaggtatacccgatcctgttaagaggcctcataacaaaaggacaagaactctggcttctcaaaccccaagtacttggagacgtcccgggaaaagagggcgagaggacttaccacagccagtcacgaaaatgccccaaagcaagaaggggagccatacgagacctggcaccgagaaggaacacatgaagaaaagaaatccggacttgaaccttcccgttgaagaaaccgccaacccaaacatgtgcgcacacaaaggcgatgaaaaactaaaggaactcgctcccgcaacaagaagcagcagggaaatgcaagaagaaatgcaagaagcatcccatgatgaaatggccataaacaatgtattaactggagaatgcatgaacagagcaacaaccaacatagacatatatttcgcaaagaaagttgcctcgatcattgatcatgacccagaaccggcatctatcgca

SEQ ID NO: 116578 - DNA, 364 bp, Zea Mays
gcctcctttgcatataaaatgatggttggggatcctcctagggaaatatcacaccaaaagacatttgatatcagagaatacaaccaccacccaaaacaggacgtagggtattatctcatatcgagagcccaaatttgcataaatctgcatgtctccatgcctttaccttcaagtttcgaccatgtgacctaccccatataattactatagaaaaacttcaacaagaagataacaaagaaataagttttcaaggtggtgttagagtaactctaaggggagttggacctaaactagggcaaaccctagtaagagtattcatagaggcatcaagatgggaatcatactaagaaaagaacagggtgtc

SEQ ID NO: 116579 - DNA, 284 bp, Zea Mays
aatttctgctctaattcctcccaagagttgatggagttaggcagcagggctacgtaccatgagaatgcgataccaataagggacaacaagaataaacggacaaggtaggcttccctatcagccaattctcctaggtgcgctaagaactagcttacatgctcatgcgtactgtttccgccttcactataaaatttagagaaattcggtatcctggtcccttgaggatatgtcacgatttcaaatagatgattataaggtttccgatacgactgcaccgatctagt

SEQ ID NO: 116580 - DNA, 483 bp, Zea Mays
cgctcgtctctcccgcggcactacgtcctgttcctgctcccgcctcctttactgcagcaacgccgccatcgactaattccccttcaaatggtactgtttcctttcccgtgcgtgtgttgctactacatactattgctttagtatgtgcgtgtgttgctagtacgtagatttgctttgtatttttctcaaaattagtgtaaccgaaacatgtaataacagtgaggctatttggttggctaatattggaatgctattttctccaggtttgtctagtgatgatgttgacaataattgcaatgcagaaggggaagacgcagtgttgggttcaaatccctcatgtcctaatagtttggatggcgaaggagcaagtcttgagagcactgcgggtggtgacaacaagagaatgagaaccagagcatcgacatatgaggtttggaaagatctaaagcctctattcaaaatcttaaatggtaagcaagtcag

SEQ ID NO: 116581 - DNA, 715 bp, Zea Mays
actcacttaggatcatgaagggtccaatgacgcgagcggacaacttccctttaactttaaacctcctcataccccggattggtgacaccttcagatacacatgatcaccctccttaaactctaactgccttctctgggtatctgtatagcttttctgtcttgactgcgccattctcaagttttcctacattaaacgtacttgctcttgtgcctcttgaataattttaggccaaaagaactgcctttcgccagtttgatcccaatatagaagagtcctgcactttctgccatataaagcctcaaacggggacatcttcaaactggcctggtaactgttatggtaagagaactccgcatagggtaaactcttttcccatctgccaccatgtttaagagtacaagcccttaacatatcttctagtacttgattagttctctaggtctgcccatcagtttgaggattgtaggccaagctgaaattcaacttcgtgtccaagcactcgtgcaacttctgccagaaccaagaagtgaactagcatccttggtctgacacaatcttcttaggtactccgtgtagacaaactattcgggccatatactactctgctagcttggcccccgtgtaattagtcctcacagggatgaagtgagccacatttgttagtctgtccacgatcacccaaatagaatcatacccaacagaagtgtggggtag

SEQ ID NO: 116582 - DNA, 898 bp, Zea Mays
cggaaggcacgccatctcggagaggcgtgtaccccgcacggtcggcccaaagcggagggagcacagctcacgaaagtgctcctatgagggcataccctcgtcctgctcaagggcatagtaccacgtctgggttgcgcctgtgaggtggtaggaagccagccatgtgcggtccgaggccatcgttcgttgttctcggaagaactgctcgcactgattgagccagaggaggggatctgcagcaccgtcgtaggtggggaactccagcttgtagaaacagggcggagtcatggcggatgttggctccggggcgataccctggtattgcgggatggcagggctgccacggtcattggttggctccctgtaaatcagggttccatcgaccccgccataaaaaaccccgttggggctagtgttgggtggtgcagctgtggttgagattgtcgccatcgtgtattggggggttgtggtggtggcaggacgtatgatggaattggcgatggcgatggtggcatgggcaggaggtcgatggggacggggttgctggttgtctaggtgggccctaggagttggggaatcgacgccggtggtaaggctggtagcagtggctggaggtggtgttgtgttgggttgctggattgcaggaaggtgttggacaggaaggtggtgatggtcgccacagagcgggtgagatcggtgaccgcctgtgcgacggattctggggttatgggtggcgtgggtaagggagaatggatggcaagggatgtggcgggcggtggtggggtcgcagatgtcgttgatggcgtgtggatgtggtgggtggaggacctgacattgccgataccagattgatgggattattgatcctgtcggggatgtcatgtagggaataggggtg

SEQ ID NO: 116583 - DNA, 535 bp, Zea Mays
gtctaatttagcttcaagctctgtggtggttatttgtctactcttctcacttctggtagatcagaagtagattatggtaagcatgccatggggtgaaatccaatgtagttctgctacataaaccccatttatatgttcctgcagatttgacctttaccgttttggttaccatatataccatactcgtcataggactatccgcaactaggagtatttacaattttgagagatgtatgcaacacaagcataagggtcctagataggacgagcaaagtggctctactggaacacacaatggttttcacaccaacatagtgcgatttttctcaaaataacctcttggtatactcgcaacttcgtgttgctagcggttacatgtccttttatctcatagtttgcttcatgtcatccagcgacaaagagatcaatgtgctaacatctagttgagcaatgtatgactgagatttctgatcttaaatcatttggtaaggtctttttgcttactaatatagtcccaatttgtgaaatcttctat

SEQ ID NO: 116584 - DNA, 488 bp, Zea Mays
cctgcgatgcttactgacccgtccaattgggctatgggtctactgaccgtcgggaacgcatgggtcttgagttcatccgcgcgctctccgtggccagaccaaattagttcaccattcgtgcaattgggttggggaaaatactcgaggtagatccaatttggtgtctgatgctcggagaatccagccgtggccccagtcggccggttcaggtgctcgccggagtgctccccgcgctgccgtcgtcgtggacttgggcgtgcaaagaattagaaatctggggggctcggtgtaaagcgtcagagacccgttggaatagtggttgaacccgttcacagttagataaaaacgcgaggaccccggtgcaattctgccatcgcgcgcgggcgcgggcgcgcgtttcctgtgttgttgggccgtctggaccagatttggcccagcactgttacatcttttctctttttcttttctacccagctttagaaatatgt

SEQ ID NO: 116585 - DNA, 628 bp, Zea Mays
cgcccggttcgtcttggtgggagagaaataatctgtctccccggccctaaacaaaacacatgcatgcacacggccaatgagcttagctatatatgcctgcatctggaatagctagcagcgctcatgctgctgctagctagtgtgttttcttgacgcatcctatagttagtaattcgttctggctaggatcccatgcatgcacgcatgcacacagtcaaactactcgctcgctactaaacctgcactacgtatacgtatagaaactatatatatgccgcctagacgatcggatatatatggccatctaaaataatctagctagctcagcagctagacttgtttttatatctttaagcagacctagctatctagcttattaattctgcaagttgaaatgatatatgcagttttcttttgggaacggtcaactgcttaatgttgtggatgtacgtacgccatgcatctcgatgcctaaaacgcgtgcacacacacacactggttatatatattattgctgtcagctggaaaattaaaggagtgtcgatcgatctgcaaaacaaaagtgtcatttgtactagtctaactttcttagggcgtcactttcagctctttgcgccttttggggccg

SEQ ID NO: 116586 - DNA, 454 bp, Zea Mays
gtggttgtttggcctcctagccaactctgttgattcatgggaggagctaaagcgtttatttgtcaataacttccgcatgacctatgaacatgagaaaacacaatatgatctcaaacaagtcatgtagaaggagatgaaactctatgcaactatattaagagatggcgcaacatgaaggttgacatgtcaagcatgtttaaggagactatcatctacgtgttccacaagggtatcagggattgagatctctcctagaatctcatttgtaaggatccaacaactctatcttccccttctaggtggccgacaaatatgccatgagcgagaaagtgtgataaaatatatcctcatcttagaagggtaaggtaaattaaaggtggagcataaagccaatctagagaggggccagaagcgcaagtcaggccaccgagtcaatggcgttgaaagagggact

SEQ ID NO: 116587 - DNA, 511 bp, Zea Mays
ctcttacccattcatcggcttctaaaggttcctcttctttaatgaaaagcggtggtcgagtctcagagaattccaaataagtagtatcacacggtccttgtgggggaactctgcctctgtgcggttggaactgattgctcaccatttcacgcaaaaagcgtgtattatcagcggtggcattaaccagggcagcgatagcctcggccaatgttggtggtacttgtggcgggtagggagtatcctccctaccgcgagatgtccctacaccatcatgtgcacgagtccgtgatggcatctgaggcaaagaaacatttggaaaaaatataacatgcaaacatataccatcatattacattaccaaaatttaatatttatacagactccagtgtacaacctgacttcattacttactttacataagtatactatctaaactatactattttagtcttcttcatcctttgttgctccatttcctgtggcaggagaccgttcgtcagcaaggttcatg

SEQ ID NO: 116588 - DNA, 610 bp, Zea Mays
agattagttctaatgggctttgaaccaacttctacttcttctcatcaacattgacataaaaccattcagtcttccagcgagctggccacttggtacgatagctgataactggagacttcatatctttgcgataagcaaattgtagcagccaaaattttcgtgcagcccatcttctctagcttttgtttgataatgaagctcatgtactcggcagaagccttcggcaaacggctctaccccctggcttcggagggcccatatgtagatgctaagcctaacgatggcgttaggagttagttgatgaagataaatcccaaacttcttcaaaacatcggcaatcatctcattcaaaggaaatcttaatcctgttttgaagaagcttttgaagaccaccacctcatccttttccggctttggagtaatttcctctccgccaaagcgaattagctcctttttggcctcactaaaatagcctaacttcatcagcttaggcatatcatcttcggtaatggtggacctcccaaactccaggtggctgggtttagatggcacgacactataatcatcttcagattcatcttcctcagcaccaacctgctcagcctcagcg

SEQ ID NO: 116589 - DNA, 303 bp, Zea Mays
gattgaaactatgtgcaatgaaattctgggcaactacaccaagaaggaggaccaactaatgactgctgccttcggcacccggccaaaaccaaggctgaatcgcatgatagacacgctaaattttgaatatccggactatgaaagatttgacaagggtgccgaaggtttgaaaaggaaaaggattgttagtattttaaacagacaggctgccagagtggtaaaggaggatgagaagattttgaagaaggcaaaaatctgctcctgagtcgaaggcggcagtctccaaaaagaggaagccagaag

SEQ ID NO: 116590 - DNA, 930 bp, Zea Mays
catgctcttcttcgctttgagaatatatcagaatatcatcaataaataccaccacaaacttgtcaaggtaatccatgaatacactgttcatcagattcatgaagaaggctggtgcatttgtcaaaccaaaagacatcacagtgaactcatacaacccatacttggtaatgaataccatcttcggaatgtctgaaggtcgaatcctgagctgatggtaacctgacctcagatctatctttgagaacacgctagctcctctcaactggtcgaacagatcttctattctgggcaaggggtacttgttcttgattgtgacctcattcagagctcgataatcgatacacatccttctggtgccatctttcttctccacgaacaggacaggggcagcccaaggcgaggtgcttggctggatgtaatctttatctgatagctcatcgatctgcttcttaagctcaaccaactctggtccagatactctgtaagctctcttaaagatgggggcggtgccaggaagaagctctatggcaaactcaacttttcgctcaggtggcatgcctggtaggtcctttgggaacacatctgggaactcagacacaaccttgataatctcaagtggatctgctcaactgctatcaacagtcatctgataacaacttcctttctttggcttagacgggactaactctgtcaccacttcctctcctagtggggacatcaacttgattgtcctcctatcacaactgataactgcctgatacttgtctagccaattcatccctaggatgacatctattccctgagtacccattactatgagattagcgagaaacgttatcccccttatttccacacttacattaaagcaaatgctatcagctcgaattctaccacggactgagtcaatttgaataggggttgacatggtag

SEQ ID NO: 116591 - DNA, 551 bp, Zea Mays
ctcgccaaaaacatcagatagattgaattgtttctcaacaatctgctgaagagtctgtttaataactgaacacgccttaccaacctccgcatcaaaatgtgacagcttctctatgaaacccatgcggtggcgggatggaagctgattcagcttgcttgatatcaaatccctgatgagcgggagttcgatgtgaattgagtgctgtccagatgggtcaggacgaggaacatcaaaagtgttggtcctggtcttatgctgttgtaaattgaaaattattaagtaagtgtatagcatatcactgaatattatgttgaaattctatgacaaacaaatatataaatagaatcatgccttgaattgtgcatcaacgggtgatacagctgtgtagcaggtctctgaggagcttcggaactaaaaaaggcgtgaaagatggagtaaaacttatacaaacatattaaattgataaatgagattcatatatttaatggaaaatgcaaaacaacatcacaaatatgcttacaaacgggcataaaggtatgtgaacgttatca

SEQ ID NO: 116592 - DNA, 423 bp, Zea Mays
ctccacacccacatttgtgaacattatcacatgtgaattaagttgagcaaaagacaccaaacttgaaatgctaaatcaaaatcaagtgttttcatcccaagaatcataccctaaccacatcaggcacccaaagtgagcaaaattctcaaaccctaaaactaccctattaagcctttttaagtaccaccaagaaatttagtgaaaaggctataaaaaacataaaatcatgatttggaccaattaacaaagttgtactacactaaataagctacaaaatatagtaaggaagtttaatcaaaagggttttgcaaaattctcaaaacaaccagttaagtggagacttcaaatgaaaatcaaaaattcagaattatgaaatttgaccttctcatcaaaatcaactgtgttcacctagttccaaggctc

SEQ ID NO: 116593 - DNA, 388 bp, Zea Mays
caatatgttagggtgaaaacagacaatttacattgacaatactttcttaaacatggagttggataggtagagggagactggtattgcagccaagaagcaagaaaataagaaaagagaggcaaaagtagccacctactgttggtcccccaacaaatacaagcgtgaagtatggagaagtcgttgaatgtaacataaagagcagaacaaaaacatgcagaattatcatccatctaccctttaccttttaaaagaagctatgtaacatataactgaatgtggctccattgtgctctccgcatgatgtttctttgtacgcatagcactccgcaatattcaccaaaaagtaccggatcacatcacaagcggcgggcggcaagcccaaatcgtt

SEQ ID NO: 116594 - DNA, 315 bp, Zea Mays
gcaaggtcatagtcattatcagtatatggcacacatacttcatttggaagacaaacatcaccatcggtgttcgctttctcagttccacctccgacacgcaacaaatattctacaaaccatgggtcgctctatgccctcatgttttgaacaagctttaggtggcacgtggattcccagaggtaagaactccatagagaggcaacaactatctgagcccttgaccccttgcgtacaacagggagtacttgtctgaaatcacccccgaacacaacagtcttcccaccaaagggcagcccaggccgtcccattacatca

SEQ ID NO: 116595 - DNA, 495 bp, Zea Mays
gttgaacagggttggatgaagcgggctcttggattcgcagggctctacgttggttatgggttaccaagtaggcctccatcaacttctggacgtgctcatccttggcttgcttcagagctttaacagcaaagacttcacgactttccaaggcagctacacgggcttgagctgtggtgagatccacatggagctgacggttgcgcttctctgcatcttctgctctggcaatcatctgacggtggtgccgagccaagaaatcatactgtgcatctagggtgagcaggtatgcagtgaggtacacgactgaggggtcgtcctcaagcaactgctgaccttccaatgcatgcatcctggccatccaaactagacggtttctctgaaagggcgaaaagaatctgagcggtgtgtcggccacttcttcttcatagatctgacacagggccctcaatgccttgcgggcgacgacttggtaggtgtctctaaatctgtgcccag

SEQ ID NO: 116596 - DNA, 274 bp, Zea Mays
agtaaataagattggcatagcacctcatcagataatgacaaaccagcacagacaataacataatatatcaatagtaaagcaggaaacccatcctacatgtgcagtgtgtcaatttattattattccacttgctaggacctgcatcctatccctttgataccaactgtaacaccccattgatcccacacaatgaatgttaccaaaaacccctttccacaaaaacttataccacataagaaaagtaatagagatggaaaataaaacaaaatctggc

SEQ ID NO: 116597 - DNA, 652 bp, Zea Mays
gcagcagatgcattgtcgaagttggggtccagtcgggcccaagctccacctagaatctttgtccaaggaatatcacagccaagcatcatcacagaccagatggaagaatgcaatgccctgagtcagtcagagacagaccccaatgactggagagagcctatcatcaggtacttaaaaaatgaaaaagagttggatgacaaggctgtggcagagcgcattgctaggcagtcagcccactacaccatcatagggggcttgttgtacagaagaggcgcaggaggagtcttcatgaaatgcatccacttggccactgggagacagttattagatgaaattcatgctgggcagtgtggtgtgcatgccgcatcaaggactctagtgggaaaagctttttagatccgatttctactggccaactatgaagaatgacgctgccgagttagtccagaagtatgaagcgtgccaattcctatcgaagtaacaacacttgcccgcacagcagctgcagaccattcttgtaacatggtcgtttgcatgctaggggctggacatgatcagacctttcaagaaagctcgggaggctatactcatatattggttgccattgacaaattcacaaaatggatagagtacaagccaattgcttccttga

SEQ ID NO: 116598 - DNA, 582 bp, Zea Mays
ttccatgcagagctcggctagtttgagttctcaggctccaaaccacatacagcagctctctgatccactttcctgcgaacttttcattcttgtcgaagactttctttctgagcgcctccaatatcatcccgttagctctttcgacttgcccgttggctcttgggtgcgccaccgaggcatatttgatctgaatgctcttttgctcgcagaaatcgaagaactctgagctggtgaagttggatcccaggtcagttatgatgttatttggtatcccgaacctgaatattatgtcttgtatgaattccactgccttagctgaagttagagaagcaatgggtttgaactctatccatttagtgaatttgtcgatagcaaccagtacatgagtgtatccttcttgagctttcttgaaaggtccaatcatatccaatccccagcacgcgaacggccaagttacgggtatagtctgcagctgctgtgctggtagatgctgctgttttgacaggtactggcaggcttcgcacctctggactaactcggctgcatcactcttcgctgttggccagtagaaaccgacctgaa

SEQ ID NO: 116599 - DNA, 271 bp, Zea Mays
ccggttgtgaaatttgtgtaagctccaagtcattgacttcctctacaagaatattgagacatgagtacatagcattggcattttcattagcaagcatctcaaaagaatttaattttctcatagcaatgtgatatctctcctcacgctcacttctagttccttcatgtagagcacatatgtccatccacaaatcatgagcatttctgtggtttctaactctattaaacacatctttgcaaaggcccctaaaaagagtgtttttggccttagc

SEQ ID NO: 116600 - DNA, 345 bp, Zea Mays
gggtggttcccacttcttctcggtagaccgagcatagtgtacttagcgcttcacgagccacgagatggcaagtgtccttggacctatgcccgattgccatagaacaccatccgggttgtcgattacttgatccaatgtacacggtaaccatgtacttctttttaccatgctccatgaattccattccacggtattctgggtaaccagggattccaaggcatgacatgctgtccctcaagagcctagagaaaccttcttcgtagatgtagaaactggtgaagctctaaccttccatctagggaacacaaaggagatcaactctggctgctgaactgagaaccacgc

SEQ ID NO: 116601 - DNA, 439 bp, Zea Mays
ggtcgaccctctcttagtcttgaccatgatgtcatcaatgtatacctctatcctatccctaatcaggtccccaaaggtcttactcattgcccgtacaaatgtcggcaagacgtttttcagaccgtaaggcattacaacataacagtaaagcccatccacagttacaaaagcggtatgctccctatcttgcctagacatctggatctgatggaaaccagagtaagcatccaggaaggacaggaggtcgcacccagaggtagaatccacgatttgatctattcgtggaagtgggtatgggtccttgggataggccttattgaggttggtgtagtcgatgcacatccaaagcttcccgttagccttgggaacgatgactggattggccagccatactgggtgatgaacctcttcgatgaagccagcatgcagcagcttccgg

SEQ ID NO: 116602 - DNA, 372 bp, Zea Mays
cagagtgtctagttagtacccagatttcctatgtcacttctaacaactagttatagacttggatctatatatgccatcccaattgatcatttgaaaggtgtgggagatgagaaatattgcaattgagttgagactcattcctaatagctctagacacccatctgctcaaaggtcactcaatgattaacataggtgccttttgaagtgcttaggttagttagaccaaaccactacatatagtgcattagtgcttgctctaggtttaggcctagtgttagaagtgagtctataatacctcttatccattggtgattgcgcacatcattgcattagttataccggaggaacttatagacttgcgagatcacacca

SEQ ID NO: 116603 - DNA, 529 bp, Zea Mays
tttcattatctgtgctgccaggcaactgaaataaacacaatacattaatgtccaacaaggtcaaattgaattagtgaaaatgaatttcaaattccaggtaaatttactgcgagtgaagaataagaaaataacatgaaatgccttcaaaacacaaataatataaacaccacaaatgatagatatttcagtttatcagaatagttaaaagtagcatcaatatatacttcccataactagccatggaatagttatataaagtgacattgtccacgtttaactacagaattcaacatctaccaccacgatcaacaatctaacaagggatacttggccacacatatcaagttagtaaagcaacatgtagcaaggttcgaggcatgtgccatgatcaaaatacataggtaaaatgaacatcaacatcaagtatgtcatcctgaaaagtaactgcagctacaatggtgctggcatcttaaaggtcatgtaggctaagatctagtaagagacaaaacaacctaaaaagtacaagaac

SEQ ID NO: 116604 - DNA, 454 bp, Zea Mays
aagtttccagatcataaaggagaagctcacgaccgcacccgttttgacactacccgatatacaccaggatttcgtcgtcttctaatgcctcaaggcaaggcttagggtgtgttcagatgcaaaacgagaaagtcattgcttatgcatcgcacctactcaagccgcatgagcagaattatcccacccatgatttggaattggcagccatagtgcatgccctgaaaatatggaggcactacctaattgggaacaaatgtcacatcttcaccgatcacaagagtctgaagtatatcttcactcaaccagatctcaacctctgttagagaagatggatggaactgatcaaagattatgaccttgagattcattatcacctcggaaaggccaacgtggtagcagacgccctcagccaaaaacctttcgggataaagggaaccaactttttagaagattg

SEQ ID NO: 116605 - DNA, 1048 bp, Zea Mays
tgggtgtctccgcaggtgaatcaccggcgctgggtccctgaaaaccggttggggagcttcgccatgttgctagaaagctgctagtatccccctctggtggtagccggctctggtgacatgacaattgctccccgatgtgcgaatgcaatcgggtaatccgcactctgccgtgggcaactcgcttgcgtccgcgtcggggccctggcgcgtggtctggtggtactgggccctcgagacatgcgggtggaagtcgtgccctgctattagagtttggtggtcggcgctctcggatctccccgtcaacacccgtctccaccgcagctccttgttccgtggatctggaccatgcgactcttgattcacaggtatagacctgcaaactgtttctgcatagtctctgcctcgcttagctacattttacggttgggttggtctcttggttgttggggaggggcgtgtgatggcaatggcgccgccgccttgtgcctacgccgagggacccggtaccagggaagaagaaacagtcttgaccgttggatcatgatctggcgcgcagacttagatgatgggcatctggccgttcgttttgcgatgatcggctaggattagaaaatacttaccctttttgcggggattgatccgtggccgtaggattagttgtcagtggccgagatttaatcgcaaccatattaaatctagtgcgttgatcagatcggatggccctggttgcatggcaattcttttaatactggaatctaatctagaccgattaaaccagatcgtgcggctgatgattgcctataccccttcggccatgccactttacacttaagcccctacacttttgttaaaccaacccgccatcctcccaagtcaaaacaaattacaaccgagccctagatctttataagctagcccctgcgctctgtagaatttgtaccagcagtccttagcccttgttttcagcaaatagaattttagaaagtgatttataatataggataatcttagaaatttcgtaactttctcatttaaagtccaaattgac

SEQ ID NO: 116606 - DNA, 474 bp, Zea Mays
aatgtttgtcgactcccaatacttcccagactcagaaagatgaagatccttggcttcatctctagtaggctgccggaaatcatgaatcttgatcttgtcgccagatatatcatcgtcagaaaagccaagaatgtgagcaaatcgacgatagctcaccttataccaactaccttcaaggaagaagttcagataggggtagttgtaatgactctcctcgtcagctagctttatccatagagtggagtagaattgagcaataacttcatcattccaatcatattggaatgtcatgatatccttcatctgtttcctttcacaggccctcaatgcctgtgacatttctgggtccccaatggcttcacaaccttcccagttgatataacgttgatgcaggataggttgatgcttctttgggagaatgacggaattatagaaatccacatgatgaagtgtccaaaagcgatttccatcgat

SEQ ID NO: 116607 - DNA, 310 bp, Zea Mays
atttgttatgttggtctggtgcgcatgtagtcggtctttgtgcggacagtttggtgtagtcgttttcgcacttgtttaagcttcatccggctgcacccttaggcaattgttgcacggatagtcttcgcggaagacttcgattcgtcgcacttgttgcgctagcccggctgcacccttaggcgtcttctgcacggatagtcttcgcggaagactacgatttttcgcacttattgtgctagtccggctgcacccttaggcgacttctgcacggatagtcttcgcggaagactacgattgttcgcactcgttg

SEQ ID NO: 116608 - DNA, 737 bp, Zea Mays
ggggatgccattcttttccacaaaactagtggctataatagaatgggatgctcatgaatcaaaaagtacagtagcgggagtaaattcaacaaggaactcaccgagcactactcccggagcttgctgagcctcctgagcatcgacgtgatttactcgtgcccttccttgatactgggtcttgttctactggctggtggaggagggcgccttgggggcgagtgccgaggtattcttggggccattcaccgagttggagtaagtaggtcctgatgccctcaactgggggaagttgtttttgaagtgactggggtctccgcagtgccaacaggcatttgctggctgttggttgcttgcaaccgagggggcatgaaaggatctctgactctgctgactaaaacgtgacggagtgggtccagctggtctaatgaagcttggtcccttgggtggaaacccaaaggatcgagttctttggtgccggtcttgctgctgagctcggaggacttggaatttccacttgaggtgacctttttcttcttcccttgccctttccacttgtatggctttgtttgagaggtgcgagaagctgaggaaatcttggctggctaggatggtcttgacttctggtctgagccccttcaaaaagcgggccatcttcttgacttcggtgctgacgtcatccggcgcatagcgggccaattctgtgattttgtgcacgtattcactgaccgatcttccat

SEQ ID NO: 116609 - DNA, 485 bp, Zea Mays
gcgagtggtatcaatatagcgcaattcgatgtcgcctttctcataatgatcacgaagaaagtgaaagcgaacatcaatgtgcttggtcctcgaatgtagcataggattcttggcaacacttatggcactcgtgctatcacaaagcagaggcacatgatgaaaatccaagtcaaagtcctgtaaggtagccatcatccaaagtaactgtgaacaacagctagcggcagtaatatactcagcctctgtggtagacagggcaacactagactattttcgagatgaccatgaaaccaatgaagtacccaaaaactggcaagtcccagaagtagacttgcgctccaaaaggcaacccgcaaaatcagcatcagaataaccgcacaaggatagaacggacgatgaggagtaccacacaccaaactcgggagtgaaacgtaggtacctcataatccgtttcacaaccattctatgagatgtgcgtgggaaag

SEQ ID NO: 116610 - DNA, 613 bp, Zea Mays
actggactaagacactgaacaaagcattattacagactctgactctgtcgatctaggtatccaaatctatccgggtcctgtagtctggggtaccatagtcgaagcgaccacggggcagtgaacggtaagggtgctgaatcccgacaggggcgggagaaccaccatcaagatagtggtgtaccgtgcattcagcacgcaattccgcaacctccgcacgaaccttgcccaactcgtcaagggcgtggtccaactatgtgttgaggacggcgactaggttgaccatgcttctcagcctaggattgccctcaccaactggcaagacaatcatgcctccaacattgccggtcgaacggcgagggtagtacttcaggtcaaggtcatcagctaccccgctgaacaatgagcaatactgagaaagtgcccatcgtgctgcatcatgcatggctgcatcggctagagatgtcaatggggaattccctagcggggattaactccccagacccgtacccatgaacatagacccgcccccatccccgaacccgaccacgggtacaaaaatcctcccatacccatccccgaccgggtactaaatacccatgggtatccatacccg

SEQ ID NO: 116611 - DNA, 369 bp, Zea Mays
ctaatgccgcataatgagaaggccattctaatggatcaattctattccaatctgctgggtgtcagcattgacagagattgctctgtcaatcttgaagctgtgggagttccgacctttgatttggctgctctggacttgcctttcttggagaaagaagtgtgggaaacagttaaattgctgcttcagataaggctccgggtcctgatggtttcacaagtggattttataaggcctgctggtctataattaaagtggatataatggcagcagtttcagcagtttggagcaggagatttgcacagttcaataggatgaacacaacatacatcacattgatcccaaagaaggagggggctgatcaagtaaaag

SEQ ID NO: 116612 - DNA, 548 bp, Zea Mays
gttttaacatttacttcatgaaaatgattgtcaattatatctcaagatttcatagatatttgtcaaggtttctacaacgaaaacatctgcatgcaaagcataaatggttccatatcatcctcctccccaacaaatcagttcccgtcattgtttaatgattgtcgcccaatcttcttgttaaacaaaagtgtgaagctgctaactaagctgatggcaaacacgcttcagaaagtaatcaccaagttaattcacaacaatcaatatggcttcaaagagcgtaccatccaggactgcttggcctggtcctttgaatatctctacttgtgcaagcaatcaaagaaagagatggtgatcctcaagctagactttgagaaagcattcgacaaattggaacatggggttattcttgatattttgaggcacaaaggttttggccccaagtggttgaattgggtcacaatgatcatggagacgggaacatattcggtccttttgaatggaattctaggtaaagtttttcattgcaagagaggagttagacaagggga

SEQ ID NO: 116613 - DNA, 484 bp, Zea Mays
ttctcaaatcaaccgagctccgaccttcgtctccaaattgcgaagctgtagcaaccattcctgtcctcgattagccaccctggctggagaattgccattttcccccaaatcagtccgccgcgccacccaaaacagcccgcccgtggccagcttactctagtaagtcactgtccaatccatgtgtttttcttgtgcttctgcatgcttgcgaagctcacggtggcgtctgtttgctctattcgaccatggtttggcgggaacatgtgctcacaaactcggtgtccgccacgatcgtgggcagacggctcccagaggggttcctgtccaattaacggttgttcatagatcgtcttaggtcggtaaagcctccccgatagttagcttgagcaatcatcgccggccaaggccggtatgaaccacggcagggatgaacaatgagcgcgtcgcggtcggggagctccttggagaagaaatagaaatcgag

SEQ ID NO: 116614 - DNA, 411 bp, Zea Mays
caattactccctattgtagctcgtttgtagcctcctatttctctcagtaccaaccaatctaagttcggccgaagcctttcaccggaacacacaattgctctgtagaatgccgctgtgacaccctctccgtcgccccacatttctattcgtgcttagtccaagttttagtatgtgcgtcatctttggtaaacctgtgaagctttcccaagcttcaatttggtcattcacgtcgtcggttggtcagaacgtgttcatccctccgatcatccgccctgtcaccgtggactgattgattcaatgccccattgatgaaattgattgaggggaagtgtgcggtaggggtctaatttggtctctgtcgcacgggagctccagccgtggcagcattcggccggaataggctcgtcggag

SEQ ID NO: 116615 - DNA, 330 bp, Zea Mays
cagaactcaaatacccaataaagttttattgtaattttttatggtgaacgtttttgcaatgttactactacaccgattttgttttcactttatgccgtcataataggagtccgagaatgctgttgaaagcatgaaagaattgattagagataaagatatcgaaatcatggagttgaaaaaggagctgaaggctgtaaggtattgttcatgcaagagttctccaataaatgaagatgactctgtggaccatgatgattcttcatcatttggtcaagctgctcagagtttagttaatatatcaaatcaagctgacctgggatctaatgatgc

SEQ ID NO: 116616 - DNA, 280 bp, Zea Mays
cgggctgcagatttaacatggtcacaaccagccttctctaggattgttgcaacccctcgcgcgccggcaaaggcacaaatgtccccgcgatcactgaggatctcttcaaaatcttcgacttcttcgcttatccaatcaataactccctcggggtcacctcgaatgaaattctcttcggaagaatatgcacccaccttgccaaacctggttttcaattttcttacgcaatccaaggatttctcaaagcatctctccttggattcacaaagttcctcaatat

SEQ ID NO: 116617 - DNA, 851 bp, Zea Mays
aaatcccgaaggttgtttatcagcaggctctgaaggcccaacttcggtgctggcctggctcattgcagcttcggcttcggtcagtattgttttggcttcaatttgcactttcaaagccttggcaattttccctggagtagagcttgaagcctttaccgtctccagcacatctagtacacttgccatcctttttctcttggggtcgctgcaagacctttttgtgccttcggcattgtcactgctaccgaagggcttaaaacttctaatatttttattccttcgattcttggctccccttcgattcttggctccccttcgattcttggctccttagttctatcagtcttcggctcagctaacttggttgagggtgccttcggcaaggtggccggttcttcagctttttgcgtagaagaaattggctcctttggagcagcagctgaagaagtttccccgccaaactcgggcaccacggccggctcaatgtaacggggccggtgggtgaggacttttaactttttactcttcggtgcaggctcgcttggagcagctgaagcaacaacctttctagaggttgcaccctttcttttctgcccctgtggcgggtagcgatagtcagggtacacaaatccaatagcatcaaaaactatatttaatcttttctttttttggctcccgaaggccacagatagtgcattatcttccgacttggaatatgctccaagtaactcattgctagtattttctacacacttcagccagtcatcatctgattcgacaaactggtctccaaacctgaaggtatacttcaatcgaaccaggccgcctttgctagggtcagtgatggtttc

SEQ ID NO: 116618 - DNA, 327 bp, Zea Mays
ggcgtgatcttttcaccggcgagctcaatccacagacctatagcacgaatcgtggcgatcagcaacaatcacagcggagggtcaccgacggcgagattcatggaatctgttgatatttgtgtgcactgtaccattgcgatttttcttcagaacaactgacaaagcatgtttggggtcaatttgctccatattttatgtggtgacccaaccatcactctgcatcaaagttgaagcttaataaaccagctttaactttgttacattgtgtacccacaaaaagtcacaggatcttactcaaaatcgagccctaagttcacccaatttcac

SEQ ID NO: 116619 - DNA, 566 bp, Zea Mays
cttggatatttttgcgggggcttttcactggtatattatatgactctgcctcgttaaaaacctcacccctcgggaggaaaagagcgcaggcctgagcaacattgtttgcagaattacatgggcgcgtaggtcctgagacttaaacaaaaaatttctggagattatcgatgttccaggaatgctctaagtctttgccggatgatgttgccagcctgtacgcgctgggggatgccttcgacttgacaatgaatggaccttcccattttggctctagcttgccccaggattctgtccgggtggtccggacgagtacgaggtctcctttcttgaattctcttgggacaaccgcgttgtcgcgccaggccttggtttgagcctgatatttgttgatggcctgcagggcgaggacgcggtctccgtcgatgagatctttggaagttggttcgtcgacatcggggattgcggatgtgtttgttctatgcgacccatgctttatctcttgcggtgtcatggcctcggatccatacaataggcggaaaggtgtgaacccggttgcccgatattca

SEQ ID NO: 116620 - DNA, 641 bp, Zea Mays
ggcagatcattcatatttgatggtacagtgcgacaattatacaacatgcggggtacaatagcgaaccagtgtgatacagtctctccataaaaaaataatttaaaatcaaactggacccttctcacaaaaaggataaatttaaaattaaagtggacatatggtccacatattagatattaaacaacagatattgtattttatcttatcttagccaaaatcttgataaatgtatgagttgaaaaagagacatttcactcttttttatagctcgcttgaccgctcgttctccttcagctggcgagatggtactatctgggagcactgtactgtatgcgacttcgtgttgtattgggcttgagtgttttctcacagcacatctgggaggaagcggcccacatcacttgacaacacaagataacagttgaaccgtggaaggacctttttgcaaaaaaggaacaatggtggaaaccaggaaaatcactgctttattggtgtagagaaaaggatagggctgacaatagggaattctccgtcggggaatacctcccatccccatccccgtccccgcgataaaaacattttctcatggggatccccacgaacacttgcggggaacgtttctttcccatccttgttcctcg

SEQ ID NO: 116621 - DNA, 365 bp, Zea Mays
cgtctatccacttctctctccagggaaaacaaaaggaaaaatatctctacattatcttgcattttcgagcctctgacagagcttcttccccttatcccagccacaaccagcatatgctcaggttggcatataaggtggcatcaagcgggcctttctgtctgtgcttcctgccattaaccatcagagagagctcaatatctcttgatttcctggggttgagctaactggttgtgtggagcatgacactatcatcttgcattagcttaagtgaaacattaacttttcttcttctcttctttaaaagaatgagttgttggttggttggttctatacaggaggaatttctgttgtgtatgcaatatatt

SEQ ID NO: 116622 - DNA, 521 bp, Zea Mays
gttccggaagaaatggttgggctcttcgatgaagcaatggttttacgtcaagaatgatctgagtaagagggaggatgtgaggggtataatccagcgccctatacgatcttgtttcggcatcaagaggccttcgatcgcaagtgggaacgaagtgcaagcatgtttgatggccttcaacacaatgtgtacttacattggcaccatggatttggttcaagagcatattgcttataaggtgtggccgcttgttaatgactgggagatactgaaggagactactgttggctctagtgaaggtggtctggtttatctaagatacacttatcgctacaaaagtcagtttgacgagccgaatgatgactggtttgaggctgttgagactaccagtgatgagctattgggagcttatacgaaggcagaggatgaggccatgaccactgccttcggcgctcgtgacaaaaggagactgaacagagtttttgatgtgattggatttatttatcctgactacttttttcccg

SEQ ID NO: 116623 - DNA, 416 bp, Zea Mays
cgtcgataacagtcgggaacggataagtaaaatcatgaaccctaacccatgtaaccacttcaaacatgcatcacaacacaacgaattaaaaaactacatcaatacaatacatgtaaacaagttatttctctggtaatgtcctttgtgcttgagctataaatctgggtgttctgacttgaaccttgtgtaattctgttactaccagtaatgaaattcagctcggccattgtgaaaaatgtaaacaagttaatatcaggcagcaatagtccacctgaatccatcagccattcaagtattcaacacacacattcagcatcagtgtggtaacgtttgcaattggtgttttttcaatgcttattacaattagtcaattagcaaggtcaacaatattaatattcagacaccttgagtagttc

SEQ ID NO: 116624 - DNA, 347 bp, Zea Mays
gttcatcactcatcaaaacatacttgaaagttgtacgtcgaatgttcttatctttcctgacattgggattttgtaaataattagttatgggcgtcctccaatcacttgcatcagcttcattatcagccgaatcgattaggagaactttcctggtaaccccggacggtccggcgtcttcacgcggacggtccgcgacctggggatttggccctgcactggttatcagattttctgtattgtgaaatttccctcgctttatccaataacctgatgcatcttgtgccaaattgttagctctatgattctcaactctagagatatgccgaatactgaattcatcaaaagaa

SEQ ID NO: 116625 - DNA, 447 bp, Zea Mays
cgagtaaaaattagtagtgctcttgtggtgtgtaaggtaaaatgcgaactagtgggtgaaaagcgcttcaatatatatgtcgtgtttgatgattgtggtgaatgcgttgattaattgtgtatggtagttctcgcgcactaaatgacttgagtaaaatttgtaagtctacttgttagtcctcatttgattaatttaactctaacaaatggtaaagtgttagaataattcaagtctctaaaacatggcaattcttgaattatataggagctgaaatttagtaattgttgttttggactgcacgcagtgatttcctcgtgttgtatgtttgataaactaaatcatgttttctgtagaaaagtcatataaaagagttgtagataaccttattaccctgcttgtgttaaaatttgatagccattagtctaatcgtttaggagttatgcattt

SEQ ID NO: 116626 - DNA, 982 bp, Zea Mays
ttcgtgaagattttgaagctcacgttcaacaagcatataggtctgtactgttctatccttattgcctcagccaactttgggattagaatgatcgtcccaaaattgaggttgtgcagcggtagagagcccctattgaagtcctcgaacagagccatcaaatcctccttgatcgtttcccagaatacctgataaaattctgctgaaaagccgtcgggaccaggcgctttgttatgttccatctggaatatcgcatacttaacttcgtcaatggtaaagtctgcggtaagactagtattttcctcctcagtgatttgcggtatatcctctatctgtctatcatccaagtggacattggattcatctgcaggaccaaagagggatttatagtaagatgtgatatgctttttaagctcatcatctccactaattatccgaactccatcttgtagtttataaatcctagtcttcctatgtttaccattcgcgaccagatggaaatatttagtgttcgcatccccttccagcaaacctttagtttttgctctctggtaccacttaacctcctcttctcgtaacatggccgcgagcctattacgaagaaaactgcgcatgtctacttcttgtgtagaaagaagacatgtttcagctttcttatcaagggtgtcaagtttttggagaatttctttcttttccttcttatttgatccactcgtgttttttgcccatcctctcaagtattgtcttaacttccttatttttcgctgccatctctcaatggcagtatctccaccatactcctttgaccaaatttgagtgaccatctcccagaatccctcccgcaacagccatccaagttcaaacttgaattcaggctgtacggaggaagcaaggttatcgccactatttaaaattaaaggggtatggtccgagatatctctagagtgagcaactactgtggacctaggaaactttaattcccatt

SEQ ID NO: 116627 - DNA, 389 bp, Zea Mays
atttgaatcaatccctaaactcaataaaccaaagcttctctcaaaaaccacaagaggggatgagaagtgagaaaacgaatcaaaaactcaatgagatcagatttggcacatgattcaaaatgaatggtgaaagcatgctggttccatgtggttacaactatacttcctcacaaaatctcaattgtacagatgcagtagttcaaagcatctggatctctgggctagagctaatacaagactagacaatagaaaacaagagtgctgaaaataaaatgcccaaagagatagccaaagaaatagctgaaacaatcaactctccctcctatttctagagggttattctactagactaaactacccatatatacatatagcttatccacctagcc

SEQ ID NO: 116628 - DNA, 554 bp, Zea Mays
atttgttagggtagtttttggagagatgattttgctcatttttgtctctttctaaaggaactagtttagcttttagagttatcggtgtgctttcatctttttctttgttcattggctagtggtgtgtaagtctttttctacctcttattgagggttagtcattttttcttattcgtcgtccatgtctttgggaaccaaacattgctcattttcgatggctttgatttgacttttatctaccgtcttatgattttgagtgagttttttcgttcttccttttgagtgagttattttgttcttcccgctcccttctttcttctacgctaaatctttgtgtttatgcgatcaaggggaatattgcgaacacaaggttgcgaagtgctcttatggttcagtttgtgatgagtgcttgttaatgtagtagaatcttggtttgagtcgtgtagaatagttagtgctgaaaggatcacgatgcccaagagggggggtgaattgggcttttctaaaaatcaacactaattaaaacctaagcaagagcccaacttcaccccaac

SEQ ID NO: 116629 - DNA, 629 bp, Zea Mays
aaaaagagaccccccttctccaaacaatctagtggttccctagtgaaaccttttaaaaaaatcatatgcttatgttagtttttctagcccttgtgtgttttacccttgaatttacacttacacagcttatagaccaccacaacttgaccgctagaccaacccaagtctccttgtgcgcttgttacgtcaaaaaaaattgttgtttggtgtctagttgcgcaatccctatcaaggccatgtttctttacataaatccttgctcctaaaacttcatagcatttctgttaatcatcctagctgatcctgtttgcctacctctccttttgcctggatctggtaatcctttttcttgtgaatcatatttgccttatcatccaaatctctgaatcctttaatgattctgccctgttatcttgttatctgctataacctgttcgcaagtatcggatgttgatcttgcctaaatctctcaattctggtcgatctcatgctcttcctccaagaatcatgatgctgttttatcggttttatctctaagcagtgtatccatttggttcaatggattatgatgttgtctttagttctctaatgcctctgcaagttgccaaccatgatctcatgagtgtttc

SEQ ID NO: 116630 - DNA, 406 bp, Zea Mays
ggattatgttttcatcattatcacctttatctttgtcacccctatatcttaccttgatgtttatcttataccggcctttaaaatatcctcttttccatctcaatctaagcattgtactttacctacttttcccttggacgtatcctcttctttgtcacctgtgagtttttaattctatcgtttgttgggtttttgtttattacttcatttacccttctcatcactctatcataccttgtgattacattatgtctgttatctaaaatctccaatctcctatctcaatttgagagcggtgttttacttacctcactcttggctatatcctcttctttaccgcgtgtaagcatgggtgcaactccattctttgttgtactcataccactggctctccaatgccttcatc

SEQ ID NO: 116631 - DNA, 490 bp, Zea Mays
gccacactctgtaagcaatgtgctcctgcaccaagtctcttgtgcctatgtaagtacacgctgtattgaaagccgcctggcatgtttgtatatcattcccaagggcagtggctggcctcctaatgacgaagcgagaccatatagggtgttgaataatccctcttacatcctccctttgacttatgtcattcttcacgtaaaaccattcctgcatccaggagcccgaccacctcttccgaaatgtgggaactgggtagctcgccttagaccgaggcacaaaactgtaacaaccaaagttgttgtgatattgctcctttccggtagccttcgtgtcataagacaactcatggatgttgcaaaagcatcttgcatctggttccagtccttggctcctcacgacccatataaagatccccactttaacgatagcttcaagagtaagttgatgaaggtaaatttcaaaggttttcagaacttcaatcaacaattt

SEQ ID NO: 116632 - DNA, 360 bp, Zea Mays
agaacccctgaacacattccaatcgaatcaatctatttaccttatttatcattcatgccttaggagtaggtgtagcacagctttagttgtatattccacatatcaatcctcaccttatatcatcgcctttattcgattctatgtcatctagaggtgtcttggatggcttaccgaccccaagatgaccctatgatctttccttgatgaggttccttgggggcgagatccaggttcaactgagggctctctgcgctgtcatgaacggcccaccgccctaccgcagacggtctagtgccctaccgcagacggtctggtgacctatcgtggaccgtccgacacctcatagggccaaacccaagg

SEQ ID NO: 116633 - DNA, 560 bp, Zea Mays
cttcgggttacttcgggtaaaactttatgcatgaggagagagcaaagaattaacttatctgtgtttcattgtatttcaatttaatttcccagatttccaagcactatagagcttgatatagtcgttatggccacttggtgatatacaaatatataatgccacacaacacagtcaaataaaatatagagccaaacaaaattgtttattaaggttgcgcataatgtgactttaggggcttgaacaacccaccacaatccacgcgagtacaagctctagcgtatctggcgtcaacgcgtgtgcggccatcagggccacaacaacacaacaagccttcgtaataagtgcaacatgcacaattatggctcggtaatcggggtacatgataagtccatgcaacgtgcgcaacaggcgcaattgtggctcaatgatcacggcagacagacagtgcctatagggcatgcgaaaaatacgcgactcagtgatggcggtccgactcaacgggagcgatccgattaagcgagagcgcgccatagcaatcacatgatgcagccaagttcgaa

SEQ ID NO: 116634 - DNA, 565 bp, Zea Mays
gtttgattattactggtaaggctcataagcttcaaattctgccactttttatgttagaaacttagtccctactagtattttctgtgcaacagtttatggtgcctgtgggttttgttttgtccttatcaggtagcacttggtcacttgagttcctgtaaatttttggaagttcaaattatctgatcttaggtcgaatggatcaatgatctaaccataacttgcgtcctcttgatcttgatggtggcctcttctggacaccggtgcctcctctcgaacgctggtgagcaagtagagatcagcggccaatggtgttgtttgcagtggccttcctggcttcctgtcacttgcagcaccacttagatcgtatcctaggaagtttgttaggctcgctaatcccctaggaacattggttcccttgggtgtgagccgtcccttttattggcactgtgtgatggggggctaactagcatatataggagctgcgctctccttgactgggctggagaaacagtctgaacattgggccattcctatgatcctatctctgagcctgagatcattttcc

SEQ ID NO: 116635 - DNA, 492 bp, Zea Mays
tgagaggcatgacatgggcatctaatgggagttctcaagatccaggtaaggatgatgcttttggaagaagtggagcaaaggcaaacaaagaaagaaagcaagtacaagacgtttgggtgaaaggtttgccccagctcaacaaagctattgatcattgcatcgtccatattttttagctatgccatatacgtcgtcccaaggtatgttcggttatcctttatggcatcattttgctccatatgcgtctttatattatggaggagtgcaaccgaattattatgcatatggatagttgcgatatgctgttgcttacataaagtcaaagtatttcagttgttggtagtaatgattcttgctacaatttgcttcagtcatgtttattcatgagatgaacatgcttataatatttgcttatcactattcagttattatttaattgcaaactacataatcaatattgccgaatagtttcaagtaaatgattcatttttt

SEQ ID NO: 116636 - DNA, 337 bp, Zea Mays
cctgattggttgtcttcccagagtagcatgtcccgtatctaggaaccaggatccagcaggccatgctctgtgcatgcaaaaagggtatgtttggatgtctggctgtcaccggcctggttgcaggagatgttgtttggtttaaagatgtagtacacctagacaacagcggccagttcctttttgcatgccgctggccaggctcaggagaaacgaagaaaaaggtcgcacgccgctggccaggccgaggggtgcctcgtgcatcaggagggacaggcccaatagactctccaggtaaccaatcagccataggttgcatcccatgagcctggatgaggaa

SEQ ID NO: 116637 - DNA, 511 bp, Zea Mays
tgtggatgtctggaattaccaatattggtgcagtggttaaccttttcttaagttcttcaaaacaattctgacaagcttcatccgacttgaactctttaccttcctctagtagataggtaagaggtttcactaacttggaaaaaccttcaataaatcttctatagtatccagccaatccaagaaaacttctaatcttggacgcatcctttggttgcttccaatccagtatctcacttatctttcctgggtctactttaattccaccattggtaacaatatgccctaagaaagcaacttccttgaaccaaaaatcacactttgagaattttgcatataattggttgtcacgaagcttttgtaggactagccttagatgatcttcatgtgtttcttcattcggagaatatatcagtatgtcgtcaatgaatacgaccacaaactgatccagatattccataaatactttattcatcaagttcataaagtatgctggtgcattagtcagtccaaa

SEQ ID NO: 116638 - DNA, 1304 bp, Zea Mays
tgggctggggcccaggggcacgtgctgaattacaacctggctaggactaggtcgggacctccacctcgctgagttgctcagtagggactaggtcgggacatccgcctcgttgagttgcttgatagggacttggtcgagacctccacctcgttgagttgcttagtagggacctagtcgtcaggtgggccgttaagagtcatgggactactacaggtacctggttcccgggcgcctgtcaccatgtcaaacggggcttaaggggcaagctataccaaccaatacaatttacaaggaagggtcattggattagacactgcacccgaccaccagggcgcggtattcctagggttgtattactttagccattacagaggtgagaatgtgcaagtctgactaagcgagaggttcgattgacaaaaatgggagtatgtatgtcagagcgcgtatgtaatccaccacgacctattggtggacagtggctcaaccacttcgtagctattaagtcaacaaaggacactggataaaccgctgtaggacatgactgagtgtaacggcgggctccagggtggcctaggtgtgcctacagtaccctgacggaggaagaaggcgtcatccatggcgttccttgactgatgggaacccaagaggacaacgaactacacgacaatgcgtgacctttattctcttgaccgttaggctcttgtaacagtgttggtctttgaccttggcctataaaggaagggaaagggacacgattccgaggacaagcaatcacacacacacatcactagcacaagtcaaagcacatagcacttataaccgcacacatattcacacactagagacttgggagctcgatccctctctcgcccgtttgtaaccactactacaaaccagtgcaaggtaacatgagcaggtcaactggatttatggatgttatgcccaaactagaataaacccttgtgtcctctttgtacaccatccgctcgaagacacacacagcacaataattactagccagtggtttcgaaacaccaacagttgacacgccaggcatgagcatttttgcccgtctcgcaacatgtttccatcacacaatagcggatgaccaactagttagctgggtgcaacaccccaaaatcctaatttggctttagtaaatgttttccaaaagtattaaattaaagtgccttcaaatgagggattacaccttggtagtgcccttcctaaaataaataataaaataatattaaaattatggtagattcaaaatttaggtttaaacctttgaaactagaatctaa

SEQ ID NO: 116639 - DNA, 654 bp, Zea Mays
gcttcggtcagttttgtttcggtttcaatttgcactttcgaagccttggcaattttccctggagtagagcttgaagcctttaccgtctccagcacatctagtacactagccatcctttttctcttgggggtcgccgcaagacctttttgtgcctttggcattgtcacttctgccaaagggcttaaaacttctaatgtttttgttccctcgattcttggctcctcagctttatcagtcttcggctcagctaacttggctgagggtgccttcggcaaggtggccggttcctcagctttctgtgtagaaggaattggttcctttggagtagcagctgaagaagtttccccgccaaactcgggcaccacgaccggctcaatgtaacggggccggtgggtaagaacttttaactttttactcttcggcgcaggctcgcttggagcagccgaagcagcaacctttccagaggttgcaccctttcttttctgcccccatggcgggtagcgatagtcagggtacacaaatccaatagcatcaaaaaccctatttaatcttttctttttccggcttccgaaggccgcagacagtgcattatctttggacttggaatatgctccaagtaactcatcgctagtattttcaacacacttcagccag

SEQ ID NO: 116640 - DNA, 492 bp, Zea Mays
agaactaacaactagacttactaatttttatacaagttaattcacgcgctagaactaacatacacatttaattaacgcatttaccacacaaacacagtttcacgccgcatactagtttctaacatgtttttcacataactcgtaattcaactactcactaacaataattcacgcacgacaactaccacatcaaccgatttatttatttggaacaccgcctgcctagcgtaccactagttcccacattttgattcaagctcaataatacaacctttattcgattatacaacagcgacctaagcgtcgcgttacccaaggcatacattcttcctcgtcgcgagtataaccatatcacgacatatacccgcacatctcaatcaaatatcttacgccaccaccactataatacatcacggcacacacgcacatacgcgccccacgttacgcacaaggcatcaacagcatagtgactctaaccggattaatcatact

SEQ ID NO: 116641 - DNA, 518 bp, Zea Mays
gcttgtctccggccaaaagcggcggtttagtttattgatgattgcttctttccttgggggatttattcctgtctggttgttgggagcctaaccacgctcctattgctgctgcggtttactaaccatctgcgccagtacacctactccatggaccccaaaatacagttcttccaaccattccccccctccatctgctttctcgcgggcaaataaaaacgtgtagaacgacggtgtagtaggcagatctactccttgtgccgctacgctagcccgctaccgaagatcgggcccgtttcaaccggttcgttggtctgagcggagctaagatggggcgcatttcattttttggtcctttcgtctgattggagaagtgcccattccggtatcgctccccggcctccaaatacgcaccgacacagaacgtgttcgtacgcacgtacacatggtatgcgcaccgtgctgctggccatagccgttgactcaccgggattcactcctctctcgcgtgtgtgtgtgtg

SEQ ID NO: 116642 - DNA, 465 bp, Zea Mays
cggtgagccggcaggcacccgcacgctatgggcctgagagctaccctatgcctccaccatcgttgtcctttcgcccttcgatgtaggctttgttacaaaggacccatcgtcgtggcacaacttgtgtcgcctttcttcctcagttctcttggagtcgctgggggtggagctgctactctcagactgcttgcccatgcccaagggactagaggccacgtcgttaggctgggacacccttctgatacgcctgggatccggatcccatgattggggttgcctcctatctgtcggatcgctagaacacattcgttgagggccagaagggtcgccgtgattgccgtccttaggttctggttgtcgcagagtgcagcgatgttcaggggtaggatcaggtgtttggtaatgacggcctcacgagtcatcccgtgcaccatgaactccagggcctccaaggttagatctgcg

SEQ ID NO: 116643 - DNA, 412 bp, Zea Mays
ggcctcgttagtacaaaaagagtgattagtgtgcacacattgttctcattggtcttgagagggtcaagtgagagtttatgcttattactcttcgtgattagcatcgcctagatggttttatggtgtgaagtgtggtgtcacctagggaagttgtgggtcagccggctcaggacgtgtacataatcatgagtggctcactgtggtggagcagtgaagtcctagctcgtagagagcacttgtctttgcatggaccaaggggaaacgtcactcttgcatgagtgctctaatggggattagtagagaatgctgactctttgacaccatgggaaaacatgaggagacttttaaacctttgctttacttttgcaattatgcttgtacaatttacgttcttagaattgccatgataaca

SEQ ID NO: 116644 - DNA, 297 bp, Zea Mays
acttgccaatttctatcttcattctggtccactagtataaggatctgagatcatgatacatcttgttgatgctggggtgcatgcagaattttgaaaggtgagcttcatccaatatcttctttctaagctcagtgtccttgggaacaaccaatcgatctccaaaccatagaattcctttgctatcctgacggaagcatttgtatttttctgctttctgcttgatcatttccttgataacctgaacaccctttaatctgtgccctgactatttgctcttgtaatgtgggctccaccgag

SEQ ID NO: 116645 - DNA, 392 bp, Zea Mays
aggaggctcagcaagctccgggagtagtgctcgatgagttccttgttgaatttactcccgctgcggtactttttgattcaggtacatcccattcttttatatccactagttttgtagaaaaacatggcatcccctctacccctctagagatacccttggtcacccgaaccccagggtcagaccttctatgccagctcaaatgctcccaagtcagaattcttttaagtggggtagtgttcttggcagacttaaccgtcttgccatcccaagggattgatttgatcttaggaatggattggttaaccaagcataaaggtatcataagttgcgcaaacaagacagtccttctcacagaccaccaaggaaagtcaatctcttatcaggctcagcca

SEQ ID NO: 116646 - DNA, 847 bp, Zea Mays
caggatacgtagacatctcctcacagtacgcgaccaactcccgtcgtccgggctgctacccctgggtctataaataggatagcctacgactccaggagagggacgaacacttcataagttttctcctccatacaatattggcacttgcctcaatcaacctcaataacttgggatccttccctctcccactctgcttgtactccctactgcaagcacttaggtacgagtaatataagtctcatcgccctctactagaagtaggacctctccttgctcgaaccaggataaaagacttgtgtcaacttgcatcaccatctaggtctggggcacgcaacattatttcactagttggttagaacctcatatccaaacaccgacaaaacccgacccgaccaatacaacgggtggatatgggccatagtttttggcccgcaacaatcgaaggactggacatggactatgatttttaatccaaaatccgatctaactcgaaaaaactcgttcccaatgccaaaaaccccgatcaaccccaaacaaaaccaaagccaacacgcctaacagggaagtacgtgtcgactcgacacgacacatagctatgccaaaacgacccatgatccgacctagacctgatccgacctagcgtttgaataggtccatcaacggtgggggaccacacagcagtcatccggcaagcagtggcagtgtgacgtggtacggatgggttttcaaattatgattaattgtatgaatattgaactacgtgtcaattatgtgaaacatttggtactgatatatattatgtgattcgcgctgtgatatattataaatgctaaatagtactccattt

SEQ ID NO: 116647 - DNA, 348 bp, Zea Mays
aacctctcaaggtaccggaatggaaatgggaagaaatcggtatggatttcatagttggactaccccatactcgggatggatatgattcaatatgggtcatagtagataggttgactaaagtggcacaccttatacatgtgaagacaacttactccggagcccagttagcagagttatacatgtcgaggattgtttgtctgcatggagtaccaaagaagatcgtaccagatcgaggaacccaatttacctcacgcttttggaaaatactacatgagtccatggataccaagctaaactttagttcagcttatcatccacaaacggatgggcaaacggaaaggacaaacc

SEQ ID NO: 116648 - DNA, 553 bp, Zea Mays
ttctagcatttatttttgcataaaaaaatcattttctaattcctttttctagattttataattctctggattgggcctcatatactaaaaactgcagggactagccaataaattatcccagactcagcgcgctacacagggtggacggcgggttaatttctgttttatccgggggttccttagcaaaacgcgcgccgaagcggtatcgtgcaatcagagccatccgattgtcaactgagggtcccgattagatcgagcccacacccgaatcggtatgtgatgctatgcgttggattgggaatcaacggctcagattagaccagacttatgctgaatcggtacgcgatcctgacctactatccactgatcaacggttccgattttaaatgcccgaatccattgacgtgcacccgatccagatcggacgatcccgagctaaagaagtgaaggagtatgtttgatctgatctcggccgcacaacacaagatcagtggccccggcgcatcttcaacctccctcgactccgccgcgacggtgcgcacacaatccacgg

SEQ ID NO: 116649 - DNA, 614 bp, Zea Mays
ttgatcgattagaggtcttatatgagcgttatcgcagcccaataattattggaagcaagtagcattcataagtcagtcctggttaaaattggagaacaattcgatagcatatgcacctaagtgctttaggtccctcagtagccaatgtaagtcttacggagttttatgccaggtgttaatgcctttatgttagacctcctaaaatatgatgctttaagtgacttgtgtgttgtccagtttaagttgagaaaaggttaagaaacattaattaacttgcttccacccatgttttgagttgcaatgtctaaatggttcgctaagtcttctactgtgattagccaactcatgttaaataggagtcgatttcgttaagtgtttgttatatatatatgttgtgtctcggattgcgatagtaataggcaagccgacgtgtatgctgtcgagcggaccgtgtcgttgctctagttagccgacttgttagatgacttggtttatctcataatcacggtaaattacttgttggggtctaaatgtgtatggttttggtcgcgggtaaagagtagtagtgctcaagtgatgtctaatttaaaacgcaaattgttgggtgattatcg

SEQ ID NO: 116650 - DNA, 389 bp, Zea Mays
ggcaggttatgaatggagagattgccgtcgtttgtgcctcctaactgacagaccaagcggtagtcggtgagccatagctccggctttgattctcccgagtacttggtgattgtagtcggtgcctagaaccgagccaggaacggtgccctgcatctagcttggatgaagacttggggtcctggaggttcgggtgaagggcttcaatcttccccactatcgtagcgaccaccccgctgagagtgatagccaggcatggcgtggcattggtcgtcgtggtgcggccgctcaccaaagcgatcttggacatcacggttctgacagttgtctaggaggcagtctcagaccacaggggctttgtctcttatgagctcaggatggaccaaggcttc

SEQ ID NO: 116651 - DNA, 499 bp, Zea Mays
acatgccaaggtagtcatcattttctctatgttaataagtcgagttgagtcgatgtgcattatgtgttcgttaaattatgcttcgcatatagtgtatggttgtgctcgtggattctagtagtcacatcgggtggtcaaataggatcgtaatacaagttgtgtactggagttagttgttttgggatgattattaaagtgctctgttcacatgataaatatgtatgtttataaaaacgatgtagtgtaggttgtgtctcagtctgcgatcataataggcaagccgatgtgtatgttattagcgggctatgtcgttgctctagttagcagacttgttagatggttttggttaagctcatggtcacgtcgatttgcttgttgtagtctaaatgcgtatggttatgatcgcgaatgaaaagtagtagtgctcatgtgatgtctaagttgaaatgcaaattattgggtgaaaagcgcttcgatatggattattgtagaaaatgcg

SEQ ID NO: 116652 - DNA, 385 bp, Zea Mays
ccgaaacagcgctgatttcagaagtaatgaaacgatcaggtctggttgaggttgacgaaggtgcttcaaatgctgaagctgaacaaactgtggtggagggtgaaaatgttaatgagagtgaggaagactatagcattctgatcccaacaaaggctagtcatcttgattttgaaaaatctactgtgacggaagatgacatgcctatgatgatgaaattgggctattttggagaggcagagagcaaacttattcgatttgctggagaagaggtaatcccatagccgaagaaggatgaagttgttgttttcaagagcttctttagagcagggctgtgattccccttgagtgaaatgataggtgtagttttaaagacctttgagatata

SEQ ID NO: 116653 - DNA, 458 bp, Zea Mays
gatatccgcagaaggttgtcagggcttttagcgctacgacctcagtggtgttgtccgccctaaaccagacagtctcggtgtcaagggaatgccataccggctgcagagggtgagactccagggtcagccaaaccctgcaacgtggcacccgatgctcctcgtatagctgcaccgtatacagagggggtgtagggtaactggcggagcagagcacctcccacaagatggagggaaaaccctcatgggaaaggtagtcaaaactaaaacgagtgtctcctccattgatgggggtgggtgaagtcatctgtgaaaagagggttagatgtaagtgtcatggtagtggtaaggagaaacatgtgcccgggttgttaaaagaaggtgggttaaatttgatttgtctattccaacccctttcattattcattattaacaatgcttgttaagttcataattagatg

SEQ ID NO: 116654 - DNA, 411 bp, Zea Mays
ccgatgtagagtgtggtgccctcgcttgtgtatgtagaggcttgtatgatgaagctgtgtgccctcgcttgtgtacgtgtgcgaaggcgttgtgtactttgtctggtttgttctgttgttctgatgtgattatagttggtcttggcggacggtttgatgttgtcgtttctgcctttgttaggcgacttccgagcggatagtcctcgcggcagactttggttttcgcgcgtttgttgtgctagtccaactgcacccttaggcgacttctgcgcggatagtcttcgcgatagactctggttttttcgcacttgttgtgctagtccggctgcacccttaggcgacttctgcgcagatttgtcgcacgcgagggttgctagcgcttagcctcgcggtgacctcgtgttggtcgaa

SEQ ID NO: 116655 - DNA, 637 bp, Zea Mays
cccaatcataggagaacaactttgcttaagagtgtgagcatagttgttaagaaaaaatggagataattaagcctgaagtcaggctgtcaggctgatacagtctgaacttcagatggacaatgactttgatccaagtttgagagccatttcgactaagatccagtgagaatctgcctagggttgctataacaaagttgtagagttattaaagaggaataactttgttataggtgtttgggtttggtaccacatggaattgggagaaaatggagctccaaagtgctctatcagccgctctgaatgagctctcccatggtacagtgctgaaccagattagactgccagcgtggagttctcaccgccgatgactccctccgccgcgattcgtgtcaccggcgtcgggattcgtgcctggtggatggatagcgtcgtgggtaaaagatcttcgccgccggtgagctggacgccactccggctagccgcaatccctctccccttgctcaccgcccttgaataaaggttctcaccgccgtcaaaccttcgccgttgtccgccgcgtgtctcagactgtctaccgcatcacgtgactcacccttgctctccgtcgatcaccggaatagccgccatgacgattgac

SEQ ID NO: 116656 - DNA, 417 bp, Zea Mays
atttcaatctttgggcgtagtgtctggcttctagtatttcttcttggtatagtttcttccccgaagcatgttgaatgatgtagtcaacgttttcgttcggagcttcgggagcaggagcttcgatcttttcaggtgcaatctgctctgccgttttttcctcaggcacggcaggctccgtctcgatgggcactaaaggcccagcttcggcttcggcctgaactttcatagcttcgacaattttattaggggctgggctcagggcctttgtagtctctataacaacgtctaatacgctggccatcctcctcttgggagttgtggcaggaattttttgcatctctggcaaatctgcctctatcggtgggctcaagatttctgacgcttttttcaccttttccacctatggctcttcagcct

SEQ ID NO: 116657 - DNA, 370 bp, Zea Mays
cacaatgatataaccacttactttatgtaatgtgaatacgtttattaaaatagttatgatcagcatatccttccttaatcgacatatttttttcttctatgtaccttctattcaggttacgaatactgtaaagataatttagaatttctcatacaaatccttaaccactgtaaatatatggggaatttctaaaatgtgtttagattcatacatgtacaagtttgtattatgtttttatgcatatttatgaatctaccttataatcgattttatattgttgtctcacttattcctctttaaaacacacacttgctgttttcaaatttcaagtcactaattgttactgttcttcctcaaaaaaataccactg

SEQ ID NO: 116658 - DNA, 581 bp, Zea Mays
caaacttggaaatcaagatcctaagtaagtgcaactcatcttaggagacatgacttggctttatcatgcacatatagtggagagacatgcccaaaccctaatggaaacccctttggacaattggagcactataagtgagcatgaccaaaaggctataaaaaccacataatcatgacttgggccaattataacatttgtagtacacctaataccctaccaaaaatagtaaggaagtgaccccaaaaaggtttcagaaaaaccccaaaaggttcaccaaagggttgagcataagagaaaaatcagaattcttctaagtccaaaaccaacccttttccaaagatcaaacatgttcaccctctttcaaacttcaaaaccacttgacccaattgacaaagtggcgcctaaagacccttagaacaccctggaaaagtttgaacccaaccctaagtcgtttgacacgacttggcacgagttttgtctcggtgtggatagctctgacagagccgacttcccacccccatatctctctaacccgaccacatcttcccttgtgttggggacttgttctcaaatgctaagag

SEQ ID NO: 116659 - DNA, 345 bp, Zea Mays
attggaggcaaggctgtgaggaagcgattgatgagacacccatcagtcaaagtacagcctcgtactatgagaccactgcatttgctctagggccccaacatccgagcaccccgcagagaaactgcgggtatttcgaagctaaaaggagagcttcccccaaatggcatggaacccttagacataaacaatagaagcatcaaatacagagcaacctaataccacagctgcaaatttgcgtgccaggttatcatgcataccatgccattaaagggaacatcacattgtccttaatcataagacatttacattacccttataaacactaggtaaacatgtctactaaag

SEQ ID NO: 116660 - DNA, 360 bp, Zea Mays
cgcagcctgtaggagtcatcagttttcataaaatcccaagaaaattaattattagtatgaaaataatttataaaacttggagaatcaataacttacacgttttaactcggatttaaatggttcaagttgcattagactcgtattaaatttgcctacgaagtaacaacattattttatcgtatcacctatgtttataaacaaatatttatttgagctatgattagtgaccctcctaatccaaggttgacatgtctataattataatttgactgtagtatgatttccaaacaagttataatttagattaaagttgaattaattatttagagtgtattttctcatatgatgtatattaaccaa

SEQ ID NO: 116661 - DNA, 324 bp, Zea Mays
ggtcacacaatttctcaggatgggatatcagttgatcctgagaaggtacaagaggtaatggattggaaaccccgactatagtgaggcagattcggagttttctgggattggcagggtattatcagcgatttattccagatttctctagaattgccaagccaatgactgaattattgaagaacggagtcaaatatgattggagccagaagtgtgaggatgcctttcatacactaaggcagcacttgacaacagccccagtgctagctcaacctgacaacaccaagccctttgaagtgtattgtgatgcttctggtatgagattgg

SEQ ID NO: 116662 - DNA, 571 bp, Zea Mays
tggtagttgtcgtgcgtgatttattgttagtgagtagttgaattacgagttatgtgagaatcatgttagaaactagtgtgcggcgtgtaactgtgttcatgtagtgaataataggtcagtaggtatcgttggtgtcattggcaaatggggatcattcctgttgtgcgataaattttgaaaggcaaagaacatgggtagtgtgtcgatcaagttaactgataggttccgtaaacacgcttgtgatgcttttatgtgcatgataagatcgatgtcttgtcgtcgtagtctcagcaaaattttctgaaatgtgctagtgctctactgatggggttgaatgaacttgagatgtattacaatagctgtgtatcgcgcaggttatccaaaaatggcgaaaggtggtgtatgttggtaattgggaaatagtcacgccattagccaactcgtgttaagcagaagtcgattgcgttaagtgattgttatatacatgttgtgtcttggatttcgataataataggctagtcgacaagtatgttgtatagcggcctaggttgttgccttggttaaccaactt

SEQ ID NO: 116663 - DNA, 518 bp, Zea Mays
gttctaatgatcctatttgaagttccctacatgtctattagtggggatgctccgatgaatgatgtgtttatcttgtttgatgccaccttagccaccaccatcagaccgatgtggctaggtctgatgctatccaaaatattactaaagagctattaagggctctacttcaatagttcgatgtcctgcgaacaattatggtctaacgcctctacaagatgaatagtaccattacatgtttgatgctttcactacttctcattcaatgttttggtctgatgcttcttttcattgccggttagggttggcttcaaccgtattgttcgacaactccctcaggatggtccgacgctttggtccaacgcccttcaaacttttctcctgcttcgtttctttatgatctttatcttcggcctggtttcatcgtgtgtcttgaacttttgcatatagttatagatctttattaagtctttaatgtcttgtttgaggtgttgatcatcttgaacaccactttgccttcg

SEQ ID NO: 116664 - DNA, 1102 bp, Zea Mays
caacacaacatgttggtggtaatgtgaatcatggattcggcccgaccattctgaggggtggtgtaggggtacgagagtcgcagctgaacaccatgagaatggatgaaggagcaggaggagtcatcgaacttgtgatcattttcacactggagagcacaaatagggtggtcgaactaggtggagacctaagcaaagaagtgcaagagagtggtgaaagtgtcagatttcaaacgcagtgggaaagtccaaagaaagtgcggaaatcatctagaatcaacaagtaatatttataccccgagaggctgaaaataggtgatgtccacatatcacggtgtttaagatcaaaagcttgagcagcccgggaagaggaaccggagaaagggagacgagcatggcggtctaactgacaaacatagcacagactatcaaaatggcccctgctacaagagatgacatagctgctagacaacctacatatgacatcggacccaggatgttcgaggcgactatgtcagatggtggatgaagtggtggtagccaaggcatgcatggaggaggtggtggtggaggatgcgtgtagccaaagagtgtacagtggccccatatcgagcgagaaggaccttggtaggcaggtccttcatagttaaaccaaaaaggtcagactccatagaacaagagttgtcggtggtaacgaacaaaaagaagattctagatgatgttgggagcaacaagaatgtttttgagatggaacggtcccaagagaatcgagtcacctactgaggtagccgggagagtggaactgttccacgcaatgatagaggagggaaaagatgggtaagggggatgggattgagataacgtgttggcatcaggagtggtatgggaggaggcatcggagtccgccacccaatctggtgtcgtgggcggggtgtcaatgccatgatgctgaacgagccgacaagagactgctaatcccaaccactgtcccatagagaccaagtgggcgaggtcagagtctttgggaggaaaaggagaggcggaagcgacaactgttgctgaagagggggcattatagatggaggggcaccatagatggaggggc

SEQ ID NO: 116665 - DNA, 636 bp, Zea Mays
tttgctgtgataactgcgcatcaacatatcatcaatcttgtctattggttaaggtattctaatttctcatgttatacgattttcttaaataatttatcaagcaatgaagtgcaacttgcctctagccgaatcttatatttggcattctaacttttaagggaacaaataatgtatattgatggagcaaatttcttcattttggatgatgtagccatgtagtatgaacaaattgcattcttacaaatgatttagctaagttatcctattacccttctttctaatgttggagcacctagatgataggtggtactgccataactgtatatgtcgtgtttgtggttgtccacttagtgaaaaggcttacttccatagtgtcatcagcatagtctcaagcgtagaagcttagccgatgccgcgatggcttggatcgtgctgtttagtctgagtgtctgttgtgaatggaagcagatctcacacttgaacttgagtgccttccaatcccccaattcaagttaataatctctatggcatttttcatttcaggtgtattgggttaacaatctcacctaagattgattcttttatagctttttggtaagcgcatggagctgttgatctttgtcaacgctacttcag

SEQ ID NO: 116666 - DNA, 308 bp, Zea Mays
caccaatcgcgtgcgccagtacccctcctcctctctggccgccgcgtgtatctttcaaattcaccggccaccgctcaagagccctataaattgagcacaccctcggctccgttaggtattacagcatccaatccacccgctcgtgcctccaattactcaccagagcccgcgaattgctcagttcccccaattctgttttccgccaccgtgatcaagctctcaccgtggtcagtgcaattcaagtccggtcttgccctctactctcttgtttcagcactcctacataccattgatgctcctcgacccat

SEQ ID NO: 116667 - DNA, 541 bp, Zea Mays
acaattggaacgaatcaatcaggaaaggcttattggtgtcacatcagcgactactacaatgaacacaagaagacagctaatgctaggacacaacactccttggagcacaggtggagcgacattcaaagggacactacgaagttttgtgctgcgtacgacaaagtgataaggttgaagcaaagtggcaaaagcgaagacgacaaggtatacgaattcgtatccttttcaaacatgttagttaccatgtaaacaacggtgggtttaatcaatctaaacttacaggtaaaagatgcactacagatgtttgaaggcatgcacaagaatcagtttaggtttatgaactgttggtacatgcttcgccgagaggtcaaatggacgacctggctctcaagttgtgaaactccacataataatactgggaatgtcaacgtcaacgaaaccgggtcctaggcgaagcagggggaagacgaatttggttcaccgtctgatacctttgtgcgaccaatgggtagggaccgtgcaaagaaggctcgtagtacca

SEQ ID NO: 116668 - DNA, 421 bp, Zea Mays
cgtaacataggtatcataatccacggttagaaaagctgcgcacttcttggctgtcgtatcatggtaaagattgttgggtgcatcattagctcaaggcctaaaagacgatgtctgctagtaaccactgaagcccagcatattcctttcgctccggacaaaagcatatgttgataccaattcaacttcgtcgatcaccattaattagtatgtacatatgtgccaaatctaccaagtgctgcggctttattcaccattcatacttcccgtaaacatgtttttgaagtgtgctactgcttaagtactgtgacatcatcaatggacacaacttgaatattttcatatatatgaggagatacataatccaaataacagcggatatatttctgcagtactatatatgtatttcagtatgccttaggat

SEQ ID NO: 116669 - DNA, 474 bp, Zea Mays
cttcgtccttctcttcagtctgcttcgaaggtgttccgatgccgaagctcctacaacgcttaataacatatcgacaaccaatggttaaatgtgtttttgatgaccttcgaaagaagaaggcccccaacagcacgcgtgatgaatgagctagcaagagcaaggcgagacctcaagacttgttcagcaagactataaaggaaaaggatgacaatgaccttagtcaactttgtagctcatatgtataggataggtttgagggcatgattgtattttttatgaggttgtacctaacgactataaatagggcatgttaccatgcatacacaagttttttggctgaggagaactaactcgctcagcctacgaagttatatcatgttcttcctttgtattgttattcgccgagtcaaaggtagaactgtaatcatttgttatatagtaaaagatggagagaaataatgcttaattgagatg

SEQ ID NO: 116670 - DNA, 398 bp, Zea Mays
aatccatatttagcttcaataccacatttgcatagtactggatcaaacttcaactcttccgcccactcattttttcttttcctttgcctctggctctggccaatgggacataggaccatacaaccactctatgaaatgacacttacgccacccgtatggctgcaggagaataatttagtacatttatgcaaaaaataataaaagtttagacatttgttatgggctcacataatcaatgttcggacacacgaagtgcttcgcagtgtcctcgtcgatgacatcacgatctccgcaatcgcatcgaggcggcgagtccattcgtctttctgttgctacctccttctctgcatccgtcattggtggagaatttaggggaggaggtacccaacgcttaaaac

SEQ ID NO: 116671 - DNA, 362 bp, Zea Mays
cggaaatcaggggcagtaagattagtgttcggtggggagattagcagtgactcacttcgaatggtggatcgcagtgactcgagtggtggatttgagacagttgttatactggttcagggcttgcgccctagtctagtgtagtgctgatcgtagtattgctctgagcgtgttacagttggtgtgctcgtgtgttcaaaaaagaggggtccttcccttttatacttcaagggatggactatacaatggggactttgtattctgctggggggtgctcgaccgacggcccttggggtagcatggttcctctaatgttgtccatagggtcgtgcttagtcgtactcccattatggcgtactgcctcg

SEQ ID NO: 116672 - DNA, 530 bp, Zea Mays
acaagcttggacgccaacagttaactcatttgatgccatcctgcggttacatgttaagatggtccgcacgaccagagctcttaaagcctagagacgacgcacggtgggtaacatcaaagtgcagttggctatcattcagatcgtacttaccatgctggaaaaagctcaggaaaatagaggactatcgagggatgagcttgactttagaagaaagttaaaaatcaaaattctgggccttgcgggcatccagatatcaaatgctagacaacactctagacagacttgggtgcggttgggtgatgtgaacacaaaattttttcacttgatggccaatcacagaaaaaggaaaaaatttatcagatccttaaattgtggaaccagcatgttaactagccaagaagacaagctgcaagaggctcatcggcatttccttgagattctcgggagtagaggtgagaggaacaatgttattcattgggaaaacctgggctactctccttttgatttatctgatatggacgccatgatca

SEQ ID NO: 116673 - DNA, 441 bp, Zea Mays
ataaaaccatcagttgccaagccgatacgaacgtttcttgcatcgctcgcaacatctgggtcaaagttgtcaagagccttccatggatcaccatctgacgggtgcaccattaacccatcttgtctattcgtacaatctttatgccacctcatgtgcatagcggtcttcctcgagagaaacaaatgtttcactctaggagtgagaggcatgtaccgaagctgtttatgtgcaacctttgtcaccaccttctccccatcttcatttacaagctcaacgtacctcgacttcccatattttaagcatttctgctctctaccatgttccttccaaaaaagcatacagttgtcctaacaaacatcaatcttctcatactccataccaagaccttcaagcaatttcttagactggtacatgtctttgggcatcttgtgactcgtagaa

SEQ ID NO: 116674 - DNA, 416 bp, Zea Mays
tgtatattgcagtgcaggaaagggtgattggtgttgttcttatacaagaacatagcgggaaggagagtgtggtggcttatttaagtcgtcgcttgctggacagcgaaagcaggtatgcgtttatcgaaaaactttgtttatccctatatttcgcgtgcaccaagtttagacactatttactcttaagtacttgtatcgtagtgtgtctaacagacgtgattaaatatatgttacagaagccgattcttagtggttgggtcggaaagtgggcatttgctttgatagagtacgatctaatttatgaatctttatcttctatgaaagggcaagttatagctgattttataactgatcatagggttgatgtagagcaggaaatctcatgtcttaatgcttgtacttggcaattatttttt

SEQ ID NO: 116675 - DNA, 497 bp, Zea Mays
aagaaattaggttcattatttaataggcttgagacatggttccatttcaatcctgtaacagtacttagtaacagaccctaaaaatcctataaaaggggcaggaaccctccaatgtagtagagagcttgagatatagaaaagatagagcttggttgtgaagatcaagcaaggtgtgtaagcatatagtgtacaaccagaagcctacaacttgattcttaacgcaatcgttacatcgtatacaaccaggaataagcatgatcagatctatatactaccagtgttttattgtccattcaaacattttttctttcaaatgcaaaacattttttcttcaactttgtgagtttctattcaaggagtgcatgaaacttgaaattcttgaatcctcctcggtgcagcatcttcaatattgacatttgtagtccatttttgtgtgaggtcaacctgagttttgagtttcaatagcagtatgttcaccatcattatgtgacttgatc

SEQ ID NO: 116676 - DNA, 358 bp, Zea Mays
aagatagctcgggtccgtggatgtattgaccgacggcccagatcgatcgcgcgtctggaccgcacgatttggatccaagggtagcgtcgcgtgcattctgtggtgagcgtgatctaatccggacgctcgattcatcatccgacgaccagtgttggctgataccccttcgccgatcgcttttgcataagagaccttgggttattagaaaaccaacccgcagtccgcactgtatagtgctctgagtcttagaaattctttcacgaaagcccctgcgctttacagaaaatgtggcccagtccagaggattagaaaatcagagaatttaatttagaaatagatttttaatattacattaatt

SEQ ID NO: 116677 - DNA, 1586 bp, Zea Mays
cgcgctgcgaaggttgatgtctcttgcatcgaaggttaatggtacgtgagaccactttgtctgaacgacgggtcctatgaccacgacatgattgaccctttggtagtgatcccttttttgtcatttgttctcaaagtgtgagctggaccctccggtgatcatgtgaatcactcccctgaagggtggatctgcgaagtcttcttgctttggtggtggcgggtggtaggtgttggtttggatgctgaggcagtggaggtggcaacactagcatttcttggtgttgaaagtgttgttgctggtgaaagaggttggggttttgctgctcggggtaataggggtgttcgttttgatattgatgctggtggtattgttggggttgataggtatgagcgatgactctttggttgtcaactggcgccgacctggccatttggttttttgttgctttggtctctaggaagtctctggttgggtgtgctgagtctttgccatggaaaagacaatagaatcttctctgttgttgaggtcctcggcccctgcctctgcccctggtcgcgttgccaccgcggccttgttgtgtgtgggggggtaatcttgacgatgaggggggttctctcctggttgctgctgatttgcaatattgtgtacctggagctaggcacggtcatgtcgggccgagtcctgctatgaaggcctgatccatgtactactggattgcggggtctacttaggttttcgctaagactctacttttctttggtggatctcttctgattgggcatacttttcaaagagctagtacaactcctgcaggttggttggtggatcccttatctagtggctgtataaaaagcatgcccgaaggccgctgattgcatagtggatggctatgtggtcatcaaccgaaggcagctgtgatttcaacaggagaaactttttgtaatattcttgaagactttctttctcttgctgcctatagagcaagagttctgccacggcgtttgtcttgggtttgtaaccttgaaaatttagcaggaatttgtcgtggagtggcttccatgaatcaattgatagtggcagtcgtattgagtaccatgtgagaactgggccctcgaggtctatgatgaatgacttggcaattatggcgtcgtccctccagatgatgcgattgcaacctaataactcatgatgtaatgagttgggtctgcactgccaaggggaggcctgaagctgtggtgcaagagggttttattcatcaaggtaatttaacccttagaaggcagatggtgcgaagactagcatgtgaggtgacaagggtttatgttgagtgcggtggcctactcctgctggtggaggtcctcgccctgcatttccgcgatttgttgttctagctctctggctttctgctcttcttctaggattatctgcttgactttggattgcatgttgatgcgctagcgcttggccgcgagtatctccttctgtttttgcaggtgattgtttttaatgcgaagtgctcgtaactttagctggtctttaggtgagatgtctaggaccttgccatctgtcggtgtttagagcccgac

SEQ ID NO: 116678 - DNA, 875 bp, Zea Mays
ataaagataactttaaaagagagtattcatcatctgacgtgaagactatcttattacaacaaggcttaaaattttcagagcagcctggtgatggatccgggttccctatagcaaatcctcttacggggcggggacaacgccatggcggggacctgggcttcaggcggatcccatcttggaagttgggcttccagggctacaatcctggcatgggcatcctccagctccaagtgcaccctagagagatccagggtggcactgtccaggtcggtgttgagaccggccactacactagctagggtgttgaggcgatcctcaccagcttcacctaggacgatgctggtctagcttcctccactcagacgcagaggaagatgtctgaacctcgtgtcatgcagctgctaccagtaggtgtggctgagagaccacagggtccgtctggaagcatcactgaccgaagtagtgtaggtggatagcgatgtcagggactcatgagctgacagagtcatgaatcccctatcctctatcccctgcatccatcaccctaacgtggatgcgagtgatgtagtagcaagcccggggaggctcactcactcgccttgtttcgtacagggggcggacgtaggttcctaatgcgtgcagcacatcttgcaacaggttggggaagtgccccgtctcgaacattgatgtgtaatgtttggtgacatgaccaaaccccatgaagtagtcctgctgggcatagttggcctcctcattgacttgttcctcttcgtcctcctcgtcgtcgtcatcctcatcatagtcatccctagagtcgtctgggtcatcgcctccgggtgcaggagcttgaacagctggtgcaggcggtgccgagg

SEQ ID NO: 116679 - DNA, 517 bp, Zea Mays
ccggtgatgagactcaggtaaactccaattggccggctccgagagcaacagggggctaaaaacaagcaagaactcgaatcaattgggtatgcactaacccgaggagtgctagccacggaagagttcttcacggcggcggaagaaaccggttcaggggaactccgttgatcacagaggatgggggatagaacgtgatggctagtggctggttggattcgcaactgaggaatgaagagctgggcttggttgatttgagacaaacaaagtgggagcagggtggatttataggctccgtgagcatcgcgacggtcacggtgataaccatcaccggaccctgctggcgatcaacgacgacaccgagcgtggtgcttctcttagagcttgccacgttcaaccacgaccgtaaagcagtcaaatcggtgatggcgtggacgaacagaggagagcggcgccggtgaccaagcatggccggaaagatcagtgaccgcgtggcggccggaataatcacccccccccc

SEQ ID NO: 116680 - DNA, 571 bp, Zea Mays
ggggccactgcctagtgaattgggcaacattcataagaccgaaggacttggccggtttagggataccagaccttgataaattcggcagggctttacgcctacgttggttatggcaggaatgggtggacgataccaagcattgggctggcatggataccccgacggacgacactgatcgagcacttttcactacctcaacaagggtcgtcgttggagatggccatagatgtcgtttctggcatgacgcttggcttgatggagaagcgtcatgccacttagctcctagcatatttcgatatccaggacgaaaaacggatcggtgttcatggagctccgggataaccactggatcaacacgttgcgaggacgaatcatcactgcaacctagatgcaggagttcatctccctttggatcagaacccaggacacccaccttatgcctggcttgagggactccattctatggagatggacggtagacggaacatactccgctcgctcagcttaccgtgtccagtttagaggctcctttaggcctttccggtccagcctaatctggagagcacatgct

SEQ ID NO: 116681 - DNA, 458 bp, Zea Mays
tcagaggaatctttagctaacatatccagcatggcacttatctctgcatcactggggttcaaaggcacctcaaaatgaacctgtctctcgtcgtcaggaatttcttccagtgaggcaaccaaagcattaacttcttcgggagagggtcgcactctaaggcccaaaccactatcaccgggagcaggattcgacacaaaactggtaaaaggcttggaaggaggcatattgcaggctgagtacgcacaggagcgctgatgttcgacaccttgcctctgagaatcatttcaagccggctcaccaagtccacagcaaaaattcttctgttggttacccgggttgaatcagacaggcctcggtacagataggacggatacgctctgtctttcagtggctgaatgttcttgaaaacaaagtcagcgaccacagcttctgcagtcagacccctttctttcaacaat

SEQ ID NO: 116682 - DNA, 311 bp, Zea Mays
ttttgataccatttccgatacaaaaattccgataccgattccgtttccgaataataccgttaccgttgaaatcgatcgaaaaaaatcgaaaacggttttcgggattccgaaaaattctgcaaccattttcatccctactccgacaatttgctcttctggtagttgtttccccgaagcatgctgaacaatatattctaagttaccttgagaagatgcttcgggtagaggtgatgttggcttttctggaagactttccttcactagctctactggtttagttcccgaaggtcctgcttcaacgtgaataagag

SEQ ID NO: 116683 - DNA, 287 bp, Zea Mays
atgggctattttgcgtctggtgtgttcacggtaagttcccatgcccagtttgcaaggaagctcttaggttcatttggttgaagaagggtggcaaatattcgtcattcgataaacatcgacaatttctccctcctgaccatgcattccgactagacatcaagaactttacgaaaggtgtcgtggtgacagacggcccacctgcaatgatgactggcaccgaagtttgccaacagatagatggtctcgtggccaacccagaaggtggttttgtgggatatggtgagcaa

SEQ ID NO: 116684 - DNA, 611 bp, Zea Mays
gtattacagcaatatctataatctgaaacaaatcttgccctagagctgaacagtccattccaatcctataacaagtacttccaatctgcgatgaattacttctataacaagtaaatgaatatatgatcccagaacatgagcactatatccatagtcatattgtatcagctccaaaagagcaccctgcacttgtatattccttcagtgcaatcccagcctcaacatacttgttatccaccatctctagcttcatgtctacatttgaatattcaggagccatgtattacagcaatatctataatctgaaacaaatcttgcactagagctgaacagtccattccaatcctataacaagtacttccaatatgcgatgaattccttctataacaagtaaatgaatatatcatcccagaacataagcattatatccatagtcatattgtatcagctccaaaagagcaccctgcaattctctagtccttcagtgcattcccagcctcaacatacttattatccgccatctttagcttcatggcttctagtcgaatcacacctccacgcatttgttgacatcagctatccacatagacaggtggcccaatatttgagtg

SEQ ID NO: 116685 - DNA, 622 bp, Zea Mays
tctgaatgctcttttgctcgcagaaatcgaagaattctgagctggtgaagttggatcctagatcagttatgatgctattcggtatcccaaacctgaatattatatcctatatgaattccactgctttagctgaagttaaagaagcaatgggtttgaactctatccatttagtgaatttgccgatagccaccagtacatgagtgtaccctccttgggctttcttgaaaggtccaatcatatctaatccccagcatgcgaacgaccaagttatgggtatggtctgcagctgctgcgccggtagatgctgctgttttgacaagtactggcaggcttcgcacctctgtactaactcggctgcgtcactcttcgctgttggccaatagaaatctgacctgaaaaccttcccaactagggttctggattctgcgtgtactccacattgcccagcatggacctcatccagaagttgttttccagtagctgagagaatgcatttcatgaggactcctgatgcaccccttctgtatagtgtttccccaatgagtgtatagtgagctgattgtcttgcgatgcgctcggtcgtattcttgtcatctggctcctcctcattttttatatattt

SEQ ID NO: 116686 - DNA, 580 bp, Zea Mays
ggaaaacaatgcattttaatgggagaagccgttgcgagtaagtgcatcgactctaagagtgaggtagggagaatgctcacccaacctctaagatttgaagagagtagaacgaaaagtagacgcgtggatcgttaatgtagtcttacatcaatcgatcatggatgactttgcgatcctgatgaatatagctccaatgctgcctatttaactttctctttgttgaaaacctgaaagcaaactttatcatcacatccatcatagtttgatgcaagatatcgagcatcttgccttcaacaacagtttagtggagtgaaacaaataagttcaatatgaattggtaagagcaatttaaaaagcgagagatgtgaacaaacctaaacacgtactactatttatagatcaggttccaggattttttttatttttttcttctaaaatttaaaataacgagaaccaatcaaaaaaatgttgcatttaaaatacgagaaccaatcaaaaaatgttgcaaggcaacatacagtcgactcaaaccgataaagatcagtaccgaccggttcaacaacgcccaaatcaacaccta

SEQ ID NO: 116687 - DNA, 530 bp, Zea Mays
catactgctttatatgtatgcccgaaggcctaaaaacatcgtctccactttttcaagactaacaaagatagtactagaagggcagttggggtgcaatgtctttacttatgtcaatgacatagtcgttgcgagcaaaaataaggaatattacaacactgaccttgtagaaacattcacaaaaatgcgcgaagccagacttcgcttgaaccctgagaagtacatacatggagttcgctagggtaaaatcttgggctacctcgtgtctcacagatgtatagaagccaatccaaccaagataaaagcaatcttggacatgcaacctccacaatcaacaaaggatgtacggagaccgataggaaggttggcagcgttgaacagatttaactttcagtccgcacaatgaagcctacctttcttcggacactacgaggagcaaaggacttcgtttggggcccgaataagcagcatcctttgaatcgctcaaggcctacttactgtagcaacaactcgtatacttcgtctctgaggtc

SEQ ID NO: 116688 - DNA, 594 bp, Zea Mays
gcctttgtcacctttggtaattctacctccatcggtgggctcagaatttttggcagcatcactattttttctaactctggttctttggtcacatcatctttggcttcggctgacccgactataggcacctttggcgctgcagtcgatccttcggcttcagcctcagcgggaacagcttgattcgcttcgacagcggaggaagccccttcaccaaattcaggcactacggtcgtttcaatatatcatggctggtgggtcagaaccttcattttcttgcccttcggcactgcagtggtggtagaagcggtagtttttctcttttttccttgcctttgcagtgggtagcaataatcagggtatatgaagccaattgcatcaaaaaccctgttcaatcttttcttgccccgacccccgaaggccgaggataaagcatcatctttggctctggtatatgtcccaagtaactcgtcgctaatagcctcaatacttttcagccaatcgtcatttggctcatcaaaccggtccctaaatctgaaggtgtatttcaatcgaactaaaccatcttcagcggacccggcagcagtatcattcggc

SEQ ID NO: 116689 - DNA, 407 bp, Zea Mays
ggattctctagtatgaaggatgctagaggattgagtagatggctaatgagtgacctgaattttgatggagtgccccctaggccttatatactcaaccatggggcgttacatgcgggtatgataactatgtgctcctaagtaatagtgaaccgactgaacttatctccctattatcctgccgacttatcctcgttcagttcgatgtctgagggcgctgcgcggaagagtcagatcaatgctgcggataacgtttaaatccattaagccgcctgggctcgagttgatccaatcttgcgtcgatccattctgccagtgattcctcccctggcccacgaaggggtggccttgcgaaataatgggcccagagtctttcgcgaggccttccagccttctagtggacccggggg

SEQ ID NO: 116690 - DNA, 339 bp, Zea Mays
tatgcttactgcgatcatgaaaaacaggatttttacttagctcgattgcagattttgttgtcgatgttgagggtgaatatatacgcctcacgtcctctgagttcagctagcagtcgaggcagccacacctcttgacagcacgccgttgctcctgctatgtattcagcttcacaacttgacaaggctacgaccttttgcttctgtgactgccaggtgatcaggttctctccaaggaaaaaaaggactcctgtggtactctttctcccgtctatgtcagcaccgtgatcactgtcactgaaaccagtgaggcacacttctcctctcttcctctggtagctg

SEQ ID NO: 116691 - DNA, 519 bp, Zea Mays
cgactttgttaaagaagccgaagagaaagttgccttgatccacaggaggttacttgaagctcagagtcgacagaagagttacgcagataatagacgaagggaactcagatttgaggaaggagatttcgtttatctcaaggtctccccaatgcatggtgtcaaaaggttccaaatgaaaggaaagctagcaccacgtttcgtcggtccctaccccgtcattgcctgaataggacccgcagcataccgtcttgagctaccagaatccatgtcagatattcacaatgtgttccatgtgtctcagctccgcaaatgcctaaaagtaccagaaaaccacatcgaggcagatgcaattcagattcaaaaggatctccagtatcgagaaaagccagtgaagattctcgactcagcagtcagaaggacccgcaactcagaagtgagactctgtaaggttcagtggagcagagatggtgaagaggaagccacctgggaaagtgaggattctctgaggaaggaataccc

SEQ ID NO: 116692 - DNA, 375 bp, Zea Mays
gacacttgcttggcaagcatctcctttcttggcgcttgttttgttcatccatcctcaagttgtcgaccgattttgccttgtggtcggctccactttacgccttcatttcacacgatcaacatctctaatgagatgcaagatgcatatgtatgaacaagatggaaaatagcacaagacactctaaggcacatggtagcgaactaaacattaaatcgtaagacaccgtaaacaaccacacactagcattagctatctacacgtcatcgagcgcacaacatcaacaccatttgaaggacgatgattactacctataattaaccaacgcaaacacgacatcacacgtgcaagaatttaccacattcactttaatcattt

SEQ ID NO: 116693 - DNA, 527 bp, Zea Mays
cgaagacttcgttgatgagcagagagaaaaattgctatgtgttgccaccgttccaatttggaagcatgcagtcaccgaggcgagaagaccgtgcgcaaggcgtcttcgagcatggagaaccccaagaaacaacaggaattgctcggcggagttcgttcttcatcgtcgccaagctgctgcgcagacgatccgtcctccacggaggtttgggggcgccaccacatatttgcttctggtctgaggctttgaagaatcacggatgcataaggatcatacctacgacgttgttggggatcgagaattgatcggtgaccaggaaccgctcaccggcgttgttgcacctccccggattttcggagtgtcgtggacagagctctacgttgcgtctacataggtgagtacctgccagtcatgtttgcctcgtcctttgcttcgggtagcaccagtcagctcggagttgggagcccgggaccactgtgcagggcttcgccggttaggctccgtcgctcggcgtggtggcgtcgcca

SEQ ID NO: 116694 - DNA, 524 bp, Zea Mays
cttttttggtatagttccccaaaatttcattgcacatagtttcaatcatttctagccattcttggcaaggctctttaaattgtttctcaaacttaaaacgataaggcaatcgaacaagttcatatttcttctttgttccctttagcttcggcatgccccaatcacttaacgtcggagatgtcctgttggccaggtattcttccaccaggtccctgatgctgatttgttcagccaccaccctaaattatactgcagctagctggcacgctaaccctggcttcatgttgcacaaaggtctggtcattccgaagcttaaagccagcaggcacatgaccatcgtcatcagttccccctcttcttctcattggccttgacataaaatcattcactcttccagccggttggccatttggtgcggtagctaagaactggagccttcgtatccttgcgatacgcgaaattatagcagccaaaattttcatgcagaccgtctgccctggccttcgtttggtagtgcaactcat

SEQ ID NO: 116695 - DNA, 341 bp, Zea Mays
gaatactcttcactggagtcatgatatggactccctgggtcatctaggttcggaacttcatctaccaattctgcagggttaatgtgtccaatccctccactttgtagtcctagcttcttagccctgatattcctcttcacctcattggcatattttctgaaatcaattgcttcatcatcttcccctgaactgtcatcttcaatgggttggaagtagtctttatctaatgattcagtttcagtgtcttcctctttatcttctactggaaattcagcaaacctattatcttcaatttgcttgctgctgccaccatcttcatcttctacaatttgcttacccct

SEQ ID NO: 116696 - DNA, 346 bp, Zea Mays
aactaagtcggcatccatcccttcagattggtggctgctatgaagttcacgatattgaggatcttgtcagagttggacagaaagcaaaaggtacataaatatcttttagttgcacttgtttcctcctgaggatagtctcgctctgatctagtcactggctcactgctgtctgctgatacctattcgattatctcttttcctgttattggcaggatgtccgtattttgctgcacaacacatggcagaagcagcccaattggttttctgcccatataactacctgattagtccggttgtcaggagagcaatggacatcgatatcagtggttccatcattattcttgac

SEQ ID NO: 116697 - DNA, 571 bp, Zea Mays
gtgatatgttgattacgggtttctcatgtgaagcaacaacttggtgagcaatttcagatgtctactttaggttctctcagctatttcttaggcattgtggttaaacagtctactagggtataatctgtctcaatccaaatacatacaagagcttcttgattgttcggctaccacacccatgaatcttcactttcaactttgtcctactaatggtacatctcatgtggatcctccctctagatattgattatgggcaagtcttgtttatctcgctgttagagacccaatattgctcatgtagttcatattttgaactaatttgtgagtgcttttccattcattatggaatttacttcgcctagtgctgttagagacccaatattgctcatttttttatgctcgtaatagtctgttttatcttgacgctagctcggactccacttgtgtcttcgatatctgagggtgaaattggatgggatctgtccgtttctggattggggatgtattttatttatgcttcctgtttgattggatggatgagacgagtcattgtttatctagttggatggaa

SEQ ID NO: 116698 - DNA, 423 bp, Zea Mays
gggaggagtgtgcggggccatggttattatgtggtgattttaacctgattttcaaataagaggataagaataattccaacataaacaggacaatgttgggtaacttcagaggtcttgttaattccttggagctaaaggagattcctttgattggtagaaggttcacttggtcgaatcagagggatgtgcctacccttgtgaaattggatcatgttttctgcactacagttgggaagattattttcctgattgttctcttcacagtaatgctacctcagtttcggatcactgtcccttaactcttaaagtcagagaggtgtgcttgggtaagagacagtttcattttgggagtttttggcctaagatccctggttttttggaggtggtggctgcattgtggaatcagctattacaggattcttg

SEQ ID NO: 116699 - DNA, 303 bp, Zea Mays
gtcgggatgtgttgggtaaacccacaataaaatccatgctgagatcctcccatttccaagatggtatgggaaggggctgtaaggtacctgctaccttcaaatgactggccttgactctttggcaagtgttgcattcagatacatacttagcaatttccctcttcattctggtccaccaatacaaagatctgagatcatgatacatcttgttactgccggggtgcatggagaatttggaaaggtgagcttcatccaatattttctttctgagtttaggattcttaggaataaccaatcggtctt

SEQ ID NO: 116700 - DNA, 510 bp, Zea Mays
caagataaccgagacgtattcgcatggcaacctgcggataccgagagtcccgagagaactggccgagcacaaactgaaggtttacccccaggcccggccgatccaacaaaaattacgtcgtttcacgcccgacaagagagaagccatccgtgcagagctggctcgcttggtcgcggcatgattcattagagaagtgttacatcccgagtggttagcaaatcctgttcttgtactcaaaaagaataaagtggattggcgcatgtgcgtcgactatacggatctcaacaaacattgtccgaaggatcccttcggacttcccagaatagaccaggtggtagactcgaccgctggatgttctatgttgtctttcttagattgctattccgggtatcatcagatcagcttggcaaaagaagacgaggaaaaaacagcgttcatcaccctgttcggggctttctgctatacctccatgccgtttggcctcaaaaacgctggagcgacttaccagag

SEQ ID NO: 116701 - DNA, 713 bp, Zea Mays
tgaagttctgcgatctggagttttagttccgctaatttggtgggagccatgcggtatggtctctttgcgatgggtgcagtgccgggaattagatcaatgtagaactctacttctctttctggcggcattcctagcaattcttctgagaatacatccatgaattcttctactatagatatgctttctgctgctaggttaaacaccattggatcctaggcgggtggctgagcctgacatgaaactgactttccttggtggtcagtgagaagaacagtcttatttgcacaacttatgatgcccttgtgtttggttaaccaatccattcctaagatcacatcaatcccttgggatagcaagacggtaagtctgcaaagaacactaccccacttaaaagaattctgacttgggagcatttgagctagcatagaaggtctgaccctagggtttgggtgaccaagggaatttctaggtgtgtagagggaatgccatgcttttccacaaaactaatggctatgaaagaatgagatgctcctaaatcaaaaagtacattagcgggagtaaattcaactaggaactcaccgagcactactcccggagcttgctgagcctcttgagcgtcgacgtggtttactcgtgccctgccatgatactgggtcttgctctgctagctgttggaggagggtgccttggaggcgggtgctggggcattcttg

SEQ ID NO: 116702 - DNA, 463 bp, Zea Mays
gtgagttactacatagaaattggagaacaaagccatgtaattctctttgtcacgcactctaaagagtgtttgcgatggtacagtaacctaaataagatcgcgggttcagtgtatctcgccgccgatgactccgcgtcgtgatcctcgccgacgctatgattcgtgcccagtaacgtgcggataacgactcctggtgaaaagatcttgtcgtggatgaagtcggagcactatattgccctgtcgccgtacccacttgcccggcgatgtggccgcacggtcatcgccgaggctgccgccattttccccggttgcaccacgccttcggtagtttaccacgtcgctttgcaccgtggaggttaaccagtgatagccatccgcctatgtccagtgaatgccacgatagaacgccgcggtgactcagtccctcttctcggccgccagcgcatcttctcaaaattgggcg

SEQ ID NO: 116703 - DNA, 293 bp, Zea Mays
gacgacgtgcttagcctgctagtcggggaatcgtccgactctacccgcaccgagccgatggtcatcacgactggacaagaatttggcgtagaggtggagatccggaaacctgaaggtgcctgcccaaagcgttcacgccgagtgaaccacccggctgcacctgtcgaattgaagaagaaaaatcggcgactgtcgtgcctagatcaagacgctggcccttctgtgccgatcctcggtgatgtcttggtggacgccattctcgaggttaatgtcagaggttgtgatgatgtgcg

SEQ ID NO: 116704 - DNA, 320 bp, Zea Mays
gtcctagtgggtgcaccatcatctccaggagataatatccacagaaggtcgtcaaggcctttagcgctgcggccttagtggtgtcgtccgctctgaacctgacagtctcggaatcaagggaacgccacccaggctggagagggtgagactccagggttagccaaaccctgcaacgtggcacccgatactccttgtatagttgcaccgtgtacagagggggtgtggggtatccagcggagcagagcacctcccacaagatagagggaaagccctcgtgggaaaggtaatcaaagctgaagtgagcgtctccaccattggcg

SEQ ID NO: 116705 - DNA, 554 bp, Zea Mays
ccgaaggtcaccgcatcgtcaacctcatcatggtcgaagactggcgggccacaataactctgtacctgcaaggccactaccatccaagcgatcgcaatgaggccaaatgactaaagcacagaagtcgggacttcgcattagtcgagggtcagctatacaagaaggggattagccattccatgctgaagtgcataactgaaaccgaaggcatacaaatcctccgcgaggtccatagcggaacttgtggctcccactcaggacccagggccctcgctgccaaggtgatttgttagggattttactggcccgcaataatttgtactgccaaccgagtcacaaggtcatgcgaagcatgccaaaagttctcccctcgcttaggcagcccttcgcaattcaccaagctcatcgcccatacatggccacttcaacgctgggggctggacatcgttggaccactgcctatagctcaagggaacctcaagttcaccttcatcgccgtcgagtatttcacaaagtggattgaggccagggcagtatccacaataacatcgaag

SEQ ID NO: 116706 - DNA, 276 bp, Zea Mays
gggaactaaagcatagtctttaggaagggatgtggtggccatcttgctctatgtgaaaataaaaagaaaacaatgtagaagaagtcaatatttggcatctactttactggatattagatgtctgccacacaattgatgtgatgaacctcacaaagaatatttgtgttagcctacttggtttcttagacatgtgcgggaaggacaaagatacactagaatcatgggaggacttgaaaacactaaaacaatgagagggcttgcaccttgatgagagag

SEQ ID NO: 116707 - DNA, 634 bp, Zea Mays
aaactattatctattgagctcatcacagattcacagttcagcctggttgcaactagttgcttggcatctgggtgaaactggtaaatcgttactaattctgttcgcttgggcttgctcagatcaaccggcaataatagggtatagggcagatgtgtttaatatgctttggtctgatctatacactagcccgtcttctcgtctaaaaactagccagtagcctgtagtttgttgattgatctttgttggcctgcccgatggaagggaccacatgggaagctggaagctagctcttgccatctagtcaaattgttgccttgccatttagtcaaattgttgccttgccatttcattgcatttcagatggaccggatcaatgcgggtgataaattcttgggccatggttgttgcctcctgagaaggatttgaattattgtcaagcctgtgttggtccgaacaaacattgtggcttcactatgcaaacagagcgaaaaagagcatggttatgagttatgacttatgtgatgatcagtaaaggctaacatgtattttatttggtctatcccttactaaattatatgaacattaacaggtatgtcttatgaacttatggtgtcaaatgatcttctgatagatt

SEQ ID NO: 116708 - DNA, 390 bp, Zea Mays
ccttatgggcgccctatcaccgattgtttccaaaatccaaacaccagaatgacaaaggctacattgcaattgcaaactcacccctgccccaccccattgttgccttgcggaggaaagataccgagaaagaaagatacagttagggattggagagagatttgtgtcgtctctctcgcttgcacagaagccaagcccacaaggaagccaaagtgtgggggtctctctcgcttgcacagtttcttcaacatttatgggcagaaagaacacgagcctgttctctagggaaaagattaagtgaactggcacataatgtattgatattggagagaaattgaaatgtgcgaaaataatgtcaagctgaaccatattgtaacaatttgtaggccagca

SEQ ID NO: 116709 - DNA, 1280 bp, Zea Mays
gtgaccacctccccatgatagacaacctggtgtttgcggagatggccagtggcgacgaggatctcatcttcaatgcgttctgcatggacttaaactcgaatttgggtccctctaagagcgatgatgagtagtgcccctggtgacaaggggaacgaggaccgtccgatcaccatggctttgtcgatagtcctggcaggatgggacgtcgcgcatggtaggaccagaggaaacaccggatgtaatgccaatggcccaagagcccgtagtagatgatcggccgaagcagatccacgccttctttgtaaaaccctcgaacagttataaataaaatgtgtcgtcaagaacactctttgccacaaacatggtaagcaggggagtgagcctcggtcgtaccttggtctcccctctcctgattttttcctcttttcctttcccttttcctcgttttccgttggtaactttcaggacaggaagcgtaccaagaaccaaacgaagtgggacgaacgaacaatggactcgacggaataacgagtggaagcaccgagcgcgaaaccagctatgtcgttttccctttttctataacaacgcactttgaatctttgcaactttccttcaaagagtcctaagcaaaatacaacatcgccccactcgtgctttgctgggggcaccctcaacgggaagggccctcaggacaacgtaactagagacctccgtggccgaaccttggggaaagcatcgggcggaatgactttgtccccatcttcgcaagaaacgaacctatggggtaggcaacatgaatggaaggacctgatggggaagctaatcgagactgtgaatacctacgcctcgaaggctattgtaatggtcactagtggaacttgcgggacccgagaatttgcgaacatctgtcccgatggaacggtcgctagcaaagagaaacgaaaaagcgcgacaccaaggactctgacgacgtttattaaacatatcactatttttacaatacccagcgaaaaacttattactccacttttccttctctaggaaactcgaaaattagcgaccacatggcgagcgtcgcacgttgggtcctgccaacgcccttaggtctttagagctcgtcgtgtgaccaaccaatggcacatccgaggcaggctcagccccgcttgtctgagtcctcgtcgagagaacgagcgacgatcgaggcatagaggaccccgagtcaaaacatagtggcctccagttcttgaatgcagtcggagatgagcgccatccagggagta

SEQ ID NO: 116710 - DNA, 578 bp, Zea Mays
tcatttatgaaagtgatgcccaaaataaggtgaacgatctatattttgtcacctggacatcacaattcacaacctattcatttgagtgcattttgtagccaatgcctatgagataaccatgttacaactttcttagacaccatcttggttttctattaactaacacaatataactttcctaattattagcttaggttcctgttaactagatcaggaaaattggtgcaggtgagacaaagttgattccattgcaaccagtagttacagtaatcaactataaaattattcatttgtgaagaaatatagaatcatgcttcatgaccggccacactcaattttgattgagaatacagagggagggatggagggagactaatactcttagcttacagatttccatattcaaaaagaaagaaaattctttggtcaacttgaatttgatgttttcctttttgacacattatgacgacaaacttgaatacaaaagtagaaggcattgagtttgtaataccacctcagaatgctctgcaaaccatagtgtaagcataatatgaacatttgaacttaagtgaaaaaac

SEQ ID NO: 116711 - DNA, 309 bp, Zea Mays
gtttggcattctctccatacttagtggtattctttcgtggtttcctcttcctcttttttgttccatttagcgaacacttgtagcttgtttctccgtgccctagctctccacatcttttgcactttctttttcctcggatcatttgtttctttgtcccccattcagcttctacagcagccacctttgcatcttttttgggttttccaccacctccaccctccaaacaacttttgatcctaagttttctctgtctaccagcaagccttttgtccagtggtgctccaacaacaaatggcaagtccacttcag

SEQ ID NO: 116712 - DNA, 1051 bp, Zea Mays
ctatggtaagatttttccaatttttgcatctaaaagagataaaattccatttcaactctaaggcattgaaccatttcgagtattgatttgactgatttatagtggttcaataaaaagtcggtagtcggtacaataaaaagtgtaacactctaatgttaagcacttaagcctccgagaacttggaagacatctgacttcagttcaggtttagcttttgaagcactacagttcaagctagtttgtaactgcctcaagacaccctagagtgttcaatggagaatggacctccataatgtctgcctacagtgaaattccatagaaacattccaatatggagccgttgaatatttcttttaccacacaatcataatgcaaaagcaaaaggatggcagaaaaaataggcataaaacagaaccataatgtcctaattgttctctacaagaatgtcccacaactgtaataagaatcccactttgataagtaactggctaactgcaattaaaaagtaatagaatattattattcatggttcattaactaagcttggcaactcaaaccatataaaagcactatacttgacccctaatagcatgcagttacaaaatgacagtgtgccttggcatctcactaataattactgtccaaattagacagtggttcaaattcccagccagttattgtttttatcctaatccaacctacaagtgcaaatcctattacagctgtgggcacatggtcgttcctccggtaaattcagcacaccgaatgcgacggcgagctttcagctctgcccacatagtgcctcgtcatgcactgcatcatcggcacccatcagagcatactttttcttaggatcatggccttcttgccgcatccttctggcaacatcatccagaaactctgcaatcctattctagtctgggtgattctggttatctacaataaagacatgaagcctaatgtttgagtaagatccaaaaaactacacacacttcatgatgtatattctgggtgccttactacttcatgtggtaaaacaaaaaagcttaaa

SEQ ID NO: 116713 - DNA, 274 bp, Zea Mays
cttgggtaattaatttttacttcaacccttctgctggaaccatacctatcttacccttgattattttctccacttcgccacttcgcgagtcttgccttaactctatccttggttatgattttcacgattatcatctttacccttgtcacctctatatcttaccttgatgcttatgttatacctgtcctttaaaaccttctcgcttccatctcaatttatagttgtattttacctattttcccttggtagtatcctcttccttgtcgcttgtgag

SEQ ID NO: 116714 - DNA, 336 bp, Zea Mays
cacaattacaaattgttttactttaatgacgttggttacttagtagtattagcagaaagccaaagacaggacattattattttgtttctccgaacatataactgcatgctaagtgtttattaagccaagctacttattagacctcaacaaaattagttcactaacttagtgagacatgtactacttacctgtatataactcaaattatattagtcactttcattattactcatgttcaattaaaaccaaaacaagcaagcagtcactcaagtcaaacacaatagagtagagcaatcaatcacttctaacacattaggacagcagcacataagttgc

SEQ ID NO: 116715 - DNA, 320 bp, Zea Mays
gtggaatcgctcgtccactggtcgttcggcctaagactaaccggtagtcgttcttcatatcactagcatgcaggcccacctgtcactccctcatatccctctctctcatttgcatgccggaccctcatatgttatctaaaatctctcccagcggacgcatgccgctcggcttctagtgcaccgctgcggcaaccattctttgaacgtcgcttgcgctgcttgcacaacaccgccaacgcctcctcgactgccgacgactctccctctccccgcccgcaatcacatggccaacagcttcttccccggccattgatggtgcc

SEQ ID NO: 116716 - DNA, 580 bp, Zea Mays
aagaccagatctaccaataacactgcctccgacctatacaccatgaagaatgaggtgtttccgtgtaaagctcgactcgactgggttcgtaggctctagaccacatatggtagttccctgatccattttcctgtgagcttctcgctcttgtcaaacacctttttcctgagtgcatcgagtatcatcccattggctctttccacctgcccattagctcttggttgtgccactgatgcatacttgatctggatgctcctctactcgcagaagtcaaagaactccgagctagtgaagttagatcccaggtctgtaatgatgctgttgggtattccaaacctgaacaatatttcttgaatgaactccactgtctttgttgaggttaaagaggcgatgggtttgtattctgtccactttttgaatttatcaatggcaactagtatgtgtgtatatcccccttgagctttcttgaagggcccaatcatgtccaggcccaagcatgcaagcgaccaggtcataggaatagtctgcaactgttgcgcgggtagatgttgctacttcgataagaattggcacgcctcgc

SEQ ID NO: 116717 - DNA, 569 bp, Zea Mays
ccttcgtctccggccggcccggctctcttttccccccgctagtgcagcggccatgactagcagactgctcagtatgccgtgtgacgatgtaaactcagcttggatcgcccgatgatggccggtgagtgaggggcactcccatgttcattatgcaaaccgtgctctgtccgctgtcaaagcgcgtggtaatctgctgcctctcttttcactttaggccaacttccgttgcttgctattggctgatctgttcggcagccacttcgttgagccgtcattctccggacattattagaacgtgtcattagcaaacatgatcgtgcaggactggtaacttggacgtacgcttagtagatcagaccactggggggtgtgcactgcttggtagaccatttggacactgctcagtagaccatgtgaacttgcacaacccgatgaccggtcaccgtttgcaatgtctatgcaaagaaagcacatgtagtgtgaaactctcaggctaatagagagagatatttagttggctgcccatctttaggccaactgccactgcgatgttcacaggtacaggctgg

SEQ ID NO: 116718 - DNA, 292 bp, Zea Mays
cccacgtagtggacagcgggttgattagctatttctcggagggctctttagcaaaatagtcgccgcgaaggggtatcggattatttcatccacccgatccggaatcgagggctcagattaaatcgcggatggtatgggatcacgccagattcgatccaggccattccccgcacgatttacggtcagcgtttaataaagcacggtcacatcacggccgttgaatccaatctcgacgccacagatccactggaacaaactggtaccccagtctaatcctagacgtacaaaaccc

SEQ ID NO: 116719 - DNA, 478 bp, Zea Mays
gcgagaaaggcatgccattctacaaattgctcaaaaaggtggaaaagttttagtgtaccatagaggcacaggaagttctaaaggcactgaaaaagttcctgactacaccaccagtactcaagccaccacgccgagctacgctgaatcagccgacggaagatctgttgttatacatctacacgactcacatggtaagcaccgcgttagtagtcgagcaggcggaggaaggacacgcatacctggtgcagcatccggtctacttcatcagtgaagtcctcgggccctcaaagataaaatatcctcaagtccagaagctgctgtatgcggtactcctaaccgcccgtaagctctgtcactacttcgacgaccacaaagtcatagtagtcacaggatttccaataggagatattctcgacaacaaagaagctattggaaggatagacaagtgggcgtgcgagctgggagctcacgacataga

SEQ ID NO: 116720 - DNA, 902 bp, Zea Mays
aaagttccttgtcctatgactgttttggattaatgagctaaggtaatgtagaaagctatatctttcagcacataaggtatgtattgagattagatgcatgattaaaatattggaaacgattaatttctgcaatgttgtaaactcacctgcgtcttatttggggcatccattgagatattgcacttcttttttggtggctcaaagtcatcatcatcatccacattaggcataggaatgtttttagcatcagctgcaacacccctctttctatgctgcggaggatcaccatcagaccgcgtatttgtagggtctgccatgtcagtcgagcgcggaatgtcaacactgaaacattcttgacttgactcaatgattaaacgctgcggattggttgggggtcgatcaaccttccccattattgaagcagcagcctgcaaaagaacaatgtaaaacatatgtgctttattgagttacatcaacatatacaccaatgattatacgaactaattggaaaaaatgtcattaattgtgttatatgaccctaacgaaataaatgtcaacacagtcaaacatcaaaaaattgtatcattgcattatagaaattgccatatacatatatgcaaaccaacagactgttactctaaaacaatatttactcagaataatatatatttatgtagtagtagtagttaataagcagcaacataaacatttatacatgactaaaacaaaacatgcaaccagatgttcaaaaatttattgttgcaatttggacatgattgatgaccatatttatgtgaaaaatatgatccagtaagtatataaaaattgaattgcatttcagtttatctgaataatatatagtagcacgaagtcatgagcagcacactagtttgcacatcaaa

SEQ ID NO: 116721 - DNA, 492 bp, Zea Mays
tcatgaggggactcaacgaccggctccaacagaaaatggccacctgcctggatcttacttacaacagagctgtcagcacggcgctggcagtagaagccaagaacacatgccagggaaaatcaaagggatttggaggtgataggtctaatcagggacctaagaagcgaacaaggttggtaatccgaccttttaatcagaatcgttcttcgcctcgtccaccctcatatctgttcaaacagcctattttcattcgtcctaccactgcccccacttctacaaaccagccgagtgcccctggtgctcgtttccccactctccctagttcttctactagctgcttcaactgtggaaagtctggtcattttataaaggactgtccatacccgagcagaataaattcaacactcaatagaactctaggagctccaatcaaggtaaagggaacatggctactaattcagcgggcaaaaatgtcaagaagactgggcgaat

SEQ ID NO: 116722 - DNA, 470 bp, Zea Mays
gagaaagtcctctttgctcgattgctctttcaagatatgaaataaactaagagaaatattgtaagtaaatttggagaacttagatagaagaataaaaatcacaaaggaataaacacacgaggcactgtgatttttctcgtggtttggccaagccacaaatgcttgcctagtccaagttgtcgtgtcatcagtggacaagggttgctctcaacctctctcaaacgatcctatggtcaacttgagtgccacggtcttgcttatatcaatatgtttctcctcgcatggaatctccacaagttggagtctcttgcagtcgtacatagattaatggagcttacaacttagtaacatcacaagagagaggagagggtacacacacaagaccaaacacagcaacacaacacgagagagaatatcacaagagcgcaaacagacaaagtcacaagaacagctcaaaaacggcgctcaaa

SEQ ID NO: 116723 - DNA, 335 bp, Zea Mays
ccagaaaactctgaatctgcctcactgtagtcgggggtttccaatccattacctcttgtaccttctcaggatcaactgatatcccatcctgagaaattgtgtgacctaagaatttaatttctttcagccagaattcacatttagacaacttggcatacaactgatggtcacgcagtctctgaagtacaatatgcaaatgtttggtgtgctcaacttcatttttggaataaaccagaatatcatcaatgaaaacgaccacgaatttgtccaactctagcatgaatactgagttcatcaggtacataaaataagtcggggcattggtcagcccaaaa

SEQ ID NO: 116724 - DNA, 803 bp, Zea Mays
atttgaaggaggaagagtatgaatgtcgaccaacaaagccatgtttgaaatgggtcagtctgttttgaaggatgaagattttaaagctatgaagggggttggctattttggtgacaaggtcaaggttcgtcttgctggcaatgagactattagaaccaactgacacatggtcgagtaggcccaaacgatgggaagtaggaatggtcaggtgctcaacaaaacaatgggtagggaacaacaatgtcttgttaagcgtgtcctatcaatgtaaagtgtggaggtatttataggtaaccaggtgggtgtgcatgcccttctaagtacgattatgcccctggttacctgcttctcccctagaatattccccctttaggggtcattacgtgtcattatagcgagtttaagtatagcttgattaaatataccacaaacccaaccccaggatggggcttacaaatgggcctgaatggccagcgaggcgtcgcgtgagcccattccacagaccacgtgggcagggagcaggtaatttcgctcgggggcactgggtcttggaaccttgctaagactcaacgaagtctggaagagcccccgctttaagcgataggtccctttgcctccaagccttcgccagttctccaaccgaggctttgccttcagtacaggttgaagtacccttcgcctcctatgtctatgatggaaccttctcaatttatatttaaagcagaccgaatgagggggcggatgacctttgctccaatagagacgacctcgaaaccaaagaacaatgaagttatggttttcag

SEQ ID NO: 116725 - DNA, 569 bp, Zea Mays
aaaaggatgcacttgaatcaagcttgtcatgcttaacagttcaaaatcaagaacttcaagtgcaacttgaaaactgcaagaactttaacacttcatctttaatagaaaaatctaaggctagctcctcaaataatgatatttgtaaacattgtacaaaatatcatgcttcttgttgtttgactaaccatgcaaggaagaaaatcccacaggttaaggtcaaagaaatattgaagaagtgctctagcaatgatgggttgatgaaagttgaacccaagtacaagtccttaaagcccaacaatgggagaaaggggcttgggtacaactcacataaggtaaaccccatcatagagcataaggggtgtagatcccccaagttcatagagggaaccaccctatatgatgccttggggaggattcattcctcaaatgacaagtcaactcaagcaaaggtaaacttgagttacacaaaagacaagatgaaggatgtggtctccacaagtggagaaaagtttagagctcccatttcgcattcttacctttgtgattatatgttgacttgggattcaggg

SEQ ID NO: 116726 - DNA, 735 bp, Zea Mays
ctgtggtctcgtgagagatttgcgcgagggccgccgtgacctcgcgtttgcgggtgctggggtcaccaggggcaggcctcctccactgcccagggccgccgtacctcgcctctgctacgcggatgacaaggaaagcgaccacggaagcaacagtccacaaggcgcaagaatacgccattgtgtctgacgaccagctttgtgtgtactttcattgttctgcctcacctccgcttagatcttggctagcttcttaggcttctcttcctcctggccgtaaaagagagggactgagggaagagatcttagctagcttcttatgcttctatttcgcttagatccttcctgttcgtcttcgttgtgggctactcgctcggcctcctgtcgttgtccagtagcgcgtgaaaaagcatatatgcgcagggagagaaagatgcggagaaattacacacgtcaaatttcccttgctcgacacaacacgatccttaaatctgtccctgtttattatattctagtccaggatcaaaactcacagcctcttccgtttttctttttttaaatacagcctcttattttctgctgcttttttaaaaaaaatattcatgattttccataataaagctatttgggatcgatcctctgttgcttcagcgtcaagagagaaacaccacacgagtcctcggccaaatgtgttgttcatacgctaaactgcacacatcacactactctcctacatac

SEQ ID NO: 116727 - DNA, 333 bp, Zea Mays
ctggcacacatatgcgatgcatccggcttctgcccttggaaccgggtgtgacaaaaatactcacaaccctgtttcttttcgccccccggccgcttcatcaagtctgtcgtaatctgggtattcaaagttgagagcatccatcacccgattcaacctttgtttttcaggggtgccaaaggcagttgtcatcaacttatcttctttcttcatgtagttctcgagaatttcattgcacattgtttctattagctccagccattcagtgcagggtttgttgaatcttttctggaatttaaaccgataaggaagtcatacaagttcatactttttccc

SEQ ID NO: 116728 - DNA, 610 bp, Zea Mays
gaaaccaggggcattaagatttgggttcggtaaggggactagcgcgggctcactccaaatggtgaatcacagggactcgagcgtggatttatgatagtgggtttatactggttcaggcttacgcccctagtccagtatagcgttgattgttgtattgctttggagcgtattacagtagttgtgcttgtgtgtttagcaaaagaggcggtccttcccttttatagttcaagggctggactctacaatggggacttgtattctactgggaggagctcgaccggtggcccttgtgcagcgtggttcctctgatgctctcggtagggtcgtgcatagccgtattcccatcatggcgtactgttgcgtccgctcgtcgtacgagtttcttttgtcggtcttccgttgacatcctcgtggtagtgcacgaagggtccaacaagacagtcgaatggagtagtcgtgcgtcgtgcggtctcgcctgtcgtcacgagtctacgtcactcgttggcatgcatacgcatacaccaggtatggtgtacccgctgcgcactacccgatattcgggtcactgtagaagcgctgatgctgaggtactttacgaataggatcgtcc

SEQ ID NO: 116729 - DNA, 453 bp, Zea Mays
cttcagccttctgcgtaggagaaatgggctcctttggtttagcagctgaagaagtctctccgccaaactcaggcaccatggccggttcaatataacgcggccggtgggtaaggactttcaactttttgctcttcggcgcaggctcatctggagtggccgaagcagcagtcctggccggagcagtagtcttcctcttctttccccgtccccgcagcgggtagcagtagtcggggtaaacaaaaccaatagcatcaaaaactctgttcaatctcttttttccccgtccaccaaaggatgcggataatgcattatcttttgctttggaatacgacccaagcagttcatcacttgtagcttcgatacatttcagccagtcatcattcggttcatcaaatttatctccatatctgaaggtgtatttcagtcgaaccagctcaccttcgctagacttgg

SEQ ID NO: 116730 - DNA, 757 bp, Zea Mays
tataaagaaaagattcgcccccagatttgtttttgtggtggtcttattttgcttcaacttacgagcatcattttttatctaacccacccatacagttcccacccttgctcgtatatggacatccgaattgagtagccaggcttgcagtttggggtccctcgataggagggtctggcagcctgggggccagttctagagaatgggtacttgtctactagggtggtccggagctgtgtagccatttagcttggttccataccctaagcctgcacactccaccactttgtgacgggtaccctagtatttggaactatagtcctgtgggaccaacaaccgggggtctggttctagagaacggacacacgtcccctggggtggtctggagctgtgtggtcgcttagcctggtctcgtaccctaagcctacacgctccaccactctgcgacgcctgccctagtatttgaagttgcgatccagggggtctggacacacggattggcttcccagtttaaatcctgcaggtcctgttgcgtgaatcaaaggataaaagataccagttagtgggtcctatgggtgcactactaaagcttcctagccaaggctgtgtgcaggtccgggtcccagtcgaggctacctcctgggggccaggtcatcaatttttcttaagtatactggcatccagcatcgacatgtcgagactacataccagggggccaagtacaaatagcatacagataacttctgtcactgttaaatta

SEQ ID NO: 116731 - DNA, 885 bp, Zea Mays
cgcgcgcacaaataacagaaagttcagggtctactgcacaaatgtttccaagactcagactcctacatcgtggactatgggttcattaccaaaaagactaaggactcttctgcataacacaacccacgaaggggtaccgatgaaccctggccgtccgatccacacccgacggtcacgattagatttatccccggattgaatcggtctgtgccctgatccgatagatcagggatcaacggcacatagtggcccgcgtctactcctaactcgggccctcagatctcgatcggacggtaccacgtttatgagatccgacgtttgcccagtaccgcacgattatcatccgaccgctctgactccctaaatcgaaccgttgcacgagatctaatccgaggtgttggctaatggatcaacggtccaggtctcagttccctttttccccagctcaagatggcggcgcgggcatggagcacgacggcgccatggctagaccgatgcagccacccttcccaatgctgaaccacgattccagaaggcgctacacgcggcgaagagtattacctacactagggatagttaccaacctcggattggagcggctgcaagggcgctgacgtgagttggttagactacggtggcggtacaacaccggcgatcaattgctcatgctccgatcgatgtcgaggttcgactatcccgcgtttaggctccacacaccccggtgcagaaccgaagcactttcccctgtcctcgaacgtctcgaatacgacgggcaatgatggtgggcagtctgaatctaccgagcacacttttgtctccctcacggtccttatggcggagggggtaggatggccactggttgacggagcacgaactcttccccgg

SEQ ID NO: 116732 - DNA, 304 bp, Zea Mays
atgatttcatatattcatagcatccagcataacttggaactgtttaacatctataaataccaattctttatcatatctcagcatagagatatcgaacaacaagatgataagcattggcaaattagtgtttcataaacatttgcaaactaccatggataatcgatgtattaaaacagtaagccgactgaccaaattaacttacaatttcaattcacggttgcccgttagtaattggcggtggtgtacggactggatagtctcagatcggtgtagcagggagagctgtagcataggacatcacggg

SEQ ID NO: 116733 - DNA, 378 bp, Zea Mays
cgacgatcatccagagcaagtaagaatgccgaaacaagaacgcagatggcgagaatggacctgatttgggctggccacagcgagcttgatttcgcggcgttcttcaaccgatttgggggaaatcccaaattggggagctgtggggaacgatcggagctacgagttggttcactggacgcacgattacctagcggaacatgctgaggcttcaatttataggatacttgagcggtggtgatcaattcggtcgagcagcgctggcggccggaggagaaaaagagctcggtgtgtgaaacaggtggctttcaccgtggcagtcactccggtgatcaccggacatgtaccccatggttcaccatgatgagggccagcgcttaa

SEQ ID NO: 116734 - DNA, 648 bp, Zea Mays
ccatatttaactacaaattttagatataaactgcaacctgtagattacttgtccaggaaactgaaaactaaaaacatgtcaggttttagaagttttactgtaaactgaaaacttcacagaaactgctttatacaatattgatatcaacgagttgcttgataggcaatgtgatgttctaggtagttcgtagtagttagttgttgtatggttcatagctgtatgcactaggtgctagatgttgtaaggttaaatgtgttgccattatctatgtatgaacatgatttgtttctatgaacatggtcaatttctatgataaacatggcagcatatttaaccacgaaccaccaatatttaaacacattagaggcatgactgtaataatcaagaaaagtgatatttcaataaaatataaggaaagtaacaagttctttattaaaccagaaaagtgatagaaacaaatgacttgtaactattgtttcataacttgcataaattaattgttctatctggggttgctgaccgcctgaccatcacaccttgatattaggatgccattcgtaaatggtaatgactgctaccatgcttatgaaaaaaatatgaataactttatgatggtgtactttaaagaatgtgcccttgttatcccgg

SEQ ID NO: 116735 - DNA, 679 bp, Zea Mays
ggatcagcggagaagccgaagcgtttgacgaaattttaaatgatcgaggagatttctgtgccttcgctggtgcacaagggaccacggcgatcttagagaaagctggttgcgatcatgccaaggctgtagttcggccatgatttgttttctcagcggaggatattaaaaacccttcggtcgaagcttctgcgctaggcaggaaattttactccgaggtgtggatgaagggcggtcgtcagatagctaatgaagctattaaaaagattgaaaaaggatctcatgatgctcaagaagaagccaaacaagctgaagaagctgctgagcgtgcaaggcttataggtaccactactgaggtttagcttcgaaattcgttttcagcttcggaattaataaatattttcttatgatgtagctgaactttcacccctcggagccgtacaaccctgaagttgacccagccttgaaggaagcattagatattattaaaattgctaatgaagctattgacgaagctatcaagagactgctgaatgaagccgctgagaaagtgttgaaagaagattaaaactttgtatatttaagagtttaatgtttgtatatgaccttcgtctcttgtaagaaccaaacatcaagtatttgtatgtgtgttaatgtaatatatttctttgtgatgcatgaa

SEQ ID NO: 116736 - DNA, 424 bp, Zea Mays
gcttaaagaagaaaataaaactatgtcatctaaccctaaagagatacatgaggagctcaacactagatttagctctttgaaagaaaactatactcatgttaaagttaatcatgataaccttgctattgtttatgagctcttgtttagtgaaacacatgttgctactaatccaattgagattgatataacaacctcatatgatgaatttattgaaagcatggaacattgtactaaaagcaaatgcaataaagtggtagataacaagcttcttgacgagattgagaaaatcgagaaataaaatgagaagattggacaagaattgaaaagatagtaatcaagagtaatattgtcatagaaaatgaagtggttgataatgcaatggcgcttgacaatgaaaaacttagagaagaaaacaagaaactaa

SEQ ID NO: 116737 - DNA, 733 bp, Zea Mays
caactgctttgatggtgttgttctggtgaagcatctccgaaagtggaacaaaagcatgtcctggttttgtgctgaaaacattcttcttgaattccacctgcttcacgcttgagccagggcctaaaagtgaacagagaagttgcaacccttgaacctgccattcaataccatggaataggatgtttctcaaattcatgtaattctctttatactccacaagatgacgaagaaacctgtgcaggaagttgacaccactgttgtccatgcagacatgaattcctagtgatctctcactttccatggacaaggctgattccaaatttgctggaacctggtagaacgcgatgttctccaagtccatgtaggactgcaaatcaatatctccaatatctctggcatcatccctcttagatggtgatgttatcatgattatcctatcactcatgcttaggaggggatggtggagtgtagatgaaagagagaagcgcaaagacaaaggttgccttaatcatggaaggggaattcagatgtacatggctaaggagcaatatgctttatgaagtcagatgccacatgttgcaatactgaagatggtgtggaaagacaagacaaggaaagaaatcagattcctgccttgtcaagggggcatcataaagaaaggaaccatctttaactttgccgacctggaaagacaaccagtaactacataaattaaattcaactactataaaag

SEQ ID NO: 116738 - DNA, 440 bp, Zea Mays
attcttgggaagttctccaaagttcacgttatccttgttgtcgcaattgctttcggagcgtcggtcaaggaagtcgggagtctttttctccatggtggtggatagtgaggctgctttgcgggtgcaagacatccgtgtggcgtgtgattatgccgacgtgtttctagcagagcttccaggcattccactggagtgcgatgcgacttttgaaattaaactgattccgggtacgcagcctattcataaggccccgtatcggatggctccaaaggagcaggttgaattgaagaggcaattggatgatctgctggctaagggtttcataaggcctagcaggtcggcatgggcttccccagtattgtttgttgagaagaaggataaaagcaagaggttatgtgtggattatcgtgctttgaatcaagtgacaatcaagaataaat

SEQ ID NO: 116739 - DNA, 632 bp, Zea Mays
gcgtctctggtgtggacatgcgcgataagtataacagtaacaatggcggcttgaggacgaggagggacgaggtccttctggagaggcacctcagcacgaggtcgtcttcttactcgagatcaggacatcatgacctggatccagcagctatggcaccgccgcagatgggaatgcagttgagcagccggccgcccaacatcccgaggcgctcctcttccaactccaagcatgaattgggcaagacaaggaggagcacacttggactctagctgcctgttccatcccaagtgcccgtagcattcagcatgacgtacgtacgtagtctgttctggctgacaaggtggaccatagctggtgaactgaactgcaactcatagtcagtccttcttgtgttgggtactgtactctctagctcttagactgttacataaacactctacaacaggtactttaggtgggagggggacttatatatttatcacaggcacagcctttctttctccatgattaagcatgacttgctcttcccttgtctattcaagtcaagcactgtgtcaggccaggatcattcagggacaaagatgcatcaaatggttctcctgtttgcactggcaaccaaaagagcgccagcc

SEQ ID NO: 116740 - DNA, 483 bp, Zea Mays
ggggatggtagccacagaaggtcgttagggtcttcaaagctaccgcctcggtggtgtcgtctgtcctgaatccaacagtctcggagtcaagggaacgccaacctagctgaagggggtgtgcctccagagtcagccagactcggcaatgtggcacccgatgctcctcgtacagctgcaccgtgtacaaaggggacgtagggtaaccggcggagttgagcacctcccacaagatggaaggaaaaccctcgtgagaaaggaaatcggagctgaaacgagtatctcctccattggtgggggtgggtgaagtcatctgtggaagaggattagatgtaagggttatggtggaagaaagaaaaaatgaaagagcctgggtggttaaaaggaagcgggttagatcaaatttttactccttttgtgttttgtaatgcatgcatgctgaaaagaacgtctcctcaccgaatcagaagggtgcctttggggcat

SEQ ID NO: 116741 - DNA, 280 bp, Zea Mays
ggcaaaaaatgactgctccggattagttttgtctcagaaaacataaaatttggtgtggagtcgatctttgtaaaatacatgctagtgtcctagtgtcgtctgagcaagttgcatacccgggtccaatttgtgatttctaacatatcaaatgagtccattcaatttctggacaaatggtgcgtcaagatgcatacccaggtccaatttatgatttctcaacatgtgaaataacgagtccattcaatttgtagacaagtggtgcgtcaaattctttatgaac

SEQ ID NO: 116742 - DNA, 360 bp, Zea Mays
tgatgcagacataaatgacatgcttgatctgttagctgaagattcatccgacgctgctcctgttggtacgttggcagtggtgccgcttccagaggttgatacaactttggatgtcccgaaacctgtcagtactcgcccgaggcgtcctagccgaaccaatcagcctgagccttctgctgatgagcaaaagaagaaaagaagacgcctccggtgggtatccagttttgatgaggatgctggtacctcagttcctgctaatgaaggagtgcctgcgactggacttactgacgccgaccccaatgggtgtacccaaactgctactgatcccaatgtgggtgctccgtctgttgctgatcccaa

SEQ ID NO: 116743 - DNA, 784 bp, Zea Mays
attgccatgctggcagtctaatccacttcggtttactgtaccatcgaatcaccatcagacaacctgatagagcaagttcaggtccagatttctccacattttctatggtaccaagcccaaacatctatagcaaagttgttctactacaaaggatctacaatttttctatatcgacctggggcaaattccttgaagatcatgatctgtagagctccaaagatgacccagtaccactgttagtctgaatttcagactccaataacctgacagctcgactttgagtgtgtttttcttccatttcttcataacaactatgcttacactcttaagcaaagttgttcccctttcatagagctacaaagttgatgtggtgccctaaggtgaattctcactattttgaaagttataaagctccaaagttgagccaaaatactgattttcagacttatgtgtatagggtttaagtggtgctttttgcaattagacccaaaacttagggtttaacttgcaaatccacatatttgtgatccatatgacttaggacactttattatcatggtttttgcactttagtccaaaagtggactaattttgcacttaaccccctagggtttggatttagggttttccagggtcctttttagggtttttggtatttcaagggtgtgaatgtaatgcaagtcccttcttagtaacattttatgactatttttcttaagcttagggttttctccatttgggtgttgttttacccttctaacccccatctagggttaggtatcct

SEQ ID NO: 116744 - DNA, 408 bp, Zea Mays
ctctgctgaagaagtcagtactttggttgcttcgcttggggagatacctgatgacgagcggcaggttcattttgaggtgcccctgaaccctagtgatgcggatataaatgtcatgcttgatctgctagctgaggattcctccgacgctgctcctactggtacgttggcagtggtgccccttccagaggttggttcaactttggatgtccagaaaccagtcagtactcgcccgaggcgccctagccgaaccagtcagcctgagccttctgttgatgagcaaaagaagaagagaagacgcctccggcgagtttccagttttgatgaggacgccggcaccttagttcctgctgctgaagaagtgcctgcaactggacttactgacgctgaccccaatgggtgcacccaaac

SEQ ID NO: 116745 - DNA, 377 bp, Zea Mays
cagtgcaactgtgtaaccatggaatctaagatcgccactctgtgtgacgagttgtgcaagctgaacatggaagttgtttccccaagtacattggattatatctcagttgagccaaccttacaagaacagataatcatggtacacattggtgacaatggtgttcaagtcattaaggaaatgctcaatcaaaaagtggataagtacaaatgttttcgtcaggacagcaagggtgttctatggtttgaagaccgattggttgttcccaagaacccaaaactcaggaagaaaattttggatgaagctcatctttccaagttttctatgcaccccgggagtaacaagatgtaccatgatctcagatccttatattggtggac

SEQ ID NO: 116746 - DNA, 749 bp, Zea Mays
atccagcgccccatacggtcacgcttcggcatcaggagaccatcgatcgcaagtgggaacgaagtgcaagcatgtttgatggccttcaacatggtgtgtacttacattggcaccagggatttggttcaagagcatattgcttaaaaggtgtggccacttgttagtgactgggagatgccgaaggagactactgctggctccagcgaaggtggtctggtttgtctaagatacacctatcactatagaagccaatttgatgagccgaatgatgactggcttgaggttgttgaagctaccagcgatgagctgttgagagcttatacgaaggcagaggacgaagccatgaccactgcctttggtgctcacgacaagaggagactgaacagagtttttgatgtgatcagagttttgtatcctgattactgctttcctgcccaaaaacaagggttgaaaacaaaaatggcaacttcatcttcttccaccgcgcctaagccaaatagagctatggttttgacttgtaggtcgaagccacattctttagaaaggacagctgtagtgcttgatacagacaagatggagattgctgaacatgccgaagccatccccctggctccaaaggcaattcctgctgtgacagccaaagctagcgccggtccggtagaagaaatggaaacaaagagctcaacaacagaagagcatccaaaactgctgagtcccccaaccatgacggggttgccgaagctaacaac

SEQ ID NO: 116747 - DNA, 276 bp, Zea Mays
atctcaatctttctgaatttttcacttatcttgattttgattttaagcacataatttctgattcaagacagtgaatgacctagagcatgatacataggcacctagcatacttctgacagcacaaatgatttcaatcacatcctacacatgctaggtgctaatctcaaatgatgaacatgttttggattcaacaagtaatagtcaagttacaattatgaaaacaagcttagctcaacaaaattgtattagtatgagcaaaagaagccaaagtttgcc

SEQ ID NO: 116748 - DNA, 368 bp, Zea Mays
gttgttataagagaattctgccaacgaaaggcactggtcccaatccttaccatagtgtagcacacatgccctcaacatgtcttccaaaatctgattcaccctttctgtctaaccatctgtttgaggatggtaggctgagcttcttattacatgggtcccaagcgattcttgcaattgctcccagaaacgtgatacgaatggtgctcctctgtcagacacgatagtccttggtattccatgcaaatgaactatctcgtcaatataaatttctgcatacttttctgccctgtgggtggtatgtactggcaagaaatgagctgtcttggtcaacctatccacaatgacccaaatagaatcgtggtgccggg

SEQ ID NO: 116749 - DNA, 433 bp, Zea Mays
gttggctgcttgcaacagactgggtgtggaagaaactttgaccaggctagttgagacgtgacggagcggatcctgctggtttgctaaagtttgacccttggaagggaacccaaaatatcgaacgctctggtgcctgtcctgctattgagctcggagaacttgaaattttctcttgaggtgacctttttcctcttctcgtgctctttccacctggatggccttgttcgagaggtgcaagaaactgaggaagtcttggctggcaaggatggtcttgagttccggtcttaaccccttcaagaaatgggccatcttcttggcttccgtgctgacgtcatcaggtgcatagcgagcaagttctgtgaatttatgcatgtattcactgacggttcaccctccttgagttaactcccgaaattcctcttccttgagctgg

SEQ ID NO: 116750 - DNA, 452 bp, Zea Mays
gttatctacaactattcaatatgaattttctacataaaatataatttagttcattaaacaaatagcacggtgaaaacagtacgtgcagtcctaactatgataatatttcactttattttccacctagcctttacaattaccatccacttgctactctagctgtttttaacacttaattatagttatttaaccgacggcgtgatggttacgaagtcatgccatcacttcaccttacaattcaaattaactaaacaattccaatcgaactcgccaactagccaattgcgtgctaatctatttttcataccaccactacaccatataccgcatactcagaacaactcattcacatttcacatatatctttactaaaatatttcccgcatcgcttgcaacttaaaactaaactttactacgcaaacacatgacttctagtttaatcacgaatatca

SEQ ID NO: 116751 - DNA, 605 bp, Zea Mays
cagagaggaccaaccaagtgctagaggatatgttaagagcttgtgctcttaaacatggtggaagttgggataagagcttaccctatgctgaattttcttataataatagctaccaggccagtttgaagatgtcaccatttgaggctctgtatgacagaaagtgcaggactcctctgtattgggatcaaactggagaaagacagttctttggacccgagcttatacaagaggcagaagaacaagttcgaatgataagggaaaatttgagaattgcacaatcaaggcaaaagagctatgctgataatagaaggagactactggagtttaaggagggtgatcatgtgtatctgaaggtgtcaccgatccggggtatgaggagatttaaagttaaaggaaagttgtcccctcgcttcattggacctttcttgatcttaaagcgagtgggagaagttgcatatcaactggagttacccgatcatctgtcagacgtacatgatgtattccatgtatctcggttgaagaagtgcctcagggtacctgaggagcaactgccaatggaagatctgagtgttcaagatgacctgacttatgctgagtaccctatc

SEQ ID NO: 116752 - DNA, 525 bp, Zea Mays
caatagataccatgctggagatagctgtggtcaatgtagtcaaggtagttgatgttgaggtggctgtatatgaagctgctgacacaaagaggtgccatgatgatgacaaagatgtgtcggggtagtcgtcatgaaaggggatgatgctgaggtcgatgtagttagggctatcgaggacgtagacaaatgcagtgacacaatcaagagagggttgatgtagtcaagctgcgagggacgaatcatgcgacatggttgccaggcttgggaatgcattgtggatgaagcacacactagtgttgccaatatttgacgtacgaggtagagggccccaaccatgcatcagcgtttgagggaacattagaggtcttggcgatggttgctgtgcgctgaacgatggggtagaaggtgctgatgcaactcacggatgtcgaagtagacaaagtagttggggaagagacgatgacattaaagacgtggttgtgctggacgaataagaagccatacgaagtcggacgtgtctaaccg

SEQ ID NO: 116753 - DNA, 451 bp, Zea Mays
tctctctccacatgatgaaattccagccctccaaatttgtcctctagcttttggacggctgtgcagtacttgcccatggagtcattcgagcaatcccactctttatttatctggcttatgaccaccagtgaatctccatataccatcagtctcttgatgcccagtgatatggcaatgttcagtccatgaatcaaagcttcatattctgctgcattattggacgtcgagaatagcaactgaaaagcatatttgagttgttcacctctaggtgcaatgaagaggattcctgcgcctgccccctgcagcttcaacaagccatcaaaatacatccgccatacttccgcagtctccgggttatctggcacttgttgctcggtccactctgatatgaagtcaactagtgcttgagtcttgattgtagtacgaggtcgaaactcaatgtcgtgagctc

SEQ ID NO: 116754 - DNA, 778 bp, Zea Mays
ttcctttatcagtcttatctctttgaaattcaactgagttgacacttctcttgtagatggttcacactctccaaaccacccgcgtcaacaccagctatgcccctcagccccggcagatcccggtctacccagtggtagtcgaggaagttccggcgcatctccctcccgtccgagtggagaatgtaatcaacctggaggacagctcggaggagcagctgccgacccccaccccgttggccgagtccctggccttcatagctgggtcatcgacgtcagcatcgtctgcaccagccttccaagcacctgcacctggaggcgacgaccccgacgactccggagacggtgatgacgaggatgacgacgacgaagacgatggagaagacggacacgtcaacgaggaagctgactacgcccagcaggacaacttcatggggtttggtcctgttgtcaaacattacacatcaatgttcgagacggggcacttccccaacttgttgcaggaggtgttgcatgcgctaggcacctacgtccgccccctgtacgagacgaggcaagtgagcgagcctccccgggcttgctattacatcacacgcatccacgtcagggtgatggatgcaggtgacaggggattcaggactctgtctgctcacgagtccctgataccactgtccacctacgctgcctcggtcagcgatgctgcccgtcggaccctgtggtcgctcagccacacctaccggcagcagctgcagaacacgaggttcaggcatcttcctcagcg

SEQ ID NO: 116755 - DNA, 712 bp, Zea Mays
aggtaggtggtatgcctagaacctaaccacccctagcacttagatatggtcgaagttacattcaagagagaagatcacaacaaaagtgtatctcttggctccacatgtgccgattacctagatgaccgccgtcaatttcatatgaagacatgtttgtagcatgctcggtgggaccactacattggctcttcataaacatggctactcaaaggaagaaatttgacgacacgagcaattaccaaagcggatagcaagaagggaagaccttgtttcccttgcctaaggacattagttagaagctactaaagtactattactaggtccttaaaacctagtaggggagatccttacatacttcacgtggacccatgtcggtggcatcaaagtcttcgggcacctagagacactgctggagcaagttgaccttgccacatccttgaaggagcgcaacaccaccctctgggcaggagatgaactacatgatccatcaggtgatggcgcaacagtcagaggtcctaaactccatggagggggtcacaacatgagtggccaaatccattttggttcaaaattacactttatcggggcccatgtttgggtcacaccaaggagagaagttgttccatacttggccggcagagctgatgtgacacgaaggcaaaatttatcgtctaccaccctagagtaccacacgacatcccctcggtctacg

SEQ ID NO: 116756 - DNA, 1411 bp, Zea Mays
ctaaaacggcctttatatgtccaggcttcattggtttatttcagtgggttgtcatgacatttggtctgaaaaatgctggtgttacttatcaaagggctatgaatttgatctttcacgagctattgggaaacactgtagaagtccacattgatgatattgtagttaaatcgactaagtttagttctcatatagctgatttgcgcaaagccttcgataaaatgtgtcggtatggtctgaaaatgaacccatgtaaatgtgcttttggagtgtcggctggtaagttcttaggattcatcattcatgaacatggtatatagatagaccctgaccgaattaaatccattcggaatgtgggacctccgacctataaggtcgaggtgcagaagtttctcggcaagataaattatttgcgaagtttatttctaacctaggcgggaagattgatgcctacacccctatccttcggcttaaaaatgatgtcgaattcacctgggggcagaacaacaggaagtgtttgatctcattagaaagtatttgtcttcggctcctgtgttaaaggcgccacaggtaggagtgtcgttcagattatacattgcagctgaagataaagttattggagctgttttgacacaagagaccgaaggaaaggagcatgtggtaacctacctaagtcggaggctggtggatgctgaaacaaggtacactttcatcgagaagttatgcttatgcctgttttaagcatgcaccaagtgtagatgttatttgttgtctagtcattgcaccgtttccggtcaaaccgatgtgatcaaatacatgttgtaaaacccgattaagagtggtacaattggtaaatgagcttatgcactcatagaatatgacttggcttatgaaccattgaaatctattaaaggccaggtcatagcagactttattgtagaacatcggattgatgatactcataaactagacatatcatacctcactgttactccttggattttatattttggtggatcggtttgcaatgaaggacaaggaattggcatcgtgcttgtttcaccaagtaatgtctctttcgacttctctagccgattcaaaactcattgcactaacaatcaagccgaatatgaggcccttttgttcagcttggagcttttaagttgtatgggagtaaaacatgtgagagcatttggtgattcttagttggttgtccaacaagtattagaagagtatcaatgttttgatggtactctaaacagttaccttgaaaaatgttggggcataattcattcttttgacgaattcaacattcggcacatctctagagttgagaatcacagagctaacaatttggcacaagatgcatcaggttatcggataaagcgagggaaatttcacaacaccgaaaatc

SEQ ID NO: 116757 - DNA, 710 bp, Zea Mays
cgggtttatcgtcagccaccaagggattgaggctaatccggaaaaaatcgaggccatcatgagaatggaggcgccacaatcacagaaaaaggtgtagaggcttactgggtgcatggcagccctgagcagattcatatcaaggctaggcgagaaaggcatgtcgttctacaaattgctcaaaaaggtggacaagtttcagtggccatagaggcacaagaagctctagaggcacttaagaacttcttgactacaccaccagtactcaagccaccacaccaagctacaccgagtcagtcggcggaagatctgttgttatacatctcctgcacgactcacgtggtaagcaccacgttagtagtcgagcgagtggaggaaggacatgcatacctggtgcaacatctagtctacttcgtcagtgaagtcctcgagccctcgaagataaagtatcctcaagtccagaagctgttatacgcggcactcctaaccgctcgcaagctccgtcactactttgacgaccacgaagtcatattagtcacatgatttccaataggagacattttccacaacaaagaagctattggaaggataggcaagtgggcgtgtgagctaggagttcacgacatagagttccggccccgcacagcaataaagacttagacgctggttgacttcgtatcagagtggactggacaccaggtcccgaacaacct

SEQ ID NO: 116758 - DNA, 431 bp, Zea Mays
gatttccaagaataacagactattgaaacagagaatgtcctcaaatctgatggcgtcaacaccctcgaagccccttttcaattaccaaaggtaagacataggaactcggtcgggggagttaaatcagataaggaaaacaaccattctgagttctaacgcacaaacaacttaacatgatcaagaattgatgaactcagccaagactcggcaatggcaaagatagatcacttcatttcatcaaccatccataaacaaaagaacagttcatcatgaattgtttttatagagatttctactacttctaccctacactacacctactactactacattatactacttaagtcggtggtgccttgccacaggcactgccgccgccgctgttgctgctcagttgctgccactgtcaccgccaatgttgccacccttgc

SEQ ID NO: 116759 - DNA, 406 bp, Zea Mays
gttcattaatgtcagtctcgtgattgccttgtgtttgggttctactcttcatgaccttcacaaacgaaccttgcgtttcttatgcacattgcttaactctgagttataattgagtattttatcatgtggataatggaaggaaattcccaaatttgcagatggtagggagagcacgccatagagagaaccagcaggctccaccaccgtcgcctcctaagatgcaggaactcattgttcaatagaatgagaacctatgacagcttgttcaacgccagccccagccacaatagtttggtggtggcaaccaccagcactagcctacaatggctagctactagtattttgtgagcacccagccaccgctttttagaaaaaaagaagaacccctcgatgcggatgtctggct

SEQ ID NO: 116760 - DNA, 915 bp, Zea Mays
ccagggatgaacgaagcaggtggcgaccatgcgctcatcacaggattgctcgaagcatttgaggccgaaggtagatttaaccttgtctcctatgattgaggctgaacatattgtggaacatagggcgagcagtatgaagatgtattgaacacctccttcgactgagaaggttgagcggctgacgaagcaagctctttctgcttgttgattgtgtggtggcatgttcttgtggtgtggcctttatcctcacagcaaaacaagcagaatggcttcctagggggcgcaatgaatctgtcgtcgaagcttctgcctcctcttcctcctctcggagcaggtgggcggaatgtgctgtgagaaggttgttgttgtgagtttgcttgttgttggcctgactgaccttaagactgggtcgctttttcctcgccctgtagtgagttatggatgcttcggacatgccttagatgaaaccttcctccgaagcccgtagcggcttaggcgtgtctgtgtaattcctcccttctttggcagaaatcattgtcagcccttatgtacccgtccatcttttgcaacaatttttcaatggtgtgaggaggcttccttgcaaaatactgagtagctggtcttggcctaagccccttgaccacggcttcgatgacgatgtcatcctggactgtcggagtttgggcgcgaagctttagaaaccttcggacaaacgactaaaggtattcatgtggctcctgggtacactgaaataaagcttatgcagtaatgggtttagactgaaagccatggaagctggtgaaaagcatttccttgagcttcggccacgaagtgactgtccttaaccgaagtgatgagtatcaagtctatgccacacttcggacagccatgacgaaggacttcgccatgactact

SEQ ID NO: 116761 - DNA, 376 bp, Zea Mays
ggaaaatatagcaccgatctccaaaaaatcgttgaaacaatcatatcatctcttgcgaaggaactcgacgagggggacgtagacaaaattgttcctcagaatgtcgacgctaacatcaaaaaggaagcaaaggttgacaccaatgttgaagggccaactacttcaaagaaaattcataagcaaatcgccactgacaatgtcaagaaactatcagaatcagtgacatgctacctgcaaaaattgaagagagttatgacagatcaatcaaaagcagaatcagcatctcatggagtacgcacacgatcccaaatagacaatttcgaagtatgggaagaagatggaatgattcatactcgagaatcattacgtcttaaaa

SEQ ID NO: 116762 - DNA, 391 bp, Zea Mays
gtcgaggtcgtggccgtgggatgggtgcccgcctggcccacgggtttgcggccttcttctccatgtgccgaaatattgctgcagatgtccatgaggtggctcgacgtcagcgggagaccgacgacaaccttcgtcgtcaagcttccgctttgggtactcccttcgcccctcgctctcctgatgtacctcttcaccctcctcctccagatgtcaacgagtggtaccagcaggcgtatggggtacctttttctacagctgatgacgtcgaagaggaagaaacttactttgatgatccggagcagtttgtcccgcccccatatcgtggggatccgggccaatcgtcctcttatcctccgccccaggacccgtctggcagtgctcctcctccggc

SEQ ID NO: 116763 - DNA, 292 bp, Zea Mays
caagcacaaaatttaaatcttaaattgatttgtcgggctcctccttattaagaggagtaccctccaaaaattaacgtatgctgtttaatgtggagagcacacagcattcttctattctcagtcctatagtaaggctatctccaacagcccttaggctatcggctatctccagcagcccttaggctatcataagcagtctctttgctgctataaataaaaggtgcattgtatatgcaccaaatgctggcctaagaatatagggcggaagaatagttagctgtgtgctcaccac

SEQ ID NO: 116764 - DNA, 410 bp, Zea Mays
aaaggttgctgcttcggccatcacagctgagccgaagggcaagaagatgaaggttctgactcatcggccgccttacattgaaccggtcgtgatacctgaatttggcgaaggggcttcttcagctaccgagacaaaagaaactgtttcgtctgtgcagagcactgaagagccggctgtaatgccgaagttactttcagtcaatctagttgagacgaaggttgataaggctgaaaggccaaaaattggagaaataaccaaaatgccagagattttgagccctccaacggaggcaacagtgccaaaggtacaaaagggttttgccacaacacctaagaggagaaggatggcgaatgtgctggatgttgtgttagaaacaactaaaaccttgagtcctgctcctccaagtaaag

SEQ ID NO: 116765 - DNA, 466 bp, Zea Mays
cgatcatgtccagccattcttggcaaggctctttaaattgtttttcaatcttgaaacgataagctagtcgaacaagttcatgcttcttcgtttctttcatcttcggcattccccagccgtttgacgttggatatgtccggttagccagatattcctgtaccaggtccctggtactgatttgcttagctaccaccctgaactctacttcagctagcggacatggcgatcccagttgcatgttgcatagaggcctgatcatcccgaagcttagagacaacggactcatgaccatcgtcatcagtttccctctctttttctcatcagctttcatgtaaaaccattcattttcaagcaagtcggccactttgtacggtagttgaggactggtgccttcgtatccttgtgatacgcaaaattgtaacaaccaaaattttcgtgaagaccatctgctctggcctttgtttga

SEQ ID NO: 116766 - DNA, 283 bp, Zea Mays
atagacgcgatagttcttttggagcaaccagagtggctctaggcttgttcccccttattccctctcaaaaatttagtttcgcaacgctttctcaaattcgaatgatgatttggcactcagcctgtatcccatcctaatctttcctctagtgcatgaatctgaactctacagagaagcaagccttcaacctgtcctgatccctaatttctcaattcctgagcactcaatggtgaaatcttcagttcacacagctgtatttggtttgaaggtaagaagattcaac

SEQ ID NO: 116767 - DNA, 286 bp, Zea Mays
ccacaatggtggggagaatgtaactgcacagggaaaagggctagcatacgtaatgatgattgtgatggcaccaatgaaacgagcttagcatgatagggatagtgtacatcaacttcgctggtggaggcactactggggacggggcgaccacaccctatagatgcacgatgtaacacaacatttaaagaaacttatggtcaagcaatggagtacaatggtattgttgatctacataaagttggattgtaataatccaatgcatgtggttgtcataaactcttctccc

SEQ ID NO: 116768 - DNA, 320 bp, Zea Mays
taacgattcacccagttaattctgagccgcccgatctagatcgaaggtgtgtaaataggtttgccttcactagttttggacccttagaactaggttcgagcgcggctgatttgatctgtgcggtcggatcatgatcgaacggctcagcccgtctgatacccccttcggccagtaatctttataaagagcccctgcccttttgttatatgaaaccgccgttcattgcaacagtggactgagtctaggaaaattttacacactagaccctatgttttccagtatttgacgcgcagtccagacatttaataaaatcgaggaat

SEQ ID NO: 116769 - DNA, 604 bp, Zea Mays
gttttaaattagacatcacatgagcactaatacttttcatccgtgaccataaccataagcatttagaatacaacaagcaatttaccgtgattacaagcttaactaaagtcatctaacgagtcggctagctagaacaacgacacaacccgctagatagcatacacgtcggcttgcctattattatcacaattcgagacacaacatatataacaatcgcttaacacaatcaactcctacctaacatgagttggctaataacgtgactatttcccaattaccatcacacaccacctttcgccatttttagataaccggcacgtcacacagctattgtaatacatctcaagtttagtcaacccatcagtggagcactagcgtatttcagaaaatttcctgagactacgacgacaaggcgtcgagcttatcatgcacataaaagcatcacaagcatatttacggaacctattggttaacctggtcgacacactagacatgttcttcgcccttcaaaatttatcgcacaaccaaaatcatcacacttgctaatgacaccaacaatacctactgatatgttattcacatcacgaacacagttacacgccgc

SEQ ID NO: 116770 - DNA, 755 bp, Zea Mays
gatcatgtaaagtatgccagaaattctctccccgaacagacgccccttcgcaactcaccaagctcatcgcccacacctggcggcttcagcggtgggggctcaacattgtcagaccactacccacagctcaagggaatctaaaattcaccttcgtcgccattgagtactccaccaaatggatcaagggcagagcagtctccataataacatcgaagaccgcacaaaaaattttctggcaaaatatcgtctgtcggttcggagtcccatccgaattaatagtcgataatggcaagcagttcgacaaccaagacttctgagaattctgcagctccatcggaacgaaggcagtgttcacctctgtctaccacccacagtccaacggtgtagtcgaacgtgccaacggcaagatctccagcgctatcaaaaaaaggctccttgatgacaaaaagggcaaatgggcagaccaactacccgaagtcatatgggagttgaacacgacagagtccagagcaaccaggttcacaccctttcgcttgatgtatggatccgaggcaatgacactgcaagagttaaagcatggatccccacgaacaagcccaatggccacccctgacgtcgatgagtcaacttccaaagatcttatcgacggagaccatgtcctcgctctgcaagccctgaacaaatatcaagcgcagactaaggcatggcatgacaacagtgtcatcccaagagaattcagagaaggagacttagta

SEQ ID NO: 116771 - DNA, 532 bp, Zea Mays
ggcggacgtagcagatgcacggtgagccatcgtgagctcttccaacagaagagtggcacggacgttgaggaacatggggaaggggcgaccgaggcgaagatggcggccgatgttggagaaatggttgctgaggccgcgcaaaacattgaggaccaatgttcgaccggagactggttcgccaaggtcgccgagagcatctgccatagttttgaaacgacgatagttgttggagatggatagatcaccttggatgaagtgctggaactgggcgtcgagatggagggcgcgagtctcccgattgctgagaaactggttctcaagggaaagccaggcgatgcgggcagtggtgccacgttgcatgaccatctcagcaagttccgggaagatggaaccggagatccacgacttgacaatgcaatccttgcgtgcctagtcggggaaggtaggcgagggagcatcgtcgaggatgtggctgtccagggagtacttgccgacgacgaggagaatctcattgcgccaatgagagtagttg

SEQ ID NO: 116772 - DNA, 1459 bp, Zea Mays
gacagtccatgcggctaaatcccgactcgttcaggttgaatccatgtgattgacttacttgcacatttgtcattgtcatgtataaatatatgtatgtgaatatgttgtatgcgaattaaaattcatgaaggagaaagtggtacgcgtagatgtgtttgcgattggaataccaacaagtgtttgtgtgcctgtaatggtccaattgtgcgtcgtagggattggtcgcagatgcattaattgtttgttaaaaacacttcgtcgtaaagtagtgtgttagctgtggtaaattaataaagcgtaaaacatgcttggtaatttccgcagtcggctaagatgttcgtctatgttaaaaatattttatgtattcatcgtggtgtattttagtagtggtggcgtaagatattcgtttgagggtgcgggtatatgccgtaatatggttatactcgcgacgaggaaagatgcatgtattgtgtaacacgacgcttaggtcgctattatataatcgtgtgaaggatgctcgtgatggttgtgtgattaaggagtgatgtagtggcaagcgagaagtaagtttagtttttcaacggttagcggatagtagctgtcagtgttgtcatgatttttgttgtatgacagatcgatgcttagctttataaattattgcattccattccctttggataaataaatgtcttgttgatcgattagaggtcttatatgagcgttatcgcagcccaaaaattattggaggcgagtagcattcatgagtcaatccttgctaaaattgaagaacagttcgataacatatgcacatgggtgctttagatctttcagtagccagtgtaagtcttatggagttttatgccatgttttaatgtctctatgttagaccttctaaaatatggtgttttaagtgacttgtgtgttaactaattcgagtggagaaatggttaagaaaaactaattaacctgcttcaacacatgtttcgagttacaatgtctaaaatggtttgctaagtcttatacggcgttagccaactcatgttaagtaagagtcgatggcgtaagtgattgtgatatatatacatgtggtgtctcggactgcgttaataataggcaagccgacgtgcatgtcgtatggcgggctatgtcattcctttggttaatcaacttgttagatggctttggttaagctcgtagttatgatgaattacttgttgtagcctaaatgcgtatggttatgatcgcgggtaaaaagtagtagtgctcatgtgatgtctaatttaaaacgcaaattgttgggtgattatcgtgaagaatgcgttgttaattggttgtagtaattttagtgcactaaatgatttggataaaatttgtaagtctacttgctagtcctcatttaattaatttaactctaagaaatggtaaagtgctagaatgattcaagtctctagaatgcggc

SEQ ID NO: 116773 - DNA, 618 bp, Zea Mays
tctcaaccgcgctggcgagcggagcagaagcaatgttgcaggaaagcagagaaagcctggatgcaaaaagctaagcaaaacctagggcacggagcgtggaggcgtgcgacagtgcagtacatatggggtttttccgagccagatgtcgtttccaagaaagtgcccagtcatcacccagcggttatttctaaaacgctggcgtgccatgtcatcactcagctgctatttctaaaaaaagctggcgcgccatgtcatcactcggccgttatttccaaaatggccaacgcggctcaaattgactcagctattgtttctaaaaacgctgtcattatctgactccactcggctattaccttcaaagtgaccaacgcagtctgattatcactcggctgctacctctaaagcaccgacgtcgccagtaatcgttcggctgttacctctaaaacgccgaagtcgccagtaactgctcggtcgttatttctaaaacaccaacgcagcccccattaccactcggctattacttctaaaaacaccgacgtcgtcagtaatcgttcgactgttacctctaaaatgtcgacatcgccagtaatcgctcggtcgttatttctaaaacactga

SEQ ID NO: 116774 - DNA, 444 bp, Zea Mays
gcaagaggtaacccgggtggtttctcgtgcttcgtcgaccttagagggcggtcttatttgcgcaaacactgatctgggtcacctggctcctatggatgtggctgaggaatctttagctttagaggtggctgctgcagagggcccaacccccgagggtggtgctggtagcgacccaaccaccgagggtgttggggtaggctctctctctgcagcttctatggaagtccatgctggatcgcccccagtccggtccgaggaggctgcggtgacacatccttctacgactctcgttggtctggtcaccttagaagccggtgagccaggtgctaggagtctgctgcctgctgatggtgtcgaagttcctccgagtcatgtttttgatatcattcctactgatctcccttcatcaagcaatgcatcaacccttcctgctttgggtcttcc

SEQ ID NO: 116775 - DNA, 395 bp, Zea Mays
gtttgggtcttagagtgcgaccctctctcgaagaagttgaggtcctggttgctacacttggtgatcttcccaatgatgagaggcaagttcactttgagatgcctatgagtccaggtgatgtagagataagtgctatgctggacatgttggctggggattcttctgactcggtccctgctgaaacaatggctgttgcaactatcccagagtttataaaaactgtggatacccgaaagcctgagggtactcgcccaaaacatctccgccaggtcagtcatccaactgcacctgccgaggggaagaagaaaaagagacggcttcgacgagtgtcgtgtttggaccaggatgctggcccttctgctcctgctgctgaagaagtaccggtggaaatcttt

SEQ ID NO: 116776 - DNA, 361 bp, Zea Mays
cacttgtcccaatccttcccatagtgtagtgcacatgctcgcaacatgtcttccaaaatctgatttatcctttctgtctggccatctgtttgggggtggtatgctgagcttcggatgacatgggtcccaagtgattcttgcaattgttcccaaaatcatgccacgaatggtgctcctctgtccgagactatagtctttggtatcccatgcagacgaattatttgatcaatgtatatctctgcatatttctctgtcctgtgggtggtgtgtactggtaagaaatgcgcagtctttgtcaatctgtccacaataacccaaatagaatcatggtgcctggaggtattgggtaatcccactataa

SEQ ID NO: 116777 - DNA, 1026 bp, Zea Mays
cggtccaaaaagcactagtgaaaaccgtgtcccgatcactgacaatggaacaaggaaaaccatgaagccggtcaatgccatcaaagaaggccttggcgactgaggctgctgtgtatgggtggcctaatggaatgaaatgcgccattttggaaaatcggtccaccactgtgagaattactgatttaccgcccaccttggaaaaaccttccacaaaatccatggagatatcactccaaatgcctgttggaattggtaatggttgcagcagcccgacagggtgcaagtggactgacttgttgcgttgacatactgagcagcccttcacatattctctgattcgttggagggcatgagcattataaaatgtagcccgccaacggtgcaccgtcttctctacaccttcatgcgccccatcatgggcatcggccaagaggagtggccacatagatgatgcatctggtacgaagatcttgcctttaaatagcagcaacccatctacttcagtccattcctctttggctgttcctactgccagctgagcacggatagcctgcacttgggaattagtggccgcctcatctcgcaagttgtcaaacagtgagaatattgggagtgatatgctgtgcacagtgcccattggttcctcccgccgagataaagcgtctgcagcaccattcaatttgcccggatgatattcaacagtcaaatcatagccaaataatttactgacccatgtgtgttggggaatggtggagagccgctggtccaagatgaacttcaaactgtaatgatctgtccggactgtaaatgcacgtccccagagatatgggcgccagttgcggacggccttgaccaaaccgatcaattcccgctcataagcgggcaacttctggtgatgtggcgcaactgcacggctgaagaaggcaattgcaccatcaccttgatggagcacagcgccgaaccctgcccctgaggcatcgcagtccaccatgaagcgcttggagaagtccggcatttggaggagtg

SEQ ID NO: 116778 - DNA, 324 bp, Zea Mays
attttcagctacctcgcgcgccataacttccattagtttttgtcctacccaagcgaggccaactgtgcgccctattgggcgacttatcatgggcctcttaggcaacccaaggaatgtatgggtgccttagtggcacatgggatatctatctcccacaggcccccaaggctcaagcaaaattttgaggacaataggctcgagactccaagaatgaactctattatttgattgtctttgagtgcatcttcttttcccatgttgtaggtgcacccaatggatgtagccctcgagctttgagttgagcaacaatcaactcgatggacc

SEQ ID NO: 116779 - DNA, 763 bp, Zea Mays
gttattccttggtatatcatctagcaccaagcaccctgtcctgactttccaacaaaaatggttgggttcatggatgatgcagtcctttttttgtttgatgttgtgatgtgatgtgtaaaacaatgtatgtttttgtgttgtcatacaatgtatctatgtggtgtatggcaacaaaaacgcaatgatgttctctgatttttaatgtgatgtggttttttgttggcagttactgtcttttttgctgtgtgctaaagttttcttagccctgtggtgcttttttgtttttagtaattgtattacactaactacaaaaaatctacctgttctgattacaccgtattaggaaactttagtagtaaattttcaaacaaacagtaacaaaatacacacaatttgtgacactacacttcatcgtcttctgttaatgactcattcccatcatcatctgaaggtgcaaatatattcacacgccatgttccttttggccgtcctcttagtcgtttgaccactggttttgtgaccgttcgaatgtcgatgtgttgtgtcgtgtgtcatataagccacacttcccgcattttctttttttcgtctgtctcgctggaagtgtggggtgaaacattttcatcaaccggtaatagtgtcttcctgttgcctttcgttgtcgacactagaggtgcaaacgctaagatgacaacaacttctgctcctagtggtacatgatcagtttgatgcacagtgcttggtatgacgtcttgcagaacaa

SEQ ID NO: 116780 - DNA, 665 bp, Zea Mays
tgaaattcaacatcagtaaatgcacaaaagtgaataacatagtccgacataacccttaaggagaaatattgttgtacccctttttttgacaattaggggcagggacatggcgagtgctgcaggctgcagcaccggtccaagcaacaaaaactcttacaaaatgctgctccaactagttggcaccacaacatcttatagttagaatcaagacatactaggactagcagtgtagttagcatcttcccttgcctgtgttttggctccgcccctgaaaacaactatcatgtatgaaatattatgccatgaaagatgagtatacaatgcgttaacatgtacaaactggtctggttaggctggatcctgtgcaactggtccttatcgactgccatgtcatatcaatcatactaccaaccacgctatcaaccgtcatcagcttttatctaccacatccctcctatgcctagtctatatcatcaccctacagtcgccttagcaccatatccgcttttcttttatagacttttatttaaaataaaacataatgttttatattgaaataaaaattcatccgagtacataactaagtagataaaaatcacaattcattaaacatatataataattatataatttctaaagctaacaaagtacatgactcataaata

SEQ ID NO: 116781 - DNA, 745 bp, Zea Mays
cgcctaagggtgcagccggaatagcacaacaagtgcgttaatcgaagtcttttatttaaaaggcactccacgcaaaagtcgcctaagggtgcagccggaatagcacaacaagtgtgttaatcgaagtcttttatttaaaagacacttcgtgcaaaagtcgcctaggggtgcagccggaatagcacaacaagtgcgttaatcgaagtctctcattaaaaagacactccgcgcaaagtcaaccacgggcgcagccgaatcaacacaggcgtacgaatacggcgaacaggccacattaccatacaaattacagttacatacacacgacgagggcatcacatattacatcagctcaaccttcgggatgatacccatctccctgtaattgaacagcattatcctcaattcctcaccctcaaaaagattccgaagatccccctcgcctttgctcgccccaatcggcgaggacaacaattctcgtttaccaacccggtctactcggagatgaccacgatccatccccatacaacggtgcctaccacttcgcaaaattcacccacactacgttttcccaccacccttcaccgcctatacctagtactcgcactagcaagatccccggcaccctccatactcggcgaagtctccgccgcagccacatccaacacaacaaaataatccaaaccttcatccgaggactcctccgtccaaggaaacgaactcccatattcaccatcagactcaaaac

SEQ ID NO: 116782 - DNA, 575 bp, Zea Mays
agcagctttctgacaggatgcagttttcgggaaaacaagaaaatgacgatgaaactggttggaggtatagtggagggaccctctacttatagcgaccaattggcccctagaaggccaatgacaagtctcacagttcgaacttaggtctgaagcgccccggaacacgaaaatcaaaggatagcaaggaaaacactgcccgacccagaatagccacccaaggggagacactcttccctcaggggctactatcgaggaaaagatccctggggcccaccagtcagaaagagctcatgggacaagagccaccagattgctggggacctccggtcagtgggtgaataagggaaccgtctaccttagaagcgcccgcccccagataaaccataaggcaccgagcctagggtcgggcgtggcagagctagaaaggggtccaggcagaccgaagagaagtcatttgagtggattcctcacctagcccaagactaacccaccgtaaatgtcgactacatcaactacgcctgacaccgagccgcagtagagaaccggtctgcctctcactcatgatctccgaaccc

SEQ ID NO: 116783 - DNA, 375 bp, Zea Mays
cgaagttgtcgggcttcaaatgccaccagatgggcgaagacatcatcaagagttggagcggcgggcagagttgtcatcgtcgtgacaaacggatcatattcagcaggtaatcctgcaaacaaatatgcgaggatctcgtcgtcgcgaagagcagcattagcagcagccagctcggtggcgaggccacgaaccttgtgaaagaagtcggctgctgtcatgtcgcgtttcttgcatgttgccagttccacacggatctgcaccgtgcgtgctcgtgtggaggacgcgaagcgcttctgtaccgagtcccaggcgtccttggcagaggcggcatcgataacgtcgcgcagcacctcctccggcatggaggataagagg

SEQ ID NO: 116784 - DNA, 628 bp, Zea Mays
ggtgacaacagcaaccaccacagattgcttagccttcccgacagcatcactcatcaaaagcttctcatcatcaacatcattctcgtccatgctggactccaatggatcagcatgtagctcctgaccgaaccccaaagaaccatcaactaacacaccatctatcggctgacccgcaaaggtagtgacttccccgagagcaactgatttgtgcccggtattatccccaccggccagcttgttaaggggttgatcactagcattttccttcctgttgagaccatcttcgttgttcctatcagaacctttatcctcacttttactatcagcatcatcatcaaagaaagaatcatcatcaaccgccattgggaccgctgtccctgcgccattttccacccacaggtgtacctcgtagaagaccttggctacttcgacatccaccgcaaagggaattgcctgtggatcgatcacactgacctgcatcctacatatgccatgatgtctgtaaaacgccatatcaacatcggatgcaacccccagggtcgagccaacaccccaaatgtgaggcaccgtacaaaattcaaccggcaacccattaaactgaatccaagtatcaaccaacttagctttg

SEQ ID NO: 116785 - DNA, 489 bp, Zea Mays
gtttgtcatcatctacgcgttgtgtagccatggtgtttggtagagtttgggcgccaggccaacagatggccatgggcggcgacggtgccaccgtccgtctgggcgcgccaccggccggtgtcaggagtaaagagagggaggtgagaagggaagtccctgaacattggatccgatatatgcgatggagattagatgatggggaactgttttgggtggtggggtgtgagccgttggatggtgatcgggcccataacgcgcttgggcataatagccgtagatcttgaatcccacggtccaatggcgtgtaccggtttaaggcacactaggatctaatctataccatcgattcatgatcgcacggcccagagcgaaggataccccttcagcctaggaagtattcaaatgcttcctcaggaatttgggaaactaacccatcgtcccttatcagtagaaagtattacatcgaggtccctgatatttgcatataag

SEQ ID NO: 116786 - DNA, 285 bp, Zea Mays
atatcttcactcagccagacctcaacctccatcaaagaagatggcttgaactgatcaaggattatgacctcgagatccattaccaccccgggaaggctaacgtggtagcagacgctctcaaccgaaaacctttcgagataaagggaccaactttttagaagattgggagagggaatcagctcagctaaatgcatgtctgggagataacggtagcctggaggtcaagccaatgctagaagacctcatatgcaaggctcaacgcctggacgcggagacaacaacact

SEQ ID NO: 116787 - DNA, 1361 bp, Zea Mays
gttgaacactgggtgtatggaactgcctggtggaagttgtaactcgtacgcaacagaattcactcttttggtcactgcaaaaggcccaaagtagcggaaagctagcttgtggttcagtcactcagttaccgagttctggcagaatggttgtagcttcaaaagtactcgatctccaaccttgaactccctttctttatgacctttatcggcttgctttttcatgcggtcctgggctctttgaagatgtagtttcacctgttgcaacatgttttggcaagtctgcatccactgttgcagatctggtaccgaacacttgtcaactgacaccagccccagttgagatggagtataaccatacagaacttcaaaaggagattttcctagagaggagtgatgacatgtattgtaccaaaactctgctagtgacaaccatgcataccattgtcgggggcaagaatggacgaagcaatgcaaatatgcttccaaacactgattgactctttccgtttggccatccgactgcggatggtacgcgctgcttagacataacttggtaccagatagtttgaacaattcttgccataacttgcttgtaaagatggcgtctcggtcagagataatcgaagatggcataccatgcagtctataagtctccttcatgtacagttttgcaaccgatagtgctgaaaagggatgtgccagagcaaggaaatgggcatacttcgatagcttgtcaacaaccaccatgacacagttgtaatgatgtgataaaggtaacccagaaatgaagtctgtactaatcacttgccatgaatgttcaggtataggcaagggaaatagcagccctggatatccactcctctctagtttcgctggctgaaagacaaggcaagattgcacaaactcctcaatgtgttttttcataccaggccaactgaatattgctttgatgcgttggtaggtcactgaaaacccgagtgaccacctgttgcactgtcatgtaacgttgtcatgaccctagtctggacctcacagttggcacctagccacactcgattcttgtgtttaattatcccattgttgtatgtgaactgatccacctgccccccagtagataatatacttaatagcttcttcgacatctcatcggtttcataccctttggatacttcgagcagccagctgggaaccacagatgagcacgtggtagcattcaactgcatgtcagcaccatcagactggaaatcaggtcgggtgatagagcatctaccaccttgttctctattccctgtttgtacattatacgaaattgcaaacccataagtttggttaatgctttttgctgccatggtgtggttatc

SEQ ID NO: 116788 - DNA, 590 bp, Zea Mays
atggcgacagggcaccgtggtcggacgggggtgaaggccttgtggtggaggagccctagcttgggcttcgagtcgggttcgagcgggtctagcagttgggctcaaaccatcctaattgtttatttgagtggtcaccttatgccctgtttgacacatcttatttcacatcttcacatacttaagtagaagttgtaccaaacaggacgcatctgaagtaacttatcaattcagttgcttctcaaaatgaactaaaagcagaaactgctttcactagtttcttagataagctgcgtttccaataatcagcagttgtgccaaacagcccccttgccattcagcccaagcttatccatccctctccaatccccttgtcgttattggtcgttcttgctcacggcctcccttcgacgcccgtgaatcgtggcgctccttgttccccttcctcagccacgacaccaacttcaaaaatatggcatcgttggtacctctgttccaccttgttctacgccccccctcctctcctttgtcagcacttctccgtgggtcgcacacatctcccaactagctgtcgctctcatcctgaacgctgc

SEQ ID NO: 116789 - DNA, 597 bp, Zea Mays
gctgtttcgacattgctaattttctttcttttatcttctgattactgaaaatactttacaggacagtttgcttaccggttttgtgttcttacttggttgtgattataatcacccgagaccttgtcgtatgtggatatcatgcttgaagatttgatatactcgtgttagcagctaaattcgaagaaaatggtgatgggaagagaggacaaatatgtgaggttagccatcccctgttgcttgacaagttgagtacattattttgttgaagtgttttacgttcataacatgtcatgctagcgttgggaaacatggtatgctatatgctaacagtgaataagattagttgcgtaaaataggaccacttgcaagtagataatcatagattataccttcctgtcgcatagcacagtgggagattgccattgaaacatgtaaatcataaatcttgacatgatgccatcagccatcgttctatgacaaccattaaagtatcatcataagcctcccactcacactagagttaattgtgccagcattttgcacccatggctcttgtgtgtgcctcatgctttgctcgtggtagtggcttagtcaacg

SEQ ID NO: 116790 - DNA, 339 bp, Zea Mays
gcgggctggtcttttggtgcagaggttgagtcacccaattttggttagttctgctaatggctccattagtagctattcagtttgtcaggggtgctctgtcattcttgctgatgaggtcttttcggccaatcttgtggtgatttccttgggggcattcgatgttatcttgggtatggattggttatctcagtataacgcagttatatcctgtttttggaagacaatgttattgcaggcactatcgggtagggaggtggtattcttgggaagttccccaaagttcacgttatccttgttggcgcaattgcttccggatcgccggtcaaggaagtcgggaat

SEQ ID NO: 116791 - DNA, 523 bp, Zea Mays
cggctgacaccgaattgaacctcccccggccatttcccccaacttaatttgaagaatggagatctaaattgttctggccacggcgaccgtagaccatgcgaatagaggaacgtgttcccgacgatgggtggcggtttagttcaattgggcaggtctatgagcatcacgggtatgtgagatcactcaaacgagggagcagaaggtttgaactgacctcaattgcacaggccgcggcgaggttggtttcacagcggcggaaactgtgattgggggaagtgagcgattctccggctatgggggctaatcggagatgggagtggtggctatggcttcgcaatttggagacgaaggtcaaagctcggttgatttgagcgaagggagcgaggacggggtgaatttataggcgcggtgaagcacgaccgtggccacggtgataaccattgctggccctagctggcaatcaacgatggcaccgagcacgacactccccttagagcttgccacgttcaaccgcggccgtaag

SEQ ID NO: 116792 - DNA, 488 bp, Zea Mays
gggcacactaatatagagaagtgcaggggctcgcgggtaaagattcctagactcaatgcacaataccccctagacggtgggttaatatctaaatacttcgggggctcttcagaaagatttgcaggccgaagggggtatcgggtaactagagctgtccagattagatctagcggcgaagattggatctggcgtgttatgtactggtgagcagcgaggaccattggataatggatcaacggtccaggtcacttttgaacacgatctaatcctacgcgctcgccccgcatcagacgaccctaccaagccgagccaatcggtacgcgatgccctaatcccgatcgtccgaaggtcatccaacgatccagtgttgtctccctcaccagattcaatcctagccatccatttcaaatcgacggccccgaatccttctcctacccagggaccagaccgcggcggcgctgccccccctacggcagggagttggccgg

SEQ ID NO: 116793 - DNA, 450 bp, Zea Mays
cggggagatccgaggtgttgacattgaggagagcagcttgaagtagttccagatcatgtcttgcaaccgggctcagatgcggggggaggtgccttgtggtcccatcagagagaacttgatgcacagacgcagacggatttttggcatggcttgtgagggcaggaaggcgatctgtgataggaccaaaatcaagccagtcatcagaccagaaactggtagttctcccattcccaagcttgacagtggtgatggcggagtacaggaggagcaacttttggatttgattcaagtggtctccagatggtttgacaccgatctctgattgaacccaagtgacccaagaagaacaagctggctacaacatcttgtgaaccagtttcaacataagacaagtattatgagtctgcatgtgattcacacccaagcctccatgttgtctcccacggcaaa

SEQ ID NO: 116794 - DNA, 398 bp, Zea Mays
gtttgagtgaatggtgttgcacacatacttagatattggcttcagacgtgtagtcatcagatgtcattatcctctcacaattgagttgattcttctgtgtgcagttggatctgaatgttccttgctgccggtgcaagtccatcatggaagtcttcttaaatctttccattgacatgagttgatcaatcatgaactgtcaagcatctcgattctgctgctctcgtctgagcaactaatggacacacgacatatttgttctctgtacggtggagtttgccagcaagttcaggatcagcatgtgacctcagaggttgttgtataaggggatttggtcccatcttcgccggtttcttggactcactgcttatctttgttgatctccttggagtccaggcttt

SEQ ID NO: 116795 - DNA, 515 bp, Zea Mays
gatccaacttcacaagttcagggttcttcgatttctgcgagcaaaagagcatttagatcaagtatgcttcggtggcacacccaagagccaacgggcaggttgaacaagctaacgggatgatattggaggcactcaggaagaaagtcttcgacaaaaacgaaaagtttgcaggaaagtggatgagggagttgccctacgtcgtttggagcctaagaactcaacctagtcgagctttgcatggaaatactcctttcttcatggtctacgggtcagaggcagtactacctgctgacctcaagtttggggcaccaaggttgatctttgaaagcatagcagaagccgaggctactaggctagaggatgttgatgtactcgaagaagaacggctgaacacggtaattcaatcagcacagtaccagcaaactctgaggcgttatcacgataaggccatgagacgtcgatcctttgcagtgggagatctcgtcctccgtcgaattctaacgggggagggacga

SEQ ID NO: 116796 - DNA, 594 bp, Zea Mays
tatgtttcatcatctaaatcactagcagaggagtacccaccattagctattactacaagcactcgcttgcttgggcagtctttgcgaatatgaccataacccttgcattgcaagcattgaatatctcgtgtacgcctagttgatgcgacagagaacgaagtccttgctattgtggttgttgttgcttttgttgtgtcaggtagacaggtaggaatcgatgtagaagagatatgttgcttgctgtttgtaggggttattgtagtctgacctggcggtgtactagtgttgtgaggtatccaaaagctagcacgacctgcaggagtgttagctagtgtgcttgctcgacgtccatgtacctccctttcagctttacatgcaagatgaataaatagttcacagaattatattccttgtatgctaggatatcttgaatttctcggtttaacccactcatgaaactatccatagaagcatcattattctccacaagaccacaacagagcatatctatttgcaattcctaataatactcctctatcgttttgttcccttgccttaattgttgtagcttatgcaatagatcacgtgcatgat

SEQ ID NO: 116797 - DNA, 595 bp, Zea Mays
gacttcaactcctcttgagctagcaactatattattgattgggacttaaccacatatttggtgtgcatgtcggtttccaatgatatcttgatcgtccaaaatggagttcatatgtggcccgaggatctgttttcgtgaggcccattattgcagtccaaaatagactcacgaatagattggacttcaattccccttaagcttaggactctattattttggtccttgaccatatagttggtgtgcgtgtcctcatcactataggaggatatctccatggtatcagcggcgacatctacgacgacatctgtggcggcagccagaacttacccgacttagcaggtccctaaggcatcacttggcctcctatcgaaactgaaacaggaatttgttcttgataaccagttctgtaaccctgtaacaagagaatcagttgcttgttcacgaattagaactctaacttgaatggaatacatgagtttatctgtgatgcatcaacttgtgatggcaaggggttcactggctggctagactacgtcagttatcgaacgttggacaatgctggtggaatcggaggcatgccaaactaaggtccagc

SEQ ID NO: 116798 - DNA, 847 bp, Zea Mays
gctggctgatggaggagggcgccttgggggcgagtgctgaggtattcttggggccattcactgagttagagtaagtaggtcctgatggcttcagctgggggcagttgttcttgaagtgactgggatctccgcagtgccaacacgcattcgctggtggttggttgcttgcaactgagggggcatgaaaggagctctgactctactggctaaaccgcgacggagtgggtctagctggcctaatgaagcttggtcccttgggtggaaatccaaaggatcgagttttttggtgccggtcttgctgctgagctctgaggacttggaatttcctcttgagatgacctttttcttcttcctttgcccattccacctgcatggcattgttgcagaggtgtgagaagctgaggaagtcttggctggctaggatggtcttgagttctggtttgagccccatcaaaaagcgggccatctttttgactttggtgctgacgtcatccggtgcgtaacgggccaactctgtgaacttgtgcacgtactcactgacagatctttcgtcttgagttagttcccggaattcatctcccttgagttgaacgatcccttggggcacatggtgctctcggaaagcagtttcaaactctgcccaggtagcatctctgatggcaacattgaaggtatcccaccaggctaaggccattccggaaagttgatgagcggccagttgaacacgctgattttctgggcatccgatggcttccagcttccttttaatcatgcgcagctaatcatcagcatcgaggggattgctagatccggcaaacatgggaggcttgagcctcaggaaatctcc

SEQ ID NO: 116799 - DNA, 1059 bp, Zea Mays
tctgcacgcctggaggcgccggaggcacaaccaaggaggagcctaagaaggaggagcaagccctctgactcgcacccttcatcacccgtctccttccctaatcccactccatcgctgctaggtcctcctctcccactttctctgcgaccgcgacggcagcatccgcaccgcccaccaccaccacctcctgctctgttgaaccgattcgctgaaaggtccctaccatccacgccatgcccttctctagcctcgcatcgcgcccttgatgtgtctcattgtgtcgctgtcaggccacagattcgtcatccgactccgatgaggctgcatcctgtcgtcctcgactgttgactgctggtaagtcaccctagcctgtttaccattcatcctgatcttgtctctccgtgtcccgcaatcccagtcgcgaggaactccatagcaatcccagccgcaatcgacgcaccggccgcgaggaactccattgcaatcccactccatcgcaatcccagtcgtaatcgacgcaccggctctcgatccgcgctctcaagggaaggtgagtcgccttggcaccgaccggcctcgcccccatcaaaaaccttccatgtaggatgcgacagacacagattcgcgcctataaaatgtcaagaaacattacataacaaatgcatctcttcatactactgccaggtacgtccggatcttgtatacactatttgcatcactaatccttgattatcagacatctgtagtgagattgttcttttcctatgaatttctgttggtcagctacaatttcagtattttggtgtttcaataaggtttcagtatttttggtatttgactgttctagacaagcagtgttgtagatatatagaacctgcgctcattttgtccaagagaaactgttttctctgtctgatatattgtctaactgttttctctgcctgatatattgtctaactgttctagataagaagtgttctatgtagagtagtttctgaaaacagtttcaaatgacactaacataatcaagttcacaagaagatcatagatatgtcttcc

SEQ ID NO: 116800 - DNA, 343 bp, Zea Mays
gcaacaccgaagaagtgccagaaagaaggatgctccgaacccaattaacccacttaggaccaaagcctttgtggatcaaaacttgaagaatcagttcatgctcaacagtgtcaaaagccttttcgaagtctagtttaagcacaatgatttctttctttgaggagtggcataagtgaatgtattcataagcccaagccaagcaatcctgaatagatctgcccttgatgaaaccatattggttcctatgaattaatcgagacatgaacgactgcagacgatttgccaaaagcttcattaggattttcatactattgtttaataacgaaattggcctataatctcc

SEQ ID NO: 116801 - DNA, 831 bp, Zea Mays
gaggcggtaggcgtagttttatccaaagccatctgccatggggagagagagttactactatgcatatgccaaatttttttcaaccaagttattttattcattacaccagttcattacaagcatacagttaccgcaagtcgcactacacgcgagcgctttctaaggtacttccgaactccttttctaaggtgtccccaaattccttgagaaggtcatcaagctagtcagggacatatcctcgacgtcggacaatttctctatcctgaagagaggtggagctggaggggctttcttcttccgctcagtctggcatccttggctcttggtcttcttttggatttccttcgtgggggcgagcttcttcagcttcttatcgtaatccatcttcagggttcggtaggcttcacgagtgttggcctctttgccttcggctatatcgagacactcttggagggatgccttctcctttttaagttccttgacctactgctctaagctttccacccgggagtttaggtgggtgtagtgggaggaaaggtcatcgtagtggttatcgagagtgtggagatatccgaccatgtagatgatagtggggtcatcttcggtaggatctcttcctgacagggcctgaagtcttttcctccaggtgggggtatttttgttgctaggtgggaagtaacgaaggggggtttcaaagacttccttgctgtagttttggcataattgtcggagggcttttcgggcaacattttggcaagtgtctgggaagtggtgtccagtgaaggtgacttggaaaggagggtggtatgggtagcttcggttttctcccag

SEQ ID NO: 116802 - DNA, 644 bp, Zea Mays
atttctaataagttttgtgaatttaactcatttgggctttgtttactcttctaaacccagtttagggttaagtactctactctagggttttactcatgacatgtcacatcaatacaactttgtttgaaatttttgcctagtgaatgcactctaggtgtgacaaacacatgatatgccaatgcttatgatgttatgcgcaagttttagtgacagtaacaccacgggtgttacattttccatatcaagaaataagaggggatctttggtagaggtcattagaaaaatgcatggatcactgatctttccctattcaacaagcccattactacccaccatattcatgagttctacattctttagtctgaagtccaaaagatctagcttcacctagaaattgaagatgtcatcacctggaaattcaccgcgtatcaacgctacactgtcaaatcggcataccaggctcaatttttgggttttgtttgcacgaactaagacctcatcatctcgaagaattaggcgcccacaaaatgcgagttgccatgttttttagttggttagcaattcaaaaccgcatttggactatcgctcatttagttgtcaagaattggacccatgaactgacttgcaccttatgtcatgccacc

SEQ ID NO: 116803 - DNA, 321 bp, Zea Mays
tggaccccttgaatcacagcttcatatactaggacacccatcatagagtggtggagcgtgcaagcttagggtacagaaccaagctaagcggctacacgactctggaccaccccaggagacgtgtgtccattctttaggaccggaccctaggttcccagacccactgggctatagttccaaatactaggatacatgtcgtagagtggtggagcgtgcaggcttagggtacggaaccaagctaagcggctacacatctccggaccaccctagggaacgagtacccgttttctagaaccgacccccaagctgccggaccccctg

SEQ ID NO: 116804 - DNA, 276 bp, Zea Mays
gcaggacggacggccatggccacgggcaccaccgccggctagacgatggcccggcctgccctggcccaagtaactgaccgatgccaattatacatgctactgctcgagtgactggccacatttctgagttgtgatgatttctggccaacagaacaagaagaagaagaaaagtttcgcaacatgctattcagtggttctcgttttcacccggatcgatgaaccaattcaaacgactcagtgacgtttctgctttcagttgggatggaatggggaagc

SEQ ID NO: 116805 - DNA, 366 bp, Zea Mays
tgaagctgaagcacggcagaatcagccgaagcaggtcctgcacactacttcatgttgttcgccatatatccttgagtatgtgggcaaccagcaacccacaacatcggttgcttcggcaagtcattctcaagctgcatgggcttagctaccaccactaccacctatggcaccaaccttgattcacaatcagcagccagaagggcattgtcaagcgcagcaacaacgcgatacacgagaggagtccgaagctcgtactgtcaataacattgtgcccgattcgagacatatttactaaagcaatagaggggctcgaccagaaagttttcaagttcaatgtattttttacttttctgtccttatatttcc

SEQ ID NO: 116806 - DNA, 2061 bp, Zea Mays
cactataggggtagcaactgtggatgctggtggcattggtggctgagtactgatagctccgacgacctaggtcaagaagtccaaggtgacaggttagagtggagagaatgtcggaccaaaagggtggagttggggtcctaactaaatcgctagcaccactgaagtctggagacctagtggtggagtggactacactggaggcataggaaccatcagtgtgccaaagaatgtgagtcatgaagggttggtgctccgccttatctgctagaagctgctgctgaagagtgtcctgatggtcctgaattgtctgaaacatcgatagcatccgctcggacatgtgctattgaatagctgcctgacgagcctgctcagcggccaagtgagcctgctgctaagttaacaactgtagaatggctgccagggctggatcgatggcgtgaggagtagagggaggagcaaaactggaaccactgccatgtgaacgaggtggcataggaggaggtttttggcggtggtggaatcccgaggtcctcatcaacagagtctgaagaagtattagcaaccattccctagtcctcaagctagcggatcaccttgtcctcatctcgacgctcaggggccaaaggatccaatgagcactagcgggaaccaaatgtcagcctggtggagtcaagagctgcctggaactgaggaggtcggatcagctgcgcgaagatgttacagaggtagtgcgcgtagggcagctgacaccgagcacggagaccatcaaacattgtgtcctcaatctcgcagatcaagaaatcgaccatgtcgaacactgagtgagataccagagcacttaggagccattactaaatatgagtgatagcctctctgtatcccatcagtggtatcacgatgcacctcatcaactcatatagaaacttcgccgctgaggtgaagtctgctggagaacgactcgagccatttgtgaagggtggcctgaagagtgctgcgacatgagcggtaccaggagcaactccatcatgagggcgacgaggagggtatgaggtaccataacaaagaccgtgtagcctcatcgatgacttagggaatccaaaaagctcctagatctaagaagtatgcaaagtgacgtcctcacgctcgaagcggaacctcatccattgatggtcggggtcaatccaaacagtggcatagaaaactctaacccactcctctatgtattgaccaccaaaagtcagtagagagtacaaacctggtaggtaagtgatgtagccctcaatctctgaaccggctgctgagcggaaagctgtcaggtagtcgatggtgagccctcaaggctatctgagctgtcagctgggcgtggtagaaggactcctgtctgagtactagaaagaggagctgcgactagatctctctgagctagaagccatgactccactggcacatgtctgaatcggcgaaccctggtggcagtggccctctgaaggtcaaatagtcgaggatcctcagcaagtggttgcacctctgtctcgtctcgctctcggaaatagggtggatgaactggtaagcggcagagggagcaagagcggaggaagcatgtgtggtggtaggcacaggagtggcaaaacctggcgtagtggagggaggtggagtggtagtgatgactggagccgtggggtcaaaacaagtaggtgtggagcgagtccgagatgagatgcgatggacacgaaaggcgatctgatcagaggcaatcctcaactggcctccctgctccgctctctccgcagctgctggtgctactactgctcgagtagctctatccaactttctcttcttcttgcctccttgctgctcaaggtaaacatgctttcccttgccctatctaaaggggcaaggagggtcctggtcatctcctccccctactggggtgacattctttgtccgcaccatcctaactgcagaaactacccactgatcactgacacgctgcacgagaattaaagaagataagcaagagcaacaaagcaatagataagtagagagataggaaagttttgc

SEQ ID NO: 116807 - DNA, 429 bp, Zea Mays
gttattgtgtacattcataactagtacggtgccatgtcaacaataacattgcaaaggagttcacacatcacttcgggttccaagcaaaccataacattcgaaatgaaaacaaagttgccgtaatttttggaccgacaagaccatgacaaacaaatgcatcaaacaataatcaaacatgttcacagcacgcagacataatttttttgtattacaacacgatacaacataagtgacagcacaactgtccttgacgacttatggttcgaacaataatataatggtctcacaaacatatttctgaaaacttaaacaaataatgcaaaccggtttcgtgcacaagctcaagttttgagtcaccgaataaattgtttactcaaaactaaatatgaattattgcaactttttttttgttctttcatcataatccat

SEQ ID NO: 116808 - DNA, 391 bp, Zea Mays
caatgtcccagaaaactgcctcaacaagatctctatcccaaagaccagtattaggatcaatcaagtctgccacctttgttaagatagtccttccttttggtgtcgctggtctttgatttgccccattcggtatccaagggtccaaccagatgttaatattttctccgtttcccactcgccagatgagccccttctgtaacgcttgaacaccatgaagaatacttcgccatgcataagaaatccctgatttctcttttgccttgagtagattaccatgtgggaaataccgtgccttcaacacttgagcacataaggaatcagggtaatgaattaaacgccagccctgtcgagctaacatggccaggttaaaacaatgtacatccctgaaacc

SEQ ID NO: 116809 - DNA, 768 bp, Zea Mays
gtcatggcacagattggtgacaagggtgttcaagtcattaaggaaatgatcggacagaaggtggacaaatacaaatgcttccgtcaggacaacaaaggagttctatggtttggagaccgattggttgttcccaagaaccccaagctcagaaagaaaatattggatgaagctcatctttcaaaattttccatgcacccaggcagtaacaagatgtatcatgatctcagatccttgtactggtggaccagaatgaagagggaaattgctaagtatatatcggaacgcgacacttgccaaagagtcatggccagtcatttgaaggtggcaggcaccttacaaccccttcccataccatcttggaaatgggaggatatttgcatggatttcattgtaggattgcccaatacctcccggcaccacaattctatttgggtcattgtggataggttgaccaaaacagcgcatttcttgccagtacataccacccaccggacagaaaagtatgcagaaatttatattgaccagatagttcgtttgcatggaataccaaggactattgtgtctgacagaggagcaccatttgtagcacggttttgggagcaattgcaagaatcacttgggacccatgtgataagaagctcagcataccatcctcaaatagatggtcagacagaaagggtgaatcagattttggaagacatgttgagggcatgtgtgctacactatggtaaggattgggacaagtgtctttcgttggcagagttctcc

SEQ ID NO: 116810 - DNA, 601 bp, Zea Mays
tgtgtgtcagcgagttaaagctgaataccaaataccagcaggattactacaacctctcaaggtaccggaatggaaatgggaagaaatcggtatgaatttcatagttggactaccccgtacttgggatggctatgattcaatatgggtcatagtagacaggttgactaaagtggcacactttatacctatgaagacaacttacttaggagcccagttagtagagttatacatatcgagtattatttgtctgcatggagtaccgaagaagatcgtatcagaccgaggaactcaatttacctcgtgcttttggaaaagattacataagtccatggataccaagctaaactttagttcagcttatcatccgcaaacggatgggcaaacggaaagaacaaaccaagtgttggaagatatgctaagagcttgcactctaaagcatggtagaagttgggataaaagtttgccttatgcagaattctcgtataacaatagttatcaagcaagtctaaaaatggcaccaattgaagcactttatggacaaaagtgtagaacatcgctttattggaatcagactgaagaaacccaagtatttggtctagaa

SEQ ID NO: 116811 - DNA, 297 bp, Zea Mays
tgcggttccaggtaatagttcaataggaaactctatatcaggatcgggtggcatacctagtaattcttccgaaaatacgtctgggtattcacacactatcctgatgtgctccgaagatttctcttccaactgatttaccattgcttctgatgtggctggcatactgacattgacttcaattctttctccttgcggactggttaatgtatccatcctcttggcacaagatattactccatcatacttggccaagtagtctattccaagtatcacattgattccactcgattccaaaat

SEQ ID NO: 116812 - DNA, 750 bp, Zea Mays
cttatatccctgtttgcaaggaatctccataatttagagtctcttgcagtcgtacacaatatcagagttacaactcaaagcaagagaggggagagattacaaatacaagaccaaaacgtagcagcaaaactcaagagagaagatcacaaaagcgcaaagtcacacatacacaagaacagctcagaaatgacgcattgatctcactaaatcactagaatgagttacagaagagagtcggagtgatgtgacactcttggagtgcttgggttctgaaggaggtcgccatgggggtgcttttatagctccaaaagaccccatagtcattgctcctttcttgcaaaaagatgtcaaatatcagcttacttgcgggggtactggatcggttcatgcgtcatgagtccaggattctggttgacactttccttcgctgacgggcaccggattagtctagtgcacctctggattgggtgccacgtcagctaacagttggctcacccgcgcacgccaaagactatcctttggaggcggtccggacttgtgtgccactgaccatgaacaatgacggtccgatgaattatcaaaaataattctcgagacctcaaagttcgtttgtactggctgtccggtgctcatcggcacggtccggtgcgccaggccactagaagaccaagtcctaggacccctatggactcggtctggtgcaccaccggaccagtctagtaaggcccagaacttcccgattttggctct

SEQ ID NO: 116813 - DNA, 538 bp, Zea Mays
aaaccatgcagaaaagctttaccgaccagcatgtggaatgaggaatgacttccgcactcgccaccatggatctctgcgagcaacttgcgaccctctacctggaagatgcaccgcatgagaatgtcattggtgccatggcattatagatcccctccaccaccatgtagcatttagccaaccacactatgtgctcagcggacacatgttctttaggaagtatgttgtctttcaggtagtcctggatcttgtagatcaatgaattgggacccccttaagtaactagaagtggcactaagagatctctaggatccttaatattacacataatccttggtgtgatacatggatggagtgccaccaggatcgctagcttcaaggtgctagtctaacccccttcgcccagctcgataggctaggcggaaggtctcaatagttgtcttttgacgatgctcgcaggcatgggtgcccaagttgatgccctcatggaaagttcatttgttgatgagttgttagcgtgtgggacatgttgcaattccga

SEQ ID NO: 116814 - DNA, 735 bp, Zea Mays
aagaactcattcgcagctcagacccgaccaacttgaacagatgttgccaaaagtggttggtgaagacaggaccgtgatctgatataacagccaatggaaatccatggaggcgatacacattggaaagaaacaactgagcgacagaggcagcagtataaggatgagatagtggtatgaagtgggcaaatttggtgaacttttcaaccactaccattatacaatctgctgaacctaagcgagggagaccttccacaaagtcaagtgaaactatgtgccaagcagtaagaggaatggggagaggttgaagtttgccaggatacgtcgatctatccggtttagcttgcagacaaacttgacattgctgtacaaattcttggatgaattgcttcagtttcggccaggcaaacaaactcttaactcgacgatacgtggctggaatgcctgaatgaccgcctatagcagaggtgtgtaatgcggacaacaccttgttttttaactgaggatcatcgcccaaccatattccacccttgtagtgtatgataccctccttcaagataaagtgtggcgctgtcgttggatcaagcgacaatttagcgatcaaggacagagcctctagatccttatcatagttggtctaaacgtcgttcaccattgaggaactactgctgaaacaacctgacactccgcatcaactttacgcgacaaagcatccacaacacgattttcagagctcga

SEQ ID NO: 116815 - DNA, 382 bp, Zea Mays
cgggggatcatgttttgccaaagagcatgtacgaggcacataaactccttcatgcactcaagatgacgtatgagcatatgcatgcttgtccgaagggttgtgtcctatttaggaaagaatacacgaaggcaaacaactgtccgaagtgtaaatcgtctaggttcatggaggtagaatctggtgattggacagaagagactgttcgaaatccccattacaatcctatgccaccttccattcatatcgaggatccagcgtctatacatgaccaaggaatctgcaaaacagatgacatagcacaaaaatgacaaacgatacaatcctaacaagatgatacacgcatccgatggtgaagcatggacctaatttgatgacattcgcc

SEQ ID NO: 116816 - DNA, 320 bp, Zea Mays
cagagttttccttcaaaagtgcttgagcgctcgacaggtctttgcttaactttttgttctgagtttgtgctttagcaagagacccttcgactgaacatagcattttgtctttctccttcaaagagtcttcgagttctttgaccttatcctctaagcccttgataatgatttcgtgttttttgtcctcgtcgtcttgttggatctttaaagctttgctcaatagtaaactctataaaagtaggtccaaacttaggatatttaaactaatgcagacacatcaggggtaacttaaaagagagtacttactttaaagttggaat

SEQ ID NO: 116817 - DNA, 650 bp, Zea Mays
ttctgataaagggaagagaattgaagagacctcttcggaagatatgaatttcgaccttcggcacctgggcggccaacaactttccgaagaggacatatcagaattgaaggaatttgccatatcctgcggctaccaacctagataaatgctcttcagcggggttgatgaagagattttgggatgcattcgcaaccatgccggggctaagattataagcactttatctaaaagcattggattccataagctagaaaaggatattagctgctatagacgacatcacatcattgggagcttgttttactcaaacttcaaagttagactcctttacaggatatcaatggtatcttcatgttgatttaagtattctaactttagttcattttttagagtttattgctaagcataaccttgaagatgcaacaagatgacgaagataggaaaaatgaaattgtcgtcgaaggctttgaagataagatcaaaaaacttgaagattctttgaaagaaaaagataacctgctacgttcagccaaaggctcacttgtcgaagctcaggctcagagtgaaaaattaagcaaagggctgaaggaaactcaaacacttttggaagagaactcaagccggtttagccgtgaaatcgaagctttaaa

SEQ ID NO: 116818 - DNA, 492 bp, Zea Mays
gggaacacttcctccgtgttgttgaaattggttgcctgccatttcgcgcagaaagcgcgtgttgtcgacggtggtgttgaccaaggcaacgatagcctcggctagggtaggaggtacctgtggcggataggagtgtcctccccgccgcgggatgtacctgccccatcatgtgcacgggtctgggatgacatctgaggcaaagaaacatttggaaatataacatgccaaacatacaccatctttatttcattgcagaacagtaataattatacatactccattatacaactcaactttcttacttactttacataagtacactacttagactatactactctaatcttctccatccttagttgttccgctacctgcttcaggagaccgttcatctgcaagattcatggaaggaggggcttgaaaaaggtcaattcgcccatcatatcctccatttactgttccagatggtccagctcccattgctgccacatc

SEQ ID NO: 116819 - DNA, 462 bp, Zea Mays
cgttaggccactatttagcgcctataaagcttaagcgtagattaattgtgcttaagcgtttgtagtaatatacaatataatacatatatttgcacagaaaacaggtttatttaggaattagtggggtacttacctagactagtggacatgtttttgcagccgtgctgcacgttcctagcttcttgccttcagcccttcaccaaacagtagtagcatcacctcagcgcgctgaccctggcgttctggataacttgaccagaaggggaagaggacaccgacggtcctggacagctggggaagaggacattggcagcggggaacttagacgggtggggaagaggacgaatctggtggtaggctggcagttctgttttcctcctctcacacgcgataccagctgctcccgccttctttcctattattcacgttctttcacgcaacagctcccgcccttcttttcac

SEQ ID NO: 116820 - DNA, 415 bp, Zea Mays
tttccccgtcagcccaacccacgtctccctcgtttcccggtttccaaaaccgtcttcgcgcaatcaacagagagaaacccgcgcgaataggaaggaaaccctaacgaccgaggcgactttccttgcggccgaggcgacttgccaggcgatttccgccgctccaatccagctgcgctccttcagtctccgaacattggagcccgattcaagagccattgctttcccgagaagttccaggtaatccatccaacttgaaatacatcgaggtttccgtcgatttttgaagcattttttgtcgattgaagtcggtttattgtaacccttagtttttagttgtgtgtgatttgtatccgattatacatttgtctaatcggctcattgcatcgctcattgcatctctctttggttcaggagc

SEQ ID NO: 116821 - DNA, 494 bp, Zea Mays
ctcgtactaagtcgatgactgttgccattagacatggccttagtgaggatgaaggagttcatagtcctgtaagtgttcatcgcaaacaatcgcgccgaatgatccatcccgctgcgcctgccgaggggaagaaaagaaggaagagacttcggcgatcatcaggcttggaacaggatggtgctaagtcgatgactgttgccattagacatggccttagtgaggatgaaggagttcatagtcctgtaagtgttcatcgcaaacaatcgcgccgaatgatccatcccgctgcgcctgccgaggggaagaaaagaaggaagagacttcggcgatcatcaggcttggaacaggatggtgatcccacgacctcactccttggcggtggcccagcgagcaccaactttgaggatgttatcggaggttgtgatgatgtcaaagttggcggtcgtgtgcttgatgaggatgaagaggaggaggaggaagaggtccccttgatt

SEQ ID NO: 116822 - DNA, 364 bp, Zea Mays
ctgactaaatgtaacagaaaatctttttactgattaatcagataattgatttagtgatgaaagtctggatggtcgctgtctgaattatatttcctcccagaaaaaaacacgacaccagtagtgcttttccttttctcaagatcacctgcatggtcgctgtctgaatatcccaacaattcggagttgtccccttttacatacctacagtcgtattgtgttgtaccagccacatatcttacaattcttttaatggaagtccagtgttcagaatttggtgtctccataaacctgctcaccattcccacaaaatatgctaggttaggtctggtgtttacaagatatctcagactcccaactatacttt

SEQ ID NO: 116823 - DNA, 310 bp, Zea Mays
agacactaagggcgcaaaatgagtattaaatgagacaacaagagtactataagcagcaacaagagtatgttgctaacaatacagctcatcagtaaaattgaatttctataactatgattttagaacaattaggatttcagacaattagcactaccaactagttgcatttataatcaaatttgtagcagcagcatgtctaaataaacatcttaccacagcggaagctactgtcaccatcgttaatattgctgcagttatatcctctgggacttcctggacctaaggattccatgaactttatcaaattcag

SEQ ID NO: 116824 - DNA, 546 bp, Zea Mays
cccttggccatccagtccagaacccgagtcacccaaggcacaaactgtctcgccatagctaaacaaagtgaaaggaggggattggagccgccttcggcgaccggcatgtgggtctttgttcctgaccatgcaaatagtgtacgggggttctctggtgctcatggaagctacacatggtgtcacgtgtgtcgaggagcaaccagagccgagggattgctcaccagagcactccgatcaccatggagccaccgtgtctcatgggttgcattgtcgtcaccccgatctatggtaagatgcattctctattgttagcgcttgcatgaatttagttttgctcggttgccaaccatgataacgtcaccagggtggcgctctgtgaattctggcgtggcctccgccgcatacgggggcggcgccaccgtgtccgtgtcgtgtggggtgagggaatagccatgtgtcgtccgattctgtggggacatcccagattggatggtgtaatacctcttcgggtatttcaattcgggccattcgattgggcaccggtga

SEQ ID NO: 116825 - DNA, 718 bp, Zea Mays
gtcagagtggctaatggacaactcattacttgctctcaacatttaccactggccacttggtctatggccactttccagttcatttctgatttcatttttttacctcttccctcagtggatttagtggtgggcatggattggcttcagcattatagtcccatgcatattgattggtatcacaagtggattactattccttatcagggcacctcagtctgtcttcaaggaatgcggtcgacgttaccagtgggcgcggtgattgaactgaggttgttttctgactctccaacaccaaccagcgaccgacaacaaattcctaccgacgacagggtgcaggcagtgctctcccaattcacagaagtttttgatgacccggttggcttgcctcctacccgacagtgtgatcatgccattccattgttgccaggcgccaatccttttgctgtgcgtccgtatcgttatccaccagcgctcaaggatgagattgagacgcaggtgaaacaaatgctggaccaaggagtaattcagaaaagtcatagtccgttctcatccccagttttattagtgaagaaaaaggatcggacatggagattttgtgtcgactaccgttatctcaatgttatcacagtaaaaggaaaatatccagttccggtatttgatcagttaatcgacgaactcactcaagctaagtggttcagcaagctagacttgaaggctg

SEQ ID NO: 116826 - DNA, 459 bp, Zea Mays
gtttggattatggctcgggttaaggtatagttgttaaatgagttcttactctttctatgttctaatgcaatcattattgtgtatgatagatatctttatgttaatacatgttaatatggatttacttattgcttatgtatttatatatagcttaatgagttctccgatcaaggaccaaggattagggcccgaccaaatgaaccagagtgtttctcaataactatcctgtggtgaagggtatcaaacgcctattgacccttgtcctagcatagataggatcgttggtcgtgagttgcaatgtgacctgaactatgatccacaagaagatgaggtaaattgcacatccttgatttcgtgcatgtccctaattacctgatttcacaatgtcctttacacatgcatgatttattatgcattttattaaatgaataagaggaatacacaatgaagcaattttgc

SEQ ID NO: 116827 - DNA, 605 bp, Zea Mays
gaaaaaggggagatcgtggggcatttcgtttgacggggggaactggcatcatgcctagttaagttaatcagaaagacccaagaaatgagtatgatgttgagcagtgcaaaggaaagcaaagatcaatatgatgttgagcatgtgtgtgggtaagtgtaaaagcgtcgagacaaggaacatcatttaattcccctcccaaactacctcatatgatccaatttttctagtagaaaacaagttatttagcgagagcatgtaatatactacaataacaaaaacatgggtcattcatttggtcctaacagatggggcaataatttggtcctaacgcacgagccaaaatcattgtaatttcacaacagattgttgttacggagtccacacaccttatggagggagagtagtagggattatgtgttccaaggtgacaaacacagatagagctgctctacaatctgaatctgaaaagcaacaataacaattctgatcagtatgactgcaaactgaaaaaatggtacagtaaatgagtatgacgttgagcaatgcaaaggaaagcaaagatcaatatgattctgtgttccaaggtgacaaacgccagaaaagaa

SEQ ID NO: 116828 - DNA, 551 bp, Zea Mays
aattcatcacatggaagagaatacgtgacacctaattaaactaccttaattgtttagtcccataaggaagtgggccacattctcacccatcctccacgccttgccaaaattgattattctcattaattttgacactttttctttctctattttcggtactacatgtctcttttaaataggttctaacacttgtaggcatgcatttctaatgaaagcataaaacataataagatgtgcataaaatttcatttgagaatgcataaatcatgatgatcataaaattctcaattttgaatgtaaaggatggttatagcaaagagatgggtaaggatgggcataacgtcaacaacatacaaacctcgacataaccgatacgcatgatccacgtgtttgtcgtaacgagaacaatataatgcatatggtaactgggcctatatatacttaaaaatcagcataaatacaagtatgaattagcataaaggccacatatgcccagaaattagcatgagctttttagtaaaagcgtaaaatgccacaagaagtttattttt

SEQ ID NO: 116829 - DNA, 397 bp, Zea Mays
gtggtattgtgattattcaacccttcttcccaaaactagcaaaaaaaatgttgcttgttctgttcatgaaaagaaccccctccaaacaaccttgagtttagcaactgaaacctccttaaaaaaacaaatcctacttgtgttggtattttctagccccccttgagtgttttacctttgaagttaaacctgcacaacttgtagacccccatagcttaaccgctagccaaactaaaacttccttgtgaacttgttgtgtcaaaaaattttattgttggtgtctagttgcgcaaaccctatcaaggccatgtttctttccacaaatccttgcccctaaaacttcatagcattcctgttgatcatccagctgatcttgttgcctacctctcctttcacctgg

SEQ ID NO: 116830 - DNA, 572 bp, Zea Mays
cacgagtccgttgtttacatcccttttcttatctgtggccttgctcttcccatttctcccttctttcgcagtctccttgacttttacaatctaaatctgactcacctgaatccctctctcgaagagtgtgaccctctctcgaagaagttgaggttctggttgctttacttggtgatcttctcaatgatgagaggcaagttcactttgagttgcctatgagtccgggtgatgcagagacaagtgctatgctggatatgttggctgaggattcttctgactcggtccctgctgaaacaatagctgttgcaactatcccagagcctgaaaaaaccgtggatactcaaaagcctgatggtactcgccttaaacgcctccgccgggccagtcatccatctgcacctgccgaggggaagaagaagaaaaagagacggcttcggtgagtgtcgtgtttggaccaggatgctggcccttctgctcctgctgctgaagaagtaccggtggaactctttactggagctgatcccaatgggtgtggccctgctgatgctaatcccaatgggtgtgaccctgcc

SEQ ID NO: 116831 - DNA, 1082 bp, Zea Mays
gtgatggtcgcgccgacgcttgccgtgtccatgacatggttcttgatctcatcgtatccaaatcagccgaagaaaactttctaaccttgtgtggtgacggggatcacaggatggcgcgacgagataaggctcgtcggctatccatcaactaccatgcccgggatggtattgtagtgccagagaatatggtcgtttctaatgttcgatccctcacaatctttgggcacgctgaggacatgtctgctctttccaacttcctgttcttgagggttctagatctagaaaacagggtggtgctggaatacaattaccttaggcacataggcaggctacgtcagctgaggtatctccgactcagttcaagaagaatagctgcgctccctgaacagataggagacctacagaacttgcagaccttggatctgaggtggacaaggctgaaaagattgccacggagcgttgttctgctacgccgactgacatgcttgctggtcaacagtttagaattgcccgaagggattgggaacatgcaagctctgcaggaattgtcagagatcgaaatcaatcgtcacacaccagtgtcttccttgctggaactgggcaagctgacgaatttgagaatccttgggataaactggtgcatcatcgacgcagatcatgatgcaagaaaggtccacgcggacagtttggttacgtccctctgcaagttaggcgtgctcagccttcggtcgatacagatccagagctaccacacctgttctctggacttcttgcaggattcttggttcccacctcctcgccgcctccagaaattcgacatgtccatagattaccatttcccccgaaccccgaagtggatggtctcgctggagtacctcagctacctggacatatacctcactccggtggacgaggagtcgttccgaaccctgggggacctgccgtccctgctgttcctctggatatcctcgagagaggccaggcctggagaaggcgtcgctgtcggcagccacggtttccgttgcctcagggagttctacttcacctgctgggaagtcgggaccgggctggctttcgaaccg

SEQ ID NO: 116832 - DNA, 467 bp, Zea Mays
atggttctattcagcaaatgaattccatcaaggtaaatatgcggccaacttccctttttattcattctgatctctaaagttttattaattttaaagcattcttttcagcataacgaattcaaggaacggattgatgacatggcaatgagttcattgcgttgtgtagcttttgcatattgcccctgggaacccaaaatggtcccaatggaatctctagataagtggaagttgcctgaggatgatctgactcttattgggatggtcgggataaaggtagtttattctgagcctttgtatatttgtatgtctccttggtacttgaatagttatttgacttattaggttgtctccagcatctattctatctcatcgtctatcttatccctatttcaaacttcactaacagtataatctacattagaaatcccctttttacacgatctgtcgcatacaacgttacgtatgtg

SEQ ID NO: 116833 - DNA, 413 bp, Zea Mays
ctcatgcttcgatgagctctccaactcgagatttacctcctcgacccccttctggcccccgactgccgatgcgactagcctaggcggcgtgcctggccttggcctcccttgtctgcgggcatagttggactggctggggaggtcggttcacatgtagggtccaccacatgagcaaaacatgtcattctactaaaaatctcagttttgtggatcttgagctgatatatactctgatgaatctcatatccactattgaagctgcttcaactaaatctcgattttagatttatttttttggacctatcctaaacccgtataaaatgatcacacacaagcgtgcgtacacgcacacatatgatcgtccattttagaatgatttaacaaatatctattaataagttattcacgttttt

SEQ ID NO: 116834 - DNA, 555 bp, Zea Mays
tctttaggggataacttgctatactatacttttccacaaaatgctccgttatgaagaaatgagtctagtatcaaataaaacaaatataggtactgagttgataagaaacatataccgagcaccacgttagctccttccaaaaccaattccacagtcacgtaattgactctacccttactctaattctgttgtcccttgccttaagagttgcgagagggtgcgttctaggctgacctctgattgttggtggcttgtggtgtctgaaaattcttcttgtgacaggtgttggcataatgtccaacctctccacacttgaaacaaccattgggatgcattggggcgataggatgttggcctttgctagggtattggtggcaactccctgatgagtctgctgacctccatcggttctctgcctttattggttgtacctatgagtttgctgacctgagcgttggttctggttttggtaattcccactctgaactgcggagcgagaataagaacactggttgtcttgctggtagtggacattcctactagactcgcttggag

SEQ ID NO: 116835 - DNA, 362 bp, Zea Mays
gtctggtctgtctcactgcccgagcccgaggcaaatccttggttttgtcatgtctagggctcgcgtcccaatgccgtcttctggcatgtgacagaggggttagttagacatgtttttgtcaatgggagtattaggattagagctaaggatcaaggtgaacacactcggttttggttcaagggctgaaaattcagaaatctgaatttcagaaatccccattgaacctccacttgaatggcttgtttggagtttttaataaactattttggacaagctttcataatctttattgtatcttatttagtgtatttcaatttttataattggcccatgccatgattttatgtttttcatggtctttc

SEQ ID NO: 116836 - DNA, 999 bp, Zea Mays
ctggcattgaaaacaagtgagtgcaaagacaatatttcgcccaaagtttagccagatcaggaaaaaccaagttacctgaagattggagaagaatgaaggaagccccaaatcatgagaaactagttggtgactcgatgagggaatatcagccgaggcaatctgaagatcatcattggagattaactcaacatcaccagcaggaatcaaaactctagcattgggtgtgccggtctctaaggcgacttcctgatttgaagcacgtgctgctgccatgcaatcagaatgtggaggagaagacccgacgtggacatccatggaggtatgagaaggagagcccgctcggacaccctcgggggctgggtcgcagcctacattgcccatcagagccggatcaccaccgatagcaccctcaggggctgcgttgcagctcgcactacccacctgagtcgaatcattcccggcaacaccctcgggggctgggtaatcgctggcgccatccttggggactgggttctctacaacagccacctctaaggctgaaagattcttagttacctgcatgggaatgaagcaacctagaccagcttgttgactctgaagaccgcactccaaggtcgatgaggctcgagacgctgctcgggataactctaaccccacatccgaaatgtcagtgcaaacgtccatcataccaccatctgctggctcggatagcagatctttaggaaccatatcctcgagagcctaatcaaaatttgctatggacaactcttgcagaccaacgagtgcagacaaggctagagaaggaatatcactactccccccactgaccaggtagcgccgactgtttttccgaattaaggggatttcgtcctcctcttcctcaacctcatcaacaatacgaacaacacacccattggggtcagcgctggccggattacacccattgggatcagcatcatcaaggtcacacccattggggtcagcgtcagcagggtcaca

SEQ ID NO: 116837 - DNA, 387 bp, Zea Mays
gtttaaggcttctaacctcgaaaccaaaaactgggatgctacagacctaccccacttaaaagaatctcgccctcgagatttaggctgagctagagaaaaggtaagggtactccttcctcaatgagtcctcactctcccaggtagcctcctcttctccttctctgctccactggaccttacagagccttaccttcgagtttcgggtccttcgaacggctaaatcaagaatctttactggcttttctcggtactgcagatctttctgaatttggactgactcttctgcgatgtggcattctggtactttcaagcatttccggagctgggatacatgaaatacattgtggatgtttgacatcgattctggcaactgcaggcggtaaccgg

SEQ ID NO: 116838 - DNA, 426 bp, Zea Mays
ccactatgaaacatcttttaaggaaaaagaaaagaagcctcgagatgcatgctaaacttttctgtaccatagaacaaattcgcattagttagtaccaggcatctatctggcattgggtatattggaacctagaaatattgtgtgatgagcggacgggaaatcttctgtgatgggtcgttcagtcagtgtctaaattctcagatggctcgccactggctgatccgaaattatactgtcacaactaaatattcatgcctagtaaaaaatacgacatcagcattgattaaattagaccatggtggtaatagaaattgctgttacttatcaaagtgaaccggagaaagagataaaaattattttgtaaatagcaccaattgaattacatagccatgagaagcccagacattttactttatgacatgttct

SEQ ID NO: 116839 - DNA, 809 bp, Zea Mays
ttcgttcttgaggtcgcgtgtggacgaaggcccatcagcaagcagctcacgcaggacgacgacagtgacggcggcgccttgttattggtggactgggtgcttagtcactggcagaatggatcactcactgaaacagtggacatcaggcttcaaggggactacgacagtgacgaggcatccatggtactaaagctggggctactatgttcacacccattcgtggacgcaagaccaacaagcatgcgacaagtcacccagtaccttgatggccacgtagcattaccggactttatgccgccctgccatatactacccagcagcatgatgattccggagcaaagcgagggatttcttatgtacaacaatacgtcaagccaaatattcaaggcaagcaatgggagcatgtctagcctctcagggggaagatgacctagctgttatatgtgtgtgtgtctctctctcatgggatactgtaatgatccatagtgtatgtgagataggttagggtattagggatgcaagttgcgcaccaactatttgattaaccttctaatccaacaacacaaaaaaatagcacaaatatggacacaaggtgctatttggtaaggaatatatcaaaaatgcaaacatcattggaattgatgccgccgtgttcccagttcataccagcaattgtgattgtttgtggttcataccagcaataatggaaaggtaaacgtcgccatcctctcctcacagagtcactgagaaaattatgcatcctcccgctggctccgctgcaccctatctgtataacccgcccccttgag

SEQ ID NO: 116840 - DNA, 754 bp, Zea Mays
caggagtaggagcgatgaccaactgtcttgcaacgaaaacaccttggctctaggtggcagaaagcaacgaggtgatcatccgtgaagcaattgaaacaacgacctttcaagtcttttggcaccaggcgacgtgcccgcagtgcactaaggcgatgcttcttcgccttcctagattcaactctggtccacccaccaactgttgtcttcggcgcactctccaacccacgaaaccggctatgttgatgctcgtgatgagggttaaacgtcctggtctcaagtggggagggctccctcggagacgaaatagtctgtgctggaacaagcggaacccgcgggtgaagcagaatatcacggaacagaggccggccagcccaagaacgtggttgtagaccgtcgtcaggggaacccgccgcactctcaactccatctctagaacttggaccgtccctgggtggcagaggatgacgatttcggggaaggggaggaaggggcagatggtgaggcgacctagcggagggaagtagcggtggcaccggatatggtgtggacggtggtcggagtgggatggcaggcagccgaccgtccctgggtggcggaggttgacaattccggggaaggggagaaaggggcagatggtgaggcgacctggcgaagggaagcagcggtggcgccgtttatggagtgtatggcggccggagttgggtggtaggcaaccggaccgttgggaggcgcggtgctgtgggcagtggagggg

SEQ ID NO: 116841 - DNA, 471 bp, Zea Mays
ggtcaatcttggtggactcgagcttgttgaaaagctcatccacggtggggttctcatagttgggtgattctatgatcgctgaaaccttcatctcccaaactcttggatctagagcatgtagtaacttgagtgctctctcatgattgtcatagggtagatgtgccttatttgcgcgcgtcatgatgataatcgacatgaagcgtgaaaacgaatcgatggtttccccaatcaattgcacaaagttcacatactattgatggcaggtctaaaagagacttttttaacaacataatttctctcgtgtaatttctctatggtagtccaaatctcatgacccatactcaaatgtctaaatatttcaaattcagagagcgaggaataagagatagagcattcaaatccttgttgtttgagtcatgctctctgctttatgcagagtgacttaaatctacgggatcccataagtgcaac

SEQ ID NO: 116842 - DNA, 578 bp, Zea Mays
ctgctaacatacacaccccactatattcaaaatgaagtacttcatttgttgagtcatacaaatctggaattgttttgtatctctgtggtacccctgctgaaaactgaggactctgctcaggaggagatacccaacctgtagctgtacttgacccctgactttgaggtgaatttggagcatgagagggtcctgcttcactgttatgcgtagctgagagttctccctctaagtcttgattcaccggtactgaaccttcactgtcttctactgttgtcgtagcttgaataggcaattgatgatcaactataaaagttttagtcaactaaaagcctgaattgtctatgaaattttcccagtcccatggtttactctcttcaaaaattacatctcggctaacaactagcctgttagtcataggatcaaatagtctgtaaccttttgagcctgactcataacctatgaaaaccattttgctagatctgttagccagtttatttaaacctggaccaaccaacttcacatgggcaacacaaccaaaaattctcaaatgactgacactaggtttctttccatgccag

SEQ ID NO: 116843 - DNA, 562 bp, Zea Mays
aactttgtccagttagctgaactggggtcagtttggacagagagggagggtctgtcgtgatccagctatacaccggctgatgttgcttgcttgtttcagtttgcttgcttgcttgtgtcatccttatcagttgtgtcgagctgtgcctggaccgtgcatggtgttgtgctatgtggccgcgtgtccacgttcaagcagcatttaagcagcaaatgccttgcgccttattctatgtgctcaattcctaaaatatttctatagaccagtcttgtacatcttctcttcttcacattggctctgaagcctatacgtgtcttcctcaaacaggtgcttaggtcattttccctgttgtactgtcggcgcgaaaggttcttagcaccctcctctcaacgctcgaacgtcatccttctccatttggccttcagccaggatgccgtcttccacggtcccacaatgttgctcgtccaggtatgcccacgtccggctgtgaagatcctgcaaccttgctcgcatcccggctccctagcgctcatcgtgcaatgcctccgtccgtcaatctctc

SEQ ID NO: 116844 - DNA, 332 bp, Zea Mays
aagggtgcagccggactagcacaacaagtgcgcaaaatcgaagtcttccttaaaagactatccgtgcaaaagtcgcctaagggtgcagtcggactagcacaacaagtgcgcaaaatcgaagtcttccttaaaagactatccgtgcaaaagtcgcctaagggtgcagccggactagcacaacaagtgcgcaaaatcaaagtcttcctcaaaagactatccatgcaaaagtcgcctaagggtgcagccagactagcactgcaagtgcgcaaaaatcgaagccttcctctaaagactatccgtgcaaagaccggctacaggtgcagccggacgga

SEQ ID NO: 116845 - DNA, 462 bp, Zea Mays
actaagtatgtgccaactgtcaacccttatgcccatataaggactctaggtggcttagttaagtactaactctgggggggtcatgcgtcatgttaaaattctgcaaattatattgttttcatggaatgtcatcgcctcgtcgtcaaggtaagtgtaggaccatgcagactgggactagtcggctgccctcatgtgtgggcaaccatacatgttgtataaggactggtagatttactttcagcaatgcatgatgagtagatgataggttgttttacccttcacttataactgttgcatcatggggaagggctggagtgaattttctgcaggtacactaactatgaaacgtatagtcatttagttgcacattgagtgcacgtgtatgccaccgcttaaaacgtaggatgaataggatgtgaggttgtaagttacgcacatgcatcatgccactaaaatcattct

SEQ ID NO: 116846 - DNA, 1403 bp, Zea Mays
caggcgccatcaaaatacatttgccatataggattcactaccatggtggtgaagactgcttcatctggcaaatcatcatcgatggggaaatgatcaggtatgggatgtgcagctagaaaattagccaaggcttggcctttaacagctttttgaggcacaaacacaatgtcaaattgtgaaagtaacattgcccatttagccaacctacctgataatgtcattttacttagaatatgtcggagtgggtcagctcttgagacgagatgtatagtatgttctagcatgtaatggcggagcttttgagatgcgaacacaagtgctaggcatattttttctatgtctgggtaattgcactctgccttcagcagggtgcgacttaaataatatagggagacttctttcctatcatcgttggtttgtgctaaaagagcacctagcgaagttggcatcgccgccgtatagaggatcagtggccgccctttaacaggtgcacttaagacaggaggatttgttaggtatttctttatatcatcaaatgcattttgacatgcttgatcccattgaaatgggactcctttcttcatgagcctagaaaagggcttgcacctcccggacaaatttgagatgaacctcctaatatatgccaagtgaccttggaggcttttcaattcgtgtaaatttgttggttgaggcatgttaacgattgttttgattttggttggatcaatttcaatgccacgcttagtgactacaaaaccaaggaattttcctgaagacaccccgaaggcacacttcataggattcatttttaatttatgctttctaaggcgctcaaacaccatttccaagtgctttaagtgatctttctcacgcttagattttacgacaatgtcatctatatagcactcgacaatcttatatagcaacccatcaaggataatggtcatggcacgttggtacgtggcgcctgcattttttaacccgaagggcattactttataacaatatatgcccttaggtgtgcggaatgctgttaactcttcatcttctggcgacatctttatttggttgtagccagagtaaccatccataaaggagaatatttcatatcccatagtggcatcaataaggatttcagagatcggaattggaaagtcatctttcggacacactttatttaaatctctaaaatctacacatacacatatcttcccatttttctttttcacgggaacaatactagacacccatttagggtattttacttctcgaataaaactagcagctatgagtttatcgacctcagcttctatttgtgggagaagttctggccgatatattcttttcccttgcttcacaggaggaacatcctctctaactgctaatttatgtacagccaccgc

SEQ ID NO: 116847 - DNA, 377 bp, Zea Mays
tcaggtttttctcagcctcaaccttgagtgtcatgttcaaagcttcggtttcacgattgaatcggctggagttctcttccaaaagcgtctgggcctctttcagctccttgctcaatttcttattttgagcctgcgcttcggcaagcgatccttcggttgaatgcagcaaatcatctttttcttttagagaatcttcaagtttcttgattttatcttagaaacccttgacaacagttttgttctttatgtcttcatcatcttgttgcattttcaaagctttgcttaataacaaactctataaaaatgaattaaagttagaatacctaggtcaacacgaagatatcaatggtaactcgcaaggggaccttactttgaaa

SEQ ID NO: 116848 - DNA, 382 bp, Zea Mays
cctggatgcttcatgcactccacattgcccagcatggacctcatccagaagttgctttccagtatctgagagaatacatttcatgaggactcctgacgcgccccttctgtatagcgtttccccaatgagtgtatagtgagctgactaccttgcaatacgctcggccgtatttttgtcatctggttcctctttattccttatatatctgatgatcggctccctccagtcatcaggatttgattctggttggctcagagtattgcattcttctacccgatccactgaaatgctcgggcgcgacacttcttgggcaaaaactccaggcgagacctgagtccgactggaccctagcttagacaatgcatcagccgccgcgttgcgg

SEQ ID NO: 116849 - DNA, 352 bp, Zea Mays
catgtccaaggtcttctagagtcggttttttgaagccacagccatcgcatccggagggcccatccaagctctgggaggcttgatattcccagacctccaagctgaagaggacgacacaccttgccccaagccaccaaacagtgccccctttagcttcctttcttcctctccaaagaaatccctttcttattttatcaatagcatcaagggcccaatggggtatataaattgccattgcaagatacacagtcatacctgtaagaacatgttgcactaggattctcctgcctgctctggtcatcaaatcagctttccaattaggaagttggtcagcaaatctatcaacatatgg

SEQ ID NO: 116850 - DNA, 567 bp, Zea Mays
ggaaattagcaagaatgtcatgaaaagaaagaagatggccaaacgcttcagcagataggggagtgtggaacaattcattcggggaagccaaccgagcttgatgaatgttaatctccctgacagatgcaaaagaccagagctccgggaatctttcagatgtgcgctgtccattccatcaatcatgccagaggagagtagttttcccatttccaacctccactcgggcaatttccttaaataaatcatgaattttgataatatctttccaccaaaacgaaccaactggtttagctgaaggcagagaattgttgtagtgagtgtcccagatgatgttgacccacaggatgttgactctattatagaatttatggaggcatttcataagtagcactttattctgaagctcaagattgatgactccaaggccccccctgattttttggcttgcatactgatttccaatcaactagaggaggttttttagcatttatgtctgcccctctccaaagacaatgccgtcgaagtttatcaatctgtttgatcacatttttgggaagtttcagggtg

SEQ ID NO: 116851 - DNA, 345 bp, Zea Mays
ctaaaccacgctaggtcgtcgagaacacccgtgttcatccgttgtttgcgctgtctccgtggaccgggcgatttagagctccgctagtgcaattgatcgaggggaaacgcttcttcggtgttgaattagaaataaaccaatttagagcactggtcgtggcgtattccggccagagcgacctcgccggagctactgctccgccgctccacgtcgtggacctgacgttgtgaagaattagaattagaggggtgtttttgtaactatcagtgaaacgtaggaatagtaccgcgactctgtttcaacttattcaaattagcaaggacccattcgcaaaatagacacgcg

SEQ ID NO: 116852 - DNA, 354 bp, Zea Mays
cttgataaggtttgcgggtgaagaaataattccagagccaaaggatgatgatgaggtggtttttatgagcttccatgccgggatttgattcccgttgtacgagatgattggcaaagtgctaaagagatttgagatatatcttcatcagctaacaccaaatgctatagtcagactttgtgtctcgaagtcagagaaagagtgataatgctgaaggattctgcagagttcattaactccattaccagaccaaggcgagagcagatggtctgcacaagaacttcggatgctacaattttgcatatcgaaaggatacgaaggcccttgtgattggatactgcaccaagtggcccaccg

SEQ ID NO: 116853 - DNA, 356 bp, Zea Mays
gtgtgatttaattctattattactaactgctatgaatggtagtattacggaatcagacgtgctttctgctggtgacagactgagtaggtgttgtcttgttcctgcatatgtgcgtaggtgctgaacgtccatatgtattcacgagctcaaagtcaaaccacacatagtatactacgccttgtctttcattcagtatactaattgtccatatgtattcacgagctagctacgtaagtaccgccacgatcgacgtgtatataacatacgtatccttttgcgatgatatttttctgtatatatacggctatattaattgtccgccctgtagtttgcacatccagcgagtccaaactaat

SEQ ID NO: 116854 - DNA, 459 bp, Zea Mays
ccattaacaattgtgttgtcttgttcttggtgcataacatttgagagcaaggaccaacattggcacccacctccggtgaactcattcgaccaccttcggcaagcttcgaccttcgtcatgccgctgaagaagatagcagcaccaggggctgcactgcagccactggatactaatcaggagacgctacacgaagctaggagccagaagaggaaggctaccagcccaacacctcaggaggaggaactcgatcaagagatcagggacctggaagctatccatcaacaggtgcagaagaagagagaaaagatgctttggctcgccgatctctagaggaagatcgatgaagccgccggagaaatgtgtcacctcactcaggatgaccaagaccgaaggccccagcatagggagcttcgccaggaaaatccatacaatgacgatgaatggtacgatgactttcat

SEQ ID NO: 116855 - DNA, 594 bp, Zea Mays
tcctacatagctacccccaacaccatatattccagcatcacccgcaccatccccatggctaccatcatcgttgttgccaccatcaccttcactagggttatttgtgctttcttcagtcccaacctcttcatcttcgcatttttatcagcaaatttgaccctttttcctttgcgttatgaaggaccaatttttgttttcctctttccaaggtgggtgtcaccaactgttgtattggcctattcctgaacatccttttgtgtctccatgttcacgagcaattgatgtaaacaacttgttaggaacatgtgtgtcactattagagagagatgactcctcatgtaatgttggaggtgcattggatctccctctctccatccactctcggatagcttcattatgtctatgtaaggagagatccatgagggccaaggcaggatccaactcactaggctttggcgtagctgatgcacgttgaatgagtagacataggttgtagttcacgaacaccaactcatgtagattctggtagcctagtttgttgcggagctttatatgaatgaaagtgaatgtactccaattgcgctcacacccact

SEQ ID NO: 116856 - DNA, 443 bp, Zea Mays
cgccactttgtcaattgggccaagtggttttaagttcaggatcaaggtgaacatgtttgatctttggaaagggggtggttttggacttagaagaattctgatttttctcttatgctcaacccttttgtgaatcttttggggtttttctgaaatcttttttgggttactttcttactattatttgtagggtattaagtgcactacatcttgtataattggcccaagacatgatcaagtggttttcataactttttggtcatacttacctatagtactccaattgtccacagggggtgcattagggttttgggcaatttctcccccctttaatgtacatggtaagccaaggcatgacatctaagataggttgcactttcttaggatcttgagctccaaatttggtgtactttttcccaacttaagtcacatgtgatgatgggctt

SEQ ID NO: 116857 - DNA, 313 bp, Zea Mays
cggacatgaagcttctaaagcaactatcatagccagcaacactccacaactgaaacaggacattgtagtctgccacttggaagaccaggagaccaaggtgtcactgagaaaggtgcagaagctcaaggtagaacaccgggagtttgggtagtctgtctagtcgacatcagagtaggcagcgatggatgacacaccgctagtgcctaggtgaagaccgacatcgagggtgcccttctcctagcataggatgtgctagatcagtgcgaggtggggctcttgttagtcatgttcgaagagacatacttgctaaacg

SEQ ID NO: 116858 - DNA, 558 bp, Zea Mays
aaattggacacttcataagcgtcttaataactgaaaattaaccgtctcatatagcatgatctgtagtagtgtcagtgacaagggagtgcaaatcatcaaagataatcttagttaggaagtggggaagtataagtgctttcgccaagataagaaggggatattgtggtttgaagacagattggtggttcctaaaaataaagacctcaagaagaaaatcttggatgaggctcatctctccaaattctccatgcatccgggaagcaccaagatgtaccatgatctgaagcccctatattggtggaccaggatgaagagggaaatagcccaatacatatcggaatgtgacacatgccagaggataaaggcaagctacataaaatcagttggtgccttgcagcccctatcaataccttcatggaaatggaatgacatcagcatggatttcattgtgggtcggcccaacacctctcggcatcatgattcaatttgggtcattgtggaccgattgacgaaggtggcacattttattccggtgcacaccaccgataaggctcagaa

SEQ ID NO: 116859 - DNA, 286 bp, Zea Mays
cgcgactggtgggtcaggaccttcatcttcttgcccttcggcacaacagtaatggccgaagcgatagtttttcttttcttcccttgcctttgcaacgggtaatgataatcagggtatacgaagccaatggcatcaaatactctgtttagtcttttcttccctcggcccccgaaggctgcagacaaggcatcatcttcggccctgctatatgctccaagtagttcatcactgatagcctcaatactttttagccaatcatcatttggctcatcaaaacggtctctga

SEQ ID NO: 116860 - DNA, 273 bp, Zea Mays
cactactaaatactagtgtcgtatagtgctgacattgtatgattaggcactatgagactgcttggtagcctagataccaccttagatagtctgcaataatgcaacatagtttgtttggttacctaaatcctaaacactatagccaggccccagtagtgcagaaagggatgctagcctaactaagttagtacgtcagaaagggttcatatggctttgtaactaggatgacaacaatggacacaatgttcctcttatcacctcacaactgactgt

SEQ ID NO: 116861 - DNA, 859 bp, Zea Mays
aacgacgattccgcagaaaatatccatccaaacttgttcaaatttttgcacaacattcacaatgagtagcactaataatcccaccaatcagatttgtgaatctattgctcaattctagatcagagagaaaatctgactaatcccaaatttgaagaaatttgatgaaatccatgagattatgaaataccgggatgaagacatgtttgttgaactttccacaggctttcggactgtccgtgcgcaacttctcttcaccgtccgtgcacaatcgacgaaagtgaccttttggcgagtggagagtgtgagaggagaggcaatgagtagaaatgacaagttgactgcctctgcccgtctttactgcctgtcgcggacggtctgcgccctgataacttcagactgtctgcgcttctgaccggactgtcccgatcctgatactgcggacggtccacggtccatgggcggacggtccgcggcctgatactcaatttttcaaattctgttcactttctgattttgaatttcaaatctgatttgatgctcatatatggacatttcgaccagtccaaaggttagtatgcatgcatatacacattatgtatttaaggatgcaaattttcatatcaaaatatttagatcaatctaaaatgaaaatttcatcaaaaatacccaataaatagcgtagagagcatatttagagccgaaatgcaatactacacatgtgcgatcaacctcaagccacatttgagagatcgatcacattcatttcacttcttagagtacaaaatctcgtttcatccaatggctttgtaaaaatatcggctaattgatcatccgtgccaatggaatatatagagatatc

SEQ ID NO: 116862 - DNA, 324 bp, Zea Mays
gcacgatgtggatctgacggccagagggtcttcttccccaactcagccgagacgaagcagtggcatgcttcaacacgcggcgcagctccggtgggcaggcgcacaagctgtcccagaacacagactcgagctaggacgtaactacacgtggagcagactagggaaaataacagaaagggattttcaccatggttcaagacagcgcgattccgatgatgtccccgcggtgccctacgcacagggacggaacgcccggtatggccatgtatggcctaagccataccttgatccgtctcattagcagaccaaagaccacttaaactt

SEQ ID NO: 116863 - DNA, 407 bp, Zea Mays
tgccgaaggtccgaaaaagcaccttcccttcactagaatagcgaatcattctgacccgtgggacccaccatgctgcggggttctaggtgtatatatagagacctgtgtcgtgagtatttttcgtgctatctagttgcttgcactgtgtttgccattttaaccttccttgtttcgtcgagtttgattaaattttgagctttggcattttagcaaccatcgtttgaatggctgaggagaagaagatcaactgccccgctctggccgggttttacgaagctatggagaaaaccaacacagagaaaatcaccaatgaaatgttggctgggttatctaaaaactcaagcgatagcgagagtgttgatgtagaaagtggaaatgaagatgtcaaagaccggccatggaggtcg

SEQ ID NO: 116864 - DNA, 699 bp, Zea Mays
acccgcctcgacgtcgcgcacgcgctgccactggtccttagtgccgcaccaccagggcttaaacaaagagtgtcatgtcgtcggtcctaagtgcctctctctcttctcttgtctaatctctcctttattcttctcgcgcatcaaaggcaatacacgtcaaaaggggcaagcctcgcgcccgtatttttttatgcttaaggcgcctgctaggtgctcgaaggggatgccttgcacgcctattgcgctaaggcccaaggcggacgccctatcaatctaggtcaaggcggtgccgacgcctaacattttttacgcctgcacgcataggcgacgccttttaaaccatggtcgtcccacttggtgtagtccagagaggtagctgtactgatcaccactaattcatcaagaagtagatgacaaagcgtcaaccatcaccaggaaggagaggacgaaacgagcagttgtgccgcttgcggactcccccaaaatgtgattgtcttcactcgagcaggtgaactctcggacgacactcgtttcagagtcttactctctcaatacttgtgcgcgtaaggattcaaatgaggagaacttggccaacaacagaactgaagaaaatgaatgatgataggatgaaacttttatcttcgagccagaagaaccgagtgggcgtgggagaaccgagcgggcgcaggagatcaagag

SEQ ID NO: 116865 - DNA, 440 bp, Zea Mays
tatggtcaaggcttatacagtctccctggcagcagactgcaccccaaggacgtgactagctggttcaaaatcttttttcaaggtttggacaaccctctcttctttccttattatgatcttgtcaaatttgagaacccaacctctttcaagttagatagctttgccaatgatagtggcactcgacacttgtactcacttatgatccgcccttgcttcctttaagttggcatgaacttctaacaatattatcaagcctagttatgaatcttaccaacctgttgtagtggcccgacaattcggtgttggacaggttcctcccactttcacctccaccagctgaccgaatgtagagccaaccttcctgattctatcactgcccatcggtgctactcattgttcgagaacctgaaggtccttatttttgtcgacttatcattcac

SEQ ID NO: 116866 - DNA, 283 bp, Zea Mays
caggcatacaatccgtgccatgtacaactctgccaacttagctcctgaataagtggtcttcactggaataaagtgggctaccttggttagcctgtccacaatcacccatatagaatcatatccagcagacgtgcggggtaatccaacaatgaagtccatgacaatctcttcccatttccactcaggtatcttcagcgggtgcaataatccggctggcctctggtgttcagctttaactctttggcatacatcgcacatagccacatgtgcagccacatctctc

SEQ ID NO: 116867 - DNA, 939 bp, Zea Mays
attcgctaggtattcctgcactagatccctagtactgatatgtttagccaccactctgaattctgcctcagctagctagcatggtaaccctagcttcatgttgcacaggggtatggtcatcccgaagcttaggctcagtgggctcatgaccaacttcttcagcttctcccttttcttttcgttagccttgatataaaaccactcacttttccagccagttggccatttggtccgatagctcaggaccggggccttcgtatccttgcgataggtgaagttataacagccaaaattttcgtggagcccgtcttctctggccttcgtctggtaatgtagctcatgcacttggcaaaaaagcttcggcatttgggtccatcccctggcttcggagggcccagatgaaaatactgagtctaacgatggcgttaggggtcagctgatgaagaaatatttcataattatccaaaatttctccaattatctcgttcagtggaaaccgtagtcctgctctgaaaaacttttaaaaactaccacttcatcatctttcagtgtcagagtggtttcttccccagcaaagcgaatcagcttcctctcggcttgtccgaagtagcccagcttcatcatcatgggcatatcagcttcataaatagtagatttttcaaaatccatgtggctgggttttgacgggatcaaaactataatcctcctcttcttcatcagcgattccttcctcatcttgttcagtttcggcagcaggtgcaccttcttcaatggctccatttatcacaactagtctcgattgtctcattacttcggagatcgaagcagtctcggtggcttcggcctactctccatcatggtcaccctcgcagtcgagcgcactctggccatctgatattgaatttcttacagttcttacgatgttgatgttttttcaaa

SEQ ID NO: 116868 - DNA, 312 bp, Zea Mays
ataccagagattaacaaagtctaacaactgagattacaaggccaaatccggcccaacaggatccactaaaaccaaaccttgttagtaaacctctcccaccgcctcctcagtcatctgcggcgatgtttgtctgatcctgatgcagtaccgatgtgacaatttcttcctcgtggttctctcccatccgaccatccgtgagtacacgctacacacgtgctcatgaaaacaccatgcgtctagggttcgcagacggccgctgaaaactatgtgtggttttagtacttgagataactaatggactaatgtctattc

SEQ ID NO: 116869 - DNA, 1012 bp, Zea Mays
caccggtgtcttggtcatcctagccacgacattgtgtccaaactaacacaattgtctgctattccttgtaataagcgtgttgatcacattttgtgtcacacttgtcagttgggtcgccatacatgtgttcccttttatgcatccttgtcacatacaactcgcatttttcagcttatatattgtgagctatggacgtcaccaagtgtcaacgtctctagctattaagtactatctggccatccttgattttttgcattaactttggacattccacctgtgactgaaatctcacacattttccacccttgcctctgctgccacacagttcgacgtttccatttagggcatcaagtgcaataatggtcacagattcgacaaacacatcacccacactatcttccactcccacaacattcaacttcgtatgtcttgcccctaaactttgcctcaaaacagtaaagccgaacacatgcttctcaccatcaataatgtcgttcactccttgttgattcaggatagtgtccttctcgcatattgggtcgaggcgcttagcactgttacgctcctcaatattctaccgactaagacacttaacttcacatcccatcgtgctatcttcggatccccaccctcatatatactcatcactatgttttcgaccgacgatgctatcccaacatttccgccaccgctcctccctgtatgttttccccgattactccactaatcataagggttattgttgccttgatcggtcttccaaccagatcattatttctaggcacattgtatgagtatgtgctaggtatagcaagacaacccttgcatatgttaaactgatatatatggtgtgtgtgtgtatggtaatgttacgtgccaggaagattttaaatatgcattttaaatatgcacagaactgactggatgagaaacaaacgcactataggcagtgttcaagactaaaacatcaaaaaaggaagattttaaatatgcacagatgtaggttgagggc

SEQ ID NO: 116870 - DNA, 470 bp, Zea Mays
atcgacacgactcgacttataaatgcagagaaagcagtgactactttggcatgtcaccacctatctagttaagccaaaacaatttctattatcgactaagagttctaagtattaaacatattattagttcccacgcacaaataaacctcaacttaacataagtgacaccgatggatttttattaaacttattgtggcgtgcactcgagacattactgtttaatttaacgcaatcactactacaactcatctcggcatacttgttcggcaacacagtgctcaggcaaacccacacttccaatctacttatcacatccaaccacaccacgtgcccactgcattcttatgaccaattttagcacaattatttatgacaatgtttatcgactagacgagtgaaacaccaactgattattcgcacatctcgcctctaaaacactaatcacatctcacataatttatattttcaac

SEQ ID NO: 116871 - DNA, 501 bp, Zea Mays
cccaaaaccgccgtgcccaccgacacgcggggcctgccctgtcagccgctcataccctctctgtgccatatgaccggtgggacccacgtctgggcgttctcctagctcaggttgtttctacgatttctcgggcgcagactcgtggggctggccagattcctctcatcaaccattacaagcctgggaccgagccttccccttgactcatggctctcaattgtggctggggtcctcttccacgggtcttcttccacaattcatggtaacagactccaatagaagatgccaatcacgcgcatgcctgcgatctggtggattgggttgtgagattcctgatcccgcctctgcccatataacgtagacgcaaaaccccccaaccctcatcttaggcgccgccaaaccaccgtcaattgagcaagcatcgacgagaatagggaagaagtacatgaatcaccgcgggtccatgcggtggcatggttgggagctctgcgctgggtggat

SEQ ID NO: 116872 - DNA, 928 bp, Zea Mays
caagtttatatagtagaattggagctggtatattggagattaactttgttaaagacggattagggagttgccacacaaaaatttatgaaaaacatctctgaagttgctcttgttaggcgctctgatgaacggtttcgatggtacagtagactgagaaacatcttcaggtgcatcacccctcgccgccggtgaccctcgcgtcgtgatctacgctggtgctgcgattcatgttcgctagtgaggagataatcgaggcggagtaaaaatcttgacaccggatatgctcgaacccggtcactggtgggttcaccgtacccacttgacctgcaaccgaccgagatggccctcaccggcgttggctgcttaccgaccgtgaaccacgtgcctagtagctgtaacacatcgcagtaaaccgttgatgcaggtctgtccttcgccggaggccttgccatggtgaaagccacgatcacccgcggagtgcacttctcctctctccggccgctagcacaacttctcaaaaattagcctccaccgctctcggacactataaattgaaggtgccgctagctccattaggttgtcacgaagccagagcacccgcccctgccttcgattagccccataacgccctaatttctttcttcccccaatttggttctccaagccgccgtgtgccatcgcgtcgtggaccgccatttccaggtccgttcataccctccttgctctcgtttcagcacgttggtgtgctatggatgcttatcagcccagccaattgaactagaccatgctagattgccgggaacacctcgagtcatcctcggttcttgccgtcgtcgtgaacagagtgattccgacccagattcatgaaattaattgagggattaaggccgccaagggtagtatttggtgtcaaccaagtaagaagctt

SEQ ID NO: 116873 - DNA, 447 bp, Zea Mays
taagttgtttattgcaaattttatgagccttgatcaagatgtataatgcttctccctatttgtctttaaagtaaatgcatccaattcattcaaattcttgatgcatatctttagggggagtctctttctatatcttgattatgttgagactatcactttatgttggtaatttcatatagtctcttgcatgagaatgagtttctcatgatgtatgctactatttttcaattattatctttcactctaaagtagcatatttgctggattctcgtatttcaagcttatctaatgcatatgttgttcttttgatcacatctgttatttgtttgatcattgaatgacttcaattaacaatcatgtttcttagtgccgtatatactatcaatcgatatctctcttgatatgcactaagttaaaaggagaattcatgatacatttatgcaattt

SEQ ID NO: 116874 - DNA, 319 bp, Zea Mays
gagttaacatgtgtcttgatattattgtaatatactcagtgtagtggtgttgaatgaattaatcttaagttaaattgtggacttatgctcgtacatagttggttcatgcacaattgttgtttaaagtagaacatggtcagtgatggactgaaactaggtttaggaggaactaaagatctgggactaagttcagagagaaactgaagtcctattggctaaggatatcacatgagacattcgagtttgagaacggtgcaaataaagatagacgttgcgttagagtgacaacataatgtatggtcgtgtcacgtgaggatat

SEQ ID NO: 116875 - DNA, 457 bp, Zea Mays
gtttcgagagcgaggctacgcgcctccggtcagggcatgatgaggcatgcggcaacactaaatgcctccatggggagaggacccagctccagcaagacctgagcgaagcgacttcgcgggccgaagaagtcgagtcgaccttgcgagtggtgaacgctcgtctagaggaggcgaactcggaacttcgacgtgagctggaggttgttggaggtaggcttcctttgttttgagcacacttttgtcagctgtcaatacacatgatcgtgattcgtagatcttcagaataagttctctaaggccaggatgctatgaaggcggttgaataggcgaagaaggcagtggaggatgaagagcacaagctctcgatcacttgcgacgaagtcattattgtgtaggttcaagtgcaaacttcgctgaaggagtacaacatcgaactgcaagagcctcaccaagtcgt

SEQ ID NO: 116876 - DNA, 463 bp, Zea Mays
gtggggtcgggtcagtcagccgtagtagtggaagcaggctcgactggggcggccggtggagttggctcgagagcaacctaatcggcgtcatcatgctcctcctccataaagatggtctttcccatctaatctggacctgcacgctcaaagacaggggatggacaaggtgcagtctcatcaaatgtaacctcacaagtctccataatgcagttagtctctaggttaagaacacgataagcatgagaatgtaatgcataacccagaaaaactccattagaagactgggactcaaacttgtccagattaccttgttttagcacaaagcatctgcagccaaataccctaaaatgactgaccttgggtggccgtccaaatcgtagctcataagaagttttgttcagaaaagcccgaagaacgatgcgattggacacatggaaagcagtgttgatcgcttcgacccaaa

SEQ ID NO: 116877 - DNA, 350 bp, Zea Mays
gaatgctagaagtatacatgaaaggggatgcgtcgggaacagttattttgtgaaactatcaaaaatcgggcttgctcctcttctttggtgtatcattatagccttaatggttgtatatatacattcaattatcttaggtattatggtatttttatgtatttcaaatgatttattcttccataatgtggcacttagtttattccttctatgcagaagactataacacaaagatgaccgtaatttttgggttatttgcatggttgggagttttccttgcaagtgtcggactggttatgttttatagatgcagcaggtacacatcttattacgatatatacaaggaacaaaag

SEQ ID NO: 116878 - DNA, 456 bp, Zea Mays
gttaactagagagggattctttgatttggtttcttctttttggcaacaagaacgtagaggagaaactgccatacagatatggcagaacaagatgaggtcccttcggcagtatttaaggggatgggcaaagaactcgacggggttaattaaaaaggagaaacaacaacttttagaattgattgatgaactcaataaaaaggcagagtttacttgcttatcgcctatcgagttgaactctaaagcttttgccaatgataggcttgccagtatcttgagagaggaagaagtacgtctcttccagagggccaaggtcaaacatctcctcgaaggtgacgataacacaaaatatttccatttagtggctaacggcaagcaccggaggcaatggattttttcgttggaggatgaggatggtgcatgcatagcggataaggaagaacttaaatcacatataac

SEQ ID NO: 116879 - DNA, 457 bp, Zea Mays
aaggacacaggaaagggataataatagaaacttgcactccaataggagggcagtggatgcgcaaaaacaaaaagagatacgatgtgtacgtagggctaggaatgcgccataaaaactcacgggcaaaaatggcctccaaactcatgggctgacaaatttgggctctttttgggttcccattgataaggccagagttggatcaagccatttccctaaagagcaggcacgaatcgatcctcgaacatggctcaagcgtgcttgtggatcgaaagaaagggcataactcatggatcgtgtgaagagttgagtatctcaatcttttaggcggtatccgtattcgtgctcgtagggaggcaacacgacacatgtaggcagctccgtggagatgctgcccctaccgcggaggacaaggtcatcctcacgactgagcagccagcaacccaaatatctgttgcaa

SEQ ID NO: 116880 - DNA, 293 bp, Zea Mays
cagcagctggccagccacacagtgcccacagcttgcaagatgttgagcgcgtcaacagtggtagttaagctcctcctacaatagtatacaaggtgctcgatcaattgccacgtgcatgaaaaatcatgctacaatatgtcaagagtgcataggtatttggatttctggagcttcaatttgccctgcacaatattgcctctcaacgacaaggtttttattacgttgagtttgatctaaacacttgtgcagttcagaagactccatgacaaatctattgagaagacagaaaaagg

SEQ ID NO: 116881 - DNA, 403 bp, Zea Mays
cctccatgacggcgcccagtacgcgaggctgaatcgctgaagccgccctcgctcaaaaagttgtcgtgactcgtgaaccctactccgctgcctttagctcactcaccgtgaaggggcgccaccactattctgccggagtgagaaatggagtgagaggagtggagcaagattgagaaagactagggttcagtaattgcttttgggcctccaaattccgtacgacccacaaccataacaccgaaccgagcttagaatttctagcgccaaatgttacatgttttaactgttttagcgggataatagtggctattagcgtctccagctgtttagcgcgaaacagagtagctatatccagatatatcgatcgctatatctagttattttaaatatagggtgatagttc

SEQ ID NO: 116882 - DNA, 307 bp, Zea Mays
ccggaggctactgaagtatggcgaatgtattttgatggctcgctgaagctgcagggagcaggcgcagggatcctcttcattgcccctggaggtgaacaactcaagtacgctcttcagctattattcctagcatcaaataatgcagcagaatatgaggcactgatccatgggttgaacatcgccatatcactgggcattaagaggttgatggtatacggagattcactagtggtcataagctagataaataaagattgggattgctcgactgattctatgggcaagtactgtacaaccgtccgaaaat

SEQ ID NO: 116883 - DNA, 511 bp, Zea Mays
gccaaaaccaaaaccaaatccacaacaactaagcctacgcctagcttcggcttggaaacaagcacatgcccagctctagcgttacctgagcctacgcctggcttcaacagtaactaagcatgcactcgtctctagcacagggccaagccaaccatcacaaagaaagggtctaccccaaagcggcgagctcaccacgctcaagataatcccccaaacaatccataagaattacttagggcctcggtgactgcatctaattgatgcgcttgtgtgcctccatgatcttgattccttacaagatagcctacgaacaactccaaggagttgtccggaggcttaggggatgctgacgggtccctaggaacatggtttcctaagtaggcccatcacatatggtggcctaatgagggcaaagggctgcagaagtgagacaaccaactcccgtcgagcaattaggtgaagtgactaaccaactcccgtcgagcaactggatgagacagtgaaccaagcc

SEQ ID NO: 116884 - DNA, 497 bp, Zea Mays
cgcgttttcaccgtgaacagttgggctcatacgtgacggcagggtggatgaagtagtggtggccatggtgcagccggtgcttgaatctaagctgtaattgatgaagttggtgccgcttgattgcaccctccgcggaaggaactcaagatggaatcggcactggtaaggtcccttcaatccctttgcatcctgtttaccacgcgtagacccaccagggagggagaagcatgtcaccggcgagcgcacctccgccaacggcatgggcatttcgctactcggcctcggtcggggaagaagcgctctgaccgtccgatctgatgtgggcgggggaggttagatcagtacatgaggcattcctttggccattgattgatggatccacaggtgagattaaaaccagggtagctgtgggctcgggctgttctgggccattgagattggatcagacgactgaaactcattcataccctttcgcctgggtggtttttcagaagagc

SEQ ID NO: 116885 - DNA, 291 bp, Zea Mays
gcgaaggggtatgggcgaacttcggcctcccgatcaaacacctatcgtctagattagatccatggtatattacgaaccggtatctcacacctatcgtcttttaaagtatagcaatcactatcgcccgccggatcaatgatctccagtccagatcaagcgggccaaatcgttttctaaggccttatctccatcgtccactgtcgatccaacgatcgcgatctaaccgggtaaagtgccatgttgcattcaatcaccattgatcgctcttggatgaacggccacgagactctc

SEQ ID NO: 116886 - DNA, 451 bp, Zea Mays
aacaaaggcctagctcttcatataactccaagaatatgataagatcggggttgtcaggccttagcagaagggagtcaaggtccatgtaacctctatcctcccttgcactgtaaaaggaggaagcaaggtaatgttttaaaggggttagctcagataagagatgtattaaattcactctacataaagggtagccataaagatagattaagaccaataggcaagaactcccacaagaattgaatggcaagagggaataggcaagaactcccacaagaattgaatggcaagagggagttaggagtttgtggtgctcagttgtgttatgagactataagcttcaccttttgtgcatcattcgaagagtggtaagagaatatagggttttacgcacattgtggcataaacctctaaacttcccttgtgcttgctcttgatcgtgcgcaggttcaac

SEQ ID NO: 116887 - DNA, 293 bp, Zea Mays
aaaagagggggctctatctagtgagtgggttgccaaggccggtgaatttctcgaccgtactttttgtagctcacaaatcgataccaatgttaggtgtccttgtagcaagtgttagaacaattattttcatgacatgaggactatgtcaatagatctttgtaaggacggctttatacatagctacaaggtgtgggtgcaccgcggtgaggaactacctcgtcagaaagtatcagaagttcaggtggatagaggggactacaataggatgaaaatgatgcttgagtatgtacgac

SEQ ID NO: 116888 - DNA, 491 bp, Zea Mays
ccattttccatcatttgatggtgagaatcccaagctgtggcaaactagatgtgaggactacttccttatgtattcggtggacccctgtatgtggatcaaggttgcttctatgcaatttgtgggaccagcagctagatggctacaatcgattgagtataagttggttcaaatgtcttggggggaatttgggcgcctaattcaggaacgatttggcaaggaccaatatcaagggctccttagacagttattccagatcagacaaacggggacagtagctacttatgtggaggaattctctcaattgattgacaagttaaatgcttaccaaaccatgtctgatcctttatactatacattaaaatttgtggatggtcttagagacgacattaaagctgttgtaatgcttcaaaggccacaagacttcgatactgctgctgttattgctcaattacaggaggaggcaggtcttatgttgaggaagaaagactatt

SEQ ID NO: 116889 - DNA, 491 bp, Zea Mays
cgccgcgttccaggtgatcatcgtggagttcctggggactttcgcgagcacggtgcacctgagcgggagactctggctcgctagcatgatgatcggctcgggaagcctgctgatgggcgccggcctcaagttcatccctgtcgatccgggcagtgaaggctcgtctgaccgccacgatgggtaccagcccatccccaccggccccaacgccgtgtgatttccaagaagacctcctgccatccttcttgatttttatttccttctatagaaacaatagaactgaaccctcggatgcgtttgcagtttggggaaaaaaaaagatgttttagataggagcgacggttgcatatgatggccgtcctcaagaattttaatcctcgtctcttggctattttgtctttgtagccggcaatgttttgtttctgaatttggatgatagaatcgatgttgctttagcgaataatgagaatctgtgtgaagctttgcataat

SEQ ID NO: 116890 - DNA, 460 bp, Zea Mays
tcgtttttgttaactgaaaccagttttcagtgttatcctcaacattttgttggacctgataactcttgatccctgcacccgtggttttgggcaagtgagtcaatctgatagcgctatggtcggaggacatgtttgtctaactgttttgacttggtgccattaaaattttggaatgagacaaggataaacatgtgggttcagtaaagctaatgtggctgggttcagagaaatagaaaatatcggcaaaagatctcattctgttatcttttcaatgggagattctacgaaaggacttcaaactattacagtcttatcccaaggaggggaaagaagtgatcccaaccggtgaatattttttccagtagtttctacatgtagctgggtgtcggacacagctaatatttactgtgtggtcgtggcaacgtggtaatctgaggccgcggcgcgcgtccagaccttt

SEQ ID NO: 116891 - DNA, 275 bp, Zea Mays
cgaagatgaggctacatgggaaactcaagactttttagacaagaatttcccaagcgttttagcctcatgtagtttgtaaagtgtatataatcgttgtaataaagaagtgagccccaaaccacccctgctttgtaccagaaataaggaaataaaagtatgacgtgtttccttttccattacttgccctaggacttttaatctcaggacgagattcttttatggggggaaggatgtaacacctggtgttactgttactaaaatttgagcatgacatc

SEQ ID NO: 116892 - DNA, 581 bp, Zea Mays
tcgctggtggtgatatgttcactcttggtgaagccaaaaattcatttgtgttatggcctaagtcaggcatacaactagcagaggtacactttgctaacttcaacctgatgaacttattattgttattcaaaacttggttaatgccatgtacttgtttctgaatttcacataggaaacaacagttcatgcaaagcctcaacaagtcccacacacatcgcctcaggtactccatcacacaccggaaaaggataaaatgccaacaccaacaatgggtaccgaggatatagatgtcacacatagtgcctccaatgtcagcaagaagaggaaacataagcataaaaaacataacaaaagcaaagagaaggagcaaaaaaaattcacaacagaaaaacatagaagatgatggtcttgatcccctttggactcccccctttcatcaacgatctccaccaccagttccaaataataaacaatttgtgctagggcagcctttagtatctagtgcattgcttaagaggatgggtaaacagagccaatgtttccacaaatggtattttgctatgaccacaccaatatctcga

SEQ ID NO: 116893 - DNA, 568 bp, Zea Mays
gtgacccgacagcaaatccgccaagagcagagctcttttggaggaagaactccaacatcaacaaggtggaggagatctgattctgagacaacaaacatgtggttacctgcgaacggcaactgactattgggatcgatgggaggaatgattgccacaacaaaactctgattcttccgcttgggcgccatcgcaatctcgccggcggatcgaacaagggcgaaatcttagggaaacaaagaagtggatcaaggcggaaatgtgaagttagggcttagaactcaaaagcgcacgtcgacatgagtataaatggggttttcccgggttgggcaccatttctaaaaagtgccaagtcatcactcgggaaaacgagatttccgacataactcggctgttacctctaaaacgccgacaacatcaagcaccactcgaccgttatctctaaaacaccgacaatgcctgtcataactcggttgttgtctctaaaacaccgatggggtcaagcataactcgacttttatctctaaaacaccgacagggtcaagcataactcggttgttacctctaaaac

SEQ ID NO: 116894 - DNA, 351 bp, Zea Mays
ggtttataagggttatgacaaacaacttcaagcttcgctttgtgacaacaatgaatggttcccatggcttttgagggcacacgctagataaagcctaaacaagtgaaattgaatatcatatgccacacggtgtgctatgggaaattgattcatagcctcataggtgggcttgggctcgacacaacccaattgttatcccaacgtcagtccaacctgcttagatccagctaatttcaatgaggttgcaaggtaatataactagaccgattgtctttttggtgtagcttgaattttctgttgcatgttggcaggtagcagcaatcaatcggaatttatgcagggggtgcagga

SEQ ID NO: 116895 - DNA, 376 bp, Zea Mays
acgacctttaataaaggcagactgagtcgagctaacaaccttatttgccaccgatcctaacctattggtggccaccttggtgaagattttatagatcacattcagaagacaaattggcatatactgtagaataatatttgcctcctgaaccttaggaatgagggttaatgttccaaattgaggctaaatagggggagataacccttggctaaatccctaaacatttgcattaaatcatccttgacagtttcccagaactgttgatagaattcagccggaaacccatcaagacctagaagccttattgtggttcattgaaaagatagcctcccaaacctcgctttccaaaaaatctactgtaaggaagctattttcc

SEQ ID NO: 116896 - DNA, 452 bp, Zea Mays
gtacacgattattctggcttagattgtgctgcataaggtctaatacaagcaaaaggcaatggaagcaatcaatcaattaaacacactatgttgaggatttctttcgcgtgcatcattggcacttccatgccatttttataaacacactgatgcactcacatgtgtgtcgataaatgaatgatgtatctagcatcactaggtttggttagatccagcttggtaatagttagcaactaagaattaggcagagtgaaccacaagataccaatgcataaaggtgtgctacccgtattaggcatgtggcttaccttcttcttgtggacctttctgacttctgtgcctccttatgttcaccatcaaggtcgtctgcgatgacccaaatccagcgatggttagggtttaggggttggcgagagaaatgtggatggggcgtgttaggtggaaggggcgag

SEQ ID NO: 116897 - DNA, 516 bp, Zea Mays
ccttagatgccatcaaggacttgtgcgcatgacggtgcgtgtacttcccgtggtcgggaagatactcctaatcccccacttgtaccaccaacgctggctgaggctatcgctgccttggtcaatgctactgccaataatacccgcttcttatgtgagatggtgggtaatcaattccagtagcacggcggaagggctcctccacagggaccgcgtgaaacctcatatatggacttctctgaaatgcgtcccccactctttgctaaagctgaagaccctcttgaagctgatgagtggatcagggtaatggagcagaagttcggattactccgttgcacagaaacacagaagccgttgtttactgctcaacaactgagaggccctgccagtacctggtggggaaattttgtggcaattcaactagccggacatcaggtgacttgggatgaatttaagctggtattccgtgaacactatattccagaaggagtgcttcacatgaaacaagatgaatttatt

SEQ ID NO: 116898 - DNA, 500 bp, Zea Mays
ctgccgccgttgttgaatcatgttttcttcttcgctccggcctcggcgtagggtcgttggggccgtcagggctcgtggatcccgtatcatcctctggggagcacgaggatcatcggtgggttccgaatttgtcgccgggcttcgtcaaacgccgcggatccgccgagccgcgtgggtgggggcctctgcgtcaccgtactaggtaagaaccgtcccatttcatttcgccttcatgcctgcgagatgtatcacctttcaaattggaatttagggcaccagtactcagtgtcgagttttctggcatggtttccgccgtcggccaataggtaccgctgtttccagctgatgagggaggaagacgatcggtgagccaatggatcccagccgaacggcagtgattagatcataacctaccctttcgccgattcaatcttgtccgtagatccctaattggatggcttcgagtagatcacaagttaataaaatcgtgactgttgtga

SEQ ID NO: 116899 - DNA, 793 bp, Zea Mays
acttgacatgcagtccaaatagcaagcattaaacatgttcacccatgtagtcctcgcttaacttcgtatccgaaacttaaactccccatcgatactatgttgatttcttgaacactaatgtgtccatgccattacagacaactgaaatatctcatcaaactgctaacgtaacactatcatgccataaaggataatagaaaggaaacttctccactagacgtctcttcctcatcctagtcgtcaaaagtgtcacacaagcaacagcacatgatctgaagaccaccacacaaacaaaaacaacacgagcaacccttgacaaaaccaatggctaagagcttgaaatattaactcgactatcgcatcaaccacacactacacctcacatacatgttagctaaatgccttcatcacacaaacagagaaaaagggaggaaatgttcttccctgcacgactctagaaaacatcatccaaacaatagcaaaggatccgacgataatcaccacagaggacctgctaaacataagggaatcattgacctatccacactgtcggtaccctaaatcaggggtaccctcttctacagcatgaaggcgctgcacccgtacaacacctctaggtcacatggagagcggcacccgaccccaccacatgggcaggcctaagggcaccacgtggcaaggaaggataatacatcctaggaagcaccgttgggtccggacctccgtagacggacgctggacccctatgagtacgagcccggagctcccgaggagacatccgggtccccctgag

SEQ ID NO: 116900 - DNA, 820 bp, Zea Mays
gtttatcattgataagttggtgaaatttaagatgtcatgaaagatgagtcaagaataagccacttcatcaaacaaagatacaactctcacatgtaaaaaactcaaatccaagcttctcaaatgaagataaaagatgaggaggatgaggatcaactctacctcatctctcgaagttaataaagatacaatcaagggagtcagaaatgtgacgagaatgattcacaagatgaatttaatggttgtgcccattcaagttgaagacatcctattcaacattgatggaaaagaaaaaatggatgttttggatacgacaaagattgtcaaaacaagctcacaccaagaacaagaaaaagaggtgctaggtttaagctctaatatcaattaagacttgagatgattcatcaagtgaagatgaaacccaacatccactagtttggcagaaccacagagaagggggagatggggggagtagaaggaaccttgagatgacgagctcatctcctcaatggtgcaggtctgctggagcttgggaaggggtagggtggagactggagactgcagctggtgaaccttgagacaaccgccgcaggtggagactgcagcaggcgagcagggaaggggcagggtggtgtagccgttgatgatgtagccgccggtgagctataggtctgaaggggcagccattggtgagctgtaggtctgaaggggtagccaccgacgaccaattgtgaataagggcaagggctggaacagtcgggttggcaagagaggagagtaggagacgtagtgcactgtttggcggctaggtattacagagaag

SEQ ID NO: 116901 - DNA, 601 bp, Zea Mays
caacatgtcttcttcagaaatcagtctactggtaattcaagtagggtcattgaccctagtataaaggtaggcagggtagactctatcctttagaggttgaatattcttgaaggcaaaatcaacaacaatagcttcagttaggcccctatccttcaatgcacatatctctgcgagcagcactctagactcagcaagctctgaatctatagggacctctgtccagctgggcgttcggacgtcaggctgcctccctgatcgggcaggaagggaattgttgtggttttccatggtaaactactcgaggcgccatcccttaatactgtccttcaaagggatgtcaagatactcaactttcctacctcggcgaagttccaggctggcaccgccaacaagatgatgttgtcctccagccatcccaggccgacagtggtagtggtacttccaaagcccaaagtgaggaagaatcccaaggaaagcctcgcaaagatgaacatatacaacaatctgaagcacaaaattgggatttaagtgggtgagatttagagaataaaagtcgagaaggccgcgaaagaaaggagaagctagcagggctagtccccgg

SEQ ID NO: 116902 - DNA, 493 bp, Zea Mays
aatcatattgcgcatccagggtgagtaggtatgcagtgaggtacacgactgtggggtcgtcctcaagcagctgctgaccttccaatgcacgcatcctggccatccaaacgggacggtttctctaaaagggcggaaagaatctgagcgggtgtcggccacttcttcttcataaatttgacacagggccctcaatgccttgcgagcgacgacttggcaggtgtctttgaatctgtgcccagcagcagtggcactccattccacatggtgcggactggatccaatgtatacagtcacgacacacttctctgtgccatgctcgacaaattcacgaccatcatactctggttggctcctgattccgaggcagactgtgcatgctctcagcaacttggggaaaccatcttcattctggcacaagctggtttggcagcggacctccatctgacttctgagagaaggaaaggggaaagcatttttgaaaaggagggatgag

SEQ ID NO: 116903 - DNA, 362 bp, Zea Mays
gtcatttccaataccatttttagttcattagtgtgacaaaacgcataaacgagagttcggtacgtaacttcatcaacgacattcctctccccaccatattgttcttcacctccactgcctcaagaacacgattgtttctgcagagaccatacatcaacacattgtatggcacaacactgcccttaacaccctcactttccatcctcgccaacaatctccttgcgccatccaaattccttatctcacagtaggcccaaatttcggccgtgtaaacatactcgtccaagtgaatttatattgaagcatttcatcgaacaggtcgcgagcaagagcaaattaccggatcttaatgagagcaaaaa

SEQ ID NO: 116904 - DNA, 903 bp, Zea Mays
ctttgcttaagtgattaagcattgttgttatgcaaaaagtggagataattagccctaaagtctagctgtcagaccactctgagactgaacattgattgacagtaagttctaaggaactttgggctcaattcttgtgcaaggagttaagcaaatgggcaagatccctatagcaaaattgtagctggtatatagggctacaagtttgttacagatggattggcatgttcgtgcacaaaaatccaagatctaggcgttgcaattctgtctatcaggcgctctgaatcaagttttcaatggtacagtgttcggatcagatcgccgggttcagttcatctcgccgccggtgatcccgcgccgagatcctcgtcgacgttgcgattcgtgctctgtggggtgcagataactcctaagggtaagaaatatcacatcgtggatgaactcaggccactgttcactgtctggtgcgtaccacgtcagcacgcccgtggatgaactcagaccttatgaatttggcgccagcaactaagtgaacatctctgatctttagaagagggctgatttttgacttagagaaaatttgggttgctctatagtgctctccacttgggggctgaatttgggggttttgtgggacctttttgggataatttccttactctttcttgtagatatataaatgtacttcaactttggtataaggtttaagtcatgaaatggtcatttgcataggtttccactaatcccatgcttgggagcctaatggctcaacggggggtatagggtgttagcatctttttcctaggtgaagatacatgaaaggctagggtattccctctatcatgaccattacttaatagatccatggtttctaaggttttggtgccccttctccccacttaaaca

SEQ ID NO: 116905 - DNA, 584 bp, Zea Mays
ccgagttggttagactccgttccagtctattagtgatacactatcacgttatcatgttattattatactactcttgtcctcggcatcttttgtcgctccaaatctaccaccaactttagcagagggatcttccacgatattcatagaagaatgaactctaaagatatccaacgctccataaggtcctcctccactggctttagctgcgcctgcacccatctcggtgacttcttgtggtatgtatggatacagctagtcatacaacacatgcacttcttcgtgcagaatgttattgtacacttacagatttttcagagccagactcagctcttccacatgggctcgagcgattgtctcacaatcccatgctacgaatcgtgagttcagagcccaatctatagcctcatcacactcgaccaactcccgttgtaggtgttccacttctcctgacagctcagcgatgtggtggctaccacatgctcgctccctgcctccatgtcacagttctgcagttatacactcgactctagcctccaagtctcctatgggatcgttactcccactgctgctcccttcatggcgag

SEQ ID NO: 116906 - DNA, 274 bp, Zea Mays
gttcagacgagcagtttcaagcatgtataggatttatcttttcatgtgtgtatttggttcaaacttctagaaatctttagatacacttgatagatagagacgaatgatgatatagatataacaagtcgatttgcataagaattaattagaggttcgcacaatatagattccgctggagaatgcggattcggactacgtatttggacatagaccgaataacaactgtcaagagttcgaataaatgagtgtggacgggatttgcgagacgagattg

SEQ ID NO: 116907 - DNA, 785 bp, Zea Mays
atatgagacgaaggccatgggtaaagaacagtaccacaacaacttcggttgttatggatttatcgcccgtcccaacgcaagccaccctgtgccaacatttcgaaaaagatggcccgaaacttggatggaagaatggttttacgtgaagaacgacttgatagcgagggaggacatcaaggaggttatcatgtgtcccatatggtcccgcttcggtctccgaaagccgaaggttaaaattgatgacgccgccgaagcgtgtcagaaggcgtttggtactgtttgcttcttcattggtacaagagatttaattcaagagcatatagcattcagagtatggctgcttgtagaaagctgggaaatgctgaaggagaccatcaccaagtctagcgaaggtgaactggtccagttgaagtatacattcaggtatggggataagttcgatgaaccaaacgatgactggctgaaatgcatcgaagctataagtgatgaactgcttggagcatattccaaggcagaagataatgcattatccgcagccttcggaggtcggggaaagaagagattaaacagagtttttgatgtcattggcttcgtttaccgcgactaccgctatccgctgtggggacaagggaaaaagaggaaagctgctacttcggtcaccccagacgaacatgtgccaaagggaaaaaagttgaaggtcctaactcaccggccgcgtttcatcgaaccgaccgcgatacctgaatttggcgaagggacctcctcggctgccaaaacaaaaggaa

SEQ ID NO: 116908 - DNA, 285 bp, Zea Mays
ctagaacatcaatcaaggatgcttgagctaacctgcaggacgctggccacgacgcggtggttcatggcgtgcggaaaaccgatttggggagagaaagaaattggaggtctctggtggctaattggaggcaggagatggtgctttggcttcgtcatgacccaacggagctgatgacacgcttaatttatagggaccgagggcggtggctcttaaatttggaatggcgcactggcgatcggagaggggaagagttactagtgcacggttaccgtggcacttcactgt

SEQ ID NO: 116909 - DNA, 408 bp, Zea Mays
gcggtgtggcataccttctgtgttttgatgaagacgacgacggaggcgcaaatctctggtggctgcttcatcataattaccttcttcatcaatcaccgcatcatcgggaagacgtggacgaggtcacgaggaggtggtggtggcggtgcttgttgttgcgtctccaacacagcaagtctgtcgatgatctgggtcaatcgtcgatccagcctctcgtaagtcctaccaaggtccatgttaatgaaggcatcatgcactgacttgtggaccgtctcctccatttgctccttcaggagcttgttgtttgcctcaagatcttggcggctaacacattcatcgaagtctgtagggatccttgcttcttcgtcgtcgtctgccatcgaaacacaaaaataggaaacaaacggt

SEQ ID NO: 116910 - DNA, 456 bp, Zea Mays
gctgcctgcgccgcctagaactgccggatccgctcttctagctttttctctttctccttcgcctcgagctcatgctcgaccagcaacttatcccacctttcaaacatttcctccatgaaggcgaggtccttctcccgccaggcgagatccgtcgcccgcttatctagggacgcatccttctccttgaggttctcctcggccagggcaatgttgctggccttgtcctccagctcccgctcccatttttggatcctctccacagccgcggtctactgggtccgctgctcttccaagatttcgttcatggcactcagcttggcctggagctctgtgatggcctcctccctctggttcaaggcctcctccctcttggccaacctcttctccttctagctcgcctccagctcccgggcgtacaccttcggaccgctcggaggtgaactggttggacgccgc

SEQ ID NO: 116911 - DNA, 495 bp, Zea Mays
acaactttcattgttttcgttagcaacattttctgtctgtatgatttagtaactccatcctttcccctgaagctcttatcaattctttcaaacggtacatcttttcttgatgagacagtgtacctttgcaatatatactttgaaggtatcttttcaacttgtagatgcatgaaggctcttaaaagatgaacacacaatagacctgaaatcatgaagaccaaccattatttttttaatgataaacattaatttgtactacaatcaacaaattatttagtatgcaattttattcttttaatcaacacaatatgtacaaacctgtatgttcccactgtttgcactcgcatgtatactccccagcttctatgtccgctattatcttgaattgatgttgtccccatacaattttattagatctttttttatgttgtacgatccaatctttatcacaaccgtctatgtccttcaatattctgtatgcagtggcgtatttca

SEQ ID NO: 116912 - DNA, 725 bp, Zea Mays
tttttaacgaagtctgtaatgaatccatcaggtcctagggatttatttgaaggaagaattctaataatcccatcaatttcttgtgttgtgaagggatcttctagagatgcgagattatctgccggttgaaaaagcgtggtcaaaaaccatagatgtttcttgtgaggagcccaacctttctttatatgcttcataaagtactgacgctttgtctatatggttatgtacttgatttccgcttgtatcccgaatagttgcaatcagattttgtcggtgcctcactattgcccttgcatgaaagaattttgttcgagcatcaccaagagtagccaatttgatttgccctctttgtttctagtatgctttttgttttgataatagctcttgaaggttctataagagaatatccttgaagttccattcttgcactgttaagtctctattttcttccactaggtctagaaattgtgctaccaattttatgttatcaatcaccttatttaggttaggaagattcatgtgccattctttgatggcctttctggttcttttgaatctagccatcagtctcttgtccgggtcatgttgatgaatttgtatattccaagcactttggaaagttgtctggaaatcctcatctacagctagtaattttcgaatatgaaaacatgtggtcttgggacatttgtttaactgtgatcacccaagggacatggtcgaaggtg

SEQ ID NO: 116913 - DNA, 550 bp, Zea Mays
gaaagtgagcattggcattccaataacttagtgtgattatgcatctggggatatacagtttgtaatggagtacgacacaatcgtggcgttgtggcgttaaactctgattcaatttgtgtgtagtacatgtcatatatttcccatgctgctcctagaaggaaggtggaaagaaggttttgtagtaggtggatgatgcaacagcagtgacttgcgagactggaatggcatgccgtaggcgtgtgtgatgccggtggggatgttgtggtatctagctgatttttttctttttctgaaggcgtcaccagagaggtgcgtgcctcacttggatattttccattggtatctaggctgatgtgattgcgatgtgtgtttgttgttgtgatggtagacttatttggcagtggatgagaacaacccgtcaagatattttagtttggataaagatagtgtactgctggtgttgtgggagaaatgaattcgtgtggtttgcttgttagtagaagcaacaacatttgacactttccccaggatgttgatgtcttgctgccag

SEQ ID NO: 116914 - DNA, 676 bp, Zea Mays
ctgacggagaggattacatggggcacactgaacgtgtgttccaaaacaatgcaaagaagctggtgaaggatgccatatactatgcgagaattcaggctacatacatgtattttcaaaagcatccagaagaagtaggccccttgaataaaaaggaagggtcctcaaagatatatttgactgaggatcaatatcgtgaggttagtattcaatttgttttaccctttttattgattgttgtgattgatataatatgtaacattgtgtgtgcaggtgatggttccatggatggcgcccgtgcctgatgcgtactatgcttggtgtcgatattgggctttcgaaggcttctagaaagcgtccgcgcatcacatgcaatgtcgaggaaccaatcctaaccacaagtttggcggtgacgacatgctacaaaaagctaaaagaatggtaagtttgatctagctatgtcgatcagcaaatagtacgattgcttatgaatgtttttttgtttatacaagaagctacgagtggccaaaagcctagtgacattgagttctaccatgagggccacaaaggaccagaacctaacaaccctgaccagctctgcagccagacagccacggatcggctggtgagttttggcccaaaagtacaaatgttcaaagtatagaaattcctgcatttg

SEQ ID NO: 116915 - DNA, 445 bp, Zea Mays
agttgttatcagatggctgttgatagcagtgaagcaaacccaattgagagtatcaagattgtgtccgagtttccagatgtgtttcccaaggacttaccgggtatgccaccagagcggaaagttgaatttgccatagagcttcttcctggaaccgcccccatctttaagagagcttacaaaatatctggaccagagttggttgagcttaagaagcagattgatgaactgtcagagaaaggttacattcggccaagcacctcgccttgggccgcccctgtcctatttgtggaaaagaaagatggcaccaaaaggatgtgtatcgattatcgagctctaaatgaggtcacgatcaagaacaagtaccctttgcccagaatagaagacttgttcgaccagttgagaggaaccagtgtgttctccaagatagatctgaggtcaggttatc

SEQ ID NO: 116916 - DNA, 877 bp, Zea Mays
tctctagcgctgctgctgccaagttgatgtgaattttgtgggttgtgttgcgtagatcggaatgtgctgctgcctgctgctgtcattgtacggggtcggtggccagtgtttctgtgtcgatgtttcccaatcgtgtatcgtccaccttgttccgttgtattttattttctctgtcttgtttgattgatcgaaaatggtgtgtcgtgtggcggttgtggtattggattatcggtacattttttttagggtgtgcaacgaggccaccaaactggatagaatactggagccctcagattttgctgctcctaccggcttctctggttcgtggtagttatgtttcggataatggctaatgaatgtggacaagaatgtgacagcgctgtagttcaatattcggttattaccacaaaacatatattttcctatgaaaaagctaccttgtgattctggtgccatgcccttaaagtgcctgttggattctatacttctctgagagcactgcactcatttacagttttgtttttttcgagagggtcactgaacaaacagctctcaggttggtacggtggatgctctgtagtcaatctattgatggacataagagagctgtagagaattgatgttgaaacgtcacccttggtgggcctgcttttgagctagtttcattagttcacaaccagaatagatgtggagtcagtgttatagcatggaacttcattaagtccagcatcaaacttagatgactctaggctattctatgtacagtgattttaggtgcccattattgtattaaatgaaatgaaacaatatctcaggggtttatattggatatgccaatcttttttagtcatgtaattgaacatatggcattttataa

SEQ ID NO: 116917 - DNA, 1239 bp, Zea Mays
aggactttggcacaattgcagctcccctaaccaaactcctcaaaaaagacagttttgcagggtcagcagaagcagccacaacctttacagcactcaaggaggcaccgtctacaacaccggttttgcaccttccggagttcaccaaatcattcatcgtggattgtgacacatccggtttagggtttggggcagtgctacatcaagacaatggcccaattgccttcttcagtagaccgttcgccacacgacacttgaagctcgctgcttatgaacgtgagctcatcggtctggtgcaggcagtacgtcattggaggtcgtacttatggggccgtcgttttctggttcgaacagaccatttcgccctcaagttcatgctggaccaacacctctcaactgttccgcaacaccactggattagtaaactgttcgggtttgatttttccgttgaatatcgacccagacgttttaacacagtggcggatgctctctcccgcagggacgctgaagcaatggagtccctagccatatctgtaccatcgttccagctatatgatgaaatacgcagtgatggcagcagcagaccggaatggaaacaactacatgaacaaatcctcaatggcacccaatcggcgccatgacacatccaagagggcctaatactacatgggtccagggtatttgtaccacctacatcacccacaataattcatattctacagctagcacatggcgcgagacatgggggttccaaaagacattacacaggcttcgcgcagacttctacattccaaatgacagaactctggttcgtgactttgtcaaatcatgtacagtctgcgagaaaaacaaaactgaggccttatacccatcagggttgctgcaacccttagaagttccctcacaagtttgggcagacatagcgatggacttcgtggaaggcctcccaaaggtgcacggcaaatcagtcatactaactgtggtggatcggttctccaaatatgcccatttcattgccctgggacatccttatactgcagcctcagtggcacgagccttctttgacaacatagtccgtcttcatggatttccactttccattgccagcgatcgtgatccagtctttacaggcagcttctggcgcgatcttttcaaggtggctggggtcaaactccacatgagcacgactttccacccccagacagatggacagtccgaggttgtcaataaaactatagccat

SEQ ID NO: 116918 - DNA, 319 bp, Zea Mays
ccggcatatcgcacaagttcgctttcagcttccccaaagtagcccagcttcatcatcatgggcatgtcagcttcggacacagtagatttcccaaaatctagatggttgggttttgttgggatcaaaatactataatcttcttcaccttcgtcaatgttttcttcctcagcagtggtctgttcagcttcggcagtaggagcaccttcgtcagtagttccctctgtcacaactagacctgattgtttcatgacttcagaaattggtgctgtctcagtgacttcggtttcttctccctcacgagacacccttgcagtcgaac

SEQ ID NO: 116919 - DNA, 556 bp, Zea Mays
tccccctacttctgcttcccataatctggaatcctaaacgactccaatcttcctgcgaatctcctggaaacgcagcctgctcaaagctttggtgaacgtatctgcaagctgttcatcagtcccaacttgcaccaattcaatatcaccacgttccacacattctctggtaaaatgatatttcacatcaatatgtttgcttcgatcatggtgaaccgggttctttgccaacgcaatagcagccgtgttatccatgagaataattgttggcttagcagggatgccaacgacctcctcaagtagcttctgcagccacactgcttgagctgccgcggctgcgctcgccatgtattctgcttcacacgacgatgtggccactgccttttgtttctgagacatccatgacactggactccccccaagaaaaatatagcacctgtagtactgcggcgatcatcaatgtcaccggctaagtcactgtctgaatacccaatcaatttcagactgcctcttcctcgactgtactgtagtccataacctgctgtcgctgacaggtaac

SEQ ID NO: 116920 - DNA, 495 bp, Zea Mays
aacgctttgcaaggtcagggctaggaccgggccagtgtatattagggtatcatgtggtcagatgcgggtagcccatcggacatcgccattgctcgatcatttcgatcgccacaggtgaccaaggaaaaatcatgggagagaaaccttgaagcacatgcacaccatacctttggatgaaggcaaaagcgagatatagggatcagaaagccgtcacactccaagttgatcggcccgcgtcttgtgtcacacgtaccgtaccattatcccatcaatcctcccatacacaattgatggagagtggtgacaaggatggtggtagtggcaatgatggcgatgataatgactaagtaaagacacaacggcatgtggaagatggggaaggggcaatgatagtggtgggcaggaggataatgccggcaattggactaagactcggttggatgaagaatgtgaggtggatggagcgtacaactttgttggaaacatggttaagcc

SEQ ID NO: 116921 - DNA, 306 bp, Zea Mays
atcttgatcttttatgccattttattttttgtatgagaaacaagtaacgaaggactaaatttcgatttcttgtaataattgtgcttgcatcaatgagtaaaatatgccttcctcacagtcttctgaagctcgaaaatcgttcctaagggagcgcaaagtaaattccgaagctgcaaaaagtcattcctaagggagcgcagcgtaagttttctactcaaaactcaaaagtcattcctaagggaatgcaaagccaaaaattaagttctgaagttgcaaaaaagtcgttcctaagggagcgcagcataa

SEQ ID NO: 116922 - DNA, 2436 bp, Zea Mays
gtctaaacatagcagattaataaataccgcaatacaataacttgatactgtctgctgacactaccgaattcggcattatacacatcaccctaaaaaattaaaacaaggggttcttatcgaacaggtggtgttcgtttgaataacaaatagtgtaaacaaatttaatcaatcccattttctacagtgctatgtgttcaatcccagagacagacaaactcaatgtgatatccggtggattatcgccagagatcaccggagagaagagagaagaaagggaaagaacacaggcaagagaagcagacagaggtatgaatatttggtttctgttcttccatcccttcttcagcgcagatatttgcctcttatacgtgtggctgacccgcccacgaatacacggccacaatacggcccaataccagagattaacaaagtctaacaattgagattacaaggccaaatccggcccaacaggatccactaaaaccaaaccttgtccgcatacctctcctaccgccaactcagtcatccgcgacggtgtttgcctgatcctgatgcagcaccgatgtgacagtgccccctccagaagcaccagctggtccccagatggatgaattcgggaacctggattgcagcactgtataatcctcccaggaagccatctcaactggaattccctcccatttgatcaaaatttgagtaactgcagctgatcctttcttcaccaacctcctatccaatatcctttctggattgggagtcacattttcagaaaaagctgttggtggcaactcagtaaacactggagtataatctggaacatgtgtcttgagctgagacacatgaaacactggatgtatattagcagattcaggcaacaatagcttgtaggcagcagatcccactttatcaactattttgaatggcccgaaatatttgaatgataatttggcacagggtctataagccactgaaacttgtgcaaaaggctgcaacttcaagtaaaccagatctccaatctgaaactgtctaaaagacctattcagatcagcataatgcttcatcctgctttgagcagatgccaaatttgtcttgattacttccaagaattcctgtctttgctgcaaggtgagttgagcttctgaaggattcaaagagtcagtgacaggaatgcatcccaaattaggctcaactccatataaagctttaaatggagaacactttatagaagtatgataggatgtgttgtaccacaactctgctgagtctaaccattttgcccactgagaaggggaattgtgaacagcacatctcaaaaacatctccaagcattgattcacacgctccgtttgaccatcactttgggggtggtatgctgaactgagatgtaactgagttccagacaatttgaataactcttgccaaaatgtgctggtaaacactttatccctgtctgaaactatggtatgagggaatccatgtagtttaaccacttgagagaaaaacaagtgagcaatgtgtgaagctgtgaaaggatgtttaactgctaaaaaatgggcatattttgtcaagcgatccacaaccactaagatcacagaatacccattggatttaggtagcccttcaataaaatccatggacaagtcttgccaggaactttggggaataggcaaaggctgaagcagacctgggtacttacaatgttcgtgtttagcttgttgacacacgtgacattgcctcacaaattgttccacatcagccttgagtccattccaaagaaataacttcttcaccctttgataggtggcctggattcctgaatgtcctcccaaaggagatgcatgaaaggctgaaatcaactttgtttgcagccccacattttgtcccactacaagcctgttattcttgtaaatcagcccattcttcaattcaaacccttgctcatttggactagagacagccagttctgccaatagactttgagcatgagtatccaactcataggaatttgttatctcctgaagccacacaggagttgttgcagaaatggccgacaattccatattatgggccactctagaaagggcatctgcagctttattttctgctccctttttatattgtactgaaaattgcagtccggccaatttggtcattgctttcttctgcatatccgttgccaaagtctgatcctgaagatgacacaaacttctgtgatcagtccgaatcacaaaaggtcctctactcagataacatctccacttctctactgccattaatattgcaagaaattccttctcataagttgacagttggctgttcttcactcctaaagctttactataaaaagccacaggatgtcccttttgcgacaacactgctccaatgccagtgtcacaagcgtcagtttcaatgacaaatgtctcactgaaattaggt

SEQ ID NO: 116923 - DNA, 419 bp, Zea Mays
atggaatgcaatgagactgatagaacaaggagaagagagggaaaaggggaaaacatgacctgcacattgtaaattgaacaccagggaggtatagaacgcgtaatccatgggccaaagaaaatgcatcaaggttttacattttccaaccacaaaagaaatcgtgaaatcctaaagaaaacaaattctagacagtagattcaaaagcagagagaattaggagatggaggaaagcagagtggcgtccaaaggaaggagtgggctttctggcttgtatttccaaaataaagttaaaaaagaaaacagaggcaaacatcgttgaataagaagtcataatagaacataatgaaacacaattgtagaaaatagcaaggaaagggaaaaaatattgcagagaataatgcgtaagtggaagattggcg

SEQ ID NO: 116924 - DNA, 475 bp, Zea Mays
ttcatttacaagctccacatacctcgacttctcacattttaagcatttctgctctctgccatgttccttccaaaaaagcatacagttgtcctggcaaacatcaatcttctcatactccataccaagaccttcaagcaacttcttggactggtacatgtctttgggcatcttgtgacccataggaagaacctcgctaatcaaatccacaagctccttgtaacaattaattgaaaatgcaaacttggacttgattgacatcagccgggtcacgaattcgaggacggtcacgtcagtgtgcccgtgaagaggctcttctgacgctttgagtaggtcgaagaacttctgaacctctggtgtaggtgaatcatgatgatctggtgccagttcaggctgcagatcctcaagcatctggtccatcctatcaacatcatcttcaccgtcatcaacttctacttctgttgctcgttcaacatct

SEQ ID NO: 116925 - DNA, 328 bp, Zea Mays
gtcgagttagccctcttagtgaccgcagggttcattagggaggtgctgcatcccgagcggctagcaaatcctgttcttgtactcaaaaagaataaagtggattggcgcatgtgcgtcgactatactgatctcaacaagcattgtccgaaggatcccttcgagctccctagaattaatcaggtagtcgactcgactgctagttgttcaatgttgtccttcctagattgctattctggataccatcagattagcctaacaaaagaagatgaggagaagaccgctttcattaccctgtttggagctttctgctatacctccatgcctttta

SEQ ID NO: 116926 - DNA, 378 bp, Zea Mays
attagacctcttatgttgtatggtgcagaatgttgaactacaaaacgtcatgttcaacaaattaatgttgtgagatgcgtatgttgcattggattttggccataccagaagggatcgagtctagaatgatgatagacatgataggttaagtaaagcaccaattgaagaaaagtctgtctaccaccggttaattggacatgtccaatataaataaatcttcaggggcaccagtgcatagttggattctatgatgcggtagtaatgggaagagaggcaacaaaaggccgaagttgacatgggaagagatactaaacgaagacttaaaaggatgatgagcatcaacaagagcatccaccagagacacaagggtgattagca

SEQ ID NO: 116927 - DNA, 609 bp, Zea Mays
cggtgatagcggagacagtcaatggaaccgcgtgttcccagtgatctatggcggtttagttcaatccgaggggtcgaggagtttgaggagagcttagggatgctagaacaaatgactgagaagcttgaactgacctgggataagctggtcgtggtgagggtgttcttgcggtggtagaacaggattgggggaagtaaggaattcatggtctctggtgagcgatttgaagcaacagctggtgcgttggattcgtgattacatggcgcaacagacccggccatcaatttataggattgttaagcgatggctgatgaatttaggcgagacgcgcggcggccggaggtgaaaggagctctatgcttggaacaggtggctttcaccgtggcagtcactccggtgatcaccggaaatgcaccccatggttcaccatgatgaggactagcgcttaagcacgtggcgcgcaacggtgacagatcgacggcggtgaaggttatccgatcgaccgatgagctggggggggggtacggcggctagtcggattggtgtccataacccaacggcggtgatgatctttttaccccgcgacgttatccagactaaaatgggcac

SEQ ID NO: 116928 - DNA, 603 bp, Zea Mays
gacttttgttcccttggattatgaccgaccatggactatggggcccgtttgtatctttaagggtggatcagttggctggaggagtcgttagagtctcgcataccgtacctattttgtccttcgtatgtcttagtcaggagcattgctgagtggtcaaaatatcataaatgtatccccacattgggttgtgctaccttggggtcatgggatcctactagagacactcttctttataccatcttatcttagggtgaccaaggttggggctgtgtgattgggcgacttggttgatatttttgtttagggcaattggggttaggtctatcctggtcgaggaatccttagctagctttgttatagttagattgatcctgatcgaggtaactaggttggaaaacttaatttgggatcctggttagaggttgcctcatgccatgaatttgtaggtcctttatgtcattcttagggtatcctaagtatgggtacacatcatcgagtctgagaaatcccaagctcacagagaaggacttggatccaaattacctctattgtggcattagaaacttccctgtattcggcctccatactagactgagaaataat

SEQ ID NO: 116929 - DNA, 1026 bp, Zea Mays
aaatataccacagtacagtacagcctgattgcccaactgaaattcggttgacattgacacaccccgaccccgactcgaggttttggactcgtcgtgtacgccggctggcgggcagtgacgtcatccgcatccgtccaggaagtgaggtggcccgacgacggacggtcaagcttttgcgaagagaaagtcattgtggcccacgacgatcgtcgctgtcgggcaaaggaaaaaccacaaaggaggagacgcctaatcccattgactacgaccgaccagggattgccgtcatatttcaaacccactgctcgtcagtcctcgtcataatttctcaaatgctatctagtgcctatcggacgggtgatgctatagatttagataaaagagtaaaaggatctagactaaatttgttagggcaaccgtgagctttaaaatcgggttttccaagtgtaagaaagttaagggcatgtataatacatattaatgcaccgaatcgtgaagtgtgtttaatgggggtaagtgtaaaaaccgattaaaccatgttttcttgctcgattttctaagtctaagacacttcactattacgacccacataaatgagtcatctcttagagtttttttattgattttattgaataatacaccatgtgtcttaaggcatgtacaactctgagacactaattcagtttttcaagtataagagacggttaagaaattgtatgctataaccatgagactatagatcataaatacggttatagacccgctatacatgttatgaggggtggacccaccatacaggttgtgaggggtttgcattcaatagatttgattaaaatttcatcatatatgtacctctagaaaaattcttatgtatctacaaggccaattgcacactcctcaattttgttcaagcttcgccactgcctgtaaagattctggtttacattctggtgcactattttttatcttccagattggcgtaagtcccatgatgctatcgaagccgatgcgggacaaacatccaac

SEQ ID NO: 116930 - DNA, 615 bp, Zea Mays
tgtagtaacaggcttgcatttcttgaaatgggcagtggtacttctagatgctcctgggatgggtgtattatacgagtcttgcaagaaactgctctggttccatacctaataattatctctgtaccaatgtattgggcacttctgtcttttggttgtatcattgcatcgcttgtctcgtcctcaatgtgaatgtggttatgctcttgttaactgggatttttaatctcattgctactgtagtacttagtgatttgattttgcctggttggctgattctgttgtatggaaatatgttcttagatgttttcggtagctcataaaaaatagaaatggtgttgattttgtttgcatttacatggcttggtcaattgcttttggtgttactatagttgggcaggtactccaactctgttgcattttgatcactagcttcagaagtacttgaggaatttggtcaatggtagtgaagaatatggtggtctattttgttcttagaagtattttgtcatttggttagttggctgttcaactaaccagatataaacatcagttgctttgtgcaacaccatattatttttctgagtcatttcctaataagattgttttcatctgttg

SEQ ID NO: 116931 - DNA, 453 bp, Zea Mays
caacctttgaaggacagagtttaccctgcttacttgtatacatgcatcaatggttctaccggggtcacaaacaggcagattcccaatgaggacttgctaagccgactagatatgatattgaggggcagggtctcaaatgttggtgctcccttagcttactctgcatggaacttgcctccgcatagtcccttctctgattttgtctccaatcctcctgctcgatatggtagcctgggccatagagtgcggccctccctagaggacatcgaggccttgattgctcccctttgggatcttcccgaggttgagaggcaaactcatttcgagatgccatctagtaccgatgatgctgagatggatgtcgtgcttagcttgctagccggggaattgtctaactctacccgtaccgagtcgatggccattgcgactggacaagagtttggagaggacgag

SEQ ID NO: 116932 - DNA, 504 bp, Zea Mays
cgaatctgaagaaacatttgcatgatccagatcgtgatccattattattaccctagccagagtgccagacatatcacatatgcatgaaagacggaattaaaatgggtgtgtgaattatttcaattttaaatcctgcacatccaaccattcttttacaattcatggacagccatgcatgtcgtagatagacccctacctgatgccttgatgagtttccatctaggtcgtttgaactgtttcaatttcacttgcacttgagttttatacggatgtgtaaagacctctatttcaatttaacttggtgattccgtgcatgcgagaagaaattatctagaacatgcagcacacctggtggatcctagtgcataggaatctcattgctagttttgctttaatcctctctcatctttatttgcacaaagatatgtgctttcctaaagtttatacctttgagcaacctcctctctagctagctatgcctgggataaccctatagctttcaag

SEQ ID NO: 116933 - DNA, 313 bp, Zea Mays
ttccatatgcagtgcaaggtttgagctacatggttgttcttaccttgtgttctgctagatgtatggtatgtattttggcgttgtcttacatatacattgtttgtgactcatgttccatgctcgaactggaaacaacagaggtgcttcggtcaatgtcgtgttgtggggtgcccaagccaccctattcccaggagagcgcatatacgaagatgggcagaattccccacaaattgtgctatttgttggcacacttgtcaaaaaatatgcaggtatattgacgtaacacttagtctttttctgactcccatacatt

SEQ ID NO: 116934 - DNA, 669 bp, Zea Mays
gcgctggcggccggagagaggggaagttcactgacgtgagttaccatggcattcattggcgcgtcgactcagaggacaggtaggcttcctattgcgaccaacggtgacgtggtaacaaggcagtagtgtggcaggctcggattaacggcgatcatcaccgcgacggcctcgccaccacgtcgcgacgcaagtggatgaggcgacagagcggccacagtgctccgacttcatctcgagccaaagatctttcacccctcatagttatccgcgcgccaccgggcacgaatcatagcaccggcgaggatcgcggcatgtgattaccagcggtgagatacactgaacctgcgatcttcttcaggttactgtacaatgggaagtccattcagtgtgcctgacagagcaatttaaagggctcggttctcaaacttttatgtagtaactcgttaatccatctgtggcaaaattaatcttctacaaactagcttaaattttgtcatagcaactagaatcaagtactcactggatcctgctcgaaattgctcccaaagtctgtcccagttcactgtcagtacagattcagtttcaggccgactgacatcccgacttcaggtccatttatctccaaattttgtatgtcaccaatgatcaatcacttaagcaaagttgtac

SEQ ID NO: 116935 - DNA, 330 bp, Zea Mays
gaattttctaccaattaaacaagttctagtaattatttttgtattaaaaatgcatttctgatttattttctctgtttttcgagttttctggactgggcctcatttcctaagaagcgcaggggctctggcgcaagaaaccagagacacagtgaatagcgccccgggacggcgggttgattagtgatttcccagggggctctttagcaacaagtacccgcgaaggggtaccaaggatttctgacggttggatcaataggcgacgcaccagattaaaaccaggcgctcaactcacccgcgtactaccccgaccgacggatccgagatcgatgg

SEQ ID NO: 116936 - DNA, 520 bp, Zea Mays
aattaccaattatttcattgcacatggtctcaatcatctccagccattcgttgcaaggtttcttgaattgtttctcaaacttaaaacgataggggagctgtacaagctcatgtttcttccccccttctttcttcttcggcattccccaaccgctggaagttggaaatgtcttgtttgccaaatattattgtactagatccctagtactaatttcggcagcaacgaccctaaactcaactgcggctacctggcatggagagccaagttgcatatggcacaagggcctggtcatcccgaagcttagtttcataggcttcatgaccatagtcatcagcttctcccttctcttcttgtctactttcacataaaaccattcattcgttcacccgattggccatttggtgcgatagccaatcactgaagcctttgtatctttcctataagcaaagttgtagcagccgaagttcttatgaataccatctgccctggccttcatctgataatgcagttcatgtacccg

SEQ ID NO: 116937 - DNA, 669 bp, Zea Mays
ggataatgttacatatgaaacattgatcatgatttattattgttagattatttattatgcatgataagatcactttgtttaattggaacacagaatgactacccgagaaaatagtgcaacctcaaagatatatggctttcatattgactaattaattcgggaagctagtgtgtgagaatcttatctgaaaggggcaagcggggaggagtttctcaagtacagtgtcagactgatcttgctctgatggcttttcaaacccaggaagacctatatcacctttgtctggcctgtagcggattttctcatactagtgggactttgtaaaggcttcagagtgaactctgtccaactcctcagaagaggtgtgtgagagtcatgtccccttggcaaatgagtaacggtctgtgggtaagatgtgcaacccctctacggtgtaaaattgtatatcatatgtgctcacggttaagagcggtttggaccctcacatgcttaaattatggaactaaattaaatcggtaatgcatttttatttttgatattacctttatgatcatttatttaattgagatggtatatacaattagtaattgctaataaagttataaccaacaaaaataaaaagctaatgtttatcctcaaccatattcctcggtaaaccttatactacac

SEQ ID NO: 116938 - DNA, 698 bp, Zea Mays
gtttcacaatctacattattatcgactagaatttgtgcctcacaaatctcagcatcggaaacttgttccactcgaggagccttctgtgagctatcttcatccctaaatcctaatgcatcataaaattgttcatctccagcaaaaacatcagcatcatataacatagcaggatccacgtccccttcagactagcttgattttttgttgcttggcaattttcccaataacttatcctacatttttaggcttctcacataacctagtttcaattcaaactgtacaaccaatgccaacaacttacttatccagtacatatgaaatgccttctgaatatccatgtttgtgacaatttgctgcagatatttgttttctcggttccaaaaccaaaatattggctcctgacaagtccccaaattgtcttgcttgcaagatcattcatcaaatgttgaactaagtagccaccagcaatattcatagaaagaacatgatttttatcctccaactcaactctattaccatcatcaagaatagctgtataggcaggaatagtggcgcgcaagcaaaacacatgttgtttcctacccaaaagttgagaaaatgtgtgaaaatcatattgcagtcagggagattgacatgaatgacaaaatcacattgggattcatatttgaacgtaccttatgggtgaggcactgtgatac

SEQ ID NO: 116939 - DNA, 380 bp, Zea Mays
ggatttttgaactgcatgtaacacaatccgcgggattgcagtatgtgcatgcacgggattagtggatagatattatggtggttcagatctgtatgtaataacaggcaaaatttatgaagggtataatatctagatgatggtttcgtaaacatagcatgatatgtttgaaaggtacaatataatgcataaaaggatgatgcagatgacttaaaaataagtattgtgtgtcgtaatgaagctaaaattaacagtggtgtgaagtatgcaatatcgacataatttctcaatggtagtgcataaattgtggtataaaaattcataaacacataaaaggtatgtggggaaatattcccgaccggttatgatttgatacgtgggca

SEQ ID NO: 116940 - DNA, 306 bp, Zea Mays
gttttttagggttggcgggatattacaggaaatttattcgtcactttggaatcatatgtcagccccttcatgccttgttgaagaaaggtgtactctttgtgtggacatctgatcagtccctggcatttcagacactgaaaaaagcattaacgtctgcgcccgtattggccctgcctgatttcataataccatttactgtcaaaactgacgccagtgactcaggggttggagcagtgttgatgcaacgtggccatcctttagctttctttagcaaagctctgggtcctaagggcagagggttatcca

SEQ ID NO: 116941 - DNA, 295 bp, Zea Mays
aaatgaccgccgtagcccctcagccagtgagtgccacggtaaaccgcgccggtgactcatcccttcttcccggccgccagcggaatcccttcaaattagacaccaccgctcacggactctataaattgagcgcaccctcggctccgctatgtaattgtgcacccaacacacccactcgtgcctccaattactcaccagagcccccgaattgcttacttccccaaatcggttttctgtcgccgtaaaaaggctctcaccatggccagtgcacttcaggtccgatcatgtcctctgc

SEQ ID NO: 116942 - DNA, 588 bp, Zea Mays
cggtgactcacctttgctccggccgccagcttgtcttccccaaattcggagccaccgcttctggacactataaattgtagcccccgcctgctccgctaacttgttacgaacccagagcaccgctcctcgccccagattagccaccataaccgaagaatttggattttcccccaaatcggtcgtcgcgccgccgtgagacatcccgccgtggccagccatcctcaggtccgctcatccccttctgtgttgtgtttaagcatccttgactgtcagcattgctcatcgacccaatcgatggaatgctaccgcactagatcgtcaggaacacctcgatccgtcctcagttttcgtcgtcgtcatgggcaagggaatttcgggacggattagctcaattagggcaaggactaggctcgcctaggatcagggatgctagtccgatgctcggtttcaacagtcgtcgtcgtttggggcgagtcccagcaaggggatggccggcgggcgagcgcgttgtcgctaggggcttgtccggtgaaggaatagaagttcaagggtccttgcgcaaacatcagtgagacagatgaatagtgt

SEQ ID NO: 116943 - DNA, 275 bp, Zea Mays
gcggatacatgtgtggtaaatcacgacattcatttgcctgttgccatcctgcaactgctattttctctaccttcgaaacttgcttcggccaacttttctctcaaaagcttcatgctcttctaggctttgtagacttccaaatggccgaggaagcaagtagtgatgagctcgccctcgtggcaagctctgatgctacggaaaaggctagagtggagaagattactgaagaaatcttggctagtttatctaatgattctaatggcagtgaagaattt

SEQ ID NO: 116944 - DNA, 471 bp, Zea Mays
gtccccaagttctgttatacccccggttacctactacattcttggaatattcccctcaatggggtcattacagtgtggtaaagtacagtaacttagacatactctggaatttatcccatgaaggggcttacaaatgggcctgaatggtgataaggcggagcctgagtcccactataatctggcgtggccttcacgtatgagttgcacccttgactccatgaagttgcgcccttgacttcatcgggacttggacttcgctatcgaggaaagagtttgagcctttgagatgtgtgtgtggagctatagtgagcacccttgactagtgtagcccttcgcttcgtcccctctgagggttgcaatcgatgacctcgatgctggtttgagtcgaagtacccttcgctacttgtacctgcgccaaaacatgtttggttgtagccagattagtcagatcgaggacgtgttcggcctttg

SEQ ID NO: 116945 - DNA, 602 bp, Zea Mays
caattgctcgtcgtcgtcgtgctccactgtgacccgcctaacaacgtggaccgaggctcccacaccattatctccggtgagaaacccctcgactgcctcgccttattcctatctacgcgtagcacgttttgggggaggggattaccatctgaagcgatggattggctcggcgtcggcgatgctcctccgtgtggggagagcgccgccgcattggatcggcaggggaagatgattctctggccgtccgatcctgtatgggcgtgcgagatgagatctctagtataccctttcggcatggtagtcccaactgtccgattaggatcgagcgtttgtaaaccaatctaggcactttaaacggtggctgttgatcgccgatcccacggtggtaattgggtaccagttcgggtaagattagttctaatctgacccgtcgaaatgcaatcgggcggctctggtcactctgtaccccttcgcgggcagatttacactttggcccctctgtttttatagaaccaactcgcggtccactgtgggagtagactgagtctaagatatttttcacgttagcccctacatttccgtttaattgaggcgcagtccag

SEQ ID NO: 116946 - DNA, 455 bp, Zea Mays
ctcctctctggtaagaagcctcagtgagcacctctctcccctcttctctcttctctctctgttcaaagcccagtgagcacacctcttcctcacctttgattccctatatcaaatctatgaattttctgtgaatcgaagtgttggatgtggttcctttgtgtcccattgaatcccctgcaggttcctagctccttcgggaggatttccctacctccaatagccatttcattcaaaacctaaatccccgcacatcacatgttcgatgaaatgcccaaactagccaaaaatgctccaatcgatcccaaattttttaggcaccttcacaacaccttcagtaacatattcgtgcaatttcacgccaatccgatataccaggcttcaatttcacacatttccctgtttcgagcgatcgtttctgagccgagtgcccaaattccattttcttcgccccaaat

SEQ ID NO: 116947 - DNA, 469 bp, Zea Mays
attatgaagaatatatactgacagaattttggggtggagttacttctgtgacagcaatattgtcagtaatgggagccttatgaaaaaataaataaaaacattcagatatatgagggttactataacatattgtaattataagtataatcgttgggaataaaataaaacaaatatttgatgttggagttttgtcgaagattggagcatccatgaccgattcttcgataccaacgtttacaccggatacctgtatgggaaacatatgaagttggtgtacatgtgaactagtatgctctatttgatatagatatgtgtatatgcttacacctaagtttttataaaaatactgacctgttcggatcctttaatatcagcagttggaacctgggtggggcgatcatgatgctgattatcagaggttccaacaggaggcgtggatacaataggttcatttatcggtgacgatgtg

SEQ ID NO: 116948 - DNA, 701 bp, Zea Mays
accaataatgctgttttagatcagggtacatcttagtgctcccgggatgaatagaatagcgactaaaatgtgcttcgtccagaatttgctggcggacctcttcatttttaggcaccacaatgcggttgttgaaccatacgacaccttgactatctcttcggaagtagttggcttttccaacttctatcttctcatgaatgtgctttattccctcatcattcttttgggcatcaattatcctttgtaaaaggactgactcaagctgtagttgatttaaggttccttgttggatcattcctagattcaacttctccatctcctggcataatgtaacgtcagaaatctttattgtcttacaatggcagcaagccttgcgactgagtgcatctgccactacattagctttgcccgggtgataatggatctctaattcataatccttgattagcttgagccatctcctttgtctcatattgagctctgactaggtaaagatatatttcaaactattgtggtctgtataaatatgatagacattccccagcagataatgacgccaaatctttagagcatgaaccactgcagctaactccaggtcatgagttgggtaatgttcctcatgccggcgtaactgccttgaagcgtaagctattactcggccttcttgcattaatacacagccgagaccactgtctgatgcg

SEQ ID NO: 116949 - DNA, 557 bp, Zea Mays
ccgtcgaccaatctagccacaaaattttttcttttgcgacgacgagcatgtaaatggaacaacttcgtatttgcatctccatctcttaaccaagaaatcctagccctcaaacgtgccatagtacgtttaaaggaggaaagcagtagggactactttttaagcttgttcttaagccagaattcagctgggctgagaatacgtccatcttgggccatctctaacttgtgcagaatttccttggctagagcaagctgggatctcacatgtccaacttttctatcactccatgtctgcaattttttagccgtttctttcagctttcggtccaaggtattgaaggggcaagtagtagcctgaactgagttccaaacttccgcaacagtatcctgaaaatcatcaagttttgtccagaaggcctcaaaatggaaacgccttcttccaattctgttatctgtaagtcccgggatgagagggcagtggtcagaatcttggtaggcagtactttgaaggaggacatttggaaatagtatttcccagtccactgagcagaacaccct

SEQ ID NO: 116950 - DNA, 1095 bp, Zea Mays
aaagatgtagttggtacattggacaacaactttgatataggcgggtgagtgagttgccacacaaaaattgaagaacaagaccctacaagttgctcgggcagagggactgacgaagatagccatggtacagtgatcagaaagatctccggtgccgtgagcctgacgccggtcatcttccaccgcaattcgcgctagcctaggagattcgtgccgcgggagtgatagataacgccgggtcaaggtgaaaatatcgggggaggggtgaactcagtcattggctagaccagccatcgtgtcccgccgcagtcagtcagtcacgttggcatcatcggagctcaccatttctccgaccgtgacacgcaacgatctctactccacatcgtaatggtcgtggaaagcgaccggttatcatccctggaccaattccctcctgcgcgccacgttgagtcggccaccgtaaaatatcctcgccacggtaaccttgatctcaatccaaaattcgtgttaagcttggccagagactataaattggaagcaccccctgttccgcctactcgttacaaactcagtgaaccactcctcacccccaatcatccaccgtagcgccctaatttggaattttcctcaaatccattctccgcgccgccgtgagcaccccctccgtcgacccactgtcctgtccctccacccgtcttcctagcttccgttcttgagtcctggtatgttgctaaagcatatcgcgcccccaatttgtatgttactacattgtgtcgtcgagaacacgtcgggaaagtcgctagctccacggttgtgcgtggactgagctctagaactgcgttcaggttaaattagggatttccagtggatcgcgagcggtgaaattaggcatagaccgacttagggcatggattgctaggtgttgtggccggtacaagtttgccggagcacgcacgtcgatgtccaccattggggacttggtcttgcgaaggaaagaaaggagaggggcttaagtgagattgtcagtgagacagggaatagtgcatagggattctttaccgattattcaaatcaccgagggtctctgcacaagattgc

SEQ ID NO: 116951 - DNA, 353 bp, Zea Mays
caggtttcatgcctggtcacaatgttctcgaaggtgtagttgtgcttcatgagactattcatgagttgcataggaaaaattgaatgggctatttctaaaattagacttcgaaaaagcctatgacaaagtaaaatgacctttcctccaacaggctatgcgaatgaaaggtttctcgtcgaaatggtgtgcttgggttcagtctattgtctctggtggtcacgccgagattaaaacaaatgatgaagttggtcctttctttactacccataagggctttcgacaaggtgatcccctttctccgattctttttaatatagtcgtggatttgttggcaatactcttttaagagcgaa

SEQ ID NO: 116952 - DNA, 446 bp, Zea Mays
cgtagtccaacggagttgtggaacgcgcaatggcaaaattttcacagctgtcaagaagatgctccttgacgataaaaagggcaagtgggccgatttgttacctgaagtggtctggcattaaacacgactgagtgcagggcgactaggttcacccctttctgccttctatatggatcggaggccatgaccccgcaagaaatgaaacatgggtccccacggacagtcccgtcagctgtccccgacgtggacgagcccacttcgaaggacctcatcgatggagaccgcgtcttcgccctacaggctctaaacaaataccaagcccaaacaaaagcatggcgtgaccacgcagtcatcccgagggaattcagtgaaggagacctcgtactcgtccggacagctcggacagagtcccagggcaagctggagcccaggtaggagggcccttt

SEQ ID NO: 116953 - DNA, 478 bp, Zea Mays
ggtatatgaagccaattgcatcaaacaccctgttcaatcttttcttgccccgaccctcgaaggctgcggacaaggcatcatcttcggctctggaatatctcccaagcacctcgtcactaatagcctaattacttttcagccaatcatcatttggctcgtcaaactggtccctggatctgaaggtatactttaatcaaactagtccaccttcgctagactcaacagtagtctccttcggcatatcccagctctccacaagtggccacactctgtaggctatgtgctcttgaattatgtcccttgtgctaataaaagcacaaacaatgctaaaagccttctgaaatgcttcgatgtcactttcaatagccaccttcggccttcggaggccgaagcgagaccagatggggcgctggataatttccttaatatcctccctttcaatcagattatttttaacataaaaccattcctccatcca

SEQ ID NO: 116954 - DNA, 422 bp, Zea Mays
attctatctaatctattatgatctgatctagggtaagttacttaatgctggtacaaaggataagaccatactcctaattcatttatgactaaattggtgacttagatcaactaggccatacacaacaacttgacctgcataataggttacctaacctatccaacccatctacaagcaaacaaccaaaccagattctgactaatctcatttaactcatagccccctactaaactagctgctccacctactactttatcttaactacatgtccctaattcggataacaacttcaagaatgaagatcgaagatgatcgacctcatcaaatcaaggaaggataatattcaagccagatcttcaaaagaatcaagatccacaatcttggagggagtctttccttactgtactctttcttacccaaac

SEQ ID NO: 116955 - DNA, 482 bp, Zea Mays
ttgagagccgtgcagtttaccacgttgaggctgcctgcggctttctccgaagagccgtatagtaggtactctctcccaatagatggagcttctaagcgcgtggtttgagtttgacactagaaccaaatactacatatactatgtggtttcagtgaattttgttttccctttcagtgcaataaacctatttgactggattatgtggcggcacttgatccaacacactgttctcgatgttcagtcgagtttcgctttcccacgaatacaacattaacttctaacacatgcataatgtggatgtacgacgtatacaaatttatggtcagggtacccagacaacaacaggtatttcgcttcagaatcgaacagaatatttagaggacggtactcctatccctggtctttaaacttttgagatcactgtagatttagagcaggtactgcatcattgattatatgccgtccctaaacagccacataag

SEQ ID NO: 116956 - DNA, 492 bp, Zea Mays
gcggcagtgcgtgggtgcgcaggcgagcgaatgcatggtgctgcaggagttgaagttgcagtccttcatcagatagatttcttgcacagtgagagatctgcagcatgctggtggatttcagagagaccggagaaagcttcatgtcgcttctagacgaatgatggaatgagcagcgaaggtacctatcttttgcctgctccattttatttttgggctcaaataaatgcacatagtattttgctattttatttatttccagacatgattgtgtggcctgctgaacttgacagaatgagcagcagatgtgttagaacttgtaggttatatgttcagggttggatggtgaaaccattagggcgatatagctcgactttgaagttgcaaggtagagtgacgtggctgaccctaccttggattgggagtttgggacagaaggcctttgtcgtcgttggagatgcaaaacacaaacattttgcaatgcacatatttaag

SEQ ID NO: 116957 - DNA, 895 bp, Zea Mays
ctataaggccttgagtttaccgaaatagaccctggcaacagaggaatgtgatggtcataaggcctgattagaggcaatttcgaaggcacaacaaaaacatcttctaattcctttaaaatctcccgtagaactgcatcatttttcccaactatttcttttgtaacctactccagaagcacaaatacctagacttcctctcccttcatccatttctccagttgcaacacagatacttgtcgcacttcctacacctctctagcatcaccctgtaaccttaccatctttcattgatcagtaaaggttaacaccttgttattccagtcacactccataggactctgagccttcaaccaatcataccctaggatcacatcatatgcttccaaatccaacaacctcatagcagtgttgtacaggtgccccccagaactccacactatctccttaactcttttatcactgatcatagctgtttcatttgccacattaacccgcacagtggagcaatcttcagtgaccaaccccaattttgctacaattctctggatgataaaggttgcagaactaccagaatcaatgagcatgaccaacatctgattctgaatcagagcttggaccctcatacatccgtcacattatgtgccaaactcctccacacacttctcctcattctccaacttctgcaatacttcatcagtcaaaactagacccatgtcttccacgatcagattatgtagttgagttaccaccctcttcggacattttgcttgatggcctggctcaaatttatctccacaaataaaacacaacccattcgctcttctatattccctcaactacctgaactcaggatacaatattccttccctattctctccccttactcctgcaacct

SEQ ID NO: 116958 - DNA, 409 bp, Zea Mays
ccatgctagatgggatccatgtgggcattatggatggccaaaatccactcctcacaagcggacccttccatacttggcactcttcctttatcaccccactaccatccccttccatatgcgacgaggacgatctgggaagcccaccatctactcccccttccacaagtcgagagcttcctatttattaatccaaagggtgaacataggcaaggccgccaccccagtttcatcctcctctcgttgagttgaatttgcaaattgttttgtcaaggtacgtacattttcagttttcaaacgtacaaggtttcatccatctgtttttagtataattttcaattttcacttgagttgaagttgcaaactgagaagtgttttgtttcatcaggtaaccctacacgtggacagaatc

SEQ ID NO: 116959 - DNA, 345 bp, Zea Mays
tgcatatggattgttgttagttgtgaatttcagcaaatggagcttagatgacttagtgatgctcattgtaataaaaagttggatgcatgcatgtcctatacttcgctccaatttgttactttacaatatttctatcctcatttctgtcaatcgacttctagatcttctgctaccaaataatcttgacttgggttgatgtatatctagggtttttattttgtaactaaaccatagccttcttttcttcctcctgatttcatcttggcaagtataattcttgtatctctggctaaattgtttaagtgacacttcataccatctttcattctagcatctgaggaaata

SEQ ID NO: 116960 - DNA, 497 bp, Zea Mays
ttaacttgtgagatctcagcttagttctgtggatgccgtttgatttcgttgtagggtagtatgggaaaacggagcatccatagagaagataataggatatgcgggagggaatgtgtggttgtgatttctgttgttctatttgtcatgttttgaggtaaacgatgaatagtgaggctcaccgtaccttgcttcttgtgcttatgagggcaacgatagctatgtgtttagacttcttgtgtgcatcttaagatctctagtatgagctcctgggttatcaatatggatgcaccaacttgcctgtttgggtttttctttatttactaaccctctttctcccaaacgtttctggtgtagcctcctatcggtcatgtttcttgcgatagcgtgtttgaatctggcacaacttacttactatctagaatgctcatgtttgtaatttgtgtcttggaatgaggttagttttatgtttgaatctgccgctgccatgtgcatgttta

SEQ ID NO: 116961 - DNA, 846 bp, Zea Mays
atgtatctagagctagggttttagacacattctcagccgccgcgccgccgctagttcttcatcgttctatagatccgcctcgtgtggtgcactcgcccgagagccgaggctacgttctcctgtctcttgtctgtgcgcctgcttcgactgcgtggaagtcgcagccgccaccagttcaacgcgacgtgcgccgtatcgtctacgcgttcctgcagtcctcatcaccgcctctaccaggtgactggtgtccttatcaacaaacaaagtgcatccgacatcctactcagtgttagtggtcacggctagcaattctgaagccaagccagaaatcatcgtgacgtgtgctcattctgagtttaaaggtgaaggttttattgttcgaggtagaactcaacaagcgggtaattctaataaaccaaaatcaaggtctaagtcaagagatagtaaacccaacaatttttgttgttattgcaaagctgataatcatgtgatctcccagtgtcctaagttgaaaaataagtaagaaaggcaaaagaaaagggaagttgataaatcaactgttgaggctagtattgttgaaaataatgatggtggagaagctcttatgatcacttctaataatgaaaagtgtatggcttggattcttgattcagcttgctcttttcacaattgctcacatcgagagcggttttctgattattctcgtgttcatgatggtgttgttaatattggtgatgaatctccacttgaaatttctggaattggttctgttcaaattaaagttcatgatggcacattaaaaaaccttactaatgttcgctatgttcctaagatgaagaggaatct

SEQ ID NO: 116962 - DNA, 460 bp, Zea Mays
ggcaggtccatgggctatccacatagttaccgactaggagtttatacctcacgggtgtacccttgcgcaagtctccaacaagaactaggggaagcgtgagcttctcgataccttagaaaaataaggtgaggaagtttgcttctctaattcatttaatcttctatatttacttgattttctaggttgtgtgcttatatatcctattctagcttgctaggttagttgatggaatcgaaattgtaagaaaaatggatcgagctccattaatatgatatctagatagttttttctttcaacccctccctccctcctcaactcagtcgccaacctcttcctcccctctagcagctcaatggttgcctcccctcaatgattgatgtcccctgggacacggtgctctcctctgaccttagacgacgcttggtgccccccgcacccccttcccgcgactgcgctcgct

SEQ ID NO: 116963 - DNA, 624 bp, Zea Mays
caggacgtaacccttagcctgatcaaaagtttttgagtccaaactattttcttaaaaaaatcttcctctcatcccttcatttcaaaaatgctttccccctttccttccctcagaagtcagatggaggttcgctgccaaaccagcttgtgccggaatgaagatggtttccccaagttgttgagagcatgcacagttcgcctcggaatcaggagtcagccagagtatgatggtcgtgaattcgtcgagcatgccatagagaagtgtgtcgtgactgtatacattggatccagtctgcaccatgtggaatggagtgtcactgctgctgggcacagattcaaaaacacctgccaagtcgtcgcccgcaaggcattgagggccctgtgtcagatttatgaagaagaagtggctgacacaccgctcagattctttccgccctttcagagaaatcgtcccgtttggatggccaggatacgtgcattggaagggcagcaactacttgaggacgacccctcagtcgtgtacctcactgcatacctgctcaccctggatgcccagtatgatttcttggctcggcaccaccatcagatgattgcccgagcagaagatgcagagaagctcaaccgt

SEQ ID NO: 116964 - DNA, 273 bp, Zea Mays
acaaagaagccattggcagaatagccaagtgggcctgcgagctaggatatcatgacattgaatttcgacctcgcactgccatcaaaactcaagcattgattgattttgtatcagaatggactgaacaacaagtaccaaataacccagaaactacagaggtatggcgaatgtattttgacggctcgttaaagctgcagggagcaggcgcggggatcctctttaccgcacctgggggcgagcacctcagatatgctctccagttgttatttccgg

SEQ ID NO: 116965 - DNA, 506 bp, Zea Mays
ccgccaacggaggagacactcattttagttccaattttctttcccacgagggtttcctttccatcttgtgggaggtacttagctccgccggttaccctacaccccctttgtacacggtgcagatgtacgaggagcatcgggtgccacgttgccgagtctgactgactctggaggctcaccctctacagccgggttggcgttcccttgactccgagaatattggatttagatcggacgacaccaccgaggctgcagctatgaagaccctgacgactttctgcggctaccatcccttggagatggtaatgcacccactgaaactcttccccgctgacaagagggatgaccccatatggtgcaaccgtgtgagccatgtgaaagatgtgtgagccatgcatcccgaccaagttgggaggatcactgttcagtgcatgagcgcactgtacctaccaccctgaggctctacagagcgacgccatggcacacctcactaaccttgctcagac

SEQ ID NO: 116966 - DNA, 1685 bp, Zea Mays
aatactttctccttcccctcgtcatcttcatcagcatcagcatcagattcatcaaatatgatctgcccaacactgctactgatgaactctcgagagatactaccattagagaagcattctgcccactccttcaagatctacttcacagcgtcagagctccctgcaccattaaattcaatgattgattccaaagccaaaacttgagagaaaataccgccaactccaatcgcatcagcattttcagtcgttgtgccaacctcttccactttactaacagcatcctgattttcagcattctgctccttctctaggctatcctctagcacactgccaaccctagcaggaagaagctcctccatgcttccaccattcttaaccactgcagttgcctcactcggtgagtcaggcctactagcttcatcttcaacatgagcatccttgctagccgattcttctaagtattctccacctcgagaaggctgcttcaataaaccttcatgcatgtgagttttagattgcatctcctcatcccatgccacttttagacccacttaaccgaacactaaggaatatgaatctttagggaacaagacaaccaccgcctcgttgttgttgtgagacatttcatcaaacaccagaggggccatacctccaacacctggtgcaacaagccacactgacatcctcgttcaccagactgtggatccaaccaaccctattcctcaggccacatctccatatccctagccttggtttccttcatttgatgtgccaacatagtccattctgttgccacctctgctgctaacctcgactgaatcaggattgtttgctggacgtcatccaccacttccaacttctgaattaaacgatccaaccggttcatcaccctatcccaacgccctgcatcctccttcctccactcttccatcacgaacagaatgaatcgagttggttgtttgtacctcgcacacctcccgtcaaggatcgccccggtcctgtttcgatcccgacagcaagagaaggagttctgcgtcaagaagcacaaccgcgtcgtgggatgatgttggcgccgaggtagacgagtgagctgggaaggaggggaaacgccaatgaagaaccgaagaaggtggagccgacggagaagaaatgcttgcaccacgagaacctatgttgctagaacggaatcgccgccaaagaggacgcgaccctcacgcaccctgccaaggatcagagagctttgataccactgtgatggcccctggacaccgtcgtgcgcaaacgcaagaacgtgagctctgatcgtcgccaggacttagcaaaggaagcgggtatgaggcaatttccttctattaatatttcgatgcttctctatcaagtctactacatacttatatggcatcccaaataggtcaacccaacaccatcactcacacaagtccaacacagctcacacgatttacaacaaaaaaacacacacctaatcatcgcacgataatggctcctcttcagacttcagcttctactacctctgtcactgcttcatcaagtgtgacagaggggaacaataacgtcttgttatgtgtgtctcgtccagatataggacaagggtatttatatgaccgttgagggtcggtgatccaaaatacattatttccctcgattacctactacattatgcagaa

SEQ ID NO: 116967 - DNA, 560 bp, Zea Mays
aagaagggtttggatgtccaacaatccaacccagggagttgggcgtgacgagaagattcacttggcaaagaaaggctggctaaccctcgctcgtatagggataatgtgtgtataatcgcgtaggctggtataggcttgatcgtgacagtacagtagtagcttggtaagctagcattgacctatgctatgcaagtgcaaaataagccgtctggggtttcatttgctttgttgaccgcgcttggaattggaacgcgggactgctgctgtgctggctatggatttgcagaggctgtgtggctggaagtgggtggagtgtgagccagagaacgctgatctgatcgaccacttccacttgctcggttgtcacctgccaaactccaaactcactatgcgcatccaatcggaacagctctaagccgttttactgtacctgaaactctgaagaaagggaacccgtgcatgaaccctgctgccttaggaaacccgtgcaagcctgcagaattggtacgctgaactaggcatgtgcctgcgttgcgtgccattctggttcttagcacaac

SEQ ID NO: 116968 - DNA, 790 bp, Zea Mays
attccccatgccaagcttttcatcagccaaaacataaaagtattttcgtcaactctcagaatcacactaacatatgtgtactgatggtgtaggcgcaggatgaacctatatacaacaacaagggctccacttgccaagttgatcgggataagcgtaaacaaaagcatccaatctgagataatgatgaactgaggcccggaggcctgagtgatgaaaccaaccaacaaacattcagacatctcacactgatctgatgaagctctttataaaaagagcagcccacagacagagatattcttattctagcaccatgtgatggatgcaaaaaataaaggcagcctaatctcacgccacctactgccgctaatgtaggtcaaacaaagccagttaggacctgggactctcctgcagagctcaaatgagagcagagcaatgagccgtcaggcaatcatgacatcaacagtgtggcatgcgctgcagatcccaagataacaactgtgcagtgcagaggccatgcacatccaagcgcttttttgcttaacaaagattcttcatcgcgttcgcattcgcatcgagttgttttaagggatcttctactcttcttttctctctccctctctctctcatggactgcaaagcgaaagggcgtgcgcaaaagcaggaggctattcgatggattggcatgcgaaagcagagggaaagctagcaatggcgcaagtggagcccgcctgtcataggcacagcagcagcagcagtaacgctgtgcatgcgaggcatgccatggcgatcg

SEQ ID NO: 116969 - DNA, 1090 bp, Zea Mays
ggttcctcgcccggcctaagaccgacccgacgtatgtgaccgatcacattaacaatgcttgacaccaggtcaaaataaagagctagttcgccccccactcatgatatgtgcaaccccttggcttacgaagcattcatgaccttgcaaagccctctggtcaacaacgcactcatgacctacgacccccttggcctatggagcactcatgacctatcaggcctaggcctgagagcgcgaaccgtccacaggacccacaacacaattaaccacatcgagacctaggctacggaagccaggggtcagtgtggcatagagatagtaatgatgatgccaaggcccatgccacccatgtcaatagtcttaatgagcacagacagagatgacaaggtgcatacgaacaaatggctatgccacggtaaagacactcattttatcacggtacaatggctccttctcaaaggggccaccgaccaccgacccccgccatgtcctctaaaaggaggaggtcggccatgagggtaggggttggctggctagggactgagcggactaggaccaaatggaccaatacgaaccgaagaagactaaggacaaaagacacgtgccttgagagacctaaagacctggaggccgaagccaaggcttactgtcggactccagtttcgtagtctttaagtccactcccacataagagacttgggagcctttcctccctctctctcgcttgtaacccgcttgtaacccctactacgagcatcgagcaacagatgtgctggtaacatgagctgctgaagactggatgtagggacgttttgactgaatcagtataaaccttgtgcatttcgagcacaccgcccagagcccagaacacgcacatagaaatttacttgtcagagcgaaggttctaaacacaaatatttgatgtgctaggtaggagacttgcacgttctcaatgaactttctaggctccgaacggccagccgcgacgctgattgggtccccaaggcgatgattcgctttaggaacctcgactttgtcctctacggtaatgaggagagggtcagggccctggaagcctgatccttcctcc

SEQ ID NO: 116970 - DNA, 380 bp, Zea Mays
attgaattaactccctcaagcaccccaaggcttcataccatctccttctcctacaaagcttgtcaagcacattttggtacccatcgcttgatgggtccgtcaaggttagtaaacaaagatttaggaacccaaaagtcctttgtgttagcgcttggtaacctcattacctttctagcacaagttgcaattttgggttgcctagttatatgagaattaattgacaagctaggggtggggttgttaccaatgggacaatccttgcatagatgtccctttttccggcatgtgtagcataggcgtttttgaagtcttgaagatttcttctttccttgtttgttgcctgctacatggttagtaaaaactttcttttctaaccctat

SEQ ID NO: 116971 - DNA, 315 bp, Zea Mays
agtgaactgactttcctcttgttccgagaaacaggtagatcggtaaagcaggtaaagagtgccgccctgtgacttaaatgcgtagactagcttcttcttttcttcggaatggctcccgggttaaaataggctttaggcctacacgaatggaaggaagcaagcagttggggcatcaggagaagttcttgctgtgggaactcagatagctgactggctggatagcactggtctgtctagttcttggagatagctcttgtgagatagctcttgtctggtgtctggcctgggtttcgagagtgagttccgggatgattg

SEQ ID NO: 116972 - DNA, 495 bp, Zea Mays
aagaataatcctagccaaatccccacttcaaaaccaacgcttctgatcgctttatttaccacctctctcttactcaatcacaatcaaatggtcagtatcttttggatcatccctcctcagccctgcctcctacgactcctatccaagccctccccccattgcagccaacccgcttatcctggatgatcacgtgcctctcctaaacaaggaatgtcggtgtttatgacctaactacgcaccacaaggttccccaagtgatgctattgagcagtacgacgacattgatggtgactcgatggtacatgcaggtgcacgtcggatcacataagtgtttatacaggttcgggccgctagaatgcgtaacaccctactccctattgaggctgagtatttgagtatcactggtgtacactgaaaggatcacgatgcccaagagggggtgaattgggcttttctaaaaattcaacaactattaagccctaagcaagagcccaa

SEQ ID NO: 116973 - DNA, 399 bp, Zea Mays
gacggaggggaaacaacacctagaggagacatcggcgccacctgcacaacggtggaatgtgaggggagaaacatgagatcccggtgccctgctggctcctgctcatcaagatcttcaaccaccagtcccaaactcttaccatgattttttagtgcagccaataattgttattccgacgtgttctttgtttcgtgctaatctctgttgtgatattctgtgctatgctaacggtggattgtttggtgattgcgtagggtagggagagatacggtgtcgcaaggctggaaccatctctgcatctaattgatgagccaaccccgtgttgggtcttttcaagcctttcaatgtgctgttgttgcgggttgggtggtgacggatgccttcaatattatcctgaag

SEQ ID NO: 116974 - DNA, 579 bp, Zea Mays
cccccgcgcttctattccttcacatcccgaggtccacgacggcgagcggcgccagaccgaactccggcgaacctgtactggctaaactacgcaacagctagccctcccctttgctggacaccaaaatcaacactacgtgactaattcctctcacttaattgctggattcgagttctacatcacccggttcacgctgacagcgcgaggaatagaccgaccgaggtgttcccgatgatccaatggattctagctcaattggatgggtcagagagtattaggagcattcaaggatactgaaacgaggaaccagaggacatgaatggacctgagacacgttggccacggcgaggtcacaaggcgcggtgtttcggaccaatttgggggaaatccgaaattggggagctctggtgagcaattggagacacggcttggtggattgggtgcttgactaccttacgaccccgacggtgtgctcaatttataggatttgggggcggtggcttgtgaatttgagttggcgcggtggcggccggagagtgaggagagcactgtcgcgagagcttggtggcatctaccgtg

SEQ ID NO: 116975 - DNA, 415 bp, Zea Mays
caaggacgcgttctccgtcaatgagatctttagatgttggttcatcgacgtcggggaccgctgatgtgcttgttcggggcgacccatgttttatctccttgcggcatcatggcctcggatccatataatagacgaaaaggtgtgaatccggttgctcggaattctatcgtgtttagggcccagaccacttcgggtagttggtcggcccattttcccttcttgtcgtcgagaagccttttcttgatggcggtgaaaatcttgccgttggcgcgttcgacgacgccgttggactgctggtggtataccgaggcaaagacaggcttggtgccgatggagaaacagaaatccctgaagtcttggctgtcaaactgtttgccgttgtcgactgtgaattcggacgggactccaaataagc

SEQ ID NO: 116976 - DNA, 377 bp, Zea Mays
tcctagtgatgaattggttgaacaaaaaccaagcagctgtcagctgtgacaagaggacagtgatgttagtgtcccatccgggggagaaatagtaactgaactgatcatgcctgatttagaagagggagcctgtcaccatatgtttgtagatggtaaggaggccaacctgcttgaggccatcagagttgtgtcaaaatttcctgacatgtttcctaaggagttactaggcatgctacccgagggtaaagtcgagtttgccatagagcttgaacccggcaccacccctatttctgagagagcttatagagtgcctggaccagaattagtggaactcaagaagcagatagacgagttgttggagaagagttacatcagac

SEQ ID NO: 116977 - DNA, 396 bp, Zea Mays
tgtcaatccactgctcaaaatcacagagtggtggaggagtctacaatacatgcaatgattagtatgcaaacacttagattacaaattgttaacatactaaaaaattattctcaccattaaattcatccggcgctgaacaatcattggctcaaatgcatagttagcacacatccaatacttttgtcgatacgtgtcatgatcctcagacttgtcaaccttgcaaggattaccacaaaaacacataggcactggaacaccagttggcaaatgaagcgggtcgaaggcagttccggtcaatggacccttcctaaatttcgataagtattataagactcataaaaattagttattacatttaatacaacgcttacctttgtttagcacttttaccacgtc

SEQ ID NO: 116978 - DNA, 559 bp, Zea Mays
aatcagcttgatttcaaaagctgcatcgtgctccagaggaatgcccggaagctctgctggaaacacgtcggcaaagtcacacaccacccggatgtcctacacctgcaaggcaaccgcaccctccaccaccatggagaacaagattcccaacttccttgaccggtgatctagaagcaattgcgccaacaaggataacgtgaactttggggaacttcctaagaataccacctccctacccgatggcgcatgcaataacactgtcttccaaaaacaggatataactgcacgatactgagataaccaatccatacccaagataacatcgaatgccctcaaggaaatcacaacaagattggccaaaaagacctcatcaacaagaataacggaacacccctaacaaactgaacagctactaatggatccattagcagaactaaccaaaattgggtgacccaacctctgcaccgaaagaccagcctgcaacacaaaattctccgaaacaaacggatagctagcgccagagtcaaaaagagcatgggccacaaacaaatcaactgag

SEQ ID NO: 116979 - DNA, 771 bp, Zea Mays
agagaacctaaccctagaagatatggtgaagttgattattcctagggaagttgataggtcttatcaacttggtgccttaaatgatcacttttatgtacaaacttttaaagaggatgatgattcatgatgacatattgtgaggatctaaggacaatgaagcagagagtgaatcaacagcgaaagatgatgattgtgccatttcactaggttggaaggatgagtatacttatggtccaagtactcgggatgatgtgatggggatgagtataaatctaggcctagtattaagtatgataatgagcgaggtgaggtaaatgtggagtcattctgatgccaaagtgacgggtcactgagaatggagtacaataacctgaaatgaggcaattgaaggttgtccatgtgaaggtacccttagcactaaattatgaggggctcttatgctcattacccactagagatttacaaagagcgactatagtaaaaccatgacatattggagttcctctttagtgtggttcttacatggtcctcattgcaggcttggcatgtgatgccaattagtgcgtgaaccacatagcttggactcgccacaatgagaatgtaggttatcagcaagcaattgaacctcgagatatatcttgtgtcatctcttttcccatgtggttttctctttgttattcatgtaactacatttgttcacttgttatacgataattgctcaactagccttgtaaatatggtaactaattgtagttgtatttgattgatatc

SEQ ID NO: 116980 - DNA, 285 bp, Zea Mays
aaagatgtagtttgaatcagttcacacaacattgttccacgtttaatgtcacatattgttccttcatctaattcacatggtattttgaaacgagaatgtgctgttcggccgcctggtaggagtaaagaagccacacctgaagaagcgacagataacactatgtgtttgcagctacgtaagaatgttatgatggagttccatagatacgttttgcctgtatcaccgtaaccagagacaaagtagaagcctggtctctttgttagaacaatttctgtaatagttttg

SEQ ID NO: 116981 - DNA, 700 bp, Zea Mays
ggcattgttggccgtcggatgtttcctaactttcgagaggttcattggaagttaagctaacttccgaccgtaactttccgagagcttattttttgatggcctaggatcttggaagttaagttgtttcctatagtgttgggtccccaagttgacatgatgtatcacttgggtcctcgagatttcattagtgtgctctagggtggcatatgccatatcggtatccgatttgggcaaacctagttttggacgattttgaatagggaggccaagtttgtaagttgttcccctagttttttgagtttggggacccaagtgacacagtgtgtcaagtttgaggaccactaatggcttgttaatcacggcaaggccttcataacggtgacctactatcctctgaaggtaaatatcttggttgactgaggatgcatgatgtgcccttgaaactagatatttttccttaggtgacagaaattagtgtggtagacaaaaaactatcttaagacaagccaaaggcgagacaccaccatctatgaaggcaatgcttcggttgccctctgtgttgccatccatatcattaattatttcaccgtccaatttcaaatagctaatccctccattatagtagttctattgaattactaagcctatttgttgttaatgccactattgccctagggttgccaacacaacgatggcctca

SEQ ID NO: 116982 - DNA, 540 bp, Zea Mays
ctggaaagtgaattgctcaagtctccactccctactgctgtgctcctacgcatggacactgtaacacccctagtgttacaagaactaaaactttggcatgacatcatatgcattagcatttcattatgtatgttacacctagagtgcatccactaggtaaaaatttcaaaacaaacatgggatgtaatgatttgacttgattaaagagatctttaaccctaggatagggcacttacccaaggattaaaatcatgtgggtgtgtgagatgataatttgagtatgatctcaaaggttagtggagatgttcaagagagactaaacttagagagtttgagtggcacataaaccctagaacactcaaaaccctaatagaaaccctaaaaccctaattagtgttctatgaggtgactccaatttctatgcacttttcgaccaaagtgcatacatcgaagtggtagagtaataaaaactaagcaacttttatatttggggatttccatgttttgtggaaaaattggagtatattccaaaaaggtccc

SEQ ID NO: 116983 - DNA, 403 bp, Zea Mays
ttttgtcttgtagtcttcgcttcgaccctatgaggtcttggatgacgaagagctaggccgcatttggacttcgccatgaagggggttgctagcctttgtgcttccttaggactcattaggtcatatatacctttgctcggtggtgaggccttcatgccgatgcaaccctcgtttgccttcggtggctaaaccatctttcgggttgagggcaccttcaattcctacacttatgatcaagtctggtctggggttagttgttagtagtagagtgatcaaggtcaagttcagctctcatcccaacagtaggccctcgagggaatggttgaacttgatgagctggtctcgaagtctttctacaagaggggacgaacgctgccctcgatcgcaagttgggctatgctgg

SEQ ID NO: 116984 - DNA, 1001 bp, Zea Mays
cgcgcgcgcccgcgatgtcaactttgtgctgaggaccttgatcatccaaataatcggtgaagaatcctcggctactattccctgtctcactgacattcacagtttggccctcggagttctatttcttcgcaacgacaggtccccgacggggaacgccggtgagcacgccctccggtgaacctgtaccggctgatatgctcaaagaccagagccctagcttggccgacacctaattccaccctcggcgacactaatccctccattaattgcacgaatccggcccggaattcgtctgcccccaacgatggcaagattcgaggagaaactatggtgttcagggcaattcagcgcggtctaattcaatcaaccgagcctacaagcatcaggagacctaagagatgctagaatatccaacagagaggcatgaaccaacctgaggagggctggccacggtgagagactctcggcggcgcggaaaacagatttgggggaaaagagaaattgagaggctatggtgaacgattgaaggcaaggactggttcactgggttcgtaacaagtagtcagaacaggccgaggcatcaatttatagaggacggtcatgaggagggcgaatttggacggggaagtgcgcgcggtgaaaagggggaggagtcaccggaggttgctaacgtggcgttcactggtttacgttctacggcggtcactgccgagtcttcatggcttgcgatgagtggggagatgacttaaggcgtgtcacaaccgagctagacggtggcacaacggcgatggtcggatagccccgtcgctggtgcaagtggttacggcgacagggcaaaacagtgccccaagttaatctcctgtgcgatatttttcaccctatgtagttatctgcactccaccaagcacgaatcgcagtggcaacgaggatcacgacgcaggatcaccggcagcggtgcactgaacctggcgatctttgttaggttactgtaccatcgcgaa

SEQ ID NO: 116985 - DNA, 305 bp, Zea Mays
aacaaaaccaatggcatcaaaaactctgttcaatctcttttttccccggccaccaaaggatgtggataatgcattatcttctgctttggaatacggcccaagcaattcattacttgtagctttgatacatttcagccagtcatcattcggttcatcaaatttatctccatatctgaaggtgtatttcagtcgaaccagctcaccttcgctagacttggtgacagtctccttcgacatttcccagctctctacaagtggtcatactctgaaggctatatgctcctggattaaatctcttgtaccaa

SEQ ID NO: 116986 - DNA, 498 bp, Zea Mays
caaaattttcatgcagaccgtcttccctggccttggtctggtagtgcaactcgtgcactcggcaaaatgcttcggcatccgggctcatcccttgactttggagggcctagatgaagacattaagcctaacaatggcgttaggggtaagctgatgaagatatatttcaaaatttttcaaaacttcccctatcatctcattaagaggaagtcgaagtcctgctctgaaaaaactcttgaagactaccacttcatcatccttcggcactagggtggtttcttctccggcaaatcgaacaagttcccttttagctttgccaaagtagccaagcttcatcatcatcggcatgtcagcttcagacacaatagacttttcaaaatctagatggctcggctttgatggggacaaaatattgtaatcttcttcgtcctcttcaacatctttttcttcaccaatggcatgttcagcttcggcaataggggcaccttcgtcagtagttc

SEQ ID NO: 116987 - DNA, 398 bp, Zea Mays
gctatattacagtgctcagtagaatcttcatggcaagttatagtagtaacagagttgatttgtccttgcatgtaacaattcatttgcaagttcacaacagtccatccatgtcccatttcacaaagaagttaacttgttcaatagcagactagcacactatgtttgtgttttgaccagttttgtcactctctccttcaataattgcaattaccaaagcgacaggacgtgaaccatgcaaggatttcaatgaattatgcagaatgtgaactgcacagatccaatcgtgcactgcatctggacgacgctggtccctgccacggcctcagtccactacatctaggaaagccaccctatccacatggccatagacccagggctattccactactagatccaag

SEQ ID NO: 116988 - DNA, 988 bp, Zea Mays
gtgcatgacaatctcttctcaatcctatgaatgagcggtaaaaagtggcagattttaggctttgacagaccaagcggaacaccaaggtaagtgaagggcattgaacctgtctgacagttgagagttctggctagaatctccattttagcgggacaaacattgatggggtacatacttgatttgttgtagttcaccttgagccccgtcgaagttgcaaaagagtttagaacagctctgagaaaaaataattgtctagggcaagcttccattatcaacaatgtgtcatccgcatattgaacgatcggaaaatcttgaccacaattcgtggcgaggggcaacttgagcaggtcttgttgtcgcgctttattgatgatgctctatagcagatccgccgcgagaacaaaaagaagaggcgagaggggatctccctgcctaaccgcgcgcttgcaatgaaaagttttccctggtacaccattaaggaggaccgaggacgtgccagaccgaagaatatccctaatccagctcatccacctgggcccaaaacctctacgcgacatcacctgaagaatcaactcatgctcaagagaatcaaaggccttttcaaaatccaatttgagcacaataatctcttttttgagatatggcaaagatgaatatattcatatgcccaggccaagcagtcctgaatggttcttcctttgatgaagccatattgatttttgtgaacaagggaagtcatcactgcctgtagctgattggccagcagctttgtgatgattttcatactattattcagaagcgaaattggtcggaaatcacccactaaactagcattatccttcttcgggatcaggacaatgaaagaaccattgatacttcgaagacaaacatccccgtggtaaaattggtcacataagtcatagaagtcctgagaaacaatcggccaacattttttgataaaattggtattaaacccatcaggtcccgg

SEQ ID NO: 116989 - DNA, 535 bp, Zea Mays
gagaatggccagtgtactggacgctgtcatggagtcgatgaaggtatcaactcctgcctctacaaaagataaaaatataaaggaggctaccgaagctattacaactcgtgttgaaactgaagttgggccctcaaatcccgcgcgaaacagggcctgttgaaactgttgggaaggatactgaacaaagacctttagatgccgttctggtcttggaaaaagaaggcacacccaagaaggttaaatctcatactcccaaagcatctaatgaagagctagactttatcattcgacatgcttcggataaacagttgtcggaagaggagattgctgaaactaagcactatgccaaggaattaaagtacccaaaaggatccttggtgtataatagcactaatgaagatgactttctgtactgccttccggacaacaaggaaatatctgtttgccggaagttggcaaggaacatagggtttccgaagctcgaagttggcctctctgcaatgtcgaaggatgaccttgcagacagcctcgctta

SEQ ID NO: 116990 - DNA, 503 bp, Zea Mays
cgagctctaaaaacatatctaaccctcgactgtcctctgcatacagtgatttttgtaatatatagaacaaataccactggaatatgcctctagtatgggtgaaccgactcacatcctgacagaggtcagttttggtgtaaattcttttacagttttgtgtgccaacatcaatcaatcaaccaaactagcagttctaaaaaagttaccaaagaacggttaccaaggactgaggacacagtttggataatctgctaatcatggtattcagttattctactgaaacatatgctcgccacactagctgaaccacttgtattaaaaattagcagtaacaccccatggttcattttggctgcaccaacttgcaagagcgtagagctaaatatgtcatggaagtttcgtttaagtatgcaaaagaagcatacacctatcacctatgcaagctgcagatggaaatatacaggtgtaacactttcatgccgataaacttgtaccaaagggca

SEQ ID NO: 116991 - DNA, 461 bp, Zea Mays
gcacgattgataaccagaggagaagtggtgctgcgattgcggggttctagtcgtgttgattggaagccggatcgtctgtgtgacatctccaccaaatcgatagttatcttcacctgacggaagatcgggcacccccattcctattaagtggtattcaaagactcaggtattaccgtcaggcttaacctagtttagtttaggttttttcatcctataactccagataattgccatacataaaaaaattccactgtccgataaccctgtttagccttgcaatttcgtttcagattgctttgttgaatttgtgtccgtgttcgagtcttgttgctggtttaggtcgtgtcgtaatcgtagttcaaccgctccgtcgttgttatttttttccgccgctatcccatccaccttacccagattacaagtcgaaacaccacattactcgatttgccctcgcttgtcgc

SEQ ID NO: 116992 - DNA, 571 bp, Zea Mays
tgcacataccatgttgtgtttcttggctttgttgtttcaggaaagggaatagaagtggataaatccaaggtgaaagcaatcaaggattggctagctccaacgaatgaaagaaccaatatggaagcctccaagcgtgctgcatatataaaaagatacatgagaataccaatgaagcaattgagctcaaagtagtgtgcaaggctgcaaacatgaacaagcataggaagaaagtgttatttgaaccgggggacgtggtttggattcacttgcgcaaagaacattttcctgatcagtgcaaatccaaatttatgccacaaggggatggtccatttcatatccttgccaagatcaatgataatgcatacaagatagatcttccaccaagctatagcgtgagcaacacatttaatgttgctgacctcttactagttacaagtgaagacacttcagagtcgaggacgactccttttcaaggggaggaggatgatatgaccacgccattaagcaacatattacaacccctaaatcaagctatatcaactcaagtacaaccaatatcatcaccaaccca

SEQ ID NO: 116993 - DNA, 649 bp, Zea Mays
gggcatccgatggcctctaacttcctttttattgtgcgcaaccagtcatcagcgttgagcgggttgctggatccagcgaatgtgggaggcttgagccttagaaaatctcccatcctgtcctgaggccttccaccatttgggcgctggttttcaaggcttatggtgaggacctcaatgagtcgggtttggttggccagaacttgggctaaatctaatggcagctccagaggtgtgggaggtgggtttcactcccttctccaccgatgtctccttcggcacctaggggtgaccttgctccaatccctgaggcggtaggcgtagttttatccgaagccatctgcgagggggaaaggattactactatgcacatgccatatatatattttaaacacattattttattcatcactcaagttcattacaagcatacaattgtcacagatcacgctacgcgtgggcgttttctaaggtgcttccaaactccctttctaaggtgtcccaaattccctgagaagatcgtcaaggctagccagggacatctcctcaacgtctgacaagctttctatcctggagggaggcagtgttggcgaggcttcctcttttcggtcagtctggcatccttggctcttggtccgtttctggatcttct

SEQ ID NO: 116994 - DNA, 591 bp, Zea Mays
gtctaaaattctaattcctgaatacaccaggggtcacggtgtaaaccatcccaagacacagagtataagctaggtggacggcgggttatttgtggcaaaggaaaggggcttaagtgcaaagtagcatgaccgaaggggtatccccggatcctagccgtccgatccacagcagacgcaccagattagatttaagcaagttactcatctgcgctcacccccgaccgtcggatcctagatccacggatgaaggacgctcctgccccgatctgacctagaccgttcattactgaatcgacgccacagatctattctcgcgaatcggtacacagtcgtctaatctccaccataggagacgatccaacggccaggaggccaccttctctcctctatcctttcttctaccctgggcaccccctctcctcactgcgacccgagcccgtcggagcaacagcccctcccccatggcggcgcagtgcacaacccggcaggagacttcactgtcgtaggcctcaccaatcccccgacgcaccaaacccgacccgagtcgattgcggtgagttccaccctggatcgtggtatttgtggcgcaga

SEQ ID NO: 116995 - DNA, 339 bp, Zea Mays
gtcatgctagatatacctataagtctggcgtgttcagcagcttcttcattttttctggcctcttccaaggcgtcatgagattctttctctttctttctaataccatcatcagctatctctcgtccacccttcagccatacttcggaataaaaatttccacctagtgcaatggcctcggccgaagggtttctaatatcgtcggatgagagcgaaaatcctggctaaaccgcagccttggcatgttcacagctgaccttttcaaggattgacatggccccacaggcaccggcaaaggcacagaaatctcctctgtcactgagaatctcttcaaaacctttg

SEQ ID NO: 116996 - DNA, 930 bp, Zea Mays
ttgttgggatcgatggggggaatgattgcgacggacaaactcgaagctttccgcttgggcgccatctcaaccttgctagcgagcagagcagaagcaatattgcaggagagcagagaaagcctggatgcagaaaagcagaaactagggcacggaacgtggaggcgtgcgacagtgcagtacatatggggttttcccgggctcggcgccacttccaaaatgttggcatgccatgtcatcgcccgactgttatttctaaaacgcgggcatgccatgtaatcacccggccgttatttctaaaacgcgggcatgccacatcaccactcggccgttatttccaaaacggccgacgcggcccattttaactcatcggttatttctaaaaacgctgatattaccagaattcacccggccattgtttccaaagctgccagcgtggcccgttatcactcggctgttacctctaaaaacgccgacattgccatcgatcactcggctgttacctctaaaacaccgacgtcaccatgaatcgctcggccgttattcctaaagcggtgacgcgactccaaaggattcggctgttacctctaaaacgccgacatcaccagtaactgctcggtcgttacttctaaagcaccgacgtagcccgctgacattcggccattacctcaaaaagcaccgacatcgccaataatgactcggccgctaccaccaaagcaccgacgtcgcaaataaagcaatcagaagcgtgattcgatgactccaagttactactcaagcgttgcagacagaaaacatcatcggcagtaaatattacaacaatcggcgactgaccagaaggcaaaataatgaactcagaagtgggacgaaatcattcttcataagggaagcattacggaacttacaaatcaactcattatgagctgatacttt

SEQ ID NO: 116997 - DNA, 882 bp, Zea Mays
acatttacacccctgagataccaaaaaccctaaaaaggaccctggaaaaccctaaatccaaaccctagggggttaagtgcaaaattagtccacttttggactaaagtgcaaaaagcatgtcaataaggtatcttaagtcatatggttcaccaaggtgttaatttacaagctaagccttgaatttttggacttatttgcaaaaagaccccataggtgttctagtgctaagtctgaaaatcagtattttggctcaactttggagctttataactttcaaattagtgagaattcacctaagggcaccacatcaactttgtagttctatgaaatgggaacaattttgcttaagagtgtaagcaaggttgttatggagaaattggagataattaagtctaaagtctggctgtcaggctgttaaagtctgaatttcagactgacagtgcaaccacaaagactttgggcatgaattcaagcttgattcaataggaatttggctactgctgctatggcaaaattatagctggtttgtagctctacaactttagtgcagagggatgataaagttgtcatgcgaaatctagagagaatttgccctgaagttgctctgtcaggttaactgaagtggaatgccatggtacagtaactgaagaagaacctcaggttcatcccctcaccgtcgacgaccctcgcgccacgattcccgccggtgagctgattcgtgctcaccagtgcttggataacgctcggggtcacgtaaatatcagcgccgttgataagtccggccagtaaacaacttcggccaccgtacaggttgccagtaaacaactttggataagctcgctggtgactgccgccttccggccttgtgccacgtgccctggc

SEQ ID NO: 116998 - DNA, 294 bp, Zea Mays
gatttagtgagacagactgtataagaggcttgtatgacattaagataaagagcgaacacaacttttcgatttccaagataagattagttaaggatgatttccgattccgcctagcttcatcatgctacaagagtgtacaagtgttataatccttaaccaagatcttttgaactttatagatttcagagcatgatatccaaatcatccttctgatccaagagtatttctttgagcacaaattgagagaaatacttgagcgggattttagggcaactagctagaatagagcatcac

SEQ ID NO: 116999 - DNA, 457 bp, Zea Mays
ggctcagaatctttagcattttttcgtcaatctttggctcttcagccttttcaaccttatcttcaactgtctcaactatatgcgtcttcggcattacagttggttcttcagcgccctgtgcagtcaaagcagtttgtattgctttggctgctgaagaggaccctgcgccaaagtcaggcaccacggtcggttcaatgtaacacggctggtgggttagaaccttcacctttttgcccttcggcacagactcggctgggttgaccgaggcagcaatcttcctctttttctgttgccctcgcagtgggtagcaataatcagggtatatgaagccgattgcatcaaaaaccctgttcagtcttttcttcccccgacctccaaaggctgcggacagagcattatctttggccttgtaataggctccaagtagttcatcactggtagcttcgatacacttcag

SEQ ID NO: 117000 - DNA, 316 bp, Zea Mays
gtcgtcggaccagtcaatgctcagccaccagtgcctccagcgtctgttgtaaccactcctattgtggctatctctatgactgctccaactccagcagatcaagcaccgcagccagcgtctgatcagcaccagctccagcctctacagcagatactggatctgggactaactccaacaccttgctcgtgtttgcgctgcttcctcgtcctcaacctgatgcgcctgcttttcctcattcttcctctaggctctaggatagggtaacccttttggtgtttgacggtaaaaggggagagatgcaagttgttagagctag
